United States Patent Application Publication US 2024/0398993 A1 - sequence listing, part 20

SEQ ID NO: 84647 - protein, 181 aa, Homo sapiens; identical to SEQ ID NO: 66396
  MOD_RES (1)..(1): Any amino acid

SEQ ID NO: 84648 - protein, 193 aa, Homo sapiens
MVVLRAGKKTFLPPLCRAFACRGCQLAPERGAERRDTAPSGVSRFCPPRKSCHDWIGPPDKYSNLRPVHFYIPENESPLEQKLRKLRQETQEWNQQFWANQNLTFSKEKEEFIHSRLKTKGLGLRTESGQKATLNAEEMADFYKEFLSKNFQKHMYYNRDWYKRNFAITFFMGKVALERIWNKLKQKQKKRSN

SEQ ID NO: 84649 - protein, 567 aa, Homo sapiens
MGLLPKLGASQGSDTSTSRAGRCARSVFGNIKVFVLCQGLLQLCQLLYSAYFKSSLTTIEKRFGLSSSSSGLISSLNEISNAILIIFVSYFGSRVHRPRLIGIGGLFLAAGAFILTLPHFLSEPYQYTLASTAILFAISVFGPAFGYLLGSVMLQIFVDYGRVNTAAVNLVPGDPRWIGAWWLGLLISSALLVLTSFPFFFFPRAMPIGAKRAPATADEARKLEEAKSRGSLVDFIKRFPCIFLRLLMNSLFVLVVLAQCTFSSVIAGLSTFLNKFLEKQYGTSAAYANFLIGAVNLPAAALGMLFGGILMKRFVFSLQAIPRIATTIITISMILCVPLFFMGCSTPTVAEVYPPSTSSSIHPQSPACRRDCSCPDSIFHPVCGDNGIEYLSPCHAGCSNINMSSATSKQLIYLNCSCVTGGSASAKTGSCPVPCAHFLLPAIFLISFVSLIACISHNPLYMMVLRVVNQEEKSFAIGVQFLLMRLLAWLPSPALYGLTIDHSCIRWNSLCLGRRGACAYYDNDALRDRYLGLQMGYKALGMLLLCFISWRVKKNKEYNVQKAAGLI

SEQ ID NO: 84650 - protein, 273 aa, Homo sapiens
MVLNALWSASRTSLGTGIIWGSCYGIAGSTNVTGDQVKKLDVLSNDLVMNMLKSSFATCVLVSEEDKHAIIVEPEKRKSTDEPSEKDALQPGRNLVAAGYALYGSATMLVLAMDCGVNCFMLDPAIGEFILVDKDVKIKKKGKIYSLNEGYARDFDPAVTEYIQRKKFPPDNSAPYGARYVGSMVADVHRTLVYGGIFLYPANKKSPNGKLRLLYECNPMAYVMEKAGGMATTGKEAVLDVIPTDIHQRAPVILGSPDDVLEFLKVYEKHSAQ

SEQ ID NO: 84651 - protein, 242 aa, Homo sapiens
MHRGSRGRRRHSQDEEQQIKRGAFTKSKELSKQGYCSRYNHIVGCTFSNQGCYGRYLDDSWVNAPISKSTKSRKEKSRSPLRATTLESNVKKNNRVEFREPLVSYREIHGAPSNFSSSHLESKHVYCVDVNEEKTESGNWMIGSREERNIRSCDFESSQSSVINDTVVRFLNDRPAIDALQNSECLIRMGASMRTEEEMPNRTKGSENNLKLSVNNMAHDTDPKALRLTDSSPSSTSTSNSQ

SEQ ID NO: 84652 - protein, 130 aa, Homo sapiens
  MOD_RES (1)..(1): Any amino acid
XVLIQCAGSEEKNERYLLLFPNVLLMLSASPRMSGFIYQGKLPTTGMTITKLEDSENHRNAFEISGSMIERILVSCNNQQDLQEWVEHLQKQTKVTSVGNPTIKPHSVPSHTVRTWCFSSFQTPGVASRG

SEQ ID NO: 84653 - protein, 114 aa, Homo sapiens
MSSKRTKTKTKKRPQRATSNVFAMFDQSQIQEFKEAFNMIDQNRDGFIDKEDLHDMLASLGKNPTDEYLDAMMNEAPGPINFTMFLTMFGEKLNGTDPEDVIRNAFACFDEEAT

SEQ ID NO: 84654 - protein, 134 aa, Homo sapiens
  MOD_RES (1)..(1): Any amino acid
XMTARSYLKTHVNVSVLKVPNFIGQYYKWKKMDLQHQKEWNLKYSVIKCWLARKRMPHEVTHSMEEIKLCPTLNEIFLESPTAINSITDIYETEEEGWKSDTSLYENDTDEPREEEVEDLISWTNTLNTNTSED

SEQ ID NO: 84655 - protein, 45 aa, Homo sapiens
MPDRDSYANGTGSSGGGPGGGGSEEASGAGVGSGGASSDAICRDF

SEQ ID NO: 84656 - protein, 198 aa, Homo sapiens
  MOD_RES (1)..(1): Any amino acid
XQRLASCSADGTVRIWDPSSSSPACLCTFPTASEHGVPTSVAFTSTEPAHIVASFRSGDTVLYDMEVGSALLTLESRGSSGPTQINQVVSHPNQPLTITAHDDRGIRFLDNRTGKPVHSMVAHLDAVTCLAVDPNGAFLMSGSHDCSLRLWSLDNKTCVQEITAHRKKHEEAIHAVACHPSKALIASAGADALAKVFV

SEQ ID NO: 84657 - protein, 24 aa, Homo sapiens
MNVPFKRLSGVSLLQWSLENTHCW

SEQ ID NO: 84658 - protein, 71 aa, Homo sapiens
PVHTLTEVELLAFTSCLLSQPKFWAIQTSALILRTKLEKGSTRRVERAMRQTQVAHDVHLSCHWGCYLIIQ

SEQ ID NO: 84659 - protein, 552 aa, Homo sapiens
MHFKCSSLYMLYLTEVETNWINLLDRDTFSKSDPICVLYVQGVGNKEWREFGRTEVIDNTLNPDFVRKFILDYFFEERENLRFDLYDVDSKSPNLSKHDFLGQVFCTLGEIVGSQGSRLEKPIVGIPGKKCGTIILTAEELNCCRDAVLMQFCANKLDKKDFFGKSDPFLVFYRSNEDGSFTICHKTEVVKNTLNPVWQAFKISVRALCNGDYDRTIKVEVYDWDRDGSHDFIGEFTTSYRELSRGQSQFNVYEVVNPKKKGKKKKYTNSGTVTLLSFLVETEVSFLDYIKGGTQINFTVAIDFTASNGNPAQPTSLHYMNPYQLNAYGMALKAVGEIVQDYDSDKMFPALGFGAKLPPDGRISHEFALNGNPQNPYCDGIEGVMEAYYRSLKSVQLYGPTNFAPVINHVARYASSVKDGSQYFVLLIVTDGVISDMAQTKESIVNASKLPMSIIIVGVGPAEFDAMVELDGDDVRVSSRGKYAERDIVQFVPFRDYIDRSGNHILSMARLAKDVLAEIPEQFLSYMRARGIKPSPAPPPYTPPTHVLQTQI

SEQ ID NO: 84660 - protein, 550 aa, Homo sapiens
  MOD_RES (1)..(1): Any amino acid
XCIMCVCLNKEVTCKREKCPVLSRDCALAIKQRGACCEQCKGCTYEGNTYNSSFKWQSPAEPCVLRQCQEGVVTESGVRCVVHCKNPLEHLGMCCPTCPGCVFEGVQYQEGEEFQPEGSKCTKCSCTDSTVVCKRKCSHPGGCDQGQEGCCEECLLRVPPEDIKVCKFGNKIFQDGEMWSSINCTICACVKGRTECRNKQCIPISSCPQGKILNRKGCCPICTEKPGVCTVFGDPHYNTFDGRTFNFQGTCQYVLTKDCSSPASPFQVLVKNDARRTRSFSWTKSVELVLGESRVSLQQHLTVRWNGSRIALPCRAPHFHIDLDGYLLKVTTKAGLEISWDGDSFVEVMAAPHLKGKLCGLCGNYNGHKRDDLIGGDGNFKFDVDDFAESWRVESNEFCNRPQRKPVPELCQGTVKVKLRAHRECQKLKSWEFQTCHSTVDYATFYRSCVTDMCECPVHKNCYCESFLAYTRACQREGIKVHWEPQQNCAATQCKHGAVYDTCGPGCIKTCDNWNEIGPCNKPCVAGCHCPANLVLHKGRCIKPVLCPQR

SEQ ID NO: 84661 - protein, 125 aa, Homo sapiens
METDESPSPLPCGPAGEAVMESRARPFQALPREQSPPPPLQTSSGAEVMDVGSGGDGQSELPAEDPFNFYGASLLSKGSFSKGRLLIDPNCSGHSPRTARHAPAVRKFSPDLKLLKDVKISVSFT

SEQ ID NO: 84662 - protein, 222 aa, Homo sapiens
MSSGIHVALVTGGNKGIGLAIVRDLCRLFSGDVVLTARDVTRGQAAVQQLQAEGLSPRFHQLDIDDLQSIRALRDFLRKEYGGLDVLVNNAGIAFKVADPTPFHIQAEVTMKTNFFGTRDVCTELLPLIKPQVVLLLRLWFTRTSKGSSSKSHLTLLSQNSKAGMNFFMQLPPHFLCVFLLELIPVTVSHMKIFCSKIPANLAFTSLRDCCTPFYIMLCGVS

SEQ ID NO: 84663 - protein, 1829 aa, Homo sapiens
MPPATTVSLRELADLSIGTPEVGAVNFTALHTLIVAMLKNLDLQNTRIDFQPSSPEPSRSLQSVRSSFSIPHLPAPKEVPKGAPREKRRGVGQAPSSALESQVKDLGGQVEDLSKQLKRVDGQVQGIATHVQHFSQASGLDLAALEWPEEQEVGVRAFDRVRTGSIMKDAAEELSFARVLLQRVDELEKLFKDREQFLELVSRKLSLVPGAEEVTMVTWEELEQAITDGWRASQAGSETLMGFSKHGGFTSLTSPEGTLSGDSTKQPSIEQALDSASGLGPDRTASGSGGTAHPSDGVSSREQSKVPSGTGRQQQPRARDEAGVPRLHQSSTFQFKSDSDRHRSREKLTSTQPRRNARPGPVQQDLPLARDQPSSVPASQSQVHLRPDRRGLEPTGMNQPGLVPASTYPHGVVPLSMGQLGVPPPEMDDRELIPFVVDEQRMLPPSVPGRDQQGLELPSTDQHGLVSVSAYQHGMTFPGTDQRSMEPLGMDQRGCVISGMGQQGLVPPGIDQQGLTLPVVDQHGLVLPFTDQHGLVSPGLMPISADQQGFVQPSLEATGFIQPGTEQHDLIQSGRFQRALVQRGAYQPGLVQPGADQRGLVRPGMDQSGLAQPGADQRGLVWPGMDQSGLAQPGRDQHGLIQPGTGQHDLVQSGTGQGVLVQPGVDQPGMVQPGRFQRALVQPGAYQPGLVQPGADQIDVVQPGADQHGLVQSGADQSDLAQPGAVQHGLVQPGVDQRGLAQPRADHQRGLVPPGADQRGLVQPGADQHGLVQPGVDQHGLAQPGEVQRSLVQPGIVQRGLVQPGAVQRGLVQPGAVQRGLVQPGVDQRGLVQPGAVQRGLVQPGAVQHGLVQPGADQRGLVQPGVDQRGLVQPGVDQRGLVQPGMDQRGLIQPGADQPGLVQPGAGQLGMVQPGIGQQGMVQPQADPHGLVQPGAYPLGLVQPGAYLHDLSQSGTYPRGLVQPGMDQYGLRQPGAYQPGLIAPGTKLRGSSTFQADSTGFISVRPYQHGMVPPGREQYGQVSPLLASQGLASPGIDRRSLVPPETYQQGLMHPGTDQHSPIPLSTGLGSTHPDQQHVASPGPGEHDQVYPDAAQHGHAFSLFDSHDSMYPGYRGPGYLSADQHGQEGLDPNRTRASDRHGIPAQKAPGQDVTLFRSPDSVDRVLSEGSEVSSEVLSERRNSLRRMSSSFPTAVETFHLMGELSSLYVGLKESMKDLDEEQAGQTDLEKIQFLLAQMVKRTIPPELQEQLKTVKTLAKEVWQEKAKVERLQRILEGEGNQEAGKELKAGELRLQLGVLRVTVADIEKELAELRESQDRGKAAMENSVSEASLYLQDQLDKLRMIIESMLTSSSTLLSMSMAPHKAHTLAPGQIDPEATCPACSLDVSHQVSTLVRRYEQLQDMVNSLAVSRPSKKAKLQRQDEELLGRVQSAILQVQGDCEKLNITTSNLIEDHRQKQKDIAMLYQGLEKLEKEKANREHLEMEIDVKADKSALATKVSRVQFDATTEQLNHMMQELVAKMSGQEQDWQKMLDRLLTEMDNKLDRLELDPVKQLLEDRWKSLRQQLRERPPLYQADEAAAMRRQLLAHFHCLSCDRPLETPVTGHAIPVTPAGPGLPGHHSIRPYTVFELEQVRQHSRNLKLGSAFPRGDLAQMEQSVGRLRSMHSKMLMNIEKVQIHFGGSTKASSQIIRELLHAQCLGSPCYKRVTDMADYTYSTVPRRCGGSHTLTYPYHRSRPQHLPRGLYPTEEIQIAMKHDEVDILGLDGHIYKGRMDTRLPGILRKDSSGTSKRKSQQPRPHVHRPPSLSSNGQLPSRPQSAQISAGNTSER

SEQ ID NO: 84664 - protein, 140 aa, Homo sapiens
MNCCIGLGEKARGSHRASYPSLSALFTEASILGFGSFAVKAQWTEDCRKSTYPPSGPTYRGAVPWYTINLDLPPYKRWHELMLDKAPVVIVNSLKNMINTFVPSGKIMQVVDEKLPGLLGNFPGPFEEEMKGIAAVTDIP

SEQ ID NO: 84665 - protein, 137 aa, Homo sapiens
MLKLYAMFLTLVFLVELVAAIVGFVFRHEIKNSFKNNYEKALKQYNSTGDYRSHAVDKIQNTLHCCGVTDYRDWTDTNYYSEKGFPKSCCKLEDCTPQRDADKVNNEGCFIKVMTIIESEMGVVAGISFGVACFQDI

SEQ ID NO: 84666 - protein, 149 aa, Homo sapiens
MGWLTRIVCLFWGVLLTARANYQNGKNNVPRLKLSYKEMLESNNVITFNGLANSSSYHTFLLDEERSRLYVGAKDHIFSFDLVNIKDFQKIVWPVSYTRRDECKWAGKDILKECANFIKVLKAYNQTHLYACGTGAFHPICTYIEIGHH

SEQ ID NO: 84667 - protein, 1737 aa, Homo sapiens
MLSATPLYGNVHSWMNSERVRMCGASEDRKILVNDGDASKARLELREENPLNHNVVDASTAHRIDGLAALSMDRTGLIREGLRVPGNIVYSSLCGLGSEKGREAATSTLGGLGFSSERNPEMQFKPNTPETVEASAVSGKPPNGFSAIYKTPPGIQKSAVATAEALGLDRPASDKQSPLNINGASYLRLPWVNPYMEGATPAIYPFLDSPNKYSLNMYKALLPQQSYSLAQPLYSPVCTNGERFLYLPPPHYVGPHIPSSLASPMRLSTPSASPAIPPLVHCADKSLPWKMGVSPGNPVDSHAYPHIQNSKQPRVPSAKAVTSGLPGDTALLLPPSPRPSPRVHLPTQPAADTYSEFHKHYARISTSPSVALSKPYMTVSSEFPAARLSNGKYPKAPEGGEGAQPVPGHARKTAVQDRKDGSSPPLLEKQTVTKDVTDKPLDLSSKVVDVDASKADHMKKMAPTVLVHSRAGSGLVLSGSEIPKETLSPPGNGCAIYRSEIISTAPSSWVVPGPSPNEENNGKSMSLKNKALDWAIPQQRSSSCPRMGGTDAVITNVSGSVSSAGRPASASPAPNANADGTKTSRSSVETTPSVIQHVGQPPATPAKHSSSTSSKGAKASNPEPSFKANENGLPPSSIFLSPNEAFRSPPIPYPRSYLPYPAPEGIAVSPLSLHGKGPVYPHPVLLPNGSLFPGHLAPKPGLPYGLPTGRPEFVTYQDALGLGMVHPMLIPHTPIEITKEEKPERRSRSHERARYEDPTLRNRFSEILETSSTKLHPDVPTDKNLKPNPNWNQGKTVVKSDKLVYVDLLREEPDAKTDTNVSKPSFAAESVGQSAEPPKPSVEPALQQHRDFIALREELGRISDFHETYTFKQPVFTVSKDSVLAGTNKENLGLPVSTPFLEPPLGSDGPAVTFGKTQEDPKPFCVGSAPPSVDVTPTYTKDGADEAESNDGKVLKPKPSKLAKRIANSAGYVGDRFKCVTTELYADSSQLSREQRALQRAMMRFSELEMKEREGGHPATKDSEMCKFSPADWERLKGNQDKKPKSVTLEEAIAEQNESERCEYSVGNKHRDPFEAPEDKDLPVEKYFVERQPVSEPPADQVASDMPHSPTLRVDRKRKVSGDSSHTETTAEEVPEDPLLKAKRRRVSKDDWPEREMTNSSSNHLEDPHYSELTNLKVCIELTGLHPKKQRHLLHLRERWEQQVSAADGKPGRQSRKEVTQATQPEAIPQGTNITEEKPGRKRAEAKGNRSWSEESLKPSDNEQGLPVFSGSPPMKSLSSTSAGGKKQAQPSCAPASRPPAKQQKIKENQKTDVLCADEEEDCQAASLLQKYTDNSEKPSGKRLCKTKHLIPQESRRGLPLTGEYYVENADGKVTVRRFRKRPEPSSDYDLSPAKQEPKPFDRLQQLLPASQSTQLPCSSSPQETTQSRPMPPEARRLIVNKNAGETLLQRAARLGYEEVVLYCLENKICDVNHRDNAGYCALHEACARGWLNIVRHLLEYGADVNCSAQDGTRPLHDAVENDHLEIVRLLLSYGADPTLATYSGRTIMKMTHSELMEKFLTDYLNDLQGRNDDDASGTWDFYGSSVCEPDDESGYDVLANPPGPEDQDDDDDAYSDVFEFEFSETPLLPCYNIQVSVAQGPRNWLLLSDVLKKLKMSSRIFRCNFPNVEIVTIAEAEFYRQVSASLLFSCSKDLEAFNPESKELLDLVEFTNEIQTLLGSSVEWLHPSDLASDNYW

SEQ ID NO: 84668 - protein, 101 aa, Homo sapiens
CQPCHRFCATCAGAGADGCINCTEGYFMEDGRCVQSCSISYYFDHSSENGYKSCKKCDISCLTCNGPGFKNCTSCPSGYLLDLGMCQMGAICKDVSLFRGA

SEQ ID NO: 84669 - protein, 1010 aa, Homo sapiens
MGDKKDDKDSPKKNKGKERRDLDDLKKEVAMTEHKMSVEEVCRKYNTDCVQGLTHSKAQEILARDGPNALTPPPTTPEWVKFCRQLFGGFSILLWIGAILCFLAYGIQAGTEDDPSGDNLYLGIVLAAVVIITGCFSYYQEAKSSKIMESFKNMVPQQALVIREGEKMQVNAEEVVVGDLVEIKGGDRVPADLRIISAHGCKVDNSSLTGESEPQTRSPDCTHDNPLETRNITFFSTNCVEGTARGVVVATGDRTVMGRIATLASGLEVGKTPIAIEIEHFIQLITGVAVFLGVSFFILSLILGYTWLEAVIFLIGIIVANVPEGLLATVTVCLTLTAKRMARKNCLVKNLEAVETLGSTSTICSDKTGTLTQNRMTVAHMWFDNQIHEADTTEDQSGTSFDKSSHTWVALSHIAGLCNRAVFKGGQDNIPVLKRDVAGDASESALLKCIELSSGSVKLMRERNKKVAEIPFNSTNKYQLSIHETEDPNDNRYLLVMKGAPERILDRCSTILLQGKEQPLDEEMKEAFQNAYLELGGLGERVLGFCHYYLPEEQFPKGFAFDCDDVNFTTDNLCFVGLMSMIDPPRAAVPDAVGKCRSAGIKVIMVTGDHPITAKAIAKGVGIISEGNETVEDIAARLNIPVSQVNPRDAKACVIHGTDLKDFTSEQIDEILQNHTEIVFARTSPQQKLIIVEGCQRQGAIVAVTGDGVNDSPALKKADIGVAMGIAGSDVSKQAADMILLDDNFASIVTGVEEGRLIFDNLKKSIAYTLTSNIPEITPFLLFIMANIPLPLGTITILCIDLGTDMVPAISLAYEAAESDIMKRQPRNPRTDKLVNERLISMAYGQIGMIQALGGFFSYFVILAENGFLPGNLVGIRLNWDDRTVNDLEDSYGQQWTYEQRKVVEFTCHTAFFVSIVVVQWADLIICKTRRNSVFQQGMKNKILIFGLFEETALAAFLSYCPGMDVALRMYPLKPSWWFCAFPYSFLIFVYDEIRKLILRRNPGGPCCRS

SEQ ID NO: 84670 - protein, 154 aa, Homo sapiens
  MOD_RES (1)..(1): Any amino acid
XNGAKGGKKNGRKFENLKIQKVGISQENKKEVEKKLTVKPIETKNKFSQAKLLAGAVKHKSSESGNSVKRLKPDPEPDDKNQEPSSCKSLGNTSLSGPSIHCPSAAVCIGILPGLGAYSGSSDSESSSDSEGTINATGKIVSSIFRTNTFLEAP

SEQ ID NO: 84671 - protein, 132 aa, Homo sapiens
MTAAENVCYTLINVPMDSEPPSEISLKNDLEKGDVKSKTEALKKVIIMILNGEKLPGLLMTIIRFVLPLQDHTIKKLLLVFWEIVPKTTPDGRLLHEMILVCDAYRKDLQHPNEFIRGSTLRFLCKLKEAEL

SEQ ID NO: 84672 - protein, 307 aa, Homo sapiens
MLSLKLPQLLQVHQVPRVFWEDGIMSGYRRPTSSALDCVLSSFQMTNETVNIWTHFLPTWYFLWRLLALAGGPGFRAEPYHWPLLVFLLPACLYPFASCCAHTFSSMSPRMRHICYFLDYGALSLYSLGCAFPYAAYSMPASWLHGHLHQFFVPAAALNSFLCTGLSCYSRFLELESPGLSKVLRTGAFAYPFLFDNLPLFYRLGLCWGRGHGCGQEALSTSHGYHLFCALLTGFLFASHLPERLAPGRFDYIAPGWRQIIGGTSLSSYNESITGRVLHLPLLRPQPPVIPHLCSAGHPLPAGGSAG

SEQ ID NO: 84673 - protein, 146 aa, Homo sapiens
MSYNYVVTAQKPTAVNGCVTGHFTSAEDLNLLIAKNTRLEIYVVTAEGLRPVKEVGMYGKIAVMELFRPKGESKDLLFILTAKYNACILEYKQSGESIDIITRAHGNVQDRIGRPSETGIIGIIDPECRMIGLRLYDGLFKVIPLD

SEQ ID NO: 84674 - protein, 854 aa, Homo sapiens
METSQETSLFLVKILEELDSKQNTVSYQDLCKSLCARFDLSQLAKLRSVLFYTACLDPNFPATLFKDKMKCTVNNQQSKKIMVAADIVTIFNLIQMNGGAAKEKLPTGRQKVRKKEASFESCRSDTEICNAAECEPLNCELSERSFSRGYPIRQSSKCRKMDCKDCPQFVPASEPNFLLGVSKEVKNRAASLDRLQALAPYSVTSPQPCEMQRTYFPMNIENESISDQDSLPINQSIKETFISNEEPFVVQSCVQKRNIFKEDFHNLMAVSPSLVGPISKAENEHREPQSRKEPHKPPFFNHSFEMPYNSQYLNPVYSPVPDKRRAKHESLDDLQASTYFGPTPVMGTQEARRCLGKPNKQTPWPAKSWSLNTEEVPDFERSFFNRNPSEEKLHYPNASSQTPNFPAPERRPTYLVPKDQQPILPIAYAAKQNGLKSKEISSPVDLEKHEPVKKFKDKSINCTSGQLSSDTSSVGTQTEHVLEPKKCRDLCTSGQGKYSDRHTMKHSDDDSEIVSDDISDIFRFLDDMSISGSTGVIQSSCYNSTGSLSQLHKSDCDSSPEHNLTKIANGVPNSKGDKGNRPENTHHSEEELKTSVCKLVLRIGEIERKLESLSGVRDEISQVLGKLNKLDQKMQQPEKVSVQIDLNSLTSEGPSDDSASPRMFHAHSGSHGPKLENNPDWCCSDASGSNSESLRVKALKKSLFTRPSSRSLTEENSATESKIASISNSPRDWRTITYTNRVGLNEEEIKDTGPGDNKDWHRKSKEADRQYDIPPQHRLPKQPKDGFLVEQVFSPHPYPASLKAHMKSNPLYTDMRLTELAEVKRGQPSWTIEEYARNAGDKGKLTALDLQHVG

SEQ ID NO: 84675 - protein, 172 aa, Homo sapiens
MAPRRARGCRTLGLPALLLLLLLRPPATRGITCPPPMSVEHADIWVKSYSLYSRERYICNSGFKRKAGTSSLTECVLNKATNVAHWTTPSLKCIKPAASSPSSNNTAATTAAIVPGSQLMPSKSPSTGTTEISSHESSHGTPSQTTAKNWELTASASHQPPGVYPQGHSDTT

SEQ ID NO: 84676 - protein, 128 aa, Homo sapiens
MGQIEWAMWANEQALASGLILITGGIVATAGRFTQWYFGAYSIVAGVFVCLLEYPRGKRKKGSTMERWGQKYMTAVVKLFGPFTRNYYVRAVLHLLLSVPAGFLLATILGTACLAIASGIYLLVSGAL

SEQ ID NO: 84677 - protein, 263 aa, Homo sapiens
MRPRGLPPLLVVLLGCWASVSAQTDATPAVTTEGLNSTEAALATFGTFPSTRPPGTPRAPGPSSGPRPTPVTDVAVLCVCDLSPAQCDINCCCDPDCSSVDFSVFSACSVPVVTGDSQFCSQKAVIYSLNFTANPPQRVFELVDQINPSIFCIHITNYKPALSFINPEVPDENNFDTLMKTSDGFTLNAESYVSFTTKLDIPTAAKYEYGVPLQTSDSFLRFPSSLTSSLCTDNNPAGQAYWFTPVIPALWEAEARGSLERFW

SEQ ID NO: 84678 - protein, 174 aa, Homo sapiens
TVLVHTTETARLRYFMELLLEKGKPLMLVGNAGVGKTVFVGDTLASLSEDYIVSRVPFNYYTTSTALQKILEKPLEKKAGHNYGPGGNKKLIYFIDDMNMPEVDLYGTVQPHTLIRQHIDYGHWYDRQKVMLKEIHNCQYVACMNPMVGSFTINPRLQGIDSHMLLQQPLIYCH

SEQ ID NO: 84679 - protein, 278 aa, Homo sapiens
MAARAGFQSVAPSGGAGASGGAGAAAALGPGGTPGPPVRMGPAPGQGLYRSPMPGAAYPRPGMLPGSRMTPQGPSMGPPGYGGNPSVRPGLAQSGMDQSRKRPAPQQIQQVQQQAVQNRNHNAKKKKMADKILPQRIRELVPESQAYMDLLAFERKLDQTIMRKRLDIQEALKRPIKSALSKYDATKQKRKFSSFFKSLVIELDKDLYGPDNHLVEWHRTATTQETDGFQVKRPGDVNVRCTVLLMLDYQPPQFKLDPRLARLLGIHTQTRPVIIQAL

SEQ ID NO: 84680 - protein, 124 aa, Homo sapiens
  MOD_RES (1)..(1): Any amino acid
XVAAGNLLNESEKDCGQDRRAPGVQPCRLVTMTSVVKTVYSLQPPSALSGGQPADTQTRATSKSLLPVRSKEVDVSKQLHSGGPENDVTKITKLRRENGQMKATDTATRRNVRKGTTIITATNH

SEQ ID NO: 84681 - protein, 426 aa, Homo sapiens
MEEYHTWQNFGNSHRFSFCQYPFVISVAAKKIIIQRDSEQQMINIARQSLVDKVSRRQRPDMNILFLNMKVRRTHLVSDSLDELTRKRADLKKKLKVTFVGEAGLDMGGLTKEWFLLLIRQIFHPDYGMFTYHKDSHCHWFSSFKCDNYSEFRLVGILMGLAVYNSITLDIRFPPCCYKKLLSPPIIPSDQNIPVGICNVTVDDLCQIMPELAHGLSELLSHEGNVEEDFYSTFQVFQEEFGIIKSYNLKPGGDKISVTNQNRKEYVQLYTDFLLNKSIYKQFAAFYYGFHSVCASNALMLLRPEEVEILVCGSPDLDMHALQRSTQYDGYAKTDLTIKYFWDVVLGFPLDLQKKLLHFTTGSDRVPVGGMADLNFKISKNETSTNCLPVAHTCFNQLCLPPYKSKKDLKQKLIIGISNSEGFGLE

SEQ ID NO: 84682 - protein, 84 aa, Homo sapiens
MAPGQLALFSVSDKTGLVEFARNLTALGLNLVASGGTAKALRDAGLAVRDVSELTGFPEMLGGRVKTLHPAVHAELLPAISIPL

SEQ ID NO: 84683 - protein, 97 aa, Homo sapiens
  MOD_RES (1)..(1): Any amino acid
XSEPTGAYPIKGFFADYEIPNLQKEKITRIEIWVMHEIGGPNVESCGEGSMKVLEKRLKDMGFQYSCINDYRPVKLLQCVDHSTHPDCALKSKLWEP

SEQ ID NO: 84684 - protein, 230 aa, Homo sapiens
  MOD_RES (1)..(1): Any amino acid
XQAEQTHRSILLGLLLGAGRTPQPDSALIRQALAERWSQWSLRGGLEMLPQALETHLTSRGVSVLRGQPVCGLSLQAEGRWKGFGHLVPSSEDPGVLGIVYDSVAFPEQDGSPPGLRVTVMLGGSWLQTLEASGCVLSQELFQQRAQEAAATQLGLKEMPSHCLVHLHKNCIPQYTLGHWQKLESARQFLTAHRLPLTLAGASYEGVAVNDCIESGRQAAVSVLGTEPNS

SEQ ID NO: 84685 - protein, 178 aa, Homo sapiens
MPRLHDHFWSCSCAHSARRRGPPRASAKLDFANNVQLSLTLAALSLGLWWTFDRSRSGLGLGITIAFLATLITQFLVYNGVYQYTSPDFLYIRSWLPCIFFSGGVTVGNIGRQLAMLIPFCEELNLKTTWLFHKTRSNYRVFLKSPIVIESSKPPILRARKILEENLTVDYDKDYLFS

SEQ ID NO: 84686 - protein, 268 aa, Homo sapiens
MTSIKEQAAISRLLSFLQEWDNAGKVARSHILDKFIETNQGKTAPELEQEFSQGASLFLVRLTTSLRITYMTDSCLEKLLRSIGIFLSAVSSNRYLIEFLEVGGVLTLLEILGLEKIKEEAKKESVKLLQVIANSGRTYKELICESYGVRSIAEFLAKSKSEETQEEVQVLLDSLVHGNPKYQNQVYKGLIALLPCESPKAQQLSLQTLRTAQPIIGTTHPSIVDCVLKVLGTMHLEVQYEDPALPSSMKPGFLQGEGPPLWGLSLQR

SEQ ID NO: 84687 - protein, 85 aa, Homo sapiens
MKTVDTGQIPHSVSRPLRSQDSVFNSIQSNTGRSQGGWSYRDGNKNTSLKTWNKNDFKPQCKRTNLVANDGKNSCPVSSGAQQQK

SEQ ID NO: 84688 - protein, 176 aa, Homo sapiens
MGRSGKLPSGVSAKLKRWKKGHSSDSNPAICRHRQAARSRFFSRPSGRSDLTVDAVKLHNELQSGSLRLGKSEAPETPMEEEAELVLTEKSSGTFLSGLSDCTNVTFSKVQRFWESNSAAHKEICAVLAAVTEVIRSQGGKETETEYFAALMTTMEAVESPESLAAVAYLLNLVLK

SEQ ID NO: 84689 - protein, 113 aa, Homo sapiens
MELVKAALAEALRLLRLQVPPSSLQGSGTPAPPGDSLAAPPGLPPTCTPSLVSRGTQTETEVELKSSPGPPGLSNGPPAPQGASEEPSGTQSEGGGSSSSGAGSPGPPGILRP

SEQ ID NO: 84690 - protein, 170 aa, Homo sapiens
MDDFVLRTGEQFSFNTTAAQPQYFKYEFPEGVDSVIVKVTSNKAFPCSVISIQDVLCPVYDLDNNVAFIGMYQTMTKKAAITVQRKDFPSNSFYVVVVVKTEDQACGGSLPFYPFAEDEPVDQGHRQKTLSVLVSQAVTSEAYVSGMLFCLGIFLSFYLLTVLLACWENW

SEQ ID NO: 84691 - protein, 858 aa, Homo sapiens
MTVPISITNPDLLRHSTELFMDSGFSPLCQRMGAMVAFRRFEDFTRNFDEVISCFANVPKDTPLFSEARTSLYSEDDCKSLREEPIHILNVSIQCADHLEDEALVPILRTFVQSKKNILVDYGLRRITFLIAQEKEFPKFFTFRARDEFAEDRIYRHLEPALAFQLELNRMRNFDLTAVPCANHKMHLYLGAAKVKEGVEVTDHRFFIRAIIRHSDLITKEASFEYLQNEGERLLLEAMDELEVAFNNTSVRTDCNHIFLNFVPTVIMDPFKIEESVRYMVMRYGSRLWKLRVLQAEVKINIRQTTTGSAVPIRLFITNESGYYLDISLYKEVTDSRSGNIMFHSFGNKQGPQHGMLINTPYVTKDLLQAKRFQAQTLGTTYIYDFPEMFRQALFKLWGSPDKYPKDILTYTELVLDSQGQLVEMNRLPGGNEVGMVAFKMRFKTQEYPEGRDVIVIGNDITFRIGSFGPGEDLLYLRASEMARAEGIPKIYVAANSGARIGMAEEIKHMFHVAWVDPEDPHKGFKYLYLTPQDYTRISSLNSVHCKHIEEGGESRYMITDIIGKDDGLGVENLRGSGMIAGESSLAYEEIVTISLVTCRAIGIGAYLVRLGQRVIQVENSHIILTGASALNKVLGREVYTSNNQLGGVQIMHYNGVSHITVPDDFEGVYTILEWLSYMPKDNHSPVPIITPTDPIDREIEFLPSRAPYDPRWMLAGRPHPTLKGTWQSGFFDHGSFKEIMAPWAQTVVTGRARLGGIPVGVIAVETRTVEVAVPADPANLDSEAKIIQQAGQVWFPDSAYKTAQAVKDFNREKLPLMIFANWRGFSGGMKGCLGTWRDVSWWKIRAMLPMHIGEGSV

SEQ ID NO: 84692 - protein, 1230 aa, Homo sapiens
MALSDEPAAGGPEEEAEDETLAFGAALEAFGESAETRALLGRLREVHGGGAEREVALERFRVIMDKYQEQPHLLDPHLEWMMNLLLDIVQDQTSPASLVHLAFKFLYIITKVRGYKTFLRLFPHEVADVEPVLDLVTIQNPKDHEAWETRYMLLLWLSVTCLIPFDFSRLDGNLLTQPGQARMSIMDRILQIAESYLIVSDKARDAAAVLVSRFITRPDVKQSKMAEFLDWSLCNLARSSFQTMQGVITMDGTLQALAQIFKHGKREDCLPYAATVLRCLDGCRLPESNQTLLRKLGVKLVQRLGLTFLKPKVAAWRYQRGCRSLAANLQLLTQGQSEQKPLILTEDDDEDDDVPEGVERVIEQLLVGLKDKDTVVRWSAAKGIGRMAGRLPRALADDVVGSVLDCFSFQETDKAWHGGCLALAELGRRGLLLPSRLVDVVAVILKALTYDEKRGACSVGTNVRDAACYVCWAFARAYEPQELKPFVTAISSALVIAAVFDRDINCRRAASAAFQENVGRQGTFPHGIDILTTADYFAVGNRSNCFLVISVFIAGFPEYTQPMIDHLVTMKISHWDGVIRELAARALHNLAQQAPEFSATQVFPRLLSMTLSPDLHMRHGSILACAEVAYALYKLAAQENRPVTDHLDEQAVQGLKQIHQQLYDRQLYRGLGGQLMRQAVCVLIEKLSLSKMPFRGDTVIDGWQWLINDTLRHLHLISSHSRQQMKDAAVSALAALCSEYYMKEPGEADPAIQEELITQYLAELRNPEEMTRCGFSLALGALPGFLLKGRLQQVLTGLRAVTHTSPEDVSFAESRRDGLKAIARICQTVGVKAGAPDEAVCGENVSQIYCALLGCMDDYTTDSRGDVGTWVRKAAMTSLMDLTLLLARSQPELIEAHTCERIMCCVAQQASEKIDRFRAHAASVFLTLLHFDSPPIPHVPHRGELEKLFPRSDVASVNWSAPSQAFPRITQLLGLPTYRYHVLLGLVVSLGGLTESTIRHSTQSLFEYMKGIQSDPQALGSFSGTLLQIFEDNLLNERVSVPLLKTLDHVLTHGCFDIFTTEEDHPFAVKLLALCKKEIKNSKDIQKLLSGIAVDFPSATLVCVGTVQMYAHTHLRLGAPGPHCAHGSALPRFCEMVQFPGDVRRQALLQLCLLLCHRFPLIRKTTASQVYETLLTYSDVVGADVLDEVVTVLSDTAWDAELAVVREQRNRLCDLLGVPRPQLVPQPGAC

SEQ ID NO: 84693 - protein, 134 aa, Homo sapiens
MDELFPLIFPAEPAQASGPYVEIIEQPKQRGMRFRYKCEGRSAGSIPGERSTDTTKTHPTIKFPEPGNPVCEEAGPGAGYQSAHPDQQQPLPSSYRRAAWGLRPECCAALLPGDSAGPIRQAPPPAACPFSSHL

SEQ ID NO: 84694 - protein, 47 aa, Homo sapiens
MSVLSGPGWTTGCPWPQNHPNPCHISGREVARGSRDDSSPQESCCLL

SEQ ID NO: 84695 - protein, 106 aa, Homo sapiens
MAALTLRGVRELLKRVDLATVPRRHRYKKKWPGRPHPSENTIATLPALLGLRRLAGKDSAPSSTSSCLWRPGKVTATTLSILPAQTLAKGCHRAQIPCCSTGFAEF

SEQ ID NO: 84696 - protein, 63 aa, Homo sapiens
MGYARKVGWVTAGLVIGAGACYCIYRLTRGRKQNKEKMAEGGSGDVDDAGDCSGARYNDWSDD

SEQ ID NO: 84697 - protein, 20 aa, Homo sapiens
  MOD_RES (1)..(1): Any amino acid
XNSGYSTLTFGKGTMLLVSP

SEQ ID NO: 84698 - protein, 55 aa, Homo sapiens
MDPSSDYHFLSQILWKRVKLTLVCGVFEGVLQHVDPNKIVVLKKVELLDEVEQGS

SEQ ID NO: 84699 - protein, 228 aa, Homo sapiens
MMLRMHNLHGTKPPPSEGSDEEEEEEDEEDEEERKPQLELAMVPHYGGINRVRVSWLGEEPVAGVWSEKGQVEVFALRRLLQVVEEPQALAAFLRDEQAQMKPIFSFAGHMGEGFALDWSPRVTGRLLTGDCQKNIHLWTPTDGGSWHVDQRPFVGHTRSVEDLQWSPTENTVFASCSADASIRIWDIRAAPSKACMLTTATAHDGDVNVISWSRREPFLLSGGDDGA

SEQ ID NO: 84700 - protein, 179 aa, Homo sapiens
  MOD_RES (1)..(1): Any amino acid
XQYPHLHNAELSKTLGKLWRLLNESDKRPFIEEAERLRMQHKKDHPDYKYQPRRRKNGKAAQGEAECPGGEAEQGGTAAIQAHYKSAHLDHRHPGEGSPMSDGNPEHPSGQSHGPPTPPTTPKTELQSGKADPKRDGRSMGEGGKPHIDFGNVDIGEISHEMGKLKFARLMLRSAGARI

SEQ ID NO: 84701 - protein, 55 aa, Homo sapiens
MAPISLSWLLRLATFCHLTVLLAAWRRDSTGCSVPTRRSNGSRTRCSIWTARLLP

SEQ ID NO: 84702 - protein, 70 aa, Homo sapiens
MGNWGFPGNWTPSKLPRIQITPTEEGLKNSTQMSATYSQGFTVWLGPIIPFIVLCHPDTIRSITNASAAI

SEQ ID NO: 84703 - protein, 326 aa, Homo sapiens
MGPLSAPPCTQHIKWKGVLLTASLLNFWNPPTTAQVTIEAQPTKVSEGKDVLLLVHNLPQNLTGYIWYKGQIRDLYHYITSYVVDGQIIIYGPAYSGRETIYSNASLLIQNVTQEDAGSYTLHIIMGGDENRGVTGHFTFTLYPKLPKPYITINNLKPRENKDVLNFTCEPKSENYTYIWWLNGQSLPVSPRVKRPIENRILILPSVTRNETGPYQCEIRDQYGGIRSYPVTLNVLYGPDLPRIYPSFTYYRSGEVLYLSCSADSNPPAQYSWTINGKFQLSGQKLFIPQITTKHSGLYACSVRNSATGKESSKSMTVKVSDWTLP

SEQ ID NO: 84704 - protein, 108 aa, Homo sapiens
AECTLKESAAINQILGRRWHALSREEQAKYYELARKERQLHMQLYPGWSARDNYGKKKKRKRDKQPGETNDLSAPKKCRARFGLDQQNNWCGPCRCKYSKEVSGTVRA

SEQ ID NO: 84705 - protein, 124 aa, Homo sapiens
MIDPDFADKPKLPENYTDETWQKLKEAVEAIQNSTSIKYNLEELYQLCYLPIGKASRHADIIHVPLDCSQKDYFEMFKFKQEDKGGCRKSLFLQDFCKLVQTAETDLRRSHQSTDSSIQRGFIG

SEQ ID NO: 84706 - protein, 70 aa, Homo sapiens
LQAMPAAGGVLYQPSGPASFPSTFSPAGSVEGSPMHGVYMSQPAPAAGPYPSMPSTAAESRCHPGWSAVP

SEQ ID NO: 84707 - protein, 134 aa, Homo sapiens
MLHPETSPGRGHLLAVLLALLGTAWAEVWPPQLQEQAPMAGALNRKESFLLLSLHNRLRSWVQPPAADMRRLLVWATSSQLGCGRHLCSAGQAAIEAFVCAYSPRGNWEVNGKTIVPYKKGAWCSLCTASVSGC

SEQ ID NO: 84708 - protein, 416 aa, Homo sapiens
MDFRTACEETKTGICLLQDGNQEPFKVRLHLAKDILMIQEQDVICVSGEPFYSGGGAEHNIPVVVSKISKEQRAELSGLLFIGDAILQINGINVRKCRHEEVVQVLRNAGEEVTLTVSFLKRAPAFLKLPLNEDCACAPSDQSSGTSSPLCDSGLHLNYHPNNTDTLSCSSWPTSPGLRWEKRWCDLRLIPLLHSRFSQYVPGTDLSRQNAFQVIAVDGVCTGIIQCLSAEDCVDWLQAIATNISNLTKHNIKKINRNFPVNQQIVYMGWCEAREQDPLQDRVYSPTFLALRGSCLYKFLAPPVTTWDWTRAEKTFSVYEIMCKILKDSDLLDRRKQCFTVQSESGEDLYFSVELESDLAQWERAFQTATFLEVERIQCKTYACVLESHLMGLTIDFSTGFICFDAATKVMCSGQL

SEQ ID NO: 84709 - protein, 130 aa, Homo sapiens
MASLSRPSLPSCLCSFLLLLLLQVSSSYADPFYWVSPGVLVLLAVLPVLLLQITLGLVFLCLQYRLRGKLRAEIENLHRTFDPHFLRVPCWKITLFVIVPVLGPLVALIICYNWLHRRLAGQFLEELRKF

SEQ ID NO: 84710 - protein, 372 aa, Homo sapiens
MDGNLAFCLHGRTWPPFSSSLFHPRKQYLEEHRFSVVVVPSPFPCALEEAQKAIQQLFGKIKDIKDKAEKSEQMVKEITRDIKQLDHAKRHLTTSITTLNHLHMLAGGVDSLEAMTRRRQYGEVANLLQGVMNVLEHFHKYMGIPQIRQLSERVKAAQTELGQQILADFEEAFPSQGTKRPGGPSNVLRDACLVANILDPRIKQEIIKKFIKQHLSEYLVLFQENQDVAWLDKIDRRYAWIKRQLVDYEEKYGRMFPREWCMAERIAVEFCHVTRAELAKIMRTRAKEIEVKLLLFAIQRTTNFEGFLAKRFSGCTLTDGTLKKLESPPPSTNPFLEDEPTPEMEELATEKGDLDQVSLVCVTTGNLPNVRF

SEQ ID NO: 84711 - protein, 269 aa, Homo sapiens
MIGVNSVQSASKVRVRTSGSVKYSREDSIRRQSHRSKSMKISNSSEFSAKENKALYNSIKNEKLEWAVDDEEKKKSPSESTEEKANGTHPKTISRIGSTTNPFLDIPHDPNAAVYKSGFLARKIHADMDGKKTPRGKRGWKTFYAVLKGTVLYLQKHESKLKQITTELAEHRSYPPDKKVKAKDVDEYKLKDHYLEFEKTRYEMYVSILKEGGKELLSNDESEAAGLKKSHSSPSLNPDTSPITAKVKRNVSERKDHRPETPSIKQKVT

SEQ ID NO: 84712 - protein, 139 aa, Homo sapiens
  MOD_RES (1)..(1): Any amino acid
XRVLGATQILLALIIVGFGTIFALNYIGFSQRLPLVVLTGYPFWGALIFILTGYLTVTDKKSKLLGQGVTGMNVISSLVAITGITFTILSYRHQDKYCQMPSFEEICVFSRTLFIVSGLILHEESLKSSLNCVHDVMIH

SEQ ID NO: 84713 - protein, 905 aa, Homo sapiens
MPTAAAPIISSVQKLVLYETRARYFLVGSNNAETKYRVLKIDRTEPKDLVIIDDRHVYTQQEVRELLGRLDLGNRTKMGQKGSSGLFRAVSAFGVVGFVRFLEGYYIVLITKRRKMADIGGHAIYKVEDTNMIYIPNDSVRVTHPDEARYLRIFQNVDLSSNFYFSYDLSHSLQYNLTVLRMPLEMLKSEMTQNRQESFDIFEDEGLITQGGSGVFGICSEPYMKYVWNGELLDIIKSTVHRDWLLYIIHGFCGQSKLLIYGRPVYVTLIARRSSKFAGTRFLKRGANCEGDVANEVETEQILCDASVMSFTAGSYSSYVQVRGSVPLYWSQDISTMMPKPPITLDQADPFAHVAALHFDQMFQRFGSPIIILNLVKEREKRKHERILSEELVAAVTYLNQFLPPEHTIVYIPWDMAKYTKSKLCNVLDRLNVIAESVVKKTGFFVNRPDSYCSILRPDEKWNELGGCVIPTGRLQTGILRTNCVDCLDRTNTAQFMVGKCALAYQLYSLGLIDKPNLQFDTDAVRLFEELYEDHGDTLSLQYGGSQLVHRVKTYRKIAPWTQHSKDIMQTLSRYYSNAFSDADRQDSINLFLGVFHPTEGKPHLWELPTDFYLHHKNTMRLLPTRRSYTYWWTPEVIKHLPLPYDEVICAVNLKKLIVKKFHKYEEEIDIHNEFFRPYELSSFDDTFCLAMTSSARDFMPKTVGIDPSPFTVRKPDETGKSVLGNKSNREEAVLQRKTAASAPPPPSEEAVSSSSEDDSGTDREEEGSVSQRSTPVKMTDAGDSAKVTENVVQPMKELYGINLSDGLSEEDFSIYSRFVQLGQSQHKQDKNSQQPCSRCSDGVIKLTPISAFSQDNIYEVQPPRVDRKSTEIFQAHIQASQGIMQPLGKEDSSMYREYIRNRYL

SEQ ID NO: 84714 - protein, 560 aa, Homo sapiens
MDEERALYIVRAGEAGAIERVLRDYSDKHRATFKFESTDEDKRKKLCEGIFKVLIKDIPTTCQVSCLEVLRILSRDKKVLVPVTTKENMQILLRLAKLNELDDSLEKVSEFPVIVESLKCLCNIVFNSQMAQQLSLELNLAAKLCNLLRKCKDRKFINDIKCFDLRLLFLLSLLHTDIRSQLRYELQGLPLLTQILESAFSIKWTDEYESAIDHNGPPLSPQETDCAIEALKALFNVTVDSWKVHKESDSHQFRVMAAVLRHCLLIVGPTEDKTEELHSNAVNLLSNVPVSCLDVLICPLTHEETAQEATTLDELPSNKTAEKETVLKNNTMVYNGMNMEAIHVLLNFMEKRIDKGSSYREGLTPVLSLLTECSRAHRNIRKFLKDQVLPPLRDVTNRPEVGSTVRNKLVRLMTHVDLGVKQIAAEFLFVLCKERVDSLLKYTGYGNAAGLLAARGLLAGGRGDNWYSEDEDTDTEEYKNAKPNINLITGHLEEPMPNPIDEMTEEQKEYEAMKLVNMLDKLSREELLKPMGLKPDGTITPLEEALNQYSVIEETSSDTD

SEQ ID NO: 84715 - protein, 241 aa, Homo sapiens
  MOD_RES (1)..(1): Any amino acid
XPDGRLLRGHDQSAYDGKDYIALNEDLSSWTAADTAAQITQRKWEAAREAEQWRAYLEGLCVEWLRRYLENGKETLQRADPPKTHVTHHPISDHEATLRCWALGFYPAEITLTWQRDGEDQTQDTELVETRPAGDRTFQKWAAVVVPSGEEQRYTCHVQHEGLPKPLTLRWEPSSQSTIPIVGIVAGLAVLAVVVIGAVVATVMCRRKSSGHFLPTGGKGGSYSQAASSDSAQGSDVSLTA

SEQ ID NO: 84716 - protein, 256 aa, Homo sapiens
MAAPIPQGFSCLSRFLGWWFRQPVLVTQSAAIVPVRTKKRFTPPIYQPKFKTEKEFMQHARKAGLVIPPEKSDRSIHLACTAGIFDAYVPPEGDARISSLSKEGLIERTERMKKTMASQVSIRRIKDYDANFKIKDFPEKAKDIFIEAHLCLNNSDHDRLHTLVTEHCFPTLAIYDRFGRLMYGQEDVPKDVLEYVVFEKQLTNPYGSWRMHTKIVPPWAPPKQPILKTVMIPGPQLKPEEEYEEAQGEAQKPQLA

SEQ ID NO: 84717 - protein, 313 aa, Homo sapiens
METANYTKVTEFVLTGLSQTPEVQLVLFVIFLSFYLFILPGNILIICTISLDPHLTSPMYFLLANLAFLDIWYSSITAPEMLIDFFVERKIISFDGCIAQLFFLHFAGASEMFLLTVMAFDLYTAICRPLHYATIMNQRLCCILVALSWRGGFIHSIIQVALIVRLPFCGPNELDSYFCDITQVVRIACANTFPEELVMICSSGLISVVCLIALLMSYAFLLALLKKLSGSGENTNRAMSTCYSHITIVVLMFGPSIYIYARPFDSFSLDKVVSVFNTLIFPLRNPIIYTLRNKEVKAAMRKLVTKYILCKEK

SEQ ID NO: 84718 - protein, 251 aa, Homo sapiens
MRRMLVVEVANGRSLVWGAEAVQALRERLGVGGRTVGALPRGPRQNSRLGLPLLLMPEEARLLAEIGAVTLVSAPRPDSRHHSLALTSFKRQQEESFQEQSALAAEARETRRQELLEKITEGQAAKKQKLEQASGASSSQEAGSSQAAKEDETSDGQASGEQEEAGPSSSQAGPSNGVAPLPRSALLVQLATARPRPVKARPLDWRVQSKDWPHAGRPAHELRYSIYRDLWERGFFLSAAGKFGGDFLVYP

SEQ ID NO: 84719 - protein, 45 aa, Homo sapiens
  MOD_RES (1)..(1): Any amino acid
XKEQEKEKKSVVWLCCPGWRTVAQSQLTAALTSWSQVILPHQPPK

SEQ ID NO: 84720 - protein, 290 aa, Homo sapiens; identical to SEQ ID NO: 43868

SEQ ID NO: 84721 - protein, 241 aa, Homo sapiens
  MOD_RES (1)..(1): Any amino acid
XPDGRLLRGYDQDAYDGKDYIALNEDLSSWTAADTAAQITQRKWEAARVAEQLRAYLEGLCVESLRRYLENGKETLQRADPPKTHVTHHPISDHEVTLRCWALGFYPAEITLTWQRDGEDQTQDTELVETRPAGDRTFQKWAAVVVPSGEEQRYTCHVQHEGLPKPLTLRWEPSSQSTVPIVGIVAGLAVLAVVVIGAVVAAVMCRRKSSGHFLPTGGKGGSYSQAACSDSAQGSDVSLTA

SEQ ID NO: 84722 - protein, 113 aa, Homo sapiens
MRQRLLPSVTSLLLVALLFPGSSQARHVNHSATEALGELRERAPGQGTNGFQLLRHAVKRDLLQPRTPPYQEPASDLKVVDCRRSEGFCQEYCNYMETQVGYCSKKKDACCLH

SEQ ID NO: 84723 - protein, 314 aa, Homo sapiens
MMGSVLPAEALVLKTGLKAPGLALAEVITSDILHSFLYGRWRNVLGEQLFEDKSHHASPKTAFTAEVLAQSFSGEVQKLSSLVLPAEVIIAQSSIPGEGLGIFSKTWIKAGTEMGPFTGRVIAPEHVDICKNNNLMWEVFNEDGTVRYFIDASQEDHRSWMTYIKCARNEQEQNLEVVQIGTSIFYKAIEMIPPDQELLVWYGNSHNTFLGIPGVPGLEEDQKKNKHEDFHPADSAAGPAGRMRCVICHRGFNSRSNLRSHMRIHTLDKPFVCRFCNRRFSQSSTLRNHVRLHTGERPYKCQASLPPNLAPGDG

SEQ ID NO: 84724 - protein, 115 aa, Homo sapiens
MGVEGTGRGGCRLGGPDGKGKGWAPVDATARLPHPQRLSLPLLQLQPEPCFSLVAQMRPWWSPDYLHSLGKARTAQVQKDARIGEAEAKRDAGIREAKAKQEKVSAQYLSEIEMA

SEQ ID NO: 84725 - protein, 103 aa, Homo sapiens
  MOD_RES (1)..(1): Any amino acid
XYKIITGKPSGAISGVQKAENGPIDWSGDMPVSCSLSRATIFHELVYKQTKIISSNQELIYEGRRLVLEPGRLAQHFPKTTEENPIFVVSREPLNTIGLIYEK

SEQ ID NO: 84726 - protein, 72 aa, Homo sapiens
  MOD_RES (1)..(1): Any amino acid
XAQSDSELPSYHQNDVSLDRGYTSDSEVYTDHGRPGKIHRSATDADVVNSGWLGRMTLITPSQGPAAQALHP

SEQ ID NO: 84727 - protein, 128 aa, Homo sapiens
  MOD_RES (1)..(1): Any amino acid
XPTMDIATKGPFPTSRDPLPSVPPTTTNSSRGTNSTLAKITTSAKTTMKPPTATPTTARTRPTTDVSAGENGGFLLLWLSVASPEDLTDPRVAERLMQQLMTQGTHSAHVPSMVGVNPLPIVPGGFQH

SEQ ID NO: 84728 - protein, 56 aa, Homo sapiens
MRQGPTLSPWLECNGVISAHYNFCLLGSSDPPVSASRMARTTVRSPRIPWRKSFHS

SEQ ID NO: 84729 - protein, 73 aa, Homo sapiens
  MOD_RES (1)..(1): Any amino acid
XPLYVALAQRKEERKAILTNQYMQRLSTMRTLSNPLLGSFQQPSSYFLPAMPQMPMSTETLQNRHRLSSISPA

SEQ ID NO: 84730 - protein, 809 aa, Homo sapiens
  MOD_RES (1)..(1): Any amino acid
XEEDAFKSKKERSTLLVRRFCKNDREVKKSVYTGTRAIVRTLPSGHIGLTAWSYIDQKRNGPLLPCGRVMEPPSTVEIRQDGSQRLSEAQWYPIYNAVRREETENTVGSLLHFLTKLPASETAHGRISVGPCLKQCVRDTVCEYRATLQRTSISQYITGSLLEATTSLGARSGLLSTFGGSTGRMMLKERQPGPSVANSNALPSSSAGISKELIDLQPLIQFPEEVASILMEQEQTIYRRVLPVDYLCFLTRDLGTPECQSSLPCLKASISASILTTQNGEHNALEDLVMRFNEVSSWVTWLILTAGSMEEKREVFSYLVHVAKCCWNMGNYNAVMEFLAGLRSRKVLKMWQFMDQSDIETMRSLKDAMAQHESSCEYRKVVTRALHIPGCKVVPFCGVFLKELCEVLDGASGLMKLCPRYNSQEETLEFVADYSGQDNFLQRVGQNGLKNSEKESTVNSIFQVIRSCNRSLETDEEDSPSEGNSSRKSSLKDKSRWQFIIGDLLDSDNDIFEQSKEYDSHGSEDSQKAFDHGTELIPWYVLSIQADVHQFLLQGATVIHYDQDTHLSARCFLQLQPDNSTLTWVKPTTASPASSKAKLGVLNNTAEPGKFPLLGNAGLSSLTEGVLDLFAVKAVYMGHPGIDIHTVCVQNKLGSMFLSETGVTLLYGLQTTDNRLLHFVAPKHTAKMLFSGLLELTRAVRKMRKFPDQRQQWLRKQYVSLYQEDGRYEGPTLAHAVELFGGRRWSARNPSPGTSAKNAEKPNMQRNNTLGISTTKKKKKILMRRFRRFCAASCLPPSPEEYCCIVKNN

SEQ ID NO: 84731 - protein, 397 aa, Homo sapiens
MRVMAPRTLILLLSGALALTETWACSHSMRYFDTAVSRPGRGEPRFISVGYVDDTQFVRFDSDAASPRGEPRAPWVEQEGPEYWDRETQKYKRQAQADRVNLRKLRGYYNQSEDGSHTLQWMYGCDLGPDGRLLRGYDQSAYDGKDYIALNEDLRSWTAADTAAQITQRKWEAAREAEQWRAYLEGTCVEWLRRYLENGKETLQRAEHPKTHVTHHPVSDHEATLRCWALGFYPAEITLTWQRDGEDQTQDTELVETRPAGDGTFQKWAAVVVPSGEEQRYTCHVQHEGLPEPLTLRWEPSSQPTIPIVGIVAGLAVLAVLAVLGAVMAVVMCRRKSSGREGVRSGVWPATVPRALMSLSSLVKPETAACVGLRCRISSHLSFVTSRASGISFCKGI

SEQ ID NO: 84732 - protein, 130 aa, Homo sapiens
MSVNGKKVLHMDRNPYYGGESASITPLEDLYKRFKIPGSPPESMGRGRDWNVDLIPKFLMANGQLVKMLLYTEVTRYLDFKVTEGSFVYKGGKIYKVPSTEAEALASSLMGLFEKRRFRKFLVYVANFDE

SEQ ID NO: 84733 - protein, 98 aa, Homo sapiens
MHLKHLRTLLSPQDGAAKVTCMAWSQNNAKFAVCTVDRVVLLYDEHGERRDKFSTKPADMKYGRKSYMVKGMAFSPDSTKIAIGQTDNIIYVYKIGED

SEQ ID NO: 84734 - protein, 26 aa, Homo sapiens
MAMIELGFGRQNFHPLKRKSSLLLKL

SEQ ID NO: 84735 - protein, 129 aa, Homo sapiens
MDTMMLNVRNLFEQLVRRVEILSEGNEVQFIQLAKDFEDFRKKWQRTDHELGKYKDLLMKAETERSALDVKLKHARNQVDVEIKRRQRAEADCEKLERQIQLIREMLMCDTSGSIQLSEEQKSALAFLN

SEQ ID NO: 84736 - protein, 143 aa, Homo sapiens
LSHHSLRAGPDLTESEKSYVEAVCNEIINIAEKSVHYCSTVSHPLDFHHKVSPSDNKSSLIISQQPQAQQRRVTPDRSQTSQDLFSYQALYSYIPQNDDELELRDGDIVDVMEKCDDGWFVGTSRRTKQFGTFPGNYVKPLYL

SEQ ID NO: 84737 - protein, 62 aa, Homo sapiens
MANFHKTLILGKGKTLTNEASTKKVELDNCPSVSPYLRGQSKLIFKPDLTLEEVQEIRLLNV

SEQ ID NO: 84738 - protein, 361 aa, Homo sapiens
MPYQYPALTPEQKKELSDIAHRIVAPGKGILAADESTGSIAKRLQSIGTENTEENRRFYRQLLLTADDRVNPCIGGVILFHETLYQKADDGRPFPQVIKSKGGVVGIKVDKGVVPLAGTNGETTTQGLDGLSERCAQYKKDGADFAKWRCVLKIGEHTPSALAIMENANVLARYASICQQNGIVPIVEPEILPDGDHDLKRCQYVTEKVLAAVYKALSDHHIYLEGTLLKPNMVTPGHACTQKFSHEEIAMATVTALRRTVPPAVTGITFLSGGQSEEEASINLNAINKCPLLKPWALTFSYGRALQASALKAWGGKKENLKAAQEEYVKRALVRIGRRWAGCLGGWDSEKSPSHSTPLPA

SEQ ID NO: 84739 - protein, 75 aa, Homo sapiens
MNPTSYDNVLIKWFPEVTHFCRGIPMVLIGCKTDLRKDKEQLRKLRAAQLEPITYMQGLSACEQIRAALYLECSA

SEQ ID NO: 84740 - protein, 124 aa, Homo sapiens
MFLIVLPLESMAHGLFHELGNCLGGTSVGYAIVIPTNFCSPDGQPTLLPPEHVQELNLRSTGMLNAIQRFFAYHMIETYGCDYSTSGLSFDTLHSKLKAFLELRTVDGPRHDTYILYYSGHTHG

SEQ ID NO: 84741 - protein, 201 aa, Homo sapiens
MNYEGSPIKVTLATLKMSVQPTVSLGGFEITPPVVLRLKCGSGPVHISGQHLVAVEEDAESEDEEEEDVKLLSISGKRSAPGGGSKVPQKKVKLAADEDDDDDDEEDDDEDDDDDDFDDEEAEEKAPVKKGQESFKKQEKTPKTPKGPSSVEDIKAKMQASIEKGGSLPKVEAKFINYVKNCFRMTDQEAIQDLWQWRKSL

SEQ ID NO: 84742 - protein, 36 aa, Homo sapiens
  MOD_RES (1)..(1): Any amino acid
XSLLRNDLRPANKLAKGNRLFMRFATKAPGLGSIQD

SEQ ID NO: 84743 - protein, 45 aa, Homo sapiens
GLMYHDASRWGLTLQTYVQLTMLDRHTRPQWEDARSGLCSSVGMV

SEQ ID NO: 84744 - protein, 93 aa, Homo sapiens
MAAEEVLQTVDHYKTEIERLTKELTETTHEKIQAAEYGLVVLEEKLTLKQQYDELEAEYDSLKQELEQLKEGPLLLKDVIYDILNQLAFQFSV

SEQ ID NO: 84745 - protein, 68 aa, Homo sapiens
MHQKLLKSAHYIELGSYQYWPVLVPRGIRLYTYEQIPGSLKDNPYITDGYRAYLPSRLCIKRHYTRHR

SEQ ID NO: 84746 - protein, 795 aa, Homo sapiens
MGYLRIFSPHPAKTGDGAQAEDLLLEVDLRDPVLQVEVGKFVSGTEMLHLAVLHSRKLCVYSVSGTLGNVEHGNQCQMKLMYEHNLQRTACNMTYGSFGGVKGRDLICIQSMDGMLMVFEQESYAFGRFLPGFLLPGPLAYSSRTDSFLTVSSCQQVESYKYQVLAFATDADKRQETEQQKLGSGKRLVVDWTLNIGEQALDICIVSFNQSASSVFVLGERNFFCLKDNGQIRFMKKLDWSPSCFLPYCSVSEGTINTLIGNHNNMLHIYQDVTLKWATQLPHIPVAVRVGCLHDLKGVIVTLSDDGHLQCSYLGTDPSLFQAPNVQSRELNYDELDVEMKELQKIIKDVNKSQGVWPMTEREDDLNVSVVVSPNFDSVSQATDVEVGTDLVPSVTVKVTLQNRVILQKAKLSVYVQPPLELTCDQFTFEFMTPDLTRTVSFSVYLKRSYTPSELEGNAVVSYSRPTDRNPDGIPRVIQCKFRLPLKLICLPGQPSKTASHKITIDTNKSPVSLLSLFPGFASQSDDDQVNVMGFHFLGGARITVLASKTSQRYRIQSEQFEDLWLITNELILRLQEYFEKQGVKDFACSFSGSIPLQEYFELIDHHFELRINGEKLEELLSERAVQFRAIQRRLLARFKDKTPAPLQHLDTLLDGTYKQVIALADAVEENQGNLFQSFTRLKSATHLVILLIALWQKLSADQVAILEAAFLPLQEDTQELGWEETVDAAISHLLKTCLSKSSKEQALNLNSQLNIPKDTSQLKKHITLLCDRLSKGGRLCLSTDAAAPQTMVMP

SEQ ID NO: 84747 - protein, 131 aa, Homo sapiens
MSHAVTIEEPQAQPQVSQTRYRERSRAGSHISSNRAYDFLYELTLLFRCLKKFMKILKLLERIAINTLKGLFSHFFSRCHSMLFMPYPRQNHTLFLLLLLSTYPSLQSLLWALRLIIGMLTFKQIHTLQNM

SEQ ID NO: 84748 - protein, 139 aa, Homo sapiens
MMTAKAVDKIPVTLSGFVHQLSDNIYPVEDLAATSVTIFPNAELGGPFDQMNGVAGDGMINIDMTGEKRSLDLPYPSSFAPVSAPRNQTFTYMGKFSIDPQYPGASCYPEGIINIVSAGILQGVTSPASTTASSSVTSA

SEQ ID NO: 84749 - protein, 249 aa, Homo sapiens
  MOD_RES (1)..(1): Any amino acid
XLSLEVMTILCRCENIETSEGVPLFVTGVAQVKIMTEKELLAVACEQFLGTLTVEQIYQDRDQFAKLVREVAAPDVGRMGIEILSFTIKDVYDKVDYLSSLGKTQTAVVQRDADIGVAEAERDAGIREAECKKEMLDVKFMADTKIADSKRAFELQKSAFSEEVNIKTAEAQLAYELQGAREQQKIRQEEIEIEVVQRKKQIAVEAQEILRTDKELIATVRRPAEAEAHRIQQIAEGEKVKQVLLAQAE

SEQ ID NO: 84750 - protein, 71 aa, Homo sapiens
  MOD_RES (1)..(1): Any amino acid
XKKQLRETKDKKNENSFEKQVSCHENSKSCIRRKAIVREDLLSAKVCDLKWIHSKLLFACGFYLFFCCFLI

SEQ ID NO: 84751 - protein, 180 aa, Homo sapiens
  MOD_RES (1)..(1): Any amino acid
XRDVTLTREMITLSFRTTRTPSLLLYVSSFYEEYLSVILANNGSLQIRYKLDRHQNPDAFTFDFKNMADGQLHQVKINREEAVVMVEVNQSAKKQVILSSGTEFNAVKSLILGKVLGRSGPVDEGEPLVNADRRDSAVIGGVIAVEIFILLCITAIAIRIYQQRKLRKENESKVSKKEEC

SEQ ID NO: 84752 - protein, 58 aa, Homo sapiens
MSTERTSWTSLSTIQKIALGLGIPASATVAYILYRRYRESRVVSRRHLPQRLDLENRT

SEQ ID NO: 84753 - protein, 251 aa, Homo sapiens
MRALWVLGLCCVLLTFGSVRADDEVDVDGTVEEDLGKSREGSRTDDEVVQREEEAIQLDGLNASQIRELREKSEKFAFQAEVNRMMKLIINSLYKNKEIFLRELISNASDALDKIRLISLTDENALSGNEELTVKIKCDKEKNLLHVTDTGVGMTREELVKNLGTIAKSGTSEFLNKMTEAQEDGQSTSELIGQFGVGFYSAFLVADKVIVTSKHNNDTQHIWESDSNEFSVIADPRGNTLGRGTTITRSI

SEQ ID NO: 84754 - protein, 1632 aa, Homo sapiens
MNPREEKVKIITEEFIENDEDADMGRQNKNSKVRRQPRKKQPPTAVPKEMVSEKSHLGNPQEPVQEEPKTRLLSMTVRRGPRSLPPIPSTSRTGFAEFSMRGRMREKLQAARSKAESALLQEIPTPRPRRLRSPSKKELETEFGTEPGKEVERTQQEVDSQSYSRVKFHDSARKIKPKPQVPPGFPSAEEAYNFFTFNFDPEPEGSEEKPKARHRAGTNQEEEEGEEEEPPAQGGGKEMDEEELLNGDDAEDFLLGLDHVADDFVAVRPADYESIHDRLQMEREMLFIPSRQTVPTYKKLPENVQPRFLEDEGLYTGVRPEVARTNQNIMENRLLMQDPERRWFGDDGRILALPNPIKPFPSRPPVLTQEQSIKAELETLYKKAVKYVHSSQHVIRSGDPPGNFQLDIDISGLIFTHHPCFSREHVLAAKLAQLYDQYLARHQRNKAKFLTDKLQALRNAVQTGLDPEKPHQSLDTIQKTINEYKSEIRQTRKFRDAEQEKDRTLLKTIIKVWKEMKSLREFQRFTNTPLKLVLRKEKADQKADEEAYEAEIQAEISELLEEHTEEYAQKMEEYRTSLQQWKAWRKVQRAKKKKRKQAAEEHPGDEIAEPYPEEDLVKPSPPEPTDRAVIEQEVRERAAQSRRRPWEPTLVPELSLAGSVTPNDQCPRAEVSRREDVKKRSVYLKVLFNNKEVSRTVSRPLGADFRVHFGQIFNLQIVNWPESLTLQVYETVGHSSPTLLAEVFLPIPETTVVTGRAPTEEVEFSSNQHVTLDHEGVGSGVPFSFEADGSNQLTLMTSGKVSHSVAWAIGENGIPLIPPLSQQNIGFRSALKKADAISSIGTSGLTDMKKLAKWAAESKLDPNDPNNAPLMQLISVATSGESYVPDFFRLEQLQQEFNFVSDQELNRSKRFRLLHLRSQEVPEFRNYKQVPVYDREIMEKVFQDYEKRLRDRNVIETKEHIDTHRAIVAKYLQQVRESVINRFLIAKQYFLLADMIVEEEVPNISSEGSGILGLSLFKLAEQKRPLRPRRKGRKKVTAQNLSDGDIKLLVNIVRAYDIPVRKPAVSKFQQPSRSSRMFSEKHAASPSTYSPTHNADYPLGQVLVRPFVEVSFQRTVCHTTTAEGPNPSWNEELELPFRAPNGDYSTASLQSVKDVVFINIFDEVLHDVLEDDRERGSGIHTRIERHWLGCVKMPFSTIYFQARIDGTFKIDIPPVLLGYSKERNMILERGFDSVRSLSEGSYITLFITIEPQLVPGESIREKMSNMLKKFESQEDEKLLQATEKFQAECALKFPNRQCLTTVIDISGKTVFITRYLKPLNPPQELLNVYPNNLQATAELVARYVSLIPFLPDTVSFGGICDLWSTSDQFLDLLAGDEEEHAVLLCNYFLSLGKKAWLLMGNAIPEGPTAYVLTWEQGRYLIWNPCSGHFYGQFDTFCPLKNVGCLIGPDNIWFNIQRYESPLRINFDVTRPKLWKSFFSRSLPYPGLSSVQPEELIYQRSDKAAAAELQDRIEKILKEKIMDWRPRHLTRWNRYCTSTLRHFLPLLEKSQGEDVEDDHRAELLKQLGDYRFSGFPLHMPYSEVKPLIDAVYSTGVHNIDVPNVEFALAVYIHPYPKNVLSVWIYVASLIRNR

SEQ ID NO: 84755 - protein, 204 aa, Homo sapiens
MAGLTLFVGRLPPSARSEQLEELFSQVGPVKQCFVVTEKVYVDQCPVSKGLYPEGDSNAVEREAEHMNYVSFSGSKACRGFGYVTFSMLEDVQRALKEITTFEGCKINVTVAKKKLRNKTKEKGKNENSECPKKEPKAKKAKVADKKARLIIRNLSFKCSEDDLKTVFAQFGAVLEVNIPRKPDGKMRGFGFVQFKNLLEAGKA

SEQ ID NO: 84756 - protein, 31 aa, Homo sapiens
MMRNKDKSQEEDSSLHSNASRVVWNALSSEA

SEQ ID NO: 84757 - protein, 197 aa, Homo sapiens
MQIIRHSEQTLKTALISKNPVLVSQYEKLNAGEQRLMNEAFQPASDLFGPITLHSPSDWITSHPEAPQDFEQFFSDPYRKTPSPNKRSIYIQSIGSLGNTRIISEEYIKWLTGYCKAYFYGLRVKLLEPVPVSVTRCSFRVNENTHNLQIHAGDILKFLKKKKPEDAFCVVGITMIDLYPRDSWNFVFGQASLTDGV

SEQ ID NO: 84758 - protein, 78 aa, Homo sapiens
VLCKLINSLYPPGQEPIPKISESKMAFKQMEQISQFLKAAETYGVRTTDIFQTVDLWEGKPSRIGEAFPRSSFARDRT

SEQ ID NO: 84759 - protein, 466 aa, Homo sapiens
MKIPFLLLFFLWEAESHAASRPNIILVMADDLGIGDPGCYGNKTIRTPNIDRLASGGVKLTQHLAASPLCTPSRAAFMTGRYPVRSGMASWSRTGVFLFTASSGGLPTDEITFAKLLKDQGYSTALIGKWHLGMSCHSKTDFCHHPLHHGFNYFYGISLTNLRDCKPGEGSVFTTGFKRLVFLPLQIVGVTLLTLAALNCLGLLHVPLGVFFSLLFLAALILTLFLGFLHYFRPLNCFMMRNYEIIQQPMSYDNLTQRLTVEAAQFIQRNTETPFLLVLSYLHVHTALFSSKDFAGKSQHGVYGDAVEEMDWSVGQILNLLDELRLANDTLIYFTSDQGAHVEEVSSKGEIHGGSNGIYKGGKANNWEGGIRVPGILRWPRVIQAGQKIDEPTSNMDIFPTVAKLAGAPLPEDRIIDGRDLMPLLEGKSQRSDHEFLFHYCNAYLNAVRWHPQNKTIFKKLGNISR

SEQ ID NO: 84760 - protein, 4510 aa, Homo sapiens
MKGARWRRVPWVSLSCLCLCLLPHVVPGTTEDTLITGSKTAAPVTSTGSTTATLEGQSTAASSRTSNQDISASSQNHQTKSTETTSKAQTDTLTQMMTSTLFSSPSVHNVMETAPPDEMTTSFPSSVTNTLMMTSKTITMTTSTDSTLGNTEETSTAGTESSTPVTSAVSITAGQEGQSRTTSWRTSIQDTSASSQNHWTRSTQTTRESQTSTLTHRTTSTPSFSPSVHNVTGTVSQKTSPSGETATSSLCSVTNTSMMTSEKITVTTSTGSTLGNPGETSSVPVTGSLMPVTSAALVTFDPEGQSPATFSRTSTQDTTAFSKNHQTQSVETTRVSQINTLNTLTPVTTSTVLSSPSGFNPSGTVSQETFPSGETTTSSPSSVSNTFLVTSKVFRMPTSRDSTLGNTEETSLSVSGTISAITSKVSTIWWSDTLSTALSPSSLPPKISTAFHTQQSEGAETTGRPHERSSFSPGVSQEIFTLHETTTWPSSFSSKGHTTWSQTELPSTSTGAATRLVTGNPSTGTAGTIPRVPSKVSAIGEPGEPTTYSSHSTTLPKTTGAGAQTQWTQETGTTGEALLSSPSYSVTQMIKTATSPSSSPMLDRHTSQQITTAPSTNHSTIHSTSTSPQESPAVSQRGHTQAPQTTQESQTTRSVSPMTDTKTVTTPGSSFTASGHSPSEIVPQDAPTISAATTFAPAPTGDGHTTQAPTTALQAAPSSHDATLGPSGGTSLSKTGALTLANSVVSTPGGPEGQWTSASASTSPDTAAAMTHTHQAESTEASGQTQTSEPASSGSRTTSAGTATPSSSGASGTTPSGSEGISTSGETTRFSSNPSRDSHTTQSTTELLSASASHGAIPVSTGMASSIVPGTFHPTLSEASTAGRPTGQSSPTSPSASPQETAAISRMAQTQRTRTSRGSDTISLASQATDTFSTVPPTPPSITSTGLTSPQTETHTLSPSGSGKTFTTALISNATPLPVTYASSASTGHTTPLHVTDASSVSTGHATPLPVTSPSSVSTGHTTPLPVTDTSSESTGHVTPLPVTSFSSASTGDSTPLPVTDTSSASTGHVTPLPVTSLSSASTGDTTPLPVTDTSSASTGHATSLPVTDTSSVSTGHTTPLPVTDTSSASTGHATSLPVTDTSSVSTGHTTPLHVTDASSASTGQATPLPVTSLSSVSTGDTTPLPVTSPSSASTGHATPLLVTDTSSASTGHATPLPVTDASSVSTDHATSLPVTIPSAASTGHTTPLPVTDTSSASTGQATSLLVTDTSSVSTGDTTPLPVTSTSSASTGHVTPLHVTSPSSASTGHATPLPVTSLSSASTGDTMPLPVTSPSSASTGDTTPLPVTDASSVSTGHTTPLHVTDASSASTGQATPLPVTSLSSVSTGDTTPLPVTSPSSASTGHATPLLVTDTSSASTGHATPLPVTDASSVSTDHATSLPVTIPSAASTGHTTPLPVTDTSSASTGQATSLLVTDTSSVSTGDTTPLPVTSTSSASTGHVTPLHVTSPSSASTGHATPLPVTSLSSASTGDTMPLPVTSPSSASTGDTTPLPVTDASSVSTGHTTPLPVTSPSSASTGHTTPLPVTDTSSASKGDTTPLPVTSPSSASTGHTTPLPVTDTSSASTGDTTPLPVTNASSLSTGHATPLHVTSPSSASTGHATPLPVTSTSSASTGHATPLPVTGLSSATTDDTTRLPVTDVSSASTGQATPLPVTSLSSVSTGDTTPLPVTSPSSASTGHASPLLVTDASSASTGQATPLPVTDTSSVSTAHATPLPVTGLSSASTDDTTRLPVTDVSSASTGQAIPLPVTSPSSASTGDTTPLPVTDASSASTGDTTSLPVTIPSSASSGHTTSLPVTDASSVSTGHATSLLVTDASSVSTGDTTPLPVTDTNSASTGDTTPLHVTDASSVSTGHATSLPVTSLSSASTGDTTPLPVTSPSSASSGHTTPLPVTDASSVPTGHATSLPVTDASSVSTGHATPLPVTDASSVSTGHATPLPVTDTSSVSTGQATPLPVTSLSSASTGDTTPLPVTDTSSASTGQDTPLPVTSLSSVSTGDTTPLPVTNPSSASTGHATPLLVTDASSISTGHATSLLVTDASSVSTGHATALHDTDASSLSTGDTTPLPVTSPSSTSTGDTTPLPVTETSSVSTGHATSLPVTDTSSASTGHATSLPVTDTSSASTGHATPLPVTDTSSASTGQATPLPVTSPSSASTGHAIPLLVTDTSSASTGQATPLPVTSLSSASTGDTTPLPVTDASSVSTGHATSLPVTSLSSVSTGDTTPLPVTSPSSASTGHATPLHVTDASSASTGHATPLPVTSLSSASTGDTTPLPVTSPSSASTGHATPLHVTDASSVSTGDTTPLPVTSSSSASSGHTTPLPVTDASSASTGDTTPLPVTDTSSASTGHATHLPVTGLSSASTGDTTRLPVTNVSSASTGHATPLPVTSTSSASTGDTTPLPGTDTSSVSTGHTTPLLVTDASSVSTGDTTRLPVTSPSSASTGHTTPLPVTDTPSASTGDTTPLPVTNASSLSTRHATSLHVTSPSSASTGHATSLPVTDTSAASTGHATPLPVTSTSSASTGDTTPLPVTDTYSASTGQATPLPVTSLSSVSTGDTTPLPVTSPSSASTGHATPLLVTDASSASTGQATPLPVTSLSSVSTGDTTPLPVTSPSSASTGHATSLPVTDTSSASTGDTTSLPVTDTSSAYTGDTTSLPVTDTSSSSTGDTTPLLVTETSSVSTGDTTPLPVTDTSSASTGHATPLPVTNTSSVSTGHATPLHVTSPSSASTGHTTPLPVTDASSVSTGHATSLPVTDASSVFTGHATSLPVTIPSSASSGHTTPLPVTDASSVSTGHATSLPVTDASSVSTGHATPLPVTDASSVSTGHATPLPLTSLSSVSTGDTTPLPVTDTSSASTGQATPLPVTSLSSVSTGDTTPLPVTDTSSASTGHATSLPVTDTSSASTGHATPLPDTDTSSASTGHATLLPVTDTSSASIGHATSLPVTDTSSISTGHATPLHVTSPSSASTGHATPLPVTDTSSASTGHANPLHVTSPSSASTGHATPLPVTDTSSASTGHATPLPVTSLSSVSTGDTTPLPVTSPSSASTGHTTPLPVTDTSSASTGQATALPVTSTSSASTGDTTPLPVTDTSSASTGQATPLPVTSLSSVSTGDTTPLPVTSPSSASTGHATPLLVTDASSASTGQATPLPVTSLSSVSTGDTTPLPVTSPSSASTGHATSLPVTDTSSASTGDTTSLPVTDTSSAYTGDTTSLPVTDTSSSSTGDTTPLLVTETSSVSTGHATPLLVTDASSASTGHATPLHVTSPSSASTGDTTPVPVTDTSSVSTGHATPLPVTGLSSASTGDTTRLPVTDISSASTGQATPLPVTNTSSVSTGDTMPLPVTSPSSASTGHATPLPVTSTSSASTGHATPVPVTSTSSASTGHTTPLPVTDTSSASTGDTTPLPVTSPSSASTGHTTPLHVTIPSSASTGDTSTLPVTGASSASTGHATPLPVTDTSSVSTGHATPLPVTSLSSVSTGDTTPLPVTDASSASTGQATPLPVTSLSSVSTGDTTPLLVTDASSVSTGHATPLPVTDTSSASTGDTTRLPVTDTSSASTGQATPLPVTSLSSVSTGDTTPLLVTDASSVSTGHATPLPVTDTSSASTGDTTRLPVTDTSSASTGQATPLPVTIPSSSSSGHTTPLPVTSTSSVSTGHVTPLHVTSPSSASTGHVTPLPVTSTSSASTGHATPLLVTDASSVSTGHATPLPVTDASSASTGDTTPLPVTDTSSASTGQATPLPVTSLSSVSTGDTTPLPVTDASSASTGHATPLPVTIPSSVSTGDTMPLPVTSPSSASTGHATPLPVTGLSSASTGDTTPLPVTDTSSASTRHATPLPVTDTSSASTDDTTRLPVTDVSSASTGHATPLPVTSTSSASTGDTTPLPVTDTSSVSTGHATSLPVTSRSSASTGHATPLPVTDTSSVSTGHATPLPVTSTSSVSTGHATPLPVTSPSSASTGHATPVPVTSTSSASTGDTTPLPVTNASSLSTGHATPLHVTSPSSASRGDTSTLPVTDASSASTGHATPLPLTSLSSVSTGDTTPLPVTDTSSASTGQATPLPVTSLSSVSTGDTTPLPVTIPSSASSGHTTSLPVTDASSVSTGHGTPLPVTSTSSASTGDTTPLPVTDTSSASTGHATPLPVTDTSSASTGHATPLPVTSLSSVSTGHATPLAVSSATSASTVSSDSPLKMETPGMTTPSLKTDGGRRTATSPPPTTSQTIISTIPSTAMHTRSTAAPIPILPERGVSLFPYGAGAGDLEFVRRTVDFTSPLFKPATGFPLGSSLRDSLYFTDNGQIIFPESDYQIFSYPNPLPTGFTGRDPVALVAPFWDDADFSTGRGTTFYQEYETFYGEHSLLVQQAESWIRKMTNNGGYKARWALKVTWVNAHAYPAQWTLGSNTYQAILSTDGSRSYALFLYQSGGMQWDVAQRSVEMAISKTAH

SEQ ID NO: 84761 - protein, 231 aa, Homo sapiens
MLVGQGAGPLGPAVVTAAVVLLLSGVGPAHGSEDIVVGCGGFVKSDVEINYSLIEIKLYTKHGTLKYQTDCAPNNGYFMIPLYDKGDFILKIEPPLGWSFEPTTVELHVDGVSDICTKGGDINFVFTGFSVNGKVLSKGQPLGPAGVQVSLRNTGTEAKIQSTVTQPGGKFAFFKVLPGDYEILATHPTWALKETESRSVAKTGVQWHDFGLLQPRPSVSKRVSGFSLLSS

SEQ ID NO: 84762 - protein, 245 aa, Homo sapiens
QELHLRPESHSYLPELGKSEMEFIESKRPRLELLPDPLLRPSPLLATGQPAGSEDLTKDRSLTGKLEPVSPPSPPHTDPELELVPPRLSKEELIQNMDRVDREITMVEQQISKLKKKQQQLEEEAAKPPEPEKPVSPPPIESKHRSLVQIIYDENRPLYNQPSDTRQYHENIKINQAMRKKLILYFKRRNHARKQWEQKFCQRYDQLMEAWEKKVERIENNPRRRAKESKVREYYEKQFPEIRKQ

SEQ ID NO: 84763 - protein, 102 aa, Homo sapiens
MTVELWLRLRGKGLAMLHVTRGVWGSRVRVWPLLPALLGPPRALSSLAAKMGEYRKMWNPREPRDWAQQYRERFIPFSKEQLLRLLIQRQDFTMLATLVLNS

SEQ ID NO: 84764 - protein, 86 aa, Homo sapiens
MLTLASKLKRDDGLKGSRTAATASDSTRRVSVRDKLLVKEVAELEANLPCTCKVHFPDPNKLHCFQLTVTPEFGWCDASLLTVPTE

SEQ ID NO: 84765 - protein, 144 aa, Homo sapiens
MSKIRGLPPEVREPGPGVELGVENGLLCQLIHSPEFNLFSNSVVFESNFIQVTKPGNWRDVCEGSATVILGVTSSVPSLPLPNVLLMANVTWPQGPFTTWSTPGDAPVINLSRAQWLTSVILALWEAEVGGSLEARSSRPTWAT

SEQ ID NO: 84766 - protein, 87 aa, Homo sapiens
MRRCSYFPKDVTVFDKDDKSEPIRVLVTGAAGQIAYSLLYSIGNGSVFGKDQMSSQQIKKTLPSKTWMWPFLWAPCQEGKAWREKIY

SEQ ID NO: 84767 - protein, 50 aa, Homo sapiens
  MOD_RES (1)..(1): Any amino acid
XTAPPRESPQYSPRKKITPLAHPPPSHQRQSGPDRGAGPSDHGQGPHQGP

SEQ ID NO: 84768 - protein, 103 aa, Homo sapiens
  MOD_RES (1)..(1): Any amino acid
XDIIVIKYNVNDKFSFHEVKDNYIPVIKRALNSVPVIIAAVGTRQNEELPCTCPLCTSDRGSCVSTTEGIQLAKELGATYLELHSLDDFYIGKYFGGVKKCLS

SEQ ID NO: 84769 - protein, 99 aa, Homo sapiens
MAAETQTLNFGPEWLRALSSGGSITSPPLSPALPKYKLADYRYGREEMLALFLKDNKIPSDLLDKEFLPILQEEPLPPLALVPFTEEEQRNFSMSVNSA

SEQ ID NO: 84770 - protein, 125 aa, Homo sapiens
MAEEYHRESMLVEWEQVKQRILHTLLASGEDALDFTQESEPSYISDVGPPGRSSLDNIEMAYARQIYIYNEKIVNGHLQPNLVDLCASVAELDDKSISDMWTMVKQMTDVLLTPATDALKNRSSV

SEQ ID NO: 84771 - protein, 291 aa, Homo sapiens
MELHILEHRVRVLSVARPGLWLYTHPLIKLLFLPRRSRCKFFSLTETPEDYTLMVDEEGFKELPPSEFLQVAEATWLVLNVSSHSGAAVQAAGVTKIARSVIAPLAEHHVSVLMLSTYQTDFILVREQDLSVVIHTLAQEFDIYREVGGEPVPVTRDDSSNGFPRTQHGPSPTVHPIQSPQNRFCVLTLDPETLPAIATTLIDVLFYSHRFPSDLLLTSSSGELWRMVRIGGQPLGFDECGIVAQIAGPLAAADISAYYISTFNFDHALVPEDGIGSVIEVLQRRQEGLAS

SEQ ID NO: 84772 - protein, 209 aa, Homo sapiens
MLAKLLCDQVVGAPIAVSAFYAGMSILQGKDDIFLDLKQKFWNTYMVVYVARNAKDVAVSYYHFYHMAKVYPHPGTWESFLEKFMAGEVSYGSWYQHVQEWWELSRTHPVLYLFYEDMKENPKREIQKILEFVGRSLPEETVDLMVEHTSFKEMKKNPMTNYTTVRREFMDHSISPFMRKGMAGDWKTTFTVAQNERFDADYAKKMAGC

SEQ ID NO: 84773 - protein, 148 aa, Homo sapiens
MTWRHHVRLLFTVSLALQIINLGNSYQREKHNGGREEVTKVATQKHRQSPLNWTSSHFGEVTGSAEGWGPEEPLPYSWAFGEDPKDFLASHAHGPSAGGAPSLLLLLPCALLHRLLRPDAPAHPRSLVPSVLQRERRPCGRPGLGHRL

SEQ ID NO: 84774 - protein, 57 aa, Homo sapiens
MDRMKKIKRQLSMTLRGGRGIDKTNGAPEQIGLDESGGGGGSDPGEAPTRAAPGELR

SEQ ID NO: 84775 - protein, 614 aa, Homo sapiens
MKAGRFEADEGTSVRFGAPRFGGSRAGPLSGKKFGNPGEKLVKKKWNLDELPKFEKNFYQEHPDLARRTAQEVETYRRSKEITVRGHNCPKPVLNFYEANFPANVMDVIARQNFTEPTAIQAQGWPVALSGLDMVGVAQTGSGKTLSYLLPAIVHINHQPFLERGDGPICLVLAPTRELAQQVQQVAAEYCRACRLKSTCIYGGAPKGPQIRDLERGVEICIATPGRLIDFLECGKTNLRRTTYLVLDEADRMLDMGFEPQIRKIVDQIRPDRQTLMWSATWPKEVRQLAEDFLKDYIHINIGALELSANHNILQIVDVCHDVEKDEKLIRLMEEIMSEKENKTIVFVETKRRCDELTRKMRRDGWPAMGIHGDKSQQERDWVLNEFKHGKAPILIATDVASRGLDVEDVKFVINYDYPNSSEDYIHRIGRTARSTKTGTAYTFFTPNNIKQVSDLISVLREANQAINPKLLQLVEDRGSGRSRGRGGMKDDRRDRYSAGKRGGFNTFRDRENYDRGYSSLLKRDFGAKTQNGVYSAANYTNGSFGSNFVSAGIQTSFRTGNPTGTYQNGYDSTQQYGSNVPNMHNGMNQQAYAYPATAAAPMIGYPMPTGYSQ

SEQ ID NO: 84776 - protein, 1773 aa, Homo sapiens
  MOD_RES (1)..(1): Any amino acid
XECQNAAQIYRKVTCGIKPASFEKVHDPEIKEIIGECICKNKEERYEIKDLLSHAFFAEDTGVRVELAEEDHGRKSTIALRLWVEDPKKLKGKPKDNGAIEFTFDLEKETPDEVAQEMIESGFFHESDVKIVAKSIRDRVALIQWRRERIWPALQPKEQQDVGSPDKARGPPVPLQVQVTYHAQAGQPGPPEPEEPEADQHLLPPTLPTSATSLASDSTFDSGQGSTVYSDSQSSQQSVMLGSLADAAPSPAQCVCSPPVSEGPVLPQSLPSLGAYQQPTAAPGLPVGSVPAPACPPSLQQHFPDPAMSFAPVLPPPSTPMPTGPGQPAPPGQQPPPLAQPTPLPQVLAPQPVVPLQPVPPHLPPYLAPASQVGAPAQLKPLQMPQAPLQPLAQVPPQMPPIPVVPPITPLAGIDGLPPALPDLPTATVPPVPPPQYFSPAVILPSLAAPLPPASPALPLQAVKLPHPPGAPLAMPCRTIVPNAPATIPLLAVAPPGVAALSIHSAVAQLPGQPVYPAAFPQMAPTDVPPSPHHTVQNMRATPPQPALPPQPTLPPQPVLPPQPTLPPQPVLPPQPTRPPQPVLPPQPMLPPQPVLPPQPALPVRPEPLQPHLPEQAAPAATPGSQILLGHPAPYAVDVAAQVPTVPVPPAAVLSPPLPEVLLPAAPELLPQFPSSLATVSASVQSVPTQTATLLPPANPPLPGGPGIASPCPTVQLTVEPVQEEQASQDKPPGLPQSCESYGGSDVTSGKELSDSCEGAFGGGRLEGRAARKHHRRSTRARSRQERASRPRLTILNVCNTGDKMVECQLETHNHKMVTFKFDLDGDAPDEIATYMVEHDFILQAERETFIEQMKDVMDKAEDMLSEDTDADRGSDPGTSPPHLSTCGLGTGEESRQSQANAPVYQQNVLHTGKRWFIICPVAEHPAPEAPESSPPLPLSSLPPEASQDSAPYKDQLSSKEQPSFLASQQLLSQAGPSNPPGAPPAPLAPSSPPVTALPQDGAAPATSTMPEPASGTASQAGGPGTPQGLTSELETSQPLAETHEAPLAVQPLVVGLAPCTPAPEAASTRDASAPREPLPPPAPEPSPHSGTPQPALGQPAPLLPAAVGAVSLATSQLPSPPLGPTVPPQPPSALESDGEGPPPRVGFVDSTIKSLDEKLRTLLYQEHVPTSSASAGTPVEVGDRDFTLEPLRGDQPRSEVCGGDLALPPVPKEAVSGRVQLPQPLVEKSELAPTRGAVMEQGTSSSMTAESSPRSMLGYDRDGRQVASDSHVVPSVPQDVPAFVRPARVEPTDRDGGEAGESSAEPPPSDMGTVGGQASHPQTLGARALGSPRKRPEQQDVSSPAKTVGRFSVVSTQDEWTLASPHSLRYSAPPDVYLDEAPSSPDVKLAVRRAQTASSIEVGVGEPVSSDSGDEGPRARPPVQKQASLPVSGSVAGDFVKKATAFLQRPSRAGSLGPETPSRVGMKVPTISVTSFHSQSSYISSDNDSELEDADIKKELQSLREKHLKEISELQSQQKQEIEALYRRLGKPLPPNVGFFHTAPPTGRRRKTSKSKLKAGKLLNPLVRQLKVVASSTGSSTSSLAPGPEPGPQPALHVQAQVNNSNNKKGTFTDDLHKLVDEWTSKTVGAAQLKPTLNQLKQTQKLQDMEAQAGWAAPGEARAMTAPRAGVGMPRLPPAPGPLSTTVIPGAAPTLSVPTPGTALSNLPTPPCALPLGQYRGLLPAPVSWGPWAGQVGQLGAQGSWNTPQVPVLPVFLQPPVVSMPGPRLRIT

SEQ ID NO: 84777 - protein, 81 aa, Homo sapiens
MLELRHRGSCPGPREAVSPPHREGEAAGGDHETESTSDKVEKLVDTWNSHSNYDLVVFPDHLYGILHADASCSGHPSEMLP

SEQ ID NO: 84778 - protein, 244 aa, Homo sapiens
GGGYDLNLFASPPDSNFVCSVCHGVLKRPARLPCSHIFCKKCILRWLARQKTCPCCRKEVKRKKVVHMNKLRKTIGRLEVKCKNADAGCIVTCPLAHRKGHQDSCPFELTACPNEGCTSQVPRGTLAEHRQHCQQGSQQRCPLGCGATLDPAERARHNCYRELHNAWSVRQERRRPLLLSLLRRVRWLDQATSVVRRELAELSNFLEEDTALLEGAPQEEAEAAPEGNVGAEVVGEPRANIPCK

SEQ ID NO: 84779 - protein, 238 aa, Homo sapiens
MKALILVGGYGTRLRPLTLSTPKPLVDFCNKPILLHQVEALAAAGVDHVILAVSYMSQVLEKEMKAQEQRLGIRISMSHEEEPLGTAGPLALARDLLSETADPFFVLNSDVICDFPFQAMVQFHRHHGQEGSILDPSARIGQNCSIGPNVSLGPGVVVEDGVCIRRCTVLRDARIRSHSWLESCIVGWRCRVGQWVRMENVTVLGEDVIVNDELYLNGASVLPHKSIGESVPEPRIIM

SEQ ID NO: 84780 - protein, 47 aa, Homo sapiens
MCDRKAVIKNADMSEEMQQDSVECATQALEKYNIEKDIAAHIKKELR

SEQ ID NO: 84781 - protein, 169 aa, Homo sapiens
MPKRSCPFADVAPLQLKVRVSQRELSRGVCAERYSQEVFEKTKRLLFLGAQAYLDHVWDEGCAVVHLPESPKPGPTGAPRAARGQMLIGPDGRLIRSLGQASEADPSGVASIACSSCVRAVDGKAVCGQCERALCGQCVRTCWGCGSVACTLCGLVEPALCWKEHDVGM

SEQ ID NO: 84782 - protein, 68 aa, Homo sapiens
MAASGSGMAQKTWELANNMQEAQSIDEIYKYDKKQQQEILAAKPWTKDKGRSQDFDSCLDFQHESPLL

SEQ ID NO: 84783 - protein, 1004 aa, Homo sapiens
MDSQELKTLINYYCQERYFHHVLLVASEGIKRYGSDPVFRFYHAYGTLMEGKTQEALREFEAIKNKQDVSLCSLLALIYAHKMSPNPDREAILESDARVKEQRKGAGEKALYHAGLFLWHIGRHDKAREYIDRMIKISDGSKQGHVLKAWLDITRGKEPYTKKALKYFEEGLQDGNDTFALLGKAQCLEMRQNYSGALETVNQIIVNFPSFLPAFVKKMKLQLALQDWDQTVETAQRLLLQDSQNVEALRMQALYYVCREGDIEKASTKLENLGNTLDAMEPQNAQLFYNITLAFSRTCGRSQLILQKIQTLLERAFSLNPQQSEFATELGYQMILQGRVKEALKWYKTAMTLDETSVSALVGFIQCQLIEGQLQDADQQLEFLNEIQQSIGKSAELIYLHAVLAMKKNKRQEEVINLLNDVLDTHFSQLEGLPLGIQYFEKLNPDFLLEIVMEYLSFCPMQPASPGQPLCPLLRRCISVLETVVRTVPGLLQTVFLIAKVKYLSGDIEAAFNNLQHCLEHNPSYADAHLLLAQVYLSQEKVKLCSQSLELCLSYDFKVRDYPLYHLIKAQSQKKMGEIADAIKTLHMAMSLPGMKRIGASTKSKDRKTEVDTSHRLSIFLELIDVHRLNGEQHEATKVLQDAIHEFSGTSEEVRVTIANADLALAQGDIERALSILQNVTAEQPYFIEAREKMADIYLKHRKDKMLYITCFREIAERMANPRSFLLLGDAYMNILEPEEAIVAYEQALNQNPKDGTLASKMGKALIKTHNYSMAITYYEAALKTGQKNYLCYDLAELLLKLKWYDKAEKVLQHALAHEPVNELSALMEDGRCQVLLAKVYSKMEKLGDAITALQQARELQARVLKRVQMEQPDAVPAQKHLAAEICAEIAKHSVAQRDYEKAIKFYREALVHCETDNKIMLELARLYLAQDDPDSCLRQCALLLQSDQDNEAATMMMADLMFRKQDYEQAVFHLQQLLERKPVMLKGVVNKISGPKIVCQGDK

SEQ ID NO: 84784 - protein, 491 aa, Homo sapiens
MMFYRLLSIVGRQRASPGWQNWSSARNSTSAAEARSMALPTQAQVVICGGGITGTSVAYHLSKMGWKDIVLLEQGRLAAGSTRFCAGILSTARHLTIEQKMADYSNKLYYQLEQETGIQTGYTRTGSIFLAQTQDRLISLKRINAGLNVIGIPSEIISPKKVAELHHLLNVHDLVGAMHVPEDAVVSSADVALALASAASQNGVQIYDRTSVLHVMVKKGQVTGVETDKGQIECQYFVNCAGQWAYELGLSNEEPVSIPLHACEHFYLLTRPLETPLQSSTPTIVDADGRIYIRNWQGGILSGGFEKNPKPIFTEGKNQLEIQNLQEDWDHFEPLLSSLLRRMPELETLEIMKLVNCPETFTPDMRCIMGESPAVQGYFVLAGMNSAGLSFGGGAGKYLAEWMVHGYPSENVWELDLKRFGALQSSRTFLRHRVMEVMPLMYDLKVPRWDFQTGRQLRTSPLYDRLDAQGARWMEKHGFERPKYFVPPDKG

SEQ ID NO: 84785 - protein, 172 aa, Homo sapiens
MQLFLLLCLVLLSPQGASLHRHHPREMKKRVEDLHVGATVAPSSRRDFTFDLYRALASAAPSQSIFFSPVSISMSLAMLSLGAGSSTKMQILEGLGLNLQKSSEKELHRGFQQLLQELNQPRDGFQLSLGNALFTDLVVDLQDTFVSAMKTLYLADTFPTNFRDSAGAMKQI

SEQ ID NO: 84786 - protein, 52 aa, Homo sapiens
MRQLKGKPKKETSKDKKERKQAMQEARQQITTVVLPTLAVVVLLIVVFVYVA

SEQ ID NO: 84787 - protein, 186 aa, Homo sapiens
MCRRLSDGVRPPIMNGPLHPRPLVALLDGRDCTVEMPILKDVATVAFCDAQSTQEIHEKVLNEAVGALMYHTITLTREDLEKFKALRIIVRIGSGFDNIDIKSAGDLGIAVCNVPAASVEETADSTLCHILNLYRRATWLHQALREGTRVQSVEQIREVASGAARIRGETLGIIGLGRVGQAVALR

SEQ ID NO: 84788 - protein, 150 aa, Homo sapiens
MANNDAVLKRLEQKGAEADQIIEYLKQQVSLLKEKAILQATLREEKKLRVENAKLKKEIEELKQELIQAEIQNGVKQIPFPSGTPLHANSMVSENVIQSTAVTTVSSGTKEQIKGGTGDEKKAKEKIEKKGEKKEKKQQSIAGSADSKPI

SEQ ID NO: 84789 - protein, 179 aa, Homo sapiens
MLRWLIGGGREPQGLAETIGEEQTQNPYTELLVLKAHHDIVRFLVQLDDYRFASAGDDGIVVVWNAQTGEKLLELNGHTQKITAIITFPSLESCEEKNQLILTASADRTVIVWDGDTTRQVQRISCFQSTVKCLTVLQRLDVWLSGGNDLCVWNRKLDLLCKTSHLSDTGISALVEIPK

SEQ ID NO: 84790 - protein, 63 aa, Homo sapiens
  MOD_RES (1)..(1): Any amino acid
XEECKSPKAECWSQKMSNKQPNSGIENFLASLNISKENEVQSSHHGEPPSEEHLSPQSFAMKR

SEQ ID NO: 84791 - protein, 144 aa, Homo sapiens
MLLLEVISGERLAKPERGKMRVHKISNVNKALDFIASKGVKLVSIGAEEIVDGNVKMTLGMIWTIILRFAIQDISVEETSAKEGLLLWCQRKTAPYKNVNIQNFHISWKDGLGFCALIHRHRPELIDYGKLRKDDPLTNLNTAF

SEQ ID NO: 84792 - protein, 2717 aa, Homo sapiens
NCRICIECGTRSSSQWHHNCLICDNCYQQQDNLCPFCGKCYHPELQKDMLHCNMCKRWVHLECDKPTDHELDTQLKEEYICMYCKHLGAEMDRLQPGEEVEIAELTTDYNNEMEVEGPEDQMVFSEQAANKDVNGQESTPGIVPDAVQVHTEEQQKSHPSESLDTDSLLIAVSSQHTVNTELEKQISNEVDSEDLKMSSEVKHICGEDQIEDKMEVTENIEVVTHQITVQQEQLQLLEEPETVVSREESRPPKLVMESVTLPLETLVSPHEESISLCPEEQLVIERLQGEKEQKENSELSTGLMDSEMTPTIEGCVKDVSYQGGKSIKLSSETESSFSSSADISKADVSSSPTPSSDLPSHDMLHNYPSALSSSAGNIMPTTYISVTPKIGMGKPAITKRKFSPGRPRSKQGAWSTHNTVSPPSWSPDISEGREIFKPRQLPGSAIWSIKVGRGSGFPGKRRPRGAGLSGRGGRGRSKLKSGIGAVVLPGVSTADISSNKDDEENSMHNTVVLFSSSDKFTLNQDMCVVCGSFGQGAEGRLLACSQCGQCYHPYCVSIKITKVVLSKGWRCLECTVCEACGKATDPGRLLLCDDCDISYHTYCLDPPLQTVPKGGWKCKWCVWCRHCGATSAGLRCEWQNNYTQCAPCASLSSCPVCYRNYREEDLILQCRQCDRWMHAVCQNLNTEEEVENVADIGFDCSMCRPYMPASNVPSSDCCESSLVAQIVTKVKELDPPKTYTQDGVCLTESGMTQLQSLTVTVPRRKRSKPKLKLKIINQNSVAVLQTPPDIQSEHSRDGEMDDSRGELMDCDGKSESSPEREAVDDETKGVEGTDGVKKRKRKPYRPGIGGFMVRQRSRTGQGKTKRSVIRKDSSGSISEQLPCRDDGWSEQLPDTLVDESVSVTESTEKIKKRYRKRKNKLEETFPAYLQEAFFGKDLLDTSRQSKISLDNLSEDGAQLLYKTNMNTGFLDPSLDPLLSSSSAPTKSGTHGPADDPLADISEVLNTDDDILGIISDDLAKSVDHSDIGPVTDDPSSLPQPNVNQSSRPLSEEQLDGILSPELDKMVTDGAILGKLYKIPELGGKDVEDLFTAVLSPANTQPTPLPQPPPPTQLLPIHNQDAFSRMPLMNGLIGSSPHLPHNSLPPGSGLGTFSAIAQSSYPDARDKNSAFNPMASDPNNSWTSSAPTVEGENDTMSNAQRSTLKWEKEEALGEMATVAPVLYTNINFPNLKEEFPDWTTRVKQIAKLWRKASSQERAPYVQKARDNRAALRINKVQMSNDSMKRQQQQDSIDPSSRIDSELFKDPLKQRESEHEQEWKFRQQMRQKSKQQAKIEATQKLEQVKNEQQQQQQQQFGSQHLLVQSGSDTPSSGIQSPLTPQPGNGNMSPAQSFHKELFTKQPPSTPTSTSSDDVFVKPQAPPPPPAPSRIPIQDSLSQAQTSQPPSPQVFSPGSSNSRPPSPMDPYAKMVGTPRPPPVGHSFSRRNSAAPVENCTPLSSVSRPLQMNETTANRPSPVRDLCSSSTTNNDPYAKPPDTPRPVMTDQFPKSLGLSRSPVVSEQTAKGPIAAGTSDHFTKPSPRADVFQRQRIPDSYARPLLTPAPLDSGPGPFKTPMQPPPSSQDPYGSVSQASRRLSVDPYERPALTPRPIDNFSHNQSNDPYSQPPLTPHPAVNESFAHPSRAFSQPGTISRPTSQDPYSQPPGTPRPVVDSYSQSSGTARSNTDPYSQPPGTPRPTTVDPYSQQPQTPRPSTQTDLFVTPVTNQRHSDPYAHPPGTPRPGISVPYSQPPATPRPRISEGFTRSSMTRPVLMPNQDPFLQAAQNRGPALPGPLVRPPDTCSQTPRPPGPGLSDTFSRVSPSAARDPYDQSPMTPRSQSDSFGTSQTAHDVADQPRPGSEGSFCASSNSPMHSQGQQFSGVSQLPGPVPTSGVTDTQNTVNMAQADTEKLRQRQKLREIILQQQQQKKIAGRQEKGSQDSPAVPHPGPLQHWQPENVNQAFTRPPPPYPGNIRSPVAPPLGPRYAVFPKDQRGPYPPDVASMGMRPHGFRFGFPGGSHGTMPSQERFLVPPQQIQGSGVSPQLRRSVSVDMPRPLNNSQMNNPVGLPQHFSPQSLPVQQHNILGQAYIELRHRAPDGRQRLPFSAPPGSVVEASSNLRHGNFIPRPDFPGPRHTDPMRRPPQGLPNQLPVHPDLEQVPPSQQEQGHSVHSSSMVMRTLNHPLGGEFSEAPLSTSVPSETTSDNLQITTQPSDGLEEKLDSDDPSVKELDVKDLEGVEVKDLDDEDLENLNLDTEDGKVVELDTLDNLETNDPNLDDLLRSGEFDIIAYTDPELDMGDKKSMFNEELDLPIDDKLDNQCVSVEPKKKEQENKTLVLSDKHSPQKKSTVTNEVKTEVLSPNSKVESKCETEKNDENKDNVDTPCSQASAHSDLNDGEKTSLHPCDPDLFEKRTNRETAGPSANVIQASTQLPAQDVINSCGITGSTPVLSSLLANEKSDNSDIRPSGSPPPPTLPASPSNHVSSLPPFIAPPGRVLDNAMNSNVTVVSRVNHVFSQGVQVNPGLIPGQSTVNHSLGTGKPATQTGPQTSQSGTSSMSGPQQLMIPQTLAQQNRERPLLLEEQPLLLQDLLDQERQEQQQQRQMQAMIRQRSEPFFPNIDFDAITDPIMKAKMVALKGINKVMAQNNLGMPPMVMSRFPFMGQVVTGTQNSEGQNLGPQAIPQ

SEQ ID NO: 84793 - protein, 485 aa, Homo sapiens
MGEVEAPGRLWLESPPGGAPPIFLPSDGQALVLGRGPLTQVTDRKCSRTQVELVADPETRTVAVKQLGVNPSTTGTQELKPGLEGSLGVGDTLYLVNGLHPLTLRWEETRTPESQPDTPPGTPLVSQDEKRDAELPKKRMRKSNPGWENLEKLLVFTAAGVKPQGKVAGFDLDGTLITTRSGKVFPTGPSDWRILYPEIPRKLRELEAEGYKVLVATHAGLYRKPVTGMWDHLQEQANDGTPISIGDSIFVGDAAGRPANWAPGRKKKDFSCADRLFALNLGLPFATPEEFFLKWPAAGFELPAFDPRTVSRSGPLCLPESRALLSASPEVVVAVGFPGAGKSTFLKKHLVSAGYVHVNRDTLGSWQRCVTTCETALKQGKRVAIDNTNPDAASRARYVQCARAAGVPCRCFLFTATLEQARHNNRFREMTDSSHIPVSDMVMYGYRKQFEAPTLAEGFSAILEIPFRLWVEPRLGRLYCQFSEG

SEQ ID NO: 84794 - protein, 315 aa, Homo sapiens
MASARGGTGSVGLAAAPVRGRRENKQGGAGPGMKLGRAVLGLLLLAPSVVQAVEPISLGLALAGVLTGYIYPRLYCLFAECCGQKRSLSREALQKDLDDNLFGQHLAKKIILNAVFGFINNPKPKKPLTLSLHGWTGTGKNFVSKIIAENIYEGGLNSDYVHLFVATLHFPHASNITLYKDQLQLWIRGNVSACARSIFIFDEMDKMHAGLIDAIKPFLDYYDLVDGVSYQKAMFIFLSNAGAERITDVALDFWRSGKQREDIKLKDIEHALSVSVFNNKNNSFTLSPRLECSGVTLPHCNLCLPGSSDSCASAS

SEQ ID NO: 84795 - protein, 123 aa, Homo sapiens
MVSWKGIYFILTLFWGSFFGSIFMLSPFLPLMFVNPSWYRWINNRLVATWLTLPVALLETMFGVKVIITGDAFVPGERSVIIMNHRTRMDWMFLWNCLMRYSYLRLEKICLKASLKGVPGFGR

SEQ ID NO: 84796 - protein, 172 aa, Homo sapiens
MLGAQWRRNQPSRAAEVSGPGGKHAAGQGPRVRREILGEEEWSQHINGASHSRRCQLLLEIYPEWNPDNDTGHTMGDPFMLQQSTNPAPGILGPPPPSFHLGGPAVGPRGNLGAGNGNLQGPRHMQKGRVETSRVVHIMDFQRGKNLRYQLLQLVEPFGVISNHLILNKINE

SEQ ID NO: 84797 - protein, 44 aa, Homo sapiens
  MOD_RES (1)..(1): Any amino acid
XGAGRGAAVSRVQAGPGSPRRARGRQQVQPLGKQRPAPWPGLRR

SEQ ID NO: 84798 - protein, 125 aa, Homo sapiens
PVQPAFSTVPFSQPVCFPPRPRGRRQKTQTVIHTVQSAPGQMFSTPAIPPMMYPHPAYPMPFITTILGGLYPSKSILLSGTVLPSAQRFHINLCSGNHIAFHLNPRFDENAVVRNTQIDNSWGSE

SEQ ID NO: 84799 - protein, 137 aa, Homo sapiens
MALPQGLLTFRDVAIEFSQEEWKCLDPAQRTLYRDVMLENYRNLVSLVRRSEVCCTDIWAEVIVADISSKCMLKTLSSTGQGNTEVIHTGTLHRQASHHIGEFCFHEIEKDIHGFEFQWKEDETNGHAAPMTEIKEL

SEQ ID NO: 84800 - protein, 44 aa, Homo sapiens
KVLIGAVPTCMILAGLCILMVGSTPKTPSRDASSRLSLRRVLHH

SEQ ID NO: 84801 - protein, 147 aa, Homo sapiens
MECLCAHPPAGLQHLGLGHNKLLGPLESLYVTANHWPNLVSLDLGFNDLTDLQSMVTSLRTLRHLRLLVLQGNPLALVPYYRGLTIDSLAQLCVLDDITVSPNEKHLFRGLSLNGDLLAQEAQFVVTIGNIRGVLDTSVLDPEPRPE

SEQ ID NO: 84802 - protein, 577 aa, Homo sapiens
MKIKSSWDIDGRATKRRKKSGDLKKAKVQVERMREVNSRCYQPEPFACGIEHCSVHYVSDSGDGVYAGRPLSVIQMVAFLEQRASALLASCSKNCTNSPAIVRFSGQSRGVPAVSESYSAPGACEEPTERGNLEVGEPQSEPVRVLDMVAKLESECLKRQGQREPGSLSRNNSFRRNVGRVLLANSTQADEGKTKKGVLEAPDTQVNPVGSVSVDCGPSRADRCSPKEDQAWDGASQDCPPLPAGVSFHIDSAELEPGSQTAVKNSNRYDVEMTDELVGLPFSSHTYSQASELPTDAVDCMSRELVSLTSRNPDQRKESLCISITVSKVDKDQPSILNSCEDPVPGMLFFLPPGQHLSDYSQLNESTTKESSEASQLEDAAGGDSASEEKSGSAEPFVLPASSVESTLPVLEASSWKKQVSHDFLETRFKIQQLLEPQQYMAFLPHHIMVKIFRLLPTKSLVALKCTCCYFKFIIEYYNIRPADSRWVRDPRYREDPCKQCKKKYVKGDVSLCRWHPKPYCQALPYGPGYWMCCHRSQKGFPGCKLGLHDNHWVPACHSFNRAIHKKAKGTEAEEEY

SEQ ID NO: 84803 - protein, 169 aa, Homo sapiens
MGRGWGFLFGLLGAVWLLSSGHGEEQPPETAAQRCFCQVNLKRPCPFWNDISQCGRRDCAVKPCQSDEVPDGIKSASYKYSEEANNLIEECEQAERLGAVDESLSEETQKAVLQWTKHDDSSDNFCEADDIQSPEAEYVDLLLNPERYTGYKGPDAWKIWNVIYEENCF

SEQ ID NO: 84804 - protein, 100 aa, Homo sapiens
MSRPLITRSPASPLNNQGIPTPAQLTKSNAPVHIDVGGHMYTSSLATLTKYPESRTTLCYMKRQNIFSFSPCCWRWKDGSRTEKLVDFQGPVSASSCVWP

SEQ ID NO: 84805 - protein, 181 aa, Homo sapiens
MAPSPRTGSRQDATALPSMSSTFWAFMILASLLIAYCSQLAAGTCEIVTLDRDSSQPRRTIARQTARCACRKGQIAGTTRARPACVDARIIKTKQWCDMLPCLEGEGCDLLINRSGWTCTQPGGRIKTTTSPSKPPKRAPPGIPSCRQRAGGSLGSRDLRTSLLCQGSHLADRRRWLRPSQ

SEQ ID NO: 84806 - protein, 113 aa, Homo sapiens
MFILFPVCGSKFKSNSDREARERKRRRQLRASVFALALPLSLGPCWALWVAVPKASATIRGPQRRLLASLLQENTEILGYLLGSVAAFGSWASRIPPLSRIVRPGVGMGLWVT

SEQ ID NO: 84807 - protein, 197 aa, Homo sapiens
QLFSRSCPRVLPRQPSTAMAAYGQTQYSAGIQQATPYTAYPPPAQAYGIPSYSIKTEDSLNHSPGQSGFLSYGSSFSTSPTGQSPYTYQMHGEYNTHNGPSTPAKEGDTDRPHRASDGKLRGRSKRSSDPSPAGDNEIERVFVWDLDETIIIFHSLLTGTFASRYGKDTTTSVRIGLMMEEMIFNLADTHLFFNDLE

SEQ ID NO: 84808 - protein, 71 aa, Homo sapiens
MVLPQGLLTFRDVAIEFSQEEWKCLDPAQRTLYRDVMLENYRNLVSLGSPSDAEPKLDGTAAILAHCNLPA

SEQ ID NO: 84809 - protein, 61 aa, Homo sapiens
MDRGEQGRRRNPDSVSSVSSKREASSRDQAETWNQFSTGTKTEHCQRVARRDSNICLQEDI

SEQ ID NO: 84810 - protein, 146 aa, Homo sapiens
MAAETLLSSLLGLLLLGLLLPASLTGGVGSLNLEELSEMRYGIEILPLPVMGGQSQSSDVVIVSSKYKQRYECRLPAGAIHFQREREEETPAYQGPGIPELLSPMRDAPCLLKTKDWWTYEFCYGRHIQQYHMEDSEIKGLQAASS

SEQ ID NO: 84811 - protein, 51 aa, Homo sapiens
MATPASAPDTRALVADFVGYKLRQKGYVCGAGPGEGPAADPLHQAMRAAGD

SEQ ID NO: 84812 - protein, 713 aa, Homo sapiens
MDLLTRENVALKVESAQQPKQVLKMEVAVLKKLQGKDHVCRFIGCGRNEKFNYVVMQLQGRNLADLRRSQPRGTFTLSTTLRLGKQILESIEAIHSVGFLHRDIKPSNFAMGRLPSTYRKCYMLDFGLARQYTNTTGDVRPPRNVAGFRGTVRYASVNAHKNREMGRHDDLWSLFYMLVEFAVGQLPWRKIKDKEQVGMIKEKYEHRMLLKHMPSEFHLFLDHIASLDYFTKPDYQLIMSVFENSMKERGIAENEAFDWEKAGTDALLSTSTSTPPQQNTRQTAAMFGVVNVTPVPGDLLRENTEDVLQGEHLSDQENAPPILPGRPSEGLGPSPHLVPHPGGPEAEVWEETDVNRNKLRINIGKSPCVEEEQSRGMGVPSSPVRAPPDSPTTPVRSLRYRRVNSPESERLSTADGRVELPERRSRMDLPGSPSRQACSSQPAQMLSVDTGHADRQASGRMDVSASVEQEALSNAFRSVPLAEEEDFDSKEWVIIDKETELKDFPPGAEPSTSGTTDEEPEELRPLPEEGEERRRLGAEPTVRPRGRSMQALAEEDLQHLPPQPLPPQLSQGDGRSETSQPPTPGSPSHSPLHSGPRPRRRESDPTGPQRQLEEDRLSGHSLPRYSPLRRLASSVFSSSTLETEHYPHPGGGGSSGSSGSLIQRSRSAESSPVRAPHRRHAPLAAGNHRLMPSVLRISRSQLQQVWARFTHKT

SEQ ID NO: 84813 - protein, 95 aa, Homo sapiens
MSASQDSRSRDNGPDGMEPEGVIESNWNEIVDSFDDMNLSESLLRGIYAYGFEKPSAIQQRAILPCIKDTEGGHGTRRLHGRLLSRLYRGHQRAC

SEQ ID NO: 84814 - protein, 169 aa, Homo sapiens
MINKSEKPESCDNVKVVVRCRPLNEREKSMCYKQAVSVDEMRGTITVHKTDSSNEPPKTFTFDTVFGPESKQLDVYNLTARPIIDSVLEGYNGTIFAYGQTGTGKTFTMEGVRAIPELRGIIPNSFAHIFGHIAKAEGDTRFLVRVSYLEIYNEEVRDLLGKDQTQRLE

SEQ ID NO: 84815 - protein, 73 aa, Homo sapiens
MAASAAAAELQASGGPRHPVCLLVLGMAGSGKTTFVQRLTGHLHAQGTPPYVINLDPAVHEVPFPANIGDEIY

SEQ ID NO: 84816 - protein, 266 aa, Homo sapiens
MSFLVSKPERIRTNDASSESIASFSKQEVMSSFLPEGGCYELLTVIGKGFEDLMTVNLARYKPTGEYVTVRRINLEACSNEMVTFLQGELHVSKLFNHPNIVPYRATFIADNELWVVTSFMAYGSAKDLICTHFMDGMNELAIAYILQGVLKALDYIHHMGYVHRSVKASHILISVDGKVYLSGLRSNLSMISHGQRQRVVHDFPKYSVKVLPWLSPEVLQQNLQGYDAKSDIYSVGITACELANGHVPFKDMPATQGEDSTVKGI

SEQ ID NO: 84817 - protein, 464 aa, Homo sapiens
MSSRPLESPPPYRPDEFKPNHYAPSNDIYGGEMHVRPMLSQPAYSFYPEDEILHFYKWTSPPGVIRILSMLIIVMCIAIFACVASTLAWDRGYGTSLLGGSVGYPYGGSGFGSYGSGYGYGYGYGYGYGGYTDPRAAKGFMLAMAAFCFIAALVIFVTSVIRSEMSRTRRYYLSVIIVSAILGIMVFIATIVYIMGVNPTAQSSGSLYGSQIYALCNQFYTPAATGLYVDQYLYHYCVVDPQEAIAIVLGFMIIVAFALIIFFAVKTRRKMDRYDKSNILWDKEHIYDEQPPNVEEWVKNVSAGTQDVPSPPSDYVERVDSPMAYSSNGKVNDKRFYPESSYKSTPLVTAAVVTLRHLQKEHLQREEQEGQREQSKITMRQTTQLAASPVMSWRRTGSGNIHLSLQINKDNCTRGILTLAYRNTRAYNQNLMRSIKNSPVWIKNWMTIEKKVKSTWLLLMNTID

SEQ ID NO: 84818 - protein, 95 aa, Homo sapiens
MGPLRESKKEHRVQHHDKEISRSRIPRLILRPHMPQQQHKVSPASESPFSEEESREFNPSSSGRSARTVSSNSFCSDDTGCPSSQSVSPVKTPSD

SEQ ID NO: 84819 - protein, 56 aa, Homo sapiens
MNLTENGVGEVSIKSRFPGEDHRLDFGHGDSQMSQDGYVTQTGGHKGGLCVERTGG

SEQ ID NO: 84820 - protein, 571 aa, Homo sapiens
MVSANNMPKQVEVRMHDSHLGSEEPKHRHLGLRLCDKLGKNLLLTLTVFGVILGAVCGGLLRLASPIHPDVVMLIAFPGDILMRMLKMLILPLIISSLITGLSGLDAKASGRLGTRAMVYYMSTTIIAAVLGVILVLAIHPGNPKLKKQLGPGKKNDEVSSLDAFLDLIRNLFPENLVQACFQQIQTVTKKVLVAPPPDEEANATSAVVSLLNETVTEVPEETKMVIKKGLEFKDGMNVLGLIGFFIAFGIAMGKMGDQAKLMVDFFNILNEIVMKLVIMIMWYSPLGIACLICGKIIAIKDLEVVARQLGMYMVTVIIGLIIHGGIFLPLIYFVVTRKNPFSFFAGIFQAWITALGTASSAGTLPVTFRCLEENLGIDKRVTRFVLPVGATINMDGTALYEAVAAIFIAQMNGVVLDGGQIVTVSLTATLASVGAASIPSAGLVTMLLILTAVGLPTEDISLLVAVDWLLDRMRTSVNVVGDSFGAGIVYHLSKSELDTIDSQHRVHEDIEMTKTQSIYDDMKNHRESNSNQCVYAAHNSVIVDECKVTLAANGKSADCSVEEEPWKREK

SEQ ID NO: 84821 - protein, 128 aa, Homo sapiens
MYQVSGQRPSGCDAPYGAPSAAPGPAQTLSLLPGLEVVTGSTHPAEAAPEEGSLEEAATPMPQGNGPGIPQGLDSTDLDVPTEAVTCQPQGNPLGCTPLLPNDSGHPSELGGTRRAGNGALGGPKAHR

SEQ ID NO: 84822 - protein, 78 aa, Homo sapiens
MSSRRGSFLSTKLHCSSCLPCPLSFEKFKPSEKLQEHEAKGSSSLYCGLSLRGSCIGQRDAVQQTDHCGHFGADFPTV

SEQ ID NO: 84823 - protein, 123 aa, Homo sapiens
MTAPVPAPRILLPLLLLLLLTPPPGARGEVCMASRGLSLFPESCPDFCCGTCDDQYCCSDVLKKFVWSEERCAVPEASVPASVEPVEQLGSALRFRPGYNDPMSGFELGQQGGDSAEQAPRGA

SEQ ID NO: 84824 - protein, 140 aa, Homo sapiens
MADDAGLETPLCSEQFGSGEARGCRAAADGSLQWEVGGWRWWGLSRAFTVKPEGRDAGEVGASGAPSPPLSGLQAVFLPQGFPDSVSPDYLPYQLWDSVQIQLACWAASSLPGGKVHRECCWWGHSGCPDRAPGSEEQHG

SEQ ID NO: 84825 - protein, 108 aa, Homo sapiens
KDELYLNLVLEYVPETVYRVARHFTKAKLTIPILYVKTGSLSPTLECSGAISAHCNLRLLSSSDSSASASRVAGITGVHVPALPQLGLHPLPGRVSPRHQAPEPAGGP

SEQ ID NO: 84826 - protein, 1321 aa, Homo sapiens
MEGTHCTLQLHKPITELCYISFCLPKGEVRGFSYKGTVTLDRSNKGFHNCYQVREESDIISLSQEPDEHPGDIFFKQTPTKDILTELYKLTTERERLLTNLLSSDHILGITMGNQEGKLQELSVSLAPEDDCFQSAGDWQGELPVGPLNKRSTHGNKKPRRSSGRRESFGALPQKRTKRKGRGGRESAPLMGKDKICSSHSLPLSRTRPNLWVLEEKGNLLPNGALACSLQRRESCPPDIPKTPDTDLGFGSFETAFKDTGLGREVLPPDCSSTEAGGDGIRRPPSGLEHQQTGLSESHQDPEKHPEAEKDEMEKPAKRTCKQKPVSKVVAKVQDLSSQVQRVVKTHSKGKETIAIRPAAHAEFVPKADLLTLPGAEAGAHGSRRQGKERQGDRSSQSPAGETASISSVSASAEGAVNKVPLKVIESEKLDEAPEGKRLGFPVHTSVPHTRPETRNKRRAGLPLGGHKSLFLDLPHKVGPDSSQPRGDKKKPSPPAPAALGKVFNNSASQSSTHKQTSPVPSPLSPRLPSPQQHHRILRLPALPGEREAALNDSPCRKSRVFSGCVSADTLEPPSSAKVTETKGASPAFLRAGQPRLVPGETLEKSLGPGKTTAEPQHQSPPEYQAAILHLKREHKEEIENLQAQFELRAFHIRGEHAMITARLEETIENLKHELEHRWRGGCEERKDVCISTDDDCPPKTFRNVCVQTDRETFLKPCESESKTTRSNQLVPKKLNISSLSQLSPPNDHKDIHAALQPMEGMASNQQKALPPPPASIPPPPPLPSGLGSLSPAPPMPPVSAGPPLPPPPPPPPPLPPPSSAGPPPPPPPPPLPNSPAPPNPGGPPPAPPPPGLAPPPPPGLFFGLGSSSSQCPRKPAIEPSCPMKPLYWTRIQISDRSQNATPTLWDSLEEPDIRDPSEFEYLFSKDTTQQKKKPLSETYEKKNKVKKIIKLLDGKRSQTVGILISSLHLEMKDIQQAIFNVDDSVVDLETLAALYENRAQEDELVKIRKYYETSKEEELKLLDKPEQFLHELAQIPNFAERAQCIIFRSVFSEGITSLHRKVEIITRASKDLLHVKSVKDILALILAFGNYMNGGNRTRGQADGYSLEILPKLKDVKSRDNGINLVDYVVKYYLRYYDQEAGTEKSVFPLPEPQDFFLASQVKFEDLIKDLRKLKRQLEASEKQMVVVCKESPKEYLQPFKDKLEEFFQKAKKEHKMEESHLENAQKSFETTVRYFGMKPKSGEKEITPSYVFMVWYEFCSDFKTIWKRESKNISKERLKMAQESVSKLTSEKKVETKKINPTASLKERLRQKEASVTTN

SEQ ID NO: 84827 - protein, 377 aa, Homo sapiens
MEVLRPQLIRIDGRNYRKNPVQEQTYQHEEDEEDFYQGSMECADEPCDAYEVEQTPQGFRSTLRAPSLLYKHIVGKRGDTRKKIEMETKTSISIPKPGQDGEIVITGQHRNGVISARTRIDVLLDTFRRKQPFTHFLAFFLNEVEVQEGFLRFQEEVLAKCSMNTGGRVRWLTPVIPALWEAEDHGVDSSIFQNPKKLHLTIGMLVLLSEEEIQQTCEMLQQCKEEFINDISGGKPLEVEMAGIEYMNDDPGMVDVLYAKVHMKDGSNRLQELVDRVLERFQASGLIVKEWNSVKLHATVMNTLFRKDPNAEGRYNLYTAEGKYIFKERESFDGRNILKLFENFYFGSLKLNSIHISQRFTVDSFGNYASCGQIDFS

SEQ ID NO: 84828 - protein, 194 aa, Homo sapiens
MAVNVYSTSITQETMSRHDIIAWVNDIVSLNYTKVEQLCSGAAYCQFMDMLFPGCISLKKVKFQAKLEHEYIHNFKLLQASFKRMNVDKVIPVEKLVKGRFQDNLDFIQWFKKFYDANYDGKEYDPVEARQGQDAIPPPDPGEQIFNLPKKSHHANSPTAGAAKSSPAAKPGSTPSRPSSAKRASSSGSASKSD

SEQ ID NO: 84829 - protein, 425 aa, Homo sapiens
MVFMSLHFLYYCSEPTLDVKIAFCQGFDKQVDVSYIAKHYNMSKSKVDNQFYSVEVGDSTFTVLKRYQNLKPIGSGAQGIVCAAYDAVLDRNVAIKKLSRPFQNQTHAKRAYRELVLMKCVNHKNIISLLNVFTPQKTLEEFQDVYLVMELMDANLCQVIQMELDHERMSYLLYQMLCGIKHLHSAGIIHRDLKPSNIVVKSDCTLKILDFGLARTAGTSFMMTPYVVTRYYRAPEVILGMGYKENVDIWSVGCIMGEMVRHKILFPGRDYIDQWNKVIEQLGTPCPEFMKKLQPTVRNYVENRPKYAGLTFPKLFPDSLFPADSEHNKLKASQARDLLSKMLVIDPAKRISVDDALQHPYINVWYDPAEVEAPPPQIYDKQLDEREHTIEEWKELIYKEVMNSEEKTKNGVVKGQPSPSAQVQQ

SEQ ID NO: 84830 - protein, 183 aa, Homo sapiens
NNFLHFTNEETEAGTGEGDAGSRTCPSWGQKLTQLTKITRTGPSAWETKKILAVSFAPLIQPCHSESGKSRLVQLPPVAVRSLQDLARIAIRGTIKKIIHQETVSKNGNGLKNTPRFKRRRVRRRRMETIVFLDKEVFASRISNPSDDNSCEDLEEERREEEEKTPPETKPDPPVNFLRQKVL

SEQ ID NO: 84831 - protein, 122 aa, Homo sapiens
MAPGSRGERSSFRSRRGPGVPSPQPDVTMLSRLLKEHQAKQNERKELQEKRRREAITAATCLTEALVDHLNVGVAQAYMNQRKLDHEVKTLQVQAAQFAKQTGQWIGMVENFNQALKGFLVW

SEQ ID NO: 84832 - protein, 290 aa, Homo sapiens
  MOD_RES (1)..(1): Any amino acid
XRPEQLGDICVGNVLQPGAGAIMARIAQFLSDIPETVPLSTVNRQCSSGLQAVASIAGGIRNGSYDIGMACGITSENVAERFGISREKQDTFALASQQKAARAQSKGCFQAEIVPVTTTVHDDKGTKRSITVTQDEGIRPSTTMEGLAKLKPAFKKDGSTTAGNSSQVSDGAAAILLARRSKAEELGLPILGVLRSYAVVGVPPDIMGIGPAYAIPVALQKAGLTVSDVDIFEINEAFASQAAYCVEKLRLPPEKVNPLGGAVALGHPLGCTGARQVITLLNELKRRGKR

SEQ ID NO: 84833 - protein, 142 aa, Homo sapiens
  MOD_RES (1)..(1): Any amino acid
XLVQLWAICMLRVALATVYFQEEFLDGEHWRNRWLQSTNDSRFGHFRLSSGKFYGHKEKDKGPDICGFDIKKVHVILHFKNKYHENKKLIRCKVDGFTHLYTLILRPDLSYDVKIDGQSIESGSIEYDWNLTSLKKETSPAE

SEQ ID NO: 84834 - protein, 133 aa, Homo sapiens
MEKLTFYAVSAPEKLDRIGSYLAERLSRDVVRHRSGYVLIAMEALDQLLMACHSQSIKPFVESFLHMVAKLLESGEPKLQVLGTNSFVKFANIEEDTPSYHRRYDFFVSRFSAMCHSCHSDPEIRTEIRIAGI

SEQ ID NO: 84835 - protein, 478 aa, Homo sapiens
ELQLHAIATLSSVAPLLIEEYMSCQGNARVLAFLEWCESEDPFFSHGNSFHGTGGRGNKFAQMRYSLRLLRAVVYLEDETVNKDLCEKGTIQQMIGIFKNIISKPNEKEEAIVLEIQSDILLILSGLCENHIQRKEIFGTEGVDIVLHVMKTDPRKLQSGLGYNVLLFSTLDSIWCCILGCYPSEDYFLEKEGIFLLLDLLALNQKKFCNLILGIMVEFCDNPKTAAHVNAWQGKKDQTAASLLIKLWRKEEKELGVKRDKNGKIIDFENLPGLSAEDFVTLCIIHRYLDFKIGEIWNEIYEEIKLEKLRPVTTDKKALEAITTASENIGKMVASLQSDIIESQACQDMQNEQKVYAKIQATHKQRELANKSWEDFLARTSNAKTLKKAKSLQEKAIEASRYHKRPQNAIFHQTHIKGLNTTVPSGGVVTVESTPARLVGGPLVDTDIALKKLPIRGGALQRVKAVKIVDAPKKSIPT

SEQ ID NO: 84836 - protein, 110 aa, Homo sapiens
MQRLMMLLATSGACLGLLAVAAVAAAGANPAQRDTHSLLPTHRRQKRDWIWNQMHIDEEKNTSLPHHVGKIKSSVSRKNAKYLLKGEYVGKVFRVDAETGDVTQMSPRTG

SEQ ID NO: 84837 - protein, 318 aa, Homo sapiens
MKDKRKKKDRTWAEAARLALEKHPNSPMTAKQILEVIQKEGLKETRNGTSPLACLNAMLHTNTRIGDGTFFKIPGKSGLYALKKEESSCPADGTLDLVCESELDGTDMAEANAHGEENGVCSKQVTDEASSTRDSSLTNTAVQSKLVSSFQQHTKKALKQALRQQQKRRNGVSMMVNKTVPRVVLTPLKVSDEQSDSPSGSESKNGEADSSDKEMKHGQKSPTGKQTSQHLKRLKKSGLGHLKWTKAEDIDIETPGSILVNTNLRALINKHTFASLPQHFQQYLLLLLPEVDRQSRNEPFLQEAMVPISGGCHEIKMS

SEQ ID NO: 84838 - protein, 97 aa, Homo sapiens
MAWIKRKFGERPPPKRLTREAMRNYLKERGDQTVLILHAKVAQKSYGNEKRFFCPPPCVYLMGSGWKKKKEQMERDGCSEQESQPCAFIGIGNSDQE

SEQ ID NO: 84839 - protein, 69 aa, Homo sapiens
KDEVYLNLVLDYVPETVYRVARHYSRAKQTLPVIYVKVLGTPTREQIREMNPNYTEFKFPQIKAHPWTK

SEQ ID NO: 84840 - protein, 65 aa, Homo sapiens
MDLTAIYEVSPRRTASPVPACLSPSPHLSSAANSSPGRLPPFSNWGSLAPRPPAWGPCLPLRPAW

SEQ ID NO: 84841 - protein, 95 aa, Homo sapiens
  MOD_RES (1)..(1): Any amino acid
XKKPPCCVLSNPDQKGKMRRIDCLRQADKVWRLDLVMVILFKGIPLESTDGERLVKSPQCSNPGLCVQPHHIGVSVKELDLYLAYFVHAAGGVGR

SEQ ID NO: 84842 - protein, 86 aa, Homo sapiens
MAGGYGVMGDDGSIDYTVHEAWNEATNVYLIVILVSFGLFMYAKRIFGFWRIEENHNGGTSLCCVKWMCSATFLTASYFLVKERIL

SEQ ID NO: 84843 - protein, 446 aa, Homo sapiens
MQLPRWWELGDPCAWTGQGRGTRRMSPATTGTFLLTVYSIFSKVHSDRNVYPSAGVLFVHVLEREYFKGEFPPYPKPGEISNDPITFNTNLMGYPDRPGWLRYIQRTPYSDGVLYGSPTAENVGKPTIIEITAYNRRTFETARHNLIINIMSAEDFPLPYQAEFFIKNMNVEEMLASEVLGDFLGAVKNVWQPERLNAINITSALDRGGRVPLPINDLKEGVYVMVGADVPFSSCLREVENPQNQLRCSQEMEPVITCDKKFRTQFYIDWCKISLVDKTKQVSTYQEVIRGEGILPDGGEYKPPSDSLKSRDYYTDFLITLAVPSAVALVLFLILAYIMCCRREGVIQLVHHSAIQKSTKELRDMSKNREIAWPLSTLPVFHPVTGEIIPPLHTDNYDSTNMPLMQTQQNLPHQTQIPQQQTTEIIFSITAFVNLRRFSFDNFSKI

SEQ ID NO: 84844 - protein, 112 aa, Homo sapiens
MADIHHLKEQLAELRQEFLRQEDQLQDYRKNNTYLVKRLEYESFQCGQQMKELRAQHEENIKKLADQFLEEQKQETQKIQSNDGKELDINNQVVPKNIPKVAENVADKNEEP

SEQ ID NO: 84845 - protein, 157 aa, Homo sapiens
MQAARMAASLGRQLLRLGGGSSRLTALLGQPRPGPARRPYAGGAAQLALDKSDSHPSDALTRKKPAKAESKSFAVGMFKGQLTTDQVFPYPSVLNEEQTQFLKELVEPVSRFFEEPGCGILCLPQEVNDPAKNDALEMVEETTWQGLKELGAFGLQV

SEQ ID NO: 84846 - protein, 535 aa, Homo sapiens
MVVSAGPWSSEKAEMNILEINETLRPQLAEKKQQFRNLKEMFSNSTGRLPGQPTEEIQQYKVLVHSQERELTQLREKLREGRDASRSLYEHLQALLTPYEPDKSQGQDLQEQLAEGCRLAQHLVQKLSPENDEDEDEDVQVEEAEKVLESSAPREVQKAEESKVPEDSLEECAITCSNSHGPCDSNQPHKNIKITFEEDEVNSTLVVDRESSHDECQDALNILPVPGPTSSATNVSMVVSAGPLSSEKAEMNILEINEKLRPQLAEKKQQFRNLKEKCFLTQLSGFLANQQKKYKYEECKDLIKFMLRNERQFKEEKLAEQLKQAEELRQYKVLVHAQERELTQLREKLREGRDASRSLNEHLQALLTPDEPDKSQGQDLQEQLAEGCRLAQHLVQKLSPENDNDDDEDVQVEVAEKVQKSSAPREMQKAEEKEVPEDSLEECAITYSNSHGSYDSNQPHRKTKITFEEDKVDSTLIGSSSHVEWEDAVHIIPENESDDEEEEEKGPVSPRTSVGSSEKGGPRGNRSQAQQGAAG

SEQ ID NO: 84847 - protein, 167 aa, Homo sapiens
NKDLFVLTYGALVAQLCKDYEKDEDVNQYLDKMGYGIGTRLVEDFLARSCVGRCHSYSEIIDIIAQVAFKMYLGITPSVTCNNSSKNEFSLILEKNPLVEFVEELPAGRSSLCYCNLLCGIIRGALEMVHLAADVTFLQDRLKGDSVTEIGITFLKKRDEKKYRGKK

SEQ ID NO: 84848 - protein, 72 aa, Homo sapiens
MTMTANKNSSITHGAGGTKAPRGTLSRKSFEFEDASSLQSLYPSSPTENGTENQPKFGSKSTLEENAYEDIV

SEQ ID NO: 84849 - protein, 122 aa, Homo sapiens
MPVTVTRTTITTTTTSSSGLGSPMIVGSPRALTQPLGLLRLLQLVSTCVAFSLVASVGAWTGSMGNWSMFTWCFCFSVTLIILIVELCGLQARFPLSWRNFPITFACYAALFCLSASIIYPT

SEQ ID NO: 84850 - protein, 76 aa, Homo sapiens
DIHHKVLSLNFSECHTKIRHVDAHATLSDGVVVQVMGLLSNSGQPERKFMQTFVLAPEMKCLVILSLNLMKNQKMK

SEQ ID NO: 84851 - protein, 237 aa, Homo sapiens
MVTCWRPGRLGSYFWTGAVIFLDKIDVIKQADYVPSDQDLLRCRVLTSGIFETKFQVDKVNFHMFDVGGQRDERRKWIQCFNDVTAIIFVVASSSYNMVIREDNQTNRLQEALNLFKSIWNNRWLRTISVILFLNKQDLLAEKVLAGKSKIEDYFPEFARYTTPEDATPEPGEDPRVTRAKYFIRDEFLRISTASGDGRHYCYPHFTCAVDTENIRRVFNDCRDIIQRMHLRQYELL

SEQ ID NO: 84852 - protein, 154 aa, Homo sapiens
MPEGPELHLASQFVNEACRALVFGGCVEKSSVSRNPEVPFESSAYRISASARGKELRLILSPLPGAQPQQEPLALVFRFGMSGSFQLVPREELPRHAHLRFYTAPPGPRLALCFVDIRRFGRWDLGGKWQPGRGPCVLQEYQQFRNRFSEPLSP

SEQ ID NO: 84853 - protein, 224 aa, Homo sapiens
MAELYRVLEAGKIGIFESPTGTGKSLSLICGALSWLRDFEQKKREEEARLLETGTGPLHDEKDESLCLSSSCEGAAGTPRPAGEPAWVTQFVQKKEERDLVDRLKAEQARRKQREERLQQLQHRVQLKYAAKRLRQEEEERENLLRLSREMLETGPEAERLEQLESGEEELVLAEYESDEEKKVASRVDEDEDDLEEEHITKIYYCSRTHSQLAQFVHEVKKSP

SEQ ID NO: 84854 - protein, 349 aa, Homo sapiens
MALTAHPSCLLALLVAGLAQGIRGPLRAQDLGPQPLELKEAFKLFQIQFNRSYLSPEEHAHRLDIFAHNLAQAQRLQEEDLGTAEFGVTPFSDLTEEEFGQLYGYRRAAGGVPSMGREIRSEEPEESVPFSCDWRKVASAISPIKDQKNCNCCWAMAAAGNIETLWRISFWDFVDVSVQGGLASEKDYPFQGKVRAHRCHPKKYQKVAWIQDFIMLQNNEHRIAQYLATYGPITVTINMKPLQLYRKGVIKATPTTCDPQLVDHSVLLVGFGSVKSEEGIWAETVSSQSQPQPPHPTPYWILKNSWGAQWGEKGYFRLHRGSNTCGITKFPLTARVQKPDMKPRVSCPP

SEQ ID NO: 84855 - protein, 119 aa, Homo sapiens
RRLLAALRGQSLGLAAMSSGTHRLTAEERNQAILDLKAAGWSELSERDAIYKEFSFHNFNQAFGFMSRVALQAEKMNHHPEWFNVYNKVQITLTSHDCGELTKKDVKLAKFIEKAAASV

SEQ ID NO: 84856 - protein, 126 aa, Homo sapiens
  MOD_RES (1)..(1): Any amino acid
XDAFLLLRNNSIQNRQLLAEQVSSHITSSPLHSRSIAAELDELADDRMALVSGISLDPEAAIGVTKRPPPKWVDGVDEIQYDVGRIKQKMKELASLHDKHLNRPTLDDSSEEEHAIEITTQEITQA

SEQ ID NO: 84857 - protein, 671 aa, Homo sapiens
MPLAFCGSENHSAAYRVDQGVLNNGCFVDALNVVPHVFLLFITFPILFIGWGSQSSKVHIHHSTWLHFPGHNLRWILTFMLLFVLVCEIAEGILSDGVTESHHLHLYMPAGMAFMAAVTSVVYYHNIETSNFPKLLIALLVYWTLAFITKTIKFVKFLDHAIGFSQLRFCLTGLLVILYGMLLLVEVNVIRVRRYIFFKTPREVKPPEDLQDLGVRFLQPFVNLLSKGTYWWMNAFIKTAHKKPIDLRAIGKLPIAMRALTNYQRLCEAFDAQVRKDIQGTQGARAIWQALSHAFGRRLVLSSTFRILADLLGFAGPLCIFGIVDHLGKENDVFQPKTQFLGVYFVSSQEFLANAYVLAVLLFLALLLQRTFLQASYYVAIETGINLRGAIQTKIYNKIMHLSTSNLSMGEMTAGQICNLVAIDTNQLMWFFFLCPNLWAMPVQIIVGVILLYYILGVSALIGAAVIILLAPVQYFVATKLSQAQRSTLEYSNERLKQTNEMLRGIKLLKLYAWENIFRTRVETTRRKEMTSLRAFAIYTSISIFMNTAIPIAAVLITFVGHVSFFKEADFSPSVAFASLSLFHILVTPLFLLSSVVRSTVKALVSVQKLSEFLSSAEIREEQCAPHEPTPQGPASKYQAVGCEPQASSPGGLSGPHRPTAEPGPQCRWRC

SEQ ID NO: 84858 - protein, 138 aa, Homo sapiens
MFSLLVRRCTCLLKESAKAQLSSPEDQDDQDDIKVSSFVPDLKELLPSVKVWSDWMLGYPDTWNPPPTSLDLPSHVAVDVWSTLADFCNILTAVNQSEVPLYKDPDDDLTLLILEEDRLLSGFVPLLAAPQDPCYVEK

SEQ ID NO: 84859 - protein, 59 aa, Homo sapiens
MRKMNTLLLVSLSFLYLKEGDKHMYSTHMCKYKCREEESSKRGLLRVTLCCDRNFCNVF

SEQ ID NO: 84860 - protein, 94 aa, Homo sapiens
  MOD_RES (1)..(1): Any amino acid
XSPRHALTSPSLGGQGRQNLWFANPGGSNSMPSQSRSSVQRTHSLPVHSSPQAILMFPPDCPVPGPDLEINPTLESLCLSMTEHALGGEHFLFP

SEQ ID NO: 84861 - protein, 581 aa, Homo sapiens
MVAEVCSMPAASAVKKPFDLRSKMGKWCHHRFPCCRGSGKSNMGTSGDHDDSFMKTLRSKMGKCCHHCFPCCRGSGTSNVGTSGDHDNSFMKTLRSKMGKWCCHCFPCCRGSGKSNVGTWGDYDDSAFMEPRYHVRREDLDKLHRAAWWGKVPRKDLIVMLRDTDMNKRDKQKRTALHLASANGNSEVVQLLLDRRCQLNVLDNKKRTALIKAVQCQEDECVLMLLEHGADGNIQDEYGNTALHYAIYNEDKLMAKALLLYGADIESKNKCGLTPLLLGVHEQKQEVVKFLIKKKANLNALDRYGRTALILAVCCGSASIVNLLLEQNVDVSSQDLSGQTAREYAVSSHHHVICELLSDYKEKQMLKISSENSNPEQDLKLTSEEESQRLKVSENSQPEKMSQEPEINKDCDREVEEEIKKHGSNPVGLPENLTNGASAGNGDDGLIPQRKSRKPENQQFPDTENEEYHSDEQNDTQKQLSEEQNTGISQDEILTNKQKQIEVAEKEMNSELSLSHKKEEDLLRENSMLREEIAMLRLELDETKHQNQLRENKILEEIESVKEKLLKAIQLNEEALTKTSI

SEQ ID NO: 84862 - protein, 1165 aa, Homo sapiens
IEIPMDLTQPPTITKQSAKDHIVDPRDNILIECEAKGNPAPSFHWTRNSRFFNIAKDPRVSMRRRSGTLVIDFRSGGRPEEYEGEYQCFARNKFGTALSNRIRLQVSKSPLWPKENLDPVVVQEGAPLTLQCNPPPGLPSPVIFWMSSSMEPITQDKRVSQGHNGDLYFSNVMLQDMQTDYSCNARFHFTHTIQQKNPFTLKVLTNHPYNDSSLRNHPDMYSARGVAERTPSFMYPQGTASSQMVLRGMDLLLECIASGVPTPDIAWYKKGGDLPSDKAKFENFNKALRITNVSEEDSGEYFCLASNKMGSIRHTISVRVKAAPYWLDEPKNLILAPGEDGRLVCRANGNPKPTVQWMVNGEPLQSAPPNPNREVAGDTIIFRDTQISSRAVYQCNTSNEHGYLLANAFVSVLDVPPRMLSPRNQLIRVILYNRTRLDCPFFGSPIPTLRWFKNGQGSNLDGGNYHVYENGSLEIKMIRKEDQGIYTCVATNILGKAENQVRLEVKDPTRIYRMPEDQVARRGTTVQLECRVKHDPSLKLTVSWLKDDEPLYIGNRMKKEDDSLTIFGVAERDQGSYTCVASTELDQDLAKAYLTVLADQATPTNRLAALPKGRPDRPRDLELTDLAERSVRLTWIPGDANNSPITDYVVQFEEDQFQPGVWHDHSKYPGSVNSAVLRLSPYVNYQFRVIAINEVGSSHPSLPSERYRTSGAPPESNPGDVKGEGTRKNNMEITWTPMNATSAFGPNLRYIVKWRRRETREAWNNVTVWGSRYVVGQTPVYVPYEIRVQAENDFGKGPEPESVIGYSGEDYPRAAPTEVKVRVMNSTAISLQWNRVYSDTVQGQLREYRAYYWRESSLLKNLWVSQKRQQASFPGDRLRGVVSRLFPYSNYKLEMVVVNGRGDGPRSETKEFTTPEGVPSAPRRFRVRQPNLETINLEWDHPEHPNGIMIGYTLKYVAFNGTKVGKQIVENFSPNQTKFTVQRTDPVSRYRFTLSARTQVGSGEAVTEESPAPPNEATPTAAYTNNQADIATQGWFIGLMCAIALLVLILLIVCFIKRSRGGKYPVREKKDVPLGPEDPKEEDGSFDYSDEDNKPLQGSQTSLDGTIKQQESDDSLVDYGEGGEGQFNEDGSFIGQYTVKKDKEETEGNESSEATSPVNAIYSLA

SEQ ID NO: 84863 - protein, 29 aa, Homo sapiens
  MOD_RES (1)..(1): Any amino acid
XNWVLDFGRPIAMSTRNASPCMTSSRGGR

SEQ ID NO: 84864 - protein, 36 aa, Homo sapiens
GPPGIQGIHQTLGGYYNKDNKGNDEHEAGGLKGDKV

SEQ ID NO: 84865 - protein, 52 aa, Homo sapiens
MRKSSSPSLSNCNSVLANKIFGIPLDELQQGGHPDNEVPFIVRHVVDYIEEH

SEQ ID NO: 84866 - protein, 96 aa, Homo sapiens
MEHKTLKITDFGLAREWHKTTQMSAAGTYAWMAPEVIKASTFSKGSDVWSFGVLLWELLTGEVPYRGIDCLAVAYGVAVNKLTLPIPSTCPEPFAQ

SEQ ID NO: 84867 - protein, 137 aa, Homo sapiens
MQLEQSIIPDIPAKDVKWIDITPDMMVQERPLDVDCKRLSPDRCKCKKVKPTLATYLSKNYSYVIHAKIKAVQRSGCNEVTTVVDVKEIFKSSSPIPRTQVPLITNSSCQCPHILPHQDVLIMCYEWRSRMMLLENC

SEQ ID NO: 84868 - protein, 393 aa, Homo sapiens
MAAAMPLALLVLLLLGPGGWCLAEPPRDSLREELVITPLPSGDVAATFQFRTRWDSELQREGVSHYRLFPKALGQLISKYSLRELHLSFTQGFWRTRYWGPPFLQAPSVWINLGRSSVMSSQGSSAPLSTSSTPPTQSLPLPPSNPWVWPMAGLSVLLKADRLFHTSYHSQAVHIRPVCRNARCTSISWELRQTLSVVFDAFITGQGKKDWSLFRMFSRTLTEPCPLASESRVYVDITTYNQDNETLEVHPPPTTTYQDVILGTRKTYAIYDLLDTAMINNSRNLNIQLKWKRPPENEAPPVPFLHAQRYVSGYGLQKGELSTLLYNTHPYRAFPVLLLDTVPWYLRLYVHTLTITSKGKENKPSYIHYQPAQDRLQPHLLEMLIQLPANSVT

SEQ ID NO: 84869 - protein, 17 aa, Homo sapiens
  MOD_RES (1)..(1): Any amino acid
XRHDNIKPSDETLSLML

SEQ ID NO: 84870 - protein, 169 aa, Homo sapiens
MNPEYDYLFKLLLIGDSGVGKSCLLLRFADDTYTESYISTIGVDFKIRTIELDGKTIKLQIESYANVKQWLQEIDRYASENVNKLLVGNKSDLTTKKVVDNTTAKEFADSLGIPFLETSAKNATNVEQAFMTMAAEIKKRMGPGAASGGERPNLKIDSTPVKPAGGGCC

SEQ ID NO: 84871 - protein, 264 aa, Homo sapiens
MGEMEQLRQEAEQLKKQIADARKACADVTLAELVSGLEVVGRVQMRTRRTLRGHLAKIYAMHWATDSKLLVSASQDGKLIVWDSYTTNKVHAIPLRSSWVMTCAYAPSGNFVACGGLDNMCSIYNLKSREGNVKVSRELSAHTGYLSCCRFLDDNNIVTSSGDTTCAKLWDVREGTCRQTFTGHESDINAICFFPNGEAICTGSDDASCRLFDLRADQELICFSHESIICGITSVAFSLSGRLLFAGYDDFNCNVWDSMKSERV

SEQ ID NO: 84872 - protein, 74 aa, Homo sapiens
MQNVINTVKGKALEVAEYLTPVLKESKFKETGVITPEEFVAAGDHLVHHCPTWQWATGEELKVKAYLPTDGIFR

SEQ ID NO: 84873 - protein, 122 aa, Homo sapiens
FPCGNLKREILPKALKDKGIAMESITVYQTVAHPGIQGNLNSYYSQQGVPASITFFSPSGLTYSLKHIQELSGDNIDQIKLLDGGELLKKFMQGRNKGSHRNLRAKVKCNWPPRPRGASSEN

SEQ ID NO: 84874 - protein, 440 aa, Homo sapiens
MAATDLERFSNAEPEPRSLSLGGHVGFDSLPDQLVSKSVTQGFSFNILCVGETGIGKSTLMNTLFNTTFETEEASHHEACVRLRPQTYDLQESNVQLKLTIVDAVGFGDQINKDERPIVDYIDAQFENYLQEELKIRRSLFDYHDTRIHVCLYFITPTGHSLKSLDLVTMKKLDSKVNIIPIIAKADTISKSELHKFKIKIMGELVSNGVQIYQFPTDDEAVAEINAVMNAHLPFAVVGSTEEVKVGNKLVRARQYPWGVVQVENENHCDFVKLREMLIRVNMEDLREQTHSRHYELYRRCKLEEMGFQDSDGDSQPFSLQETYEAKRKEFLSELQRKEEEMRQMFVNKVKETELELKEKERELHEKFEHLKRVHQEEKRKVEEKRRELEEETNAFNRRKAAVEALQSQALHATSQQPLRKDKDKKKASGWSSIYSVTIP

SEQ ID NO: 84875 - protein, 714 aa, Homo sapiens
MWMSQWYELQQLDSKFLEQVHQLYDDSFPMEIRQYLAQWLEKQDWEHAANDVSFATIRFHDLLSQLDDQYSRFSLENNFLLQHNIRKSKRNLQDNFQEDPIQMSMIIYSCLKEERKILENAQRFNQAQSGNIQSTVMLDKQKELDSKVRNVKDKVMCIEHEIKSLEDLQDEYDFKCKTLQNREHETNGVAKSDQKQEQLLLKKMYLMLDNKRKEVVHKIIELLNVTELTQNALINDELVEWKRRQQSACIGGPPNACLDQLQNWFTIVAESLQQVRQQLKKLEELEQKYTYEHDPITKNKQVLWDRTFSLFQQLIQSSFVVERQPCMPTHPQRPLVLKTGVQFTVKLRLLVKLQELNYNLKVKVLFDKDVNERNTVKGFRKFNILGTHTKVMNMEESTNGSLAAEFRHLQLKEQKNAGTRTNEGPLIVTEELHSLSFETQLCQPGLVIDLETTSLPVVVISNVSQLPSGWASILWYNMLVAEPRNLSFFLTPPCARWAQLSEVLSWQFSSVTKRGLNVDQLNMLGEKLLGPNASPDGLIPWTRFCKENINDKNFPFWLWIESILELIKKHLLPLWNDGCIMGFISKERERALLKDQQPGTFLLRFSESSREGAITFTWVERSQNGGEPDFHAVEPYTKKELSAVTFPDIIRNYKVMAAENIPENPLKYLYPNIDKDHAFGKYYSRPKEAPEPMELDGPKGTGYIKTELISVSEV

SEQ ID NO: 84876 - protein, 62 aa, Homo sapiens
MMVNCHAHFWTTKAFLPTMLEINHGHIVTVASSLGLFSTAGVEDYCASKFGVVGFHESLSHE

SEQ ID NO: 84877 - protein, 68 aa, Homo sapiens
MSSLGGGSQDAGGSSSSSTNGSGGSGSSGPKAGAADKSAVVAAAAPASVADDTPPPERRNKSGIISEP

SEQ ID NO: 84878 - protein, 94 aa, Homo sapiens
LVRSASFSRGGQLSFTDLGLPPTDHLQASFGFQTFQPSGILLDHQTWTRNLQVTLEDGYIELSTSDSGGPIFKSPQTYMDGLLHYVSVISDNSG

SEQ ID NO: 84879 - protein, 77 aa, Homo sapiens
ICKVRPPPDWQPPFACDVDKLHFTPRIQRLNELESRSVTQGGVQQHYPGSLQPLPPGFKSFSCLSLPSSWDYRPKLV

SEQ ID NO: 84880 - protein, 202 aa, Homo sapiens
MAAENEASQESALGAYSPVDYMSITSFPRLPEDEPAPAAPLRGRKDEDAFLGDPDTAGHRCPACPGVHAKMRKDPDSFLKSARLQRLPSSSSEMGSQDGSPLRETRKDPFSAAAAECSCRQDGLTVIVTACLTFATGVTVALVMQIYFGDPQIFQQGAVVTDAARCTSLGIEVLSKQGSSVDAAVAAALCLGIVAPHSSGLG

SEQ ID NO: 84881 - protein, 180 aa, Homo sapiens
CSHEMAAGILKQALAMGMMTEYYHYIFTTLTDAALMYDAVHVVSVAVQQFPQMTVSSLQCNRHKPWRFGTRFMSLIKEAHWEGLTGRITFNKTNGLRTDFDLDVISLKEEGLEKIGTWDPASGLNMTESQKGKPANITDSLSNRSLIVTTILEEPYVLFKKSDKPLYGNDRFEGYCIDLL

SEQ ID NO: 84882 - protein, 171 aa, Homo sapiens
MSFLSSQQSSQQSSHDDDSSRFLSPRAREESTASNSNRSTPACSPILRKRSRSPTPQNQDGDTMVEKGSDHSSDKSPSTPEQGVQRSCSSQSGRSGGKNSKKSQSWYNVLSPTYKQRNEDFRKLFKQLPDTERLIVDYSCALQRDILLQGRLYLSENWICFYSNIFRWETL

SEQ ID NO: 84883 - protein, 184 aa, Homo sapiens
MWGFLKRPVVVTADINLSLVALTGMGLLSRLWRLTYPRAVVFDEVYYGQYISFYMKQIFFLDDSGPPFGHMVLALGGYLGGFDGNFLWNRIGAENALITQSRLMLLESVLIFFNLLAVLSYLKFFNCQKHSPFSLSWWFWLTLTGVACSCAVGIKYMGVFTYVLVLGVAAVHAWHLLGDQTLSN

SEQ ID NO: 84884 - protein, 140 aa, Homo sapiens
  MOD_RES (1)..(1): Any amino acid
XAIGCVFAELLSGVPLWPGKSDVDQLYLIRKTLGDLIPRHQQVFSTNQYFSGVKIPDPEDMEPLELKFPNISYPALGLLKGCLHMDPTQRLTCEQLLHHPYFENIREIEDLAKEHNKPTRKTLRKSRKHHCFTETSKVII

SEQ ID NO: 84885 - protein, 945 aa, Homo sapiens
IMLLTDPEIESSLLISSDEGATYQKYRLNFYIQSLLFHPKQEDWILAYSQDQKLYSSAEFGRRWQLIQEGVVPNRFYWSVMGSNKEPDLVHLEARTVDGHSHYLTCRMQNCTEANRNQPFPGYIDPDSLIVQDHYVFVQLTSGGRPHYYVSYRRNAFAQMKLPKYALPKDMHVISTDENQVFAAVQEWNQNDTYNLYISDTRGVYFTLALENVQSSRGPEGNIMIDLYEVAGIKGMFLANKKIDNQVKTFITYNKGRDWRLLQAPDTDLRGDPVHCLLPYCSLHLHLKVSENPYTSGIIASKDTAPSIIVASGNIGSELSDTDISMFVSSDAGNTWRQIFEEEHSVLYLDQGGVLVAMKHTSLPIRHLWLSFDEGRSWSKYSFTSIPLFVDGVLGEPGEETLIMTVFGHFSHRSEWQLVKVDYKSIFDRRCAEEDYRPWQLHSQGEACIMGAKRIYKKRKSERKCMQGKYAGAMESEPCVCTEADFDCDYGYERHSNGQCLPAFWFNPSSLSKDCSLGQSYLNSTGYRKVVSNNCTDGVREQYTAKPQKCPGKAPRGLRIVTADGKLTAEQGHNVTLMVQLEEGDVQRTLIQVDFGDGIAVSYVNLSSMEDGIKHVYQNVGIFRVTVQVDNSLGSDSAVLYLHVTCPLEHVHLSLPFVTTKNKEVNATAVLWPSQVGTLTYVWWYGNNTEPLITLEGSISFRFTSEGMNTITVQVSAGNAILQDTKTIAVYEEFRSLRLSFSPNLDDYNPDIPEWRRDIGRVIKKSLVEATGVPGQHILVAVLPGLPTTAELFVLPYQDPAGENKRSTDDLEQISELLIHTLNQNSVHFELKPGVRVLVHAAHLTAAPLVDLTPTHSGSAMLMLLSVVFVGLAVFVIYKFKRKIPGINVYAQMQNEKEQEMISPVSHSESRPNVPQTELRRPGQLIDEKVESQLIGRYRSTLQSL

SEQ ID NO: 84886 - protein, 396 aa, Homo sapiens
MKALILVGGYGTRLRPLTLSTPKPLVDFCNKPILLHQVEALAAAGVDHVILAVSYMSQVLEKEMKAQEQRLGIRISMSHEEEPLGTAGPLALARDLLSETADPFFVLNSDVICDFPFQAMVQFHRHHGQEGSILVRRQVFSLLTLSPSMPSLPCPLAFICLRMLWIQSCAVTKVEEPSKYGVVVCEADTGRIHRFVEKPQVFVSNKINAGMYILSPAVLQRIQLQPTSIEKEVFPIMAKEGQLYAMELQGFWMDIGQPKDFLTGMCLFLQSLRQKQPERLCSGPGIVGNVLVDPSARIGQNCSIGPNVSLGPGVVVEDGVCIRRCTVLRDARIRSHSWLESCIVGWRCRVGQWVRMENVTVLGEDVIVNDELYLNGASVLPHKSIGESVPEPRIIM

SEQ ID NO: 84887 - protein, 184 aa, Homo sapiens
MVVGESGLGKSTLINSLFLTDLYPERVIPGAAEKIERTVQIEASTVEIEERGVKLRLTVVDTPGYGDAINCRDCFKTIISYIDEQFERYLHDESGLNRRHIIDNRVHCCFYFISPFGHGLKPLDVAFMKAIHNKVNIVPVIAKADTLTLKERERLKKRILDEIEEHNIKIYHLPDAESDEDEDF

SEQ ID NO: 84888 - protein, 210 aa, Homo sapiens
MRYGNFIDKLRLFTRGGSGGMGYPRLGGEGGKGGDVWVVAQNRMTLKQLKDRYPRKRFVAGVGANSKISALKGSKGKDCEIPVPVGISVTDENGKIIGELNKENDRILVAQGGLGGKLLTNFLPLKGQKRIIHLDLKLIADVGLVGFPNAGKSSLLSCVSHAKPAIADYAFTTLKPELGKIMYSDFKQISVADLPGLIEGAHMNKGMGHK

SEQ ID NO: 84889 - protein, 134 aa, Homo sapiens
MGKGDPNKPRGKMSSYAFFVQTCREEHKKKHPDSSVNFAEFSKKCSERWKTMSAKEKSKFEDMAKSDKARYDREMKNYVPPKGDKKGKKKDPNAPKRPPSAFFLFCSEHRPKIKSEHPGLSIGDTAKKLGEMWS

SEQ ID NO: 84890 - protein, 131 aa, Homo sapiens
MLCDTMGLDGAEGAGLCMDDIPHILKGCMPDRYQFNSRKPITPEHSTFITSPSLKDRIHCVAYVLDINSIDNLYSKMLAKVKQVHKEVLNCGIAYVALLTKVDDCSEVLQDNFLNMSRSMTSQSRIWNWTP

SEQ ID NO: 84891 - protein, 183 aa, Homo sapiens
MNQYVNKKFSNQYKATIGADFLTKEVMVDDRLVTMQIWDTAGQERFQSLGVAFYRGADCCVLVFDVTAPNTFKTLDSWRDEFLIQASPRDPENFPFVVLGNKIDLENRQVATKRAQAWCYSKNNIPYFETSAKEAINVEQAFQTIARNALKQETEVELYNEFPEPIKLDKNDRAKASAESCSC

SEQ ID NO: 84892 - protein, 161 aa, Homo sapiens
  MOD_RES (1)..(1): Any amino acid
XRWNRKPDNQSLGHRGRRPSGPDGAAREHILRQLPITYPSAEEDLASHEDSVPSAMTTRLRRQSERERERELRDVRIRKMPENSDLLPVAQTEPSIWTVDDVWAFIHSLPGCQDIADEFRAQEIDGQALLLLKEDHLMSAMNIKLGPALKICARINSLKES

SEQ ID NO: 84893 - protein, 73 aa, Homo sapiens
MYSGAGPGKSWNTWSSTLKHRSLGIGSPCLTAGRIYTQPCPFRLGGTRWSWRSRCQEKARIASSRCPSSGCPA

SEQ ID NO: 84894 - protein, 78 aa, Homo sapiens
PKYSLAYFNAGNIYFHHRQFSQEESLGLAWSLSLDSFLRTGGATFSSGVNPLQTLHRRMSILSPLPPTCPRDEMDFTS

SEQ ID NO: 84895 - protein, 71 aa, Homo sapiens
MSHTILLVQPTKRPEGRTYADYESVNECMEGVCKMYEEHLKRMNPNSPSITYDISQLFDFIDDLADLSCLV

SEQ ID NO: 84896 - protein, 1092 aa, Homo sapiens
MSYNYVVTAQKPTAVNGCVTGHFTSAEDLNLLIAKNTRLEIYVVTAEGLRPVKEVGMYGKIAVMELFRPKGESKDLLFILTAKYNACILEYKQSGESIDIITRAHGNVQDRIGRPSETGIIGIIDPECRMIGLRLYDGLFKVIPLDRDNKELKAFNIRLEELHVIDVKFLYGCQAPTICFVYQDPQGRHVKTYEVSLREKEFNKGPWKQENVEAEASMVIAVPEPFGGAIIIGQESITYHNGDKYLAIAPPIIKQSTIVCHNRVDPNGSRYLLGDMEGRLFMLLLEKEEQMDGTVTLKDLRVELLGETSIAECLTYLDNGVVFVGSRLGDSQLVKLNVDSNEQGSYVVAMETFTNLGPIVDMCVVDLERQGQGQLVTCSGAFKEGSLRIIRNGIGIHEHASIDLPGIKGLWPLRSDPNRETDDTLVLSFVGQTRVLMLNGEEVEETELMGFVDDQQTFFCGNVAHQQLIQITSASVRLVSQEPKALVSEWKEPQAKNISVASCNSSQVVVAVGRALYYLQIHPQELRQISHTEMEHEVACLDITPLGDSNGLSPLCAIGLWTDISARILKLPSFELLHKEMLGGEIIPRSILMTTFESSHYLLCALGDGALFYFGLNIETGLLSDRKKVTLGTQPTVLRTFRSLSTTNVFACSDRPTVIYSSNHKLVFSNVNLKEVNYMCPLNSDGYPDSLALANNSTLTIGTIDEIQKLHIRTVPLYESPRKICYQEVSQCFGVLSSRIEVQDTSGGTTALRPSASTQALSSSVSSSKLFSSSTAPHETSFGEEVEVHNLLIIDQHTFEVLHAHQFLQNEYALSLVSCKLGKDPNTYFIVGTAMVYPEEAEPKQGRIVVFQYSDGKLQTVAEKEVKGAVYSMVEFNGKLLASINSTVRLYEWTTEKELRTECNHYNNIMALYLKTKGDFILVGDLMRSVLLLAYKPMEGNFEEIARDFNPNWMSAVEILDDDNFLGAENAFNLFVCQKDSAATTDEERQHLQEVGLFHLGEFVNVFCHGSLVMQNLGETSTPTQGSVLFGTVNGMIGLVTSLSESWYNLLLDMQNRLNKVIKSVGKIEHSFHLEILSHRAEDRTSHRFHRR

SEQ ID NO: 84897 - protein, 210 aa, Homo sapiens
  MOD_RES (1)..(1): Any amino acid
XDLIDGFAIASFATLEALQKDASLQPPERLEHRLKHSGKRKRGGSSGATGEPGDSSDREPGRPPGDRARKWPNKRRRKEVSDDDLDPSFTVSTSKASGPHGAFNGNCEAKLSVVPKVSGLERSQEQPPGPDPLLVPFPPKEPPPPPVPRPPVSPPAPLPATPSLPPPPQPQLQLRVSPFGLRTSPYGSSLDLSTGRNQGSGVPCTCVWLT

SEQ ID NO: 84898 - protein, 482 aa, Homo sapiens
  MOD_RES (1)..(1): Any amino acid
XKPKLPENYTDETWQKLKEAVEAIQNSTSIKYNLEELYQAVENLCSYKISANLYKQLRQICEDHIKAQIHQFREDSLDSVLFLKKIDRCWQNHCRQMIMIRSIFLFLDRTYVLQNSMLPSIWDMGLELFRAHIISDQKVQNKTIDGILLLIERERNGEAIDRSLLRSLLSMLSDLQIYQDSFEQRFLEETNRLYAAEGQKLMQEREVPEYLHHVNKRLEEEADRLITYLDQTTQKSLIATVEKQLLGEHLTAILQKGLNNLLDENRIQDLSLLYQLFSRVRGGVQVLLQQWIEYIKAFGSTIVINPEKDKTMVQELLDFKDKVDHIIDICFLKNEKFINAMKEAFETFINKRPNKPAELIAKYVDSKLRAGNKEATDEELEKMLDKIMIIFRFIYGKDVFEAFYKKDLAKRLLVGKSASVDAEKSMLSKLKHECGAAFTSKLEGMFKDMELSKDIMIQFKQVTPCRQAVEQVKNWRLGLAGG

SEQ ID NO: 84899 - protein, 277 aa, Homo sapiens
  MOD_RES (1)..(1): Any amino acid
XTLIYRLPGVLTWPTSNVIIEESQPQKIKMLLEKFVEECKFPPVPDAICCYQKCHGYSKIQIYITDPDFKDFLQGICLTPDCEGVISKIIIFSSGGEVKCEFEHKVIKEKVPPRPILKQKCSSLEKLRLKEDKKLKRKIQKKEAKKLAQERMEEDLRESNPPKNEEQKETVDNVQRCQFLDDRILQCIKQYADKIKSGIQNTAMLLKELLSWKVLSTEDYTTCFSSRNFLNEAVDYVIRHLIQENNRVKTRIFLHVLSELKEVEPKLAAWIQKLNSF

SEQ ID NO: 84900 - protein, 68 aa, Homo sapiens
MADVEDGEETCALASHSGSSGSKSGGDKMFSLKKWNAVAMWSWDVECDTCAICRVQMRELEFVIGPRP

SEQ ID NO: 84901 - protein, 161 aa, Homo sapiens
LSLLLAVGSLIGYSRSPNDKSINALLMTVTGFFIGGPSNMISSAISADLGRQELIQRSSEALATVTGIVDGSGSIGAAVGQYLVSLIRDKLGWMWVFYFFILMETGSHIEGVTGARETERTMSATSGPLGLRVCPNLGLSRSSSLILDCQASLNTASHLRC

SEQ ID NO: 84902 - protein, 441 aa, Homo sapiens
MMMAKKWAKFLRDFENFKAACVPWENKIKAIESQFGSSVASYFLFLRWMYGVNMVLFILTFSLIMLPEYLWGLPYGSLPRKTVPRAEEASAANFGVLYDFNGLAQYSVLFYGYYDNKRTIGWMNFRLPLSYFLVGIMCIGYSFLVVLKAMTKNIGDDGGGDDNTFNFSWKVFTSWDYLIGNPETADNKFNSITMNFKEAITEEKAAQVEENVHLIRFLRFLANFFVFLTLGGSGYLIFWAVKRSQEFAQQDPDTLGWWEKNEMNMVMSLLGMFCPTLFDLFAELEDYHPLIALKWLLGRIFALLLGNLYVFILALMDEINNKIEEEKLVKANITLWEANMIKAYNASFSENSTGPPFFVHPADVPRGPCWETMVGQEFVRLTVSDVLTTYVTILIGDFLRACFVRFCNYCWCWDLEYGYPSYTEFDISGNVLALIFNQGMI

SEQ ID NO: 84903 - protein, 609 aa, Homo sapiens
MGEEDYYLELCERPVQFEKANPVNCVFFDEANKQVFAVRSGGATGVVVKGPDDRNPISFRMDDKGEVKCIKFSLENKILAVQRTSKTVVLPEKRSLKLLKSHNLNVNWYMYCPESAVILLSTTVLENVLQPFHFRAGTMSKLPKFEIELPAAPKSTKPSLSERDIAMATIYGQLYVLFLRHHSRTSNSTGAEVVLYHLPREGACKKMHILKLNRTGKFALNVVDNLVVVHHQDTETSVIFDIKLRGEFDGSVTFHHPVLPARSIQPYQIPITGPAAVTSQSPVPCKLYSSSWIVFQPDIIISASQGYLWNLQVKLEPIVNLLPDKGRLMDFLLQRKECKMVILSVCSQMLSESDRASLPVIATVFDKLNHEYKKYLDAEQSYAMAVEAGQSRSSPLLKRPVRTQAVLDQSDVYTHVLSAFVEKKEMPHKFVIAVLMEYIRSLNQFQIAVQHYLHELVIKTLVQHNLFYMLHQFLQYHVLSDSKPLACLLLSLESFYPPAHQLSLDMLKRLSTANDEIVEVLLSKHQVLAALRFIRGIGGHDNISARKFLDAAKQTEDNMLFYTIFRFFEQRNQRLRGSPNFTPGEHCEEHVAFFKQIFGDQALMRPTTF

SEQ ID NO: 84904 - protein, 266 aa, Homo sapiens
MTLDVGPEDELPDWAAAKEFYQKYDPKDVIGRGVSSVVRRCVHRATGHEFAVKIMEVTAERLSPEQLEEVREATRRETHILRQVAGHPHIITLIDSYESSSFMFLVFDLMRKGELFDYLTEKVALSEKETRSIMRSLLEAVSFLHANNIVHRDLKPENILLDDNMQIRLSDFGFSCHLEPGEKLRELCGTPGYLAPEILKCSMDETHPGYGKEVDLWACGVILFTLLAGSPPFWHRRQILMLRMIMEGQYQFSSPEWDDRSSTVKD

SEQ ID NO: 84905 - protein, 1455 aa, Homo sapiens
  MOD_RES (1)..(1): Any amino acid
XGYLYKWLDNILDSLDKKVHQLGCEAVTLLLELNPDQSNLMYWAVDRCYTGSGRVAAGCFKAIANVFQNRDYQCDTVMLLNLILFKAADSSRSIYEVAMQLLQILEPKMFRYAHKLEVQRTDGVLSQLSPLPHLYSVSYYQLSEELARAYPELTLAIFSEISQRIQTAHPAGRQVMLHYLLPWMNNIELVDLKPLPTARRHDEDEDDSLKDRELMVTSRRWLRGEGWGSPQATAMVLNNLMYMTAKYGDELAWSEVENVWTTLADGWPKNLKIILHFLISICGVNSEPSLLPYVKKVIVYLGRDKTMQLLEELVSELQLTDPVSSGVTHMDNPPYYRITSSYKIPSVTSGTTSSSNTMVAPTDGNPDNKPIKENIEESYVHLDIYSGLNSHLNRQHHRLESRYSSSSGGSYEEEKSDSMPLYSNWRLKVMEHNQGEPLPFPPAGGCWSPLVDYVPETSSPGLPLHRCNIAVILLTDLIIDHSVKVEWGSYLHLLLHAIFIGFDHCHPEVYEHCKRLLLHLLIVMGPNSNIRTVASVLLRNKEFNEPRVLTVKQVAHLDYNFTGINDFIPDYQPSPMTDSGLSSSSTSSSISLGNNSAAISHLHTTILNEVDISVEQDGKVKTLMEFITSRKRGPLWNHEDVSAKNPSIKSAEQLTTFLKHVVSVFKQSSSEGIHLEHHLSEVALQTALSCSSRHYAGRSFQIFRALKQPLTATTLSDVLSRLVETVGDPGEDAQGFVIELLLTLESAIDTLAETMKHYDLLSALSQTSYHDPIMGNKYAANRKSTGQLNLSTSPINSSSYLGYNSNARSNSLRLSLIGDRRGDRRRSNTLDIMDGRINHSSSLARTRSLSSLREKGMYDVQSTTEPTNLMATIFWIAASLLESDYEYEYLLALRLLNKLLIHLPLDKSESREKIENVQSKLKWTNFPGLQQLFLKGFTSASTQEMTVHLLSKLISVSKHTLVDPSQLSGFPLNILCLLPHLIQHFDSPTQFCKETASRIAKVCAEEKCPTLVNLAHMMSLYSTHTYSRDCSNWINVVCRYLHDSFSDTTFNLVTYLAELLEKGLSSMQQSLLQIIYSLLSHIDLSAAPAKQFNLEIIKIIGKYVQSPYWKEALNILKLVVSRSASLVVPSDIPKTYGGDTGSPEISFTKIFNNVSKELPGKTLDFHFDISETPIIGNKYGDQHSAAGRNGKPKVIAVTRSTSSTSSGSNSNALVPVSWKRPQLSQRRTREKLMNVLSLCGPESGLPKNPSVVFSSNEDLEVGDQQTSLISTTEDINQEEEVAVEDNSSEQQFGVFKDFDFLDVELEDAEGESMDNFNWGVRRRSLDSIDKGDTPSLQEYQCSSSTPSLNLTNQEDTDESSEEEAALTASQILSRTQMLNSDSATDETIPDHPDLLLQSEDSTGSITTEEVLQIRDETPTLEASLDNANSRLPEDTTSVLKEEHVTTFEDEGSYII

SEQ ID NO: 84906 - protein, 255 aa, Homo sapiens
MASSFLPAGAITGDSGGELSSGDDSGEVEFPHSPEIEETSCLAELFEKAAAHLQGLIQVASREQLLYLYARYKQVKVGNCNTPKPSFFDFEGKQKWEAWKALGDSSPSQAMQEYIAVVKKLDPGWNPQIPEKKGKEANTGFGGPVISSLYHEETIREEDKNIFDYCRENNIDHITKAIKSKNVDVNVKDEEGRALLHWACDRGHKELVTVLLQHRADINCQVPAQPQWARTPSGLLGCLIPCLGSWTALDQTSLG

SEQ ID NO: 84907 - protein, 179 aa, Homo sapiens
MMSPTGDNSELLAEIKAGKSLKPTPQSKGLTTVFSGIGQPAFQPDSPLPSVSPALSPVRSPTPPAAGFQPLLNGSLVPVPPTTPAPGVQLDVEALIPTHDEQGRPIPEWKRQVMVRKMQLKMQEEEEQRRKEEEEEARLASMPAWRRDLLRKKLEEEREQKRKEEERQKQEELRREKEQ

SEQ ID NO: 84908 - protein, 171 aa, Homo sapiens
  MOD_RES (1)..(1): Any amino acid
XSGASSDISLDEQYKHQLEETKKEKRTRIPYKPNYSLNLWSIMKNCIGKELSKIPMPVNFNEPLSMLQRLTEDLEYHELLDRAAKCENSLEQLCYVAAFTVSSYSTTVFRTSKPFNPLLGETFELDRLEENGYRSLCEQVPFIVFSMQLGTTTLGRKLPQLYTTLLWASCG

SEQ ID NO: 84909 - protein, 148 aa, Homo sapiens
MDNGMFSGFIMIKNLLLFCISMNLSSHFGFSQMPTSSVKDETNDNITIFTRILDGLLDGYDNRLRPGLGERITQVRTDIYVTSFGPVSDTEMEYTIDVFFRQSWKDERLRFKGPMQRLPLNNLLASKIWTPDTFFHNGKKSIAHNMTT

SEQ ID NO: 84910 - protein, 45 aa, Homo sapiens
MDLSGVKKKSLLGVKENNKKSSTRAPSPTKRKDRSDEKSKDRSKD

SEQ ID NO: 84911 - protein, 111 aa, Homo sapiens
MAAASIANIVKSSLGPVGLDKMLVDDIGDVTITNDGATILKLLEVEHPAAKVLCELADLQDKEVGDGTTSVVIIAAELLKNADELVKQKIHPTSVISGYRLACKEAVRYIN

SEQ ID NO: 84912 - protein, 199 aa, Homo sapiens [sequence omitted]

SEQ ID NO: 84913 - protein, 215 aa, Homo sapiens
MERLGTPSGLDSTKMESCYIAQAGLELLGSSSSPTLTSQSAEITEDASNGGVSEQHPWPSGFERELKPETISSPGYHILRATGEENMAVSLDDDVPLILTLDEGGSAPLAPSNGLGQEELPSKNGGSYAIHDSQAPSLSSGGESSPSSPAHNWEMNYQEAAIYLQEGENNDKFFTHPKDAKALAAYLFAHNHLFYLMELATALLLLLLSLCEAPA

SEQ ID NO: 84914 - protein, 93 aa, Homo sapiens
  MOD_RES (1)..(1): Any amino acid
XEQKVYAKIQATHKQRELANKSWEDFLARTSNAKTLKVPSGGVVTVESTPARLVGGPLVDTDIALKKLPIRGGALQRVKAVKIVDAPKKSIPT

SEQ ID NO: 84915 - protein, 54 aa, Homo sapiens
MPHFTVVPVDGPRRGDYDNLEGLSWVDYGERAELDDSDDLHCPTSCHFLPIGCS

SEQ ID NO: 84916 - protein, 61 aa, Homo sapiens
MVNPTVFFDIAVDGEPLGRVSFEVGWQACGVWQSERRHEYCGGHGALWVQEWQDQQEDHHC

SEQ ID NO: 84917 - protein, 79 aa, Homo sapiens
MEVPNVKDFQWKRLAPLPSRRVYCSLLETGGQVYAIGGCDDNGVPMDCFEVYSPEADQWTALPRLPTARAGVAVTALGK

SEQ ID NO: 84918 - protein, 109 aa, Homo sapiens
  MOD_RES (1)..(1): Any amino acid
XIDQPLPPGVTVTSWLGKPWKPGDKEPCAHPNSRFCAPARQCPIMDPAWEAPEGVPIDAIIFGGRRPKEMGFRHIAQADLKFLWSSELPASASQSTGITGVSYHAYYTF

SEQ ID NO: 84919 - protein, 36 aa, Homo sapiens
MKFFSYILVYRRFLFVVFTVLVLLPLPIVLHTKSKL

SEQ ID NO: 84920 - protein, 156 aa, Homo sapiens
MAVPAAAPVCQPKSATNGQPPAPAPTPTPRLSISSRATVVARMEGTSQGGLQTVMKWKTVVAIFVVVVVYLVTGGLVFRALEQPFESSQKNTIALEKAEFLRDHVCVSPQELETLIQHALDADNAGVSPIGNSSNNSSHWDLGSAFFFAGTVITTI

SEQ ID NO: 84921 - protein, 192 aa, Homo sapiens
MIAVEPSLWVSSVAESSRPSRVSAMPLLSVSPTVNVSSERAESRPTLFMAVSLHMAWCLAHIGIRHRLRGSANAVRIRAPQIGGSFAVWGGLFSTIDCGLVRLRGKEDPWNSITSGALTGAVLAARSGPLAMVGSAMMGGILLALIEGVGILLTRYTAQQFRNAPPFLEDPSQLPPKDGTPAPGYPSYQQYH

SEQ ID NO: 84922 - protein, 89 aa, Homo sapiens
MNMFKEAVTFKDVAVAFTEEELGLLGPAQRKLYRDVMVENFRNLLSVGHPPFKQDVSPIERNEQLWIMTTATRRQGNLGEKNQSKLITV

SEQ ID NO: 84923 - protein, 135 aa, Homo sapiens
MMLSRAKPAVGRGVQHTDKRKKKGRKIPKLEELLSKRDFTGAITLLEFKRHVGEEEEDTNLWIGYCAFHLGDYKRALEEYENATKEENCNSEVWVNLACTYFFLGMYKQAEAAGFKASKSRLQNRLLFHLAHKEK

SEQ ID NO: 84924 - protein, 47 aa, Homo sapiens
MLASFLRTNRQAAKLSKPTLENLTPVVLRPEIRKPEVLRPETPRPVD

SEQ ID NO: 84925 - protein, 183 aa, Homo sapiens
MEDERSFSDICGGRLALQRRYYSPSCREFCLSCPRLSLRSLTAVTCTVWLAAYGLFTLCEMTSSYASGKESTTFIEMGKVKDIVINEAIYMQKVIYYLCILLKDPVEPHGISQVVPVFQRQSLTLSPRLECSDNHHSLQPPPPRLKKSSCLSLLRTWDYRCAPSRLANFFFLFLVEMRSCHVA

SEQ ID NO: 84926 - protein, 2517 aa, Homo sapiens
MKPMKKACTGLSGPGSGSKSPPATRAKALRRRGAGEGDKPEEEDDEAQQPQPQSGPEEAEEGEEEEAERGPGAEGPPLELHPGDPAPGPAEDPKGDGEAGRWEPSLSRKTATFKSRAPKKKYVEEHGAGSSGVAGAPEERVRTPEEASGLGVPPRPPTSTRSSSTDTASEHSADLEDEPAEACGPGPWPPGSTSGSYDLRQLRSQRVLARRGDGLFLPAVVRQVRRSQDLGVQFPGDRALTFYEGVPGAGVDVVLDATPPPGALVVGTAVCTCVEPGVAAYREGVVVEVATKPAAYKVRLSPGPSSQPGLPGSLPQPPQPLHREPEEAVWVARSSLRLLRPPWEPETMLRKPPTGPEEEQAEPGATLPPCPAALDPKQPEDAEVSKISFGGNLGTHCEEGEEKHPPALGTPALLPLPPPQLLSPPPKSPAFVGPGRPGEQPSPCQEGSQGGSRSSSVASLEKGTAPAARARTPLTAAQQKYKKGDVVCTPSGIRKKFNGKQWRRLCSRDGCMKESQRRGYCSRHLSMRTKEMEGLADSGPGGAGRPAAVAAREGSTEFDWGDETSRDSEASSVAARGDSRPRLVAPADLSRFEFDECEAAVMLVSLGSSRSGTPSFSPVSTQSPFSPAPSPSPSPLFGFRPANFSPINASPVIQRTAVRSRHLSASTPKAGVLTPPDLGPHPPPPAPRERHSSGILPTFQTNLTFTVPISPGRRKTELLPHPGALGAPGAGGGGAAPDFPKSDSLDSGVDSVSHTPTPSTPAGFRAVSPAVPFSRSRQPSPLLLLPPPAGLTSDPGPSVRRVPAVQRDSPVIVRNPDVPLPSKFPGEVGTAGEVRAGGPGRGCRETPVPPGVASGKPGLPPPLPAPVPITVPPAAPTAVAQPMPAFGLASSPFQPVAFHPSPAALLPVLVPSSYTSHPAPKKEVIMGRPGTVWTNVEPRSVAVFPWHSLVPFLAPSQPDPSVQPSEAQQPASHPVASNQSKEPAESAAVAHERPPGGTGSADPERPPGATCPESPGPGPPHPLGVVESGKGPPPTTEEEASGPPGEPRLDSETESDHDDAFLSIMSPEIQLPLPPGKRRTQSLSALPKERDSSSEKDGRSPNKREKDHIRRPMNAFMIFSKRHRALVHQRHPNQDNRTVSKILGEWWYALGPKEKQKYHDLAFQVKEAHFKAHPDWKWCNKDRKKSSSEAKPTSLGLAGGHKETRERSMSETGTAAAPGVSSELLSVAAQTLLSSDTKAPGSSSCGAERLHTVGGPGSARPRAFSHSGVHSLDGGEVDSQALQELTQMVSGPASYSGPKPSTQYGAPGPFAAPGEGGALAATGRPPLLPTRASRSQRAASEDMTSDEERMVICEEEGDDDVIADDGFGTTDIDLKCKERVTDSESGDSSGEDPEGNKGFGRKVFSPVIRSSFTHCRPPLDPEPPGPPDPPVAFGKGYGSAPSSSASSPASSSASAATSFSLGSGTFKAQESGQGSTAGPLRPPPPGAGGPATPSKATRFLPMDPATFRRKRPESVGGLEPPGPSVIAAPPSGGGNILQTLVLPPNKEEQEGGGARVPSAPAPSLAYGAPAAPLSRPAATMVTNVVRPVSSTPVPIASKPFPTSGRAEASPNDTAGARTEMGTGSRVPGGSPLGVSLVYSDKKSAAATSPAPHLVAGPLLGTVGKAPATVTNLLVGTPGYGAPAPPAVQFIAQGAPGGGTTAGSGAGAGSGPNGPVPLGILQPGALGKAGGITQVQYILPTLPQQLQVAPAPAPAPGTKAAAPSGPAPTTSIRFTLPPGTSTNGKVLAATAPTPGIPILQSVPSAPPPKAQSVSPVQAPPPGGSAQLLPGKVLVPLAAPSMSVRGGGAGQPLPLVSPPFSVPVQNGAQPPSKIIQLTPVPVSTPSGLVPPLSPATLPGPTSQPQKVLLPSSTRITYVQSAGGHALPLGTSPASSQAGTVTSYGPTSSVALGFTSLGPSGPAFVQPLLSAGQAPLLAPGQVGVSPVPSPQLPPACAAPGGPVITAFYSGSPAPTSSAPLAQPSQAPPSLVYTVATSTTPPAATILPKGPPAPATATPAPTSPFPSATAGSMTYSLVAPKAQRPSPKAPQKVKAAIASIPVGSFEAGASGRPGPAPRQPLEPGPVREPTAPESELEGQPTPPAPPPLPETWTPTARSSPPLPPPAEERTSAKGPETMASKFPSSSSDWRVPGQGLENRGEPPTPPSPAPAPAVAPGGSSESSSGRAAGDTPERKEAAGTGKKVKVRPPPLKKTFDSVDNRVLSEVDFEERFAELPEFRPEEVLPSPTLQSLATSPRAILGSYRKKRKNSTDLDSAPEDPTSPKRKMRRRSSCSSEPNTPKSAKCEGDIFTFDRTGTEAEDVLGELEYDKVPYSSLRRTLDQRRALVMQLFQDHGFFPSAQATAAFQARYADIFPSKVCLQLKIREVRQKIMQAATPTEQPPGAEAPLPVPPPTGTAAAPAPTPSPAGGPDPTSPSSDSGTAQAAPPLPPPPESGPGQPGWEGAPQPSPPPPGPSTAATGR

SEQ ID NO: 84927 - protein, 90 aa, Homo sapiens
MGKNKLLHPSLVLLLLVLLPTDASVSGKPQYMVLVPSLLHTETTEKGCVLLSYLNETVTVSASLESVRGNRSLFTDLEAENDVLHCVAFA

SEQ ID NO: 84928 - protein, 126 aa, Homo sapiens
MKSAKPQVNHSQHGESQRALSPLQSTLSSAASPSQAYETYIENGLICLKHKIRNIEKKKLKLEDYKDRLKSGEHLNPDQLEAVEKYEEVLHNLEFAKELQKTFSGLSLDLLKAQKKAQRREHMLKL

SEQ ID NO: 84929 - protein, 189 aa, Homo sapiens
MGPSPAPSRTSASPPSLFRELALQATWLRCWPPSWSCWPCCWPPCSMSSAVSTCCSDGKLYDAYVSYSDCPEDRKFVNFILKPQLERRRGYKLFLDDRDLLPRAEPSADLLVNLSRCRRLIVVLSDAFLSRAWCSHSFREGLCRLLELTRRPIFITFEGQRRDPAHPALRLLRQHRHLVTLLLWRPGSV

SEQ ID NO: 84930 - protein, 58 aa, Homo sapiens
AEETSRGQAHSPASQNFLGQARTKSEMQNGGRCSTCSQDENSIILTIAKTMQQSAGGR

SEQ ID NO: 84931 - protein, 246 aa, Homo sapiens
MAENHCELLSPARGGIGAGLGGGLCRRCSAGLGALAQRPGSVSKWVRLNVGGTYFLTTRQTLCRDPKSFLYRLCQADPDLDSDKDETGAYLIDRDPTYFGPVLNYLRHGKLVINKDLAEEGACEACVPCAAVPGGGAHADGVHHVRRLEVRAVGQHRLLLQLWERRPSRVPLCGVQGAAQHPVRYGQRAQREGQDFARTRLKDVRDTVLTAEEMIYVFPRCNELPCPGSLAVRRNLLLIIFLEIWV

SEQ ID NO: 84932 - protein, 180 aa, Homo sapiens
MSFETTAITFFIILLICLICILLLLVVFLYKCFQGRKGKETKKVPCTDANGGVDCAAAKVVTSNPEDHERRVWCRMPGILVQRQSKEVLATPLENRRDMEAEEENQINEKQEPENAGETGQEEDDGLQKIHTSVTRTPSVVESQKRPLKGVTFSREVIVVDLGNEYPTPRSYTREHKERK

SEQ ID NO: 84933 - protein, 112 aa, Homo sapiens
MSSEPPPPPQPPTHQASVGLLDTPRSRERSPSPLRGNVVPSPLPTRRTRTFSATVRASQGPVYKGVCKCFCRSKGHGFITPADGGPDIFLHISDVEGEYVPVEGDEVTYKMC

SEQ ID NO: 84934 - protein, 36 aa, Homo sapiens
MQVNTTKFMLLYAWYSWPNVVLCFFGGFLIDRVFGI

SEQ ID NO: 84935 - protein, 455 aa, Homo sapiens
MTPALTALLCLGLSLGPRTRVQAGPFPKPTLWAEPGSVISWGSPVTIWCQGSQEAQEYRLHKEGSPEPLDRNNPLEPKNKARFSIPSMTEHHAGRYRCHYYSSAGWSEPSDPLEMVMTGAYSKPTLSALPSPVVASGGNMTLRCGSQKGYHHFVLMKEGEHQLPRTLDSQQLHSRGFQALFPVGPVTPSHRWRFTCYYYYTNTPWVWSHPSDPLEILPSGVSRKPSLLTLQGPVLAPGQSLTLQCGSDVGYNRFVLYKEGERDFLQRPGQQPQAGLSQANFTLGPVSPSNGGQYRCYGAHNLSSEWSAPSDPLNILMAGQIYDTVSLSAQPGPTVASGENVTLLCQSWWQFDTFLLTKEGAAHPPLRLRSMYGAHKYQAEFPMSPVTSAHAGTYRCYGSYSSNPHLLSHPSEPLELVVSGEGADPVLSELKGSAQAQAPRRALGWDGPREAVREA

SEQ ID NO: 84936 - protein, 30 aa, Homo sapiens
  MOD_RES (1)..(1): Any amino acid
XVSGLFKLWHELRKGRRISGMRKLRFTETE

SEQ ID NO: 84937 - protein, 187 aa, Homo sapiens
  MOD_RES (1)..(1): Any amino acid
XGSRESSGSRKQEKTPKDYKEYKSYKDDSSREEKESKKEREEEFKTHHEMKEYSGFAGVSRPRGTFFRIRGRGRARGVFAGTNTGPNNSNTTFQKRPKEEEWDPEYTPKSKKYFLHDDRDDGVDYWAKRGRGRGTFQRGRGRFNFKKSGSSPKWTHDKYQGDGIVEDEEETMENNEEKKDRRKEEKE

SEQ ID NO: 84938 - protein, 208 aa, Homo sapiens
MVRAQNKKKKKSGGFQSMGLSYPVFKGIMKKGYKVPTPIQRKTIPVILDGKDVVAMARTGSGKTACFLLPMFERLKTHSAQTGARALILSPTRELALQTLKFTKELGKFTGLKTALILGGDRMEDQFAALHENPDIIIATPGRLVHVAVEMSLKLQSVEYVVFDEADRLFEMGFAEQLQEIIARLPGGHQTVLFSATLPKLLVEFARA

SEQ ID NO: 84939 - protein, 250 aa, Homo sapiens
MAETLRRVLTRGGAAWSGEENMPAAGPPLLLLGTPGSGKTALLFAAALEAAGEGQGPVLFLTRRPLQSMPRGTGTTLDPMRLQKIRFQYPPSTRELFRLLCSAHEAPGPAPSLLLLDGLEEYLAEDPEPQEAAYLIALLLDTAAHFSHRLGPGRDCGLMVALQTQEEAGSGDVLHLALLQRYFPAQCWLQPDAPGPGEHGLRACLEPGGLGPRTEWWVTFRSDGEMMIAPWPTQAGDPSSGKGSSSGGQP

SEQ ID NO: 84940 - protein, 126 aa, Homo sapiens
MEKLKALLPRLEQELKDTAKFKDFYQFTFTFAKNPGQKGLDLEMAVAYWKLVLSGRFKFLDLWNTFLMEHHKRSIPRDTWNLLLDFGNMIADDMSNYDEEGAWPVLIDDFVEYARPVVTGGKRSLF

SEQ ID NO: 84941 - protein, 624 aa, Homo sapiens
MVGRSPSATPAERPPRGCAELAQRQQHEPDPRIGRAPVESRLLREAGPTPARAAGQLEYETQIKKMLCSKDSLGLKEELTDEDREKVAVHEGINSGTAMSRGLYQPATIFMGRQMSAILSMRDFSTEHKSPQPTKNFSIPDPHSHRQTAQSSNVTDSCVVQTSNDTQCLNKSDNIDGKASLQIGEKMPVTASVLSEEEQTHCLEIGSNTRHGKSNLSEGKKSAELNSPLRERLSPENRTTDLKCDSSSGSEGEILTREHIEVEEKRASPPVSPIPVSEYCESENKWSQEKHSPWEGVSDHLAHREPKSQKPFRKMQEEEEESWSTSSDLTISISEDDLILESPEPQPNPGGKMEGEDGIEALKLIHAEQERVALSTEKNCILQTLSSPDSEKESSTNAPTREPGQTPDSDVPRAQVGQHVATLKEHDNSVKEEATALLRKALTEECGRRSAIHSSESSCSLPSILNDNSGIKEAKPAVWLNSVPTREQEVSSGCGDKSKKENVAADIPITETEAYQLLKKATLQDNTNQTENRFQKTDASVSHLSGLNIGSGAFETKTANKIASEASFSSSEGSPLSRHENKKKPVINLKSNALWDESDDSNSEIEAALRPRNHNTDDSDDFYD

SEQ ID NO: 84942 - protein, 49 aa, Homo sapiens
MDGSRRVRATSVLPRYGPPCLFKGHLSTKSNAAVDCSVPVSVSTSIKCI

SEQ ID NO: 84943 - protein, 166 aa, Homo sapiens
MRTKQVNLLITLVAVALFSFSCFSIYRITQTNNQLINCRNHILEFKENMLHLRNKTEKNTQEMMKVLNRMKYEITKREILSGNLGKLFRSEDLTHFVRFFLMFYKEKPIDWLLNDIFQVKVCDAGEDLRNCMKRKKQIRIQYKPSLFQHVGIHSSFPRKEQYEKKI

SEQ ID NO: 84944 - protein, 157 aa, Homo sapiens
MRNYLKERGDQTVLILHAKVAQKSYGNEKRFFCPPPCVYLMGSGWKKKKEQMERDGCSEQESQPCAFIGIGNSDQEMQQLNLEGKNYCTAKTLYISDSDKRKHFMLSVKMFYGNSDDIGVFLSKRIKVISKPSKKKQSLKNADLCIASGTKVALFNR

SEQ ID NO: 84945 - protein, 35 aa, Homo sapiens
MAAPVDLELKKVYSSVQGSNSQSAVREAENSRRKN

SEQ ID NO: 84946 - protein, 116 aa, Homo sapiens
  MOD_RES (1)..(1): Any amino acid
XRMGLERMGANSLERMGPAMGPALGAGIERMGLAMGGGGGASFDRAIEMERGNFGGSFAGSFGGAGGHAPGVARKACQIFVRNLPFDFTWKMLKDKFNECGKCWERLCRCFPRACW

SEQ ID NO: 84947 - protein, 307 aa, Homo sapiens
MPFMRKILSNMIDSEAHEKRPPILTSSKQDISPHITNVGEMKHYLCGCCAAFNNVAITYPIQKVLFRQQLYGIKTRDAVLQLRRDGFRNLYRGILPPLMQKTTTLALMFGLYEDLSCLLRKHVRAPEFATHGVAAVLAGTAEAIFTPLERVQTLLQNHKHHDKFTNTYQAFKALKCHGIGEYYRGLVPILFRNGLSNVLFFGLRGPIKEHLPTATTHSAHLVNDFIGGGLLGAMLGFLCFPINVVKTRLQSQIGGEFQSFPKVFQKIWLERDRKLINLFRGAHLNYHRSLISWGIINATYEFLLKFI

SEQ ID NO: 84948 - protein, 133 aa, Homo sapiens
MACPDENVSSGELRGLCAAPREEKERETEAAQMEHQKERNSFEERIQALEEDLREKEREIATEKKNSLKRDKAIQGLTMALKSKEKKVEELNSEIEKLSAAFAKAREALQKAQTQEFQGSEDYETALSGKEAL

SEQ ID NO: 84949 - protein, 823 aa, Homo sapiens
MKINNEEIVSDPIYIEVQGLPHFTKQPESMNVTRNTAFNLTCQAVGPPEPVNIFWVQNSSRVNEQPEKSPSVLTVPGLTEMAVFSCEAHNDKGLTVSKGVQINIKAIPSPPTEVSIRNSTAHSILISWVPGFDGYSPFRNCSIQVKEADPLSNGSVMIFNTSALPHLYQIKQLQALANYSIGVSCMNEIGWSAVSPWILASTTEGAPSVAPLNVTVFLNESSDNVDIRWMKPPTKQQDGELVGYRISHVWQSAGISKELLEEVGQNGSRARISVQVHNATCTVRIAAVTRGGVGPFSDPVKIFIPAHGWVDYAPSSTPAPGNADPVLIIFGCFCGFILIGLILYISLAIRKRVQETKFGNAFTEEDSELVVNYIAKKSFCRRAIELTLHSLGVSEELQNKLEDVVIDRNLLILGKILGEGEFGSVMEGNLKQEDGTSLKVAVKTMKLDNSSQREIEEFLSEAACMKDFSHPNVIRLLGVCIEMSSQGIPKPMVILPFMKYGDLHTYLLYSRLETGPKHIPLQTLLKFMVDIALGMEYLSNRNFLHRDLAARNCMLRDDMTVCVADFGLSKKIYSGDYYRQGRIAKMPVKWIAIESLADRVYTSKSDVWAFGVTMWEIATRGMTPYPGVQNHEMYDYLLHGHRLKQPEDCLDELYEIMYSCWRTDPLDRPTFSVLRLQLEKLLESLPDVRNQADVIYVNTQLLESSEGLAQGSTLAPLDLNIDPDSIIASCTPRAAISVVTAEVHDSKPHEGRYILNGGSEEWEDLTSAPSAAVTAEKNSVLPGERLVRNGVSWSHSSMLPLGSSLPDELLFADDSSEGSEVLM

SEQ ID NO: 84950 - protein, 169 aa, Homo sapiens
MTTPGKENFRLKSYKNKSLNPDEMRRRREEEGLQLRKQKREEQLFKRRNVATAEEETEEEVMSDGGFHEAQISNMEMAPGGVITSDMIEMIFSKSPEQQLSATQKFRKLLSKEPNPPIDEVISTPGVVARFVEFLKRKENCTLQAVWALGNIAGDSTMCRDYVLDCNIL

SEQ ID NO: 84951 - protein, 168 aa, Homo sapiens
MNSGVNLQRSLSSPPSSKRPKTISIDENMEPSPTGDFYPSPSSPAAGSRTWHERDQDMSSPTTMKKPEKPLFSSASPQDSSPRLSTFPQHHHPGIPGVAHSVISTRTPPPPSPLPFPTQAILPPAPSSYFSHPTIRYPPHLNPQDTLKNYVPSYDPSSPQTSQSWYLG

SEQ ID NO: 84952 - protein, 215 aa, Homo sapiens
MDNYADLSDTELTTLLRRYNIPHGPVVGSTRRLYEKKIFEYETQRRRLSPPSSSAASSYSFSDLNSTRGDADMYDLPKKEDALLYQSKGYNDDYYEESYFTTRTYGEPESAGPSRAVRQSVTSFPDADAFHHQVHDDDLLSSSEEECKDRERPMYGRDSAYQSITHYRPVSASRSSLDLSYYPTSSSTSFMPSMVLFVILLTCIPPFVILLGGGD

SEQ ID NO: 84953 - protein, 142 aa, Homo sapiens
  MOD_RES (1)..(1): Any amino acid
XLEELKVRKSLSSKLTKTNERLAEVNTKLLVEKQQSRSLFTTLTTRPVMEPPCVGNLNNSLDLNRKLIPRENLVISTSNPRASNNSMENYLSKMQQELEKNITRELKEGCRNGMCLQLRQCATEKSRVMVAQRSALTEEAVA

SEQ ID NO: 84954 - protein, 83 aa, Homo sapiens
  MOD_RES (1)..(1): Any amino acid
XLQQCSITKLGCRYLSEALQEACSLTNLDLSINQIARGLWILCQALENPNCNLKHLRILDLLSSAIRSLKLWTWARIICGRVA

SEQ ID NO: 84955 - protein, 114 aa, Homo sapiens
VHFDQFKEALILILSRTLSNEEHFQEPASVGVSCQQVARVSGPLLNGHKLTHCLLIKDCSLEAQPKYVRGGKRYGRRSLPEFQESVEEFPEVTVIEPLDEEARPSHIPAGDCSE

SEQ ID NO: 84956 - protein, 22 aa, Homo sapiens
VEDAMLMFDKTTNRHRGGLAEA

SEQ ID NO: 84957 - protein, 76 aa, Homo sapiens
LLDLMHTLHTRAASIYSSWAEEQRHLETGGQKIEADSRTLWAHCWCPLLYCLPVLRCPAPGTDAGTDLSAASTTCT

SEQ ID NO: 84958 - protein, 141 aa, Homo sapiens; identical to SEQ ID NO: 73871
  MOD_RES (1)..(1): Any amino acid

SEQ ID NO: 84959 - protein, 40 aa, Homo sapiens
MATANFGKIQIGIYVEIKRSDDTTICGMFGTIFAPPLEAE

SEQ ID NO: 84960 - protein, 84 aa, Homo sapiens
  MOD_RES (1)..(1): Any amino acid
XKSENGEAYQRKKAAATGLPEGPAVPVPSRGNLAQPGGSSWRRIALLILAITIHNVPVETRVLLCWPGWPRTAGLKRTSCFSLP

SEQ ID NO: 84961 - protein, 194 aa, Homo sapiens
MKGGDRAYTRGPSLGWLFAKCCCCFPCRDAYSHSSSENGGKSESVANLQAQPSLNSIHSSPGPKRSTNTLKKWLTSPVRRLNSGKADGNIKKQKKVRDGRKSFDLGSPKPGDETTPQGDSADEKSKKGWGEDEPDEESHTPLPPPMKIFDNDPTQDEMSLEGSSYRGSLKDPAGCLNEGMAPPTPPKNPEEEQK

SEQ ID NO: 84962 - protein, 265 aa, Homo sapiens
MSTSWSDRLQNAADMPANMDKHALKKYRREAYHRVFVNRSLAMEKIKCFGFDMDYTLAVYKSPEYESLGFELTVERLVSIGYPQELLSFAYDSTFPTRGLVFDTLYGNLLKVDAYGNLLVCAHGFNFIRGSQVAVQKRPETREQYPNKFIQRDDTERFYILNTLFNLPETYLLACLVDFFTNCPRYTSCETGFKDGDLFMSYRSMFQDVRDAVDWVHYKGSLKEKTVENLEKYVVKDGKLPLLLSRMKEVGKVFLATNSDYKYTD

SEQ ID NO: 84963 - protein, 88 aa, Homo sapiens
  MOD_RES (1)..(1): Any amino acid
XPAPPAPPAPPPRGPKRKLYSAVPGRKFIAVKAHSPQGEGEIPLHRGEAVKGFCHRGFLCSGGIACHDKPLSFWGSRGHHWAPSLRAG

SEQ ID NO: 84964 - protein, 39 aa, Homo sapiens
MGRGSGTFERLLDRFCIRERRCGQSWSCPPRGASCWRQQ

SEQ ID NO: 84965 - protein, 44 aa, Homo sapiens
MADESETAVKPPAPPLPQMMEGNGNGHEHCSDCENEEDNSYNRG

SEQ ID NO: 84966 - protein, 433 aa, Homo sapiens
LPTCALQRVDRLGVAEAGGRRCRACRARTSVLPGLRAVRRGQGQAAGRVCVAPDSPRLPVPRGDLKGRGREIRSPAAAPSRSSPAQTRPAGRPQQPARLALGERSWQEGRPVCTRFGPLRPGWQDGHAPSRDGASRTPSGTEDQLYPGTLPFPPLWPHSTTTTSPSSPLFWSPLPPRLPTQRLPQVPPLPLPQIQALSSAWVVLPPGKGEEGPGPELHSGCLDGLRSLFEGPPCPYPGAWIPFQVPGTAHPSPATPSGDPSMEEHLSVMYERLRQELPKLFLQSHDYSLYSLDVEFINEILNIRTKGRTWYILSLTLCRFLAWNYFAHLRLEVLQLTRHPENWTLQARWRLVGLPVHLLFLRFYKRDKDEHYRTYDAYSTFYLNSSGLICRHRLDKLMPSHSPPTPVKKLLVGALVALGLSEPEPDLNLCSKP

SEQ ID NO: 84967 - protein, 31 aa, Homo sapiens
  MOD_RES (1)..(1): Any amino acid
XCGTLLILDPDEAGLRLFRSVALTGMMVCLM

SEQ ID NO: 84968 - protein, 59 aa, Homo sapiens
  MOD_RES (1)..(1): Any amino acid
XDYYRVGGRTMLPIRWMPPESILYRKFTTESDVWSFGVVLWEIFTYGKQPWYQLSNTET

SEQ ID NO: 84969 - protein, 175 aa, Homo sapiens; identical to SEQ ID NO: 45445

SEQ ID NO: 84970 - protein, 66 aa, Homo sapiens
VVNFPPALYEYVTGELGLALVLVLNKVDLAPPALVVAWKHYFHQHYPQLHVVLFTSFPRDPRTPQD

SEQ ID NO: 84971 - protein, 63 aa, Homo sapiens
MIVNLLKYFKLYKSAVEVSTTQCGFSFRCDFYLNSDIRNHVLDLPCSSQSALHCCGYMEMLNK

SEQ ID NO: 84972 - protein, 236 aa, Homo sapiens
QNRFSDYEKRKEQKMLEKLEFERRLELGQREHTQLLQQSSSQKDEILQTVKEEQSRLEQGLSEHQRHLNAERQRLQEQLKQTEQNISSRIQKLLQDNQRQKKSSEILKSLENERIRMEQLMSITQEETESLRRRDVASAMQQMLTESCKNRLIQMAYESQRQNLVQQACSRFHRCPAEPVGKTQCSGAPDRDRPAALDALFFLPCMWLALLPPSRAPGLCGPPLGPCRCGNFSPLS

SEQ ID NO: 84973 - protein, 157 aa, Homo sapiens
MPFLKANEVTDSAYMGSESTYSECETFTDEDTSTLVHPELQPEGDADSAGGSAVPSECLDAMEEPDHGALLLLPGRPHPHGQSVITVIGGEEHFEDYGEGSEAELSPETLCNGQLGCSDPAFLTPSPTKRLSSKKVARYLHQSGALTMEALEDPSPE

SEQ ID NO: 84974 - protein, 224 aa, Homo sapiens
MLKRKQSSRVEAQPVTDFGPDESLSDNADILWINKPWVHSLLRICAIISVISVCMNTPMTFEHYPPLQYVTFTLDTLLMFLYTAEMIAKMHIRGIVKGDSSYVKDRWCVFDGFMVFCLWVSLVLQVFEIADIVDQMSPWGMLRIPRPLIMIRAFRIYFRFELPRTRITNILKRSGEQIWSVSIFLLFFLLLYGILGVQMFGTFTYHCVVNDTKPGYQIIDDKHR

SEQ ID NO: 84975 - protein, 93 aa, Homo sapiens
  MOD_RES (1)..(1): Any amino acid
XDQLLSARVFFENFKYEDALRLLQCAEPYKVSFCLKRTVPTGDLALRPGTVSGYEIKGPRAKVAKLVRVLSPAPALDCPSDPVSAPTSRVCPL

SEQ ID NO: 84976 - protein, 97 aa, Homo sapiens
MSGGGPSGGGPGGSGRARTSSFAEPGGGGGGGGGGPGGSASGPGGTGGGKASVGAMGGGVGASSSGGGPGGSGGGGSGGPGAGTSFPPPGVKLGREY

SEQ ID NO: 84977 - protein, 320 aa, Homo sapiens
MLDLEVVPERSLGNEQWEFTLGMPLAQAVAILQKHCRIIKNVQVLYSEQSPLSHDLILNLTQDGIKLMFDAFNQRLKVIEVCDLTKVKLKYCGVHFNSQAIAPTIEQIDQSFGATHPGVYNSAEQLFHLNFRGLSFSFQLDSWTEAPKYEPNFAHGLASLQIPHGATVKRMYIYSGNSLQDTKAPMMPLSCFLGNVYAESVDVLRDGTGPAGLRLRLLAAGCGPGLLADAKMRVFERSVYFGDSCQDVLSMLGSPHKVFYKSEDKMKIHSPSPHKQVPSKCNDYFFNYFTLGVDILFDANTHKVKKFVLHTNYPGHYNFN

SEQ ID NO: 84978 - protein, 45 aa, Homo sapiens
MTQQPLRGVTSLRFNQDQSCFCCAMETGVRIYNVEPLMEKGHLGS

SEQ ID NO: 84979 - protein, 1064 aa, Homo sapiens
  MOD_RES (1)..(1): Any amino acid
XNSSPIHLNRTPLSPPSVMLHGSPVQSSCAMAGRTNIPLSPTLTTKSPVMKKPMCNFSTNMEIPRAMFHHKPPQGPPPPPPPSCALQKKPLTSEKDPLGILDPIPSKPVNQNPVIINPTSFHSNVHSQVPMMNVSMPPAVVPLPSNLPLPTVKPGHMNHGSHVQRVQHSASTSLSPSPVTSPVHMMGTGIGRIEASPQRSRSSSTSSDHGNFMMPPVGPQATSSGIKVPPRSPRSTIGSPRPSMPSSPSTKSDGHHQYKDIPNPLIAGISNVLNTPSSAAFPTASAGSSSVKSQPGLLGMPLNQILNQHNAASFPASSLLSAAAKAQLANQNKLAGNNSSSSSNSGAVAGSGNTEGHSTLNTMFPPTANMLLPTGEGQSGRAALRDKLMSQQKDALRKRKQPPTTVLSLLRQSQMDSSAVPKPGPDLLRKQGQGSFPISSMSQLLQSMSCQSSHLSSNSTPGCGASNTALPCSANQLHFTDPSMNSSVLQNIPLRGEAVHCHNANTNFVHSNSPVPNHHLAGLINQIQASGNCGMLSQSGMALGNSLHPNPPQSRISTSSTPVIPNSIVSSYNQTSSEAGGSGPSSSIAIAGTNHPAITKTTSVLQDGVIVTTAAGNPLQSQLPIGSDFPFVGQEHALHFPSNSTSNNHLPHPLNPSLLSSLPISLPVNQQHLLNQNLLNILQPSAGEGKSEINLHPLGFLNPNVNAALAFLSSDMDGQVLQPVHFQLLAALLQNQAQAAAMLPLPSFNLTISDLLQQQNTPLPSLTQMTAPPDHLPSNQSDNSRAETLLTSPLGNPLPSFAGSDTTFNPLFLPAVNGASGLMTLNPQLLGGVLNSASANTANHPEVSIATSSQATTTTTTTSSAVAALTVSTLGGTAVVSMAETLLNISNNAGNTPGPAKLNSNSVVPQLLNPLLGTGLLGDMSSINNTLSNHQLTHLQSLLNNNQMFPPNQQQQQLLQGYQNLQAFQGQSTIPCPANNNPMACLFQNFQVEPEKLKTLTEGLEAYSRVRKRNRKSGKLNNHLEAAIHEAMSELDKMSGTVHQIPQGDRQMRPPKPKRRKISR

SEQ ID NO: 84980 - protein, 135 aa, Homo sapiens
MATATGVAEERLLAALAYLQCAVGCAVFARNRQTNSVYGRHALPSHRLRVPARAAWVVQELPSLALPLYQYASESAPRLRSAPNCILLAMFLVHYGHRFWLVVNGHVDKHPFRSYPKESQKTRRYWIQNTKGRLI

SEQ ID NO: 84981 - protein, 111 aa, Homo sapiens
  MOD_RES (1)..(1): Any amino acid
XELSVYGKLRKVAKMGPYSMFCKLLGMWRHICTPRQVADKVKRFFSKYSMNRHKMTTLTPAYHAENYSPEDNRFDLRPFLYNTSWPWQFRCIENQVLQLERAEPQSLDGVD

SEQ ID NO: 84982 - protein, 391 aa, Homo sapiens
MDYLGDKLTVAQTHMTQWMGTVRRSFQEALNLVTTTVGHERTSAESASRTPFKRTSSFRHLASRSRESFRRFSARSQQRFSSLRKRHTDSEPPDIDQLKQCFSRQPTEPKDTDTLVHEAGSQYGTWTEQCQSGESLATESPDSSATSTRKQPPSSRLSSLSSQTEPTSAGDQYDCSRDQRSTSVDHSSTDLESTDGMEGPPPPDACPEKRVDDFSFIDQTSVLDSSALKTRVQLSKRSRRRAPISHSLRRSRFSESESRSPLEDETDNTWMFKDSTEEKSPRKEESDEEETASKAERTPVSHPQRMPAFPGMDPAVLKAQLHKRPEVDSPGETPSWAPQPKSPKSPFQPGVLGSRVLPSSMDKDERSDEPSPQWLKELKSKKRQSLYENQV

SEQ ID NO: 84983 - protein, 166 aa, Homo sapiens
MSSFGYRTLTVALFTLICCPGSDEKVFEVHVRPKKLAVEPKGSLEVNCSTTCNQPEVGGLETSLDKILLDEQAQWKHYLVSNISHDTVLQCHFTCSGKQESMNSNVSVYQPPRQVILTLQPTLVAVGKSFTIECRVPTVEPLDSLTLFLFRGNETLHYETFGKAAP

SEQ ID NO: 84984 - protein, 70 aa, Homo sapiens
MSILKIHAREIFDSRGNPTVEVDLFTSKGLFRAAVPSGASTGIYEALELRDNDKTRYMGKETERHRTRED

SEQ ID NO: 84985 - protein, 62 aa, Homo sapiens
  MOD_RES (1)..(1): Any amino acid
XVSITVLNVTLNDSGLYTCNVSREFEFEAHRPFVKTTRLIPLRVTEEGIPPSTTGSSKDRGS

SEQ ID NO: 84986 - protein, 89 aa, Homo sapiens
MEAADASRSNGSSPEARDARSPSGPSGSLENGTKADGKDAKTTNGHGGEAAEGKSLGSALKPGEGRSALFAGNEWRRPIIQFVESGDDK

SEQ ID NO: 84987 - protein, 149 aa, Homo sapiens
MLGSLVLRRKALAPRLLLRLLRSPTLRGHGGASGRNVTTGSLGEPQWLRVATGGRPGTSPALFSGRGAATGGRQGGRFDTKCLAAATWGRLPGPEETLPGQDSWNGVPSRAGLGMCRCQCKAQTWLDSTHGGSHQPKQQCGTGPACCWG

SEQ ID NO: 84988 - protein, 86 aa, Homo sapiens
MCSTMSAPTCLAHLPPCFLLLALVLVPSDASGQSSRNDWQVLQPEGPMLVAEGETLLLRCMVVGSCTDGMIKWVKGAHWNLPLCEV

SEQ ID NO: 84989 - protein, 638 aa, Homo sapiens
MPLFFRKRKPSEEARKRLEYQMCLAKEAGADDILDISKCELSEIPFGAFATCKVLQKKVLIVHTNHLTSLLPKSCSLLSLATIKVLDLHDNQLTALPDDLGQLTALQVLNVERNQLMQLPRSIGNLTQLQTLNVKDNKLKELPDTVGELRSLRTLNISGNEIQRLPQMLAHVRTLEMLSLDASAMVYPPREVCGAGTAAILQFLCKESGLEYYPPSQYLLPILEQDGIENSRDSPDGPTDRFSREELEWQNRFSDYEKRKEQKMLEKLEFERRLELGQREHTQLLQQSSSQKDEILQTVKEEQSRLEQGLSEHQRHLNAERQRLQEQLKQTEQNISSRIQKLLQDNQRQKKSSEILKSLENERIRMEQLMSITQEETESLRRRDVASAMQQMLTESCKNRLIQMAYESQRQNLVQQACSSMAEMDERFQQILSWQQMDQNKAISQILQESAMQKAAFEALQVKKDLMHRQIRSQIKLIETELLQLTQLELKRKSLDTESLQEMISEQRWALSSLLQQLLKEKQQREEELREILTELEAKSETRQENYWLIQYQRLLNQKPLSLKLQEEGMERQLVALLEELSAEHYLPIFAHHRLSLDLLSQMSPGDLAKVGVSEAGLQHEILRRVQELLDAARIQPG

SEQ ID NO: 84990 - protein, 481 aa, Homo sapiens
MTSSPRAPPGEQGRGGAEMIRAAPPPLFLLLLLLLLLVSWASRGEAAPDQDEIQRLPGLAKQPSFRQYSGYLKGSGSKHLHYWFVESQKDPENSPVVLWLNGGPGCSSLDGLLTEHGPFLIANVLYLESPAGVGFSYSDDKFYATNDTEVAQSNFEALQDFFRLFPEYKNNKLFLTGESYAGIYIPTLAVLVMQDPSMNLQGLAVGNGLSSYEQNDNSLVYFAYYHGLLGNRLWSSLQTHCCSQNKCNFYDNKDLECVTNLQEVARIVGNSGLNIYNLYAPCAGGVPSHFRYEKDTVVVQDLGNIFTRLPLKRMWHQALLRSGDKVRMDPPCTNTTAASTYLNNPYVRKALNIPEQLPQWDMCNFLVNLQYRRLYRSMNSQYLKLLSSQKYQILLYNGDVDMACNFMGDEWFVDSLNQKMEVQRRPWLVKYGDSGEQIAGFVKEFSHIAFLTIKGAGHMVPTDKPLAAFTMFSRFLNKQPY

SEQ ID NO: 84991 - protein, 223 aa, Homo sapiens
MDFLLLGLCLYWLLRRPSGVVLCLLGACFQMLPAAPSGCPQLCRCEGRLLYCEALNLTEAPHNLSGLLGLSLRYNSLSELRAGQFTGLMQLTWLYLDHNHICSVQGDAFQKLRRVKELTLSSNQITQLPNTTFRPMPNLRSVDLSYNKLQALAPDLFHGLRKLTTLHMRANAIQFVPVRIFQDCRSLKFLDIGYNQLKSLARNSFAGLFKLTELHLEHNDLVK

SEQ ID NO: 84992 - protein, 201 aa, Homo sapiens
MNPEKDFAPLTPNIVRALNDKLYEKRKVAALEIEKLVREFVAQNNTVQIKHVIQTLSQEFALSQHPHSRKGGLIGLAACSIALGKDSGLYLKELIEPVLTCFNDADSRLRYYACEALYNIVKVARGAVLPHFNVLFDGLSKLAADPDPNVKSGSELLDRLLKVFFSSGSTTSTSKLLGRCSGTRTASFPSYCRRYRMNRMR

SEQ ID NO: 84993 - protein, 458 aa, Homo sapiens
  MOD_RES (1)..(1): Any amino acid
XKQQLPPKKKRRVGTTVHCDYLNRPHKSIHRRRTDPMVTLSSILESIINDMRDLPNTYPFHTPVNAKVVKDYYKIITRPMDLQTLRENVRKRLYPSREEFREHLELIVKNSATYNGPKHSLTQISQSMLDLCDEKLKEKEDKLARLEKAINPLLDDDDQVAFSFILDNIVTQKMMAVPDSWPFHHPVNKKFVPDYYKVIVNPMDLETIRKNISKHKYQSRESFLDDVNLILANSVKYNGPESQYTKTAQEIVNVCYQTLTEYDEHLTQLEKDICTAKEAALEEAELESLDPMTPGPYTPQAKPPDLYDTNTSLSMSRDASVFQDESNMSVLDIPSATPEKQVTQEGEDGDGDLADEEEGTVQQPQASVLYEDLLMSEGEDDEEDAGSDEEGDNPFSAIQLSESGSDSDVGSGGIRPKQPRMLQENTRMDMENEESMMSYEGDGGEASHGLEDSNIRYQ

SEQ ID NO: 84994 - protein, 913 aa, Homo sapiens
MDAGFFRGTSAEQDNRFSNKQKKLLKQLKFAECLEKKVDMSKVNLEVIKPWITKRVTEILGFEDDVVIEFIFNQLEVKNPDSKMMQINLTGFLNGKNAREFMGELWPLLLSAQENIAGIPSAFLELKKEEIKQRQIEQEKLASMKKQDEDKDKRDKEEKESSREKRERSRSPRRRKSRSPSPRRRSSPVRRERKRSHSRSPRHRTKSRSPSPAPEKKEKTPELPEPSVKVKEPSVQEATSTSDILKVPKPEPIPEPKEPSPEKNSKKEKEKEKTRPRSRSRSKSRSRTRSRSPSHTRPRRRHRSRSRRRPSPRRRPSPRRRTPPRRMPPPPRHRRSRSPVRRRRRSSASLSGSSSSSSSSRSRSPPKKPPKRTSSPPRKTRRLSPSASPPRRRHRPSPPATPPPKTRHSPTPQQSNRTRKSRVSVSPGRTSGKVTKHKGTEKRESPSPAPKPRKVELSESEEDKGGKMAAADSVQQRRQYRRQNQQSSSDSGSSSSSEDERPKRSHVKNGEVGRRRRHSPSRSASPSPRKRQKETSPRMQMGKRWQSPVTKSGRRRRSPSPPPTRRRRSPSPAPPPRRRRTPTPPPRRRTPSPPPRRRSPSPRRYSPPIQRRYSPSPPPKRRTASPPPPPKRRASPSPPPKRRVSHSPPPKQRSSPVTKRRSPSLSSKHRKGSSPSRSTREARSPQPNKRHSPSPRPRAPQTSSSPPPVRRGASSSPQRRQSPSPSTRPIRRVSRTPEPKKIKKAASPSPQSVRRVSSSRSVSGSPEPAAKKPPAPPSPVQSQSPSTNWSPAVPVKKAKSPTPSPSPPRNSDQEGGGKKKKKKKDKKHKKDKKHKKHKKHKKEKAVAAAAAAAVTPAAIAAATTTLAQEEPVAAPEPKKETESEAEDNLDDLEKHLREKALRSMRKAQVSPQS

SEQ ID NO: 84995 - protein, 40 aa, Homo sapiens
MAGSADSYTSRPSDSDVSLEEDREAIRQEREQQAAIQLER

SEQ ID NO: 84996 - protein, 196 aa, Homo sapiens
MPHLASLFTASSRCCPHPLRPEGSGAMGPEALSSLLLLLLVASGDADMKGHFDPAKCRYALGMQDRTIPDSDISASSSWSDSTAARHSRLESSDGDGAWCPAGSVFPKEEEYLQVDLQRLHLVALVGTQGRHAGGLGKEFSRSYRLRYSRDGRRWMGWKDRWGQEVISGNEDPEGVVLKDLGPPMVARLVRFYPRA

SEQ ID NO: 84997 - protein, 118 aa, Homo sapiens
MATEIGSPPRFFHMPRFQHQAPRQLFYKRPDFAQQQAMQQLTFDGKRMRKAVNRKTIDYNPSVIKYLENRIWQRDQRDMRAIQPDAGYYNDLVPPIGMLNNPMNAVTTKFVRTSTNKV

SEQ ID NO: 84998 - protein, 34 aa, Homo sapiens
MVGEGSIQSSRYKKESKSGLVKPGSEADFSSSSS

SEQ ID NO: 84999 - protein, 137 aa, Homo sapiens
MGPLRESKKEHRVQHHDKEISRSRIPRLILRPHMPQQQHKVSPASESPFSEEESREFNPSSSGRSARTVSSNSFCSDDTGCPSSQSVSPVKTPSDAGNSPIGFCPGSDEGFTRKKCTIGMVGEGSIQSSRYKKESKS

SEQ ID NO: 85000 - protein, 195 aa, Homo sapiens
MAEKILEKLDVLDKQAEIILARRTKINRLQSEGRKTTMAIPLTFDFQLEFEEALATSASKAISKIKEDKSCSITKSKMHVSFKCEPEPRKSNFEKSNLRPFFIQTNVKNKESESTEPVEEHLKSRSIRPYLYLKDTTEMENAGPLNVLYSQHRQACRRSLGSTDFSPMFNIQSNAHKKEKDSTLFTAQIEKKPRK

SEQ ID NO: 85001 - protein, 696 aa, Homo sapiens
MGLCLAGRRRSVQWCAVSQPEATKCFQWQRNMRKVRGPPVSCIKRDSPIQCIQAIAENRADAVTLDGGFIYEAGLAPYKLRPVAAEVYGTERQPRTHYYAVAVVKKGGSFQLNELQGLKSCHTGLRRTAGWNVPIGTLRPFLNWTGPPEPIEAAVARFFSASCVPGADKGQFPNLCRLCAGTGENKCAFSSQEPYFSYSGAFKCLRDGAGDVAFIRESTVFEDLSDEAERDEYELLCPDNTRKPVDKFKDCHLARVPSHAVVARSVNGKEDAIWNLLRQAQEKFGKDKSPKFQLFGSPSGQKDLLFKDSAIGFSRVPPRIDSGLYLGSGYFTAIQNLRKSEEEVAARRARVVWCAVGEQELRKCNQWSGLSEGSVTCSSASTTEDCIALVLKGEADAMSLDGGYVYTAGKCGLVPVLAENYKSQQSSDPDPNCVDRPVEGYLAVAVVRRSDTSLTWNSVKGKKSCHTAVDRTAGWNIPMGLLFNQTGSCKFDEYFSQSCAPGSDPRSNLCALCIGDEQGENKCVPNSNERYYGYTGAFRCLAENAGDVAFVKDVTVLQNTDGNNNEAWAKDLKLADFALLCLDGKRKPVTEARSCHLAMAPNHAVVSRMDKVERLKQVLLHQQAKFGRNGSDCPDKFCLFQSETKNLLFNDNTECLARLHGKTTYEKYLGPQYVAGITNLKKCSTSPLLEACEFLR

SEQ ID NO: 85002 - protein, 52 aa, Homo sapiens
MQPRTPLVLCVLLSQVLLLTSAEDLDCTPGFQQKVFHINQPAEFIEDQSILN

SEQ ID NO: 85003 - protein, 51 aa, Homo sapiens
  MOD_RES (1)..(1): Any amino acid
XRKLLTWESVHKENFLLARARDKRESDSERLKRTSQKSSSVAASWGGWPRP

SEQ ID NO: 85004 - protein, 218 aa, Homo sapiens
MVLMQDKGSSQQWPGLGGEGGGTGPLSMLRAALLLISLPWGAQGTASTSLSTAGGHTVPPTGGRYLSIGDGSVMEFEFPEDSEGIIVISSQYPGQANRTAPGPMLRVTSLDTEVLTIKNVSAITWGGGGGFVVSIHSGLAGLAPLHIQLVDAHEAPPTLIEERRDFCIKVSPAEDTPATLSADLAHFSENPILYLLLPLIFVNKCSFGCKVELEVLKG

SEQ ID NO: 85005 - protein, 42 aa, Homo sapiens
MWRFYTEDSPGLKVGPVPVLVMSLLFIASVFMLHIWGKYTRS

SEQ ID NO: 85006 - protein, 266 aa, Homo sapiens
MSSHKGSVVAQGNGAPASNREADTVELAELGPLLEEKGKRVIANPPKAEEEQTCPVPQEEEEEVRVLTLPLQAHHAMEKMEEFVYKVWEGRWRVIPYDVLPDWLKDNDYLLHGHRPPMPSFRACFKSIFRIHTETGNIWTHLLGFVLFLFLGILTMLRPNMYFMAPLQEKVVFGMFFLGAVLCLSFSWLFHTVYCHSEKVSRTFSKLDYSGIALLIMGSFVPWLYYSFYCSPQPRLIYLSIVCVLGISAIIVAQWDRFATPKHRQT

SEQ ID NO: 85007 - protein, 51 aa, Homo sapiens
EIFASINQKDGMVSFHDNPEKYNNPAMLHNIDQESMGSQEDDSGNKPSSYS

SEQ ID NO: 85008 - protein, 74 aa, Homo sapiens
MSVPAFIDISEEDQVRKWISDWNLTTEKKHTLLRLLYEALVDCKKSDAASKVMVELLGSYTEDNASQARVDAHR

SEQ ID NO: 85009 - protein, 229 aa, Homo sapiens
MTPGTQSPFFLLLLLTVLTVVTGSGHASSTPGGEKETSATQRSSVPSSTEKNAIYKQGGFLGLSNIKFRPGSVVVQLTLAFREGTINVHDVETQFNQYKTEAASRYNLTISDVSVSDVPFPFSAQSGAGVPGWGIALLVLVCVLVALAIVYLIALAVCQCRRKNYGQLDIFPARDTYHPMSEYPTYHTHGRYVPPSSTDRSPYEKVSAGNGGSSLSYTNPAVAATSANL

SEQ ID NO: 85010 - protein, 97 aa, Homo sapiens
MTFLRHFLWAASTKDGRFTQKYPPVKFLSEKDRKRILITGGAGFVGSHLTDKLMMDGHEVTVVDNFFTGRKRNVEHWIGHENFELINHDVVEPLYIE

SEQ ID NO: 85011 - protein, 117 aa, Homo sapiens
  MOD_RES (1)..(1): Any amino acid
XCAENNNNMAMLICLIIIAVLFLICTFLFLSTVVLANKVSSLRRSKQVGKRQPRSNGDFLASGLWPAESDTWKRTKQLTGPNLVMQSTGVLTATRERKDEEGTEKLTNKQIDNEEIF

SEQ ID NO: 85012 - protein, 38 aa, Homo sapiens
MTETESFTPSPRLECGGAISAYCKLHLPSSSDSHASAS

SEQ ID NO: 85013 - protein, 84 aa, Homo sapiens
MGPYTFLETVCIYGYSLFVFIPMVVLWLIPVPWLQWLFGALALGLSAAGLVFTLWPVVREDTRLVATVLLSVVVLLHALLAMGC

SEQ ID NO: 85014 - protein, 155 aa, Homo sapiens
MPYQYPALTPEQKKELSDIAHRIVAPGKGILAADESTGSIAKRLQSIGTENTEENRRFYRQLLLTADDRVNPCIGGVILFHETLYQKADDGRPFPQVIKSKGGVVGIKVDKGVVPLAGTNGETTTQGLDGLSERCAQYKKDGADFAKWRCVLKIG

SEQ ID NO: 85015 - protein, 1058 aa, Homo sapiens
MKKSQREDIFKKMSEEMDNITAEEIIDKHLQKEENQNVAKTLRGKVREKLKISKINKGEKSSTEQLIDSEIHQRSKTEVSLDESLSFFILSGEEGSALGKSSEQRPVNRSYPKCFSLGVNLQNVAESEEEEFMKEFILTDILKVKAADYEDDQEQIKKQKANIFVPSSSPVVNQRKLPKDMMPRILEDEGFYIQRKPEIYKKTCNKMENRLLKLEEGKCWFGESGEIMSLPTPIKQSWNFRLNVRKEPLNPLLKTIYRKAVKYDLGSSFMNKMEGSREIYQLDLNIVGLQFSHHHLFNQEQVLCARLLQLYECFQDRQQQNVSQLLYEKLKALTDATKLSNENSEINQLTRKSLQDYYWQISNTKQMYDLERGKDLSLLHSILRTWKQIKSLRHGQGFTSTPIKLQVQRIKMNKCDEQEQISEMSETEKKNEGKELKNGKKLESLSYLASDETEIERIKPITLRPQLSFTAELTSLSKCSFMLRNVDARSVPGIPWLMNEQKLFEWANEVRIDPNNPEYSDLMESVTYMRLKGQDIPKYFRLEQLQDEFNFVSEEEMAKSKRFQLLQLRNAGQLDNFLLQQMPLHDTEIPDLVFQVRRLIMKRIVKISKCNLSDIVNDYEEIVSTSQLTDAVCKFVEPRRKLKPQRKERKKVTAQAISDGDIKILVRIVRAYNIPTRKTTINGSPGHDYSFSSLSKIKDNIYINIFDEMMTEKHEISGTFQVTIPPVLLGYTWSNTYVFPKEDSNEQNLKECTFLNIFATIEPQISYVTCNPTLDKFLDQTEVLQRAQIFKKNCKAMFPNRRIVTTVFNDEGIQFLVTRYIKALNPPQQLLDIFLHNSNATFDLIARFVSLIPFVPNTPDENDGSDIWMTSEHCISLAIGNKEEHAILLCNFFLYFGKKALVLLGTSVLEGHVAYVVTQETNEYLLWNPSTGQCYKQFDPFCPLKSVDCLFDDRNVWFNIQQNNTPMAVFFDYSKESFWKQLLPKNVQGTKIQSIQVTGFPIQMPYIDVQSIIDAVYQTGIHSAEFPQTEFALAVYIHPYPNNILSVWVYLASLVQHQ

SEQ ID NO: 85016 - protein, 240 aa, Homo sapiens
  MOD_RES (1)..(1): Any amino acid
XPGAENSRDYPDLAEEAGKKALADAQIPYSAVDQACVGYVFGDSTCGQRAIYHSLGMTGIPIINVNNNCATGSTALFMARQLIQGGVAECVLALGFEKMSKGSLGIKFSDRTIPTDKHVDLLINKYGLSAHPVAPQMFGYAGKEHMEKYGTKIEHFAKIGWKNHKHSVNNPPTSDGAAAAILASEAFVQKYGLQSKAVEILAQEMMTDLPSSFEEKSIIKMVGFDMSKEAARKCYEKSGL

SEQ ID NO: 85017 - protein, 711 aa, Homo sapiens
MIDSVKLRRDSAADFFSHYEYLCALQNSVPLPAVRACLREGVLDFNADRLRGVDWAPLLSTLKINKDLPLVSIKSFFQPWLGDTGSDMNKFCRSRVPAIRYKDVTFQLCKALKGCLSISSVLKNLELNGLILRERDLTILAKGLNKSASLVHLSLANCPIGDGGLEIICQGIKSSITLKTVNFTGCNLTWQGADHMAKILKYQTMRRHEETWAESLRYRRPDLDCMAGLRRITLNCNTLIGDLGACAFADSLSEDLWLRALDLQQCGLTNEGAKALLEALETNTTLVVLDIRKNPLIDHSMMKAVIKKVLQNGRSAKSEYQWITSPSVKEPSKTAKQKRRTIILGSGHKGKATIRIVIWRHRGLATKKPVSSGRKHSLGKEYYAPAPLPPGVSGFLPWRTAERAKRHRGFPLIKTRDICNQLQQPGFPVTVTVESPSSSEVEEVDDSSESVHEVPEKTSIEQEALQEKLEECLKQLKEERVIRLKVDKRVSELEHENAQLRNINFSLSEALHAQSLTNMILDDEGVLGSIENSFQKFHAFLDLLKDAGLGQLATMAGIDQSDFQLLGHPQMTSTVSNPPKEEKKALEDEKPEPKQNALGQMQNIQVSICMQSAYNEGTLMKFQKITGDARIPLPLDSFPVPVSTPEGLGTSSNNLGVPATEQRQESFEGFIARMCSPSPDATSGTGSQRKEEELSRNSRSSSEKKTKTESH

SEQ ID NO: 85018 - protein, 252 aa, Homo sapiens
MKPILLQGHERSITQIKYNREGDLLFTVAKDPIVNVWYSVNGERLGTYMGHTGAVWCVDADWDTKHVLTGSADNSCRLWDCETGKQLALLKTNSAVRTCGFDFGGNIIMFSTDKQMGYQCFVSFFDLRDPSQIDNNEPYMKIPCNDSKITSAVWGPLGECIIAGHESGELNQYSAKSGEVLVNVKEHSRQINDIQLSRDMTMFVTASKDNTAKLFDSTTLEHQKTFRTERPVNSAALSPNYDHVREPHLPSC

SEQ ID NO: 85019 - protein, 619 aa, Homo sapiens
  MOD_RES (1)..(1): Any amino acid
XNGGGGSATARGGEYRLPGEGNAGLLGLGPEAAAPGKRIRKPSLLYEGFESPTMASVPALQLTPANPPPPEVSNPKKPGRVTNQLQYLHKVVMKALWKHQFAWPFRQPVDAVKLGLPDYHKIIKQPMDMGTIKRRLENNYYWAASECMQDFNTMFTNCYIYNKPTDDIVLMAQTLEKIFLQKVASMPQEEQELVVTIPKNSHKKGAKLAALQGSVTSAHQVPAVSSVSHTALYTPPPEIPTTVLNIPHPSVISSPLLKSLHSAGPPLLAVTAAPPAQPLAKKKGVKRKADTTTPTPTAILAPGSPASPPGSLEPKAARLPPMRRESGRPIKPPRKDLPDSQQQHQSSKKGKLSEQLKHCNGILKELLSKKHAAYAWPFYKPVDASALGLHDYHDIIKHPMDLSTVKRKMENRDYRDAQEFAADVRLMFSNCYKYNPPDHDVVAMARKLQDVFEFRYAKMPDEPLEPGPLPVSTAMPPGLAKSSSESSSEESSSESSSEEEEEEDEEDEEEEESESSDSEEERAHRLAELQEQLRAVHEQLAALSQGPISKPKRKREKKEKKKKRKAEKHRGRAGADEDDKGPRAPRPPQPKKSKKASGSGGGSAALGPSGFGPSGGSGT

SEQ ID NO: 85020 - protein, 132 aa, Homo sapiens
MPDSPAEVKTQPRSTPPSMPPPPPAASQGATRPPSFTPHTHREDGPATLPHGRFHGCLKWSMVCLLMNGSSHSPTAINGAPCTPNGFSNGPATSSTASLSTQHLPPACGARQLSKLKRFLTTLQQFGSDISP

SEQ ID NO: 85021 - protein, 76 aa, Homo sapiens
MQRLMMLLATSGACLGLLAVAAVAAAGANPAQRDTHSLLPTHRRQKRDWIWNQMHIDEEKNTSLPHHVGKIKSSVS

SEQ ID NO: 85022 - protein, 84 aa, Homo sapiens
KKSKPKKCVKKFVEYCDVNNDKSISVQELMGCLGVAKEDGKADTKKRHTPRGHAESTSNRQDAMVVSSRPKATTHRKSRTLSRR

SEQ ID NO: 85023 - protein, 1056 aa, Homo sapiens
  MOD_RES (1)..(1): Any amino acid
XFFSFIEGCLVKNYMQRPSTEQLLKHPFIRDQPNERQVRIQLKDHIDRTRKKRGEKDETEYEYSGSEEEEEEVPEQEGEPSSIVNVPGESTLRRDFLRLQQENKERSEALRRQQLLQEQQLREQEEYKRQLLAERQKRIEQQKEQRRRLEEQQRREREARRQQEREQRRREQEEKRRLEELERRRKEEEERRRAEEEKRRVEREQEYIRRQLEEEQRHLEVLQQQLLQEQAMLLECRWREMEEHRQAERLQRQLQQEQAYLLSLQHDHRRPHPQHSQQPPPPQQERSKPSFHAPEPKAHYEPADRAREVEDRFRKTNHSSPEAQSKQTGRVLEPPVPSRSESFSNGNSESVHPALQRPAEPQVQWSHLASLKNNVSPVSRSHSFSDPSPKFAHHHLRSQDPCPPSRSEVLSQSSDSKSEAPDPTQKAWSRSDSDEVPPRVPVRTTSRSPVLSRRDSPLQGSGQQNSQAGQRNSTSIEPRLLWERVEKLVPRPGSGSSSGSSNSGSQPGSHPGSQSGSGERFRVRSSSKSEGSPSQRLENAVKKPEDKKEVFRPLKPADLTALAKELRAVEDVRPPHKVTDYSSSSEESGTTDEEDDDVEQEGADESTSGPEDTRAASSLNLSNGETESVKTMIVHDDVESEPAMTPSKEGTLIVRQTQSASSTLQKHKSSSSFTPFIDPRLLQISPSSGTTVTSVVGFSCDGMRPEAIRQDPTRKGSVVNVNPTNTRPQSDTPEIRKYKKRFNSEILCAALWGVNLLVGTESGLMLLDRSGQGKVYPLINRRRFQQMDVLEGLNVLVTISGKKDKLRVYYLSWLRNKILHNDPEVEKKQGWTTVGDLEGCVHYKVVKYERIKFLVIALKSSVEVYAWAPKPYHKFMAFKSFGELVHKPLLVDLTVEEGQRLKVIYGSCAGFHAVDVDSGSVYDIYLPTHIQCSIKPHAIIILPNTDGMELLVCYEDEGVYVNTYGRITKDVVLQWGEMPTSVAYIRSNQTMGWGEKAIEIRSVETGHLDGVFMHKRAQRLKFLCERNDKVFFASVRSGGSSQVYFMTLGRTSLLSW

SEQ ID NO: 85024 - protein, 204 aa, Homo sapiens
MEKVMQELGKSLTDQDVNSLAAQHFESQQDLENKWSNELKQSTAIQKQEYQEWVIKLHQDLKNPNNSSLSEEIKVQPSQFRESVEAIGRIYEEQRKLEESFTIHLGAQLKTMHNLRLLRADMLDFCKHKRNHRSGVKLHRLQTALSLYSTSLCGLVLLVDNRINSYSGIKRDFATVCQECTDFHFPRIEEQLEVVQQVVLYART

SEQ ID NO: 85025 - protein, 161 aa, Homo sapiens
MAGVEEVAASGSHLNGDLDPDDREEGAASTAEEAAKKKRRKKKKSKGPSAAGEQEPDKESGASVDEVARQLERSALEDKERDEDDEGYKISLPSPRLTCCGSISAHCSLDFPGSDGDGDGDGATGKKKKKKKKKRGPKVQTDPPSVPICDLYPNGVFPKGQ

SEQ ID NO: 85026 - protein, 67 aa, Homo sapiens
MESPSAPPHRWCIPWQRLLLTASLLTFWNPPTTAKLTIESTPFNVAEGKEVLLLAHNLPQNRIGYSW

SEQ ID NO: 85027 - protein, 51 aa, Homo sapiens
MLENYRNLVFLGIAAFKPDLIIFLEEGKESWNMKRHEMVEESPGASSVLHF

SEQ ID NO: 85028 - protein, 1262 aa, Homo sapiens
MLFPLQVAAVTSSVRDDPLEHCVSPRTRARSPEWSLTLLPRLECSGMISAHCNFHLPGSSDSPASVSPGSWDYRICKMADNLDEFIEEQKARLAEDKAELESDPPYMEMKGKLSAKLSENSKILISMAKENIPPNSQQTRGSLGIDYGLSLPLGEDYERKKHKLKEELRQDYRRYLTQERLKLERNKEYNQFLRGKEESSEKFRQVEKSTEPKSQRNKKPIGQVKPDLTSQIQTSCENSEGPRKDVLTPSEAYEELLNQRRLEEDRYRQLDDEIELRNRRIIKKANEEVGISNLKHQRFASKAGIPDRRFHRFNEDRVFDRRYHRPDQDPEVSEEMDERFRYESDFDRRLSRVYTNDRMHRNKRGNMPPMEHDGDVIEQSNIRISSAENKSAPDNETSKSANQDTCSPFAGMLFGGEDRELIQRRKEKYRLELLEQMAEQQRNKRREKDLELRVAASGAQDPEKSPDRLKQFSVAPRHFEEMIPPERPRIAFQTPLPPLSAPSVPPIPSVHPVPSQNEDLRSGLSSALGEMVSPRIAPLPPPPLLPPLATNYRTPYDDAYYFYGSRNTFDPSLAYYGSGMMGVQPAAYVSAPVTHQLAQPVVNTVGQNELKITSDQVINSGLIFEDKPKPSKQSLQSYQEALQQQIREREERRKKEREEKEEYEAKLEAEMRTYNPWGKGGGGAPLRDAKGNLITDLNRMHRQNIDAYHNPDARTYEDKRAVVSLDPNLATSNAENLEDAANKSSGHMQTQSSPFARGNVFGEPPTELQIKQQELYKNFLRFQIEEKKQREEAERERLRIAEEKEERRLAEQRARIQQEYEEEQEKKREKEEEQRLKNEEHIRLAEERQKEAERKKKEEEEKYNLQLQHYCERDNLIGEETKHMRQPSPIVPALQNKIASKLQRPPSVDSIIRSFIHESSMSRAQSPPVPARKNQLRAEEEKKNVIMELSEMRKQLRSEERRLQERLLHMDSDDEIPIRKKERNPMDIFDMARHRLQAPVRRQSPKGLDAATFQNVHDFNELKDRDSETRVDLKFMYLDPPRDHHTLEIQQQALLREQQKRLNRIKMQEGAKVDLDAIPSAKVREQRMPRDDTSDFLKNSLLESDSAFIGAYGETYPAIEDDVLPPPSQLPSARERRRNKWKGLDIDSSRPNVAPDGLSLKSISSVNVDELRVRNEERMRRLNEFHNKPINTDDESSLVDPDDIMKHIGDDGSNSVATEPWLRPGTSETLKRFMAEQLNQEQQQIPGKPGTFTWQGLSTAHG

SEQ ID NO: 85029 - protein, 123 aa, Homo sapiens
  MOD_RES (1)..(1): Any amino acid
XQLKQELGIELHEEVTLPKLRGGLMTIDPSLDKQTVNTYMSQAFQLPESEMPEEGDEKEEAVVEILQTALERLQRGELSPKASRGKPNLTWRSQGSISQIPQKGTHVYSSAGWRSAGQARPLH

SEQ ID NO: 85030 - protein, 39 aa, Homo sapiens
MAEMEFCPCCPGWSAMARSQLTATSASRVEVILLPQPPE

SEQ ID NO: 85031 - protein, 471 aa, Homo sapiens
MDRYAQDKSVVNKMQQKYWETKQAFIKATGKKEDEHVVASDADLDAKLELFHSIQRTCLDLSKAIVLYQKRICFLSQEENELGKFLRSQGFQDKTRAGKMMQATGKALCFSSQQRLALRNPLCRFHQEVETFRHRAISDTWLTVNRMEQCRTEYRGALLWMKDVSQELDPDLYKQMEKFRKVQTQVRLAKKNFDKLKMDVCQKVDLLGASRCNLLSHMLATYQTTLLHFWEKTSHTMAAIHESFKGYQPYEFTTLKSLQDPMKKLVEKEEKKKINQQESTDAAVQEPSQLISLEEENQRKESSSFKTEDGKSILSALDKGSTHTACSGPIDELLDMKSEEGACLGPVAGTPEPEGADKDDLLLLSEIFNASSLEEGEFSKEWAAVFGDGQVKEPVPTMALGEPDPKAQTGSGFLPSQLLDQNMKDLQASLQEPAKAASDLTAWFSLFADLDPLSNPDAVGKTDKEHELLNA

SEQ ID NO: 85032 - protein, 613 aa, Homo sapiens
MKDSGDSKDQQLMVALRVRPISVAELEEGATLIAHKVDEQMVVLMDPMEDPDDILRAHRSREKSYLFDVAFDFTATQEMVYQATTKSLIEGVISGYNATVFAYGPTGCGKTYTMLGTDQEPGIYVQTLNDLFRAIEETSNDMEYEVSMSYLEIMQLLMKGNRQRTQEPTAANQTSSRSHAVLQVTVRQRSRVKNILQEVRQGRLFMIDLAGSERASQTQNRGQRMKEGAHINRSLLALGNCINALSDKGSNKYINYRDSKLTRLLKDSLGGNSRTVMIAHISPASSAFEESRNTLTYAGRAKNIKTRVKQNLLNVSYHIAQYTSIIADLRGEIQRLKRKIDEQTGRGQARGRQDRGDIRHIQAEVQLHSGQGEKAGMGQLREQLASAFQEQMDVRRRLLELENRAMEVQIDTSRHLLTIAGWKHEKSRRALKWREEQRKECYAKDDSEKDSDTGDDQPDILEPPEVAAARESIAALVDEQKQLRKQKLALEQRCRELRARGRRLEETLPRRIGSEEQREVLSLLCRVHELEVENTEMQSHALLRDGALRHRHEAVRRLEQHRSLCDEIIQGQRQIIDDYNLAVPQRLEELYEVYLRELEEGSLEQATIMDQVA

SEQ ID NO: 85033 - protein, 152 aa, Homo sapiens
MSTARQQLEAQRAEAERLRQRVAELEAQAASEVTPTGEKEGLGQGQSLEQLEALVQTKDQEIQTLKSQTGGPREALEAAEREETQQKVQDLETRNAELEHQLRAMERSLEEARAERERARAEVGRAAQLLDVSLFELSELREGLARLAEAAP

SEQ ID NO: 85034 - protein, 125 aa, Homo sapiens
  MOD_RES (1)..(1): Any amino acid
XRETACEIPGFNGECLNGPSDVGSTPAPCICPPGKPGLQGPKGYQGIAGTPGVPGSPGIQGARGLPGYKGEPGRDGDKGDRGLPGFPGLHGMPGSKGEMGAKGDKGSPGFYGKKGSIDHTTKYSY

SEQ ID NO: 85035 - protein, 58 aa, Homo sapiens
MNCCIGLGEKARGSHRASYPSLSALFTEASILGFGSFAVKAQWTEDCRKSTYPPSGPT

SEQ ID NO: 85036 - protein, 60 aa, Homo sapiens
MDCYRTSLSSSWIYPTVILCLFGFFSMMRPSEPFLIPYLSGPDKNLTSAEGLWLPLQWVM

SEQ ID NO: 85037 - protein, 180 aa, Homo sapiens
MMPSKSLVMEYLAHPSTLGLAVGVACGMCLGWSLRVCFGMLPKSKTSKTHTDTESEASILGDSGEYKMILVVRNDLKMGKGKVAAQCSHAAVSAYKQIQRRNPEMLKQWEYCGQPKVVVKAPDEETLIALLAHAKMLGLTVSLIQDAGRTQIAPGSQTVLGIGPGPADLIDKVTGHLKLY

SEQ ID NO: 85038 - protein, 138 aa, Homo sapiens
MALSRVCWARSAVWGSAVTPGHFVTRRLQLGRSGLAWGAPRSSKLHLSPKADVKNLMSYVVTKTKAINGKYHRFLGRHFPRFYVLYTIFMKVPPRRHQVSFPRYYFHSTFCQLPGLLANVPVSQATTDQAFLDPKTTN

SEQ ID NO: 85039 - protein, 297 aa, Homo sapiens
MANETQKVGAIHFPFPFTPYSIQEDFMAELYRVLEAGKIGIFESPTGTGKSLSLICGALSWLRDFEQKKREEEARLLETGTGPLHDEKDESLCLSSSCEGAAGTPRPAGEPAWVTQFVQKKEERDLVDRLKAEQARRKQREERLQQLQHRVQLKYAAKRLRQEEEERENLLRLSREMLETGPEAERLEQLESGEEELVLAEYESDEEKKVASRVDEDEDDLEEEHITKIYYCSRTHSQLAQFVHEVKKSPFGKDVRLVSLGSRQNLCVNEDVKSLGSVQLINDRCVDMQRSRHEERS

SEQ ID NO: 85040 - protein, 737 aa, Homo sapiens
ASGGCVRPARPERRLRSERAGVVRELCAQPGQVVAPGAVLVRLEGCSHPVVMKGLCAECGQDLTQLQSKNGKQQVPLSTATVSMVHSVPELMVSSEQAEQLGREDQQRLHRNRKLVLMVDLDQTLIHTTEQHCQQMSNKGIFHFQLGRGEPMLHTRLRPHCKDFLEKIAKLYELHVFTFGSRLYAHTIAGFLDPEKKLFSHRILSRDECIDPFSKTGNLRNLFPCGDSMVCIIDDREDVWKFAPNLITVKKYVYFQGTGDMNAPPGSRESQTRKKVNHSRGTEVSEPSPPVRDPEGVTQAPGVEPSNGLEKPARELNGSEAATPRDSPRPGKPDERDIWPPAQAPTSSQELAGAPEPQGSCAQGGRVAPGQRPAQGATGTDLDFDLSSDSESSSESEGTKSSSSASDGESEGKRGRQKPKAAPEGAGALAQGSSLEPGRPAAPSLPGEAEPGAHAPDKEPELGGQEEGERDGLCGLGNGCADRKEAETESQNSELSGVTAGESLDQSMEEEEEEDTDEDDHLIYLEEILVRVHTDYYAKYDRYLNKEIEEAPDIRKIVPELKSKVLADVAIIFSGLHPTNFPIEKTREHYHATALGAKILTRLVLSPDAPDRATHLIAARAGTEKVLQAQECGHLHVVNPDWLWSCLERWDKVEEQLFPLRDDHTKAQRENSPAAFPDREGVPPTALFHPMPVLPKAQPGPEVRIYDSNTGKLIRTGARGPPAPSSSLPIRQEPSSF

SEQ ID NO: 85041 - protein, 126 aa, Homo sapiens
  MOD_RES (1)..(1): Any amino acid
XDVTDEHGERGSFAETDEHTGVDTKELEDIAADIKEHLAAKRKRIEKIAKACSEIKNRIKNVLRTTQLKRQKRDYRISLKLPNVLEEFITDEQKDEEGDGEKEEQIKIFQEQQKRWQQDGKGTERD

SEQ ID NO: 85042 - protein, 184 aa, Homo sapiens
  MOD_RES (1)..(1): Any amino acid
XETAEDDISDVQGTQRLELRDDGAFSTPTGTSEEQVSWWGSGQTVLEQEAGSGGGTRRLPGSPRQAQATGAGPRHLGVEPLVRASRANLVGASWGSEDSLSVASDLYGSAFSLYRGRALSIHVSVPQSGLRREEPDLQPQLASEAPRRPAQPPPSKSALLPPPSPRVGKRSPPGPPAQPAATPT

SEQ ID NO: 85043 - protein, 895 aa, Homo sapiens
MLLEKDVNPGGKEETPGQRPAVTETHQLAELNEKKNERLRAAFGISDSYVDGSSFDPQRRAREAKQPAPEPPKPYSLVRESSSSRSPTPKQKKKKKKKDRGRRSESSSPRRERKKSSKKKKHRSESESKKRKHRSPTPKSKRKSKDKKRKRSRSTTPAPKSRRAHRSTSADSASSSDTSRSRSRSAAAKTHTTALAGRSPSPASGRRGEGDAPFSEPGTTSTQRPSSPETATKQPSSPYEDKDKDKKEKSATRPSPSPERSSTGPEPPAPTPLLAERHGGSPQPLATTPLSQEPVNPPSEASPTRDRSPPKSPEKLPQSSSSESSPPSPQPTKVSRHASSSPESPKPAPAPGSHREISSSPTSKNRSHGRAKRDKSHSHTPSRRMGRSRSPATAKRGRSRSRTPTKRGHSRSRSPQWRRSRSAQRWGRSRSPQRRGRSRSPQRPGWSRSRNTQRRGRSRSARRGRSHSRSPATRGRSRSRTPARRGRSRSRTPARRRSRSRTPTRRRSRSRTPARRGRSRSRTPARRRSRTRSPVRRRSRSRSPARRSGRSRSRTPARRGRSRSRTPARRGRSRSRTPARRSGRSRSRTPARRGRSRSRTPRRGRSRSRSLVRRGRSHSRTPQRRGRSGSSSERKNKSRTSQRRSRSNSSPEMKKSRISSRRSRSLSSPRSKAKSRLSLRRSLSGSSPCPKQKSQTPPRRSRSGSSQPKAKSRTPPRRSRSSSSPPPKQKSKTPSRQSHSSSSPHPKVKSGTPPRQGSITSPQANEQSVTPQRRSCFESSPDPELKSRTPSRHSCSGSSPPRVKSSTPPRQSPSRSSSPQPKVKAIISPRQRSHSGSSSPSPSRVTSRTTPRRSRSVSPCSNVESRLLPRYSHSGSSSPDTKVKPETPPRQSHSG

SEQ ID NO: 85044 - protein, 135 aa, Homo sapiens
MLIPFSMKNCFQLLCNCQVPAAGFKKTVKNGLILQSISNDVYQNLAVEDWIHDHMNLEGKPILFFWQNSPSVVIGRHQNPWQECNLNLMREEGIKLARRRSGGGTVYHDMGNINLTFFTTKKKYDRMENLKLIVR

SEQ ID NO: 85045 - protein, 88 aa, Homo sapiens
MLPFSQNMVSSFRVSELQVLLGFAGRNKSGRKHDLLMRALHLLKSGCSPAVQIKIRELYRRRYPRTLEGLSDLSTIKSSVFSLDGGSS

SEQ ID NO: 85046 - protein, 168 aa, Homo sapiens
MQIDVDPQEDPQNAPDVNYVVENPSLDLEQYAASYSGLMRIERLQFIADHCPTLRVEALKMALSFVQRTFNVDMYEEIHRKLSEATRSSLRELQNAPDAIPESGVEPPALDTAWVEATRKKALLKLEKLDTDLKNYKGNSIKESIRRGHDDLGDHYLDCGDLSNALKC

SEQ ID NO: 85047 - protein, 9 aa, Homo sapiens
  MOD_RES (1)..(1): Any amino acid
XVQGKVGDL

SEQ ID NO: 85048 - protein, 94 aa, Homo sapiens
MRKSPGLSDCLWAWILLLSTLTGRSYGQPSLQDELKDNTTVFTRILDRLLDGYDNRLRPGLGERVTEVKTDIFVTSFGPVSDHDMIFALQNTAQ

SEQ ID NO: 85049 - protein, 518 aa, Homo sapiens
MENWPTPSELVNTGFQSVLSQGNKKPQNRKEKEEKVEKRSNSDSKENRETKLNGPGENVSEDEAQSSNQRKRANKHKWVPLHLDVVRSESQERPGSRNSSRCQPEANKPTHNNRRNDTRSWKRDREKRDDQDDVSSVRSEGGNIRGSFRGRGRGRGRGRGRGRGNPRLNFDYSYGYQEHGERTDQPFQTELNTSMMYYYDDGTGVQVYPVEEALLKEYIKRQIEYYFSVENLERDFFLRGKMDEQGFLPISLIAGFQRVQALTTNLNLILEALKDSTEVEIVDEKMRKKIEPEKWPIPGPPPRSVPPTDFSQLIDCPEFVPGQAFCSHTESAPNSPRIGSPLSPKKNSETSILQAMSRGLSTSLPDLDSEPWIEVKKRHQPAPVKLRESVSVPEGSLNQLCSSEEPEQEELDFLFDEEIEQIGRKNTFTDWSDNDSDYEIDDQDLNKILIVTQTPPYVKKHPGGDRTGTHMSRAKITSELAKVINDGLYYYEQDLWMEEDENKHTAIKVTILRTPFLV

SEQ ID NO: 85050 - protein, 172 aa, Homo sapiens
NSYSCACLASGSVLRLVDAVLGAEIRNGMAIIRPPGHHAQHSLMDGYCMFNHVAVAARYAQQKHRIRSVLYFSIHRYEQGRFWPHLKASNWSTTGFGQGQGYTINVPWNQVGMRDADYIAAFLHVLLPVALEFQPQLVLVAAGFDALQGDPKGEMAATPAGFAQLTHLLMGL

SEQ ID NO: 85051 - protein, 67 aa, Homo sapiens
MENMHLRRVRTMPRHSQSLTMAPYSSVSLVEQLEDRILCHEKTTAALVEHAFRIKDDIVNSLQKMQN

SEQ ID NO: 85052 - protein, 9 aa, Homo sapiens
MVKEKKKAD

SEQ ID NO: 85053 - protein, 109 aa, Homo sapiens
MMNHSMSSGSGSLRTNQKRSLYVRAMFDYDKSKDSGLPSQGLSFKYGDILHVINASDDEWWQARRVMLEGDSEEMGVIPSKRRVERKERARLKTVKFNAKPGVIDSKGD

SEQ ID NO: 85054 - protein, 290 aa, Homo sapiens
  MOD_RES (1)..(1): Any amino acid
XFSHGQVVSLDELRPFQDPDLSSLQAGSACLAKHQDGLWHAARITDVDNGYYTVKFDSLLLREAVVEGDGILPPLRTEATESDSDSDGTGDSSYARGMAAAAEPRSQEGPRLHRMGLPVSWAPPALWVLGCCALLLSLWALCTACRRPEDAVAPRKRARRQRARLQGSATAAEAQVGHQTARAAPGPAQQQGPAACQHGSPAPTLAGGVQGHHRTAGSPLCLPTPGAAPGSAGSCSHRRVRWPRGHLFQRGAGGPSRGQPGGQPCGGRVCPRPEAQRDPSQSPRATAGED

SEQ ID NO: 85055 - protein, 119 aa, Homo sapiens
MQRHYVMYYEMSYGLNIEMHKQAEIVKRLSGICAQIIPFLTQEHQQQVLQAVERAKQVTVGELNSLIGQQLQPLSHHAPPVPLTPPLPRNRTSHLLSGQRLHTFPCCMWGPMGRGPRWK

SEQ ID NO: 85056 - protein, 53 aa, Homo sapiens
MAAPSQQRLVVVSVSPQSRASLAARFQLNPTDTARKLTSFFKKIGVHFVFDTA

SEQ ID NO: 85057 - protein, 339 aa, Homo sapiens
MSSNKEQRSAVFVILFALITILILYSSNSANEVFHYGSLRGRSRRPVNLKKWSITDGYVPILGNKTLPSRCHQCVIVSSSSHLLGTKLGPEIERAECTIRMNDAPTTGYSADVGNKTTYRVVAHSSVFRVLRRPQEFVNRTPETVFIFWGPPSKMQKPQGSLVRVIQRAGLVFPNMEAYAVSPGRMRQFDDLFRGETGKDREKSHSWLSTGWFTMVIAVELCDHVHVYGMVPPNYCSQRPRLQRMPYHYYEPKGPDECVTYIQNEHSRKGNHHRFITEKRVFSSWAQLNKHTYAPASCPVSPGSSTAFWSSAACGLRTTSSGWGLPVKRSSASSAASGQ

SEQ ID NO: 85058 - protein, 243 aa, Homo sapiens
  MOD_RES (1)..(1): Any amino acid
XTYVKINDLEHSVHHWTINKEIKETEFKGIPISYLEIHPNGKRLLIHTKDSTLRIMDLRILVARKFVGAANYREKIHSTLTPCGTFLFAGSEDGIVYVWNPETGEQVAMYSDLPFKSPIRDISYHPFENMVAFCAFGQNEPILLYIYDFHVAQQEAEMFKRYNGTFPLPGIHQSQDALCTCPKLPHQGSFQIDEFVHTESSSTKMQLVKQRLETVTLESHSVAQAGVQWRNLGSLQPPPPRFK

SEQ ID NO: 85059 - protein, 120 aa, Homo sapiens
MSEKKQPVDLGLLEEDDEFEEFPAEDWAGLDEDEDAHVWEDNWDDDNVEDDFSNQLRHSIISTHKRWHSARLRRCPPPFPESRPSLTHTRTTEASPLVLLLVTPPQLPLIHPSIYPAWVM

SEQ ID NO: 85060 - protein, 49 aa, Homo sapiens
  MOD_RES (1)..(1): Any amino acid
XGALLFALRYRVTGHEFWDNNGGRDYALRGPEHPGSGGAPEPQGWIHFI

SEQ ID NO: 85061 - protein, 1155 aa, Homo sapiens
  MOD_RES (1)..(1): Any amino acid
XGDEVVSINGNPCADLTYPEVIKLMESITDSLQMLIKRPSSGISEALISENENKNLEHLTHGGYVESTTLQIRPATKTQCTEFFLAPVKTEVPLAENQRSGPDCAGSLKEETGPSYQRAPQMPDSQRGRVAEELILREKVEAVQPGPVVELQLSLSQERHKGASGPLVALPGAEKSKSPDPDPNLSHDRIVHINSIPTNEKADPFLRSSKIIQISSGRELRVIQESEAGDAGLPRVEVILDCSDRQKTEGCRLQAGKECVDSPVEGGQSEAPPSLVSFAVSSEGTEQGEDPRSEKDHSRPHKHRARHARLRRSESLSEKQVKEAKSKCKSIALLLTDAPNPNSKGVLMFKKRRRRARKYTLVSYGTGELEREADEEEEGDKEDTCEVAFLGASESEVDEELLSDVDDNTQVVNFDWDSGLVDIEKKLNRGDKMEMLPDTTGKGALMFAKRRERMDQITAQKEEDKVGGTPSREQDAAQTDGLRTTTSYQRKEEESVRTQSSVSKSYIEVSHGLGHVPQQNGFSGTSETANIQRMVPMNRTAKPFPGSVNQPATPFSPTRNMTSPIADFPAPPPYSAVTPPPDAFSRGVSSPIAGPAQPPPWPQPAPWSQPAFYDSSERIASRDERISVPAKRTGILQEAKRRSTTKPMFTFKEPKVSPNPELLSLLQNSEGKRGTGAGGDSGPEEDYLSLGAEACNFMQSSSAKQKTPPPVAPKPAVKSSSSQPVTPVSPVWSPGVAPTQPPAFPTSNPSKGTVVSSIKIAQPSYPPARPASTLNVAGPFKGPQAAVASQNYTPKPTVSTPTVNAVQPGAVGPSNELPGMSGRGAQLFAKRQSRMEKYVVDSDTVQAHAARAQSPTPSLPASWKYSSNVRAPPPVAYNPIHSPSYPLAALKSQPSAAQPSKMGKKKGKKPLNALDVMKHQPYQLNASLFTFQPPDAKDGLPQKSSVKVNSALAMKQALPPRPVNAASPTNVQASSVYSESGRSLSLPGRSVPPPISTSPWVYQPTYSYSSKPTDGLEKANKRPTPWEAAAKSPLGLVDDAFQPRNIQESIVANVVSAARRKVLPGPPEDWNERLSYIPQTQKAYMGSCGRQEYNVTANNNMSTTSQYGSQLPYAYYRQASRNDSAIMSMETRSDYCLPVADYNYNPHPRGWRRQT

SEQ ID NO: 85062 - protein, 775 aa, Homo sapiens
MLLVEKTTDSPAAEFSLVEDVALHFACLMGRLNEQRLFQPDLCDVDLVLVPQRSVFPAHKGVLAAYSQFFHSLFTQNKQLQRVELSLEALAPGGLQQILNFIYTSKLLVNAANVHEVLSAASLLQMADIAASCQELLDARSLGPPGPGTVALAQPAASCTPAAPPYYCDIKQEADTPGLPKIYAREGPDPYSVRVEDGAGTAGGTVPATIGPAQPFFKEEKEGGVEEAGGPPASLCKLEGGEELEEELGGSGTYSRREQSQIIVEVNLNNQTLHVSTGPEGKPGAGPSPATVVLGREDGLQRHSDEEEEDDEEEEEEEEEEEGGGSGREEEEEEEGGSQGEEEEEEEDGHSEQEEEEEEEEEEGPSEQDQESSEEEEGEEGEAGGKQGPRGSRSSRADPPPHSHMATRSRENARRRGTPEPEEAGRRGGKRPKPPPGVASASARGPPATDGLGAKVKLEEKQHHPCQKCPRVFNNRWYLEKHMNVTHSRMQICDQCGKRFLLESELLLHRQTDCERNIQCVTCGKAFKKLWSLHEHNKIVHGYAEKKFSCEICEKKFYTMAHVRKHMVAHTKDMPFTCETCGKSFKRSMSLKVHSLQHSGEKPFRCENCNERFQYKYQLRSHMSIHIGHKQFMCQWCGKDFNMKQYFDEHMKTHTGEKPYICEICGKSFTSRPNMKRHRRTHTGEKPYPCDVCGQRFRFSNMLKAHKEKCFRVSHTLAGDGVPAAPGLPPTQPQAHALPLLPGLPQTLPPPPHLPPPPPLFPTTASPGGRMNANN

SEQ ID NO: 85063 - protein, 134 aa, Homo sapiens
MDTCGVGYVALGEAGPVGNMTVVDSPGQEVLNQLDVKTSSEMTSAEASVEMSLPTPLPGFEDSPDQRRLPPEQESLSRLEQPDLSSEMSKVSKPRASKPGRKRGGRTRKGPKRPQQPNPPSAPLVPGLLDQSNP

SEQ ID NO: 85064 - protein, 77 aa, Homo sapiens
TEVGDPAGNELAEPEAKRIRLEDGQTADGQTEEAAEPGEQLQTQKRARGQNKGRPHVKPTNYDKNRLCPSLIQAIGC

SEQ ID NO: 85065 - protein, 61 aa, Homo sapiens
MTLHATRGAALLSWVNSLHVADPVEAVLQLQDCSIFIKIIDRIHGTEEGQQILKQPVSERL

SEQ ID NO: 85066 - protein, 186 aa, Homo sapiens
MIENVTFHHEGFFWRCWFNGIVEENDSNIWKFWYTNQPPSKNCTHAYLSPYPFMRGEHNSTSYDSAVIYRGFWAVLMLLGVVAVVIASFLIICAAPFASHFLYKAGGGSYIAAGILFSLVVMLYVIWVQAVADMESYRNMKMKDCLDFTPSVLYGWSFFLAPAGIFFSLLAGLLFLVVGWHIQIHH

SEQ ID NO: 85067 - protein, 149 aa, Homo sapiens
MALLTAAARLLGTKNASCLVLAARHASASSTNLKDILADLIPKEQARIKTFRQQHGKTVVGQITVDMMYGGMRGMKGLVYETSVLDPDEGIRFRGFSIPECQKLLPKAKGGEEPLPEGLFWLLVTGHIPTEEQLIYEDSMDLIAKLPCV

SEQ ID NO: 85068 - protein, 77 aa, Homo sapiens
MPLPEPSEQEGESVKAGQEPSPKPGTDVIPAAPRKPREFSKLVLLTASDQDEDGVGSKPQEVHCVLSLEMAGPATLA

SEQ ID NO: 85069 - protein, 78 aa, Homo sapiens
MIRAAPPPLFLLLLLLLLLVSWASRGEAAPDQDEIQRLPGLAKQPSFRQYSGYLKGSGSKHLHYWSAALPSGRDWEKR

SEQ ID NO: 85070 - protein, 226 aa, Homo sapiens
MSSPSLSDLGKREPAAAADERGTQQRRACANATWNSIHNGVIAVFQRKGLPDQELFSLNEGVRQLLKTELGSFFTEYLQNQLLTKGMVILRDKIRFYEGQKLLDSLAETWDFFFSDVLPMLQAIFYPVQGKEPSVRQLALLHFRNAITLSVKLEDALARAHARVPPAIVQMLLVLQGVHESRGVTEDYLRLETLVQKVVSPYLGTYGLHSSEGPFTHSCILEKRLL

SEQ ID NO: 85071 - protein, 717 aa, Homo sapiens
GMEEVIVAQVDHGLGSAWVPSHRRVNPPTLRMKKLNWQKLPSNVAREHNSMWASLSSPDAEAVEPDFSSIERLFSFPAAKPKEPTMVAPRARKEPKEITFLDAKKSLNLNIFLKQFKCSNEEVAAMIRAGDTTKFDVEVLKQLLKLLPEKHEIENLRAFTEERAKLASADHFYLLLLAIPCYQLRIECMLLCEGAAAVLDMVRPKAQLVLAACESLLTSRQLPIFCQLILRIGNFLNYGSHTGDADGFKISTLLKLTETKSQQNRVTLLHHVLEEAEKSHPDLLQLPRDLEQPSQAAGINLEIIRSEASSNLKKLLETERKVSASVAEVQEQYTERLQASISAFRALDELFEAIEQKQRELADYLCEDAQQLSLEDTFSTMKAFRDLFLRALKENKDRKEQAAKAERRKQQLAEEEARRPRGEDGKPVRKGPGKQEEVCVIDALLADIRKGFQLRKTARGRGDTDGGSKAASMDPPRATEPVATSNPAGDPVGSTRCPASEPGLDATTASESRGWDLVDAVTPGPQPTLEQLEEGGPRPLERRSSWYVDASDVLTTEDPQCPQPLEGAWPVTLGDAQALKPLKFSSNQPPAAGSSRQDAKDPTSLLGVLQAEADSTSEGLEDAVHSRGARPPAAGPGGDEDEDEEDTAPESALDTSLDKSFSEDAVTDSSGSGTLPRARGRASKGTGKRRKKRPSRSQEEVPPDSDDNKTKKLCVIQ

SEQ ID NO: 85072 - protein, 72 aa, Homo sapiens
  MOD_RES (1)..(1): Any amino acid
XAEHKTEDGKKEKYFLFYDGETVSGKVSLALKNPNKRLEHQGIKIEFIGQIAISFVLPSAAASMMLSKRWTL

SEQ ID NO: 85073 - protein, 157 aa, Homo sapiens
THGTFLNKTRIPPRTYCRVHVGHVVRFGGSTRLFILQGPEEDREAESELTVTQLKELRKQQQILLEKKMLGEDSDEEEEMDTSERKINAGSQDDEMGCTWGMGEDAVEDDAEENPIVLEFQQEREAFYIKDPKKALQGFFDREDGVLPCCTDWFRAP

SEQ ID NO: 85074 - protein, 341 aa, Homo sapiens
  MOD_RES (1)..(1): Any amino acid
XKVVWLFNTSIISKEREEAATADPLIKSRDPYKNRVWVSSQDCSLKISQLKIEDAGPYHAYVCSEASSVTSMTHVTLLIYRRLRKPKITWSLRHSEDGICRISLTCSVEDGGNTVMYTWTPLQKEAVVSQGESHLNVSWRSSENHPNLTCTASNPVSRSSHQFLSENICSGPERNTKLWIGLFLMVCLLCVGIFSWCIWKRKGRCSVPAFCSSQAEAPADTPGYEKLDTPLRPARQQPTPTSDSSSDSNLTTEEDEDRPEVHKPISGRYEVFDQVTQEGAGHDPAPEGQADYDPVTPYVTEVESVVGENTMYAQVFNLQVVPPPQQNDLEIPESPTYENFT

SEQ ID NO: 85075 - protein, 69 aa, Homo sapiens
MSEWMKKGPLEWQDYIYKEVRVTASEKNEYKGWVLTTDPVSAKVLLSPRLECSGEISALCNLHLAVLSL

SEQ ID NO: 85076 - protein, 333 aa, Homo sapiens
MGPLSAPPCTQHITWKGLLLTASLLNFWNLPITAQVTIEALPPKVSEGKDVLLLVHNLPQNLAGYIWYKGQLMDLYHYITSYVVDGQINIYGPAYTGRETVYSNASLLIQNVTREDAGSYTLHIIKRGDRTRGVTGYFTFNLYLKLPKPYITINNSKPRENKDVLAFTCEPKSENYTYIWWLNGQSLPVSPRVKRPIENRILILPSVTRNETGPYECEIRDRDGGMRSDPVTLNVLYGPDLPSIYPSFTYYRSGENLYLSCFAESNPPAEYFWTINGKFQQSGQKLSIPQITTKHRGLYTCSVRNSATGKESSKSMTVEVSGKWIPASLAIGF

SEQ ID NO: 85077 - protein, 34 aa, Homo sapiens
MLRFYLIGGGIPIIVCGITAAANIKNYGSRPNAP

SEQ ID NO: 85078 - protein, 100 aa, Homo sapiens
MENLMTSSTLPPLFADEDGSKESNDLATTGLNHPEVPYSSGATSSTNNPEFVEDLSQGQLLQSESSNAAEGNEQRHEDEQRSKRGGWSKGRKRKKPLRDS

SEQ ID NO: 85079 - protein, 150 aa, Homo sapiens
  MOD_RES (1)..(1): Any amino acid
XSACRVFKLWPLSFLGSKLSTCEQLRHRLEHLTLIFSTRKAENPAQLMRKANTVASVLLDVALGLMLLSWLHGRSRIGHLADALVPVADHVAEELQHLLQWLMGAPAGLKMNRALDQAVLPEDPWPVLTVASVPGEEVERSAPARGLLFL

SEQ ID NO: 85080 - protein, 762 aa, Homo sapiens
MLASPEPKGLVPFTKESFELIKQHIAKTHNEDHEEEDLKPTPDLEVGKKLPFIYGNLSQGMVSEPLEDVDPYYYKKKNTFIVLNKNRTIFRFNAASILCTLSPFNCIRRTTIKVLVHPFFQLFILISVLIDCVFMSLTNLPKWRPVLENTLLGIYTFEILVKLFARGVWAGSFSFLGDPWNWLDFSVTVFEVIIRYSPLDFIPTLQTARTLRILKIIPLNQGLKSLVGVLIHCLKQLIGVIILTLFFLSIFSLIGMGLFMGNLKHKCFRWPQENENETLHNRTGNPYYIRETENFYYLEGERYALLCGNRTDAGQCPEGYVCVKAGINPDQGFTNFDSFGWALFALFRLMAQDYPEVLYHQILYASGKVYMIFFVVVSFLFSFYMASLFLGILAMAYEEEKQRVGEISKKIEPKFQQTGKELQEGNETDEAKTIQIEMKKRSPISTDTSLDVLEDATLRHKEELEKSKKICPLYWYKFAKTFLIWNCSPCWLKLKEFVHRIIMAPFTDLFLIICIILNVCFLTLEHYPMSKQTNTLLNIGNLVFIGIFTAEMIFKIIAMHPYGYFQVGWNIFDSMIVFHGLIELCLANVAGMALLRLFRMLRIFKLGKYWPTFQILMWSLSNSWVALKDLVLLLFTFIFFSAAFGMKLFGKNYEEFVCHIDKDCQLPRWHMHDFFHSFLNVFRILCGEWVETLWDCMEVAGQSWCIPFYLMVILIGNLLGLGGLRKLTITVEEEAGMSFTLQQQGEVQSEGTLPVSGIGELI

SEQ ID NO: 85081 - protein, 600 aa, Homo sapiens
GKVLSAKVVTNARSPGAKCYGIVTMSSSTEVSRCIAHLHRTELHGQLISVEKVKGDPSKKEMKKENDEKSSSRSSGDKKNTSDRSSKTQASVKKEEKRSSEKSEKKESKDTKKIEGSKSPGHMVILDQTKGDHCRPSRRGRYEKIHGRSKEKERASLDKKRDKDYRRKEILPFEKMKEQRLREHLVRFERLRRAMELRRRREIAERERRERERIRIIREREERERLQRERERLEIERQKLERERMERERLERERIRIEQERRKEAERIAREREELRRQQQQLRYEQEKRNSLKRPRDVDHRRDDPYWSENKKLSLDTDARFGHGSDYSRQQNRFNDFDHRERGRFPESSAVQSSSFERRDRFVGQSEGKKARPTARREDPSFERYPKNFSDSRRNEPPPPRNELRESDRREVRGERDERRTVIIHDRPDITHPRHPREAGPNPSRPTSWKSEGSMSTDKRETRVERPERSGREVSGHSVRGAPPGNRSSASGYGSREGDRGVITDRGGGSQHYPEERHVVERHGRDTSGPRKEWHGPPSQGPSYHDTRRMGDGRAGAGMITQHSSNASPINRIVQISGNSMPRGSGSGFKPFKGGPPRRF

SEQ ID NO: 85082 - protein, 34 aa, Homo sapiens
MVVVIVCLLNHYKVSTRSFINRPNQSRRREDGLP

SEQ ID NO: 85083 - protein, 1062 aa, Homo sapiens
MVSSAQMGFNLQALLEQLSQDELSKFKYLITTFSLAHELQKIPHKEVDKADGKQLVEILTTHCDSYWVEMASLQVFEKMHRMDLSERAKDEVREAALKSFNKRKPLSLGITRKERPPLDVDEMLERFKTEAQAFTETKGNVICLGKEVFKGKKPDKDNRCRYILKTKFREMWKSWPGDSKEVQVMAERYKMLIPFSNPRVLPGPFSYTVVLYGPAGLGKTTLAQKLMLDWAEDNLIHKFKYAFYLSCRELSRLGPCSFAELVFRDWPELQDDIPHILAQARKILFVIDGFDELGAAPGALIEDICGDWEKKKPVPVLLGSLLNRVMLPKAALLVTTRPRALRDLRILAEEPIYIRVEGFLEEDRRAYFLRHFGDEDQAMRAFELMRSNAALFQLGSAPAVCWIVCTTLKLQMEKGEDPVPTCLTRTGLFLRFLCSRFPQGAQLRGALRTLSLLAAQGLWAQTSVLHREDLERLGVQESDLRLFLDGDILRQDRVSKGCYSFIHLSFQQFLTALFYTLEKEEEEDRDGHAWDIGDVQKLLSGVERLRNPDLIQAGYYSFGLANEKRAKELEATFGCRMSPDIKQELLRCDISCKGGHSTVTDLQELLGCLYESQEEELVKEVMAQFKEISLHLNAVDVVPSSFCVKHCRNLQKMSLQVIKENLPENVTASESDAEVERSQDDQHMLPFWTDLCSIFGSNKDLMGLAINDSFLSASLVRILCEQIASDTCHLQRVVFKNISPADAHRNLCLALRGHKTVTYLTLQGNDQDDMFPALCEVLRHPECNLRYLGLVSCSATTQQWADLSLALEVNQSLTCVNLSDNELLDEGAKLLYTTLRHPKCFLQRLSLENCHLTEANCKDLAAVLVVSRELTHLCLAKNPIGNTGVKFLCEGLRYPECKLQTLVLWNCDITSDGCCDLTKLLQEKSSLLCLDLGLNHIGVKGMKFLCEALRKPLCNLRCLWLWGCSIPPFSCEDLCSALSCNQSLVTLDLGQNPLGSSGVKMLFETLTCSSGTLRTLRLKIDDFNDELNKLLEEIEEKNPQLIIDTEKHHPWAERPSSHDFMI

SEQ ID NO: 85084 - protein, 562 aa, Homo sapiens
MTVLEITLAVILTLLGLAILAILLTRWARRKQSEMYISRYSSEQSARLLDYEDGRGSRHAYSTQSDTSYDNRERSKRDYTPSTNSLALSRSSIALPQGSMSSIKCLQTTEEPPSRTAGAMMQFTAPIPGATGPFKLSQKTIVQTLGPIVQYPGSNVRSHPHTITGPPSAPRGPPMAPIIISQRTASQLAAPIRIPQVHTMDSSGKITLTPVVILTGYMDEELAKKSCSKIQILKCGGTARSQNSREENKEALKNDIIFTNSVESLKSAHIKEPEREGKGTDLEKDKIGMEVKVDSDAGIPKRQETQLKISEMSVPQGQGAQIKKSVSDVPRGQESQVKKSESGVPKGQEAQVTKSGLVVLKGQEAQVEKSEMGVPRRQESQVKKSQSGVSKGQEAQVKQRESVVLKGQEAQVEKSELKVPKGQEGQVEKTEADVPKEQEVQEKKSEAGVLKGPESQVKNTEVSVPETLESQVKKSESGVLKGQEAQEKKESFEDKGNNDKEKERDAEKDPNKKEKGDKNTKGDKGKDKVKGKRESEINGEKSKGSKRAKANTGRKYNKKVEE

SEQ ID NO: 85085 - protein, 124 aa, Homo sapiens
MAAANPWDPASAPNGAGLVLGHFIASGMVNQEMLNMSKKTVSCFVNFTRLQQITNIQAEIYQKNLEIELLKLEKDTADVVHPFFLEMKSCYVAQAGLELMASILPFQSPKTLRLQLRSVILCKA

SEQ ID NO: 85086 - protein, 394 aa, Homo sapiens
MAPWPPKGLVPAMLWGLSLFLNLPGPIWLQPSPPPQSSPPPQPHPCHTCRGLVDSFNKGLERTIRDNFGGGNTAWEEENLSKYKDSETRLVEVLEGVCSKSDFECHRLLELSEELVESWWFHKQQEAPDLFQWLCSDSLKLCCPAGTFGPSCLPCPGGTERPCGGYGQCEGEGTRGGSGHCDCQAGYGGEACGQCGLGYFEAERNASHLVCSACFGPCARCSGPEESNCLQCKKGWALHHLKCVDCAKACLGCMGAGPGRCKKCSPGYQQVGSKCLDVDECETEVCPGENKQCENTEGGYRCICAEGYKQMEGICVKEQIPGAFPILTDLTPETTRRWKLGSHPHSTYVKMKMQRDEATFPGLYGKQVAKLGSQSRQSDRGTRLIHSQQASSQR

SEQ ID NO: 85087 - protein, 1267 aa, Homo sapiens
MARLADYFIVVGYDHEKPGSGEGLGKIIQRFPQKDWDDTPFPQGIELFCQPGGWQLSRERKQPTFFVVVLTDIDSDRHYCSCLTFYEAEINLQGTKKEEIEGEAKVSGLIQPAEVFAPKSLVLVSRLYYPEIFRACLGLIYTVYVDSLNVSLESLIANLCACLVPAAGGSQKLFSLGAGDRQLIQTPLHDSLPITGTSVALLFQQLGIQNVLSLFCAVLTENKVLFHSASFQRLSDACRALESLMFPLKYSYPYIPILPAQLLEVLSSPTPFIIGVHSVFKTDVHELLDVIIADLDGGTIKIPECIHLSSLPEPLLHQTQSALSLILHPDLEVADHAFPPPRTALSHSKMLDKEVRAVFLRLFAQLFQGYRSCLQLIRIHAEPVIHFHKTAFLGQRGLVENDFLTKVLSGMAFAGFVSERGPPYRSCDLFDELVAFEVERIKVEENNPVKMIKHVRELAEQLFKNENPNPHMAFQKVPRPTEGSHLRVHILPFPEINEARVQELIQENVAKNQNAPPATRIEKKCVVPAGPPVVSIMDKVTTVFNSAQRLEVVRNCISFIFENKILETEKTLPAALRALKGKAARQCLTDELGLHVQQNRAILDHQQFDYIIRMMNCTLQDCSSLEEYNIAAALLPLTSAFYRKLAPGVSQFAYTCVQDHPIWTNQQFWETTFYNAVQEQVRSLYLSAKEDNHAPHLKQKDKLPDDHYQEKTAMDLAAEQLRLWPTLSKSTQQELVQHEESTVFSQAIHFANLMVNLLVPLDTSKNKLLRTSAPGDWESGSNSIVTNSIAGSVAESYDTESGFEDSENTDIANSVVRFITRFIDKVCTESGVTQDHIKSLHCMIPGIVAMHIETLEAVHRESRRLPPIQKPKILRPALLPGEEIVCEGLRVLLDPDGREEATGGLLGGPQLLPAEGALFLTTYRILFRGTPHDQLVGEQTVVRSFPIASITKEKKITMQNQLQQNMQEGLQITSASFQLIKVAFDEEVSPEVVEIFKKQLMKFRYPQSIFSTFAFAAGQTTPQIILPKQKEKNTSFRTFSKTIVKGAKRAGKMTIGRQYLLKKKTGTIVEERVNRPGWNEDDDVSVSDESELPTSTTLKASEKSTMEQLVEKACFRDYQRLGLGTISGSSSRSRPEYFRITASNRMYSLCRSYPGLLVVPQAVQDSSLPRVARCYRHNRLPVVCWKNSRSGTLLLRSGGFHGKGVVGLFKSQNSPQAAPTSSLESSSSIEQEKYLQALLNAVSVHQKLRGNSTLTVRPAFALSPVIM

SEQ ID NO: 85088 - protein, 149 aa, Homo sapiens
MASVALEDVAVNFTREEWALLGPCQKNLYKDVMQETIRNLDCVGMKWKDQNIEDQYRYPRKNLRCRMLERFVESKDGTQCGETSSQIQDSIVTKNTLPGVGPYESRMSGEVIMGHSSLNCYIRVGAGHKPYEYHECGEKPDTHKQRGKA

SEQ ID NO: 85089 - protein, 226 aa, Homo sapiens
  MOD_RES (1)..(1): Any amino acid
XTAHHTLGLPVGKHIYLSTRIDGSLVIRPYTPVTSDEDQGYVDLVIKVYLKGVHPKFPEGGKMSQYLDSLKVGDVVEFRGPSGLLTYTGKGHFNIQPNKKSPPEPRVAKKLGMIAGGTGITPMLQLIRAILKVPEDPTQCFLLFANQTEKDIILREDLEELQARYPNRFKLWFTLDHPPKGILPISGHPTIPSSSKSKPCPFVNSGFIEINLASHCQLGSLSAQTQ

SEQ ID NO: 85090 - protein, 489 aa, Homo sapiens
MAAEIDFLREQNRRLNEDFRRYQMESFSKYSSVQKAVCQGEGDDTFENLVFDQSFLAPLVTEYDKHLGELNGQLKYYQKQVGEMKLQLENVIKENERLHSELKDAVEKKLEAFPLGTEVGTDIYADDETVRNLQEQLQLANQEKTQAVELWQTVSQELDRLHKLYQEHMTEAQIHVFESQKQKDQLFDFQQLTKQLHVTNENMEVTNQQFLKTVTEQSVIIEQLRKKLRQAKLELRVAVAKVEELTNVTEDLQGQMKKKEKDVVSAHGREEASDRRLQQLQSSIKQLEIRLCVTIQEANQLRTENTHLEKQTRELQAKCNELENERYEAIVRARNSMQLLEEANLQKSQALLEEKQKEEDIEKMKETVSRFVQDATIRTKKEVANTKKQCNIQISRLTEELSALQMECAEKQGQIERVIKEKKAVEEELEKIYREGRGNESDYRKLEEMHQRFLVSERSKDDLQLRLTRAENRIKQLETESVQWNMNFQ

SEQ ID NO: 85091 - protein, 607 aa, Homo sapiens
  MOD_RES (1)..(1): Any amino acid
XAQSLLQLWKAYSNAHGEAAARLKQQEAKFQQLANISMSGNNLAEILPPALQDIKELQHDVQKTKEAFLQNSSVLDRLPQPAESSTHMLLPGPLHSLQRAAYLEKMLLVKANEFEFVLSQFKDFGVRLESLKGLIMHEEENLDRLHQQEKENPDSFLNHVLALTAQSPDIEHLNEVSLKLPLSDVAVKTLQNMNRQWIRATATALERCSELQGIGLNEKFLYCCEKWIQLLEKIEEALKVDVANSLPELLEQQKTYKMLEAEVSINQTIADSYVTQSLQLLDTTEIENRPEFITEFSKLTDRWQNAVQGVRQRKGDVDGLVRQWQDFTTSVENLFRFLTDTSHLLSAVKGQERFSLYQTRSLIHELKNKEIHFQRRRTTCALTLEAGEKLLLTTDLKTKESVGRRISQLQDSWKDMEPQLAEMIKQFQSTVETWDQCEKKIKELKSRLQVLKAQSEDPLPELHEDLHNEKELIKELEQSLASWTQNLKELQTMKADLTRHVLVEDVMVLKEQIEHLHRQWEDLCLRVAIRKQEIEDRLNTWVVFNEKNKELCAWLVQMENKVLQTADISIEEMIEKLQKGEEAEGDLCFYSAVGQKHEQPSHLVGSN

SEQ ID NO: 85092 - protein, 143 aa, Homo sapiens
MSATVVDAVNAAPLSGSKEMSLEEPKKMTREDWRKKKELEEQRKLGNAPAEVDEEGKDINPHIPQYISSVPWYIDPSKRPTLKHQRPQPEKQKQFSSSGEWYKRGVKENSIITKYRKGACENCGAMTHKKKDCFERPRRVGAK

SEQ ID NO: 85093 - protein, 124 aa, Homo sapiens
MAALAAVGPPNPRADPECCSILHGLVAAVETLCKITEYQHEARTLLMENAERVGNRGRIICITNAKSDSHVRMLEDCVQETIHEHNKLAANSDHLMQIQKCELVLIHTYPVGEDSLVSDRSKKE

SEQ ID NO: 85094 - protein, 162 aa, Homo sapiens
MGLQACLLGLFALILSGKCSYSPEPDQRRTLPPGWVSLGRADPEEELSLTFALRQQNVERLSELVQAVSDPSSPQYGKYLTLENVADLVRPSPLTLHTVQKWLLAAGAQKCHSVITQDFLTCWLSIRQAELLLPGAEFHHYVGGPTETHVWGDCTVFPQHHP

SEQ ID NO: 85095 - protein, 116 aa, Homo sapiens
MDTRSGSQCSVTPEAIRNNEELVLPPRISRVNGWSLPLHYFRVVTWAVFVGLSLATFRIFIPLLPHSWKYIAYVSLPQWGSGDTVSGTGGFLVSPTSRMKPQTLAEQENQTLHFLQ

SEQ ID NO: 85096 - protein, 465 aa, Homo sapiens
MSHLTQHTGIHAGEKPYKCEKCGKAFNRSTSLSKHKRIHTGEKPYTCEECGKAFRRSTVLNEHKKIHTGEKPYKCEECGKAFTRSTTLNEHKKIHTGEKPYKCKECGKAFRWSTSLNEHKNIHTGEKPYKCKECGKAFRQSRSLNEHKNIHTGEKPYTCEKCGKAFNQSSSLIIHRSIHSEQKLYKCEECGKAFTWSSSLNKHKRIHTGEKPYTCEECGKAFYRSSHLAKHKRIHTGEKPYTCEECGKAFNQSSTLILHKRIHSGQKPYKCEECGKAFTRSTTLNEHKKIHTGEKPYKCEECGKAFIWSASLNEHKNIHTGEKPYKCKECGKAFNQSSGLIIHRSIHSEQKLYKCEECGKAFTRSTALNEHKKIHSGEKPYKCKECGKAYNLSSTLTKHKRIHTGEKPFTCEECGKAFNWSSSLTKHKIIHTGEKSYKCEECGKAFNRPSTLTVHKRIHTGKEHS

SEQ ID NO: 85097 - protein, 92 aa, Homo sapiens
MFRNFKIIYRRYAGLYFCICVDVNDNNLAYLEAIHNFVEVLNEYFHNVCELDLVFNFYKVYTVVDEMFLAGEIRETSQTKVLKQLLMLQSLE

SEQ ID NO: 85098 - protein, 59 aa, Homo sapiens
  MOD_RES (1)..(1): Any amino acid
XHDVAAPLSPHSQEVSCYIDYNISMPAQNLWRLGTDASSLVELGNLVVSCIRGLCSLRF

SEQ ID NO: 85099 - protein, 91 aa, Homo sapiens
  MOD_RES (1)..(1): Any amino acid
XNISSNNWFFIEFSMLGFIGKLFRSEDLTHFVRFFLMFYKEKPIDWLLNDIFQRNCMKRKKQIRIQYKPSLFQHVGIHSSFPRKEQYEKKI

SEQ ID NO: 85100 - protein, 151 aa, Homo sapiens
RPPAPASRGPMPARIGYYEIDRTIGKGNFAVVKRATHLVTKAKVAIKIIDKTQLDEENLKKIFREVQIMKMLCHPHIIRLYQVMETERMIYLVTEYASGGEIFGGFGHQQFSFCPELPIAESWRSAVKRWGPLLLLSPHLWNLIRPPGGPW

SEQ ID NO: 85101 - protein, 164 aa, Homo sapiens
MLLNGDCPESLKKEAAAAEPPRENGLDEAGPGDETTGQEVIVIQDTGFSVKILAPGIEPFSLQVSPQEMVQEIHQVLMDREDTCHRTCFSLHLDGNVLDHFSELRSVEGLQEGSVLRVVEEPYTVREARIHVRHVRDLLKSLDPSDAFNGVDCNSLSFLSVFTD

SEQ ID NO: 85102 - protein, 238 aa, Homo sapiens
MAVLLLLLRALRRGPGPGPRPLWGPGPAWSPGFPARPGRGRPYMASRPPGDLAEAGGRALQSLQLRLLTPTFEGINGLLLKQHLVQNPVRLWQLLGGTFYFNTSRLKQKNKEKDKSKGKAPEEDEEERRRRERDDQMYRERLRTLLVIAVVMSLLNALSTSGGSISWNDFVHEMLAKGEVQRVQVVPESDVVEVYLHPGAVVFGRPNQLKMARFTIVDGKMGKGVSFKDVAGMHEAKL

SEQ ID NO: 85103 - protein, 248 aa, Homo sapiens
MARRGPGWRPLLLLVLLAGAAQGGLYFRRGQTCYRPLRGDGLAPLGRSTYPRPHEYLSPADLPKSWDWRNVDGVNYASITRNQHIPQYCGSCWAHASTSAMADRINIKRKGAWPSTLLSVQNVIDCGNAGSCEGGNDLSVWDYAHQHGIPDETCNNYQAKDQECDKFNQCGTCNEFKECHAIRNYTLWRVGDYGSLSGREKMMAEIYANGPISLTLSPRLECSGMIFAHCSLDRPGSSYPPASAPSTE

SEQ ID NO: 85104 - protein, 25 aa, Homo sapiens
MTSSQVKTKPFDSWSYSEMEKEFPE

SEQ ID NO: 85105 - protein, 57 aa, Homo sapiens
MSWDPNPVPRTLRCWRLRRASETALQSSRRAVEDQLKICGHRRDADVFELFLSKKTG

SEQ ID NO: 85106 - protein, 58 aa, Homo sapiens
VLVCPLRPVERFHDLRPDEVADLFQTTQRVGTVVEKHFHGTSLTFSMQDGPEAGQTVK

SEQ ID NO: 85107 - protein, 4514 aa, Homo sapiens
MSEPGGGGGEDGSAGLEVSAVQNVADVSVLQKHLRKLVPLLLEDGGEAPAALEAALEEKSALEQMRKFLSDPQVHTVLVERSTLKEDVGDEGEEEKEFISYNINIDIHYGVKSNSLAFIKRTPVIDADKPVSSQLRVLTLSEDSPYETLHSFISNAVAPFFKSYIRESGKADRDGDKMAPSVEKKIAELEMGLLHLQQNIEIPEISLPIHPMITNVAKQCYERGEKPKVTDFGDKVEDPTFLNQLQSGVNRWIREIQKVTKLDRDPASGTALQEISFWLNLERALYRIQEKRESPEVLLTLDILKHGKRFHATVSFDTDTGLKQALETVNDYNPLMKDFPLNDLLSATELDKIRQALVAIFTHLRKIRNTKYPIQRALRLVEAISRDLSSQLLKVLGTRKLMHVAYEEFEKVMVACFEVFQTWDDEYEKLQVLLRDIVKRKREENLKMVWRINPAHRKLQARLDQMRKFRRQHEQLRAVIVRVLRPQVTAVAQQNQGEVPEPQDMKVAEVLFDAADANAIEEVNLAYENVKEVDGLDVSKEGTEAWEAAMKRYDERIDRVETRITARLRDQLGTAKNANEMFRIFSRFNALFVRPHIRGAIREYQTQLIQRVKDDIESLHDKFKVQYPQSQACKMSHVRDLPPVSGSIIWAKQIDRQLTAYMKRVEDVLGKGWENHVEGQKLKQDGDSFRMKLNTQEIFDDWARKVQQRNLGVSGRIFTIESTRVRGRTGNVLKLKVNFLPEIITLSKEVRNLKWLGFRVPLAIVNKAHQANQLYPFAISLIESVRTYERTCEKVEERNTISLLVAGLKKEVQALIAEGIALVWESYKLDPYVQRLAETVFNFQEKVDDLLIIEEKIDLEVRSLETCMYDHKTFSEILNRVQKAVDDLNLHSYSNLPIWVNKLDMEIERILGVRLQAGLRAWTQVLLGQAEDKAEVDMDTDAPQVSHKPGGEPKIKNVVHELRITNQVIYLNPPIEECRYKLYQEMFAWKMVVLSLPRIQSQRYQVGVHYELTEEEKFYRNALTRMPDGPVALEESYSAVMGIVSEVEQYVKVWLQYQCLWDMQAENIYNRLGEDLNKWQALLVQIRKARGTFDNAETKKEFGPVVIDYGKVQSKVNLKYDSWHKEVLSKFGQMLGSNMTEFHSQISKSRQELEQHSVDTASTSDAVTFITYVQSLKRKIKQFEKQVELYRNGQRLLEKQRFQFPPSWLYIDNIEGEWGAFNDIMRRKDSAIQQQVANLQMKIVQEDRAVESRTTDLLTDWEKTKPVTGNLRPEEALQALTIYEGKFGRLKDDREKCAKAKEALELTDTGLLSGSEERVQVALEELQDLKGVWSELSKVWEQIDQMKEQPWVSVQPRKLRQNLDALLNQLKSFPARLRQYASYEFVQRLLKGYMKINMLVIELKSEALKDRHWKQLMKRLHVNWVVSELTLGQIWDVDLQKNEAIVKDVLLVAQGEMALEEFLKQIREVWNTYELDLVNYQNKCRLIRGWDDLFNKVKEHINSVSAMKLSPYYKVFEEDALSWEDKLNRIMALFDVWIDVQRRWVYLEGIFTGSADIKHLLPVETQRFQSISTEFLALMKKVSKSPLVMDVLNIQGVQRSLERLADLLGKIQKALGEYLERERSSFPRFYFVGDEDLLEIIGNSKNVAKLQKHFKKMFAGVSSIILNEDNSVVLGISSREGEEVMFKTPVSITEHPKINEWLTLVEKEMRVTLAKLLAESVTEVEIFGKATSIDPNTYITWIDKYQAQLVVLSAQIAWSENVETALSSMGGGGDAAPLHSVLSNVEVTLNVLADSVLMEQPPLRRRKLEHLITELVHQRDVTRSLIKSKIDNAKSFEWLSQMRFYFDPKQTDVLQQLSIQMANAKFNYGFEYLGVQDKLVQTPLTDRCYLTMTQALEARLGGSPFGPAGTGKTESVKALGHQLGRFVLVFNCDETFDFQAMGRIFVGLCQVGAWGCFDEFNRLEERMLSAVSQQVQCIQEALREHSNPNYDKTSAPITCELLNKQVKVSPDMAIFITMNPGYAGRSNLPDNLKKLFRSLAMTKPDRQLIAQVMLYSQGFRTAEVLANKIVPFFKLCDEQLSSQSHYDFGLRALKSVLVSAGNVKRERIQKIKREKEERGEAVDEGEIAENLPEQEILIQSVCETMVPKLVAEDIPLLFSLLSDVFPGVQYHRGEMTALREELKKVCQEMYLTYGDGEEVGGMWVEKVLQLYQITQINHGLMMVGPSGSGKSMAWRVLLKALERLEGVEGVAHIIDPKAISKDHLYGTLDPNTREWTDGLFTHVLRKIIDSVRGELQKRQWIVFDGDVDPEWVENLNSVLDDNKLLTLPNGERLSLPPNVRIMFEVQDLKYATLATVSRCGMVWFSEDVLSTDMIFNNFLARLRSIPLDEGEDEAQRRRKGKEDEGEEAASPMLQIQRDAATIMQPYFTSNGLVTKALEHAFQLEHIMDLTRLRCLGSLFSMLHQACRNVAQYNANHPDFPMQIEQLERYIQRYLVYAILWSLSGDSRLKMRAELGEYIRRITTVPLPTAPNIPIIDYEVSISGEWSPWQAKVPQIEVETHKVAAPDVVVPTLDTVRHEALLYTWLAEHKPLVLCGPPGSGKTMTLFSALRALPDMEVVGLNFSSATTPELLLKTFDHYCEYRRTPNGVVLAPVQLGKWLVLFCDEINLPDMDKYGTQRVISFIRQMVEHGGFYRTSDQTWVKLERIQFVGACNPPTDPGRKPLSHRFLRHVPVVYVDYPGPASLTQIYGTFNRAMLRLIPSLRTYAEPLTAAMVEFYTMSQERFTQDTQPHYIYSPREMTRWVRGIFEALRPLETLPVEGLIRIWAHEALRLFQDRLVEDEERRWTDENIDTVALKHFPNIDREKAMSRPILYSNWLSKDYIPVDQEELRDYVKARLKVFYEEELDVPLVLFNEVLDHVLRIDRIFRQPQGHLLLIGVSGAGKTTLSRFVAWMNGLSVYQIKVHRKYTGEDFDEDLRTVLRRSGCKNEKIAFIMDESNVLDSGFLERMNTLLANGEVPGLFEGDEYATLMTQCKEGAQKEGLMLDSHEELYKWFTSQVIRNLHVVFTMNPSSEGLKDRAATSPALFNRCVLNWFGDWSTEALYQVGKEFTSKMDLEKPNYIVPDYMPVVYDKLPQPPSHREAIVNSCVFVHQTLHQANARLAKRGGRTMAITPRHYLDFINHYANLFHEKRSELEEQQMHLNVGLRKIKETVDQVEELRRDLRIKSQELEVKNAAANDKLKKMVKDQQEAEKKKVMSQEIQEQLHKQQEVIADKQMSVKEDLDKVEPAVIEAQNAVKSIKKQHLVEVRSMANPPAAVKLALESICLLLGESTTDWKQIRSIIMRENFIPTIVNFSAEEISDAIREKMKKNYMSNPSYNYEIVNRASLACGPMVKWAIAQLNYADMLKRVEPLRNELQKLEDDAKDNQQKANEVEQMIRDLEASIARYKEEYAVLISEAQAIKADLAAVEAKVNRSTALLKSLSAERERWEKTSETFKNQMSTIAGDCLLSAAFIAYAGYFDQQMRQNLFTTWSHHLQQANIQFRTDIARTEYLSNADERLRWQASSLPADDLCTENAIMLKRFNRYPLIIDPSGQATEFIMNEYKDRKITRTSFLDDAFRKNLESALRFGNPLLVQDVESYDPVLNPVLNREVRRTGGRVLITLGDQDIDLSPSFVIFLSTRDPTVEFPPDLCSRVTFVNFTVTRSSLQSQCLNEVLKAERPDVDEKRSDLLKLQGEFQLRLRQLEKSLLQALNEVKGRILDDDTIITTLENLKREAAEVTRKVEETDIVMQEVETVSQQYLPLSTACSSIYFTMESLKQIHFLYQYSLQFFLDIYHNVLYENPNLKGVTDHTQRLSIITKDLFQVAFNRVARGMLHQDHITFAMLLARIKLKGTVGEPTYDAEFQHFLRGNEIVLSAGSTPRIQGLTVEQAEAVVRLSCLPAFKDLIAKVQADEQFGIWLDSSSPEQTVPYLWSEETPATPIGQAIHRLLLIQAFRPDRLLAMAHMFVSTNLGESFMSIMEQPLDLTHIVGTEVKPNTPVLMCSVPGYDASGHVEDLAAEQNTQITSIAIGSAEGFNQADKAINTAVKSGRWVMLKNVHLAPGWLMQLEKKLHSLQPHACFRLFLTMEINPKVPVNLLRAGRIFVFEPPPGVKANMLRTFSSIPVSRICKSPNERARLYFLLAWFHAIIQERLRYAPLGWSKKYEFGESDLRSACDTVDTWLDDTAKGRQNISPDKIPWSALKTLMAQSIYGGRVDNEFDQRLLNTFLERLFTTRSFDSEFKLACKVDGHKDIQMPDGIRREEFVQWVELLPDTQTPSWLGLPNNAERVLLTTQGVDMISKMLKMQMLEDEDDLAYAETEKKTRTDSTSDGRPAWMRTLHTTASNWLHLIPQTLSHLKRTVENIKDPLFRFFEREVKMGAKLLQDVRQDLADVVQVCEGKKKQTNYLRTLINELVKGILPRSWSHYTVPAGMTVIQWVSDFSERIKQLQNISLAAASGGAKELKVKALLTSLG

SEQ ID NO: 85108 - protein, 90 aa, Homo sapiens
MPRMILSNTTAVTPFLTKLWQETVQQGGNMSGLARRSPRSGDGKLEALYVLMVLGFFGFFTLGIMLSYIRSKKLEHSNDPFNVYIESNAW

SEQ ID NO: 85109 - protein, 37 aa, Homo sapiens
TRGKYGEGAKQETFTFALTLVFIQCVINAVFAKICPW

SEQ ID NO: 85110 - protein, 228 aa, Homo sapiens
MRVIRVGTRKSQLARIQTDSVVATLKASYPGLQFEIIAMSTTGDKILDTALSKIGEKSLFTKELEHALEKNEVDLVVHSLKDLPTVLPPGFTIGAICKRENPHDAVVFHPKFVGKTLETLPEKSVVGTSSLRRAAQLQRKFPHLEFRSIRGNLNTRLRKLDEQQEFSAIILATAGLQRMGWHNRVGQILHPEECMYAVGQGALGVEVRAKDQDILDLVGVLHDPETLL

SEQ ID NO: 85111 - protein, 116 aa, Homo sapiens
MFEPNSPRRGGARYQWPEGAQVSSAEGAAKEEPKRRSARLSAKPPAKVEAKPKKAAAKDKSSDKKVQTKGKRGAKGKQAEVANQETKEDLPAENGETKTEESPASDEAGEKEAKSD

SEQ ID NO: 85112 - protein, 219 aa, Homo sapiens
TAFTAEHATHGHVKMHHAYTNVVGLGDSSTWRLPCLNRYVYMFLAPFLLPIATPLVAVERLRKVELGTALRTLALISLGLYSHYWLLLNVSGFKNPSSALGCMFLTRSLLAHPYLHVNIFQHIGLPMFSRDNKPRRIHMMSLGVLNLARLPVLDWAFGHSIISCHVEHHLFPRLSDNMCLKVVEGWAGGAGIKGLLEDGKEDSSAWGRCSHYNPGTCGG

SEQ ID NO: 85113 - protein, 79 aa, Homo sapiens
MFLNTLTPKFYVALTGTSSLISGLILIFEWWYFRKYGTSFIEQVSVSHLRPLLGGVDNNSSNNSNSSNGDSDSNRQSVS

SEQ ID NO: 85114 - protein, 150 aa, Homo sapiens
MCEVFGLWILEDKSMSSLPGCIGLDAATATVESEEIAELQQAVVEELGISMEELRHFIDEELEKMDCVQQRKKQLAELETWVIQKESEVAHVDQLFDDASRAVTNCESLVKDFYSKLGLQYRDSSSEDESSRPTEIIEIPDEDDDVLSID

SEQ ID NO: 85115 - protein, 272 aa, Homo sapiens
MAGPRGALLAWCRRQCEGYRGVEIRDLSSSFRDGLAFCAILHRHRPDLLDFDSLSKDNVFENNRLAFEVAEKELGIPALLDPNDMVSMSVPDCLSIMTYVSQYYNHFCSPGQAGVSPPRKGLAPCSPPSVAPTPVEPEDVAQGEELSSGSLSEQGTGQTPSSTCAACQQHVHLVQRYLADGRLYHRHCFRETARTACPQAEGDTEAVRGDTSPQEGPPMDHAGAGRTKEEASPTSPKQQPGATKPGQQAGGEWRHRGGGPAEPNGQPGVQTL

SEQ ID NO: 85116 - protein, 99 aa, Homo sapiens
MAELQEVQITEEKPLLPGQTPEAAKEAELAARILLDQGQTHSVETPYGSVTFTVYGTPKPKRPAILTYHDVGLNYKSCFQPLFQFEDMQEIIQNFVRVH

SEQ ID NO: 85117 - protein, 124 aa, Homo sapiens
MMLKDMEDTDDDDDDDDDDDDDDEDNSLFPTREPRSHFFPFDLFPMCPFGCQCYSRVVHCSDLGLTSVPTNIPFDTRMLDLQNNKIKEIKENDFKGLTSLYGLILNNNKLTKIHPKAFLTTKKL

SEQ ID NO: 85118 - protein, 73 aa, Homo sapiens
MDVLLTYLPKNYAKSELGAVIFWGQNQTLDPNNMTILNRTFQDEPLIMDFNGDLIPDIFGITNESNQPQILLG

SEQ ID NO: 85119 - protein, 144 aa, Homo sapiens
MQAPAFRDKKQGVSAKNQVPAQCRPPSDSTQVPCWLYRAILSLYILLALAFVLCIILSAFIMVKNAEMSKELLGFKRELWNVSNSVQACEERQKRGWDSVQQSITMVRSKIDRLETTLAGIKNIDTKVQKILEVLQKMPQSSPQ

SEQ ID NO: 85120 - protein, 26 aa, Homo sapiens
MDLNNNSLKTKAQVPMVLTAGPKWLL

SEQ ID NO: 85121 - protein, 293 aa, Homo sapiens
SYMEDHLKNKNRLEKEWEALCAYQAEPNSSFVAQREENVPKNRSLAVLTYDHSRVLLKAENSHSHSDYINASPIMDHDPRNPAYIATQGPLPATVADFWQMVWESGCVVIVMLTPLAENGVRQCYHYWPDEGSNLYHIYEVNLVSEHIWCEDFLVRSFYLKNLQTNETRTVTQFHFLSWYDRGVPSSSRSLLDFRRKVNKCYRGRSCPIIVHCSDGAGRSGTYVLIDMVLNKMAKGAKEIDIAATLEHLRDQRPGMVQTKEQFEFALTAVAEEVNAILKALPHTRSPSWLKLC

SEQ ID NO: 85122 - protein, 144 aa, Homo sapiens
  MOD_RES (1)..(1): Any amino acid
XSGKSTHIWAHDLPGLFEQRRLQQQVPLSIPTNRLTQRIIPRRFALSTKIPDTKGCLQCRVVRNPYTGATFLLAALPTSLLLLQWYEPLQKFLLLKNFSSPLPSPAGMLEPLVLDGKELPQVCVGAEGPEGPGCRVLFHARPSR

SEQ ID NO: 85123 - protein, 819 aa, Homo sapiens
MNYIFGNNTLLYSRGSRGGNTSSSHGSAGPKQKHWAKKGSSDELQAEPEPSRWQQIVAFFTRRHSFIDCISVATSSTQPTEAVLPSPPTVPVIPVLPVPAENTVILPTIPQANPPPVLVNTDSLETPTYVNGTDADYEYEEITLERGNSGLGFSIAGGTDNPHIGDDSSIFITKIITGGAAAQDGRLRVNDCILRVNEVDVRDVTHSKAVEALKEAGSIVRLYVKRRKPVSEKIMEIKLIKGPKGLGFSIAGGVGNQHIPGDNSIYVTKIIEGGAAHKDGKLQIGDKLLAVNNVCLEEVTHEEAVTALKNTSDFVYLKVAKPTSMYMNDGYAPPDITNSSSQPVDNHVSPSSFLGQTPASPARYSPVSKAVLGDDEITREPRKVVLHRGSTGLGFNIVGGEDGEGIFISFILAGGPADLSGELRKGDRIISVNSVDLRAASHEQAAAALKNAGQAVTIVAQYRPEEYSRFEAKIHDLREQMMNSSISSGSGSLRTSQKRSLYVRALFDYDKTKDSGLPSQGLNFKFGDILHVINASDDEWWQARQVTPDGESDEVGVIPSKRRVEKKERARLKTVKFNSKTRDKGEIPDDMGSKGLIILITDEYGCSKGGQEEYVLSYEPVNQQEVNYTRPVIILGPMKDRINDDLISEFPDKFGSCVPHTTRPKRDYEVDGRDYHFVTSREQMEKDIQEHKFIEAGQYNNHLYGTSVQSVREVAEKGKHCILDVSGNAIKRLQIAQLYPISIFIKPKSMENIMEMNKRLTEEQARKTFERAMKLEQEFTEHFTAIVQGDTLEDIYNQVKQIIEEQSGSYIWVPAKEKL

SEQ ID NO: 85124 - protein, 71 aa, Homo sapiens
MGLSTVPDLLLPLVLLELLVGIYPSGVIGLVPHLGDREKRDSVCPQGKYIHPQNNSICCTKCHKGTYLYND

SEQ ID NO: 85125 - protein, 82 aa, Homo sapiens
MLLAASKVLDRLKPVIGVNTDPERSEGHLCLPVRYTHSFPEALQKFYRGEFRWLWRQRIRLYLEGTGINPVPVDLHEQQLSL

SEQ ID NO: 85126 - protein, 46 aa, Homo sapiens
MTLVTAGGAWTGPGEWELRDAITSGLGSCSSGNLCCAHHKCQGQRP

SEQ ID NO: 85127 - protein, 124 aa, Homo sapiens
MQKIMHISVLLSPVLWGLIFGVSSNSIQIGGLFPRGADQEYSAFRVGMVQFSTSEFRLTPHIDNLEVANSFAVTNAFCSQFSRGVYAIFGFYDKKSVNTITSFCGTLHVSFITPSFPTDGTHPF

SEQ ID NO: 85128 - protein, 473 aa, Homo sapiens
MALDGELGEQEEEKKKKKKKKRKKKKEEEEEEEGAEKSSSPFAAAMGEDDAALRAGSRGLSDPWADSVGVRPRTTERHIAVHKRLVLAFAVSLVALLAVTMLAVLLSLRFDECGASATPGADGGPSGFPERGGNGSLPGSARRNHHAGGDSWQPEAGGVASPGTTSAQPPSEEEREPWEPWTQLRLSGHLKPLHYNLMLTAFMENFTFSGEVNVEIACRNATRYVVLHASRVAVEKVQLAEDRAFGAVPVAGFFLYPQTQVLVVVLNRTLDAQRNYNLKIIYNALIENELLGFFRSSYVLHGERRFLGVTQFSPTHARKAFPCFDEPIYKATFKISIKHQATYLSLSNMPVETSVFEEDGWVTDHFSQTPLMSTYYLAWAICNFTYRETTTKSGVVGAALIRMLANFMGHSVFQRGLQDYLTIHKYGNAARNDLWNTLSEALKRNGKYVNIQEVMDQWTLQMGYPVITILGNT

SEQ ID NO: 85129 - protein, 25 aa, Homo sapiens
  MOD_RES (1)..(1): Any amino acid
XDINEWSLITSSPHPGLPTKKTTRR

SEQ ID NO: 85130 - protein, 123 aa, Homo sapiens
MLSRLMSGSSRSLEREYSCTVRLLDDSEYTCTIQRDAKGQYLFDLLCHHLNLLEKDYFGIRFVDPDKQRHWLEFTKSVVKQLRSQPPFTMCFRVKFYPADPAALKEEITSAVATEWTSFLQEV

SEQ ID NO: 85131 - protein, 124 aa, Homo sapiens
MRTKKMSKSVPAFLQDECKDLAAADVKKQRSDPYVKAYLLPDKGKMGKKKTLVVKKTLNPVYNEILRYKIEKQILKTQKLNLSIWHRDTFKRNSFLGEVELDLETWDWDNKQNKQLRWYPLKRK

SEQ ID NO: 85132 - protein, 137 aa, Homo sapiens
MTDVPQSWPSCLCHGLISFLGFLLLLVTFPISGWFALKIVPTYERMIVFRLGRIRTPQGPGMVLLLPFIDSFQRVDLRTRAFNVPPCKLASKDGAVLSVGADVQFRIWDPVLSVMTVKDLNTATRMTAQNAMTKALL

SEQ ID NO: 85133 - protein, 84 aa, Homo sapiens
MDPDTKLIGNMALLPIRSQFKGPAPRETKDTDIVDEAIYYFKANVFFKNYEIKNEADRTLIYITLYISECLKKLQKCNSKSQGE

SEQ ID NO: 85134 - protein, 356 aa, Homo sapiens [sequence omitted]

SEQ ID NO: 85135 - protein, 63 aa, Homo sapiens
MPRYYPTEDVPRKLLSHGKKPFSQHVRKLRASITPGTILIILTGRHRGKRVVFLKQLASGLLL

SEQ ID NO: 85136 - protein, 105 aa, Homo sapiens
  MOD_RES (1)..(1): Any amino acid
XGGMVDYHAANQSYQYGPSSAGNGAGGGGSMGDYMAQEDDWDRDLLLDPAWEKQQRKTFTAWCNSHLRKAGTQIENIDEDFRDGLKLMLLLEVISEELSWQTGPP

SEQ ID NO: 85137 - protein, 146 aa, Homo sapiens
MAIKSIASRLRGSRRFLSGFVAGAVVGAAGAGLAALQFFRSQGAEGALTGKQPDGSAEKAVLEQFGFPLTGTEVMQTESIVNLSLIPISLQPSVPSMKIMLEVGGHEDTWLQQEITNFQVKPWLKPFTFLTLCLRILIIILDIGTE

SEQ ID NO: 85138 - protein, 65 aa, Homo sapiens
MSAKSAISKEIFAPLDERMLGAVQVKRRTKKKIPFLATGGQGEYLTYICLSDIKSASKEKTFSEF

SEQ ID NO: 85139 - protein, 158 aa, Homo sapiens
MADNLSDTLKKLKITAVDKTEDSLEGCLDCLLQALAQNNTETSEKIQASGILQLFASLLTPQSSCKAKVANIIAEVAKNDEGRSAVDQAGGAQIVIDHLRSLCSITDPANEKLLTVFCGMLMNYSNENDSLQAQLINMGVIPTLVKLLGIHCQNAALT

SEQ ID NO: 85140 - protein, 146 aa, Homo sapiens
MAQRLLLRRFLASVISRKPSQGQWPPLTSRALQTPQCSPGGLTVTPNPARTIYTTRISLTTFNIQDGPDFQDRVVNSETPVVVDFHAQWCGPCKILGPRLEKMVAKQHGKVVMAKVDIDDHTDLAIEYEAGSLSPRLECSGTITAH

SEQ ID NO: 85141 - protein, 198 aa, Homo sapiens
MACLLETPIRMSVLSEVTASSRHYVDRLFDPDPQKVLQGVIDMKNAVIGNNKQKANLIVLGAVPRLLYLLQQETSSTELKTECAVVLGSLAMGTENNVKSLLDCHIIPALLQGLLSPDLKFIEACLRCLRTIFTSPVTPEELLYTDATVIPHLMALLSRSRYTQEYICQIFSHCCKGPDHQTILFNHGAVQNIAHLLT

SEQ ID NO: 85142 - protein, 224 aa, Homo sapiens
  MOD_RES (1)..(1): Any amino acid
XGSAGSTVAVAVKAAQELQEGQRCVVILPDSVRNYMTKFLSDRWMLQKGFLKEEDLTEKKPWWWHLRVQELGLSAPLTVLPTITCGHTIEILREKGFDQAPVVDEAGVILGMVTLGNMLSSLLAGKVQPSDQVGKVIYKQFKQIRLTDTLGRLSHILEMDHFALVVHEQIQSQDQAWAGVVGGPAGSPNQVFLEHVHACHHRLWLLSSTSGLRAHNRDGTAPKT

SEQ ID NO: 85143 - protein, 893 aa, Homo sapiens
MITSAAGIISLLDEDEPQLKEFALHKLNAVVNDFWAEISESVDKIEVLYEDEGFRSRQFAALVASKVFYHLGAFEESLNYALGAGDLFNVNDNSEYVETIIAKCIDHYTKQCVENADLPEGEKKPIDQRLEGIVNKMFQRCLDDHKYKQAIGIALETRRLDVFEKTILESNDVPGMLAYSLKLCMSLMQNKQFRNKVLRVLVKIYMNLEKPDFINVCQCLIFLDDPQAVSDILEKLVKEDNLLMAYQICFDLYESASQQFLSSVIQNLRTVGTPIASVPGSTNTGTVPGSEKDSDSMETEEKTSSAFVGKTPEASPEPKDQTLKMIKILSGEMAIELHLQFLIRNNNTDLMILKNTKDAVRNSVCHTATVIANSFMHCGTTSDQFLRDNLEWLARATNWAKFTATASLGVIHKGHEKEALQLMATYLPKDTSPGSAYQEGGGLYALGLIHANHGGDIIDYLLNQLKNASNDIVRHGGSLGLGLAAMGTARQDVYDLLKTNLYQDDAVTGEAAGLALGLVMLGSKNAQAIEDMVGYAQETQHEKILRGLAVGIALVMYGRMEEADALIESLCRDKDPILRRSGMYTVAMAYCGSGNNKAIRRLLHVAVSDVNDDVRRAAVESLGFILFRTPEQCPSVVSLLSESYNPHVRYGAAMALGICCAGTGNKEAINLLEPMTNDPVNYVRQGALIASALIMIQQTEITCPKVNQFRQLYSKVINDKHDDVMAKFGAILAQGILDAGGHNVTISLQSRTGHTHMPSVVGVLVFTQFWFWFPLSHFLSLAYTPTCVIGLNKDLKDEAEKKEEKEKKKEPEPNFQLLDNPARVMPAQLKVLTMPETCRYQPFKPLSIGGIIILKDTSEDIEELVEPVAAHGPKIEEEEQEPEPPEPFEYIDD

SEQ ID NO: 85144 - protein, 879 aa, Homo sapiens
MPVRKQDTQRALHLLEEYRSKLSQTEDRQLRSSIERVINIFQSNLFQALIDIQEFYEVTLLDNPKCIDRSKPSEPIQPVNTWEISSLPSSTVTSETLPSSLSPSVEKYRYQDEDTPPQEHISPQITNEVIGPELVHVSEKNLSEIENVHGFVSHSHISPIKANPPPVLVNTDSLETPTYVNGTDADYEYEEITLERGNSGLGFSIAGGTDNPHIGDDSSIFITKIITGGAAAQDGRLRVNDCILRVNEVDVRDVTHSKAVEALKEAGSIVRLYVKRRKPVSEKIMEIKLIKGPKGLGFSIAGGVGNQHIPGDNSIYVTKIIEGGAAHKDGKLQIGDKLLAVNNVCLEEVTHEEAVTALKNTSDFVYLKVAKPTSMYMNDGYAPPDITNSSSQPVDNHVSPSSFLGQTPASPARYSPVSKAVLGDDEITREPRKVVLHRGSTGLGFNIVGGEDGEGIFISFILAGGPADLSGELRKGDRIISVNSVDLRAASHEQAAAALKNAGQAVTIVAQYRPEEYSRFEAKIHDLREQMMNSSISSGSGSLRTSQKRSLYVRALFDYDKTKDSGLPSQGLNFKFGDILHVINASDDEWWQARQVTPDGESDEVGVIPSKRRVEKKERARLKTVKFNSKTRDKGQSFNDKRKKNLFSRKFPFYKNKDQSEQETSDADRGQEEYVLSYEPVNQQEVNYTRPVIILGPMKDRINDDLISEFPDKFGSCVPHTTRPKRDYEVDGRDYHFVTSREQMEKDIQEHKFIEAGQYNNHLYGTSVQSVREVAEKGKHCILDVSGNAIKRLQIAQLYPISIFIKPKSMENIMEMNKRLTEEQARKTFERAMKLEQEFTEHFTAIVQGDTLEDIYNQVKQIIEEQSGSYIWVPAKEKL

SEQ ID NO: 85145 - protein, 584 aa, Homo sapiens
MNQHELAVHKKKIEEVETWLKAQVLERQPKQGGSILLITGPPGCGKTTTLKILSKEHGIQVQEWINPVLPDFQKDDFKGMFNTESSFHMFPYQSQIAVFKEFLLRATKYNKLQMLGDDLRTDKKIILVEDLPNQFYRDSHTLHEVLRKYVRIGRCPLIFIISDSLSGDNNQRLLFPKEIQEECSISNISFNPVAPTIMMKFLNRIVTIEANKNGGKITVPDKTSLELLCQGCSGDIRSAINSLQFSSSKGENNLRPRKKGMSLKSDAVLSKSKRRKKPDRVFENQEVQAIGGKDVSLFLFRALGKILYCKRASLTELDSPRLPSHLSEYERDTLLVEPEEVVEMSHMPGDLFNLYLHQNYIDFFMEIDDIVRASEFLSFADILSGDWNTRSLLREYSTSIATRGVMHSNKARGYAHCQGGGSSFRPLHKPQWFLINKKYRENCLAAKALFPDFCLPALCRQTQLLPYLALLTIPMRNQAQISFIQDIGRLPLKRHFGRLKMEALTDREHGMIDPDSGDEAQLNGGHSAEESLGEPTQATVPETWSLPLSQNSASELPASQPQPFSAQGDMEENIIIEDYESDGT

SEQ ID NO: 85146 - protein, 41 aa, Homo sapiens
MALVTVSRSPPGSGASTPVGPWAELCGAPWGCPGTAGWRGQ

SEQ ID NO: 85147 - protein, 75 aa, Homo sapiens
MVAGAGRENGMETPMHENPEWEKARQALASISKSGAAGGSAKSSSNGPVASAQYVSQAEASALQQQQYYQWYQQY

SEQ ID NO: 85148 - protein, 112 aa, Homo sapiens
MKAAYLSMFGKEDHKPFGDDEVELFRAVPGLKLKIAGKSLPTEKFAIRKSRRYFSSNPISLPVPALEMMYIWNGYAVIGKQPKLTDGILEIITKAEEMLEKGPENEYSVDDE

SEQ ID NO: 85149 - protein, 164 aa, Homo sapiens
MTTSHQPQDRYKAVWLIFFMLGLGTLLPWNFFMTATQYFTNRLDMSQNVSLVTAELSKDAQASAAPAAPLPERNSLSAIFNNVMTLCAMLPLLLFTYLNSFLHQRIPQSVRILGSLVAILLVFLITAILVKVQLDALPFFVITMIKIVLINSFGAILQGSLFGL

SEQ ID NO: 85150 - protein, 186 aa, Homo sapiens
MPGVIPSESNGLSRGSPSKKNRLSLKFFQKKETKRALDFTDSQENEEKASEYRASEIDQVVPAAQSSPINCEKRENLLPFVGLNNLGNTCYLNSILQVLYFCPGFKSGVKHLFNIISRKKEALKDEANQKDKGNCKEDSLASYELICSLQSLIISVEQLQASFLLNPEKYTDELATQPRRLLNTLR

SEQ ID NO: 85151 - protein, 267 aa, Homo sapiens
MSRLRALLGLGLLVAGSRVPRIKSQTIACRSGPTWWGPQRLNSGGRWDSEVMASTVVKYLSQEEAQAVDQELFNEYQFSVDQLMELAGLSCATAIAKAYPPTSMSRSPPTVLVICGPGNNGGDGLVCARHLKLFGYEPTIYYPKRPNKPLFTALVTQCQKMDIPFLGEMPAEPMTIDELYELVVDAIFGFSFKGDVREPFHSILSVLKGLTVPIASIDIPSAPKKSATQFTGRYHYLGGRFVPPALEKKYQLNLPPYPDTECVYRLQ

SEQ ID NO: 85152 - protein, 147 aa, Homo sapiens
MRLLSFVVLALFAVTQAEEGARLLASKSLLNRYAVEGRDLTLQYNIYNVGSSAALDVELSDDSFPPEDFGIVSGMLNVKWDRIAPASNVSHTVVLRPLKAGYFNFTSATITYLAQEDGPVVIGSTSAPGQGGILAQREFDRRFSPHF

SEQ ID NO: 85153 - protein, 208 aa, Homo sapiens
MASPGCLWLLAVALLPWTCASRALQHLDPPAPLPLVIWHGMGDSCCNPLSMGAIKKMVEKKIPGIYVLSLEIGKTLMEEGSGSEMPFTSHDQSDLGWGTTSSLVQAEYWHDPIKEDVYRNHSIFLADINQERGINESYKKNLMALKKFVMVKFLNDSIVDPVDSEWFGFYRSGQAKETIPLQETSLYTQDRLGLKEMDNAGQLVFLAT

SEQ ID NO: 85154 - protein, 427 aa, Homo sapiens [sequence omitted]

SEQ ID NO: 85155 - protein, 23 aa, Homo sapiens
  MOD_RES (1)..(1): Any amino acid
XVSSPVGMIPDIYEKEVRLMIPL

SEQ ID NO: 85156 - protein, 92 aa, Homo sapiens
MDPETCPCPSGGSCTCADSCKCEGCKCTSCKKSECGDPSPLPPPPLLCGVGVSPRRMWRDSQAPIPWFLTLAGIEPPGQTLKYRCPCPTPRN

SEQ ID NO: 85157 - protein, 91 aa, Homo sapiens
PDYSSSTYLFRLMAVVVHHGDMHSGHFVTYRRSPPSARNPLSTSNQWLWVSDDTVRKASLQEVLSSSAYLLFYERVLSRMQHQSQECKSEE

SEQ ID NO: 85158 - protein, 67 aa, Homo sapiens
  MOD_RES (1)..(1): Any amino acid
XHSVADPRHLPGEDVKVAPARGGGGGGGGGGGRGGGGRGGGRGGGGEGGGEASPDRQGSLPSRSKSN

SEQ ID NO: 85159 - protein, 90 aa, Homo sapiens
MEDSMDMDMSPLRPQNYLFGCELKADKDYHFKVDNDENEHQLSLRTVSLGAGAKDELHIVEAEAMNYEGSPIKVTLATLKMSWKPNSSIM

SEQ ID NO: 85160 - protein, 135 aa, Homo sapiens
MVQKKKFCPRLLDYLVIVGARHPSSDSVAQTPELLRRYPLEDHTEFPLPPDVVFFCQPEGCLSVRQRRMSLRDDTSFVFTLTDKDTGVTRYGICVNFYRSFQKRISKEKGEGGAGSRGKEGTHATCASEEGGTES

SEQ ID NO: 85161 - protein, 136 aa, Homo sapiens
  MOD_RES (1)..(1): Any amino acid
XIDNTKGQMLGLGNPSFSDPFTGAGRYVPGSASMGTTMAGVDPFTGNSAYRSAASKTMNIYFPKKEAVTFDQANPTQILGKLKELNGTAPEEKKLTEDDLILLEKILSLICNSSSEKPTVQQLQILWKAINCPEGK

SEQ ID NO: 85162 - protein, 421 aa, Homo sapiens [sequence omitted]

SEQ ID NO: 85163 - protein, 125 aa, Homo sapiens
MYVTTLPVPGMHFQCAPKLNGDSQAKVQRILRLISGGGLSITGSHILCGDFLFSGHTVTLTLTYLFIKEYSPRHFWWYHLICWLLSAAGIICILVAHEHYTIDVIIAYYITTRLFWWYHSMANEK

SEQ ID NO: 85164 - protein, 351 aa, Homo sapiens
MERPEAGGINSNECENVSRKKKMSEEFEANTMDSLVDMPFATVDIQDDCGITDEPQINLKRSQENEWVKSDQVKKRKKKRKDYQPNYFLSIPITNKEIIKGIKILQNAIIQQDERLAKAMVSDGSFHITLLVMQLLNEDEVNIGIDALLELKPFIEELLQGKHLTLPFQGIGTFGNQVGFVKLAEGDHVNSLLEIAETANRTFQEKGILVGESRSFKPHLTFMKLSKSPWLRKNGVKKIDPDLYEKFISHRFGEEILYRIDLCSMLKKKQSNGYYHCESSIVIGKKPIGIRDLINEALHRETMGLKSKVKQIKELLLKPETQARIRRELFEGRLINNSNSANDVDFSTTLT

SEQ ID NO: 85165 - protein, 298 aa, Homo sapiens
MEFFKNENNELPKLQWYKDCKPLLLDNIHFSGVKDRLIVMNVAEKHRGNYTCHASYTYLGKQYPITRVIEFITLEENKPTRPVIVSPANETMEVDLGSQIQLICNVTGQLSDIAYWKWNGSVIDEDDPVLGEDYYSVENPANKRRSTLITVLNISEIESRFYKHPFTCFAKNTHGIDAAYIQLIYPVTNFQKHMIGICVTLTVIIVCSVFIYKIFKIDIVLWYRDSCYDFLPIKASDGKTYDAYILYPKTVGEGSTSDCDIFVFKVLPEVLEKQCGYKLFIYGRDDYVGEDIVEVINE

SEQ ID NO: 85166 - protein, 860 aa, Homo sapiens
MGLKARRAAGAAGGGGDGGGGGGGAANPAGGDAAAAGDEERKVGLAPGDVEQVTLALGAGADKDGTLLLEGGGRDEGQRRTPQGIGLLAKTPLSRPVKRNNAKYRRIQTLIYDALERPRGWALLYHALVFLIVLGCLILAVLTTFKEYETVSGDWLLLLETFAIFIFGAEFALRIWAAGCCCRYKGWRGRLKFARKPLCMLDIFVLIASVPVVAVGNQGNVLATSLRSLRFLQILRMLRMDRRGGTWKLLGSAICAHSKELITAWYIGFLTLILSSFLVYLVEKDVPEVDAQGEEMKEEFETYADALWWGLITLATIGYGDKTPKTWEGRLIAATFSLIGVSFFALPAGILGSGLALKVQEQHRQKHFEKRRKPAAELIQAAWRYYATNPNRIDLVATWRFYESVVSFPFFRKEQLEAASSQKLGLLDRVRLSNPRGSNTKGKLFTPLNVDAIEESPSKEPKPVGLNNKERFRTAFRMKAYAFWQSSEDAGTGDPMAEDRGYGNDFPIEDMIPTLKAAIRAVRILQFRLYKKKFKETLRPYDVKDVIEQYSAGHLDMLSRIKYLQTRIDMIFTPGPPSTPKHKKSQKGNEPYVARPSTSEIEDQSMMGKFVKVERQVQDMGKKLDFLVDMHMQHMERLQVQVTEYYPTKGTSSPAEAEKKEDNRYSDLKTIICNYSETGPPEPPYSFHQVTIDKVSPYGFFAHDPVNLPRGGPSSGKVQATPPSSATTYVERPTVLPILTLLDSRVSCHSQADLQGPYSDRISPRQRRSITRDSDTPLSLMSVNHEELERSPSGFSISQDRDDYVFGPNGGSSWMREKRYLAEGETDTDTDPFTPSGSMPLSSTGDGISDSVWTPSNKPI

SEQ ID NO: 85167 - protein, 24 aa, Homo sapiens
  MOD_RES (1)..(1): Any amino acid
XHLVSKVSQLIHHLLNRLQLPMSG

SEQ ID NO: 85168 - protein, 135 aa, Homo sapiens
MAQQANVGELLAMLDSPMLGVRDDVTAVFKENLNSDRGPMLVNTLVDYYLETSSQPALHILTTLQEPHDKHLLDRINEYVGKAATRLSILSLLGHVIRLQPSWKHKLSQAPLLPSLLKCLKFLDLFSIYKIRKCG

SEQ ID NO: 85169 - protein, 173 aa, Homo sapiens
MAATLGSGERWTEAYIDAVRRNKYPEDTPPESHDPCGCCNCMKAQKEKKSENEWTQTRQGEGNSTYSEEQLLGVQRIKKCRNYYEILGVSRDASDEELKKAYRKLALKFHPDKNCAPGATDAFKAIGNAFAVLSNPDKRLRYDEYGDEQVTFTAPRARPYNYYRDFEADITPE

SEQ ID NO: 85170 - protein, 331 aa, Homo sapiens
RRGARRCEVTARPAEPLEAILTDDEPDHGPLGAPEGDHDLLTCGQCQMNFPLGDILIFIEHKRKQCNGSLCLEKAVDKPPSPSPIEMKKASNPVEVGIQVTPEDDDCLSTSSRGICPKQEHIADKLLHWRGLSSPRSAHGALIPTPGMSAEYAPQGICKDEPSSYTCTTCKQPFTSAWFLLQHAQNTHGLRIYLESEHGSPLTPRVGIPSGLGAECPSQPPLHGIHIADNNPFNLLRIPGSVSREASGLAEGRFPPTPPLFSPPPRHHLDPHRIERLGAEEMALATHHPSAFDRVLRLNPMAMEPPAMDFSRRLRELAGNTSSPPLSPGRP

SEQ ID NO: 85171 - protein, 143 aa, Homo sapiens
  MOD_RES (1)..(1): Any amino acid
XDVDQQSSSSRLRSAVSRAGSLLWMVATSPGRLFRLLYWWAGTTWYRLTTAASLLDVFVLTRRFSSLKTFLWFLLPLLLLTCLTYGAWYFYPYGLQTFHPALVSWWAAKDSRRPDEGWEARDSSPHFQAGFQERTKATRPLRP

SEQ ID NO: 85172 - protein, 734 aa, Homo sapiens
MVKLAKAGKNQGDPKKMAPPPKEVEEDSEDEEMSEDEEDDSSGEEVVIPQKKGKKAAATSAKKVVVSPTKKVAVATPAKKAAVTPGKKAAATPAKKTVTPAKAVTTPGKKGATPGKALVATPGKKGAAIPAKGAKNGKNAKKEDSDEEEDDDSEEDEEDDEDEDEDEDEIEPAAMKAAAAAPASEDEDDEDDEDDEDDDDDEEDDSEEEAMETTPAKGKKAAKVVPVKAKNVAEDEDEEEDDEDEDDDDDEDDEDDDDEDDEEEEEEEEEEPVKEAPGKRKKEMAKQKAAPEAKKQKVEGTEPTTAFNLFVGNLNFNKSAPELKTGISDVFAKNDLAVVDVRIGMTRKFGYVDFESAEDLEKALELTGLKVFGNEIKLEKPKGKDSKKERDARTLLAKNLPYKVTQDELKEVFEDAAEIRLVSKDGKSKGIAYIEFKTEADAEKTFEEKQGTEIDGRSISLYYTGEKGQNQDYRGGKNSTWSDDSRKTDQSSAYVRTTSRTLQHVLGESKTLVLSNLSYSATEETLQEVFEKATFIKVPQNQNGKSKGYAFIEFASFEDAKEALNSCNKREIEGRAIRLELQGPRGSPNARSQPSKTLFVKGLSEDTTEETLKESFDGSVRARIVTDRETGSSKGFGFVDFNSEEDAKAAKEAMEDGEIDGNKVTLDWAKPKGEGGFGGRGGGRGGFGGRGGGRGGRGGFGGRGRGGFGGRGGFRGGRGGGGDHKPQGKKTKFE

SEQ ID NO: 85173 - protein, 137 aa, Homo sapiens
  MOD_RES (1)..(1): Any amino acid
XAFCAELMIQNWTLGAVDSQMDDMDMDLDKEFLQDLKELKVLVADKDLLDLHKSLVCTALRGKLGVFSEMEANFKNLSRGLVNVAAKLTHNKDVRDLFVDLVEKFVEPCRSDHWPLSDVRFFLNQYSASVHSLDGFR

SEQ ID NO: 85174 - protein, 84 aa, Homo sapiens
MYDFAAEPGNNELTVNEGEIITITNPDVGGGWLEGRNIKGERGLVPTDYVEILPSDGKDQFSCGNSVADQAFLDSLSASTAQAS

SEQ ID NO: 85175 - protein, 712 aa, Homo sapiens
MEENPTLESEAWGSSREWLAPREARGAPCSSPGPSLSSVLNELPSAATLRYRDPGVLPWGALEEEEEDGGRSRKAFTEVTQTELQDPHPSRELPWPMQARRAYRQRNASRDQVVYGSGTKTDRWARLLRRSKEKTKEGLRSLQPWAWTLKRIGGQFGAGTESYFSLLRFLLLLNVLASVLMACMTLLPTWLGGAPPGPPGPDISSPCGSYNPHSQGLVTFATQLFNLLSGEGYLEWSPLFYGFYPPRPRLAVTYLCWAFAVGLICLLLILHRSVSGLKQTLLAESEALTSYSHRVFSAWDFGLCGDVHVRLRQRIILYELKVELEETVVRRQAAVRTLGQQARVWLVRVLLNLLVVALLGAAFYGVYWATGCTVELQEMPLVQELPLLKLGVNYLPSIFIAGVNFVLPPVFKLIAPLEGYTRSRQIVFILLRTVFLRLASLVVLLFSLWNQITCGGDSEAEDCKTCGYNYKQLPCWETVLGQEMYKLLLFDLLTVLAVALLIQFPRKLLCGLCPGALGRLAGTQEFQVPDEVLGLIYAQTVVWVGSFFCPLLPLLNTVKFLLLFYLKKLTLFSTCSPAARTFRASAANFFFPLVLLLGLAISSVPLLYSIFLIPPSKLCGPFRGQSSIWAQIPESISSLPETTQNFLFFLGTQAFAVPLLLISSILMAYTVALANSYGRLISELKRQRQTEAQNKVFLARRAVALTSTKPAL

SEQ ID NO: 85176 - protein, 52 aa, Homo sapiens
MRVKDPTKALPEKAKRSKRPTVPHDEDSSDDIAVGLTCQHVSHAISVNHVKR

SEQ ID NO: 85177 - protein, 71 aa, Homo sapiens
MADANSPPKPLSKPRTPRRSKSDGEAKPEPSPSPRITRKSTRQTTITSHFAKGPAKRKPQEESERAKSDES

SEQ ID NO: 85178 - protein, 128 aa, Homo sapiens
MAANLSRNGPALQEAYVRVVTEKSPTDWALFTYEGNSNDIRVAGTGEGGLEEMVEELNSGKVMYAFCRVKDPNSGLPKFVLINWTGEGVNDVRKGACASHVSTMASFLKVRPGGPCDHQRTGRGGCGA

SEQ ID NO: 85179 - protein, 480 aa, Homo sapiens
  MOD_RES (1)..(1): Any amino acid
XKYQDRDSLIAGVIRVVEKDNDVLLHWAPVEEAGDSTQILFSKKDSSGGDSCASEEEPTFDPGYEPDWAVISTVRPQLCHSEPTRGAEPSCPQGSWAFSVSLGELKSIRRSKPGLSWAYLVLVTQAGGSLPALHFHRGGTRALLRVLSRYLLLASSPQDSRLYLVFPHDSSALSNSFHHLQLFDQDSSNVVSRFLQDPYSTTFSSFSRVTNFFRGALQPQPEGAASDLPPPPDDEPEPGFEVISCVELGPRPTVERGPPVTEEEWARHVGPEGRLQQVPELKNRIFSGGLSPSLRREAWKFLLGYLSWEGTAEEHKAHIRKKTDEYFRMKLQWKSVSPEQERRNSLLHGYRSLIERDVSRTDRTNKFYEGPENPGLGLLNDILLTYCMYHFDLGYVQGMSDLLSPILYVIQNEVDAFWCFCGFMELVQGNFEESQETMKRQLGRLLLLLRVLDPLLCDFLGTVAHTCNPSTLGGQGGRIT

SEQ ID NO: 85180 - protein, 107 aa, Homo sapiens
SEKKRRDQFNVLIKELSSMLPGNTRKMDKTTVLEKVIGFLQKHNGKEVSAQTEICDIQQDWKPSFLSNEEFTQLMLEALDGFIIAVTTDGSIIYVSDSITPLLGHLP

SEQ ID NO: 85181 - protein, 53 aa, Homo sapiens
MNIRGDIGHKAYEYQEYGPKPCKCQQPKKAFRYRPSFRTQERDHTGEKPNACK

SEQ ID NO: 85182 - protein, 141 aa, Homo sapiens
MARLVVIDSVAAPFRCEFDSQASAPRARHLQSLGATLRELSSAFQSPVLCINQVTEAMEEQGAAHGPLGFWDERVSPALGITWANQLLVRLLADRLREEEAALGCPARTLRVLSAPHLPPSSCSYTISAEGVRGTPGTQSH

SEQ ID NO: 85183 - protein, 186 aa, Homo sapiens
MPVICGPEENYPSLQMSSAEMPHTETVSPLPSSMDLLIQDSPDSSTSPKGKQPTSAEKSVAKKEDKVPVKKQKTRTVFSSTQLCVLNDRFQRQKYLSLQQMQELSNILNLSYKQVKTWFQNQRMKSKRWQKNNWPKNSNGVTQKASAPTYPSLYSSYHQGCLVNPTGNLPMWSNQTWNNSTWSNQT

SEQ ID NO: 85184 - protein, 346 aa, Homo sapiens
MASTGSQASDIDEIFGFFNDGEPPTKKPRKLLPSLKTKKPRELVLVIGTGISAAVAPQVPALKSWKGLIQALLDAAIDFDLLEDEESKKFQKCLHEDKNLVHVAHDLIQKLSPRTSNVRSTFFKDCLYEVFDDLESKMEDSGKQLLQSVLHLMENGALVLTTNFDNLLELYAADQGKQLESLDLTDEKKVLEWAQEKRKLSVLHIHGVYTNPSGIVLHPAGYQNVLRNTEVMREIQKLYENKSFLFLGCGWTVDDTTFQALFLEAVKHKSDLEHFMLVRRGDVDEFKKLRENMLDKGIKVISYGDDYADLPEYFKRLTCEISTRGTSGMVREGQLNGSSAAHSEIR

SEQ ID NO: 85185 - protein, 91 aa, Homo sapiens
  MOD_RES (1)..(1): Any amino acid
XGESQQLIIKLENIGMEPLEKLEVTSKVLTTKEKLYGDFLSWKLEETLAQFPLQPGKVATFTINIKVKLDFSCQENLLQDLSDGKRFPNFN

SEQ ID NO: 85186 - protein, 3206 aa, Homo sapiens
QMRQKSKQQAKIEATQKLEQVKNEQQQQQQQQFGSQHLLVQSGSDTPSSGIQSPLTPQPGNGNMSPAQSFHKELFTKQPPSTPTSTSSDDVFVKPQAPPPPPAPSRIPIQDSLSQAQTSQPPSPQVFSPGSSNSRPPSPMDPYAKMVGTPRPPPVGHSFSRRNSAAPVENCTPLSSVSRPLQMNETTANRPSPVRDLCSSSTTNNDPYAKPPDTPRPVMTDQFPKSLGLSRSPVVSEQTAKGPIAAGTSDHFTKPSPRADVFQRQRIPDSYARPLLTPAPLDSGPGPFKTPMQPPPSSQDPYGSVSQASRRLSVDPYERPALTPRPIDNFSHNQSNDPYSQPPLTPHPAVNESFAHPSRAFSQPGTISRPTSQDPYSQPPGTPRPVVDSYSQSSGTARSNTDPYSQPPGTPRPTTVDPYSQQPQTPRPSTQTDLFVTPVTNQRHSDPYAHPPGTPRPGISVPYSQPPATPRPRISEGFTRSSMTRPVLMPNQDPFLQAAQNRGPALPGPLVRPPDTCSQTPRPPGPGLSDTFSRVSPSAARDPYDQSPMTPRSQSDSFGTSQTAHDVADQPRPGSEGSFCASSNSPMHSQGQQFSGVSQLPGPVPTSGVTDTQNTVNMAQADTEKLRQRQKLREIILQQQQQKKIAGRQEKGSQDSPAVPHPGPLQHWQPENVNQAFTRPPPPYPGNIRSPVAPPLGPRYAVFPKDQRGPYPPDVASMGMRPHGFRFGFPGGSHGTMPSQERFLVPPQQIQGSGVSPQLRRSVSVDMPRPLNNSQMNNPVGLPQHFSPQSLPVQQHNILGQAYIELRHRAPDGRQRLPFSAPPGSVVEASSNLRHGNFIPRPDFPGPRHTDPMRRPPQGLPNQLPVHPDLEQVPPSQQEQGHSVHSSSMVMRTLNHPLGGEFSEAPLSTSVPSETTSDNLQITTQPSDGLEEKLDSDDPSVKELDVKDLEGVEVKDLDDEDLENLNLDTEDGKVVELDTLDNLETNDPNLDDLLRSGEFDIIAYTDPELDMGDKKSMFNEELDLPIDDKLDNQCVSVEPKKKEQENKTLVLSDKHSPQKKSTVTNEVKTEVLSPNSKVESKCETEKNDENKDNVDTPCSQASAHSDLNDGEKTSLHPCDPDLFEKRTNRETAGPSANVIQASTQLPAQDVINSCGITGSTPVLSSLLANEKSDNSDIRPSGSPPPPTLPASPSNHVSSLPPFIAPPGRVLDNAMNSNVTVVSRVNHVFSQGVQVNPGLIPGQSTVNHSLGTGKPATQTGPQTSQSGTSSMSGPQQLMIPQTLAQQNRERPLLLEEQPLLLQDLLDQERQEQQQQRQMQAMIRQRSEPFFPNIDFDAITDPIMKAKMVALKGINKVMAQNNLGMPPMVMSRFPFMGQVVTGTQNSEGQNLGPQAIPQDGSITHQISRPNPPNFGPGFVNDSQRKQYEEWLQETQQLLQMQQKYLEEQIGAHRKSKKALSAKQRTAKKAGREFPEEDAEQLKHVTEQQSMVQKQLEQIRKQQKEHAELIEDYRIKQQQQCAMAPPTMMPSVQPQPPLIPGATPPTMSQPTFPMVPQQLQHQQHTTVISGHTSPVRMPSLPGWQPNSAPAHLPLNPPRIQPPIAQLPIKTCTPAPGTVSNANPQSGPPPRVEFDDNNPFSESFQERERKERLREQQERQRIQLMQEVDRQRALQQRMEMEQHGMVGSEISSSRTSVSQIPFYSSDLPCDFMQPLGPLQQSPQHQQQMGQVLQQQNIQQGSINSPSTQTFMQTNERRQVGPPSFVPDSPSIPVGSPNFSSVKQGHGNLSGTSFQQSPVRPSFTPALPAAPPVANSSLPCGQDSTITHGHSYPGSTQSLIQLYSDIIPEEKGKKKRTRKKKRDDDAESTKAPSTPHSDITAPPTPGISETTSTPAVSTPSELPQQADQESVEPVGPSTPNMAAGQLCTELENKLPNSDFSQATPNQQTYANSEVDKLSMETPAKTEEIKLEKAETESCPGQEEPKLEEQNGSKVEGNAVACPVSSAQSPPHSAGAPAAKGDSGNELLKHLLKNKKSSSLLNQKPEGSICSEDDCTKDNKLVEKQNPAEGLQTLGAQMQGGFGCGNQLPKTDGGSETKKQRSKRTQRTGEKAAPRSKKRKKDEEEKQAMYSSTDTFTHLKQLSLLPLMEPIIGVNFAHFLPYGSGQFNSGNRLLGTFGSATLEGVSDYYSQLIYKQNNLSNPPTPPASLPPTPPPMACQKMANGFATTEELAGKAGVLVSHEVTKTLGPKPFQLPFRPQDDLLARALAQGPKTVDVPASLPTPPHNNQEELRIQDHCGDRDTPDSFVPSSSPESVVGVEVSRYPDLSLVKEEPPEPVPSPIIPILPSTAGKSSESRRNDIKTEPGTLYFASPFGPSPNGPRSGLISVAITLHPTAAENISSVVAAFSDLLHVRIPNSYEVSSAPDVPSMGLVSSHRINPGLEYRQHLLLRGPPPGSANPPRLVSSYRLKQPNVPFPPTSNGLSGYKDSSHGIAESAALRPQWCCHCKVVILGSGVRKSFKDLTLLNKDSRESTKRVEKDIVFCSNNCFILYSSTAQAKNSENKESIPSLPQSPMRETPSKAFHQYSNNISTLDVHCLPQLPEKASPPASPPIAFPPAFEAAQVEAKPDELKVTVKLKPRLRAVHGGFEDCRPLNKKWRGMKWKKWSIHIVIPKGTFKPPCEDEIDEFLKKLGTSLKPDPVPKDYRKCCFCHEEGDGLTDGPARLLNLDLDLWVHLNCALWSTEVYETQAGALINVELALRRGLQMKCVFCHKTGATSGCHRFRCTNIYHFTCAIKAQCMFFKDKTMLCPMHKPKGIHEQELSYFAVFRRVYVQRDEVRQIASIVQRGERDHTFRVGSLIFHTIGQLLPQQMQAFHSPKALFPVGYEASRLYWSTRYANRRCRYLCSIEEKDGRPVFVIRIVEQGHEDLVLSDISPKGVWDKILEPVACVRKKSEMLQLFPAYLKGEDLFGLTVSAVARIAESLPGVEACENYTFRYGRNPLMELPLAVNPTGCARSEPKMSAHVKRPHTLNSTSTSKSFQSTVTGELNAPYSKQFVHSKSSQYRKMKTEWKSNVYLARSRIQGLGLYAARDIEKHTMVIEYIGTIIRNEVANRKEKLYESQNRGVYMFRMDNDHVIDATLTGGPARYINHSCAPNCVAEVVTFERGHKIIISSSRRIQKGEELCYDYKFDFEDDQHKIPCHCGAVNCRKWMN

SEQ ID NO: 85187 - protein, 241 aa, Homo sapiens
MDTNDDPDEDHLTSYDIQLSIQESIEASKTALCPERFVPLSAQNRKLVEAIKQGHIPELQEYVKYKYAMDEADEKGWFPLHEAVVQPIQQILEIVLDASYKTLWEFKTCDGETPLTLAVKAGLVENVRTLLEKGVWPNTKNDKGETPLLIAVKKGSYDMVSTLIKHNTSLDQPCVKRWSAMHEAAKQGRKDIVALLLKHGGNVHLRDGFGVTPLGVAAEYGHCDVLEHLIHKGGDVLALAD

SEQ ID NO: 85188 - protein, 15 aa, Homo sapiens
MATNKERLFAAGALG

SEQ ID NO: 85189 - protein, 115 aa, Homo sapiens
MGDLLAFRFYAFNPILDPWVFILFRKAVFQRLKLWVCCLCLGPAHGDSQTPLSQLASGRRDPRAPSAPVGKEGSCVPLSAWGEGQVEPLPPTQQSSGSAVGTSSKAEASVACSLC

SEQ ID NO: 85190 - protein, 4604 aa, Homo sapiens
MSEPGGGGGEDGSAGLEVSAVQNVADVSVLQKHLRKLVPLLLEDGGEAPAALEAALEEKSALEQMRKFLSDPQVHTVLVERSTLKEDVGDEGEEEKEFISYNINIDIHYGVKSNSLAFIKRTPVIDADKPVSSQLRVLTLSEDSPYETLHSFISNAVAPFFKSYIRESGKADRDGDKMAPSVEKKIAELEMGLLHLQQNIEIPEISLPIHPMITNVAKQCYERGEKPKVTDFGDKVEDPTFLNQLQSGVNRWIREIQKVTKLDRDPASGTALQEISFWLNLERALYRIQEKRESPEVLLTLDILKHGKRFHATVSFDTDTGLKQALETVNDYNPLMKDFPLNDLLSATELDKIRQALVAIFTHLRKIRNTKYPIQRALRLVEAISRDLSSQLLKVLGTRKLMHVAYEEFEKVMVACFEVFQTWDDEYEKLQVLLRDIVKRKREENLKMVWRINPAHRKLQARLDQMRKFRRQHEQLRAVIVRVLRPQVTAVAQQNQGEVPEPQDMKVAEVLFDAADANAIEEVNLAYENVKEVDGLDVSKEGTEAWEAAMKRYDERIDRVETRITARLRDQLGTAKNANEMFRIFSRFNALFVRPHIRGAIREYQTQLIQRVKDDIESLHDKFKVQYPQSQACKMSHVRDLPPVSGSIIWAKQIDRQLTAYMKRVEDVLGKGWENHVEGQKLKQDGDSFRMKLNTQEIFDDWARKVQQRNLGVSGRIFTIESTRVRGRTGNVLKLKVNFLPEIITLSKEVRNLKWLGFRVPLAIVNKAHQANQLYPFAISLIESVRTYERTCEKVEERNTISLLVAGLKKEVQALIAEGIALVWESYKLDPYVQRLAETVFNFQEKVDDLLIIEEKIDLEVRSLETCMYDHKTFSEILNRVQKAVDDLNLHSYSNLPIWVNKLDMEIERILGVRLQAGLRAWTQVLLGQAEDKAEVDMDTDAPQVSHKPGGEPKIKNVVHELRITNQVIYLNPPIEECRYKLYQEMFAWKMVVLSLPRIQSQRYQVGVHYELTEEEKFYRNALTRMPDGPVALEESYSAVMGIVSEVEQYVKVWLQYQCLWDMQAENIYNRLGEDLNKWQALLVQIRKARGTFDNAETKKEFGPVVIDYGKVQSKVNLKYDSWHKEVLSKFGQMLGSNMTEFHSQISKSRQELEQHSVDTASTSDAVTFITYVQSLKRKIKQFEKQVELYRNGQRLLEKQRFQFPPSWLYIDNIEGEWGAFNDIMRRKDSAIQQQVANLQMKIVQEDRAVESRTTDLLTDWEKTKPVTGNLRPEEALQALTIYEGKFGRLKDDREKCAKAKEALELTDTGLLSGSEERVQVALEELQDLKGVWSELSKVWEQIDQMKEQPWVSVQPRKLRQNLDALLNQLKSFPARLRQYASYEFVQRLLKGYMKINMLVIELKSEALKDRHWKQLMKRLHVNWVVSELTLGQIWDVDLQKNEAIVKDVLLVAQGEMALEEFLKQIREVWNTYELDLVNYQNKCRLIRGWDDLFNKVKEHINSVSAMKLSPYYKVFEEDALSWEDKLNRIMALFDVWIDVQRRWVYLEGIFTGSADIKHLLPVETQRFQSISTEFLALMKKVSKSPLVMDVLNIQGVQRSLERLADLLGKIQKALGEYLERERSSFPRFYFVGDEDLLEIIGNSKNVAKLQKHFKKMFAGVSSIILNEDNSVVLGISSREGEEVMFKTPVSITEHPKINEWLTLVEKEMRVTLAKLLAESVTEVEIFGKATSIDPNTYITWIDKYQAQLVVLSAQIAWSENVETALSSMGGGGDAAPLHSVLSNVEVTLNVLADSVLMEQPPLRRRKLEHLITELVHQRDVTRSLIKSKIDNAKSFEWLSQMRFYFDPKQTDVLQQLSIQMANAKFNYGFEYLGVQDKLVQTPLTDRCYLTMTQALEARLGGSPFGPAGTGKTESVKALGHQLGRFVLVFNCDETFDFQAMGRIFVGLCQVGAWGCFDEFNRLEERMLSAVSQQVQCIQEALREHSNPNYDKTSAPITCELLNKQVKVSPDMAIFITMNPGYAGRSNLPDNLKKLFRSLAMTKPDRQLIAQVMLYSQGFRTAEVLANKIVPFFKLCDEQLSSQSHYDFGLRALKSVLVSAGNVKRERIQKIKREKEERGEAVDEGEIAENLPEQEILIQSVCETMVPKLVAEDIPLLFSLLSDVFPGVQYHRGEMTALREELKKVCQEMYLTYGDGEEVGGMWVEKVLQLYQITQINHGLMMVGPSGSGKSMAWRVLLKALERLEGVEGVAHIIDPKAISKDHLYGTLDPNTREWTDGLFTHVLRKIIDSVRGELQKRQWIVFDGDVDPEWVENLNSVLDDNKLLTLPNGERLSLPPNVRIMFEVQDLKYATLATVSRCGMVWFSEDVLSTDMIFNNFLARLRSIPLDEGEDEAQRRRKGKEDEGEEAASPMLQIQRDAATIMQPYFTSNGLVTKALEHAFQLEHIMDLTRLRCLGSLFSMLHQACRNVAQYNANHPDFPMQIEQLERYIQRYLVYAILWSLSGDSRLKMRAELGEYIRRITTVPLPTAPNIPIIDYEVSISGEWSPWQAKVPQIEVETHKVAAPDVVVPTLDTVRHEALLYTWLAEHKPLVLCGPPGSGKTMTLFSALRALPDMEVVGLNFSSATTPELLLKTFDHYCEYRRTPNGVVLAPVQLGKWLVLFCDEINLPDMDKYGTQRVISFIRQMVEHGGFYRTSDQTWVKLERIQFVGACNPPTDPGRKPLSHRFLRHVPVVYVDYPGPASLTQIYGTFNRAMLRLIPSLRTYAEPLTAAMVEFYTMSQERFTQDTQPHYIYSPREMTRWVRGIFEALRPLETLPVEGLIRIWAHEALRLFQDRLVEDEERRWTDENIDTVALKHFPNIDREKAMSRPILYSNWLSKDYIPVDQEELRDYVKARLKVFYEEELDVPLVLFNEVLDHVLRIDRIFRQPQGHLLLIGVSGAGKTTLSRFVAWMNGLSVYQIKVHRKYTGEDFDEDLRTVLRRSGCKNEKIAFIMDESNVLDSGFLERMNTLLANGEVPGLFEGDEYATLMTQCKEGAQKEGLMLDSHEELYKWFTSQVIRNLHVVFTMNPSSEGLKDRAATSPALFNRCVLNWFGDWSTEALYQVGKEFTSKMDLEKPNYIVPDYMPVVYDKLPQPPSHREAIVNSCVFVHQTLHQANARLAKRGGRTMAITPRHYLDFINHYANLFHEKRSELEEQQMHLNVGLRKIKETVDQVEELRRDLRIKSQELEVKNAAANDKLKKMVKDQQEAEKKKVMSQEIQEQLHKQQEVIADKQMSVKEDLDKVEPAVIEAQNAVKSIKKQHLVEVRSMANPPAAVKLALESICLLLGESTTDWKQIRSIIMRENFIPTIVNFSAEEISDAIREKMKKNYMSNPSYNYEIVNRASLACGPMVKWAIAQLNYADMLKRVEPLRNELQKLEDDAKDNQQKANEVEQMIRDLEASIARYKEEYAVLISEAQAIKADLAAVEAKVNRSTALLKSLSAERERWEKTSETFKNQMSTIAGDCLLSAAFIAYAGYFDQQMRQNLFTTWSHHLQQANIQFRTDIARTEYLSNADERLRWQASSLPADDLCTENAIMLKRFNRYPLIIDPSGQATEFIMNEYKDRKITRTSFLDDAFRKNLESALRFGNPLLVQDVESYDPVLNPVLNREVRRTGGRVLITLGDQDIDLSPSFVIFLSTRDPTVEFPPDLCSRVTFVNFTVTRSSLQSQCLNEVLKAERPDVDEKRSDLLKLQGEFQLRLRQLEKSLLQALNEVKGRILDDDTIITTLENLKREAAEVTRKVEETDIVMQEVETVSQQYLPLSTACSSIYFTMESLKQIHFLYQYSLQFFLDIYHNVLYENPNLKGVTDHTQRLSIITKDLFQVAFNRVARGMLHQDHITFAMLLARIKLKGTVGEPTYDAEFQHFLRGNEIVLSAGSTPRIQGLTVEQAEAVVRLSCLPAFKDLIAKVQADEQFGIWLDSSSPEQTVPYLWSEETPATPIGQAIHRLLLIQAFRPDRLLAMAHMFVSTNLGESFMSIMEQPLDLTHIVGTEVKPNTPVLMCSVPGYDASGHVEDLAAEQNTQITSIAIGSAEGFNQADKAINTAVKSGRWVMLKNVHLAPGWLMQLEKKLHSLQPHACFRLFLTMEINPKVPVNLLRAGRIFVFEPPPGVKANMLRTFSSIPVSRICKSPNERARLYFLLAWFHAIIQERLRYAPLGWSKKYEFGESDLRSACDTVDTWLDDTAKGRQNISPDKIPWSALKTLMAQSIYGGRVDNEFDQRLLNTFLERLFTTRSFDSEFKLACKVDGHKDIQMPDGIRREEFVQWVELLPDTQTPSWLGLPNNAERVLLTTQGVDMISKMLKMQMLEDEDDLAYAETEKKTRTDSTSDGRPAWMRTLHTTASNWLHLIPQTLSHLKRTVENIKDPLFRFFEREVKMGAKLLQDVRQDLADVVQVCEGKKKQTNYLRTLINELVKGILPRSWSHYTVPAGMTVIQWVSDFSERIKQLQNISLAAASGGAKELKNIHVCLGGLFVPEAYITATRQYVAQANSWSLEELCLEVNVTTSQGATLDACSFGVTGLKLQGATCNNNKLSLSNAISTALPLTQLRWVKQTNTEKKASV

SEQ ID NO: 85191 - protein, 74 aa, Homo sapiens
MVSCLVDHRGNITEYQCHQYITKMTAIIFSDYRLICGFMDDCKNDINILKCGSIRLGEKDAHSQGEVVSCLEKG

SEQ ID NO: 85192 - protein, 329 aa, Homo sapiens
MPTAAAPIISSVQKLVLYETRARYFLVGSNNAETKYRVLKIDRTEPKDLVIIDDRHVYTQQEVRELLGRLDLGNRTKMGQKGSSGLFRAVSAFGVVGFVRFLEGYYIVLITKRRKMADIGGHAIYKVEDTNMIYIPNDSVRVTHPDEARYLRIFQNVDLSSNFYFSYSYDLSHSLQYNLTVLRMPLEMLKSEMTQNRQESFDIFEDEGLITQGGSGVFGICSEPYMKYVWNGELLDIIKSTVHRDWLLYIIHGFCGQSMYVTLIARRSSKFAGTRFLKRGANCEGDVANEVETEQILCDASVMSFTAGSYSSYVQVRGSVPLYWSQDIS

SEQ ID NO: 85193 - protein, 267 aa, Homo sapiens
  MOD_RES (1)..(1): Any amino acid
XSKHGGKKERCCRACFQKLSEGPGSPDSSGSGTSQGEPSPALSPASPGPQATGGQGANTDYRPPDDAVFDIITDEELCQIQESGSSLPETPTETDSLDPNAAEQDTTSTSLTPEDTEDMPVGQDSEICLLKSGELMIKVPLTVDEIASFGEGSRELFVRSSTYSLIPITVAEAGLTISWVFSSDPKSISFSVVFQEAEDTPLDQCKVLIPTTRCNSHKENIQGQLKVRTPGIYMLIFDNTFSRFVSKKVFYHLTVDRPVIYDGSDFL

SEQ ID NO: 85194 - protein, 240 aa, Homo sapiens
  MOD_RES (1)..(1): Any amino acid
XALALSPPDSGPEKRKVAYQHVPVPGSPGESYLVLALEVALLGLGQQRALPEGLYAQDKVVRNEEQLLTRQCELASTMLTAAKGDPKWLHTVLGSIQQNIHSPALLFKLAQDACKTATPVSAPPDTTLLGIALELGLQVMRMTLNVMTWRRREMVRWLVSCATEIGPQALMNIMQNWYSLFTPVEAATIVAVTGTTHATLLRLQLDTSRREELWACARTLALQCAMKDPQNCALPALTLC

SEQ ID NO: 85195 - protein, 140 aa, Homo sapiens
MVLVLDYSGRPMVISSGMQSMDTMKQVYQIVKPLNPNFCFLQCTSAYPLQPEDVNLRVISEYQKLFPDIPIGYSGHETGIAISVAAVALGAKVLERHITLDKTWKGSDHSASLEPGELAELVRSVRLVERALGSPTKQLL

SEQ ID NO: 85196 - protein, 120 aa, Homo sapiens
DIHAILSARKTFPSQHATLSAFAAVYVSLLKPILVFAFAIAAGVCGLTQITQYRSHPVDVYAGFLIGAGIAAYLACHAVGNFQAPPAEKPAAPAPAKDALRALTQRGHDSVYQQNKSVST

SEQ ID NO: 85197 - protein, 97 aa, Homo sapiens
MLRGPWRQLWLFFLLLLPGAPEPRGASRPWEGTDEPGSAWAWPGFQRLQEQLRAAGALSKRYWTLFSCQVWPDDCDEDEEAATGPLALGNVRCGHAW

SEQ ID NO: 85198 - protein, 351 aa, Homo sapiens
MAATAAAVVAEEDTELRDLLVQTLENSGVLNRIKAELRAAVFLALEEQEKVENKTPLVNESLKKFLNTKDGRLVASLVAEFLQFFNLDFTLAVFQPETSTLQGLEGRENLARDLGIIEAEGTVGGPLLLEVIRRCQQKEKGPTTGEKANDEANQSDTSVSLSEPKSKSSLHLLSHETKIGSFLSNRTLDGKDKAGLCPDEDDMEGDSFFDDPIPKPEKTYGLRKEPRKQAGSLASLSDAPPLKSGLSSLAGAPSLKDSESKRGNTVLKDLKLISDKIGSLGLGTGEDDDYVDDFNSTSHRSEKSEISIGEEIEEDLSVEIDDINTSDKTITQLECLLSIGALHFKNTADIF

SEQ ID NO: 85199 - protein, 294 aa, Homo sapiens
MWRLPRALCVHAAKTSKLSGPWSRPAAFMSTLLINQPQYAWLKELGLREENEGVYNGSWGGRGEVITTYCPANNEPIARVRQASVADYEETVKKAREAWKIWADIPAPKRGEIVRQIGDALREKIQVLGSLVSLEMGKILVEGVGEVQEYVDICDYAVGLSRMIGGPILPSERSGHALIEQWNPVGLVGIITAFNFPVAVYGWNNAIAMICGNVCLWKGAPTTSLISVAVTKIIAKVLEDNKLPGAICSLTCGGADIGTAMAKDERVNLLSFTGSTQVGKQVGLMVQERFEQWK

SEQ ID NO: 85200 - protein, 63 aa, Homo sapiens
MASATRLIQRLRNWASGHDLQGKLQLRYQEISKRSAVAATEKKAVTPAPPIKRWELSSDQPYL

SEQ ID NO: 85201 - protein, 90 aa, Homo sapiens
MSLHFLYYCSEPTLDVKIAFCQGFDKQVDVSYIAKHYNMSKSKVDNQFYSVEVGDSTFTVLKRYQNLKPIGSGAQGIVCAAYDAVLDRNV

SEQ ID NO: 85202 - protein, 59 aa, Homo sapiens
MASDDFDIVIEAMLEAPYKKEEDEQQRKEVKKDYPSNTTSSTSNSGNETSGSSTIGETS

SEQ ID NO: 85203 - protein, 51 aa, Homo sapiens
MSSRKLSGPKGRRLRSPAAAGTPHRVPRTHARLFLVSAGSVAPARSVLRTV

SEQ ID NO: 85204 - protein, 379 aa, Homo sapiens
MATPEENSNPHDRATPQLPAQLQELEHRVARRRLSQARHRATLAALFNNLRKTVYSQSDLIASKWQVLNKAKSHIPELEQTLDNLLKLKASFNLEDGHASSLEEVKKEYASMYSGNDSLLSNSFPQNGSSPWCPTEAVRKDAEEEEDEEEEDQEEEEEEEEEEEEEEEEEEEEEEEEEKKVILYSPGTLSPDLMEFERYLNFYKQTMDLLTGSGIITPQEAALPIVSAAISHLWQNLSEERKASLRQAWAQKHRGPATLAEACREPACAEGSVKDSGVDSQGASCSLVSTPEEILFEDAFDVASFLDKSEVPSTSSSSSVLASCNPENPEEKFQLYMQIINFFKGLSCANTQVKQEASFPVDEEMIMLQCTETFDDEDL

SEQ ID NO: 85205 - protein, 8923 aa, Homo sapiens
MDQPQFSGAPRFLTRPKAFVVSVGKDATLSCQIVGNPTPQVSWEKDQQPVAAGARFRLAQDGDLYRLTILDLALGDSGQYVCRARNAIGEAFAAVGLQVDAEAACAEQAPHFLLRPTSIRVREGSEATFRCRVGGSPRPAVSWSKDGRRLGEPDGPRVRVEELGEASALRIRAARPRDGGTYEVRAENPLGAASAAAALVVDSDAADTASRPGTSTAALLAHLQRRREAMRAEGAPASPPSTGTRTCTVTEGKHARLSCYVTGEPKPETVWKKDGQLVTEGRRHVVYEDAQENFVLKILFCKQSDRGLYTCTASNLVGQTYSSVLVVVREPAVPFKKRLQDLEVREKESATFLCEVPQPSTEAAWFKEETRLWASAKYGIEEEGTERRLTVRNVSADDDAVYICETPEGSRTVAELAVQGNLLRKLPRKTAVRVGDTAMFCVELAVPVGPVHWLRNQEEVVAGGRVAISAEGTRHTLTISQCCLEDVGQVAFMAGDCQTSTQFCVSAPRKPPLQPPVDPVVKARMESSVILSWSPPPHGERPVTIDGYLVEKKKLGTYTWIRCHEAEWVATPELTVADVAEEGNFQFRVSALNSFGQSPYLEFPGTVHLAPKLAVRTPLKAVQAVEGGEVTFSVDLTVASAGEWFLDGQALKASSVYEIHCDRTRHTLTIREVPASLHGAQLKFVANGIESSIRMEVRAAPGLTANKPPAAAAREVLARLHEEAQLLAELSDQAAAVTWLKDGRTLSPGPKYEVQASAGRRVLLVRDVARDDAGLYECVSRGGRIAYQLSVQGLARFLHKDMAGSCVDAVAGGPAQFECETSEAHVHVHWYKDGMELGHSGERFLQEDVGTRHRLVAATVTRQDEGTYSCRVGEDSVDFRLRVSEPKAVFAKEQPACREVQAEVGASATLSCEVAQDQMEVTWYKDGKKLSSSSKVHVEAVGCMRRLVVQQVGQADSGEYSCEARGQRVSFRLDVAEPKVVFAKEQLARRKLQAEAGASATLSCEVAQAQTEVTWYKDGKKLSSSSKVCMEATGCTRRLVVQQAGQADAGEYSCEAGGQRLSFHLDVKEPKVVFAKDQVAHSEVQAEAGASATLSCEVAQAQTEVMWYKDGKKLSSSLKVHVEAKGCRRRLVVQQAGKTDAGDYSCEARGQRVSFRLHITEPKMMFAKEQSVHNEVQAEAGASAMLSCEVAQAQTEVTWYKDGKKLSSSSKVGMEVKGCTRRLVLPQAGKADAGEYSCEAGGQRVSFHLHITEPKGVFAKEQSVHNEVQAEAGTTAMLSCEVAQPQTEVTWYKDGKKLSSSSKVRMEVKGCTRRLVVQQVGKADAGEYSCEAGGQRVSFQLHITEPKAVFAKEQLVHNEVRTEAGASATLSCEVAQAQTEVTWYKDGKKLSSSSKVRIEAAGCMRQLVVQQAGQADAGEYTCEAGGQRLSFHLDVSEPKAVFAKEQLAHRKVQAEAGAIATLSCEVAQAQTEVTWYKDGKKLSSSSKVRMEAVGCTRRLVVQQACQADTGEYSCEAGGQRLSFSLDVAEPKVVFAKEQPVHREVQAQAGASTTLSCEVAQAQTEVMWYKDGKKLSFSSKVRMEAVGCTRRLVVQQAGQAVAGEYSCEAGSQRLSFHLHVAEPKAVFAKEQPAHREVQAEAGASATLSCEVAQAQTEVTWYKDGKKLSSSLKVHVEAAGCTRRLVVQQAGQADTGEYSCEAGGQQLSFRLQVAEPKAVFAKEQPASREVQAEAGTSATLSCEVAQAQTEVTWYKDGKKLSSSSKVRMEAVGCTRRLVVQEAGQADAGEYSCKAGDQRLSFHLHVAEPKVVFAKEQPAHREVQAEAGASATLSCEVAQAQTEVTWYKDGKKLSSSSKVRVEAVGCTRRLVVQQAGQAEAGEYSCEAGGQQLSFRLQVAEPKAVFAKEQVVFAKDQPVHREVQAEAGTSTMLSCEVAQAQTEVMWYKDGKKLSSSSKMRVEAVGCTRRLVVQEAGQADAGEYSCEAGGQRLSFHLHVAEPKVVFAKEQPACREVQAEAGASATLSCEVAQGQMEVTWYKDGKKLSSSSKVHMEASGYTRRLVVQQAGQADAGEYSCEAGGQRLSFRLHVAELEPQISERPCRREPLVVKEHEDIILTATLATPSAATVTWLKDGVEIRRSKRHETASQGDTHTLTVHGAQVLDSAIYSCRVGAEGQDFPVQVEEVAAKFCRLLEPVCGELGGTVTLACELSPACAEVVWRCGNTQLRVGKRFQMVAEGPVRSLTVLGLRAEDAGEYVCESRDDHTSAQLTVSVPRVVKFMSGLSTVVAEEGGEATFQCVVSPSDVAVVWFRDGALLQPSEKFAISQSGASHSLTISDLVLEDAGQITVEAEGASSSAALRVREAPVLFKKKLEPQTVEERSSVTLEVELTRPWPELRWTRNATALAPGKNVEIHAEGARHRLVLHNVGFADRGFFGCETPDDKTQAKLTVEMRQVRLVRGLQAVEAREQGTATMEVQLSHADVDGSWTRDGLRFQQGPTCHLAVRGPMHTLTLSGLRPEDSGLMVFKAEGVHTSARLVVTELPVSFSRPLQDVVTTEKEKVTLECELSRPNVDVRWLKDGVELRAGKTMAIAAQGACRSLTIYRCEFADQGVYVCDAHDAQSSASVKVQGRNIQIVRPLEDVEVMEKDGATFSCEVSHDEVPGQWFWEGSKLRPTDNVRIRQEGRTYTLIYRRVLAEDAGEIQFVAENAESRAQLRVKELPVTLVRPLRDKIAMEKHRGVLECQVSRASAQVRWFKGSQELQPGPKYELVSDGLYRKLIISDVHAEDEDTYTCDAGDVKTSAQFFVEEQSITIVRGLQDVTVMEPAPAWFECETSIPSVRPPKWLLGKTVLQAGGNVGLEQEGTVHRLMLRRTCSTMTGPVHFTVGKSRSSARLVVSDIPVVLTRPLEPKTGRELQSVVLSCDFRPAPKAVQWYKDDTPLSPSEKFKMSLEGQMAELRILRLMPADAGVYRCQAGSAHSSTEVTVEAREVTVTGPLQDAEATEEGWASFSCELSHEDEEVEWSLNGMPLYNDSFHEISHKGRRHTLVLKSIQRADAGIVRASSLKVSTSARLEVRVKPVVFLKALDDLSAEERGTLALQCEVSDPEAHVVWRKDGVQLGPSDKYDFLHTAGTRGLVVHDVSPEDAGLYTCHVGSEETRARVRVHDLHVGITKRLKTMEVLEGESCSFECVLSHESASDPAMWTVGGKTVGSSSRFQATRQGRKYILVVREAAPSDAGEVVFSVRGLTSKASLIVRERPAAIIKPLEDQWVAPGEDVELRCELSRAGTPVHWLKDRKAIRKSQKYDVVCEGTMAMLVIRGASLKDAGEYTCEVEASKSTASLHVEEKANCFTEELTNLQVEEKGTAVFTCKTEHPAATVTWRKGLLELRASGKHQPSQEGLTLRLTISALEKADSDTYTCDIGQAQSRAQLLVQGRRVHIIEDLEDVDVQEGSSATFRCRISPANYEPVHWFLDKTPLHANELNEIDAQPGGYHVLTLRQLALKDSGTIYFEAGDQRASAALRVTEKPSVFSRELTDATITEGEDLTLVCETSTCDIPVCWTKDGKTLRGSARCQLSHEGHRAQLLITGATLQDSGRYKCEAGGACSSSIVRVHARPVRFQEALKDLEVLEGGAATLRCVLSSVAAPVKWCYGNNVLRPGDKYSLRQEGAMLELVVRNLRPQDSGRYSCSFGDQTTSATLTVTALPAQFIGKLRNKEATEGATATLRCELSKAAPVEWRKGSETLRDGDRYCLRQDGAMCELQIRGLAMVDAAEYSCVCGEERTSASLTIRPMPAHFIGRLRHQESIEGATATLRCELSKAAPVEWRKGRESLRDGDRHSLRQDGAVCELQICGLAVADAGEYSCVCGEERTSATLTVKALPAKFTEGLRNEEAVEGATAMLWCELSKVAPVEWRKGPENLRDGDRYILRQEGTRCELQICGLAMADAGEYLCVCGQERTSATLTIRALPARFIEDVKNQEAREGATAVLQCELNSAAPVEWRKGSETLRDGDRYSLRQDGTKCELQIRGLAMADTGEYSCVCGQERTSAMLTVRALPIKFTEGLRNEEATEGATAVLRCELSKMAPVEWWKGHETLRDGDRHSLRQDGARCELQIRGLVAEDAGEYLCMCGKERTSAMLTVRAMPSKFIEGLRNEEATEGDTATLWCELSKAAPVEWRKGHETLRDGDRHSLRQDGSRCELQIRGLAVVDAGEYSCVCGQERTSATLTVRALPARFIEDVKNQEAREGATAVLQCELSKAAPVEWRKGSETLRGGDRYSLRQDGTRCELQIHGLSVADTGEYSCVCGQERTSATLTVRALPARFTQDLKTKEASEGATATLQCELSKVAPVEWKKGPETLRDGGRYSLKQDGTRCELQIHDLSVADAGEYSCMCGQERTSATLTVRALPARFTEGLRNEEAMEGATATLQCELSKAAPVEWRKGLEALRDGDKYSLRQDGAVCELQIHGLAMADNGVYSCVCGQERTSATLTVRALPARFIEDMRNQKATEGATVTLQCKLRKAAPVEWRKGPNTLKDGDRYSLKQDGTSCELQIRGLVIADAGEYSCICEQERTSATLTVRALPARFIEDVRNHEATEGATAVLQCELSKAAPVEWRKGSETLRDGDRYSLRQDGTRCELQIRGLAVEDTGEYLCVCGQERTSATLTVRALPARFIDNMTNQEAREGATATLHCELSKVAPVEWRKGPETLRDGDRHSLRQDGTRCELQIRGLSVADAGEYSCVCGQERTSATLTIRALPAKFTKGLRNEEATEGATAMLQCELSKVAPVEWRKGPETLRDGDRYNLRQDGTRCELQIHGLSVADTGEYSCVCGQEKTSATLTVKAPQPVFREPLQSLQAEEGSTATLQCELSEPTATVVWSKGGLQLQANGRREPRLQGCTAELVLQDLQREDTGEYTCTCGSQATSATLTVTAAPVRFLRELQHQEVDEGGTAHLCCELSRAGASVEWRKGSLQLFPCAKYQMVQDGAAAELLVRGVEQEDAGDYTCDTGHTQSMASLSVRVPRPKFKTRLQSLEQETGDIARLCCQLSDAESGAVVQWLKEGVELHAGPKYEMRSQGATRELLIHQLEAKDTGEYACVTGGQKTAASLRVTEPEVTIVRGLVDAEVTADEDVEFSCEVSRAGATGVQWCLQGLPLQSNEVTEVAVRDGRIHTLRLKGVTPEDAGTVSFHLGNHASSAQLTVRAPEVTILEPLQDVQLSEGQDASFQCRLSRASGQEARWALGGVPLQANEMNDITVEQGTLHLLTLHKVTLEDAGTVSFHVGTCSSEAQLKVTAKNTVVRGLENVEALEGGEALFECQLSQPEVAAHTWLLDDEPVHTSENAEVVFFENGLRHLLLLKNLRPQDSCRVTFLAGDMVTSAFLTVRGWRLEILEPLKNAAVRAGAQACFTCTLSEAVPVGEASWYINGAAVQPDDSDWTVTADGSHHALLLRSAQPHHAGEVTFACRDAVASARLTVLGLPDPPEDAEVVARSSHTVTLSWAAPMSDGGGGLCGYRVEVKEGATGQWRLCHELVPGPECVVDGLAPGETYRFRVAAVGPVGAGEPVHLPQTVRLAEPPKPVPPQPSAPESRQVAAGEDVSLELEVVAEAGEVIWHKGMERIQPGGRFEVVSQGRQQMLVIKGFTAEDQGEYHCGLAQGSICPAAATFQVALSPASVDEAPQPSLPPEAAQEGDLHLLWEALARKRRMSREPTLDSISELPEEDGRSQRLPQEAEEVAPDLSEGYSTADELARTGDADLSHTSSDDESRAGTPSLVTYLKKAGRPGTSPLASKVGAPAAPSVKPQQQQEPLAAVRPPLGDLSTKDLGDPSMDKAAVKIQAAFKGYKVRKEMKQQEGPMFSHTFGDTEAQVGDALRLECVVASKADVRARWLKDGVELTDGRHHHIDQLGDGTCSLLITGLDRADAGCYTCQVSNKFGQVTHSACVVVSGSESEAESSSGGELDDAFRRAARRLHRLFRTKSPAEVSDEELFLSADEGPAEPEEPADWQTYREDEHFICIRFEALTEARQAVTRFQEMFATLGIGVEIKLVEQGPRRVEMCISKETPAPVVPPEPLPSLLTSDAAPVFLTELQNQEVQDGYPVSFDCVVTGQPMPSVRWFKDGKLLEEDDHYMINEDQQGGHQLIITAVVPADMGVYRCLAENSMGVSSTKAELRVDLTSTDYDTAADATESSSYFSAQGYLSSREQEGTESTTDEGQLPQVVEELRDLQVAPGTRLAKFQLKVKGYPAPRLYWFKDGQPLTASAHIRMTDKKILHTLEIISVTREDSGQYAAYISNAMGAAYSSARLLVRGPDEPEEKPASDVHEQLVPPRMLERFTPKKVKKGSSITFSVKVEGRPVPTVHWLREEAERGVLWIGPDTPGYTVASSAQQHSLVLLDVGRQHQGTYTCIASNAAGQALCSASLHVSGLPKVEEQEKVKEALISTFLQGTTQAISAQGLETASFADLGGQRKEEPLAAKEALGHLSLAEVGTEEFLQKLTSQITEMVSAKITQAKLQVPGGDSDEDSKTPSASPRHGRSRPSSSIQESSSESEDGDARGEIFDIYVVTADYLPLGAEQDAITLREGQYVEVLDAAHPLRWLVRTKPTKSSPSRQGWVSPAYLDRRLKLSPEWGAAEAPEFPGEAVSEDEYKARLSSVIQELLSSEQAFVEELQFLQSHHLQHLERCPHVPIAVAGQKAVIFRNVRDIGRFHSSFLQELQQCDTDDDVAMCFIKNQAAFEQYLEFLVGRVQAESVVVSTAIQEFYKKYAEEALLAGDPSQPPPPPLQHYLEQPVERVQRYQALLKELIRNKARNRQNCALLEQAYAVVSALPQRAENKLHVSLMENYPGTLQALGEPIRQGHFIVWEGAPGARMPWKGHNRHVFLFRNHLVICKPRRDSRTDTVSYVFRNMMKLSSIDLNDQVEGDDRAFEVWQEREDSVRKYLLQARTAIIKSSWVKEICGIQQRLALPVWRPPDFEEELADCTAELGETVKLACRVTGTPKPVISWYKDGKAVQVDPHHILIEDPDGSCALILDSLTGVDSGQYMCFAASAAGNCSTLGKILVQVPPRFVNKVRASPFVEGEDAQFTCTIEGAPYPQIRWYKDGALLTTGNKFQTLSEPRSGLLVLVIRAASKEDLGLYECELVNRLGSARASAELRIQSPMLQAQEQCHREQLVAAVEDTTLERADQEVTSVLKRLLGPKAPGPSTGDLTGPGPCPRGAPALQETGSQPPVTGTSEAPAVPPRVPQPLLHEGPEQEPEAIARAQEWTVPIRMEGAAWPGAGTGELLWDVHSHVVRETTQRTYTYQAIDTHTARPPSMQVTIEDVQAQTGGTAQFEAIIEGDPQPSVTWYKDSVQLVDSTRLSQQQEGTTYSLVLRHVASKDAGVYTCLAQNTGGQVLCKAELLVLGGDNEPDSEKQSHRRKLHSFYEVKEEIGRGVFGFVKRVQHKGNKILCAAKFIPLRSRTRAQAYRERDILAALSHPLVTGLLDQFETRKTLILILELCSSEELLDRLYRKGVVTEAEVKVYIQQLVEGLHYLHSHGVLHLDIKPSNILMVHPAREDIKICDFGFAQNITPAELQFSQYGSPEFVSPEIIQQNPVSEASDIWAMGVISYLSLTCSSPFAGESDRATLLNVLEGRVSWSSPMAAHLSEDAKDFIKATLQRAPQARPSAAQCLSHPWFLKSMPAEEAHFINTKQLKFLLARSRWQRSLMSYKSILVMRSIPELLRGPPDSPSLGVARHLCRDTGGSSSSSSSSDNELAPFARAKSLPPSPVTHSPLLHPRGFLRPSASLPEEAEASERSTEAPAPPASPEGAGPPAAQGCVPRHSVIRSLFYHQAGESPEHGALAPGSRRHPARRRHLLKGGYIAGALPGLREPLMEHRVLEEEAAREEQATLLAKAPSFETALRLPASGTHLAPGHSHSLEHDSPSTPRPSSEACGEAQRLPSAPSGGAPIRDMGHPQGSKQLPSTGGHPGTAQPERPSPDSPWGQPAPFCHPKQGSAPQEGCSPHPAVAPCPPGSFPPGSCKEAPLVPSSPFLGQPQAPPAPAKASPPLDSKMGPGDISLPGRPKPGPCSSPGSASQASSSQVSSLRVGSSQVGTEPGPSLDAEGWTQEAEDLSDSTPTLQRPQEQATMRKFSLGGRGGYAGVAGYGTFAFGGDAGGMLGQGPMWARIAWAVSQSEEEEQEEARAESQSEEQQEARAESPLPQVSARPVPEVGRAPTRSSPEPTPWEDIGQVSLVQIRDLSGDAEAADTISLDISEVDPAYLNLSDLYDIKYLPFEFMIFRKVPKSAQPEPPSPMAEEELAEFPEPTWPWPGELGPHAGLEITEESEDVDALLAEAAVGRKRKWSSPSRSLFHFPGRHLPLDEPAELGLRERVKASVEHISRILKGRPEGLEKEGPPRKKPGLASFRLSGLKSWDRAPTFLRELSDETVVLGQSVTLACQVSAQPAAQATWSKDGAPLESSSRVLISATLKNFQLLTILVVVAEDLGVYTCSVSNALGTVTTTGVLRKAERPSSSPCPDIGEVYADGVLLVWKPVESYGPVTYIVQCSLEGGSWTTLASDIFDCCYLTSKLSRGGTYTFRTACVSKAGMGPYSSPSEQVLLGGPSHLASEEESQGRSAQPLPSTKTFAFQTQIQRGRFSVVRQCWEKASGRALAAKIIPYHPKDKTAVLREYEALKGLRHPHLAQLHAAYLSPRHLVLILELCSGPELLPCLAERASYSESEVKDYLWQMLSATQYLHNQHILHLDLRSENMIITEYNLLKVVDLGNAQSLSQEKVLPSDKFKDYLETMELLEGQGAVPQTDIWAIGVTAFIMLSAEYPVSSEGARDLQRGLRKGLVRLSRCYAGLSGGAVAFLRSTLCAQPWGRPCASSCLQCPWLTEEGPACSRPAPVTFPTARLRVFVRNREKRRALLYKRHNLAQVR

SEQ ID NO: 85206 - protein, 849 aa, Homo sapiens
MEPERKGLSLASSSDGDGREENKLKQGISQDLASSSRLDRYKIARQLTEKAIKEKKIFSIYGHYPVVRAALRRKGWVEKKFHFLPKVIPDVEDEGARVNDDTCAKVKENQEMALEKTDNIHDVMSRLVKNEMPYLLWTIKRDIIDYHSLTYDQMLNHYAKTASFTTKIGLCVNMRSLPWYVPANPDSFFPRCYSLCTESEQQEFLEDFRRTMASSILKWVVSHQSCSRSSRSKPRDQREEAGSSDLSSRQDAENAEAKLRGLPGQLVDIACKVCQAYLGQLEHEDIDTSADAVEDLTEAEWEDLTQQYYSLVHGDAFISNSRNYFSQCQALLNRITSVNPQTDIDGLRNIWIIKPAAKSRGRDIVCMDRVEEILELAAADHPLSRDNKWVVQKYIETPLLICDTKFDIRQWFLVTDWNPLTIWFYKESYLRFSTQRFSLDKLDSAIHLCNNAVQKYLKNDVGRSPLLPAHNMWTSTRFQEYLQRQGRGAVWGSVIYPSMKKAIAHAMKVAQDHVEPRKNSFELYGADFVLGRDFRPWLIEINSSPTMHPSTPVTAQLCAQVQEDTIKVAVDRSCDIGNFELLWRQPVVEPPPFSGSDLCVAGVSVRRARRQVLPVCNLKASASLLDAQPLKARGPSAMPDPAQGPPSPALQRDLGLKEEKGLPLALLAPLRGAAESGGAAQPTRTKAAGKVELPACPCRHVDSQAPNTGVPVAQPAKSWDPNQLNAHPLEPVLRGLKTAEGALRPPPGGKGEGTVCSRLPHHGHHVAACQTTGTTWDGGPGVCFLRQLLASELPMGPGLPRDPRAPPCLVCRGLLPPAGPCKRCRSFCAAVLQGASFVRLGGRSCSPRT

SEQ ID NO: 85207 - protein, 28 aa, Homo sapiens
MAMQKIFAREILDSRGNPTVEVDLHTAK

SEQ ID NO: 85208 - protein, 241 aa, Homo sapiens
MRAHPGGGRCCPEQEEGESAAGGSGAGGDSAIEQGGQGSALAPSPVSGVRREGARGGGRGRGRWKQAGRGGGVCGRGRGRGRGRGRGRGRGRGRGRPPSGGSGLGGDGGGCGGGGSGGGGAPRREPVPFPSGSAGPGPRGPRATESGKRMDCPALPPGWKKEEVIRKSGLSAGKSDVYYFSPSGKKFRSKPQLARYLGNTVDLSSFDFRTGKMMPSKLQKNKQRLRNDPLNQNKFVCTFLL

SEQ ID NO: 85209 - protein, 225 aa, Homo sapiens
MPAALVENSQVICEVWASNLEEEMRKIREIVLSYSYIAMDTEFPGVVVRPIGEFRSSIDYQYQLLRCNVDLLKIIQLGLTFTNEKGEYPSGINTWQFNFKFNLTGYDFGYMVKLLTDSRLPEEEHEFFHILNLFFPSIYDVKYLMKSCKNLKGGLQEVADQLDLQRIGRQHQAGSDSLLTGMAFFRMKELFFEDSIDDAKYCGRLYGLGTGVAQKQNEDVDSAQE

SEQ ID NO: 85210 - protein, 210 aa, Homo sapiens
MAAVSVYAPPVGGFSFDNCRRNAVLEADFAKRGYKLPKVRKTGTTIAGVVYKDGIVLGADTRATEGMVVADKNCSKIHFISPNIYCCGAGTAADTDMTTQLISSNLELHSLSTGRLPRVVTANRMLKQMLFRYQGYIGAALVLGGVDVTGPHLYSIYPHGSTDKLPYVTMVHCEEELFTENLFFIRQAEVVSEEAWGPSFAISLAVFLVA

SEQ ID NO: 85211 - protein, 339 aa, Homo sapiens
MAVMAPRTLVLLLSGALALTQTWAGSHSMRYFYTSVSRPGRGEPRFIAVGYVDDTQFVRFDSDAASQRMEPRAPWIEQEGPEYWDRNTRNVKAHSQTDRANLGTLRGYYNQSEDGSHTIQRMYGCDVGPDGRFLRGYQQDAYDGKDYIALNEDLRSWTAADMAAQITQRKWETAHEAEQWRAYLEGRCVEWLRRYLENGKETLQRTDAPKTHMTHHAVSDHEATLRCWALSFYPAEITLTWQRDGEDQTQDTELVETRPAGDGTFQKWASVVVPSGQEQRYTCHVQHEGLPKPLTLRWEPSSQPTIPIVGIIAGLVLFGAVIAGAVVAAVMWRRKSSDR

SEQ ID NO: 85212 - protein, 28 aa, Homo sapiens
  MOD_RES (1)..(1): Any amino acid
XFPVGKWTALNKSPSPQQSRHDPHYNLI

SEQ ID NO: 85213 - protein, 37 aa, Homo sapiens
MDFVMKQALGGATKDMGKMLGGEEEKDPDAQKKEEER

SEQ ID NO: 85214 - protein, 398 aa, Homo sapiens
MKTGYSDRRLAWWDARHGKRNLSVEDTEIDWKAYMAEVEGVINGTYDYTQLQGDTGPLVYPAGFVYIFMGLYYATSRGTDIRMAQNIFAVLYLATLLLVFLIYHQTCKVPPFVFFFMCCASYRVHSIFVLRLFNDPVAMVLLFLSINLLLAQRWGWGCCFFSLAVSVKMNVLLFAPGLLFLLLTQFGFRGALPKLGICAGLQVVLGLPFLLENPSGYLSRSFDLGRQFLFHWTVNWRFLPEALFLHRAFHLALLTAHLTLLLLFALCRWHRTGESILSLLRDPSKRKVPPQPLTPNQIVSTLFTSNFIGICFSRSLHYQFYVWYFHTLPYLLWAMPARWLTHLLRLLVLGLIELSWNTYPSTSCSSAALHICHAVILLQLWLGPQPFPKSTQHSKKAH

SEQ ID NO: 85215 - protein, 882 aa, Homo sapiens
MIPPLKSPAAFHEQRRSLERARTEDYLKRKIRSRPERSELVRMHILEETSAEPSLQAKQLKLKRARLADDLNEKIAQRPGPMELVEKNILPVESSLKEAIIVGQVNYPKVADSSSFDEDSSDALSPEQPASHESQGSVPSPLEARVSEPLLSATSASPTQQSQPKSASEKSQRSKKAKELKPKVKKLKYHQYIPPDQKQDRGAPPMDSSYAKILQQQQLFLQLQILNQQQQQHHNYQAILPAPPKSAGEALGSSGTPPVRSLSTTNSSSSSGAPGPCGLARQNSTSLTGKPGALPANLDDMKVAELKQELKLRSLPVSGTKTELIERLRAYQDQISPVPGAPKAPAATSILHKAGEVVVAFPAARLSTGPALVAAGLAPAEVVVATVASSGVVKFGSTGSTPPVSPTPSERSLLSTGDENSTPGDTFGEMVTSPLTQLTLQASPLQILVKEEGPRAGSCCLSPGGRAELEGRDKDQMLQEKDKQIEALTRMLRQKQQLVERLKLQLEQEKRAQQPAPAPAPLGTPVKQENSFSSCQLSQQPLGPAHPFNPSLAAPATNHIDPCAVAPGPPSVVVKQEALQPEPEPVPAPQLLLGPQGPSLIKGVAPPTLITDSTGTHLVLTVTNKNADSPGLSSGSPQQPSSQPGSPAPAPSAQMDLEHPLQPLFGTPTSLLKKEPPGYEEAMSQQPKQQENGSSSQQMDDLFDILIQSGEISADFKEPPSLPGKEKPSPKTVCGSPLAAQPSPSAELPQAAPPPPGSPSLPGRLEDFLESSTGLPLLTSGHDGPEPLSLIDDLHSQMLSSTAILDHPPSPMDTSELHFVPEPSSTMGLDLADGHLDSMDWLELSSGGPVLSLAPLSTTAPSLFSTDFLDGHDLQLHWDSCL

SEQ ID NO: 85216 - protein, 111 aa, Homo sapiens
MEKEKGNDDGIPDQENSLDFSEHFNQLELLETHGHLIPTGTQSLWVGNSDEDEEQDDKNEEWYRLQEKKMEKDPSRLLLWAAEKNRVKKKITEGSVTVGKALGSSQKTCLY

SEQ ID NO: 85217 - protein, 562 aa, Homo sapiens
  MOD_RES (1)..(1): Any amino acid
XMMHPEPGKFYQINPEEYEHPNPWKESFQQLYKGAHVKPGFAEHFYSNPARYKGRENMLYYDTIEDALGGVQEAHFDGLIFVHSGIYTDEWIYIESPITMIGAAPGKVADKVIIENTRDSTFVFMEGSEDAYVGYMTIRFNPDDKSAQHHNAHHCLEITVNCSPIIDHCIIRSTCTVGSAVCVSGQGACPTIKHCNISDCENVGLYITDHAQGIYEDNEISNNALAGIWVKNHGNPIIRRNHIHHGRDVGVFTFDHGMGYFESCNIHRNRIAGFEVKAYANPTVVRCEIHHGQTGGIYVHEKGRGQFIENKIYANNFAGVWITSNSDPTIRGNSIFNGNQGGVYIFGDGRGLIEGNDIYGNALAGIQIRTNSCPIVRHNKIHDGQHGGIYVHEKGQGVIEENEVYSNTLAGVWVTTGSTPVLRRNRIHSGKQVGVYFYDNGHGVLEDNDIYNHMYSGVQIRTGSNPKIRRNKIWGGQNGGILVYNSGLGCIEDNEIFDNAMAGVWIKTDSNPTLRRNKIHDGRDGGICIFNGGRGIVVNFALVKNPVFHYSSISLMINDIAN

SEQ ID NO: 85218 - protein, 125 aa, Homo sapiens
MMTAESREATGLSPQAAQEKDGIVIVKVEEEDEEDHMWGQDSTLQDTPPPDPEIFRQRFRRFCYQNTFGPREALSRLKELCHQWLRPEINTKEQILELLVLEQFLSILPKELQVWLQEYRPDSGE

SEQ ID NO: 85219 - protein, 65 aa, Homo sapiens
MADEELEALRRQRLAELQAKHGDPGDAAQQEAKHREAEMRNSILAQVLDQSARARCIRTRFNRNP

SEQ ID NO: 85220 - protein, 651 aa, Homo sapiens
MALLAMHSWRWAAAAAAFEKRRHSAILIRPLVSVSGSGPQWRPHQLGALGTARAYQQIPESLKSITWQRLGKGNSGQFLDAAKALQVWPLIEKRTCWHGHAGGGLHTDPKEGLKDVDTRKIIKAMLSYVWPKDRPDLRARVAISLGFLGGAKAMNIVVPFMFKYAVDSLNQMSGNMLNLSDAPNTVATMATAVLIGYGVSRAGAAFFNEVRNAVFGKVAQNSIRRIAKNVFLHLHNLDLGFHLSRQTGALSKAIDRGTRGISFVLSALVFNLLPIMFEVMLVSGVLYYKCGAQFALVTLGTLGTYTAFTVAVTRWRTRFRIEMNKADNDAGNAAIDSLLNYETVKYFNNERYEAQRYDGFLKTYETASLKSTSTLAMLNFGQSAIFSVGLTAIMVLASQGIVAGTLTVGDLVMVNGLLFQLSLPLNFLGTVYRETRQALIDMNTLFTLLKVDTQIKDKVMASPLQITPQTATVAFDNVHFEYIEGQKVLSGISFEVPAGKKVAIVGGSGSGKSTIVRLLFRFYEPQKGSIYLAGQNIQDVSLESLRRAVGVVPQDAVLFHNTIYYNLLYGNISASPEEVYAVAKLAGLHDAILRMPHGYDTQVGERGLKLSGGEKQRVAIARAILKDPPVILYDEATSSLDSITEEIVNSG

SEQ ID NO: 85221 - protein, 52 aa, Homo sapiens
MGKQNSKLRPEVMQDLLESTDFTEHEIQEWYKGFLRDCPSGHLSMEEFKKIY

SEQ ID NO: 85222 - protein, 76 aa, Homo sapiens
MSWLFPLTKSASSSAAGSPGGLTSLQQQKQRLIESLRNSHSSLFPVSLAAQASPLIFPFAHLIAASAELLKYNCEE

SEQ ID NO: 85223 - protein, 17 aa, Homo sapiens
  MOD_RES (1)..(1): Any amino acid
XNYYKKLFGSGTTLVVT

SEQ ID NO: 85224 - protein, 191 aa, Homo sapiens
LFSEKRVELLKELSRKPDIYERLASALAPSIYEHEDIKKGILLQLFGGTRKDFSHTGRGKFRAEINILLCGDPGTSKSQLLQYVYNLVPRGQYTSGKGSSAVGLTAYVMKDPETRQLVLQTGALVLSDNGICCIDEFDKMNESTRSVLHEVMEQQTLSIAKGVTFCLYCCTSLEFVLKLLQGACFLRKMWL

SEQ ID NO: 85225 - protein, 144 aa, Homo sapiens
MSLLLPPLALLLLLAALVAPATAATAYRPDWNRLSGLTRARVETCGGQLNRLKEVKAFVTQDIPFYHNLVMKHLPGADPELVLLGRRYEELERIPLSEMTREEINALVQELGFYRKAAPDAQVPPEYVWAPAKPPEETSDHADL

SEQ ID NO: 85226 - protein, 104 aa, Homo sapiens
MFFNTFVFQAGLVNLLFHKFKGTIILTAVYFALSISLHVWVMNLRWKNSNSFIWTDGLQMLFVFQRLAAVLYCYFYKRTAVRLGDPHFYQDSLWLRKEFMQVRR

SEQ ID NO: 85227 - protein, 247 aa, Homo sapiens
MAQVPPPASGERHAGTEDGPIRRNPAGNVARPMVQRLPEPQDVAQCLEVGLFDTPPFYSNSTNSFRNTVEGYSDPTGKYDPAVRSLHNLAHLFLNGTGGQTHLSPNDPIFVLLHTFTDAVFDEWLRRYNADISTFPLENAPIGHNRQYNMVPFWPPVTNTEMFVTAPDNLGYTYEIQWPSREFSVPEIIAIAVVGALLLVALIFGTASYLIRARRSMDEANQPLLTDQYQCYAEEYEKLQNPNQSVV

SEQ ID NO: 85228 - protein, 304 aa, Homo sapiens
MADLDKLNIDSIIQRLLEVRGSKPGKNVQLQENEIRGLCLKSREIFLSQPILLELEAPLKICGDIHGQYYDLLRLFEYGGFPPESNYLFLGDYVDRGKQSLETICLLLAYKIKYPENFFLLRGNHECASINRIYGFYDECKRRYNIKLWKTFTDCFNCLPIAAIVDEKIFCCHGGLSPDLQSMEQIRRIMRPTDVPDQGLLCDLLWSDPDKDVLGWGENDRGVSFTFGAEVVAKFLHKHDLDLICRAHQVVEDGYEFFAKRQLVTLFSAPNYCGEFDNAGAMMSVDETLMCSFQVEHAFNMISF

SEQ ID NO: 85229 - protein, 62 aa, Homo sapiens
GGVSGLTGELEFGENGGNPNVHFEILGTNYGEELGRGVRKNERIRPQGSTGKIWPQVNFIFK

SEQ ID NO: 85230 - protein, 185 aa, Homo sapiens
MALTSFLPAPTQLSQDQLEAEEKARSQRSRQTSLVSSRREPPPYGYRKGWIPRLLEDFGDGGAFPEIHVAQYPLDMGRKKKMSNALAIQVDSEGKIKYDAIARQGQSKDKVIYSKYTDLVPKEVMNADDPDLQRPDEEAIKEMTVKEQQEWKIPPCISNWKNAKGYTIPLDKRLAADGRGLQTVH

SEQ ID NO: 85231 - protein, 221 aa, Homo sapiens
MQEADISGYIPNGEWDLVGIPGKRSERFYECCKEPYPDVTFTVTMRRRTLYYGLNLLIPCVLISALALLVFLLPADSGEKISLGITVLLSLTVFMLLVAEIMPATSDSVPLIAQYFASTMIIVGLSVVVTVIVLQYHHHDPDGGKMPKWTRVILLNWCAWFLRMKRPGEDKVRPACQHKQRRCSLASVEMSAVAPPPASNGNLLYIGFRGLDGVHCVPTPD

SEQ ID NO: 85232 - protein, 59 aa, Homo sapiens
MEPNSLRTKVPAFLSDLGKATLRGIRKCPRCGTYNGTRGLSCKNKTCGTIFRYGARKQP

SEQ ID NO: 85233 - protein, 194 aa, Homo sapiens
MADPRDKALQDYRKKLLEHKEIDGRLKEFIVKATNGPRYVVGCRRQLDKSKLKPGTRVALDMTTLTIMRYLPREVDPLVYNMSHEDPGNVSYSEIGGLSEQIRELREVIELPLTNPELFQRVGIIPPKGCLLYGPPGTGKTLLARAVASQLDCNFLKVVSSSIVDKYIGESARLIREMFNYARDHQPCIIFMDE

SEQ ID NO: 85234 - protein, 1096 aa, Homo sapiens
MVVSAGPWSSEKAETNILEINEKLRPQLAENKQQFRNLKEKCFVTQLAGFLANRQKKYKYEECKDLIKFMLRNERQFKEEKLAEQLKQAEELRQYKVLVHSQERELTQLREKLREGRDASRSLNQHLQALLTPDKPDKSQGQDLQEQLAEGCRLAQQLFQKLSPENDEDEDEDVQVEEAEKVLESSAPREVQKAEESKVPEDSLEECAITCSNSHSPCDSNQPHKNINITFEEDKVNSTLVVDRESSHDECQDAVNILPVPGPTSSATNVSMVVSAGPLSSEKAEMNILEINEKLHPQLAEKKQQFRNLKEKCFVTQLACFLANQQNKYKYEECKDLIKSMLRNERQFKEEKLAEQLKQAEELRQYKVLVHSQERELTQLREKLREGRDASRSLNQHLQALLTPDKPDKSQGQDLQEQLAEGCRLAQQLFQKLSPENDEDEDEDVQVEEAEKVLESSAPREVQKAEESKVPEDSLEECAITCSNSHGPCDSNQPHKNINITFEEDKVNSALVVDRESSHDECQDAVNILPVPGPTSSATNVSMVVSAGPLSSEKAEMNILEINEKLHPQLAEKKQQFRNLKEKCFVTQLACFLANQQNKYKNEECKDLIKSMLRNERQFKEEKLAEQLKQAEELRQYKVLVHSQERELTQLREKLREGRDASCSLNQHLQALLTPDEPDKSQGQDLQEQLAEGCRLAQHLVQKLSPENDNDDDEDVQVEVAEKVQKSSAPREMPKAEEKEVPEDSLEECAITCSNSHGPYDSNQPHRKTKITFEEDKVDSTLIGSSSHVEWEDAVHIIPENESDDEEEEEKGPVSPRNLQESEEEEVPQESWDEGYSTLSIPPEMLASYKSYSGTFHSLEEQQVCMAVDIGGHRWDQVKKEDQEATGPRLSRELLDEKGPEVLQDSLDRCYSTPSGYLELTDSCQPYRSAFYILEQQRVGWALDMDEIEKYQEVEEDQDPSCPRLSRELLEAVEPEVLQDSLDRCYSTPSSCLEQPDSCLPYGSSFYALEEKHVGFSLDVKRRRRGRKEGEEDQNPPCPRLSGMLMEVEEPEVLQDSLDRCYSTPSMYFELPDSFQHYRSVFYSFEEQHISFALDV

SEQ ID NO: 85235 - protein, 23 aa, Homo sapiens
MYQSLAMAANHGPPPGAYEAGGP

SEQ ID NO: 85236 - protein, 1023 aa, Homo sapiens
QALPDSELTQEALKVSAVPQPADQKTGLSTVTSSFYSHTEKPNISYQQELPDSHLTEEALKVSNVPGPADQKTGVSTVTSTSYSHREKPIVSYQRELPHFTEAGLKILRVPGPADQKTGINILPSNSYPQREHSVISYEQELPDLTEVTLKAIGVPGPADQKTGIQIASSSSYSNREKASIFHQQELPDVTEEALNVFVVPGQGDRKTEIPTVPLSYYSRREKPSVISQQELPDSHLTEEALKVSPVSIPAEQKTGIPIGLSSSYSHSHKEKLKISTVHIPDDQKTEFPAATLSSYSQIEKPKISTVIGPNDQKTPSQTAFHSSYSQTVKPNILFQQQLPDRDQSKGILKISAVPELTDVNTGKPVSLSSSYFHREKSNIFSPQELPGSHVTEDVLKVSTIPGPAGQKTVLPTALPSSFSHREKPDIFYQKDLPDRHLTEDALKISSALGQADQITGLQTVPSGTYSHGENHKLVSEHVQRLIDNLNSSDSSVSSNNVLLNSQADDRVVINKPESAGFRDVGSEEIQDAENSAKTLKEIRTLLMEAENMALKRCNFPAPLARFRDISDISFIQSKKVVCFKEPSSTGVSNGDLLHRQPFTEESPSSRCIQKDIGTQTNLKCRRGIENWEFISSTTVRSPLQEAESKVSMALEETLRQYQAAKSVMRSEPEGCSGTIGNKIIIPMMTVIKSDSSSDASDGNGSCSWDSNLPESLESVSDVLLNFFPYVSPKTSITDSREEEGVSESEDGGGSSVDSLAAHVKNLLQCESSLNHAKEILRNAEEEESRVRAHAWNMKFNLAHDCGYSISELNEDDRRKVEEIKAELFGHGRTTDLSKGLQSPRGMGCKPEAVCSHIIIESHEKGCFRTLTSEHPQLDRHPCAFRSAGPSEMTRGRQNPSSCRAKHVNLSASLDQNNSHFKVWNSLQLKSHSPFQNFIPDEFKISKGLRMPFDEKMDPWLSELVEPAFVPPKEVDFHSSSQMPSPEPMKKFTTSITFSSHRHSKCISNSSVVKITREDEDPTFCFL

SEQ ID NO: 85237 - protein, 45 aa, Homo sapiens
MEPRVVKPPGQDLVVESLKSRYGLGGSCPDEVIWISTLEIKLVHR

SEQ ID NO: 85238 - protein, 265 aa, Homo sapiens
GPDPSLVYRPDVDPEVAKDKASFRNYTSGPLLDRVFTTYKLMHTHQTVDFVRSKHAQFGGFSYKKMTVMEAVDLLDGLVDESDPDVDFPNSFHAFQTAEGIRKAHPDKDWFHLVGLLHDLGKVLALFGEPQASVVFCDSTFQDNPDLQDPRYSTELGMYQPHCGLDRVLMSWGHDEYMYQVMKFNKFSLPPEAFYMIRFHSFYPWHTGRDYQQLCSQQDLAMLPWVREFNKFDLYTKCPDLPDVDKLRPYYQGLIDKYCPGILSW

SEQ ID NO: 85239 - protein, 134 aa, Homo sapiens
MLTKFETKSARVKGLSFHPKRPWILTSLHNGVIQLWDYRMCTLIDKFDEHDGPVRGIDFHKQQPLFVSGGDDYKIKCVNRAQPLCDVCSVPPHRRLGSISQPGPDCARLGYFWSEEKKPVPWCGGIGCERNNWG

SEQ ID NO: 85240 - protein, 40 aa, Homo sapiens
  MOD_RES (1)..(1): Any amino acid
XVGTELLLALAEFLCLNYKKNPAVTQMGERELKRKTVLQK

SEQ ID NO: 85241 - protein, 243 aa, Homo sapiens
  MOD_RES (1)..(1): Any amino acid
XLEMDGHLNRGFHQEVFLGKDLGGFDEDAEPRRSRRKLMVIFSKVDVNTDRKISAKEMQRWIMEKTAEHFQEAMEESKTHFRAVDPDGDGHVSWDEYKVKFLASKGHSEKEVADAIRLNEELKVDEESSTSRNFLDLRAGVCRPRYPQAAPLSAQEVLENLKDRWYQADSPPADLLLTEEEFLSFLHPEHSRGMLRFMVKEIVRDLDQDGDKQLSVPEFISLPVGTVENQQGQDIDDNWVKDR

SEQ ID NO: 85242 - protein, 458 aa, Homo sapiens
MHRKHLQEIPDLSSNVATSFTWGWDSSKTSELLSGMGVSALEKEEPDSENIPQELLSNLGHPESPPRKRLKSKGSDKDFVIVRRPKLNRENFPVLPGITSQINYLKSELQNLLLGDPNLNKGQIRGFGVSWDSLPDELLLGIFSCLCLPELLKVSGVCKRWYRLASDESLWQTLDLTGKNLHPDVTGRLLSQGVIAFRCPRSFMDQPLAEHFSPFRVQHMDLSNSVIEVSTLHGILSQCSKLQNLSLEGLRLSDPIVNTLAKNSNLVRLNLSGCSGFSEFALQTLLSSCSRLDELNLSWCFDFTEKHVQVAVAHVSETITQLNLSGYRKNLQKSDLSTLVRRCPNLVHLDLSDSVMLKNDCFQEFFQLNYLQHLSLSRCYDIIPETLLELGEIPTLKTLQVFGIVPDGTLQLLKEALPHLQINCSHFTTIARPTIGNKKNQEIWGIKCRLTLQKPSCL

SEQ ID NO: 85243 - protein, 109 aa, Homo sapiens
MKDSCITVMAMALLSGFFFFAPASSYNLDVRGARSFSPPRAGRHFGYRVLQLDGHRTRRRGLFPGGRHELRRNIAVTTSMSCTDFSFHFPIQSPASNCFCQPLCGAEPE

SEQ ID NO: 85244 - protein, 296 aa, Homo sapiens
MSVGAMKKGVGRAVGLGGGSGCQATEEDPLPNCGACAPGQGGRRWRLPQPAWVEGSSARLWEQATGTGWMDLEASLLPTGPNASNTSDGPDNLTSAGSPPRTGSISYINIIMPSVFGTICLLGIIGNSTVIFAVVKKSKLHWCNNVPDIFIINLSFFLAFALPFVVITAAYVRILQRMTSSVAPASQRSIRLRTKRVTRTAIAICLVFFVCWAPYYVLQLTQLSISRPTLTFVYLYNAAISLGYANSCLNPFVYIVLCETFRKRLVLSVKPAAQGQLRAVSNAQTADEERTESKGT

SEQ ID NO: 85245 - protein, 32 aa, Homo sapiens
MAPKRQSPLPPQKKKPRPPPALGPEETSASAG

SEQ ID NO: 85246 - protein, 294 aa, Homo sapiens
MSKGQSGLGKSTLVNTLFKSQVSRKASSWNREEKIPKTVEIKAIGHVIEEGGVKMKLTVIDTPGFGDQINNENCWEPIEKYINEQYEKFLKEEVNIARKKRIPDTRVHCCLYFISPTGHSLRPLDLEFMKHLSKVVNIIPVIAKADTMTLEEKSEFKQRVRKELEVNGIEFYPQKEFDEDLEDKTENDKIRQESMPFAVVGSDKEYQVNGKRVLGRKTPWGIIEVENLNHCEFALLRDFVIRTHLQDLKEVTHNIHYETYRAKRLNDNGGLPPGEGLLGTVLPPVPATPCPTAE

SEQ ID NO: 85247 - protein, 145 aa, Homo sapiens
ESVGEGHPDKICDQISDAVLDAHLKQDPNAKVACGFDFKTCNVLVALEQQSPDIAQCVHLDRNEEDVGAGDQGLMFGYATDETEECMPLTIILAHKLNARMADLRRSGLLPWLRPDSKTQVTVQYMQDNGAVIPVRIHTIVISVQ

SEQ ID NO: 85248 - protein, 126 aa, Homo sapiens
MGNKQTIFTEEQLDNYQDCTFFNKKDILKLHSRFYELAPNLVPMDYRKSPIVHVPMSLIIQMPELRENPFKERIVAAFSEDGEGNLTFNDFVDMFSVLCESAPRELKANYAFKIYALSTSGSEDTA

SEQ ID NO: 85249 - protein, 45 aa, Homo sapiens
MAGIIKKQILKHLSSVPCWLWWRLVCCELHNHPNEYQRSLRNPGN

SEQ ID NO: 85250 - protein, 135 aa, Homo sapiens
  MOD_RES (1)..(1): Any amino acid
XKLSQRLSELDWMLKSALGDRIKEKTDHKEENTGNEEVEDGTEETLSQHSDGIVEYGPKKSRPGLSMRRKPPYRSHSLSPSPVNKHKQFHLERKRQRKPRETDVRQFQAQEKIYRGEAVRKGTPECSQPWKIYSR

SEQ ID NO: 85251 - protein, 146 aa, Homo sapiens
MSKNKKKKLKKKQKRQAELLEKRMQEIEEMEKESGPGQKRPNKQEESESPVERPLKENPPNKMTQEKLEESSTIGQDQTLMERDTEGGAAEINCNGVIEVINYTQNSNNETLRHKEDLHNANDCDVQNLNQESSFLSSQNGDSSTS

SEQ ID NO: 85252 - protein, 356 aa, Homo sapiens
MGWGGGGGCTPRPPIHQQPPERRVVTVVFLGLLLDLLAFTLLLPLLPGLLESHGRAHDPLYGSWQGGVDWFATAIGMPVEKRYNSVLFGGLIGSAFSVLQFLCAPLTGATSDCLGRRPVMLLCLMGVATSYAVWATSRSFAAFLASRLIGGISKGNVSLSTAIVADLGSPLARSQGMAVIGVAFSLGFTLGPMLGASLPLEMAPWFALLFAASDLLFIFCFLPETLPLEKRAPSIALGFRDAADLLSPLALLRFSAVARGQDPPSGDRLSSLRRLGLVYFLYLFLFSGLEYTLSFLTHQRFQFSSLQQGKMFFLIGLTMATIQGAYARRIHPGGEVAAVKRAHQGRRARSWVHCAA

SEQ ID NO: 85253 - protein, 14 aa, Homo sapiens
MPAKTPIYLKAANN

SEQ ID NO: 85254 - protein, 480 aa, Homo sapiens
MYRALRLLARSRPLVRAPAAALASAPGLGGAAVPSFWPPNAARMASQNSFRIEYDTFGELKVPNDKYYGAQTVRSTMNFKIGGVTERMPTPVIKAFGILKRAAAEVNQDYGLDPKIANAIMKAADEVAEGKLNDHFPLVVWQTGSGTQTNMNVNEVISNRAIEMLGGELGSKIPVHPNDHVNKSQSSNDTFPTAMHIAAAIEVHEVLLPGLQKLHDALDAKSKEFAQIIKIGRTHTQDAVPLTLGQEFSGYVQQVKYAMTRIKAAMPRIYELAAGGTAVGTGLNTRIGFAEKVAAKVAALTGLPFVTAPNKFEALAAHDALVELSGAMNTTACSLMKIANDIRFLGSGPRSGLGELILPENEPGSSIMPGKVNPTQCEAMTMVAAQVMGNHVAVTVGGSNGHFELNVFKPMMIKNVLHSARLLGDASVSFTENCVVGIQANTERINKLMNESLMLVTALNPHIGKCLRNNNIILNAKLKS

SEQ ID NO: 85255 - protein, 177 aa, Homo sapiens
VFVRLMQEYRLRELFKPSMAELGLCIYQFEYMLQEQLPDLNTHFRSQSFHTSMYASSWFLTLFLTTFPLPVATRVFDIFMYEGLEIVFRVGLALLQVNQAELMQLDMEGMSQYFQRVIPHQFDSCPDKLVLKAYQVKYNPKKMKRLEKEYAAMKSKEMEEQIEIKASCERLPRLTPR

SEQ ID NO: 85256 - protein, 97 aa, Homo sapiens
  MOD_RES (1)..(1): Any amino acid
XTNCTSSWGRVWRATSSQGASGNEPAQVSLLYLGDIEISEDATLAELKSQSVLIWHLSYAMFSGHDLASFPGVRCPVPSPPQSLDGGEEAPRQAFTN

SEQ ID NO: 85257 - protein, 163 aa, Homo sapiens
  MOD_RES (1)..(1): Any amino acid
XLANKQDKKKALMPCDIIDYLLLKKLVKENKCPCRVEPCSAIRNLERRNHQPIVEGLRWLLAVIDTCQLPPTSSISISKNNTGSGERCSSHSFSTRTGMSKEKRQHLEQCSIEAKPLKSILQKEAIKSILYSLRGSRRVRWHPLRMKTTLVKKNRDFTSLYRD

SEQ ID NO: 85258 - protein, 42 aa, Homo sapiens
MAATQKLVKDIIDSKTGETASKRWKGAKNSETAAKVALMKLK

SEQ ID NO: 85259 - protein, 142 aa, Homo sapiens
MQLITDIPLLDITYEISVEAISTMVVFLSCQLFHKEVLRQSISHKYLMRGPCLPYTSKLVKTLLYNFIRQEKPPPPGAHVFPQQSDGGGLLYGLASGVATGLWTVFTLGGVGSKAAASPELSSPLANQSLLLLLVLANLTDA

SEQ ID NO: 85260 - protein, 78 aa, Homo sapiens
MVKLSIVLTPQFLSHDQGQLTKELQQHVKSVTCPCEYLRKVINTLADHHHRGTDFGGSPWLHVIIAFPTSYKVVITLW

SEQ ID NO: 85261 - protein, 669 aa, Homo sapiens
MAYASWQRWSPVEWARWMWTAVTSSGDSSLLVLQGDSGKRSSDSEEAFETPESTTPVKAPPAPPPPPPEVIPEPEVSTQPPPEEPGCGSETVPVPDGPRSDSVEGSPFRPPSHSFSAVFDEDKPIASSGTYNLDFDNIELVDTFQTLEPRASDAKNQEGKVNTRRKSTDSVPISKSTLSRSLSLQASDFDGASSSGNPEAVALAPDAYSTGSSSASSTLKRTKKPRPPSLKKKQTTKKPTETPPVKETQQEPDEESLVPSGENLASETKTESAKTEGPSPALLEETPLEPAVGPKAACPLDSESAEGVVPPASGGGRVQNSPPVGRKTLPLTTAPEAGEVTPSDSGGQEDSPAKGLSVRLEFDYSEDKSSWDNQQENPPPTKKIGKKPVAKMPLRRPKMKKTPEKLDNTPASPPRSPAEPNDIPIAKGTYTFDIDKWDDPNFNPFSSTSKMQESPKLPQQSYNFDPDTCDESVDPFKTSSKTPSSPSKSPASFEIPASAMEANGVDGDGLNKPAKKKKTPLKTDTFRVKKSPKRSPLSDPPSQDPTPAATPETPPVISAVVHATDEEKLAVTNQKWTCMTVDLEADKQDYPQPSDLSTFVNETKFSSPTEELDYRNSYEIEYMEKIGSSLPQDDDAPKKQALYLMFDTSQESPVKSSPVRMSESPTPCS

SEQ ID NO: 85262 - protein, 151 aa, Homo sapiens
MRRVVRQSKFRHVFGQAVKNDQCYDDIRVSRVTWDSSFCAVNPRFVAIIIEASGGGAFLVLPLHKTGRIDKSYPTVCGHTGPVLDIDWCPHNDQVIASGSEDCTVMVWQIPENGLTLSLTEPVVILEGHSKRVGIVAWHPTARNVLLSAGG

SEQ ID NO: 85263 - protein, 177 aa, Homo sapiens
SFARRPQTLLRVASWPLLRFSCSRDLEAGTGWGRNSPRGRRGLREPRSASPSPAHTPSGLLGREPVPWPPVPAVFSIAVFGPIVNEGYVNTDSGPELRCVFNGNAGACRFGVALGLGAFLACAAFLLLDVRFQQISSVRDRRRAVLLDLGFSGLWSFLWFVGFCFLTNQWQRTAPGP

SEQ ID NO: 85264 - protein, 21 aa, Homo sapiens
LKRLVDGVSLCRPGWSAVARS

SEQ ID NO: 85265 - protein, 4532 aa, Homo sapiens
MDDLRVLWMRDRVYAAFGITDPQLFEDLLNRDDGQGEDLILHFLNQASEEEGPSALFIYRTMVPEEVEVEIDEIPVLSEEGEEEEETYSQKVESVDKVRAKRVSLRTESLGQPLNREDEEMDKEISEKLPSKRTAKHIMEKMHLHMLCTPLPEEFLDQNVVFFLRNTKEAISEATDMKEAMEIMPETLEYGIINANVLHFLKNIICQVFLPALSFNQHRTSTTVGVTSGEVSNSSEHESDLPPMPGEAVEYHSIQLIRDEFLMNVQKFASNIQRTMQQLEGEIKLEMPIISVEGEVSDLAADPETVDILEQCVINWLNQISTAVEAQLKKTPQGKGPLAEIEFWRERNATLSALHEQTKLPIVRKVLDVIKESDSMLVANLQPVFTELFKFHTEASDNVRFLSTVERYFKNITHGSGFHVVLDTIPAMMSALRMVWIISRHYNKDERMIPLMERIAWEIAERVCRVVNLRTLFKENRASAQSKTLEARNTLRLWKKAYFDTRAKIEASGREDRWEFDRKRLFERTDYMATICQDLSDVLQILEEFYNIFGPELKAVTGDPKRIDDVLCRVDGLVTPMENLTFDPFSIKSSQFWKYVMDEFKIEVLIDIINKIFVQNLENPPLYKNHPPVAGAIYWERSLFFRIKHTILRFQEVQEILDSDRGQEVKQKYLEVGRTMKEYEDRKYEQWMEVTEQVLPALMKKSLLTKSSIATEEPSTLERGAVFAINFSPALREIINETKYLEQLGFTVPELARNVALQEDKFLRYTAGIQRMLDHYHMLIGTLNDAESVLLKDHSQELLRVFRSGYKRLNWNSLGIGDYITGCKQAIGKFESLVHQIHKNADDISSRLTLIEAINLFKYPAAKSEEELPGVKEFFEHIERERASDVDHMVRWYLAIGPLLTKVEGLVVHTNTGKAPKLASYYKYWEKKIYEVLTKLILKNLQSFNSLILGNVPLFHTETILTAPEIILHPNTNEIDKMCFHCVRNCVEITKHFVRWMNGSCIECPPQKGEEEEVVIINFYNDISLNPQIIEQAVMIPQNVHRILINLMKYLQKWKRYRPLWKLDKAIVMEKFAAKKPPCVAYDEKLQFYSKIAYEVMRHPLIKDEHCIRLQLRHLANTVQENAKSWVISLGKLLNESAKEELYNLHEEMEHLAKNLRKIPNTLEDLKFVLATIAEIRSKSLVMELRYRDVQERYRTMAMYNLFPPDAEKELVDKIESIWSNLFNDSVNVEHALGDIKRTFTELTRGEIMNYRVQIEEFAKRFYSEGPGSVGDDLDKGVELLGVYERELARHEKSRQELANAEKLFDLPITMYPELLKVQKEMSGLRMIYELYEGLKVAKEEWSQTLWINLNVQILQEGIEGFLRALRKLPRPVRGLSVTYYLEAKMKAFKDSIPLLLDLKNEALRDRHWKELMEKTSVFFEMTETFTLENMFAMELHKHTDVLNEIVTAAIKEVAIEKAVKEILDTWENMKFTVVKYCKGTQERGYILGSVDEIIQSLDDNTFNLQSISGSRFVGPFLQTVHKWEKTLSLIGEVIEIWMLVQRKWMYLESIFIGGDIRSQLPEEAKKFDNIDKVFKRIMGETLKDPVIKRCCEAPNRLSDLQNVSEGLEKCQKSLNDYLDSKRNAFPRFFFISDDELLSILGSSDPLCVQEHMIKMYDNIASLRFNDGDSGEKLVSAMISAEGEVMEFRKILRAEGRVEDWMTAVLNEMRRTNRLITKEAIFRYCEDRSRVDWMLLYQGMVVLAASQVWWTWEVEDVFHKAQKGEKQAMKNYGRKMHRQIDELVTRITMPLSKNDRKKYNTVLIIDVHARDIVDSFIRGSILEAREFDWESQLRFYWDREPDELNIRQCTGTFGYGYEYMGLNGRLVITPLTDRIYLTLTQALSMYLGGAPAGPAGTGKTETTKDLAKALGLLCVVTNCGEGMDYRAVGKIFSGLAQCGAWGCFDEFNRIDASVLSVISSQIQTIRNALIHQLTTFQFEGQEISLDSRMGIFITMNPGYAGRTELPESVKALFRPVVVIVPDLQQICEIMLFSEGFLEAKTLAKKMTVLYKLAREQLSKQYHYDFGLRALKSVLVMAGELKRGSSDLREDVVLMRALRDMNLPKFVFEDVPLFLGLISDLFPGLDCPRVRYPDFNDAVEQVLEENGYAVLPIQVDKVVQMFETMLTRHTTMVVGPTRGGKSVVINTLCQAQTKLGLTTKLYILNPKAVSVIELYGILDPTTRDWTDGVLSNIFREINKPTDKKERKYILFDGDVDALWVENMNSVMDDNRLLTLANGERIRLQAHCALLFEVGDLQYASPATVSRCGMVYVDPKNLKYRPYWKKWVNQIPNKVEQYNLNSLFEKYVPYLMDVIVEGIVDGRQAEKLKTIVPQTDLNMVTQLAKMLDALLEGEIEDLDLLECYFLEALYCSLGASLLEDGRMKFDEYIKRLASLSTVDTEGVWANPGELPGQLPTLYDFHFDNKRNQWVPWSKLVPEYIHAPERKFINILVHTVDTTRTTWILEQMVKIKQPVIFVGESGTSKTATTQNFLKNLSEETNIVLMVNFSSRTTSMDIQRNLEANVEKRTKDTYGPPMGKRLLVFMDDMNMPRVDEYGTQQPIALLKLLLEKGYLYDRGKELNCKSIRDLGFIAAMGKAGGGRNEVDPRFISLFSVFNVPFPSEESLHLIYSSILKGHTSTFHESIVAVSGKLTFCTLALYKNIVQDLPPTPSKFHYIFNLRDLSRVFNGLVLTNPERFQTVAQMVRVWRNECLRVFHDRLISETDKQLVQQHIGSLVVEHFKDDVEVVMRDPILFGDFQMALHEGEPRIYEDIQDYEAAKALFQEILEEYNESNTKMNLVLFDDALEHLTRVHRIIRMDRGHALLVGVGGSGKQSLSRLAAFTASCEVFEILLSRGYSENSFREDLKSLYLKLGIENKAMIFLFTDAHVAEEGFLELINNMLTSGIVPALFSEEEKESILSQIGQEALKQGMGPAKESVWQYFVNKSANNLHIVLGMSPVGDTLRTWCRNFPGMVNNTGIDWFMPWPPQALHAVAKSFLGYNPMIPAENIENVVKHVVLVHQSVDHYSQQFLQKLRRSNYVTPKNYLDFINTYSKLLDEKTQCNIAQCKRLDGGLDKLKEATIQLDELNQKLAEQKIVLAEKSAACEALLEEIAVNTAVAEEKKKLAEEKAMEIEEQNKVIAMEKAEAETTLAEVMPILEAAKLELQKLDKSDVTEIRSFAKPPKQVQTVCECILIMKGYKELNWKTAKGVMSDPNFLRSLMEIDFDSITQSQVKNIKGLLKTLNTTTEEMEAVSKAGLGMLKFVEAVMGYCDVFREIKPKREKVARLERNFYLTKRELERIQNELAAIQKELETLGAKYEAAILEKQKLQEEAEIMERRLIAADKLISGLGSENIRWLNDLDELMHRRVKLLGDCLLCAAFLSYEGAFTWEFRDEMVNRIWQNDILEREIPLSQPFRLESLLTDDVEISRWGSQGLPPDELSVQNGILTTRASRFPLCIDPQQQALNWIKRKEEKNNLRVASFNDPDFLKQLEMSIKYGTPFLFRDVDEYIDPVIDNVLEKNIKVSQGRQFIILGDKEVDYDSNFRLYLNTKLANPRYSPSVFGKAMVINYTVTLKGLEDQLLSVLVAYERRELEEQREHLIQETSENKNLLKDLEDSLLRELATSTGNMLDNVDLVHTLEETKSKATEVSEKLKLAEKTALDIDRLRDGYRPAARRGAILFFVLSEMALVNSMYQYSLIAFLEVFRLSLKKSLPDSILMKRLRNIMDTLTFSIYNHGCTGLFERHKLLFSFNMTIKIEQAEGRVPQEELDFFLKGNISLEKSKRKKPCAWLSDQGWEDIILLSEMFSDNFGQLPDDVENNQTVWQEWYDLDSLEQFPVPLGYDNNITPFQKLLILRCFRVDRVYRAVTDYVTVTMGEKYVQPPMISFEAIFEQSTPHSPIVFILSPGSDPATDLMKLAERSGFGGNRLKFLAMGQGQEKVALQLLETAVARGQWLMLQNCHLLVKWLKDLEKSLERITKPHPDFRLWLTTDPTKGFPIGILQKSLKVVTEPPNGLKLNMRATYFKISHEMLDQCPHPAFKPLVYVLAFFHAVVQERRKFGKIGWNVYYDFNESDFQVCMEILNTYLTKAFQQRDPRIPWGSLKYLIGEVMYGGRAIDSFDRRILTIYMDEYLGDFIFDTFQPFHFFRNKEVDYKIPVGDEKEKFVEAIEALPLANTPEVFGLHPNAEIGYYTQAARDMWAHLLELQPQTGESSSGISRDDYIGQVAKEIENKMPKVFDLDQVRKRLGTGLSPTSVVLLQELERFNKLVVRMTKSLAELQRALAGEVGMSNELDDVARSLFIGHIPNIWRRLAPDTLKSLGNWMVYFLRRFSQYMLWVTESEPSVMWLSGLHIPESYLTALVQATCRKNGWPLDRSTLFTQVTKFQDADEVNERAGQGCFVSGLYLEGADWDIEKGCLIKSKPKVLVVDLPILKIIPIEAHRLKLQNTFRTPVYTTSMRRNAMGVGLVFEADLFTTRHISHWVLQGVCLTLNSD

SEQ ID NO: 85266 - protein, 34 aa, Homo sapiens
MPLLENLMRFSMMFGYCLIMTIFSGKEQPMHLHS

SEQ ID NO: 85267 - protein, 715 aa, Homo sapiens
MNSGVAMKYGNDSSAELSELHSAALASLKGDIVELNKRLQQTERERDLLEKKLAKAQCEQSHLMREHEDVQERTTLRYEERITELHSVIAELNKKIDRLQGTTIREEDEYSELRSELSQSQHEVNEDSRSMDQDQTSVSIPENQSTMVTADMDNCSDLNSELQRVLTGLENVVCGRKKSSCSLSVAEVDKHIEQLTTASEHCDLAIKTVEEIEGVLGRDLYPNLAEERSRWEKELAGLREENESLTAMLCSKEEELNRTKATMNAIREERDRLRRRVRELQTRLQSVQATGPSSPGRLTSTNRPINPSTGELSTSSSSNDIPIAKIAERVKLSKTRSESSSSDRPVLGSEISSIGVSSSVAEHLAHSLQDCSNIQEIFQTLYSHGSAISESKIREFEVETERLNSRIEHLKSQNDLLTITLEECKSNAERMSMLVGKYESNATALRLALQYSEQCIEAYELLLALAESEQSLILGQFRAAGVGSSPGDQSGDENITQMLKRAHDCRKTAENAAKALLMKLDGSCGGAFAVAGCSVQPWESLSSNSHTSTTSSTASSCDTEFTKEDEQRLKDYIQQLKNDRAAVKLTMLELESIHIDPLSYDVKPRGDSQRLDLENAVLMQELMAMKEEMAELKAQLYLLEKEKKALELKLSTREAQEQAYLVHIEHLKSEVEEQKEQRMRSLSSTSSGSKDKPGKVGPEWLGDTLRLSDCPVTAQ

SEQ ID NO: 85268 - protein, 313 aa, Homo sapiens
DRVRTDAYRLGILRNWAALRGKTVLDVGAGTGILSIFCAQAGARRVYAVEASAIWQQAREVVRFNGLEDRVHVLPGPVETVELPEQVDAIVSEWMGYGLLHESMLSSVLHARTKWLKEGGLLLPASAELFIAPISDQMLEWRLGFWSQVKQHYGVDMSCLEGFATRCLMGHSEIVVQGLSGEDVLARPQRFAQLELSRAGLEQELEAGVGGRFRCSCYGSAPMHGFAIWFQVTFPGGESEKPLVLSTSPFHPATHWKQALLYLNEPVQVEQDTDVSGEITLLPSRDNPRRLRVLLRYKVGDQEEKTKDFAMED

SEQ ID NO: 85269 - protein, 103 aa, Homo sapiens
MASYFDEHDCEPSDPEQETRTNMLLELARSLFNRMDFEDLGLVVDWDHHLPPPAAKTVVENLPRTVIRGSQAVFQVRWGQVSFRSGSLGGRACSSSPDQHSFL

SEQ ID NO: 85270 - protein, 176 aa, Homo sapiens
RGPESQSCPSKLNPETFVAFCIIAMDRLTKDTYRVRFALPGNSQLGLRPGQHLILRYTQCYQMGLMSRYVESWRVGDTAFWRGPFGDFFYKPNQYGELLLLAAGTGLAPMVPILQSITDNENDETFVTLVGCFKTFESIYLKTFLQEQARFWNVRTFFVLSQLVESTNVEPMDTEG

SEQ ID NO: 85271 - protein, 616 aa, Homo sapiens
MRRTKSAGLDLYLWRQHWPRRGKQPHEVGISNSYLVLEFERVYLDNLPSASMYERSYMHRDVITHVVCTKTDFIITASHDGHVKFWKKIEEGIEFVKHFRSHLGVIESIAVSSEGALFCSVGDDKAMKVFDVVNFDMINMLKLGYFPGQCEWIYCPGDAISSVAASEKSTGKIFIYDGRGDNQPLHIFDKLHTSPLTQIRLNPVYKAVVSSDKSGMIEYWTGPPHEYKFPKNVNWEYKTDTDLYEFAKCKAYPTSVCFSPDGKKIATIGSDRKVRIFRFVTGKLMRVFDESLSMFTELQQMRQQLPDMEFGRRMAVERELEKVDAVRLINIVFDETGHFVLYGTMLGIKVINVETNRCVRILGKQENIRVMQLALFQGIAKKHRAATTIEMKASENPVLQNIQADPTIVCTSFKKNRFYMFTKREPEDTKSADSDRDVFNEKPSKEEVMAATQAEGPKRVSDSAIIHTSMGDIHTKLFPVECPKTVENFCVHSRNGYYNGHTFHRIIKGFMIQTGDPTGTGMGGESIWGGEFEDEFHSTLRHDRPYTLSMANAGSNTNGSQFFITVVPTPWLDNKHTVFGRVTKGMEVVQRISNVKVNPKTDKPYEDVSIINITVK

SEQ ID NO: 85272 - protein, 85 aa, Homo sapiens
MSWIKEGELSLWERFCANIIKAGPMPKHIAFIMDGNRRYAKKCQVERQEGHSQGFNKLAETLRWCLNLGILEVTVYAFSIENFKR

SEQ ID NO: 85273 - protein, 99 aa, Homo sapiens
MRLFGGNFAHQASVARVVGQQGRGRAGIEASLDVQYLMSAGANISTWVYSSPGDSGAGCWSVSGRHQFRPTFPASRSQAPNLLCGIQLPLFLFVSSQAF

SEQ ID NO: 85274 - protein, 158 aa, Homo sapiens
MNAPPAFESFLLFEGEKITINKDTKVPKACLFTINKEDHTLGNIIKSQLLKDPQVLFAGYKVPHPLEHKIIIRVQTTPDYSPQEAFTNAITDLISELSLLEERFRVRAGPGGADGVGWTLARVPRPGTALACFFGGPQGEAAVMEEQGLPPQAPGHVD

SEQ ID NO: 85275 - protein, 1340 aa, Homo sapiens
MFKGVASSRFLPKGTKTKVNLEEQGRQKVSFSFSLTKKTLQNRFLTALGNEKQSDTPNPPAVPLQVDSTPKMKMEIGDTLSTAEESSPPKSRVELGKIHFKKHLLHVTSRPLLATTTAVASPPTHAAPLPAVIAESTTVDSPPSSPPPPPPPAQATTLSSPAPVTEPVALPHTPITVLMAAPVPLPVDVAVRSLKEPPIIIVPESLEADTKQDTISNSLEEHVTQILNEQADISSKKEDSHIGKDEEIPDSSKISLSCKKTGSKKKSSQSEGIFLGSESDEDSVRTSSSQRSHDLKFSASIEKERDFKKSSAPLKSEDLGKPSRSKTDRDDKYFSYSKLERDTRYVSSRCRSERERRRSRSHSRSERGSRTNLSYSRSERSHYYDSDRRYHRSSPYRERTRYSRPYTDNRARESSDSEEEYKKTYSRRTSSHSSSYRDLRTSSYSKSDRDCKTETSYLEMERRGKYSSKLERESKRTSENEAIKRCCSPPNELGFRRGSSYSKHDSSASRYKSTLSKPIPKSDKFKNSFCCTELNEEIKQSHSFSLQTPCSKGSELRMINKNPEREKAGSPAPSNRLNDSPTLKKLDELPIFKSEFITHDSHDSIKELDSLSKVKNDQLRSFCPIELNINGSPGAESDLATFCTSKTDAVLMTSDDSVTGSELSPLVKACMLSSNGFQNISRCKEKDLDDTCMLHKKSESPFRETEPLVSPHQDKLMSMPVMTVDYSKTVVKEPVDTRVSCCKTKDSDIYCTLNDSNPSLCNSEAENIEPSVMKISSNSFMNVHLESKPVICDSRNLTDHSKFACEEYKQSIGSTSSASVNHFDDLYQPIGSSGIASSLQSLPPGIKVDSLTLLKCGENTSPVLDAVLKSKKSSEFLKHAGKETIVEVGSDLPDSGKGFASRENRRNNGLSGKCLQEAQEEGNSILPERRGRPEISLDERGEGGHVHTSDDSEVVFSSCDLNLTMEDSDGVTYALKCDSSGHAPEIVSTVHEDYSGSSESSNDESDSEDTDSDDSSIPRNRLQSVVVVPKNSTLPMEETSPCSSRSSQSYRHYSDHWEDERLESRRHLYEEKFESIASKACPQTDKFFLHKGTEKNPEISFTQSSRKQIDNRLPELSHPQSDGVDSTSHTDVKSDPLGHPNSEETVKAKIPSRQQEELPIYSSDFEDVPNKSWQQTTFQNRPDSRLGKTELSFSSSCEIPHVDGLHSSEELRNLGWDFSQEKPSTTYQQPDSSYGACGGHKYQQNAEQYGGTRDYWQGNGYWDPRSGRPPGTGVVYDRTQGQVPDSLTDDREEEENWDQQDGSHFSDQSDKFLLSLQKDKGSVQAPEISSNSIKDTLAVN

SEQ ID NO: 85276 - protein, 262 aa, Homo sapiens
VIKCKAAVAWEAGKPLSIEEIEVAPPKAHEVRIKIIATAVCHTDAYTLSGADPEGCFPVILGHEGAGIVESVGDTVIPLYIPQCGECKFCLNPKTNLCQKIRVTQGKGLMPDGTSRFTCKGKTILHYMGTSTFSEYTVVADISVAKIDPLAPLDKVCLLGCGISTGYGAAVNTAKLEPGSVCAVFGLGGVGLAVIMGCKVAGASRIIGVDINKDKFARAKEFGATECINPQDFSKPIQEVLIEMTDGGVDYSFECIGNVKVM

SEQ ID NO: 85277 - protein, 129 aa, Homo sapiens
LRDVNCPFKIQDRQEAIDWLLGLAVRLEYGDNAEKYKDLVPDNSKTADNATKNAEPLINLDVNNPDFKAGVMALANLLQIQRHDDYLVMLKAIRILVQERLTQDAVAKANQTKEMQFLMKLLKFCDCCT

SEQ ID NO: 85278 - protein, 241 aa, Homo sapiens
  MOD_RES (1)..(1): Any amino acid
XSLGADDGVAEVLARRGEVVAGRFIEVPCSEDYDSHRRLHSPKVRQRCHRCRHHQGGSGADSQASILDLHSGALSVGKHFVNLYRYFGDKIQNIFSEEDFRLYREVRQKVQLTIAEAFGISASSLHLTKPTFFSRINSTEARTAHDEYWHAHVDKVTYGSFDYTSLLYLSNYLEDFGGGRFMFMEEGANKTVEPRAGRVSFFTSGSENLHRVEKVHWGTRYAITIAFSCNPDHGIEDPAFP

SEQ ID NO: 85279 - protein, 571 aa, Homo sapiens
  MOD_RES (1)..(1): Any amino acid
XKPKLPENYTDETWQKLKEAVEAIQNSTSIKYNLEELYQAVENLCSYKISANLYKQLRQICEDHIKAQIHQFREDSLDSVLFLKKIDRCWQNHCRQMIMIRSIFLFLDRTYVLQNSMLPSIWDMGLELFRAHIISDQKVQNKTIDGILLLIERERNGEAIDRSLLRSLLSMLSDLQIYQDSFEQRFLEETNRLYAAEGQKLMQEREVPEYLHHVNKRLEEEADRLITYLDQTTQKSLIATVEKQLLGEHLTAILQKGLNNLLDENRIQDLSLLYQLFSRVRGGVQVLLQQWIEYIKAFGSTIVINPEKDKTMVQELLDFKDKVDHIIDICFLKNEKFINAMKEAFETFINKRPNKPAELIAKYVDSKLRAGNKEATDEELEKMLDKIMIIFRFIYGKDVFEAFYKKDLAKRLLVGKSASVDAEKSMLSKLKHECGAAFTSKLEGMFKDMELSKDIMIQFKQYMQNQNVPGNIELTVNILTMGYWPTYVPMEVHLPPEMVKLQEIFKTFYLGKHSGRKLQWQSTLGHCVLKAEFKEGKKELQVSLFQTLVLLMFNEGEEFSLEEIKQATGIG

SEQ ID NO: 85280 - protein, 367 aa, Homo sapiens
MCSGSGRRRSSLSPTMRPGTGAERGGLMVSEMESHPPSQGPGDGERRLSGSSLCSGSWVSADGFLRRRPSMGHPGMHYAPMGMHPMGQRANMPPVPHGMMPQMMPPMGGPPMGQMPGMMSSVMPGMMMSHMSQASMQPALPPGVNSMDVAAGTASGAKSMWTEHKSPDGRTYYYNTETKQSTWEKPDDLKTPAEQLLSKCPWKEYKSDSGKPYYYNSQTKESRWAKPKELEDLEAMIKAEESSKQEECTTTSTAPVPTTEIPTTMSTMAAAEAAAAVVAAAAAAAAAAAAANANASTSASNTVSGTVPVVPEPEVTSIVATVVDNENTVTISTEEQAQLTSTPAIQDQSVEVSSNTGEETSKQETVA

SEQ ID NO: 85281 - protein, 844 aa, Homo sapiens
KKKRKVEPPTPQEPGPAKVAVTSSSSSSSSSSSIPSAEKVPTTKSTLWQEEMRTKDQPDGSSLSPAQSPSQSQPPAASSLREPGLESKEEESAMSSDRMDCGRKVRVESGYFSLEKTKQDLKAEEQQLPPPLSPPSPSTPNHRRSQVIEKFEALDIEKAEHMETNAVGPSPSSDTRQGRSEKRAFPRKRPDLLNFKKGWLTKQYEDGQWKKHWFVLADQSLRYYRDSVAEEAADLDGEIDLSACYDVTEYPVQRNYGFQIHTKEGEFTLSAMTSGIRRNWIQTIMKHVHPTTAPDVTSSLPEEKNKSSCSFETCPRPTEKQEAELGEPDPEQKRSRARERRREGRSKTFDWAEFRPIQQALAQERVGGVGPADTHEPLRPEAEPGELERERARRREERRKRFGMLDATDGPGTEDAALRMEVDRSPGLPMSDLKTHNVHVEIEQRWHQVETTPLREEKQVPIAPVHLSSEDGGDRLSTHELTSLLEKELEQSQKEASDLLEQNRLLQDQLRVALGREQSAREGYVLQATCERGFAAMEETHQKKIEDLQRQHQRELEKLREEKDRLLAEETAATISAIEAMKNAHREEMERELEKSQRSQISSVNSDVEALRRQYLEELQSVQRELEVLSEQYSQKCLENAHLAQALEAERQALRQCQRENQELNAHNQELNNRLAAEITRLRTLLTGDGGGEATGSPLAQGKDAYELEVLLRVKESEIQYLKQEISSLKDELQTALRDKKYASDKYKDIYTELSIAKAKADCDISRLKEQLKAATEALGEKSPDSATVSGYDIMKSKSNPDFLKKDRSCVTRQLRNIRSKSLKEGLTVQERLKLFESRDLKKD

SEQ ID NO: 85282 - protein, 315 aa, Homo sapiens
  MOD_RES (1)..(1): Any amino acid
XKPKLTIHGDLYYEGKEFETRLKEKKPGDLSDELRISLGMPVGPNAHKVPPPWLIAMQRYGPPPSYPNLKIPGLNSPIPESCSFGYHAGGWGKPPVDETGKPLYGDVFGTNAAEFQTKTEEEEIDRTPWGELEPSDEESSEEEEEEESDEDKPDETGFITPADSGLITPGGFSSVPAGMETPELIELRKKKIEEAMDGETPQLFTVLPEKRTATVGGAMMGSTHIYDMSTVMSRKGPAPELQGVEVALAPEELELDPMAMTQKYEEHVREQQAQVEKEDFSDMVAEHAAKQKQKKRKAQPQDSRGGSKKYKEFKF

SEQ ID NO: 85283 - protein, 88 aa, Homo sapiens
MILASVLRSGPGGGLPLRPLLGPALALRARSTSATDTHHVEMARERSKTVTSFYNQSAIDAAAEKPSVRLTPTMMLYAGRSQDGSHLL

SEQ ID NO: 85284 - protein, 103 aa, Homo sapiens
GVCKVMHPEGNGRSGFLIHGERQKDKLVVLECYVRKDLVYTKANPTFHHWKVDNRKFGLTFQSPADARAFDRGVRKAIEDLIEEVENGFWRAQKAPGLPTVLL

SEQ ID NO: 85285 - protein, 425 aa, Homo sapiens
MEGKWLLCMLLVLGTAIVEAHDGHDDDVIDIEDDLDDVIEEVEDSKPDTTAPPSSPKVTYKAPVPTGEVYFADSFDRGTLSGWILSKAKKDDTDDEIAKYDGKWEVEEMKESKLPGDKGLVLMSRAKHHAISAKLNKPFLFDTKPLIVQYEVNFQNGIECGGAYVKLLSKTPELNLDQFHDKTPYTIMFGPDKCGEDYKLHFIFRHKNPKTGIYEEKHAKRPDADLKTYFTDKKTHLYTLILNPDNSFEILVDQSVVNSGNLLNDMTPPVNPSREIEDPEDRKPEDWDERPKIPDPEAVKPDDWDEDAPAKIPDEEATKPEGWLDDEPEYVPDPDAEKPEDWDEDMDGEWEAPQIANPRCESAPGCGVWQRPVIDNPNYKGKWKPPMIDNPSYQKRNRKVMLKKMVALSVKRRKTENLKQRRMKF

SEQ ID NO: 85286 - protein, 300 aa, Homo sapiens
MFAAATKSFVKQVGDGGRLVPVPSLSEADKYQPLSLVVKKKRCFLFPRYKFTSTPFTLKDILLGDREISAGISSYQLLNYEDESDVSLYGRRGNHIVNDVGINVAGSDSIAVKASFGIVTKHEVEVSTLLKEITTRKINFDHSLIRQSRSSRKAVLCVVMESIRTTRQCSLSVHAGIRGEAMRFHFMDEQNPKGRDKAIVFPAHTTIAFSVFELFIYLDGAFDRRVMDVISRSQLYLDDLFSDYYDKPLSMTDISLKEGTHIRVNLLNHNIPKGPCILCGMGNFKRETVYGCFQCSVDGQ

SEQ ID NO: 85287 - protein, 121 aa, Homo sapiens
MCIIFFKFDPRPVSKNAYRLILAANRDEFYSRPSKLADFWGNNNEILSGLDMEEGKEGGTWLGISTRGKLAALTNYLQPQLDWQARGRGGPISVFLGEEHMPAAVDTASVPCLQVNLSPTF

SEQ ID NO: 85288 - protein, 120 aa, Homo sapiens
MSEVSCKKRDDYLEWPEYFMAVAFLSAQRSKDPNSQVGACIVNSENKIVGIGYNGMPNGCSDDVLPWRRTAENKLDTKYPYVCHAELNAIMNKNSTDVKGCSMYVALFPCNECAKLIIQA

SEQ ID NO: 85289 - protein, 108 aa, Homo sapiens
MMENSKEEGTSSSEKSKSSGSSRSKRKPSIVTKYVESDDEKPLDDETVNEDASNENSENDITMQSLPKEDGLHGIVSCTACGQQVNHFQKDSIYRHPSLQVLICKNCF

SEQ ID NO: 85290 - protein, 959 aa, Homo sapiens
MDSTLTASEIRQRFIDFFKRNEHTYVHSSATIPLDDPTLLFANAGMNQFKPIFLNTIDPSHPMAKLSRAANTQKCIRAGGKHNDLDDVGKDVYHHTFFEMLGSWSFGDYFKELACKMALELLTQEFGIPIERLYVTYFGGDEAAGLEADLECKQIWQNLGLDDTKILPGNMKDNFWEMGDTGPCGPCSEIHYDRIGGRDAAHLVNQDDPNVLEIWNLVFIQYNREADGILKPLPKKSIDTGMGLERLVSVLQNKMSNYDTDLFVPYFEAIQKGTGARPYTGKVGAEDADGIDMAYRVLADHARTITVALADGGRPDNTGRGYVLRRILRRAVRYAHEKLNASRGFFATLVDVVVQSLGDAFPELKKDPDMVKDIINEEEVQFLKTLSRGRRILDRKIQSLGDSKTIPGDTAWLLYDTYGFPVDLTGLIAEEKGLVVDMDGFEEERKLAQLKSQGKGAGGEDLIMLDIYAIEELRARGLEVTDDSPKYNYHLDSSGSYVFENTVATVMALRREKMFVEEVSTGQECGVVLDKTCFYAEQGGQIYDEGYLKTEFTVKNAQVRGGYVLHIGTIYGDLKVGDQVWLFIDEPRRRPIMSNHTATHILNFALRSVLGEADQKGSLVAPDRLRFDFTAKGAMSTQQIKKAEEIANEMIEAAKAVYTQDCPLAAAKAIQGLRAVFDETYPDPVRVVSIGVPVSELLDDPSGPAGSLTSVEFCGGTHLRNSSHAGAFVIVTEEAIAKGIRRIVAVTGAEAQKALRKAESLKKCLSVMEAKVKAQTAPNKDVQREIADLGEALATAVIPQWQKDELRETLKSLKKVMDDLDRASKADVQKRVLEKTKQFIDSNPNQPLVILEMESGASAKALNEALKLFKMHSPQTSAMLFTVDNEAGKITCLCQVPQNAANRGLKASEWVQQVSGLMDGKGGGKDVSAQATGKNVGCLQEALQLATSFAQLRLGDVKN

SEQ ID NO: 85291 - protein, 54 aa, Homo sapiens
MFESCSGFSGFCASPIEESHGALISSCNSRTMTDIWSQKRMRPKKYFQKMIFLK

SEQ ID NO: 85292 - protein, 118 aa, Homo sapiens
MARCKNADGVELYNEIEFYAKVNSKDSQDKRSSRSITCFVRKWKEKVAWPRLTKEDIKPVWLSVDFDNWRDWEGDEEMELAHVEHYAELLKKVSTKRPPPAMDDLDDDSDSADDATSN

SEQ ID NO: 85293 - protein, 197 aa, Homo sapiens
MEIRQHEWLSASPHEGFEQMRLKSRPKEPSPSLTRVGANFYSSVKQQDYSASVWLRRKDKLEHSQQKCIVIFALVCCFAILVALIFSAVDIMGEDEDGLSEKNCQNKCRIALVENIPEGLNYSENAPFHLSLFQGWMNLLNMAKKSVDIVSSHWDLNHTHPSACQGQRLFEKLLQLTSQNIEIKLVSDVTADSKEPR

SEQ ID NO: 85294 - protein, 176 aa, Homo sapiens
MSKLWRRGSTSGAMEAPEPGEALELSLAGAHGHGVHKKKHKKHKKKHKKKHHQEEDAGPTQPSPAKPQLKLKIKLGGQVLGTKSVPTFTVIPEGPRSPSPLMVVDNEEEPMEGVPLEQYRAWLGGLGGQEEEEEQRWLDALEKGELDDNGDLKKEINERLLTARQRALLQKARSQP

SEQ ID NO: 85295 - protein, 160 aa, Homo sapiens
  MOD_RES (1)..(1): Any amino acid
XLRCAILTTLIHLVQVVENALKVNPILGPQMFQPILPYVFKGIIEGERYPVVMSTYLGVMGRVLLQNTSFFSSLLNEMAHKFNQEMDQLLGNMIEMWVDRMDNITQPERRKLSALALLSLLPSDNSVIQDKFCGIINISVEGLHDVMTEDPETGTYKDWP

SEQ ID NO: 85296 - protein, 49 aa, Homo sapiens
MATGRGRILQQHWLGLQTLRGPSRGGGAARGRARAFGCSLAQGPWPSST

SEQ ID NO: 85297 - protein, 130 aa, Homo sapiens
MTCILVCFPGAPRPSEEAIRRELALDAALGCRIAELCASAQKPPSLNTVFRTLASEDIPDLPPGGGLDCKRGRMGLGSPTPRIWAQPWTWRPDSCCPLGILCFSGASTELKKKTDPFPNYMYQRKEGRPM

SEQ ID NO: 85298 - protein, 65 aa, Homo sapiens
MGNPENIEDAYVAVIRPKNTASLNSREYRAKSYEILLHEVPIEGQKKKRKKVLLETKLQGNSEIT

SEQ ID NO: 85299 - protein, 75 aa, Homo sapiens
MPHIDNDVKLDFKDVLLRPKRSTLKSRSEVDLTRSFSFRNSKQTYSGVPIIAANMDTVGTFEMAKVLFLSLHCCP

SEQ ID NO: 85300 - protein, 35 aa, Homo sapiens
ADEGSGVQGDAGKRGGDGTGREGAAGSLDPSLGVL

SEQ ID NO: 85301 - protein, 561 aa, Homo sapiens
MAQGFAVGFDPLGLGDLSSGSLSSLSSRGHLGSDSGSTATRYLLRKQQRLLNGPPRGIRASSPMGRVILINSPIEANSDESDIIHSVRVEKSPAGRLGFSVRGGSEHGLGIFVSKVEEGSSAERAGLCVGDKITEVNGLSLESTTMGSAVKVLTSSSRLHMMVRRMGRVPGIKFSKEKTTWVDVVNRRLVVEKCGSTPSDTSSEDGVRRIVHLYTTSDDFCLGFNIRGGKEFGLGIYVSKVDHGGLAEENGIKVGDQVLAANGVRFDDISHSQAVEVLKGQTHIMLTIKETGRYPAYKEMVSEYCWLDRLSNGVLQQLSPASESSSSVSSCASSAPYSSGSLPSDRMDICLGQEEPGSRGPGWGRADTAMQTEPDAGGRVETWCSVRPTVILRDTAIRSDGPHPGRRLDSALSESPKTALLLALSRPRPPITRSQSYLTLWEEKQQRKKEKSGSPGEKGALQRSKTLMNLFFKGGRQGRLARDGRREAWTLDSGSLAKTYPRLDIEKVCARGRHRGPGEAPAGHPRQAGEAATAAGHQECGGPHRPGPLRQHGDACGAGGF

SEQ ID NO: 85302 - protein, 73 aa, Homo sapiens
MASRERLFELWMLYCTKKDPDYLKLWLDTFVSSYEQFLDVDFEKLPTRMVQKEANCILHVTTYVLQIFLHIVN

SEQ ID NO: 85303 - protein, 167 aa, Homo sapiens
MVAQQESIREGFQKRCLPVMVLKAKKPFTFETQEGKQEMFHATVATEKEFFFVKVFNTLLKDKFIPKRIIIIARYYRHSGFLEVNSASRVLDAESDQKVNVPLNIIRKAGETPKINTLQTQPLGTIVNGLFVVQKVTEKKKNILFDLSDNTGKMEVLGVRNEDTMKC

SEQ ID NO: 85304 - protein, 717 aa, Homo sapiens
MASNERDAISWYQKKIGAYDQQIWEKSIEQTQIKGLKNKPKKMGHIKPDLIDVDLIRGSTFAKAKPEIPWTSLTRKGLVRVVFFPLFSNWWIQVTSLRIFVWLLLLYFMQVIAIVLYLMMPIVNISEVLGPLCLMLLMGTVHCQIVSTQITRPSGNNGNRRRRIKRVKLISNKGTETDNDPSCVHPIIKRRQCRPEIRMWQTREKAKFSDGEKCRREAFRRLGNGVSDDLSSEEDGEARTQMILLRRSVEGASSDNGCEVKNRKSILSRHLNSQVKKTTTRWCHIVRDSDSLAESEFESAAFSQGSRSGVSGGSRSLNMSRRDSESTRHDSETEDMLWDDLLHGPECRSSVTSDSEGAHVNTLHSGTKRDPKEDVFQQNHLFWLQNSSPSSDRVSAIIWEGNECKKMDMSVLEISGIIMSRVNAYQQGVGYQMLGNVVTIGLAFFPFLHRLFREKSLDQLKSISAEEILTLFCGAPPVTPIIVLSIINFFERLCLTWMFFFMMCVAERTYKQRFLFAKLFSHITSARKARKYEIPHFRLKKVENIKIWLSLRSYLKRRGPQRSVDVVVSSVFLLTLSIAFICCAQVLQGHKTFLNDAYNWEFLIWETALLLFLLRLASLGSETNKKYSNVSILLTEQINLYLKMEKKPNKKEQLTLVNNVLKLSTKLLKELDTPFRLYGLTMNPLIYNITRVVILSAVSGVISDLLGFNIRLWKIKS

SEQ ID NO: 85305 - protein, 290 aa, Homo sapiens
MKLIILEHYSQASEWAAKYIRNRIIQFNPGPEKYFTLGLPTGAFLDGEGAVDKGGESRQQGPGSTPLGCYKKLIEYYKNGDLSFKYVKTFNMDEYVGLPRDHPESYHSFMWNNFFKHIDIHPENTHILDGNAVDLQAECDAFEEKIKAAGGIELFVGGIGPDGHIAFNEPGSSLVSRTRVKTLAMDTILANARFFDGELTKVPTMALTVGVGTVMDAREVMILITGAHKAFALYKAIEEGVNHMWTVSAFQQHPRTVFVCDEDATLELKVKTVKYFKGLMLVHNKLVDPL

SEQ ID NO: 85306 - protein, 106 aa, Homo sapiens
  MOD_RES (1)..(1): Any amino acid
XQPKAAPSVTLFPPSSEELQANKATLVCLVSDFNPGAVTVAWKADGSPVKVGVETTKPSKQSNNKYAASSYLSLTPEQWKSHRSYSCRVTHEGSTVEKTVAPAECS

SEQ ID NO: 85307 - protein, 61 aa, Homo sapiens
MEDLDALLSDLETTTSHMPRSGAPKERPAEPLTPPPSYGHQPQTGSGESSGASGDKDHLYR

SEQ ID NO: 85308 - protein, 37 aa, Homo sapiens
AYRKFTSASDVWSYGIVMWEVMSYGERPYWDMSNQDT

SEQ ID NO: 85309 - protein, 392 aa, Homo sapiens
MCVCLNKEVTCKREKCPVLSRDCALAIKQRGACCEQCKGCTYEGNTYNSSFKWQSPAEPCVLRQCQEGVVTESGVRCVVHCKNPLEHLGMCCPTCPGCVFEGVQYQEGEEFQPEGSKCTKCSCTGGRTQCVREVCPILSCPQHLSHIPPGQCCPKCLGQRKVFDLPFGSCLFRSDVYDNGSSFLYDNCTACTCRDSTVVCKRKCSHPGGCDQGQEGCCEECLLRVPPEDIKVCKFGNKIFQDGEMWSSINCTICACVKGRTECRNKQCIPISSCPQGKILNRKGCCPICTESAGEERRPPDTLLLVDQVGGAGAGREQGQPAAAPHRALERLAHRAPLPRATLPHRPGWLPLESDHQSRFGNILGWRQFCRSHGCAASQGQALWSLWQLQWT

SEQ ID NO: 85310 - protein, 319 aa, Homo sapiens
  MOD_RES (1)..(1): Any amino acid
XRRCPPLLRGLVQRWRYGKVCLRSLLYNSFGGSDTAVDAAFEPVYWLVDNVIRWFGVVFVVLVIVLTGSIVAIAYLCVLPLILRTYSVPRLCWHFFYSHWNLILIVFHYYQAITTPPGYPPQGRNDIATVSICKKCIYPKPARTHHCSICNRCVLKMDHHCPWLNNCVGHYNHRYFFSFCFFMTLGCVYCSYGSWDLFREAYAAIETYHQTPPPTFSFRERMTHKSLVYLWFLCSRGETSIERHINKKERRRLQAKGRVFRNPYNYGCLDNWKVFLGVDTGRHWLTRVLLPSSHLPHGNGMSWEPPPWVTAHSASVMAV

SEQ ID NO: 85311 - protein, 72 aa, Homo sapiens
MALTGASDPSAEAEANGEKPFLLRALQIALVVSLYWVTSISMVFLNKYLLDSPSLRLDTPIFVTFYQCLVTT

SEQ ID NO: 85312 - protein, 41 aa, Homo sapiens
MTTANCGAHDELDFKLVFGEDGAPAPPPPGSRPAAHLHYLH

SEQ ID NO: 85313 - protein, 53 aa, Homo sapiens
DYDKKKLVKAFKKKFACNGTVIEHPEYGEVIQLQGDQRKNICQFLVEVSSVTT

SEQ ID NO: 85314 - protein, 105 aa, Homo sapiens
FLSNLLAQSFILLKPVFHCLNEILDLCHSFCSLVSQNLGPLDERGAAQLSILVKGFSRQSSLLFKILSSVRNHQINSDLAQLLLRLDYNKYYTQAGGTLGRKKPC

SEQ ID NO: 85315 - protein, 121 aa, Homo sapiens
MDLKEKHLGEPPSALGLSTRKALSVLKEQLEAVLEGHLRERKKCLTWKEVWRSSFLHHSNRCSCFHWPGASLMLLAVLLLLGCCGGQPAGSRGVGLVNASALFLLLLLNLVLIGRQDRLKR

SEQ ID NO: 85316 - protein, 62 aa, Homo sapiens
  MOD_RES (1)..(1): Any amino acid
XPLNQESARKSEPPAPVRRQSYSSTSRGISVTKKTHTWQAWYRALPCTALPMSSSLARRDPL

SEQ ID NO: 85317 - protein, 91 aa, Homo sapiens
MSLLGPKVLLFLAAFIITSDWIPLGVNSQRGDDVTQATPETFTEDPNLVNDPATDETVLAVLADIAPSTDDLASLSEKNTTAECWDEKFTC

SEQ ID NO: 85318 - protein, 40 aa, Homo sapiens
MSVMLAKPRLDTEQLAQRGAGLCFTFVSAQQNSPSSTGSG

SEQ ID NO: 85319 - protein, 371 aa, Homo sapiens
MYGYGCNIFPPSPSNLKGECFYGWLEPLLARIAENYTAVVSPDIASIDLNTFEFNKPSPYGSNHNRGNFDWSLSFGWESLPDHEKQRRKDETYPIKTPTFAGGLFSISKEYFEYIGSYDEEMEIWGGENIEMSFRVWQCGGQLEIMPCSVVGHVFRSKSPHSFPKGTQVIARNQVRLAEVWMDEYKEIFYRRNTDAAKIVKQKAFGDLSKRFEIKHRLQCKNFTWYLNNIYPEVYVPDLNPVISGYIKSVGQPLCLDVGENNQGGKPLIMYTCHGLGGNQYFEYSAQHEIRHNIQKELCLHAAQGLVQLKACTYKGHKTVVTGEQIWEIQKDQLLYNPFLKMCLSANGEHPSLVSCNPSDPLQKWILSQND

SEQ ID NO: 85320 - protein, 89 aa, Homo sapiens
MPKIVLNGVTVDFPFQPYKCQQEYMTKVLECLQQKVNGILESPTGTGKTLCLLCTTLAWREHLRDGISARKIAERAQGELFPDRALSSW

SEQ ID NO: 85321 - protein, 90 aa, Homo sapiens
MSGGGTETPVGCEAAPGGGSKKRDSLGTAGSAHLIIKDLGEIHSRLLDHRPVIQGETRYFVKEFECKQLMTQSVDSNRGNRNEKRFIVTT

SEQ ID NO: 85322 - protein, 17 aa, Homo sapiens
  MOD_RES (1)..(1): Any amino acid
XSESSPGEFSVSVKWAN

SEQ ID NO: 85323 - protein, 180 aa, Homo sapiens
  MOD_RES (1)..(1): Any amino acid
XKYFQKQCHECIEHIRKQNWFEAFEEPEDQLYYVKFLSLPEVRQAIHVGNQTFNDGTIVEKYLREDTVQSVKPWLTEIMNNYKVLIYNGQLDIIVAAALTERSLMGMDWKGSQEYKKAEKKVWKIFKSDSEVAGYIRQAGDFHQVIIRGGGHILPYDQPLRAFDMINRFIYGKGWDPYVG

SEQ ID NO: 85324 - protein, 86 aa, Homo sapiens
MGTGPAQTPRSTRAGPEPSPAPPGPGDTGDSDVTQEGSGPAGIRGAPPAWAASAREKISKMRTGTQHSPGRSRPTTVPTTGSSRRR

SEQ ID NO: 85325 - protein, 638 aa, Homo sapiens
  MOD_RES (1)..(1): Any amino acid
XEVTTEIRFADSKRKSVLLDKIKNLQVALTSKQQSLETAMSFVARNTFKRVRNGFLMRKVAVFFSNTPTRASPQLREAVLKLSDAGITPLFLTRQEDRQLINALQINNTAVGHALVLPAGRDLTDFLENVLTCHVCLDICNIDPSCGFGSWRPSFRDRRAAGSDVDIDMAFILDSAETTTLFQFNEMKKYIAYLVRQLDMSPDPKASQHFARVAVVQHAPSESVDNASMPPVKVEFSLTDYGSKEKLVDFLSRGMTQLQGTRALGSAIEYTIENVFESAPNPRDLKIVVLMLTGEVPEQQLEEAQRVILQAKCKGYFFVVLGIGRKVNIKEVYTFASEPNDVFFKLVDKSTELNEEPLMRFGRLLPSFVSSENAFYLSPDIRKQCDWFQGDQPTKNLVKFGHKQVNVPNNVTSSPTSNPVTTTKPVTTTKPVTTTTKPVTTTTKPVTIINQPSVKPAAAKPAPAKPVAAKPVATKMATVRPPVAVKPATAAKPVAAKPAAVRPPAAAAAKPVATKPEVPRPQAAKPAATKPATTKPMEKSQPPPPQPARSASSSTINLMVSTEPLALTETDICKLPKDEGTCRDFILKWYYDPNTKSCARFWYGGCGGNENKFGSQKECEKVCAPVLAKPGVISVMGT

SEQ ID NO: 85326 - protein, 175 aa, Homo sapiens
MSRFVQDGASQFQEVIRQELELSVKKELEKILTTASSHEFEHTKKDLDGFRKLFHRFLQEKGPSVDWGKIQRPPEDSIQPYEKIKARGLPDNISSVLNKLVVVKLNGGLGTSMGCKGPKSLIGVRNENTFLDLTVQQIEHLNKTYNTDVPLVLMNSFNTDEDTKKILQKYNHCRV

SEQ ID NO: 85327 - protein, 142 aa, Homo sapiens
MAIRAQHSNAAQTQTGEANRGWTGQESLSDSDPEMWELLQREKDRQCRGLELIASENFCSRAALEALGSCLNNKYSEGYPGKRYYGGAEVVDEIELLCQRRALEAFDLDPAQWGVNVQPYSGSPANLAVYTALLQPHDRIMG

SEQ ID NO: 85328 - protein, 152 aa, Homo sapiens
MLDDNNHLIQCIMDSQNKGKTSECSQYQQMLHTNLVYLATIADSNQNMQSLLPAPPTQNMPMGPGGMNQSGPPPPPRSHNMPSDGMVGGGPPAPHMQNQMNGQMPGPNHMPMQGPGPNQLNMTNSSMNMPSSSHGSMGGYNHSVPSSQSMPV

SEQ ID NO: 85329 - protein, 76 aa, Homo sapiens
  MOD_RES (1)..(1): Any amino acid
XLKKRAQDAVIILGGGGLLFASYLMATGDERFYAEHLMPTLQGLLDPESAHRLAVRFTSLGLLPRARFQDSDMLAC

SEQ ID NO: 85330 - protein, 2744 aa, Homo sapiens
MSDKMSSFLHIGDICSLYAEGSTNGFISTLGLVDDRCVVQPETGDLNNPPKKFRDCLFKLCPMNRYSAQKQFWKAAKPGANSTTDAVLLNKLHHAADLEKKQNETENRKLLGTVIQYGNVIQLLHLKSNKYLTVNKRLPALLEKNAMRVTLDEAGNEGSWFYIQPFYKLRSIGDSVVIGDKVVLNPVNAGQPLHASSHQLVDNPGCNEVNSVNCNTSWKIVLFMKWSDNKDDILKGGDVVRLFHAEQEKFLTCDEHRKKQHVFLRTTGRQSATSATSSKALWEVEVVQHDPCRGGAGYWNSLFRFKHLATGHYLAAEVDPDQDASRSRLRNAQEKMVYSLVSVPEGNDISSIFELDPTTLRGGDSLVPRNSYVRLRHLCTNTWVHSTNIPIDKEEEKPVMLKIGTSPVKEDKEAFAIVPVSPAEVRDLDFANDASKVLGSIAGKLEKGTITQNERRSVTKLLEDLVYFVTGGTNSGQDVLEVVFSKPNRERQKLMREQNILKQIFKLLQAPFTDCGDGPMLRLEELGDQRHAPFRHICRLCYRVLRHSQQDYRKNQEYIAKQFGFMQKQIGYDVLAEDTITALLHNNRKLLEKHITAAEIDTFVSLVRKNREPRFLDYLSDLCVSMNKSIPVTQELICKAVLNPTNADILIETKLVLSRFEFEGVSSTGENALEAGEDEEEVWLFWRDSNKEIRSKSVRELAQDAKEGQKEDRDVLSYYRYQLNLFARMCLDRQYLAINEISGQLDVDLILRCMSDENLPYDLRASFCRLMLHMHVDRDPQEQVTPVKYARLWSEIPSEIAIDDYDSSGASKDEIKERFAQTMEFVEEYLRDVVCQRFPFSDKEKNKLTFEVVNLARNLIYFGFYNFSDLLRLTKILLAILDCVHVTTIFPISKMAKGEENKGNNDVEKLKSSNVMRSIHGVGELMTQVVLRGGGFLPMTPMAAAPEGNVKQAEPEKEDIMVMDTKLKIIEILQFILNVRLDYRISCLLCIFKREFDESNSQTSETSSGNSSQEGPSNVPGALDFEHIEEQAEGIFGGSEENTPLDLDDHGGRTFLRVLLHLTMHDYPPLVSGALQLLFRHFSQRQEVLQAFKQVQLLVTSQDVDNYKQIKQDLDQLRSIVEKSELWVYKGQGPDETMDGASGENEHKKTEEGNNKPQKHESTSSYNYRVVKEILIRLSKLCVQESASVRKSRKQQQRLLRNMGAHAVVLELLQIPYEKAEDTKMQEIMRLAHEFLQNFCAGNQQNQALLHKHINLFLNPGILEAVTMQHIFMNNFQLCSEINERVVQHFVHCIETHGRNVQYIKFLQTIVKAEGKFIKKCQDMVMAELVNSGEDVLVFYNDRASFQTLIQMMRSERDRMDENSPLMYHIHLVELLAVCTEGKNVYTEIKCNSLLPLDDIVRVVTHEDCIPEVKIAYINFLNHCYVDTEVEMKEIYTSNHMWKLFENFLVDICRACNNTSDRKHADSILEKYVTEIVMSIVTTFFSSPFSDQSTTLQTRQPVFVQLLQGVFRVYHCNWLMPSQKASVESCIRVLSDVAKSRAIAIPVDLDSQVNNLFLKSHSIVQKTAMNWRLSARNAARRDSVLAASRDYRNIIERLQDIVSALEDRLRPLVQAELSVLVDVLHRPELLFPENTDARRKCESGGFICKLIKHTKQLLEENEEKLCIKVLQTLREMMTKDRGYGEKLISIDELDNAELPPAPDSENATEQELEPSPPLRQLEDHKRGEALRQVLVNRYYGNVRPSGRRESLTSFGNGPLSAGGPGKPGGGGGGSGSSSMSRGEMSLAEVQCHLDKEGASNLVIDLIMNASSDRVFHESILLAIALLEGGNTTIQHSFFCRLTEDKKSEKFFKVFYDRMKVAQQEIKATVTVNTSDLGNKKKDDEVDRDAPSRKKAKEPTTQITEEVRDQLLEASAATRKAFTTFRREADPDDHYQPGEGTQATADKAKDDLEMSAVITIMQPILRFLQLLCENHNRDLQNFLRCQNNKTNYNLVCETLQFLDCICGSTTGGLGLLGLYINEKNVALINQTLESLTEYCQGPCHENQNCIATHESNGIDIITALILNDINPLGKKRMDLVLELKNNASKLLLAIMESRHDSENAERILYNMRPKELVEVIKKAYMQGEVEFEDGENGEDGAASPRNVGHNIYILAHQLARHNKELQSMLKPGGQVDGDEALEFYAKHTAQIEIVRLDRTMEQIVFPVPSICEFLTKESKLRIYYTTERDEQGSKINDFFLRSEDLFNEMNWQKKLRAQPVLYWCARNMSFWSSISFNLAVLMNLLVAFFYPFKGVRGGTLEPHWSGLLWTAMLISLAIVIALPKPHGIRALIASTILRLIFSVGLQPTLFLLGAFNVCNKIIFLMSFVGNCGTFTRGYRAMVLDVEFLYHLLYLVICAMGLFVHEFFYSLLLFDLVYREETLLNVIKSVTRNGRSIILTAVLALILVYLFSIVGYLFFKDDFILEVDRLPNETAVPETGESLASEFLFSDVCRVESGENCSSPAPREELVPAEETEQDKEHTCETLLMCIVTVLSHGLRSGGGVGDVLRKPSKEEPLFAARVIYDLLFFFMVIIIVLNLIFGVIIDTFADLRSEKQKKEEILKTTCFICGLERDKFDNKTVTFEEHIKEEHNMWHYLCFIVLVKVKDSTEYTGPESYVAEMIKERNLDWFPRMRAMSLVSSDSEGEQNELRNLQEKLESTMKLVTNLSGQLSELKDQMTEQRKQKQRIGLLGHPPHMNVNPQQPA

SEQ ID NO: 85331 - protein, 151 aa, Homo sapiens
MVGYDPKPDGRNNTKFQVAVAGSVSGLVTRALISPFDVIKIRFQLQHERLSRSDPSAKYHGILQASRQILQEEGPTAFWKGHVPAQILSIGYGAVQFLSFEMLTELVHRGSVYDAREFSVHFVCGGLAACMATLTVHPVDVLRTRFAAQGE

SEQ ID NO: 85332 - protein, 514 aa, Homo sapiens
MRCPKSAVTMRNEELLLSNGTANKMNGALDHSDQPDPDAIKMFVGQIPRSWSEKELKELFEPYGAVYQINVLRDRSQNPPQSKGCCFVTFYTRKAALEAQNALHNIKTLPGMHHPIQMKPADSEKSNAVEDRKLFIGMVSKKCNENDIRVMFSPFGQIEECRILRGPDGLSRGCAFVTFSTRAMAQNAIKAMHQSQTMEGCSSPIVVKFADTQKDKEQRRLQQQLAQQMQQLNTATWGNLTGLGGLTPQYLALLQQATSSSNLGAFSGIQQMAGMNALQLQNLATLAAAAAAAQTSATSTNANPLSTTSSALGALTSPVAASTPNSTAGAAMNSLTSLGTLQGLAGATVGLNNINALAVAQMLSGMAALNGGLGATGLTNGTAGTMDALTQAYSGIQQYAAAALPTLYSQSLLQQQSAAGSQKEGPEGANLFIYHLPQEFGDQDILQMFMPFGNVISAKVFIDKQTNLSKCFGFVSYDNPVSAQAAIQAMNGFQIGMKRLKVQLKRSKNDSKPY

SEQ ID NO: 85333 - protein, 157 aa, Homo sapiens
MSRELAPLLLLLLSIHSALAMRICSFNVRSFGESKQEDKNAMDVIVKVIKRCDIILVMEIKDSNNRICPILMEKLNRNSRRGITYNYVISSRLGRNTYKEQYAFLYKEKLVSVKRSYHYHDYQDGDADVFSREPFVVWFQSPHTAVKDFVIIPLHTT

SEQ ID NO: 85334 - protein, 163 aa, Homo sapiens
MANRGPSYGLSREVQEKIEQKYDADLENKLVDWIILQCAEDIEHPPPGRAHFQKWLMDGTESPAESERLFRGAASPGTERNRPADGQQQGSLPGGHDRVRDAQADHVGRGILPLVERTNVPHHGLYEKEIVSHLLTFSSFSKPSVPGFCKCCISAENPRCLLL

SEQ ID NO: 85335 - protein, 40 aa, Homo sapiens
  MOD_RES (1)..(1): Any amino acid
XLLRKTRESPLVPIGPPQRPPPATRCCIKPAVYPDAQPAW

SEQ ID NO: 85336 - protein, 112 aa, Homo sapiens
  MOD_RES (1)..(1): Any amino acid
XKQAEGGRRHGYMGHLTRIANCIVHSTDKGPNSALVQQLIKDLPDEVRERWETFCTSSLGETNKRNTVDLVTTCHIHSSSDDEIDFKETGFSQDSSLQQKNTPTFIALWLCK

SEQ ID NO: 85337 - protein, 147 aa, Homo sapiens
MGRGLGSADMGDMKTPDFDDLLAAFDIPDIDANEAIHSGPEENEGPGGPGKPEPGVGSESEDTAAASAGDGPGVPAQASDHGLPPPDISVVSVIVKNTVCPEQSEALAGGSAGDGAQAAGVTKEGPVGPHRMQNGFGSPEPSLPGTP

SEQ ID NO: 85338 - protein, 269 aa, Homo sapiens
MDGEDIPDFSSLKEETAYWKELSLKYKQSFQEARDELVEFQEGSRELEAELEAQLVQAEQRNRDLQADNQRLKYEVEALKEKLEHQYAQSYKQVSVLEDDLSQTRAIKEQLHKYVRELEQANDDLERAKRATIVSLEDFEQRLNQAIERNAFLESELDEKESLLVSVQRLKDEARDLRQELAVRERQQEVTRKSAPSSPTLDCEKMDSAVQASLSLPATPVGKGTENTFPSPKAIPNGFGTSPLTPSARISALNIVGDLLRKVGGSKRL

SEQ ID NO: 85339 - protein, 3848 aa, Homo sapiens
MTTMLQKSDSNASFLRAARAGNLDKVVEYLKGGIDINTCNQNGLNALHLAAKEGHVGLVQELLGRGSSVDSATKKGNTALHIASLAGQAEVVKVLVKEGANINAQSQNGFTPLYMAAQENHIDVVKYLLENGANQSTATEDGFTPLAVALQQGHNQAVAILLENDTKGKVRLPALHIAARKDDTKSAALLLQNDHNADVQSKMMVNRTTESGFTPLHIAAHYGNVNVATLLLNRGAAVDFTARNGITPLHVASKRGNTNMVKLLLDRGGQIDAKTRDGLTPLHCAARSGHDQVVELLLERGAPLLARTKNGLSPLHMAAQGDHVECVKHLLQHKAPVDDVTLDYLTALHVAAHCGHYRVTKLLLDKRANPNARALNGFTPLHIACKKNRIKVMELLVKYGASIQAITESGLTPIHVAAFMGHLNIVLLLLQNGASPDVTNIRGETALHMAARAGQVEVVRCLLRNGALVDARAREEQTPLHIASRLGKTEIVQLLLQHMAHPDAATTNGYTPLHISAREGQVDVASVLLEAGAAHSLATKKGFTPLHVAAKYGSLDVAKLLLQRRAAADSAGKNGLTPLHVAAHYDNQKVALLLLEKGASPHATAKNGYTPLHIAAKKNQMQIASTLLNYGAETNIVTKQGVTPLHLASQEGHTDMVTLLLDKGANIHMSTKSGLTSLHLAAQEDKVNVADILTKHGADQDAHTKLGYTPLIVACHYGNVKMVNFLLKQGANVNAKTKNGYTPLHQAAQQGHTHIINVLLQHGAKPNATTANGNTALAIAKRLGYISVVDTLKVVTEEVTTTTTTITEKHKLNVPETMTEVLDVSDEEGDDTMTGDGGEYLRPEDLKELGDDSLPSSQFLDGMNYLRYSLEGGRSDSLRSFSSDRSHTLSHASYLRDSAVMDDSVVIPSHQVSTLAKEAERNSYRLSWGTENLDNVALSSSPIHSGFLVSFMVDARGGAMRGCRHNGLRIIIPPRKCTAPTRVTCRLVKRHRLATMPPMVEGEGLASRLIEVGPSGAQFLGPVIVEIPHFAALRGKERELVVLRSENGDSWKEHFCDYTEDELNEILNGMDEVLDSPEDLEKKRICRIITRDFPQYFAVVSRIKQDSNLIGPEGGVLSSTVVPQVQAVFPEGALTKRIRVGLQAQPMHSELVKKILGNKATFSPIVTLEPRRRKFHKPITMTIPVPKASSDVMLNGFGGDAPTLRLLCSITGGTTPAQWEDITGTTPLTFVNECVSFTTNVSARFWLIDCRQIQESVTFASQVYREIICVPYMAKFVVFAKSHDPIEARLRCFCMTDDKVDKTLEQQENFAEVARSRDVEVLEGKPIYVDCFGNLVPLTKSGQHHIFSFFAFKENRLPLFVKVRDTTQEPCGRLSFMKEPKSTRGLVHQAICNLNITLPIYTKESESDQEQEEEIDMTSEKNDETESTETSVLKSHLVNEVPVLASPDLLSEVSEMKQDLIKMTAILTTDVSDKAGSIKVKELVKAAEEEPGEPFEIVERVKEDLEKVNEILRSGTCTRDESSVQSSRSERGLVEEEWVIVSDEEIEEARQKAPLEITEYPCVEVRIDKEIKGKVEKDSTGLVNYLTDDLNTCVPLPKEQLQTVQDKAGKKCEALAVGRSSEKEGKDIPPDETQSTQKQHKPSLGIKKPVRRKLKEKQKQKEEGLQASAEKAELKKGSSEESLGEDPGLAPEPLPTVKATSPLIEETPIGSIKDKVKALQKRVEDEQKGRSKLPIRVKGKEDVPKKTTHRPHPAASPSLKSERHAPGSPSPKTERHSTLSSSAKTERHPPVSPSSKTEKHSPVSPSAKTERHSPASSSSKTEKHSPVSPSTKTERHSPVSSTKTERHPPVSPSGKTDKRPPVSPSGRTEKHPPVSPGRTEKRLPVSPSGRTDKHQPVSTAGKTEKHLPVSPSGKTEKQPPVSPTSKTERIEETMSVRELMKAFQSGQDPSKHKTGLFEHKSAKQKQPQEKGKVRVEKEKGPILTQREAQKTENQTIKRGQRLPVTGTAESKRGVRVSSIGVKKEDAAGGKEKVLSHKIPEPVQSVPEEESHRESEVPKEKMADEQGDMDLQISPDRKTSTDFSEVIKQELEDNDKYQQFRLSEETEKAQLHLDQVLTSPFNTTFPLDYMKDEFLPALSLQSGALDGSSESLKNEGVAGSPCGSLMEGTPQISSEESYKHEGLAETPETSPESLSFSPKKSEEQTGETKESTKTETTTEIRSEKEHPTTKDITGGSEERGATVTEDSETSTESFQKEATLGSPKDTSPKRQDDCTGSCSVALAKETPTGLTEEAACDEGQRTFGSSAHKTQTDSEVQESTATSDETKALPLPEASVKTDTGTESKPQGVIRSPQGLELALPSRDSEVLSAVADDSLAVSHKDSLEASPVLEDNSSHKTPDSLEPSPLKESPCRDSLESSPVEPKMKAGIFPSHFPLPAAVAKTELLTEVASVRSRLLRDPDGSAEDDSLEQTSLMESSGKSPLSPDTPSSEEVSYEVTPKTTDVSTPKPAVIHECAEEDDSENGEKKRFTPEEEMFKMVTKIKMFDELEQEAKQKRDYKKEPKQEESSSSSDPDADCSVDVDEPKHTGSGEDESGVPVLVTSESRKVSSSSESEPELAQLKKGADSGLLPEPVIRVQPPSPLPSSMDSNSSPEEVQFQPVVSKQYTFKMNEDTQEEPGKSEEEKDSESHLAEDRHAVSTEAEDRSYDKLNRDTDQPKICDGHGCEAMSPSSSAAPVSSGLQSPTGDDVDEQPVIYKESLALQGTHEKDTEGEELDVSRAESPQADCPSESFSSSSSLPHCLVSEGKELDEDISATSSIQKTEVTKTDETFENLPKDCPSQDSSITTQTDRFSMDVPVSDLAENDEIYDPQITSPYENVPSQSFFSSEESKTQTDANHTTSFHSSEVYSVTITSPVEDVVVASSSSGTVLSKESNFEGQDIKMESQQESTLWEMQSDSVSSSFEPTMSATTTVVGEQISKVIITKTDVDSDSWSEIREDDEAFEARVKEEEQKIFGLMVDRQSQGTTPDTTPARTPTEEGTPTSEQNPFLFQEGKLFEMTRSGAIDMTKRSYADESFHFFQIGQESREETLSEDVKEGATGADPLPLETSAESLALSESKETVDDEADLLPDDVSEEVEEIPASDAQLNSQMGISASTETPTKEAVSVGTKDLPTVQTGDIPPLSGVKQISCPDSSEPAVQVQLDFSTLTRSVYSDRGDDSPDSSPEEQKSVIEIPTAPMENVPFTESKSKIPVRTMPTSTPAPPSAEYESSVSEDFLSSVDEENKADEAKPKSKLPVKVPLQRVEQQLSDLDTSVQKTVAPQGQDMASIAPDNRSKSESDASSLDSKTKCPVKTRSYTETETESRERAEELELESEEGATRPKILTSRLPVKSRSTTSSCRGGTSPTKESKEHFFDLYRNSIEFFEEISDEASKLVDRLTQSEREQEIVSDDESSSALEVSVIENLPPVETEHSVPEDIFDTRPIWDESIETLIERIPDENGHDHAEDPQDEQERIEERLAYIADHLGFSWTELARELDFTEEQIHQIRIENPNSLQDQSHALLKYWLERDGKHATDTNLVECLTKINRMDIVHLMETNTEPLQERISHSYAEIEQTITLDHSEGFSVLQEELCTAQHKQKEEQAVSKESETCDHPPIVSEEDISVGYSTFQDGVPKTEGDSSATALFPQTHKEQVQQDFSGKMQDLPEESSLEYQQEYFVTTPGTETSETQKAMIVPSSPSKTPEEVSTPAEEEKLYLQTPTSSERGGSPIIQEPEEPSEHREESSPRKTSLVIVESADNQPETCERLDEDAAFEKGDDMPEIPPETVTEEEYIDEHGHTVVKKDNNE

SEQ ID NO: 85340 - protein, 71 aa, Homo sapiens
MRPAALRGALLGCLCLALLCLGGADKRLRDNHEWKKLIMVQHWPETVCEKIQNDCRDPPDYWTIHGLWQAR

SEQ ID NO: 85341 - protein, 159 aa, Homo sapiens
MAASMFYGRLVAVATLRNHRPRTAQRAAAQVLGSSGLFNNHGLQVQQQQQRNLSLHEYMSMELLQEAGVSVPKGYVAKSPDEAYAIAKKLGTEERNNMCRINCNYEYFWQVLWDQNSQVIRSSKILCARNSPRRLLTSMNTTKILPSWASFLMGKQNNK

SEQ ID NO: 85342 - protein, 143 aa, Homo sapiens
MEPSTCRTMESEEDYVEEKESEKCVKEGVTNPSNSSQQALLKADYKALKNGVPSPIMATKIPKKVIAPVDTGDLEAGRRKRRRKRRSLAINLTNCKYESVRRAAQMCGLKEVGEDEEWTLYWTDCAVSLERVMDMKRTMSACT

SEQ ID NO: 85343 - protein, 152 aa, Homo sapiens
EPLETEGATRSMLSSFLPPVPSLPSDPPEHFPLRKTVSEPNLKLRYKPKKSLERRKNPLLRKESAPPSLRRRPAETLGDSSPSSSSTPASGCSSPNDSEHGPNPILGSEALLGQRLRLQETSVAPFALPTVSLLPAITLGLPAPARALMPRC

SEQ ID NO: 85344 - protein, 255 aa, Homo sapiens
  MOD_RES (1)..(1): Any amino acid
XLSHGSKEKALFLPGGALPSPRIPVLSREGRTRDRQMAAALLTAWSQMPVTFEDVALYLSREEWGRLDHTQQNFYRDVLQKKNGLSLGAVEVGQRVQTSSVAALGNVKPFRTRAGRVQWGVPQCAQEAACGRSSGPAKDSGQPAEPDRTPDAAPPDPSPTEPQEYRVPEKPNEEEKGAPESGEEGLAPDSEVGRKSYRCEQCGKGFSWHSHLVTHRRTHTGEKPYACTDCGKRFGRSSHLIQHQIIHTGEKPYTC

SEQ ID NO: 85345 - protein, 489 aa, Homo sapiens
MHSYNIVKNKVIISWHQQATPGMWATVTSATGEWGMLWVNQEDEVEEGPSDVQNGHLDPNSDCLCLGRPLQNRDQMRANVINEIMSTERHYIKHLKDICEGYLKQCRKRRDMFSDEQLKVIFGNIEDIYRFQMGFVRDLEKQYNNDDPHLSEIGPCFLEHQDGFWIYSEYCNNHLDACMELSKLMKDSRYQHFFEACRLLQQMIDIAIDGFLLTPVQKICKYPLQLAELLKYTAQDHSDYRYVAAALAVMRNVTQQINERKRRLENIDKIAQWQASVLDWEGEDILDRSSELIYTGEMAWIYQPYGRNQQRVFFLFDHQMVLCKKDLIRRDILYYKGRIDMDKYEVVDIEDGRDDDFNVSMKNAFKLHNKETEEIHLFFAKKLEEKIRWLRAFREERKMVQEDEKIGFEISENQKRQAAMTVRKVPKQKGVNSARSVPPSYPPPQDPLNHGQYLVPDGIAQSQVFEFTEPKRSQSPFWQNFSRLTPFKK

SEQ ID NO: 85346 - protein, 58 aa, Homo sapiens
MWNPNAARVSRMPTVGSLPSSIPTACPWNPSCESLGSWHGWTSSDSRQEDAEENEESS

SEQ ID NO: 85347 - protein, 105 aa, Homo sapiens
MYTLLVGKPPFETSCLKETYLRIKKNEYSIPKHINPVAASLIQKMLQTDPTARPTINELLNDEFFTSGYIPARLPITCLTIPPRFSIAPSSLDPSNRKPLTVLNK

SEQ ID NO: 85348 - protein, 303 aa, Homo sapiens [sequence omitted]

SEQ ID NO: 85349 - protein, 315 aa, Homo sapiens
MDVNKFEASVGFLDVKKFLSTWKLQNPRTHFVLSPHCFMGGIMAPKDIMTNTHAKSILNSMNSLRKSNTLCDVTLRVEQKDFPAHRIVLAACSDYFCAMFTSELSEKGKPYVDIQGLTASTMEILLDFVYTETVHVTVENVQELLPAACLLQLKGVKQACCEFLESQLDPSNCLGIRDFAETHNCVDLMQAAEVFSQKHFPEVVQHEEFILLSQGEVEKLIKCDEIQVDSEEPVFEAVINWVKHAKKEREESLPNLLQYVRMPLLTPRYITDVIDAEPFIRCSLQCRDLVDEAKKFHLRPELRSQMQGPRTRARL

SEQ ID NO: 85350 - protein, 71 aa, Homo sapiens
MLLVDELRDAVLLLFANKQDLPNAMAISEMTDKLGLQSLRNRTWYVQATCATQGTGLYEGLDWLSNELSKR

SEQ ID NO: 85351 - protein, 228 aa, Homo sapiens
MMVLQVSAAPRTVALTALLMVLLTSVVQGRATPENYLFQGRQECYAFNGTQRFLERYIYNREELVRFDSDVGEFRAVTELGRPEAEYWNSQKDILEEERAVPDRMCRHNYELGGPMTLQRRGSIQVRWFLNGQEETAGVVSTNLIRNGDWTFQILVMLEMTPQQGDVYTCQVEHTSLDSPVTVEWKAQSDSARSKTLTGAGGFVLGLIICGVGIFMHRRSKKVQRGSA

SEQ ID NO: 85352 - protein, 139 aa, Homo sapiens
MRTHTRGAPSVFFIYLLCFVSAYITDENPEVMIPFTNANYDSHPMLYFSRAEVAELQLRAASSHEHIAARLTEAVHTMLSSPLEYLPPWDPKDYSARWNEIFGNNLGALAMFCVLYPENIEARDMAKDYMERMAAQPSW

SEQ ID NO: 85353 - protein, 43 aa, Homo sapiens
  MOD_RES (1)..(1): Any amino acid
XLPYVEEELSMVILLPDDNTDLAVDTLRSTSFFCDILANIIST

SEQ ID NO: 85354 - protein, 432 aa, Homo sapiens
MNASEFRRRGKEMVDYMANYMEGIEGRQVYPDVEPGYLRPLIPAAAPQEPDTFEDIINDVEKIIMPGVTHWHSPYFFAYFPTASSYPAMLADMLCGAIGCIGFSWAASPACTELETVMMDWLGKMLELPKAFLNEKAGEGGGVIQGSASEATLVALLAARTKVIHRLQAASPELTQAAIMEKLVAYSSDQMVATLGTTTCCSFDNLLEVGPICNKEDIWLHVDAAYAGSAFICPEFRHLLNGVEFADSFNFNPHKWLLVNFDCSAMWVKKRTDLTGAFRLDPTYLKHSHQDSGLITDYRHWQIPLGRRFRSLKMWFVFRMYGVKGLQAYIRKHVQLSHEFESLVRQDPRFEICVEVILGLVCFRLKGSNKVNEALLQRINSAKKIHLVPCHLRDKFVLRFAICSRTVESAHVQRAWEHIKELAADVLRAERE

SEQ ID NO: 85355 - protein, 67 aa, Homo sapiens
MDHTDNELQGTNSSGSLGGLDVRRRIPIKLISKQANKAKPAPRTQRTINRMPAKAPPGDEVLGPKES

SEQ ID NO: 85356 - protein, 83 aa, Homo sapiens
MPQAQKKTTSVSLTIGSSSPKTGVTTAVIQPLSVPVQQVHSPTSYLCRPDGTTTAYFPPVFTKELQNTAVAEGQVVVLECRVR

SEQ ID NO: 85357 - protein, 154 aa, Homo sapiens
MAGSEPRSGTNSPPPPFSDWGRLEAAILSGWKTFWQSVSKERVARTTSREEVDEAASTLTRLPIDVQLYILSFLSPHDLCQLGSTNHYWNETVRDPILWRYFLLRDLPSWSSVDWKSLPDLEILKKPISEVTDGAFFDYMAVRDGVSPCYPGWS

SEQ ID NO: 85358 - protein, 1500 aa, Homo sapiens
QMRQKSKQQAKIEATQKLEQVKNEQQQQQQQQFGSQHLLVQSGSDTPSSGIQSPLTPQPGNGNMSPAQSFHKELFTKQPPSTPTSTSSDDVFVKPQAPPPPPAPSRIPIQDSLSQAQTSQPPSPQVFSPGSSNSRPPSPMDPYAKMVGTPRPPPVGHSFSRRNSAAPVENCTPLSSVSRPLQMNETTANRPSPVRDLCSSSTTNNDPYAKPPDTPRPVMTDQFPKSLGLSRSPVVSEQTAKGPIAAGTSDHFTKPSPRADVFQRQRIPDSYARPLLTPAPLDSGPGPFKTPMQPPPSSQDPYGSVSQASRRLSVDPYERPALTPRPIDNFSHNQSNDPYSQPPLTPHPAVNESFAHPSRAFSQPGTISRPTSQDPYSQPPGTPRPVVDSYSQSSGTARSNTDPYSQPPGTPRPTTVDPYSQQPQTPRPSTQTDLFVTPVTNQRHSDPYAHPPGTPRPGISVPYSQPPATPRPRISEGFTRSSMTRPVLMPNQDPFLQAAQNRGPALPGPLVRPPDTCSQTPRPPGPGLSDTFSRVSPSAARDPYDQSPMTPRSQSDSFGTSQTAHDVADQPRPGSEGSFCASSNSPMHSQGQQFSGVSQLPGPVPTSGVTDTQNTVNMAQADTEKLRQRQKLREIILQQQQQKKIAGRQEKGSQDSPAVPHPGPLQHWQPENVNQAFTRPPPPYPGNIRSPVAPPLGPRYAVFPKDQRGPYPPDVASMGMRPHGFRFGFPGGSHGTMPSQERFLVPPQQIQGSGVSPQLRRSVSVDMPRPLNNSQMNNPVGLPQHFSPQSLPVQQHNILGQAYIELRHRAPDGRQRLPFSAPPGSVVEASSNLRHGNFIPRPDFPGPRHTDPMRRPPQGLPNQLPVHPDLEQVPPSQQEQGHSVHSSSMVMRTLNHPLGGEFSEAPLSTSVPSETTSDNLQITTQPSDGLEEKLDSDDPSVKELDVKDLEGVEVKDLDDEDLENLNLDTEDGKVVELDTLDNLETNDPNLDDLLRSGEFDIIAYTDPELDMGDKKSMFNEELDLPIDDKLDNQCVSVEPKKKEQENKTLVLSDKHSPQKKSTVTNEVKTEVLSPNSKVESKCETEKNDENKDNVDTPCSQASAHSDLNDGEKTSLHPCDPDLFEKRTNRETAGPSANVIQASTQLPAQDVINSCGITGSTPVLSSLLANEKSDNSDIRPSGSPPPPTLPASPSNHVSSLPPFIAPPGRVLDNAMNSNVTVVSRVNHVFSQGVQVNPGLIPGQSTVNHSLGTGKPATQTGPQTSQSGTSSMSGPQQLMIPQTLAQQNRERPLLLEEQPLLLQDLLDQERQEQQQQRQMQAMIRQRSEPFFPNIDFDAITDPIMKAKMVALKGINKVMAQNNLGMPPMVMSRFPFMGQVVTGTQNSEGQNLGPQAIPQDGSITHQISRPNPPNFGPGFVKTRKAFLAMIHSVSSMKSGSRRPNSCFKCSRSILKNKLVLTENLRRPFQLNNVLPRKLGVNFQRKMQNNSSMLLNSKAWFRNS

SEQ ID NO: 85359 - protein, 1846 aa, Homo sapiens
MTTMLQKSDSNASFLRAARAGNLDKVVEYLKGGIDINTCNQNGLNALHLAAKEGHVGLVQELLGRGSSVDSATKKGNTALHIASLAGQAEVVKVLVKEGANINAQSQNGFTPLYMAAQENHIDVVKYLLENGANQSTATEDGFTPLAVALQQGHNQAVAILLENDTKGKVRLPALHIAARKDDTKSAALLLQNDHNADVQSKMMVNRTTESGFTPLHIAAHYGNVNVATLLLNRGAAVDFTARNGITPLHVASKRGNTNMVKLLLDRGGQIDAKTRDGLTPLHCAARSGHDQVVELLLERGAPLLARTKNGLSPLHMAAQGDHVECVKHLLQHKAPVDDVTLDYLTALHVAAHCGHYRVTKLLLDKRANPNARALNGFTPLHIACKKNRIKVMELLVKYGASIQAITESGLTPIHVAAFMGHLNIVLLLLQNGASPDVTNIRGETALHMAARAGQVEVVRCLLRNGALVDARAREEQTPLHIASRLGKTEIVQLLLQHMAHPDAATTNGYTPLHISAREGQVDVASVLLEAGAAHSLATKKGFTPLHVAAKYGSLDVAKLLLQRRAAADSAGKNGYTPLHIAAKKNQMQIASTLLNYGAETNIVTKQGVTPLHLASQEGHTDMVTLLLDKGANIHMSTKSGLTSLHLAAQEDKVNVADILTKHGADQDAHTKLGYTPLIVACHYGNVKMVNFLLKQGANVNAKTKNGYTPLHQAAQQGHTHIINVLLQHGAKPNATTANGNTALAIAKRLGYISVVDTLKVVTEEVTTTTTTITEKHKLNVPETMTEVLDVSDEEGDDTMTGDGGEYLRPEDLKELGDDSLPSSQFLDGMNYLRYSLEGGRSDSLRSFSSDRSHTLSHASYLRDSAVMDDSVVIPSHQVSTLAKEAERNSYRLSWGTENLDNVALSSSPIHSGFLVSFMVDARGGAMRGCRHNGLRIIIPPRKCTAPTRVTCRLVKRHRLATMPPMVEGEGLASRLIEVGPSGAQFLGPVIVEIPHFAALRGKERELVVLRSENGDSWKEHFCDYTEDELNEILNGMDEVLDSPEDLEKKRICRIITRDFPQYFAVVSRIKQDSNLIGPEGGVLSSTVVPQVQAVFPEGALTKRIRVGLQAQPMHSELVKKILGNKATFSPIVTLEPRRRKFHKPITMTIPVPKASSDVMLNGFGGDAPTLRLLCSITGGTTPAQWEDITGTTPLTFVNECVSFTTNVSARFWLIDCRQIQESVTFASQVYREIICVPYMAKFVVFAKSHDPIEARLRCFCMTDDKVDKTLEQQENFAEVARSRDVEVLEGKPIYVDCFGNLVPLTKSGQHHIFSFFAFKENRLPLFVKVRDTTQEPCGRLSFMKEPKSTRGLVHQAICNLNITLPIYTKESESDQEQEEEIDMTSEKNPQDEQERIEERLAYIADHLGFSWTELARELDFTEEQIHQIRIENPNSLQDQSHALLKYWLERDGKHATDTNLVECLTKINRMDIVHLMETNTEPLQERISHSYAEIEQTITLDHSEGFSVLQEELCTAQHKQKEEQAVSKESETCDHPPIVSEEDISVGYSTFQDGVPKTEGDSSATALFPQTHKEQVQQDFSGKMQDLPEESSLEYQQEYFVTTPGTETSETQKAMIVPSSPSKTPEEVSTPAEEEKLYLQTPTSSERGGSPIIQEPEEPSEHREESSPRKTSLVIVESADNQPETCERLDEDAAFEKGDDMPEIPPETVTEEEYIDEHGHTVVKKVTRKIIRRYVSSEGTEKEEIMVQGMPQEPVNIEEGDGYSKVIKRVVLKSDTEQSEVTLCEPSILSSTSQFQAEPVEGRRVSKVVKTTVVLGERMEKHLGDSSLATDLPSAKDDFEEDNNE

SEQ ID NO: 85360 - protein, 91 aa, Homo sapiens
MRFTFNERSNPDDDSMGIQIVKDLHRTGCSSYCGQEAEQDRVVLKRVLLAYARWNKTVGYCQGFNILAALILEVMEGNEGDALKIMIYLID

SEQ ID NO: 85361 - protein, 856 aa, Homo sapiens
  MOD_RES (1)..(1): Any amino acid
XCTNEALVDEIMMTLKQAFTVAAVQQTAKAPAQLCEGCPLQSLHKLCERIEGMNSSKTKLELQKHLTTLTNQEQATIFEEVQKLRPRNEQRENELIISFLRCLYEEKQKEHIHIGEMKQTSQMAAENIGSELPPSATRFRLDMLKNKAKRSLTESLESILSRGNKARGLQEHSISVDLDSSLSSTLSNTSKEPSVCEKEALPISESSFKLLGSSEDLSSDSESHLPEEPAPLSPQQAFRRRANTLSHFPIECQEPPQPARGSPGVSQRKLMRYHSVSTETPHERNISYRNALRKKLHSSSSVPNFLKFLAPVDENNTSDFMNTKRDFESKANHLGDSGGTPVKTRRHSWRQQIFLRVATPQKACDSSSRYEDYSELGELPPRSPLEPVCEDGPFGPPPEEKKRTSRELRELWQKAILQQILLLRMEKENQKLQASENDLLNKRLKLDYEEITPCLKEVTTVWEKMLSTPGRSKIKFDMEKMHSAVGQGVPRHHRGEIWKFLAEQFHLKHQFPSKQQPKDVPYKELLKQLTSQQHAILIDLGRTFPTHPYFSAQLGAGQLSLYNILKAYSLLDQEVGYCQGLSFVAGILLLHMSEEEAFKMLKFLMFDMGLRKQYRPDMIILQIQMYQLSRLLHDYHRDLYNHLEEHEIGPSLYAAPWFLTMFASQFPLGFVARVFDMIFLQGTEVIFKVALSLLGSHKPLILQHENLETIVDFIKSTLPNLGLVQMEKTINQVFEMDIAKQLQAYEVEYHVLQEELIDSSPLSDNQRMDKLEKTNSSLRKQNLDLLEQLQVANGRIQSLEATIEKLLSSESKLKQAMLTLELERSALLQTVEELRRRSAEPSDREPECTQPEPTGD

SEQ ID NO: 85362 - protein, 154 aa, Homo sapiens
MTMTANKNSSITHGAGGTKAPRGTLSRSQSVSPPPVLSPPRSPIYPLSDSETSACRYPSHSSSRVLLKDRHPPAPSPQNPQDPSPDTSPPTCPFKTASFGYLDRSPSACKRDAQKESVQGAAQDVAGVAACLPLAQSTPFPGPAAGPRGVLLTR

SEQ ID NO: 85363 - protein, 112 aa, Homo sapiens
MTTAILERLSTLSVSGQQLRRLPKILEDGLPKMPCTVPETDVPQLFREPYIRTGYRPTGHEWRYYFFSLFQKHNEVVNVWTHLLAALAVLLRFWAFAEAEALPWASTHSLPL

SEQ ID NO: 85364 - protein, 87 aa, Homo sapiens
  MOD_RES (1)..(1): Any amino acid
XCGGAGEVEAQDSDPAPAFSKAPGSAGHYELPWVEKYRPVKLNEIVGNEDTVSRLEVFAREGNVPNIIIAHDRRSPASLEENHGNLL

SEQ ID NO: 85365 - protein, 49 aa, Homo sapiens
MLETFRNLTSLGKRWKDQNIEYEHQNPRRNFRSLIEEKVNEIKDDSHCG

SEQ ID NO: 85366 - protein, 674 aa, Homo sapiens
MAQALLVPPGPESFRLFTRESLAAIEKRAAEEKAKKPKKEQDNDDENKPKPNSDLEAGKNLPFIYGDIPPEMVSEPLEDLDPYYINKKTFIVMNKGKAIFRFSATSALYILTPLNPVRKIAIKILVHSLFSMLIMCTILTNCVFMTLSNPPDWTKNVEYTFTGIYTFESLIKILARGFCLEDFTFLRDPWNWLDFSVIVMAYVTEFVDLGNVSALRTFRVLRALKTISVIPGLKTIVGALIQSVKKLSDVMILTVFCLSVFALIGLQLFMGNLRNKCLQWPPSDSAFETNTTSYFNGTMDSNGTFVNVTMSTFNWKDYIGDDSHFYVLDGQKDPLLCGNGSDAGQCPEGYICVKAGRNPNYGYTSFDTFSWAFLSLFRLMTQDYWENLYQLTLRAAGKTYMIFFVLVIFLGSFYLVNLILAVVAMAYEEQNQATLEEAEQKEAEFQQMLEQLKKQQEEAQAVAAASAASRDFSGIGGLGELLESSSEASKLSSKSAKEWRNRRKKRRQREHLEGNNKGERDSFPKSESEDSVKRSSFLFSMDGNRLTSDKKFCSPHQSLLSIRGSLFSPRRNSKTSIFSFRGRAKDVGSENDFADDEHSTFEDSESRRDSLFVPHRHGERRNSNVSQARHHHRNGSQKEKVKLLPDFNGDAGGFLWKAKSREHSQHSDQHNGRT

SEQ ID NO: 85367 - protein, 26 aa, Homo sapiens
MTLAESYAQYVHNLCNSLSIKVEERY

SEQ ID NO: 85368 - protein, 95 aa, Homo sapiens
MDEADRRLLRRCRLRLVEELQVDQLWDALLSRELFRPHMIEDIQRAGSGSRRDQARQLIIDLETRGSQALPLFISCLEDTGQDMLASFLRTNRCS

SEQ ID NO: 85369 - protein, 156 aa, Homo sapiens
MGPDYRVLVHRARKLAQQYYLVYQEPIPTAQLVQRVASVMQEYTQSGGVRPFGVSLLICGWNEGRPYLFQSDPSGAYFAWKATAMGKNYVNGKTFLEKRYNEDLELEDAIHTAILTLKESFEGQMTEDNIEVGICNEAGFRRLTPTEVKDYLAAIA

SEQ ID NO: 85370 - protein, 158 aa, Homo sapiens
MRSTTLLALLALVLLYLVSGALVFRALEQPHEQQAQRELGEVREKFLRAHPCVSDQELGLLIKEVADALGGGADPETNSTSNSSHSAWDLGSAFFFSGTIITTIGYGNVALRTDAGRLFCIFYALVGIPLFGILLAGVGDRLGSSLRHGIGHIEAIFL

SEQ ID NO: 85371 - protein, 213 aa, Homo sapiens
MAHCVTLVQLSISCDHLIDKDIGSKSDPLCVLLQDVGGGSWAELGRTERVRNCSSPEFSKTLQLEYRFETVQKLRFGIYDIDNKTPELRDDDFLGGAECSLGQIVSSQVLTLPLMLKPGKPAGRGTITDFLGKSDPFLEFFRQGDGKWHLVYRSEVIKNNLNPTWKRFSVPVQHFCGGNPSTPIQVQCSDYDSDGSHDLIGTFHTSLAQLQAV

SEQ ID NO: 85372 - protein, 107 aa, Homo sapiens
MAGQGLPLHVATLLTGLLECLGFAGVLFGWPSLVFVFKNEDYFKDLCGPDAGPIGNATGQADCKAQDERFSLIFTLGSFMNNFMTFPTGYIFDRFKTTVARLIAIFF

SEQ ID NO: 85373 - protein, 58 aa, Homo sapiens
MENMHLRRVRTMPRHSQSLTMAPYSSVSLVEQLEDRILCHEKTTAALVEHAFRIKDDI

SEQ ID NO: 85374 - protein, 140 aa, Homo sapiens
MEERGDSEPTPGCSGLGPGGVRGFGDGGGAPSWAPEDAWMGTHPKYLEMMELDIGDATQVYVAFLVYLDLMESKSWHEVNCVGLPELQLICLVGTEIEGEGLQTVVPTPITASLSHNSLVSCDLFSSFLVLSSVTSHLIE

SEQ ID NO: 85375 - protein, 35 aa, Homo sapiens
MVNPTVFFDIAVDGEPLGRVSFELFADKVPKTAGW

SEQ ID NO: 85376 - protein, 108 aa, Homo sapiens
MRQRLLPSVTSLLLVALLFPGSSQARHVNHSATEALGELRERAPGQGTNGFQLLRHAVKRDLLPPRTPPYQGDVPLGIRNTICRMQQGICRLFFCHSGTGQQHRQRCG

SEQ ID NO: 85377 - protein, 427 aa, Homo sapiens
MLLMVVSMACVGFFLVQRAGPHVGGQDKPFLSAWPSAVVPRGGHVTLRCHYHHRFNNFMLYKEDRIHVPIFHGRLFQESFNMSPVTTAHAGNYTCRGSHPHSPTGWSAPSNPVVIMVTGNHRKPSLLAHPGPLVKSGERVILQCWSDIMFEHFFLHKEGISKDPSRLVGQIHDGVSKANFSIGPMMLALAGTYRCYGSVTHTPYQLSAPSDPLDIVVTGPYEKPSLSAQPGPKVQAGESVTLSCSSRSSYDMYHLSREGGAHERRLPAVRKVNRTFQADFPLGPATHGGTYRCFGSFRHSPYEWSDPSDPLLVSVTGNPRHLHILIGTSVVIILFILLLFFLLHLWCSNKKNAAVMDQEPAGNRTANSEDSDEQDPEEVTYAQLDHCVFTQRKITRPSQRPKTPPTDTILYTELPNAKPRSKVVSCP

SEQ ID NO: 85378 - protein, 229 aa, Homo sapiens
IIKKWSIPCPLTLNYVEKGFQSAYALPTMAFSFLCHTSILPIYCELQSPSKKRMQNVTNTAIALSFLIYFISALFGYLTFYDKVESELLKGYSKYLSHDVVVMTVKLCILFAVLLTVPLIHFPARKAVTMMFFSNFPFSWIRHFLITLALNIIIVLLAIYVPDIRNVFGVVGASTSTCLIFIFPGLFYLKLSREDFLSWKKLGAFVLLIFGILVGNFSLALIIFDWINK

SEQ ID NO: 85379 - protein, 81 aa, Homo sapiens
NNDILSSCEIKTGYNKTVQIPITSENSTVGLSNTGSKLSWYSAHKGTTPSPETASTSRLKRDSVFWRFCPGCQKLVLLAVG

SEQ ID NO: 85380 - protein, 548 aa, Homo sapiens
MIAAPEIPTDFNLLQESETHFSSDTDFEDIEGKNQKQGKGKTCKKGKKGPAEKGKGGNGGGKPPSGPNRMNGHHQQNGVENMMLFEVVKMGKSAMQSVVDDWIESYKHDRDIALLDLINFFIQCSGCKGVVTAEMFRHMQNSEIIRKMTEEFDEDSGDYPLTMAGPQWKKFKSSFCEFIGVLVRQCQYSIIYDEYMMDTVISLLTGLSDSQVRAFRHTSTLAAMKLMTALVNVALNLSINMDNTQRQYEAERNKMIGKRANERLELLLQKRKELQENQDEIENMMNAIFKGVFVHRYRDAIAEIRAICIEEIGIWMKMYSDAFLNDSYLKYVGWTMHDKQGEVRLKCLTALQGLYYNKELNSKLELFTSRFKDRIVSMTLDKEYDVAVQAIKLLTLVLQSSEEVLTAEDCENVYHLVYSAHRPVAVAAGEFLYKKLFSRRDPEEDGMMKRRGRQGPNANLVKTLVFFFLESELHEHAAYLVDSMWDCATELLKDWECMNSLLLEEPLSGEEALTDRQESALIEIMLCTIRQAAECHPPVGRGTGKRVL

SEQ ID NO: 85381 - protein, 97 aa, Homo sapiens
CNLCESSIGLGKQGLSCNLCKYTVHDQCAMKALPCEVSTYAKSRKDIGPLPPLGPAQTLPDKELPFSPRSNHMCGCEEAVSPGAATAVRKRSGSTTV

SEQ ID NO: 85382 - protein, 216 aa, Homo sapiens
  MOD_RES (1)..(1): Any amino acid
XQEKLTGMWWKQLVAGAVAGAVSRTGTAPLDRLKVFMQVHASKTNRLNILGGLRSMVLEGGIRSLWRGNGINVLKIAPESAIKFMAYEQTLKNWWLQQYSHDSADPGILVLLACGTISSTCGQIASYPLALVRTRMQAQGFHHVAQAHLELVGSRNSPAFSLPTCWDYSRWSCHEQPYGEDHVVRNSANSHVTELGRGSCCPGQHLTAILSVEFPG

SEQ ID NO: 85383 - protein, 195 aa, Homo sapiens
MSSIKHLVYAVIRFLREQSQMDTYTSDEQESLEVAIQCLETVFKISPEDTHLAVSQPLTEMFTSSFCKNDVLPLSNSVPEDVGKADQLKDEGNNHMKEENYAAAVDCYTQAIELDPNNAVYYCNRAAAQSKLGHYTDAIKDCEKAIAIDSKYSKAYGRMGLALTALNKFEEAVTSYQKALDLDPENDSYKSNLKI

SEQ ID NO: 85384 - protein, 163 aa, Homo sapiens
MADVAGPSRPSAAAFWSRDFSDEEQSVVYVPGISAEGNVRSRHKLMSPKADVKLKTSRVTDASISMESLKGTGDSVDEQNSCRGEIKSASLKDLCLEDKRRIANLIKELARVSEEKEVTEERLKAEQESFEKKIRQLEEQNELIIKEREDILLKVLFFNVQEV

SEQ ID NO: 85385 - protein, 99 aa, Homo sapiens
MRMLGQNPTPEELQEMIDEVDEDGSGTVDFDEFLVMMVRCMKDDSKGKSEEELSDLFRMFDKNADGYIDLDELKIMLQATGETITEDDIEELMKDGDKN

SEQ ID NO: 85386 - protein, 977 aa, Homo sapiens
MLEVSIPTPHRYVRGKSNLMDAISFVLGEKTSNLRVKTLRDLIHGAPVGKPAANRAFVSMVYSEEGAEDRTFARVIVGGSSEYKINNKVVQLHEYSEELEKLGILIKARNFLVFQVKKYHRLKEEASKRAATLAQELEKFNRDQKADQDRLDLEERKKVETEAKIKQKLREIEENQKRIEKLEEYITTSKQSLEEQKKLEGELTEEVEMAKRRIDEINKELNQVMEQLGDARIDRQESSRQQRKAEIMESIKRLYPGSVYGRLIDLCQPTQKKYQIAVTKVLGKNMDAIIVDSEKTGRDCIQYIKEQRGEPETFLPLDYLEVKPTDEKLRELKGAKLVIDVIRYEPPHIKKALQYACGNALVCDNVEDARRIAFGGHQRHKTVALDGTLFQKSGVISGGASDLKAKARRWDEKAVDKLKEKKERLTEELKEQMKAKRKEAELRQVQSQAHGLQMRLKYSQSDLEQTKTRHLALNLQEKSKLESELANFGPRINDIKRIIQSREREMKDLKEKMNQVEDEVFEEFCREIGVRNIREFEEEKVKRQNEIAKKRLEFENQKTRLGIQLDFEKNQLKEDQDKVHMWEQTVKKDENEIEKLKKEEQRHMKIIDETMAQLQDLKNQHLAKKSEVNDKNHEMEEIRKKLGGANKEMTHLQKEVTAIETKLEQKRSDRHNLLQACKMQDIKLPLSKGTMDDISQEEGSSQGEDSVSGSQRISSIYAREALIEIDYGDLCEDLKDAQAEEEIKQEMNTLQQKLNEQQSVLQRIAAPNMKAMEKLESVRDKFQETSDEFEAARKRAKKAKQAFEQIKKERFDRFNACFESVATNIDEIYKALSRNSSAQAFLGPENPEEPYLDGINYNCVAPGKRFRPMDNLSGGEKTVAALALLFAIHSYKPAPFFVLDEIDAALDNTNIGKVANYIKEQSTCNFQAIVISLKEEFYTKAESLIGVYPEQGDCVISKVLTFDLTKYPDANPNPNEQ

SEQ ID NO: 85387 - protein, 162 aa, Homo sapiens
  MOD_RES (1)..(1): Any amino acid
XGRENRMPILISKIFPGLAADQSRALRLGDAILSVNGTDLRQATHDQAVQALKRAGKEVLLEVKFIREVTPYIKKPSLVSDLPWEGAAPQSPSFSGSEDSGSPKHQNSTKDRKIIPLKMCFAARNLSMPDLENRLIELHSPDSRNTLILRCKDTATAHSWQN

SEQ ID NO: 85388 - protein, 135 aa, Homo sapiens
PHIKLGDIVEIAHPNDEYSPLLLQVKSLKEDLQKETISVDQTVTQVFRLRPYQDVYVNVVDPKVSTCAYITQKVEFAGIRAQAGELWVKNEKVMCGYISEDTRVVFRSTSAMVYIFIQMSCEMWDFDIYGTVSMC

SEQ ID NO: 85389 - protein, 423 aa, Homo sapiens
MAALRALCGFRGVAAQVLRPGAGVRLPIQPSRGVRQWQPDVEWAQQFGGAVMYPSKETAHWKPPPWNDVDPPKDTIVKNITLNFGPQHPAAHGVLRLVMELSGEMVRKCDPHIGLLHRGTEKLIEYKTYLQALPYFDRLDYVSMMCNEQAYSLAVEKLLNIRPPPRAQWIRVLFGEITRLLNHIMAVTTHALDLGAMTPFFWLFEEREKMFEFYERVSGARMHAAYIRPGGVHQDLPLGLMDDIYQFSKNFSLRLDELEELLTNNRIWRNRTIDIGVVTAEEALNYGFSGVMLRGSGIQWDLRKTQPYDVYDQVEFDVPVGSRGDCYDRYLCRVEEMRQSLRIIAQCLNKMPPGEIKVDDAKVSPPKRAEMKTEFYSYCPDWSAISANCNLRLPGSSNSSASASQVAEITGVCHYAQLIFCIQ

SEQ ID NO: 85390 - protein, 280 aa, Homo sapiens
ASEEVSKSLQAMKEILCGTNEKEPPTEAVAQLAQELYSSGLLVTLIADLQLIDFEGKKDVTQIFNNILRRQIGTRSPTVEYISAHPHILFMLLKGYEAPQIALRCGIMLRECIRHEPLAKIILFSNQFRDFFKYVELSTFDIASDAFATFKIFEDYEKLLQSENYVTKRQSLKLLGELILDRHNFAIMTKYISKPENLKLMMNLLRDKSPNIQFEAFHVFKVFVASPHKTQPIVEILLKNQPKLIEFLSSFQKERTDDEQFADEKNYLIKQIRDLKKTAP

SEQ ID NO: 85391 - protein, 185 aa, Homo sapiens
MQTDEEIGKVAAAVPVIISRALELFLESLLKKACQVTQSRNAKTMTTSHLKQCIELEQQFDFLKDLVASVPDMQGDGEDNHMDGDKGARRGRKPGSGGRKNGGMGTKSKDKKLSGTDSEQEDESEDTDTDGEEETSQPPPQASHPSAHFQSPPTPFLPFASTLPLPPAPPGPSAPDEEDEEDYDS

SEQ ID NO: 85392 - protein, 69 aa, Homo sapiens
  MOD_RES (1)..(1): Any amino acid
XEKEVEAEFLRLSLGFKCDWFTLEKRVKLEERSRDLAEENLKKEITNCLKLLEAEKESYRKLSNRKYQF

SEQ ID NO: 85393 - protein, 54 aa, Homo sapiens
MAEDKTKPSELDQGKYDADDNVKIICLGDSAVGKSKLMERFLMDGFHSSCPRTP

SEQ ID NO: 85394 - protein, 222 aa, Homo sapiens
  MOD_RES (1)..(1): Any amino acid
XPCGPPSRALALSCAWTWFCLLDNLSGVRLLRQDPIECLFSFICSSNNNIARITGMVERLCQAFGPRLIQLDDVTYHGFPSLQALAGPEVEAHLRKLGLGYRARYVSASARAILEEQGGLAWLQQLRESSYEEAHKALCILPGVGTKVADCICLMALDKPQAVPVDVHMWHIAQRDYSWHPTTSQAKGPSPQTNKELGNFFRSLWGPYAGWAQAVSVPRCPP

SEQ ID NO: 85395 - protein, 84 aa, Homo sapiens
MAFNFGAPSGTSGTAAATAAPAGFGGLETANSTASGFNFGGFGLTANPAVNFNIGNFGVSTTSATPFNFGNSLASADLLLLKHF

SEQ ID NO: 85396 - protein, 139 aa, Homo sapiens
MSGEENPASKPTPVQDVQGDGRWMSLHHRFVADSKDKEPEVVFIGDSLVQLMHQCEIWRELFSPLHALNFGIGGDGTQHVLWRLENGELEHIRPKIVVVWVGTNNHGHTAEQVTGGIKAIVQLGLLPRGQHPNPLREKN

SEQ ID NO: 85397 - protein, 151 aa, Homo sapiens
MKTKLNIYNMQFLLFVFLVWDPARLVLANIQEDEAKNNITIFTRILDRLLDGYDNRLRPGLGDSITEVFTNIYVTSFGPVSDTDMEYTIDVFFRQKWKDERLKFKGPMNILRLNNLMASKIWTPDTFFHNGKKSVAHNMTMPNKLLRIQDD

SEQ ID NO: 85398 - protein, 202 aa, Homo sapiens
MPFTLHLRSRLPSAIRSLILQKKPNIRNTSSMAGELRPASLVVLPRSLAPAFERFCQVNTGPLPLLGQSEPEKWMLPPQGAISETRMGHPQFWKYEFGACTGSLASLEQYSEQLKDMVAFFLGCSFSLEEALEKAGLPRRDPAGHSQAGAYKTTVPCVTHAGFCCPLVVTMRPIPKDKLEGLVRACCSLGGEQGQPVHMGDP

SEQ ID NO: 85399 - protein, 112 aa, Homo sapiens
  MOD_RES (1)..(1): Any amino acid
XINDIAFKPDGTQLILAAGSRLLVYDTSDGTLLQPLKGHKDTVYCVAYAKDGKRFASGSADKSVIIWTSKLEGILKYTVLLCCPGWSAVARSRLTASSTSQVHAILLPQPPE

SEQ ID NO: 85400 - protein, 210 aa, Homo sapiens
MGQIEWAMWANEQALASGLILITGGIVATAGRFTQWYFGAYSIVAGVFVCLLEYPRGKRKKGSTMERWGQKYMTAVVKLFGPFTRNYYVRAVLHLLLSVPAGFLLATILGTACLAIASGIYLLSQVPPARRGNCPPLAVRLLVCVRGKGAALSVYAFRVWKWSSVSSLTDLPPAELSFRTPSCCQVLIWAVALFSGGHPHPPRLPAATHS

SEQ ID NO: 85401 - protein, 35 aa, Homo sapiens
MPASWTSPQKSSALAPEDHGSSYEAGVLWCNHGSL

SEQ ID NO: 85402 - protein, 194 aa, Homo sapiens
MPRLKCSGAVIAHCSLELLASSDPSASASQGARTTVSDLQEEGKNAINSPMSPALVDVHPEDTQLEENEERTMIDPTSKEDPKFKELVKVLLDWINDVLVEERIIVKQLEEDLYDGQVLQKLLEKLAGCKLNVAEVTQSEIGQKQKLQTVLEAVHDLLRPRGWALRWSVDSIHGKNLVAILHLLVSLAMHFRAP

SEQ ID NO: 85403 - protein, 90 aa, Homo sapiens
MKGKLARSTKEIPDEISILLLGVAHFKGQWVTKFDSRKTSLEDFYLDEERTVRVPMMSDPKAVLRYGLDSDLSCKIAQLPLTGSMSIIFF

SEQ ID NO: 85404 - protein, 971 aa, Homo sapiens
MAESSDKLYRVEYAKSGRASCKKCSESIPKDSLRMAIMVQSPMFDGKVPHWYHFSCFWKVGHSIRHPDVEVDGFSELRWDDQQKVKKTAEAGGVTGKGQDGIGSKAEKTLGDFAAEYAKSNRSTCKGCMEKIEKGQVRLSKKMVDPEKPQLGMIDRWYHPGCFVKNREELGFRPEYSASQLKGFSLLATEDKEALKKQLPGVKSEGKRKGDEVDGVDEVAKKKSKKEKDKDSKLEKALKAQNDLIWNIKDELKKVCSTNDLKELLIFNKQQVPSGESAILDRVADGMVFGALLPCEECSGQLVFKSDAYYCTGDVTAWTKCMVKTQTPNRKEWVTPKEFREISYLKKLKVKKQDRIFPPETSASVAATPPPSTASAPAAVNSSASADKPLSNMKILTLGKLSRNKDEVKAMIEKLGGKLTGTANKASLCISTKKEVEKMNKKMEEVKEANIRVVSEDFLQDVSASTKSLQELFLAHILSPWGAEVKAEPVEVVAPRGKSGAALSKKSKGQVKEEGINKSEKRMKLTLKGGAAVDPDSGLEHSAHVLEKGGKVFSATLGLVDIVKGTNSYYKLQLLEDDKENRYWIFRSWGRVGTVIGSNKLEQMPSKEDAIEHFMKLYEEKTGNAWHSKNFTKYPKKFYPLEIDYGQIDLQKMPLGKLSKRQIQAAYSILSEVQQAVSQGSSDSQILDLSNRFYTLIPHDFGMKKPPLLNNADSVQAKVEMLDNLLDIEVAYSLLRGGSDDSSKDPIDVNYEKLKTDIKVVDRDSEEAEIIRKYVKNTHATTHNAYDLEVIDIFKIEREGECQRYKPFKQLHNRRLLWHGSRTTNFAGILSQGLRIAPPEAPVTGYMFGKGIYFADMVSKSANYCHTSQGDPIGLILLGEVALGNMYELKHASHISKLPKGKHSVKGLGKTTPDPSANISLDGVDVPLGTGISSGVNDTSLLYNEYIVYDIAQVNLKYLLKLKFNFKTSLW

SEQ ID NO: 85405 - protein, 93 aa, Homo sapiens
NKKKKKTDFIPYRDSVLTWLLRENLAQVSIADRSRPADGWAPLREEESVFLHLRRGLGRSRLLQAHPGGNSRTAMVAALSPADINYDETLSTL

SEQ ID NO: 85406 - protein, 39 aa, Homo sapiens
MPGKLLWGDIMELEAPLEESESQKKERQKGCYEDLNKIS

SEQ ID NO: 85407 - protein, 1060 aa, Homo sapiens
MLFEVGEGGGAGEEGKGRGRPGRSLCTHAAPARTAHLAPSALRSARPFLWEDNLLTRSQGLPDNHDQLVPDNLEAWALAGPRGLFPKRTLVIWKRIGAGLVVTVALLPRMDGRWQCSCWAWFLLVLAVVAGDTVSTGSTDNSPTSNSLEGGTDATAFWWGEWTKWTACSRSCGGGVTSQERHCLQQRRKSVPGPGNRTCTGTSKRYQLCRVQECPPDGRSFREEQCVSFNSHVYNGRTHQWKPLYPDDYVHISSKPCDLHCTTVDGQRQLMVPARDGTSCKLTDLRGVCVSGKCEPIGCDGVLFSTHTLDKCGICQGDGSSCTHVTGNYRKGNAHLGYSLVTHIPAGARDIQIVERKKSADVLALADEAGYYFFNGNYKVDSPKNFNIAGTVVKYRRPMDVYETGIEYIVAQGPTNQGLNVMVWNQNGKSPSITFEYTLLQPPHESRPQPIYYGFSESAESQGLDGAGLMGFVPHNGSLYGQASSERLGLDNRLFGHPGLDMELGPSQGQETNEVCEQAGGGACEGPPRGKGFRDRNVTGTPLTGDKDDEEVDTHFASQEFFSANAISDQLLGAGSDLKDFTLNETVNSIFAQGAPRSSLAESFFVDYEENEGAGPYLLNGSYLELSSDRVANSSSEAPFPNVSTSLLTSAGNRTHKARTRPKARKQGVSPADMYRWKLSSHEPCSATCTTGVMSAYAMCVRYDGVEVDDSYCDALTRPEPVHEFCAGRECQPRWETSSWSECSRTCGEGYQFRVVRCWKMLSPGFDSSVYSDLCEAAEAVRPEERKTCRNPACGPQWEMSEWSECTAKCGERSVVTRDIRCSEDEKLCDPNTRPVGEKNCTGPPCDRQWTVSDWGPCSGSCGQGRTIRHVYCKTSDGRVVPESQCQMETKPLAIHPCGDKNCPAHWLAQDWERCNTTCGRGVKKRLVLCMELANGKPQTRSGPECGLAKKPPEESTCFERPCFKWYTSPWSECTKTCGVGVRMRDVKCYQGTDIVRGCDPLVKPVGRQACDLQPCPTEPPDDSCQDQPGTNCALAIKVNLCGHWYYSKACCRSCRPPHS

SEQ ID NO: 85408 - protein, 138 aa, Homo sapiens
MSAQSVEEDSILIIPTPDEEEKILRVKLEEDPDGEEGSSIPWNHLPDPEIFRQRFRQFGYQDSPGPREAVSQLRELCRLWLRPETHTKEQILELVVLEQFVAILPKELQTWVRDHHPENGEEAVTVLEDLESELDDPG

SEQ ID NO: 85409 - protein, 208 aa, Homo sapiens
HNVNSNELLNMVWNSEEIQQQIWIPSVFIGERSSEYLRALFVYEKGARVLLVPDNTFPLGYYLIPFTGIVGLLVLAMGAVMIARCIQHRKRLQRNRLTKEQLKQIPTHDYQKGDQYDVCAICLDEYEDGDKLRVLPCAHGEALTACPCPSATSSHQVLHLVPLCSLPQPLRGPLAHSDPEDLPHLQAACSSGSWGRRPRGRNSRARGG

SEQ ID NO: 85410 - protein, 49 aa, Homo sapiens
MFPEPPTPGPPSPDTPPDSSRISHGPGAARSRGAGASTIRARAAGGRQA

SEQ ID NO: 85411 - protein, 505 aa, Homo sapiens
MYLWLKLLAFGFAFLDTEVFVTGQSPTPSPTGVSSVQTPHLPTHADSQTPSAGTDTQTFSGSAANAKLNPTPGSNAISDVPGERSTASTFPTDPVSPLTTTLSLAHHSSAALPARTSNTTITANTSDAYLNASETTTLSPSGSAVISTTTIATTPSKPTCDEKYANITVDYLYNKETKLFTAKLNVNENVECGNNTCTNNEVHNLTECKNASVSISHNSCTAPDKTLILDVPPGVEKFQLHDCTQVEKADTTICLKWKNIETFTCDTQNITYRFQCGNMIFDNKEIKLENLEPEHEYKCDSEILYNNHKFTNASKIIKTDFGSPGEPQIIFCRSEAAHQGVITWNPPQRSFHNFTLCYIKETEKDCLNLDKNLIKYDLQNLKPYTKYVLSLHAYIIAKVQRNGSAAMCHFTTKSAPPSQVWNMTVSMTSDNSMHVKCRPPRDRNGPHERYHLEVEAGNTLVRNESHKNCDFRVKDLQYSTDYTFKAYFHNGDYPGEPFILHHSTS

SEQ ID NO: 85412 - protein, 41 aa, Homo sapiens
MQAKKRYFILLSAGSCLALLFYFGGCLRPCDAQQWMGVAIL

SEQ ID NO: 85413 - protein, 167 aa, Homo sapiens
MDRVLLRWISLFWLTAMVEGLQVTVPDKKKVAMLFQPTVLRCHFSTSSHQPAVVQWKFKSYCQDRMGESLGMSSTRAQSLSKRNLEWDPYLDCLDSRRTVRVVASKQGSTVTLGDFYRGREITIVHDADLQIGKLMWGDSGLYYCIITTPDDLEGKNEDSVELLVLE

SEQ ID NO: 85414 - protein, 118 aa, Homo sapiens
MWQLWASLCCLLVLANARSRPSFHPLSDELVNYVNKRNTTWQAGHNFYNVDMSYLKRLCGTFLGGPKPPQRVMFTEDLKLPASFDAREQWPQCPTIKEIRDQGSCGSCWLARQKLCPH

SEQ ID NO: 85415 - protein, 155 aa, Homo sapiens
IDHLFISNLPEIVVELLMTLHEPANSSASQSTDLCDFSGDLDPAPNPPHFPSHVIKATFAYISNCHKTKLKSILEILSKSPDSYQKILLAICEQAAETNNVYKKHRILKIYHLFVSLLLKDIKSGLGGAWAFVLRDVIYTLIHYINQRKLTIFSQ

SEQ ID NO: 85416 - protein, 77 aa, Homo sapiens
  MOD_RES (1)..(1): Any amino acid
XSVATASGPLLVEVAKTPGASLGVALTTSMCCNKQVIVIDKIKSASIADSENSEERQATYLGFLGQQPQQPSHQPSL

SEQ ID NO: 85417 - protein, 49 aa, Homo sapiens
VCVLERQIFDFLGYQWAPILANFVHIIIVILGLFGTIQYRPRYITGYHV

SEQ ID NO: 85418 - protein, 796 aa, Homo sapiens
MVPGSEGPARAGSVVADVVFVIEGTANLGPYFEGLRKHYLLPAIEYFNGGPPAETDFGGDYGGTQYSLVVFNTVDCAPESYVQCHAPTSSAYEFVTWLDGIKFMGGGGESCSLIAEGLSTALQLFDDFKKMREQIGQTHRVCLLICNSPPYLLPAVESTTYSGCTTENLVQQIGERGIHFSIVSPRKLPALRLLFEKAAPPALLEPLQPPTDVSQDPRHMVLVRGLVLPVGGGSAPGPLQSKQPVPLPPAAPSGATLSAAPQQPLPPVPPQYQVPGNLSAAQVAAQNAVEAAKNQKAGLGPRFSPITPLQQAAPGVGPPFSQAPAPQLPPGPPGAPKPPPASQPSLVSTVAPGSGLAPTAQPGAPSMAGTVAPGGVSGPSPAQLGAPALGGQQSVSNKLLAWSGVLEWQEKPKPASVDANTKLTRSLPCQVYVNHGENLKTEQWPQKLIMQLIPQQLLTTLGPLFRNSRMVQFHFTNKDLESLKGLYRIMGNGFAGCVHFPHTAPCEVRVLMLLYSSKKKIFMGLIPYDQSGFVNGIRQVITNHKQVQQQKLEQQQRGMGGQQAPPGLGPILEDQARPSQNLLQLRPPQPQPQGTVGASGATGQPQPQGTAQPPPGAPQGPPGAASGPPPPGPILRPQNPGANPQLRSLLLNPPPPQTGVPPPQASLHHLQPPGAPALLPPPHQGLGQPQLGPPLLHPPPAQSWPAQLPPRAPLPAAKRKREGEGRVFREKWERAYFFVEVKSMPMCLICKQIVSVLKEYNLKRHYESKHSKSYDQYTEQTRDAILNELKKGLKCQ

SEQ ID NO: 85419 - protein, 137 aa, Homo sapiens
  MOD_RES (1)..(1): Any amino acid
XDVTFQPWHKEMLQQLLVMLSSTVATRPQKAACPHQESQSHGPPKESRPSIQLPRTGSLLPQLSDITPYQPGDLGLVPRQVHIPPNPQDLRLLSYITRVGTFRAHSSPERPVGPNAEERKRRATLQWGRGAKKGPRN

SEQ ID NO: 85420 - protein, 2101 aa, Homo sapiens
METESESSTLGDDSVFWLESEVIIQVTDCEEEEREEKFRKMKSSVHSEEDDFVPELHRNVHPRERPDWEETLSAMARGADVPEIPGDLTLKTCGSTASMKVKHVKKSTTPGLMGCDNIHRLPFTKGHFPKMAECAHFHYENVEFGSIQLSLSEEQNEVMKNGCESKELVYLVQIACQGKSWIVKRSYEDFRVLDKHLHLCIYDRRFSQLSELPRSDTLKDSPESVTQMLMAYLSRLSAIAGNKINCGPALTWMEIDNKGNHLLVHEESSINTPAVGAAHVIKRYTARAPDELTLEVGDIVSVIDMPPKVLSTWWRGKHGFQVGLFPGHCVELINQKVPQSVTNSVPKPVSKKHGKLITFLRTFMKSRPTKQKLKQRGILKERVFGCDLGEHLLNSGFEVPQVLQSCTAFIERYGIVDGIYRLSGVASNIQRLRHEFDSEHVPDLTKEPYVQDIHSVGSLCKLYFRELPNPLLTYQLYEKFSDAVSAATDEERLIKIHDVIQQLPPPHYRTLEFLMRHLSLLADYCSITNMHAKNLAIVWAPNLLRSKQIESACFSGTAAFMEVRIQSVVVEFILNHVDVLFSGRISMAMQEGAASLSRPKSLLVSSPSTKLLTLEEAQARTQAQVNSPIVTENKYIEVGEGPAALQGKFHTIIEFPLERKRPQNKMKKSPVGSWRSFFNLGKSSSVSKRKLQRNESEPSEMKAMALKGGRAEGTLRSAKSEESLTSLHAVDGDSKLFRPRRPRSSSDALSASFNGEMLGNRCNSYDNLPHDNESEEEGGLLHIPALMSPHSAEDVDLSPPDIGVASLDFDPMSFQCSPPKAESECLESGASFLDSPGYSKDKPSANKKDAETGSSQCQTPGSTASSEPVSPLQEKLSPFFTLDLSPTEDKSSKPSSFTEKVVYAFSPKIGRKLSKSPSMSISEPISVTLPPRVSEVIGTVSNTTAQNASSSTWDKCVEERDATNRSPTQIVKMKTNETVAQEAYESEVQPLDQVAAEEVELPGKEDQSVSSSQSKAVASGQTQTGAVTHDPPQDSVPVSSVSLIPPPPPPKNVARMLALALAESAQQASTQSLKRPGTSQAGYTNYGDIAVATTEDNLSSSYSAVALDKAYFQTDRPAEQFHLQNNAPGNCDHPLPETTATGDPTHSNTTESGEQHHQVDLTGNQPHQAYLSGDPEKARITSVPLDSEKSDDHVSFPEDQSGKNSMPTVSFLDQDQSPPRFYSGDQPPSYLGASVDKLHHPLEFADKSPTPPNLPSDKIYPPSGSPEENTSTATMTYMTTTPATAQMSTKEASWDVAEQPTTADFAAATLQRTHRTNRPLPPPPSQRSAEQPPVVGQVQAATNIGLNNSHKVQGVVPVPERPPEPRAMDDPASAFISDSGAAAAQCPMATAVQPGLPEKVRDGARVPLLHLRAESVPAHPCGFPAPLPPTRMMESKMIAAIHSSSADATSSSNYHSFVTASSTSVDDALPLPLPVPQPKHASQKTVYSSFARPDVTTEPFGPDNCLHFNMTPNCQYRPQSVPPHHNKLEQHQVYGARSEPPASMGLRYNTYVAPGRNASGHHSKPCSRVEYVSSLSSSVRNTCYPEDIPPYPTIRRVQSLHAPPSSMIRSVPISRTEVPPDDEPAYCPRPLYQYKPYQSSQARSDYHVTQLQPYFENGRVHYRYSPYSSSSSSYYSPDGALCDVDAYGTVQLRPLHRLPNRDFAFYNPRLQGKSLYSYAGLAPRPRANVTGYFSPNDHNVVSMPPAADVKHTYTSWDLEDMEKYRMQSIRRESRARQKVKGPVMSQYDNMTPAVQDDLGGIYVIHLRSKSDPGKTGLLSVAEGKESRHAAKAISPEGEDRFYRRHPEAEMDRAHHHGGHGSTQPEKPSLPQKQSSLRSRKLPDMGCSLPEHRAHQEASHRQFCESKNGPPYPQGAGQLDYGSKGIPDTSEPVSYHNSGVKYAASGQESLRLNHKEVRLSKEMERPWVRQPSAPEKHSRDCYKEEEHLTQSIVPPPKPERSHSLKLHHTQNVERDPSVLYQYQPHGKRQSSVTVVSQYDNLEDYHSLPQHQRGVFGGGGMGTYVPPGFPHPQSRTYATALGQGAFLPAELSLQHPETQIHAE

SEQ ID NO: 85421 - protein, 387 aa, Homo sapiens
MATATPVPPRMGSRAGGPTTPLSPTRLSRLQEKEELRELNDRLAVYIDKVRSLETENSALQLQVTEREEVRGRELTGLKALYETELADARRALDDTARERAKLQIELGKCKAEHDQLLLNYAKKESDLNGAQIKLREYEAALNSKDAALATALGDKKSLEGDLEDLKDQIAQLEASLAAAKKQLADETLLKVDLENRCQSLTEDLEFRKSMYEEEINETRRKHETRLVEVDSGRQIEYEYKLAQALHEMREQHDAQVRLYKEELEQTYHAKLENARLSSEMNTSTVNSAREELMESRMRIESLSSQLSNLQKESRACLERIQELEDLLAKEKDNSRRMLTDKEREMAEIRDQMQQQLNDYEQLLDVKLALDMEISAYRKLLEGEEER

SEQ ID NO: 85422 - protein, 25 aa, Homo sapiens
MLDIFILMFFAIIGLVILSYIIYLL

SEQ ID NO: 85423 - protein, 83 aa, Homo sapiens
MSFSATILFSPPSGSEARCCCCACKSETNGGNTGSQGGNPPPSTPITVTGHGLAVQSSEQLLHVIYQRVDKAVGLAEAALGLA

SEQ ID NO: 85424 - protein, 60 aa, Homo sapiens
MMTSVSSDHCRGAREKPQISAAQSTQPQKQVVQATAEQMRLAQVIFDKNDSDFEAKVKQH

SEQ ID NO: 85425 - protein, 264 aa, Homo sapiens
MILANVFCLFFFLDETLRSLASPSSLQGPELHGWRPPVDCVRANELCAAESNCSSRYRTLRQCLAGRDRNTMLANKECQAALEVLQESPLYDCRCKRGMKKELQCLQIYWSIHLGLTEGEEFYEASPYEPVTSRLSDIFRLASIFSGTGADPVVSAKSNHCLDAAKACNLNDNCKKLRSSYISICNREISPTERCNRRKCHKALRQFFDRVPSEYTYRMLFCSCQDQACAERRRQTILPSCSYEDKEKPNCLDLRGVCRTDHLC

SEQ ID NO: 85426 - protein, 25 aa, Homo sapiens
MAEQVLPQALYLSNMRKAVKIRERT

SEQ ID NO: 85427 - protein, 171 aa, Homo sapiens
  MOD_RES (1)..(1): Any amino acid
XLEGESFALSFSSASDAEFDAVVGYLEDIIMDDEFQLLQRNFMDKYYLEFEDTEENKLIYTPIFNEYISLVEKYIEEQLLQRIPEFNMAAFTTTLQHHKDEVAGDIFDMLLTFTDFLAFKEMFLDYRALPRTICGTRSYLQPMNGIILDVTSPIGSAHDDRTHLGKTDSVM

SEQ ID NO: 85428 - protein, 38 aa, Homo sapiens
RGVGKEASKALGAKGSCETTPSRGSTPTLTPRKKNKYR

SEQ ID NO: 85429 - protein, 65 aa, Homo sapiens
MTERFDCHHCNESLFGKKYILREESPYCVVCFETLFANTCEECGKPIGCDCKVPAAGLCGSPALP

SEQ ID NO: 85430 - protein, 75 aa, Homo sapiens
  MOD_RES (1)..(1): Any amino acid
XPSGILVYRAHRIIESCQEAFILRLFRQKNKRGFIKAFTDNAVAFDTGFCHVERVMRNLFVRKLYLWPRLLYWTF

SEQ ID NO: 85431 - protein, 86 aa, Homo sapiens; identical to SEQ ID NO: 56815

SEQ ID NO: 85432 - protein, 70 aa, Homo sapiens
MPADVNLSQKPQVLGPEKQDGSCEASVSFEDVTVDFSREEWQQLDPAQRCLYRDVMLELYSHLFAVGEHN

SEQ ID NO: 85433 - protein, 260 aa, Homo sapiens
  MOD_RES (1)..(1): Any amino acid
XPAGAPALRARRAGPGLSRTGRRLRHWPLPGEAVPPMARPARAVPASPRGQPPVAVSSEPLHAGAPGAAKPELTLEQPQGDSMMTCEQAQLLANLARLIQAKKALDLGTFTGYSALALALALPADGRVVTCEVDAQPPELGRPLWRQAEAEHKIDLRLKPALETLDELLAAGEAGTFDVAVVDADKENCSAYYERCLQLLRPGGILAVLRVLWRGKVLQPPKGDVAAECVRNLNERIRRDVRVYISLLPLGDGLTLAFKI

SEQ ID NO: 85434 - protein, 151 aa, Homo sapiens
MVAGAGRENGMETPMHENPEWEKARQALASISKSGAAGGSAKSSSNGPVASAQYVSQAEASALQQQQYYQWYQQYNYAYPYSYYYPMPPVPGMDESMSYQAPPQQLPSAQPPQPSNPPHGAHTLNSGPQPGTAPATQHSQAGPATGQAYGP

SEQ ID NO: 85435 - protein, 142 aa, Homo sapiens
MLKVTVPSCSASSCSSVTASAAPGTASLVPDYWIDGSNRDALSDFFEVESELGRGATSIVYRCKQKGTQKPYALKVLKKTVDKKIVRTEIGVLLRLSHPNIIKLKEIFETPTEISLVLELVTGGELFDRIVEKGYYSERDAA

SEQ ID NO: 85436 - protein, 124 aa, Homo sapiens; identical to SEQ ID NO: 43774
  MOD_RES (1)..(1): Any amino acid

SEQ ID NO: 85437 - protein, 191 aa, Homo sapiens
MSRERGSRSEEPGAGNRESGSREPGLAAAAMSTVDLARVGACILKHAVTGEAVELRSLWREHACVVAGLRRFGCVVCRWIAQDLSSLAGLLDQHGVRLVGVGPEALGLQEFLDGDYFAGELYLDESKQLYKELGFKRYNSLSILPAALGKPVRDVAAKSPGDYVPKEHILQVLGISAEVCASDPPQCDREV

SEQ ID NO: 85438 - protein, 41 aa, Homo sapiens
MILNKALMLGALALTTVMSPCGGEDIVGSISDSLLLYRDGQ

SEQ ID NO: 85439 - protein, 50 aa, Homo sapiens
MSGGGPSGGGPGGSGRARTSSFAEPGGGGGGGSGGPGAGTSFPPPGVKLG

SEQ ID NO: 85440 - protein, 161 aa, Homo sapiens
  MOD_RES (1)..(1): Any amino acid
XDSGNPPKSNISILRVKVCQCDSNGDCTDVDRIVGAGLGTGAIIAILLCIIILLILVLMFVVWMKRRDKERQAKQLLIDPEDDVRDNILKYDEEGGGEEDQDYDLSQLQQPDTVEPDAIKPVGIRRMDERPIHAEPQYPVRSAAPHPGDIGDFINEVVQEA

SEQ ID NO: 85441 - protein, 173 aa, Homo sapiens
LMKKLQETNYDVMLIDPVIPCGDLMAELLAVPFVLTLRISVGGNMERSCGKLPAPLSYVPVPMTGLTDRMTFLERVKNSMLSVLFHFWIQDYDYHFWEEFYSKALGRPTTLCETVGKAEIWLIRTYWDFEFPQPYQPNFEFVGGLHCKPAKALPKESYTRKPSSLKPWHLYLK

SEQ ID NO: 85442 - protein, 20 aa, Homo sapiens
EHHSGSDAQHGRWIQFRKIS

SEQ ID NO: 85443 - protein, 63 aa, Homo sapiens
MTCTDQKSHSQRALGTQTPALQGPQLLNTDPSSEETHPPTLILTDFATWSQQTISGMQGTSKQ

SEQ ID NO: 85444 - protein, 90 aa, Homo sapiens
  MOD_RES (1)..(1): Any amino acid
XAKKAEAFQLYQEAAQLDMLLEKLPQVAEEISGPLTSANKITLVSSGSGTMGAAKVTGEVLDILTRLPESVERLTGVSISQVNHKPLRTA

SEQ ID NO: 85445 - protein, 75 aa, Homo sapiens
  MOD_RES (1)..(1): Any amino acid
XYYEGLQDKLAQIRDARGALSALREEHREKLRRAAEEAERQRQIQLAQKLEIMRQKKQTVQMRAQMPAFPLPYAQ

SEQ ID NO: 85446 - protein, 96 aa, Homo sapiens
EMAIFKIAALQKVVDNSVSLSELELANKQYNELTAKYRDILQKDNMLVQRTSNLEHLECENISLKEQVESINKELEITKEKLHTIEQAWEQETKLD

SEQ ID NO: 85447 - protein, 61 aa, Homo sapiens
MSYGEIEEFCLVRIVMALCSALMTIFTIKMGTGIMLINLVMPMTGTRTEQNKLSIREDLQL

SEQ ID NO: 85448 - protein, 68 aa, Homo sapiens
MKMKQDEMDCAHFLMGAGMCWCPVQSGCWQNGESPVPAPFTECFLCAWHHCSGLYMDLLISFSLQPRA

SEQ ID NO: 85449 - protein, 235 aa, Homo sapiens
MSQNMGCYFLFLSWFPYSHPSFSTQVSGQEDFSHQLYQRKLQAPLWPSSLGITDCCQYVTSCHPKRSERRKYGRDFLLRFRFCSIACQRPVGLVLMEGVTDTKPERPAGWAESVLEEDASELEPAFSRTVGTIQHCLHLTSVYTHFLPQRGRPEVTTMPLGLGMTVDYIFFSAESCENGNRTDHRLYRDGTLKLLGRLSLLSEEILWAANGLPNPFCSSDHLCLLASFGMEVTAP

SEQ ID NO: 85450 - protein, 75 aa, Homo sapiens
MASDDFDIVIEAMLEAPYKKEEDEQQRKEVKKDYPSNTTSSTSNSGNETSGSSTIGETSKKKRSRSHNKSRDRKR

SEQ ID NO: 85451 - protein, 181 aa, Homo sapiens
  MOD_RES (1)..(1): Any amino acid
XRKFVGAANYREKIHSTLTPCGTFLFAGSEDGIVYVWNPETGEQVAMYSDLPFKSPIRDISYHPFENMVAFCAFGQNEPILLYIYDFHVAQQEAEMFKRYNGTFPLPGIHQSQDALCTCPKLPHQGSFQIDEFVHTESSSTKMQLVKQRLETVTLESHSVAQAGVQWRNLGSLQPPPPRFK

SEQ ID NO: 85452 - protein, 78 aa, Homo sapiens
MEPEINCSELCDSFPGQELDRRPLHDLCKTTITSSHHSSKTISSLSPVLLGIVWTFLSCGLLLILFFLAFTIHCRKNS

SEQ ID NO: 85453 - protein, 93 aa, Homo sapiens
MFCSGRKWVAEATICTKLMKREKRRMGKRRAKKAKREEKKKGGERRRNEKRGNQMKRMCERKKYETVLCFEKFRSTDNTSAVMRLSLYSRTDL

SEQ ID NO: 85454 - protein, 113 aa, Homo sapiens
  MOD_RES (1)..(1): Any amino acid
XKRAIIERSNTRSSLAEVQSEIERIFELARSLQLVVLDADTINHPAQLIKTSLAPIIVHVKVSSPKVLQRLIKSRGKSQSKHLNVQLVAADKLAQCPPSANEAQQPLHRELSN

SEQ ID NO: 85455 - protein, 1499 aa, Homo sapiens
MTPACPLLLSVILSLRLATAFDPAPSACSALASGVLYGAFSLQDLFPTIASGCSWTLENPDPTKYSLYLRFNRQEQVCAHFAPRLLPLDHYLVNFTCLRPSPEEAVAQAESEVGRPEEEEAEAAAGLELCSGSGPFTFLHFDKNFVQLCLSAEPSEAPRLLAPAALAFRFVEVLLINNNNSSQFTCGVLCRWSEECGRAAGRACGFAQPGCSCPGEAGAGSTTTTSPGPPAAHTLSNALVPGGPAPPAEADLHSGSSNDLFTTEMRYGEEPEEEPKVKTQWPRSADEPGLYMAQTVHGVWEEWGSWSLCSRSCGRGSRSRMRTCVPPQHGGKACEGPELQTKLCSMAACPVEGQWLEWGPWGPCSTSCANGTQQRSRKCSVAGPAWATCTGALTDTRECSNLECPATDSKWGPWNAWSLCSKTCDTGWQRRFRMCQATGTQGYPCEGTGEEVKPCSEKRCPAFHEMCRDEYVMLMTWKKAAAGEIIYNKCPPNASGSASRRCLLSAQGVAYWGLPSFARCISHEYRYLYLSLREHLAKGQRMLAGEGMSQVVRSLQELLARRTYYSGDLLFSVDILRNVTDTFKRATYVPSADDVQRFFQVVSFMVDAENKEKWDDAQQVSPGSVHLLRVVEDFIHLVGDALKAFQSSLIVTDNLVISIQREPVSAVSSDITFPMRGRRGMKDWVRHSEDRLFLPKEVLSLSSPGKPATSGAAGSPGRGRGPGTVPPGPGHSHQRLLPADPDESSYFVIGAVLYRTLGLILPPPRPPLAVTSRVMTVTVRPPTQPPAEPLITVELSYIINGTTDPHCASWDYSRADASSGDWDTENCQTLETQAAHTRCQCQHLSTFAVLAQPPKDLTLELAGSPSVPLVIGCAVSCMALLTLLAIYAAFWRFIKSERSIILLNFCLSILASNILILVGQSRVLSKGVCTMTAAFLHFFFLSSFCWVLTEAWQSYLAVIGRMRTRLVRKRFLCLGWGLPALVVAVSVGFTRTKGYGTSSYCWLSLEGGLLYAFVGPAAVIVLVNMLIGIIVFNKLMARDGISDKSKKQRAGSERCPWASLLLPCSACGAVPSPLLSSASARNAMASLWSSCVVLPLLALTWMSAVLAMTDRRSVLFQALFAVFNSAQGFVITAVHCFLRREVQDVVKCQMGVCRADESEDSPDSCKNGQLQILSDFEKDVDLACQTVLFKEVNTCNPSTITGTLSRLSLDEDEEPKSCLVGPEGSLSFSPLPGNILVPMAASPGLGEPPPPQEANPVYMCGEGGLRQLDLTWLRPTEPGSEGDYMVLPRRTLSLQPGGGGGGGEDAPRARPEGTPRRAAKTVAHTEGYPSFLSVDHSGLGLGPAYGSLQNPYGMTFQPPPPTPSARQVPEPGERSRTMPRTVPGSTMKMGSLERKKLRYSDLDFEKVMHTRKRHSELYHELNQKFHTFDRYRSQSTAKDKPSPGERPSLSQHRRHQSWSTFKSMTLGSLPPKPRERLTLHRAAAWEPTEPPDGDFQTEV

SEQ ID NO: 85456 - protein, 111 aa, Homo sapiens
AEQQALRLEVRAGPDSAGIALYSHEDVCVFKCSVSRETECSRVGKQSFIITLGCNSVLIQFATPNDFCSFYNILKTCRGHTLERSVFSERTEESSAVQYFQMRKLRLREVK

SEQ ID NO: 85457 - protein, 36 aa, Homo sapiens
  MOD_RES (1)..(1): Any amino acid
XGRGGQTVKSLRIQEQVQQTLARKGRSSVGNGPVLN

SEQ ID NO: 85458 - protein, 102 aa, Homo sapiens
MATLKEKLIAPVAEEEATVPNNKITVVGVGQVGMACAISILGKSLADELALVDVLEDKLKGEMMDLQHGSLFLQTPKIVADKDYSVTANSKIVVVTAGVRQQ

SEQ ID NO: 85459 - protein, 72 aa, Homo sapiens
MAASRLPPATLTLKQFVRRQQVLLLYRRILQTIRQVPNDSDRKYLKDWAREEFRRNKSATEEVRTKSWIQSG

SEQ ID NO: 85460 - protein, 155 aa, Homo sapiens
  MOD_RES (1)..(1): Any amino acid
XTAPGPDAAARCCSPATFAGLVLVGLGVATVKANITPFGADQVKDRGPEATRRFFNWFYWSINLGAILSLGGIAYIQQNVSFVTGYAIPTVCVGLAFVVFLCGQSVFITKPPDGSAFTDMFKILTYSCCSQKRSGERQSNGCLMVGHLQKRKWKM

SEQ ID NO: 85461 - protein, 90 aa, Homo sapiens
MESRAERIPPSCGSSLQTSGTRKLCRWCLNSASLLMWKGSPPAPPCSISPSPSQTLPATADLVSAACGRVPRAVSASSATCLGSRCFTSY

SEQ ID NO: 85462 - protein, 314 aa, Homo sapiens
  MOD_RES (1)..(1): Any amino acid
XTSQWPRAGAPGALSPSYDGGLHGLQSKIEDHLDEAIHVLRSHAVGTAGDMHTLLPGHGALASGFTGPMSLGGRHAGLVSAGRGWSWAVGGDPAPPDAPVSPRLQVGGSHPEDGLAGSTSLMHNHAALPSQPGTLPDLSRPPDSYSGLGRAGATAAASEIKREEKEDEENTSAADHSEEEKKELKAPRARTSSTDEVLSLEEKDLRDRERRMANNARERVRVRDINEAFRELGRMCQMHLKSDKAQTKLLILQQAVQVILGLEQQVRERNLNPKAACLKRREEEKVSGVVGDPQMVLSAPHPGLSEAHNPAGHM

SEQ ID NO: 85463 - protein, 206 aa, Homo sapiens
MDLSNNTMSLSVRTPGLSRRLSSQSVIGRPRGMSASSVGSGYGGSAFGFGASCGGGFSAASMFGSSSGFGGGSLGILSGNDGGLLSGSEKETMQNLNDRLASYLDKVRALEEANTELENKIREWYETRGTGTADASQSDYSKYYPLIEDLRNKIISASIGNAQLLLQIDNARLAAEDFRMKYENELALRQGVEADINGLRRVLDEL

SEQ ID NO: 85464 - protein, 318 aa, Homo sapiens
TPNIKIFSGSSHQDLSQKIADRLGLELGKVVTKKFSNQETCVEIDESVRGEDVYIVQSGCGEINDSLMELLIMINACKIASASRVTAVIPCFPYARQDKKDKSRSPISAKLVANMLSIAGADHIITMDLHASQIQGFFDIPVDNLYAEPTVLKWIRENIPEWKNCIIVSPDAGGAKRVTSIADQLNVDFALIHKERKKANEVDCIVLVGDVNDRVAILVDDMADTCVTICLAADKLLSAGATRVYAILTHGIFSGPAISRINTACFEAVVVTNTIPQDEKMKHCSKIRVIDISMILAEAIRRTHNGESVSYLFSHVPL

SEQ ID NO: 85465 - protein, 94 aa, Homo sapiens
VYITRAQLMNCHNFAPNFKESEMNAIAADMCTNARRVVRKSWMPKVKVLKAEDDAYTTFISETGKIEPDMMGVEHGFETASHEGEAGPSAEALQ

SEQ ID NO: 85466 - protein, 25 aa, Homo sapiens
  MOD_RES (1)..(1): Any amino acid
XDFKSRTLSVRRFGLQVTFACGRPF

SEQ ID NO: 85467 - protein, 184 aa, Homo sapiens
MFPVFPCTLLAPPFPVLGLDSRGVGGLMNSFPPPQGHAQNPLQVGAELQSRFFASQGCAQSPFQAAPAPPPTPQAPAAEPLQVDLLPVLAAAQDGGSGSSGSSSSPSHSCGLPLGGGGGACELSATSLPTLVSSKLVAGERGEWSRVPWYKLLSPLFSHQLLFPYQPRSLQKERRKKCFLRGIR

SEQ ID NO: 85468 - protein, 387 aa, Homo sapiens
MVISESMDILFRIRGGLDLAFQLATPNEIFLKKALKHVLSDLSTKLSSNALVFRICHSSVYIWPSSDINTIPGELTDASACKNILRFIQFEPEEDIKRKFMRKKDKKLSDMHQIVNIDLMLEMSTSLAAVTPIIERESGGHHYVNMTLPVDAVISVAPEETWGKVRKLLVDAIHNQLTDMEKCILKYMKGTSIVVPEPLHFLLPGKKNLVTISYPSGIPDGQLQAYRKELHDLFNLPHDRPYFKRSNAYHFPDEPYKDGYIRNPHTYLNPPNMETGMIYVVQGIYGYHHYMQDRIDDNGWGCAYRSLQTICSWFKHQGYTERSIPTHREIQQALVDAGDKPATFVGSRQWIGSIEVQLVLNQLIGITSKILFVSNTRKNKKVGNIVS

SEQ ID NO: 85469 - protein, 79 aa, Homo sapiens
MSIAGVAAQEIRVPLKTGFLHNGRAMGNMRKTYWSSRSEFKNNFLNIDPITMAYSLNSSAQERLIPLGMYSENLITVSI

SEQ ID NO: 85470 - protein, 193 aa, Homo sapiens
MDDVPAPTPAPAPPAAAAPRVPFHCSECGKSFRYRSDLRRHFARHTALKPHACPRCGKGFKHSFNLANHLRSHTGERPYRCSACPKGFRDSTGLLHHQVVHTGEKPYCCLVCELRFSSRSSLGRHLKRQHRGVLPSPLQPGPGLPALSAPCSVCCNVGPCSVCGGSGAGGGEGPEGAGAGLGSWGLAEAAAAA

SEQ ID NO: 85471 - protein, 22 aa, Homo sapiens
  MOD_RES (1)..(1): Any amino acid
XNTGGTIDKLTFGKGTHVFIIS

SEQ ID NO: 85472 - protein, 815 aa, Homo sapiens
MLWPRNLTSWDDSSSVSSGISDTIDNLSTDDINTSSSISSYANTPASSRKNLDVQTDAEKHSQVERNSLWSGDDVKKSDGGSDSGIKMEPGSKWRRNPSDVSDESDKSTSGKKNPVISQTGSWRRGMTAQVGITMPRTKPSAPAGALKTPGTGKTDDAKVSEKGRLSPKASQVKRSPSDAGRSSGDESKKPLPSSSRTPTANANSFGFKKQSGSAAGLAMITASGVTVTSRSATLGKIPKSSALVSRSAGRKSSMDGAQNQDDGYLALSSRTNLQYRSLPRPSKSNSRNGAGNRSSTSSIDSNISSKSAGLPVPKLREPSKTALGSSLPGLVNQTDKEKGISSDNESVASCNSVKVNPAAQPVSSPAQTSLQPGAKYPDVASPTLRRLFGGKPTKQVPIATAENMKNSVVISNPHATMTQQGNLDSPSGSGVLSSGSSSPLYSKNVDLNQSPLASSPSSAHSAPSNSLTWGTNASSSSAVSKDGLGFQSVSSLHTSCESIDISLSSGGVPSHNSSTGLIASSKDDSLTPFVRTNSVKTTLSERYTPTSQLRTQEDAKEWLRSHSAGGLQDTAANSPFSSGSSVTSPSGTRFNFSQLASPTTVTQMSLSNPTMLRTHSLSNADGQYDPYTDSRFRNSSMSLDEKSRTMSRSGSFRDGFEEVHGSSLSLVSSTSSVYSTPEEKCQSEIRKLRRELDASQEKVSALTTQLTANAHLVAAFEQSLGNMTIRLQSLTMTAEQKDSELNELRKTIELLKKQNAAAQAAINGVINTPELNCKGNGTAQSADLRIRRQHSSDSVSSINSATSHSSVGSNIESD

SEQ ID NO: 85473 - protein, 158 aa, Homo sapiens
MENWGLVTYRETALLIDPKNSCSSSRQWVALVVGHELAHQWFGNLVTMEWWTHLWLNEGFASWIEYLCVDHCFPEYDIWTQFVSADYTRAQELDALDNSHPIEVSVGHPSEVDEIFDAISYSKGASVIRMLHDYIGDKDFKKGMNMYLTKFQQKNAAT

SEQ ID NO: 85474 - protein, 54 aa, Homo sapiens
  MOD_RES (1)..(1): Any amino acid
XAAERRLHECQESLQCCKGKCADQEHTIRELQGQNMDHVADFEAVGRIFCLGMG

SEQ ID NO: 85475 - protein, 973 aa, Homo sapiens
  MOD_RES (1)..(1): Any amino acid
XPVIVEIPHFGSMRGKERELIVLRSENGETWKEHQFDSKNEDLTELLNGMDEELDSPEELGKKRICRIITKDFPQYFAVVSRIKQESNQIGPEGGILSSTTVPLVQASFPEGALTKRIRVGLQAQPVPDEIVKKILGNKATFSPIVTVEPRRRKFHKPITMTIPVPPPSGEGVSNGYKGDTTPNLRLLCSITGGTSPAQWEDITGTTPLTFIKDCVSFTTNVSARFWLADCHQVLETVGLATQLYRELICVPYMAKFVVFAKMNDPVESSLRCFCMTDDKVDKTLEQQENFEEVARSKDIEVLEGKPIYVDCYGNLAPLTKGGQQLVFNFYSFKENRLPFSIKIRDTSQEPCGRLSFLKEPKTTKGLPQTAVCNLNITLPAHKKETESDQDDEIEKTDRRQSFASLALRPQSPCERTDIRMAIVADHLGLSWTELARELNFSVDEINQIRVENPNSLISQSFMLLKKWVTRDGKNATTDALTSVLTKINRIDIVTLLEGPIFDYGNISGTRSFADENNVFHDPVDGYPSLQVELETPTGLHYTPPTPFQQDDYFSDISSIESPLRTPSRLSDGLVPSQGNIEHSADGPPVVTAEDASLEDSKLEDSVPLTEMPEAVDVDESQLENVCLSEYPQYLGNLAGSPKDVKPAEPRKLGVSSEQQEKGKSGPDEEMMEEKLKSLFEDIQLEEGVESEEMTEEKVQAILKRVQQAELEMSSITGWQNETSSGNLESCAQARRVTGGLLDRLDDSPDQCRDSITSYLKGEAGKFEANGSHTEITPEAKTKSYFPESQNDVGKQSTKETLKPKIHGSGHVEEPASPLAAYQKSLEETSKLIIEETKPCVPVSMKKMSRTSPADGKPRLSLHEEEGSSGSEQKDLKDSESDSSSEEERRVTTRVIRRRLIIKGEEAKNIPGESVTEEQFTDEEGNLITRKITRKVLRRIVIPQERKRDDVQGEGFKVKTKKEIRHVEKKSHS

SEQ ID NO: 85476 - protein, 203 aa, Homo sapiens
MGKRRHRRGNVISCVTNSGKTTLAKNLQKHLPNCSVISQDDFFKPESEIETDKNGFLQYDVLEALNMEKMMSAISCWMESARHSVVSTDQESAEEIPILIIEGFLLFNYKPLDTIWNRSYFLTIPYEECKRRRSTRVYQPPDSPGYFDGHVWPMYLKYRQEMQDITWEVVYLDGTKSEEDLFLQVYEDLIQELAKQKCLQVTA

SEQ ID NO: 85477 - protein, 407 aa, Homo sapiens
MWELVALLLLTLAYLFWPKRRCPGAKYPKSLLSLPLVGSLPFLPRHGHMHNNFFKLQKKYGPIYSVRMGTKTTVIVGHHQLAKEVLIKKGKDFSGRPQMATLDIASNNRKGIAFADSGAHWQLHRRLAMATFALFKDGDQKLEKIICQEISTLCDMLATHNGQSIDISFPVFVAVTNVISLICFNTSYKNGDPELNVIQNYNEGIIDNLSKDSLVDLVPWLKVKKKLYEEIDQNVGFSRTPTISDRNRLLLLEATIREVLRLRPVAPMLIPHKANVDSSIGEFAVDKGTEVIINLWALHHNEKEWHQPDQFMPERFLNPAGTQLISPSVSYLPFGAGPRSCIGEILARQELFLIMAWLLQRFDLEVPDDGQLPSLEGIPKVVFLIDSFKVKIKVRQAWREAQAEGST

SEQ ID NO: 85478 - protein, 208 aa, Homo sapiens
KIKRNDVEIEEEEFWENELQIEQENEKQLKDQLQEIRQKITECENKLKDYLAQIRTMESGLEAEKLQREVQEAQVNEEEVKGKIGKVKGEIDIQGQQSLRLENGIKAVERSLGQATKRLQDKEQELEQLTKELRQVNLQQFIQQTGTKVTVLPAEPIEIEASHADIEREAPFQSGSLKRPGSSRQLPSNLRILQNPISSGFNPEGIYV

SEQ ID NO: 85479 - protein, 292 aa, Homo sapiens
MPEAPPLLLAAVLLGLVLLVVLLLLLRHWGWGLCLIGWNEFILQPIHNLLMGDTKEQRILNHVLQHAEPGNAQSVLEAIDTYCEQKEWAMNVGDKKGKIVDAVIQEHQPSVLLELGAYCGYSAVRMARLLSPGARLITIEINPDCAAITQRMVDFAGVKDKVTLVVGASQDIIPQLKKKYDVDTLDMVFLDHWKDRYLPDTLLLEVQWSGVFQSADVFCIPDDQIGLLSPLAQPEKSRSPGPSLMHSLAQTGRQPPCSRPRPLSSSRVALCSTSFQLTLLGHFFFFLNENTS

SEQ ID NO: 85480 - protein, 70 aa, Homo sapiens
MGSWVQLITSVGVQQNHPGWTVAGQFQEKKRFTEEVIEYFQKKVSPVHLKILLTSDEAWKRFVRVAELPR

SEQ ID NO: 85481 - protein, 143 aa, Homo sapiens
MKTGLFFLCLLGTAAAIPTNARLLSDHSKPTAETVAPDNTAIPSLRAEAEENEKETAVSTEDDSHHKAEKSSVLKSKEESHEQSAEQGKSSSQELGLKDQEDSDGHLSVNLEYAPTEGTLDIKEDMSEPQEKKLSENTDFLAP

SEQ ID NO: 85482 - protein, 245 aa, Homo sapiens
MAAAPPSYCFVAFPPRAKDGLVVFGKNSARPRDEVQEVVYFSAADHEPESKVECTYISIDQVPRTYAIMISRPAWLWGAEMGANEHGVCIANEAINTREPAAEIEALLGMDLVRLGLERGETAKEALDVIVSLLEEHGQGGNYFEDANSCHSFQSAYLIVDRDEAWVLETIGKYWAAEKVTEGVRCICSQLSLTTKMDAEHPELRSYAQSQGWWTGEGEFNFSEVFSPVEDHLDCGAGKDSLEKQ

SEQ ID NO: 85483 - protein, 152 aa, Homo sapiens
MLVDGPSERPALCFLLLAVAMSFFGSALSIDETRAHLLLKEKMMRLGGRLVLNTKEELANERLMTLKIAEMKEAMRTLIFPPSMHFFQAKHLIERSQVFNILRMMPKGAALHLHDIGIVTMDWLVRNVTYRPHCHICFTPRGIMQFRFAHPT

SEQ ID NO: 85484 - protein, 8 aa, Homo sapiens
MAAVGSLL

SEQ ID NO: 85485 - protein, 1762 aa, Homo sapiens
  MOD_RES (1)..(1): Any amino acid
XHSRGSPFKKIPAVGGKELDLHGLYTRVTTLGGFAKVSEKNQWGEIVEEFNFPRSCSNAAFALKQYYLRYLEKYEKVHHFGEDDDEVPPGNPKPQLPIGAIPSSYNYQQHSVSDYLRQSYGLSMDFNSPNDYNKLVLSLLSGLPNEVDFAINVCTLLSNESKHVMQLEKDPKIITLLLANAGVFDDTLGSFSTVFGEEWKEKTDRDFVKFWKDIVDDNEVRDLISDRNKSHEGTSGEWIWESLFHPPRKLGINDIEGQRVLQIAVILRNLSFEEGNVKLLAANRTCLRFLLLSAHSHFISLRQLGLDTLGNIAAELLLDPVDFKTTHLMFHTVTKCLMSRDRFLKMRGMEILGNLCKAEDNGVLICEYVDQDSYREIICHLTLPDVLLVISTLEVLYMLTEMGDVACTKIAKVEKSIDMLVCLVSMDIQMFGPDALAAVKLIEHPSSSHQMLSEIRPQAIEQVQTQTHVASAPASRAVVAQHVAPPPGIVEIDSEKFACQWLNAHFEVNPDCSVSRAEMYSEYLSTCSKLARGGILTSTGFYKCLRTVFPNHTVKRVEDSSSNGQAHIHVVGVKRRAIPLPIQMYYQQQPVSTSVVRVDSVPDVSPAPSPAGIPHGSQTIGNHFQRTPVANQSSNLTATQMSFPVQGVHTVAQTVSRIPQNPSPHTHQQQNAPVTVIQSKAPIPCEVVKATVIQNSIPQTGVPVSIAVGGGPPQSSVVQNHSTGPQPVTVVNSQTLLHHPSVIPQQSPLHTVVPGQIPSGTPVTVIQQAVPQSHMFGRVQNIPACTSTVSQGQQLITTSPQPVQTSSQQTSAGSQSQDTVIIAPPQYVTTSASNIVSATSVQNFQVATGQMVTIAGVPSPQASRVGFQNIAPKPLPSQQVSSTVVQQPIQQPQQPTQQSVVIVSQPAQQGQTYAPAIHQIVLANPAALPAGQTVQLTGQPNITPSSSPSPVPATNNQVPTAMSSSSTPQSQGPPPTVSQMLSVKRQQQQQHSPAPPPQQVQVQVQQPQQVQMQVQPQQSNAGVGQPASGESSLIKQLLLPKRGPSTPGGKLILPAPQIPPPNNARAPSPQVVYQVASNQAAGFGVQGQTPAQQLLVGQQNVQLVPSAMPPSGGVQTVPISNLQILPGPLISNSPATIFQGTSGNQVTITVVPNTSFAPATVSQGNATQLIAPAGITMSGTQTGVGLPVQTLPATQASPAGQSSCTTATPPFKGDKIICQKEEEAKEATGLHVHERKIEVMENPSCRRGATNTSNGDTKENEMHVGSLLNGRKYSDSSLPPSNSGKIQSETNQCSLISNGPSLELGENGASGKQNSEQIDMQDIKSDLRKPLVNGICDFDKGDGSHLSKNIPNHKTSNHVGNGEISPMEPQGTLDITQQDTAKGDQLERISNGPVLTLGGSSVSSIQEASNAATQQFSGTDLLNGPLASSLNSDVPQQRPSVVVSPHSTTSVIQGHQIIAVPDSGSKVSHSPALSSDVRSTNGTAECKTVKRPAEDTDRETVAGIPNKVGVRIVTISDPNNAGCSATMVAVPAGADPSTVAKVAIESAVQQKQQHPPTYVQNVVPQNTPMPPSPAVQVQGQPNSSQPSPFSGSSQPGDPMRKPGQNFMCLWQSCKKWFQTPSQVFYHAATEHGGKDVYPGQCLWEGCEPFQRQRFSFITHLQDKHCSKDALLAGLKQDEPGQAGSQKSSTKQPTVGGTSSTPRAQKAIVNHPSAALMALRRGSRNLVFRDFTDEKEGPITKHIRLTAALILKNIGKYSECGRR

SEQ ID NO: 85486 - protein, 176 aa, Homo sapiens
MGGCAGSRRRFSDSEGEETVPEPRLPLLDHQGAHWKNAVGFWLLGLCNNFSYVVMLSAAHDILSHKRTSGNQSHVDPGPTPIPHNSSSRFDCNSVSTAPPGSRQWDLCCWKLRPGCLFSFCGDQPVCYFLLLTSPEAQDPGGEEEAESAARQPLIRTEAPESKPGSSSSLSLRERW

SEQ ID NO: 85487 - protein, 112 aa, Homo sapiens
MALVTVQRSPTPSTTSSPCASEADSGEEECRSQPRSISESFLTVKGAALFLPRGNGSSTPRISHRRNKHAGDLQQHLQAMFILLRPEDNIRLAVRLESTYQNRTRYMVVVST

SEQ ID NO: 85488 - protein, 94 aa, Homo sapiens
MNRSQEVTRDEESTRSEEVTREEMAAAGLTVTVTHSECRAPGNEKHDLHVTSQQGSSEPVVQDLAQVVEEVIGVPQSFQKLIFKVLQQIFIEDL

SEQ ID NO: 85489 - protein, 126 aa, Homo sapiens
  MOD_RES (1)..(1): Any amino acid
XPDSKAFGVGVAYRSLGRFEQLGKTAASWCLHVNNWLQVSFTAKHANKVKVLDAPVPDCLGLLSFYNARTKQVLHTFKTRFTQPLLPAFTVWCGSFQVTTGLQVPSAVRCLQKRGSATSSSNTSLT

SEQ ID NO: 85490 - protein, 173 aa, Homo sapiens
MAELNTHVNVKEKIYAVRSVVPNKSNNEIVLVLQQFDFNVDKAVQAFVDGSAIQVLKEWNMTGKKKNNKRKRSKSKQHQGNKDAKDKVERPEAGPLQPQPPQIQNGPMNGCEKDSSSTDSANEKPALIPREKKISILEEPSKALRGVTGPNIEKSVKDLQRCTVSLTRYRVMI

SEQ ID NO: 85491 - protein, 419 aa, Homo sapiens [sequence omitted]

SEQ ID NO: 85492 - protein, 39 aa, Homo sapiens
MHRLPLLGEKQEAKENGTNLTFIGDKTAMHEPLQTWQDA

SEQ ID NO: 85493 - protein, 37 aa, Homo sapiens
MPKLATQSNEITIPVTFESRAQLGGPEAAKSDETAAK

SEQ ID NO: 85494 - protein, 437 aa, Homo sapiens
MSAVLLLALLGFILPLPGVQALLCQFGTVQHVWKVSDLPRQWTPKNTSCDSGLGCQDTLMLIESGPQVSLVLSKGCTEAKDQEPRVTEHRMGPGLSLISYTFVCRQEDFCNNLVNSLPLWAPQPPADPGSLRCPVCLSMEGCLEGTTEEICPKGTTHCYDGLLRLRGGGIFSNLRVQGCMPQPVCNLLNGTQEIGPVGMTENCDMKDFLTCHRGTTIMTHGNLAQEPTDWTTSNTEMCEVGQVCQETLLLLDVGLTSTLVGTKGCSTVGAQNSQKTTIHSAPPGVLVASYTHFCSSDLCNSASSSSVLLNSLPPQAAPVPGDRQCPTCVQPLGTCSSGSPRMTCPRGATHCYDGYIHLSGGGLSTKMSIQGCVAQPSSFLLNHTRQIGIFSAREKRDVQPPASQHEGGGAEGLESLTWGVGLALAPALWWGVVCPSC

SEQ ID NO: 85495 - protein, 106 aa, Homo sapiens
MERFVVTAPPARNRSKTALYVTPLDRVTEFGGELHEDGGKLFCTSCNVVLNHVRKSAISDHLKSKTHTKRKAEFEEQNVRKKQRPLTASLQCNSTAQTEKVSVIQD

SEQ ID NO: 85496 - protein, 285 aa, Homo sapiens
MAAPKGSLWVRTQLGLPPLLLLTMALAGGSGTASAEAFDSVLGDTASCHRACQLTYPLHTYPKVSASLYTVDHIEEELYACQRGCRLFSICQFVDDGIDLNRTKLECESACTEAYSQSDEQYACHLGCQNQLPFAELRQEQLMSLMPKMHLLFPLTLVRSFWSDMMDSAQSFITSSWTFYLQADDGKIVIFQSKPEIQYAPHLEQEPTNLRESSLSKMSYLQMRNSQAHRNFLEDGESDGFLRCLSLNSGWILTTTLVLSVMVLLWICCATVATAVEQYVPSEVN

SEQ ID NO: 85497 - protein, 171 aa, Homo sapiens
MRRGRCLPVFHLSRKVTSLVPESCLLILLGLVLGGIVLAVAKKAEYQLEPGTFFLFLLPPIVLDSGYFMPSRLFFDNLGAILTYAVVGTLWNAFTTGAALWGLQQAGLVGLTLPSMPSRNSVAETSVTNLLRESGSGACLDLQVIDTVRSGRDREDAVMHHLLCGGLYKPR

SEQ ID NO: 85498 - protein, 139 aa, Homo sapiens
MPAPIRLRELIRTIRTARTQAEEREMIQKECAAIRSSFREEDNTYRCRNVAKLLYMHMLGYPAHFGQLECLKLIASQKFTDKRIGYLGAMLLLDERQDVHLLMTNCIKNDLNHSTQFVQGLALCTLGCMGSSEMCRDLA

SEQ ID NO: 85499 - protein, 2225 aa, Homo sapiens
MNHPFGKEEAASQKQLFGFFCECLRRGEWELAQACVPQLQEGQGDIPKRVEDILQALVVCPNLLRCGQDINPQRVAWVWLLVLEKWLAREKKLLPVVFRRKLEFLLLSEDLQGDIPENILEELYETLTQGAVGHVPDGNPRRESWTPRLSSEAVSVLWDLLRQSPQPAQALLELLLEEDDGTGLCHWPLQNALVDLIRKALRALQGPDSVPPGVVDAIYGALRTLRCPAEPLGVELHLLCEELLEACRTEGSPLREERLLSCLLHKASRGLLSLYGHTYAEKVTEKPPRATASGKVSPDHLDPERAMLALFSNPNPAEAWKVAYFYCLSNNKHFLEQILVTALTLLKEEDFPNLGCLLDREFRPLSCLLVLLGWTHCQSLESAKRLLQTLHRTQGPGCDELLRDACDGLWAHLEVLEWCIQQSSNPIPKRDLLYHLHGGDSHSVLYTLHHLTNLPALREEDVLKLLQKVPAKDPQQEPDAVDAPVPEHLSQCQNLTLYQGFCAMKYAIYALCVNSHQHSQCQDCKDSLSEDLASATEPANDSLSSPGAANLFSTYLARCQQYLCSIPDSLCLELLENIFSLLLITSADLHPEPHLPEDYAEDDDIEGKSPSGLRSPSESPQHIAHPERKSERGSLGVPKTLAYTMPSHVKAEPKDSYPGPHRHSFLDLKHFTSGISGFLADEFAIGAFLRLLQEQLDEISSRSPPEKPKQESQSCSGSRDGLQSRLHRLSKVVSEAQWRHKVVTSNHRSEEQPSRRYQPATRHPSLRRGRRTRRSQADGRDRGSNPSLESTSSELSTSTSEGSLSAMSGRNELHSRLHPHPQSSLIPMMFSPPESLLASCILRGNFAEAHQVLFTFNLKSSPSSGELMFMERYQEVIQELAQVEHKIENQNSDAGSSTIRRTGSGRSTLQAIGSAAAAGMVFYSISDVTDKLLNTSGDPIPMLQEDFWISTALVEPTAPLREVLEDLSPPAMAAFDLACSQCQLWKTCKQLLETAERRLNSSLERRGRRIDHVLLNADGIRGFPVVLQQISKSLNYLLMSASQTKSESVEEKGGGPPRCSITELLQMCWPSLSEDCVASHTTLSQQLDQVLQSLREALELPEPRTPPLSSLVEQAAQKAPEAEAHPVQIQTQLLQKNLGKQTPSGSRQMDYLGTFFSYCSTLAAVLLQSLSSEPDHVEVKVGNPFVLLQQSSSQLVSHLLFERQVPPERLAALLAQENLSLSVPQVIVSCCCEPLALCSSRQSQQTSSLLTRLGTLAQLHASHCLDDLPLSTPSSPRTTENPTLERKPYSSPRDSSLPALTSSALAFLKSRSKLLATVACLGASPRLKVSKPSLSWKELRGRREVPLAAEQVARECERLLEQFPLFEAFLLAAWEPLRGSLQQGQSLAVNLCGWASLSTVLLGLHSPIALDVLSEAFEESLVARDWSRALQLTEVYGRDVDDLSSIKDAVLSCAVACDKEGWQYLFPVKDASLRSRLALQFVDRWPLESCLEILAYCISDTAVQEGLKCELQRKLAELQVYQKILGLQSPPVWCDWQTLRSCCVEDPSTVMNMILEAQEYELCEEWGCLYPIPREHLISLHQKHLLHLLERRDHDKALQLLRRIPDPTMCLEVTEQSLDQHTSLATSHFLANYLTTHFYGQLTAVRHREIQALYVGSKILLTLPEQHRASYSHLSSNPLFMLEQLLMNMKVDWATVAVQTLQQLLVGQEIGFTMDEVDSLLSRYAEKALDFPYPQREKRSDSVIHLQEIVHQAADPETLPRSPSAEFSPAAPPGISSIHSPSLRERSFPPTQPSQEFVPPATPPARHQWVPDETESICMVCCREHFTMFNRRHHCRRCGRLVCSSCSTKKMVVEGCRENPARVCDQCYSYCNKDVPEEPSEKPEALDSSKNESPPYSFVVRVPKADEVEWILDLKEEENELVRSEFYYEQAPSASLCIAILNLHRDSIACGHQLIEHCCRLSKGLTNPEVDAGLLTDIMKQLLFSAKMMFVKAGQSQDLALCDSYISKVDVLNILVAAAYRHVPSLDQILQPAAVTRLRNQLLEAEYYQLGVEVSTKTGLDTTGAWHAWGMACLKAGNLTAAREKFSRCLKPPFDLNQLNHGSRLVQDVVEYLESTVRPFVSLQDDDYFATLRELEATLRTQSLSLAVIPEGKIMNNTYYQECLFYLHNYSTNLAIISFYVRHSCLREALLHLLNKVGHGHSSKRQCLPYSSGLDHSALSGTITP

SEQ ID NO: 85500 - protein, 535 aa, Homo sapiens
MTSPLCRAASANALPPQDQASTPSSRVKGREASGKPSHLRGKGTAQAWTPGRSKGGSFHRGAGKPSVHSQVAELHKKIQLLEGDRKAFFESSQWNIKKNQETISQLRKETKALELKLLDLLKALEHLDHRLREKVKQQNALRHQVVLRQRRLEELQLQHSLRLLEMAEAQNRHTEVAKDESLNLENRLDSMEAEVVRTKHELEALHVVNQEALNARDIAKNQLQYLEETLVRERKKRERYISECKKRAEEKKLENERMERKTHREHLLLQSDDTIQDSLHAKEEELRQRWSMYQMEVIFGKVKDATGTDETHSLVRRFLAQGDTFAQLETLKSENEQTLVRLKQEKQQLQRELEDLKYSGEATLVSQQKLQAEAQERLKKEERRHAEAKDQLERALRAMQVAKDSLEHLASKLIHITVEDGRFAGKELDPQADNYVPNLLGLVEEKLLKLQAQLQGHDVQEMLCHIANREFLASLEGRLPEYNTRIALPLATSKDKFFDEESEEEDNEVVTRASLKIRSQKLIESHKKHRRSRRS

SEQ ID NO: 85501 - protein, 312 aa, Homo sapiens
MERYKAQGCCCLVVQRRIRQVSASLEQLLTELDDFLKILDQENLSSTALVKKSCLAELLRLYTKSSSSDEEYIYMNKVTINKQQNAESQGKAPEEQGLLPNGEPSQHSSAPQKSLPDLPPPKMIPERKQLAIPKTESPEGYYEEAEPYDTSLNEDGEAVSSSYESYDEEDGSKGKSAPYQWPSPEAGIELMRDARICAFLWRKKWLGQWAKQLCVIKDNRLLCYKSSKDHSPQLDVNLLGSSVIHKEKQVRKKEHKLKITPMNADVIVLGLQSKDQAEQWLRVIQEVSGLPSEGASEGNQYTPDAQRFNCQK

SEQ ID NO: 85502 - protein, 151 aa, Homo sapiens
MLTPLGRLDKYAASENIFNRQMVARSLLDTLREVCDDERDCIAVLERISRLADDSEPTVRAELMEQVPHIALFCQENRPSIPYAFSKFLLPIVVRYLADQNNQVRKTSQAALLALLEQELIERFDVETKVCPVLIELTAPDSNDDVKTEAV

SEQ ID NO: 85503 - protein, 147 aa, Homo sapiens
MQVNKIKKNEDAKKRLSVERIYQKKTQLEHILLRPDTYIGSVELVTQQMWVYDEDVGINYREVTFVPGLYKIFDEILVNAADNKQRDPKMSCIRVTIDPENNLISIWNNGKGIPVVEHKVEKMYVPALIFGQLLTSSNYDDDEKKVT

SEQ ID NO: 85504 - protein, 205 aa, Homo sapiens
MEDLEEDVRFIVDETLDFGGLSPSDSREEEDITVLVTPEKPLRRGLSHRSDPNAVAPAPQGVRLSLGPLSPEKLEEILDEANRLAAQLEQCALQDRESAGEGLGPRRVKPSPRRETFVLKDSPVRDLLPTVNSLTRSTPSPSSLTPRLRSNDRKGSVRALRATSGKRPSNMKRESPTCNLFPASKSPASSPLTRSTPPVRGRAGP

SEQ ID NO: 85505 - protein, 433 aa, Homo sapiens
MVGSALRRGAHAYVYLVSKASHISRGHQHQAWGSRPPAAECATQRAPGSVVELLGKSYPQDDHSNLTRKVLTRVGRNLHNQQHHPLWLIKERVKEHFYKQYVGRFGTPLFSVYDNLSPVVTTWQNFDSLLIPADHPSRKKGDNYYLNRTHMLRAHTSAHQWDLLHAGLDAFLVVGDVYRRDQIDSQHYPIFHQLEAVRLFSKHELFAGIKDGESLQLFEQSSRSAHKQETHTMEAVKLVEFDLKQTLTRLMAHLFGDELEIRWVDCYFPFTHPSFEMEINFHGEWLEVLGCGVMEQQLVNSAGAQDRIGWAFGLGLERLAMILYDIPDIRLFWCEDERFLKQFCVSNINQKVKFQPLSKYPAVINDISFWLPSENYAENDFYDLVRTIGGDLVEKVDLIDKFVHPKKSPWNWKVASLKHSRNELKSLKEGLGN

SEQ ID NO: 85506 - protein, 39 aa, Homo sapiens
MTKKTRDLRRQLRKAVMDHVSDSFLETNVPLLVLIEAAK

SEQ ID NO: 85507 - protein, 219 aa, Homo sapiens
SPGAQLGRGAPTSAFPPPAAEAHPAARRGLRSPQLPSGAMSQNGAPGMQEESLQGSWVELHFSNNGNGGSVPASVSIYNGDMEKILLDAQHESGRSSSKSSHCDSPPRSQTPQDTNRASETDTHSIGEKNSSQSEEDDIERRKEVESILKKNSDWIWDWSSRPENIPPKEFLFKHPKRTATLSMRNTSVMKKGGIFSAEFLKVFLPSLLLSHLLAIGLG

SEQ ID NO: 85508 - protein, 238 aa, Homo sapiens
MDQPSGRSFMQVLCEKYSPENFPYRRGPGMGVHVPATPQGSPMKDRLNLPSVLVLNSCGITCAGDEKEIAAFCAHVSELDLSDNKLEDWHEVSKIVSNVPQLEFLNLSSNPLNLSVLERTCAGSFSGVRKLVLNNSKASWETVHMILQELPDLEELFLCLNDYETVSCPSICCHSLKLLHITDNNLQDWTEIRKLGVMFPSLDTLVLANNHLNAIEEPDDSLARLFPNLRSISLHKSG

SEQ ID NO: 85509 - protein, 300 aa, Homo sapiens
MAERQEEQRGSPPLRAEGKADAEVKLILYHWTHSFSSQKVRLVIAEKALKCEEHDVSLPLSEHNEPWFMRLNSTGEVPVLIHGENIICEATQIIDYLEQTFLDGQIGNTESELKKLAEENPDLQEAYIAKQKRLKSKLLDHDNVKYLKKILDELEKVLDQVETELQRRNEETPEEGQQPWLCGESFTLADVSLAVTLHRLKFLGFARRNWGNGKRPNLETYYERVLKRKTFNKVLGHVNNILISAVLPTAFRVAKKRAPKVLGTTLVVGLLAGVGYFAFMLFRKRLGSMILAFRPRPNYF

SEQ ID NO: 85510 - protein, 98 aa, Homo sapiens
MKLLSLVAVVGCLLVPPAEANKSSEDIRCKCICPPYRNISGHIYNQNVSQKDCNCLHVVEPMPVPGHDVEAYCLLCECRSSLSSTCPWWVPCCSTWPS

SEQ ID NO: 85511 - protein, 52 aa, Homo sapiens
MGTANIQLHGPPRVKAVKSSEHINEGETAMLVCKSESVPPVTDWAWYKITDS

SEQ ID NO: 85512 - protein, 106 aa, Homo sapiens
  MOD_RES (1)..(1): Any amino acid
XGRLDRHVFIDLPTLQERREIFEQHLKSLKLTQSSTFYSQRLAELTPGFSGADIANICNEAALHAAREGHTSVHTLNFEYAVERVLAALRVERTGAACVLLKFIFV

SEQ ID NO: 85513 - protein, 166 aa, Homo sapiens
MATFSGPAGPILSLNPQEDVEFQKEVAQVRKRITQFGTVTRFRLSRSKRTGNSKGYAFVEFESEDVAKIVAETMNNYLFGERLLECHFMPPEKVHKELFKDWNIPFKQPSYPSVKRYNRNRTLTQKLRMEERFKKKERLLRKKLAKKGIDYDFPSLILQKTESISK

SEQ ID NO: 85514 - protein, 173 aa, Homo sapiens
  MOD_RES (1)..(1): Any amino acid
XKINESTQNWHQLENIGNFIKAITKYGVKPHDIFEANDLFENTNHTQVQSTLLALASMAKTKGNKVNVGVKYAEKQERKFEPGKLREGRNIIGLQMGTNKFASQQGMTAYGTRRHLYDPKLGTDQPLDQATISLQMGTNKGASQVSGGPRDTPSRPRTLATPRPDHTTLRRLA

SEQ ID NO: 85515 - protein, 41 aa, Homo sapiens
MATGLLRAKKESFALVAQAGVQWRNLGLPQVTGITGMRHHT

SEQ ID NO: 85516 - protein, 166 aa, Homo sapiens
EASGFSKIFPGITPYILTLGAFFWMPFLREYVMSTGACSVSRSSIDFLLTHKGTGNMVIVVIGGLAECRYSLPGSSTLVLKNRSGFVRMALQHGQPGVGHGAPTLNLDLGTAGLGSEKPVGRPRDHAPSACLAFDKVPTFLGFRRYAFALQGASNTCLCLWGDGPL

SEQ ID NO: 85517 - protein, 185 aa, Homo sapiens
MSDKSELKAELERKKQRLAQIREEKKRKEEERKKKETDQKKEAVAPVQEESDLEKKRREAEALLQSMGLTPESPIVPPPMSPSSKSVSTPSEAGSQDSGDGAVGSRRGPIKLGMAKITQVDFPPREIVTYTKETQTPVMAQPKEDEEEDDDVVAPKPPIEPEEEKTLKKDEENDSKAPPHELTEE

SEQ ID NO: 85518 - protein, 88 aa, Homo sapiens
MTEKAPEPHVEEDDDDELDSKLNYKPPPQKSLKELQEMDKDDESLIKYKKTLLGDGPVVTDPKAPNVVVTRLTLVCESAPGPITMDLT

SEQ ID NO: 85519 - protein, 853 aa, Homo sapiens
  MOD_RES (1)..(1): Any amino acid
XEMTCALNNLLHSLQLPEACSEIKHEAFKNHVFNVDNAKFVVIFDLSALTTIGNAKNSLIGMWALSPTVFALLSKNLMIVHSDLAVHFPAIQYAVLYTLYSHCTRHDHFISSSLSSSSPSLFDGAVISTVTTATKKHFSIILNLLGILLKKDNLNQDTRKLLMTWALEAAVLMKKSETYAPLFSLPSFHKFCKGLLANTLVEDVNICLQACSSLHALSSSLPDDLLQRCVDVCRVQLVHSGTRIRQAFGKLLKSIPLDVVLSNNNHTEIQEISLALRSHMSKAPSNTFHPQDFSDVISFILYGNSHRTGKDNWLERLFYSCQRLDKRDQSTIPRNLLKTDAVLWQWAIWEAAQFTVLSKLRTPLGRAQDTFQTIEGIIRSLAAHTLNPDQDVSQWTTADNDEGHGNNQLRLVLLLQYLENLEKLMYNAYEGCANALTSPPKVIRTFFYTNRQTCQDWLTRIRLSIMRVGLLAGQPAVTVRHGFDLLTEMKTTSLSQGNELEVTIMMVVEALCELHCPEAIQGIAVWSSSIVGKNLLWINSVAQQAEGRFEKASVEYQEHLCAMTGVDCCISSFDKSVLTLANAGRNSASPKHSLNGESRKTVLSKPTDSSPEVINYLGNKACECYISIADWAAVQEWQNAIHDLKKSTSSTSLNLKADFNYIKSLSSFESGKFVECTEQLELLPGENINLLAGGSKEKIDMKKLLPNMLSPDPRELQKSIEVQLLRSSVCLATALNPIEQDQKWQSITENVVKYLKQTSRIAIGPLRLSTLTVSQSLPVLSTLQLYCSSALENTVSNRLSTEDCLIPLFSEALRSCKQHDVRPWMQALRYTMYQNQLLEKIKGKWFFFLVREN

SEQ ID NO: 85520 - protein, 118 aa, Homo sapiens
MLSSFPVVLLETMSHYTDEPRFTIEQIDLLQRLRRTGMTKHEILHALETLDRLDQEHSDKFGRRSSYGGSSYGNSTNNVPASSSTATASTQTQHSGMSPSPSNSYDTSPQPCTTNQNG

SEQ ID NO: 85521 - protein, 939 aa, Homo sapiens [sequence omitted]

SEQ ID NO: 85522 - protein, 82 aa, Homo sapiens
MEQTWTRDYFAEDDGEMVPRTSHTAAFLSDTKDRGPPVQSQIWRSGEKVPFVQTYSLRAFEKPPQVQTQALRDFEKVSHVSG

SEQ ID NO: 85523 - protein, 95 aa, Homo sapiens
MAKPAQGAKYRGSIHDFPGFDPNQDAEALYTAMKGFGSDKEAILDIITSRSNRQRQEVCQSYKSLYGKDLIADLKYELTGKFERLIVGGLSDVGT

SEQ ID NO: 85524 - protein, 206 aa, Homo sapiens
  MOD_RES (1)..(1): Any amino acid
XFSGIGQPAFQVGGPSRSLRPGFPGPRPPGAQPHRFSLQPDSPLPSVSPALSPVRSPTPPAAGFQPLLNGSLVPVPPTTPAPGVQLDVEALIPTHDEQGRPIPEWKRQVMVRKMQLKMQEEEEQRRKEEEEEARLASMPAWRRDLLRKKLEEEREQKRKEEERQKQEELRREKEQSEKLRTLGYDESKLAPWQRQVILKKGDIAKY

SEQ ID NO: 85525 - protein, 82 aa, Homo sapiens
MDECIPQDRAPRDFCVKFPEEIRHDNLAGQLWFGAECLAAGSIIMNRELESMAMRPLAKELTRSLEDVRGALRDQALRDLNT

SEQ ID NO: 85526 - protein, 535 aa, Homo sapiens
MGDNPFQPKSNSKMAELFMECEEEELEPWQKKVKEVEDDDDDEPIFVGEISSSKPAISNILNRVNPSSYSRGLKNGALSRGITAAFKPTSQHYTNPTSNPVPASPINFHPESRSSDSSVIVQPFSKPGYITNSSRVVSNKSSELLFDLTQDTGLSHYQGGPTLSMAGMSESSFLSKRPSTSEVNNVNPKKPKPSESVSGANSSAVLPSVKSPSVTSSQAMLAKGTNTSSNQSKNGTPFPRACPKCNIHFNLLDPLKNHMKYCCPDMINNFLGLAKTEFSSTVNKNTTIDSEKGKLIMLVNDFYYGKHEGDVQEEQKTHTTFKCFSCLKILKNNIRFMNHMKHHLELEKQSSESWENHTTCQHCYRQFPTPFQLQCHIESTHTPHEFSTICKICELSFETEHVLLQHMKDNHKPGEMPYVCQVCNYRSSSFSDVETHFRTSHENTKNLLCPFCLKVIKIATPYMHHYMKHQKKGIHRCTKCRLQFLTCKEKMDHKTQHHRTFIKPKQLEGLPPGTKSALEYLLQWRETEAWIIQSE

SEQ ID NO: 85527 - protein, 110 aa, Homo sapiens
MAPTLQQAYRRRWWMACTAVLENLFFSAVLLGWGSLLIILKNEGFYSSTCPAESSTNTTQDEQRRWPGCDQQDEMLNLGFTIGSFVLSATTLPLGILMDRFGPRPVRLVG

SEQ ID NO: 85528 - protein, 710 aa, Homo sapiens [sequence omitted]

SEQ ID NO: 85529 - protein, 82 aa, Homo sapiens
MCTKTIPVLWGCFLLWNLYVSSSQTIYPGIKARITQRALDYGVQAGMKMIEQMLKEKKLPDLSGSESLEFLKVDYVNYNFSK

SEQ ID NO: 85530 - protein, 105 aa, Homo sapiens
MKDFLEKRDKGKLLIQRSRRLKQNLLRPMQLSVTEDGYIHYGDKVMLVNPDDPDTEADVFLRGDLSLCMTPDEIQSHLKDELEVPCGLSAVQAKTPIGRNTFIIL

SEQ ID NO: 85531 - protein, 254 aa, Homo sapiens
MEPRTRVGPLLVLPDACKQPIRPRPWCHSRNTVSSCLGTRGKYGEGAKQETFTFALTLVFIQCVINAVFAKILIQFFDTARVDRTRSWLYAACSISYLGAMVSSNSALQFVNYPTQVLGKSCKPIPVMLLGVTLLKKKYPLAKYLCVLLIVAGVALFMYKPKKVVGIEEHTVGYGELLLLLSLTLDGLTGVSQDHMRAHYQTGSNHMMLNINLWSTLLLGMGILFTGELWEFLSFAERYPAIIYNILLFGLTSA

SEQ ID NO: 85532 - protein, 51 aa, Homo sapiens
MSSTRSQNPHGLKQIGLDQIWDDLRAGIQQVYTRQSMAKSRYMELYTYPPA

SEQ ID NO: 85533 - protein, 1006 aa, Homo sapiens
MTMKTKQRMLTEDWELFKQRRFIEEQLTNKKAVTGENNFTDTMRHMLSSRLSMPDCPNCNYRRRCACDDCSLSHILTCGIMDPPVTDDIHIHQLPLQVDPAPDYLAERSPPSVSSASSGSGSSSPITIQQHPRLILTDSGSAPTFCSDDEDVAPLSAKFADIYPLSNYDDTEVVANMNGIHSELNGGGENMALKDESPQISSTSSSSSEADDEEADGESSGEPPGAPKEDGVLGSRSPRTEESKADSPPPSYPTQQAEQAPNTCECHVCKQEASGLTPSAMTAGALPPGHQFLSPEKPTHPALHLYPHIHGHVPLHTVPHLPRPLIHPTLYATPPFTHSKALPPAPVQNHTNKHQVFNASLQDHIYPSCFGNTPEWNSSKFISLWGSEVMNDKNWNPGTFLPDTISGSEILGPTLSETRPEALPPPSSNETPAVSDSKEKKNAAKKKCLYNFQDAFMEANKVVMATSSATSSVSCTATTVQSSNSQFRVSSKRPPSVGDVFHGISKEDHRHSAPAAPRNSPTGLAPLPALSPAALSPAALSPASTPHLANLAAPSFPKTATTTPGFVDTRKSFCPAPLPPATDGSISAPPSVCSDPDCEGHRCENGVYDPQQDDGDESADEDSCSEHSSSTSTSTNQKEGKYCDCCYCEFFGHGGPPAAPTSRNYAEMREKLRLRLTKRKEEQPKKMDQISERESVVDHRRVEDLLQFINSSETKPVSSTRAAKRARHKQRKLEEKARLEAEARAREHLHLQEEQRRREEEEDEEEEEDRFKEEFQRLQELQKLRAVKKKKKERPSKDCPKLDMLTRNFQAATESVPNSGNIHNGSLEQTEEPETSSHSPSRHMNHSEPRPGLGADGDAADPVDTRDSKFLLPKEVNGKQHEPLSFFFDIMQHHKEGNGKQKLRQTSKASSEPARRPTEPPKATEGQSKPRAQTESKAKVVDLMSITEQKREERKVNSNNNNKKQLNHIKDEKSNPTPMEPTSPGEHQQNSKLVLAESPQPKGKNK

SEQ ID NO: 85534 - protein, 122 aa, Homo sapiens
MLGAVEGPRWKQAEDIRDIYDFRDVLGTIKHPNIVALDDIYESGGHLYLIMQLVSGGELFDRIVEKGFYTERDASRLIFQVLDAVKYLHDLGIVHRDLKPENLLYYSLDEDSKIMISDFGLS

SEQ ID NO: 85535 - protein, 407 aa, Homo sapiens
MFYGTHFIMSPPTKSKLKRQSQLLSSMLSRTLSYKYRDLDSTFSSLGASDDPAELSTQLSAPGVLKVFGDSVCTGTHYKSVLATGTSSARELVKEALERYALDPRQAGQYVLCDVVGQAGDAGQRWQARCFRVFGDSEKPLLIQELWKPREGLSRRFELRKRSDVEELAAKEVDTITAGINAQARRLQRSRAKGTPTPALGDARSSPPPRLRRTVSETSLSPVNALPAAAQGPEEPGPDAMRYSLYQSPHLLLLQGYSQQHPGVCAQPGPAHGGPADPLQQAQHQPLSPRHPASTLHHPPATAPGQRPGRGEAGPGAHPRGAHLRQLLRGGAQDRGAAPRGPALPGALLPAAIQGPRAGPAPARPGLGAPPGCAAELPAVRGRARGPGSRLPYSGRPAPAPAAAPGV

SEQ ID NO: 85536 - protein, 285 aa, Homo sapiens
MAATQELLLQLQKDNRDGRQRKQELEKLMRGLEAESESLNQRLQDLSERERSLLRRRSQAAQPLQGEAREAARERAERVRRRLEEAERHKEYLLFYYGGELQSQKSTEQQLAAQLVTLQNELELAETKCALQEEKLQQDALQTAEAWAIFQEQTVVLQEVQVKVMEAAEELDAWQSGRELCDGQLRGVQYSTESLMEEMARADRETRLFGGPRALAIRRCVLGALQVLLTLPLLFLGLSLLWTVLLDPGAVSAWLWSLTSETTLRRLRYTLSPLLELRANGLLPT

SEQ ID NO: 85537 - protein, 582 aa, Homo sapiens
MVAERTHKAAATGARGPGELGAPGTVALVAARAERGARLPSPGSCGLLTLALCSLALSLLAHFRTAELQARVLRLEAERGEQQMETAILGRVNQLLDEKWKLHSRRRREAPKTSPGCNCPPGPPGPTGRPGLPGDKGAIGMPGRVGVKGQPGEKGSPGDAGLSIIGPRGPPGQPGTRGFPGFPGPIGLDGKPGHPGPKGDMGLTGPPGQPGPQGQKGEKGQCGEYPHRECLSSMPAALRSSQIIALKLLPLLNSVRLAPPPVIKRRTFQGEQSQASIQGPPGPPGPPGPSGPLGHPGLPGPMGPPGLPGPPGPKGDPGIQGYHGRKGERGMPGMPGKHGAKGAPGIAVAGMKGEPGIPGTKGEKGAEGSPGLPGLLGQKGEKGDAGNSIGGGRGEPGPPGLPGPPGPKGEAGVDGQVGPPGQPGDKGERGAAGEQGPDGPKGSKGEPGKGEMVDYNGNINEALQEIRTLALMGPPGLPGQIGPPGAPGIPGQKGEIGLPGPPGHDGEKGPRGKPGDMGPPGPQGPPGKDGPPGVKGENGHPGSPGEKGEKGETGQAGSPGLDGPTGERRTWWPEQTQSGRIA

SEQ ID NO: 85538 - protein, 55 aa, Homo sapiens
MANALASATCERCKGGFAPAEKIVNSNGELYHEQCFVCAQCFQQFPEGLFYEERT

SEQ ID NO: 85539 - protein, 603 aa, Homo sapiens
MFYFRGCGRWVAVSFTKQQFPLARLSSDSAAPRTPHFDVIVIGGGHAGTEAATAAARCGSRTLLLTHRVDTIGQMSCNPSFGGIGKGHLMREVDALDGLCSRICDQSGVHYKVLNRRKGPAVWGLRAQIDRKLYKQNMQKEILNTPLLTVQEGAVEDLILTEPEPEHTGKCRVSGVVLVDGSTVYAESVILTTGTFLRGMIVIGLETHPAGRLGDQPSIGLAQTLEKLGFVVGRLKTGTPPRIAKESINFSILNKHIPDNPSIPFSFTNETVWIKPEDQLPCYLTHTNPRVDEIVLKNLHLNSHVKETTRGPRYCPSIESKVLRFPNRLHQVWLEPEGMDSDLIYPQGLSMTLPAELQEKMITCIRGLEKAKVIQPGYGVQYDYLDPRQITPSLETHLVQRLFFAGQINGTTGYEEAAAQGVIAGINASLRVSRKPPFVVSRTEGYIGVLIDDLTTLGTSEPYRMFTSRVEFRLSLRPDNADSRLTLRGYKDAGCVSQQRYERACWMKSSLEEGISVLKSIEFLSSKWKKLIPEASISTSRSLPVRALDVLKYEEVDMDSLAKAVPEPLKKYTKCRELAERLKIEAETGFHHVGWDGLDLLTS

SEQ ID NO: 85540 - protein, 115 aa, Homo sapiens
MGRKLDLSGLTDDETEHVLQVVQRDFNLRKKEEERLSELKQKLDEEGSKCSILSKHQQFVEHCCMRCCSPFTFLVNTKRQCGDCKFNVCKSCCSYQKHEKAWVCCVCQQARRKPF

SEQ ID NO: 85541 - protein, 327 aa, Homo sapiens
MNGYISNANYSVKKCIFLLFINHRLVESTSLRKAIETVYAAYLPKNTHPFLYLSLEISPQNVDVNVHPTKHEVHFLHEESILERVQQHIESKLLGSNSSRMYFTQTLLPGLAGPSGEMVKSTTSLTSSSTSGSSDKVYAHQMVRTDSREQKLDAFLQPLSKPLSSQPQAIVTEDKTDISSGRARQQDEEMLELPAPAEVAAKNQSLEGDTTKGTSEMSEKRGPTSSNPRKRHREDSDVEMVEDDSRKEMTAACTPRRRIINLTSVLSLQEEINEQGHEVLREMLHNHSFVGCVNPQWALAQHQTKLYLLNTTKLRSQHRSLTLPCLP

SEQ ID NO: 85542 - protein, 45 aa, Homo sapiens
MFWVQVLLAGLVVPLLLGATLTYTYRHCWPHKPLVTDEAGMEALT

SEQ ID NO: 85543 - protein, 608 aa, Homo sapiens
MKPLKEPAPNNNNNVSFVIHCQLGKEIKHICSNCSRGEDARDAEEVERLAAMRSDSLVPGTHTPPIRRRSKFANLGRIFKPWKWRKKKSEKFKHTSAALERKISMRQSREELIKRGVLKEIYDKDGELSISNEEDSLENGQSLSSSQLSLPALSEMEPVPMPRDPCSYEVLQPSDIMDGPVSEESPSASESGVLLSQDPSAKPVLLLPPKKPAAFPGDHEETPVKQLPLLKQPPALPPKPTTRIANHLTDPGAPVKLPCLPVKLSPPLPPKKVMICMPVGGPDLSLVSYTAQKSGQQGVAQHHHTVLPSQIQHQLQYGSHGQHLPSTTGSLPMHPSGCRMIDELNKTLAMTMQRLESSEQRVPCSTSYHSSGLHSGDGVTKAGPMGLPEIRQVPTVVIECDDNKENVPHESDYEDSSCLYTREEEEEEEDEDDDSSLYTSSLAMKVCRKDSLAIKLSNRPSKRELEEKNILPRQTDEERLELRQQIGTKLTRRLSQRPTAEELEQRNILKPRNEQEEQEEKREIKRRLTRKLSQRPTVEELRERKILIRFSDYVEVADAQDYDRRADKPWTRLTAADKAAIRKELNEFKSTEMEVHELSRHLTRFHRP

SEQ ID NO: 85544 - protein, 74 aa, Homo sapiens
  MOD_RES (1)..(1): Any amino acid
XSLAAPKMASIMEGPLSKWTNVMKGWQYRWFVLDYNAGLLSYYTSKDKMMRGSRRGCVRLRPVMLMSERSGSMP

SEQ ID NO: 85545 - protein, 79 aa, Homo sapiens
  MOD_RES (1)..(1): Any amino acid
XPESCFIEAAIQELKTREEALSGLAGSRREVTGVVAALEQLVLMAPLAKESVFQPRKKRRKQCLNQSLRGCQRPVMTWS

SEQ ID NO: 85546 - protein, 500 aa, Homo sapiens
MEPEPEPAAVEVPAGRVLSARELFAARSRSQKLPQRSHGPKDFLPDGSAAQAERLRRCREELWQLLAEQRVERLGSLVAAEWRPEEGFVELKSPAGKFWQTMGFSEQGRQRLHPEEALYLLECGSIHLFHQDLPLSIQEAYQLLLTDHTVTFLQYQVFSHLKRLGYVVRRFQPSSVLSPYERQLNLDASVQHLEDGDGKRKRSSSSPRSINKKAKALDNSLQPKSLAASSPPPCSQPSQCPEEKPQESSPMKGPGGPFQLLGSLGPSPGPAREGVGCSWESGRAENGVTGAGKRRWNFEQISFPNMASDSRHTLLRAPAPELLPANVAGRETDAESWCQKLNQRKEKLSRREREHHAEAAQFQEDVNADPEVQRCSSWREYKELLQRRQVQRSQRRAPHLWGQPVTPLLSPGQASSPGTPSACHIFEGHWQLRNHRTLERAWMNWDGLRLKEDVGGGSGPTSTVSSPAAAAGPVWEGLEMVSQESRGPSAYLCAADNTPS

SEQ ID NO: 85547 - protein, 111 aa, Homo sapiens
RPEPNSRSKRWLPSHVYVNQGEILRTEQWPRKLYMQLIPQQLLTTLVPLFRNSRLVQFHFTKDLETLKSLCRIMDNGFGNFVNGIRRVIANQQQVLQRNLEQEQQQRGMGG

SEQ ID NO: 85548 - protein, 78 aa, Homo sapiens
MSDQALEALSASLGTRQAEPELDLRSIKEVDEAKAKEEKLEKCGEDDETIPSEYRLKPATDKDGKPLLPEPEEKPKVR

SEQ ID NO: 85549 - protein, 351 aa, Homo sapiens
MDPLGDTLRRLREAFHAGRTRPAEFRAAQLQGLGRFLQENKQLLHDALAQDLHKSAFESEVSEVAISQGEVTLALRNLRAWMKDERVPKNLATQLDSAFIRKEPFGLVLIIAPWNYPLNLTLVPLVGALAAGNCVVLKPSEISKNVEKILAEVLPQYVDQSSPNLGRIINQKQFQRLRALLGCGRVAIGGQSDESDRYIAPTVLVDVQEMEPVMQEEIFGPILPIVNVQSLDEAIEFINRREKPLALYAFSNSSQVVKRVLTQTSSGGFCGNDGFMHMTLASLPFGGVGASGMGRYHGKFSFDTFSHHRACLLRSPGMEKLNALRYPPQSPRRLRMLLVAMEAQGCSCTLL

SEQ ID NO: 85550 - protein, 114 aa, Homo sapiens
MKLWVSALLMAWFGVLSCVQAEFFTSIGHMTDLIYAEKELVQSLKEYILVEEAKLSKIKSWANKMEALTSKSAADAEGYLAHPVNAYKLVKRLNTDWPALEDLVLQDSAAGFIA

SEQ ID NO: 85551 - protein, 133 aa, Homo sapiens
  MOD_RES (1)..(1): Any amino acid
XIPGMTLNHKQIPYQPQNNHDSLLSRWQNRTMENLVELHNKAPVWNSDTQSYVLNFRGRVTQASVKNFQIVHKNDPDYIVMQFGRVADDVFTLDYNYPLCAVQAFGIGLSSFDTDWPAPILVKSGCDHICDQL

SEQ ID NO: 85552 - protein, 90 aa, Homo sapiens
  MOD_RES (1)..(1): Any amino acid
XSEDYMKELGIGRASRKLGRLAKPTVTISTDGDVITIKTKSIFKNNEISFKLGEEFEEITPGGHKTKVRPTTVFQTHFKRMLVRYHPRVK

SEQ ID NO: 85553 - protein, 187 aa, Homo sapiens
MDFPLGQCRLVCSSLYMWLAKREDGAAILNMPSPSFYADFGPLNLAMVYRYCCKLNKKLKSYSLSRKKIVHYTCFDQRKRANAAFLIGAYAVIYLKKTPEEAYRALLSGSNPPYLPFRDASFGNCTYNLTILDCLQGIRKGLQHGFFDFETFDVDEYEHYERVENGDFNWIVPGKFLAFSGPHPKSK

SEQ ID NO: 85554 - protein, 586 aa, Homo sapiens
MAKSDTGKIGLINLGNTCYVNSILQALFMASDFRHCVLRLTENNSQPLMTKLQWLFGFLEHSQRPAISPENFLSASWTPWFSPGTQQDCSEYLKYLLDRLHEEEKTGTRICQKLKQSSSPSPPEEPPAPSSTSVEKMFGGKIVTRICCLCCLNVSSREEAFTDLSLAFPPPERCRRRRLGSVMRPTEDITARELPPPTSAQGPGRVGPRRQRKHCITEDTPPTSLYIEGLDSKEAGGQSSQEERIEREEEGKEERTEKEEVGEEEESTRGEGEREKEEEVEEEEEKVEKETEKEAEQEKEEDSLGAGTHPDAAIPSGERTCGSEGSRSVLDLVNYFLSPEKLTAENRYYCESCASLQDAEKVVELSQGPCYLILTLLRFSFDLRTMRRRKILDDVSIPLLLRLPLAGGRGQAYDLCSVVVHSGVSSESGHYYCYAREGAARPAASLGTADRPEPENQWYLFNDTRVSFSSFESVSNVTSFFPKDTAYVLFYRQRPREGPEAELGSSRVRTEPTLHKDLMEAISKDNILYLQEQEKEARSRAAYISALPTSPHWGRGFDEDKDEDEGSPGGCNPAGGNGGDFHRLVF

SEQ ID NO: 85555 - protein, 806 aa, Homo sapiens
MAVARVDAALPPGEGSVVNWSGQGLQKLGPNLPCEADIHTLILDKNQIIKLENLEKCKRLIQLSVANNRLVRMMGVAKLTLLRVLNLPHNSIGCVEGLKELVHLEWLNLAGNNLKAMEQINSCTALQHLDLSDNNISQIGDLSKLVSLKTLLLHGNIITSLRMAPAYLPRSLAILSLAENEIRDLNEISFLASLTELEQLSIMNNPCVMATPSIPGFDYRPYIVSWCLNLRVLDGYVISQKESLKAEWLYSQGKGRAYRPGQHIQLVQYLATVCPLTSTLGLQTAEDAKLEKILSKQRFHQRQLMNQSQNEELSPLVPVETRASLIPEHSSPVQDCQISQESESTFMPVASGLSPLSPTVELRLQGINLGLEDDGVADESVKGLESQVLDKEEEQPLWAANENSVQMMRSEINTEVNEKAGLLPCPEPTIISAILKDDNHSLTFFPESTEQKQSDIKKPENTQPENKETISQATSEKLPMILTQRSVALGQDKVALQKLNDAATKLQACWRGFYARNYNPQAKDVRYEIRLRRMQEHIVCLTDEIRRLRKERDEERIKKFVQEEAFRFLWNQVRSLQVWQQTVDQRLSSWHTDVPPISSTLVPSKHPLFTQSQESSCDQNADWFIASDVAPQEKSLPEFPDSGFHSSLTEQVHSLQHSLDFEKSSTEGSESSIMGNSIDTVRYGKESDLGDVSEEHGEWNKESSNNEQDNSLLEQYLTSVQQLEDADERTNFDTETRDSKLHIACFPVQLDTLSDGASVDESHGISPPLQGEISQTQENSKLNAEVQGQQPECDSTFQLLHVGVTV

SEQ ID NO: 85556 - protein, 697 aa, Homo sapiens
MAERKGTAKVDFLKKIEKEIQQKWDTERVFEVNASNLEKQTSKGKYFVTFPYPYMNGRLHLGHTFSLSKCEFAVGYQRLKGKCCLFPFGLHCTGMPIKACADKLKREIELYGCPPDFPDEEEEEEETSVKTEDIIIKDKAKGKKSKAAAKAGSSKYQWGIMKSLGLSDEEIVKFSEAEHWLDYFPPLAIQDLKRMGLKVDWRRSFITTDVNPYYDSFVRWQFLTLRERNKIKFGKRYTIYSPKDGQPCMDHDRQTGEGVGPQEYTLLKLKVLEPYPSKLSGLKGKNIFLVAATLRPETMFGQTNCWVRPDMKYIGFETVNGDIFICTQKAARNMSYQGFTKDNGVVPVVKELMGEEILGASLSAPLTSYKVIYVLPMLTIKEDKGTGVVTSVPSDSPDDIAALRDLKKKQALRAKYGIRDDMVLPFEPVPVIEIPGFGNLSAVTICDELKIQSQNDREKLAEAKEKIYLKGFYEGIMLVDGFKGQKVQDVKKTIQKKMIDAGDALIYMEPEKQVMSRSSDECVVALCDQWYLDYGEENWKKQTSQCLKNLETFCEETRRNFEATLGWLQEHACSRTYGLGTHLPWDEQWLIESLSDSTIYMAFYTVAHLLQGGNLHGQAESPLGIRPQQMTKEVWDYVFFKEAPFPKTQIAKEKLDQLKQEFEFWYPVDLRVSGKDLVPNHLSYYLYNHVAMWPEQR

SEQ ID NO: 85557 - protein, 52 aa, Homo sapiens
MDFPSSLRPALFLTGPLGLSDVPDLSFMCSWRDALTLPEAQPQNSEIPGTLA

SEQ ID NO: 85558 - protein, 52 aa, Homo sapiens
MEMDGDPYNLPAQGQGNIIITKYEQGHRAGAAVDLGHEQVDVRKYTNNLGIV

SEQ ID NO: 85559 - protein, 444 aa, Homo sapiens
MPRVKAAQAGRQSSAKRHLAEQFAVGEIITDMAKKEWKVGLPIGQGGFGCIYLADMNSSESVGSDAPCVVKVEPSDNGPLFTELKFYQRAAKPEQIQKWIRTRKLKYLGVPKYWGSGLHDKNGKSYRFMIMDRFGSDLQKIYEANAKRFSRKTVLQLSLRILDILEYIHEHEYVHGDIKASNLLLNYKNPDQVYLVDYGLAYRYCPEGVHKEYKEDPKRCHDGTIEFTSIDAHNGVAPSRRGDLEILGYCMIQWLTGHLPWEDNLKDPKYVRDSKIRYRENIASLMDKCFPEKNKPGEIAKYMETVKLLDYTEKPLYENLRDILLQGLKAIGSKDDGKLDLSVVENGGLKAKTITKRKKEIEESKEPGVEDTEWSNTQTEEAIQTRGPHERCGVLITGLPGDYGISSGLTDTQRPGAPGHHIPDMSTCAKCIHSSILDEFTEHL

SEQ ID NO: 85560 - protein, 119 aa, Homo sapiens
AQQTVFTIHPSHVQPAYTNPPHMAHVPQAHVQSGMVPSHPTAHAPMMLMTTQPPGGPQAALAQSALQPIPVSTTAHFPYMTHPSGEACVCRGRRGTPKHSARTGGMAGRASASSPAFEN

SEQ ID NO: 85561 - protein, 81 aa, Homo sapiens
MANKENELACAGHLPEKLHHDSRTYLVNSSDSGSSQTESPSSKYSGFFSEVSQDHETMAQVLFSRNMRLNVALTFWRKRSI

SEQ ID NO: 85562 - protein, 59 aa, Homo sapiens
MVTPLSNANQPEQVILYQGGQMFDGAPRFHGRVGFTGTMPATNVSIFINNTQLSDTGTY

SEQ ID NO: 85563 - protein, 106 aa, Homo sapiens
KIRELENSLHEAKESAMHKESKIIKMQKELEVTNDIIAKLQAKVHESNKCLEKTKETIQVLQDKVALGAKPYKEEIEDLKMKLVKIDLEKMKNAKEFEKEYVFVLI

SEQ ID NO: 85564 - protein, 87 aa, Homo sapiens
MPTTHQIHVEQSISLLLNFLLAAFDPEGHGKISVFAVKMALATLCGGKIMDKLRYIFSMISDSSGVMVYGRYDQFLREVLKLPTAVF

SEQ ID NO: 85565 - protein, 395 aa, Homo sapiens
MIPTFTALLCLGLSLGPRTHMQAGPLPKPTLWAEPGSVISWGNSVTIWCQGTLEAREYRLDKEESPAPWDRQNPLEPKNKARFSIPSMTEDYAGRYRCYYRSPVGWSQPSDPLELVMTGAYSKPTLSALPSPLVTSGKSVTLLCQSRSPMDTFLLIKERAAHPLLHLRSEHGAQQHQAEFPMSPVTSVHGGTYRCFSSHGFSHYLLSHPSDPLELIVSGSLEDPRPSPTRSVSTAAGPEDQPLMPTGSVPHSGLRRHWEVLIGVLVVSILLLSLLLFLLLQHWRQGKHRTLAQRQADFQRPPGAAEPEPKDGGLQRRSSPAADVQGENFCAAVKNTQPEDGVEMDTRAAASEAPQDVTYAQLHSFTLRQKATEPPPSQEGASPAEPSVYATLAIH

SEQ ID NO: 85566 - protein, 431 aa, Homo sapiens
MSASEGMKFKFHSGEKVLCFEPDPTKARVLYDAKIVDVIVGKDEKGRKIPEYLIHFNGWNRSWDRWAAEDHVLRDTDENRRLQRKLARKAVARLRSTGRKKKRCRLPGVDSVLKGLPTEEKDENDENSLSSSSDCSENKDEEISEESDIEEKTEVKEEPELQTRREMEERTITIEIPEVLKKQLEDDCYYINRRKRLVKLPCQTNIITILESYVKHFAINAAFSANERPRHHHVMPHANMNVHYIPAEKNVDLCKEMVDGLRITFDYTLPLVLLYPYEQAQYKKVTSSKFFLPIKESATSTNRSQEELSPSPPLLNPSTPQSTESQPTTGEPATPKRRKAEPEALQSLRRSTRHSANCDRLSESSASPQPKRRQQDTSASMPKLFLHLEKKTPVHSRSSSPIPLTPSKEGSAVFAGFEGRRTNEINEVKNV

SEQ ID NO: 85567 - protein, 676 aa, Homo sapiens
MNQSGTNQSSLSDSNQAGINQPSTNSLGMNQMDMNQGSASLYEMNQVDMKQPSMSQAGMRQSGTNLPDINQPDMKQPDTWQLGRSQPGMLQQELSQLVLSKAGISQPDPSQPGPSQSGPSQSRMRQIGTNQSGMSQPVMQQLDSQSGGSQPSMRQVGTSQLGTSQIGMSQPGTWQTGLSQPVLRQPNMSPPGMWQPGVQQPGISQQVPSHPDMSQPGMSQQVPSQPGIRQPDTSQSCKNQTDMSQPDANQSSLSDSNQTGIIQPSPSLLGMNQMDMNQWSASLYEMNQVDMKQPSMSQAGMRQSGTNLPDINQPGMKQPGTWQLGRSQPGMWPQSLSELVLSEASISQPGPPQRAPSQSGPRQSSTSQAGTNQSGISQPVMWQLDMRQSGGSQPSMRQVGTSQSGTSQIGMSQPGTWQTGLSQPVPRQPNKSPPGMWQRGMWQPGMSQQVPSQLGMRQPGTSQSSKNQTGMSHPGRGQPGIWEPGPSQPGLSQQDLNQLVLSQPGLSQPGRSQPSVSQMGMRQTSMDYFQIRHAEAGDCPEILRLIKELAACENMLDAMELTAADLLRDGFGDNPLFYCLIAEVNDQQKPSGKLTVGFAMYYFTYDSWTGKVLYLEDFYVTQAYQGLGIGAEMLKRLSQASINYYTSRGALDLSSEEGWHLFRFNREELLDMAWEE

SEQ ID NO: 85568 - protein, 42 aa, Homo sapiens
EKDIDECASDPCVNGGLCQDLLNKFQCLCDVAFAGERCEVDY

SEQ ID NO: 85569 - protein, 197 aa, Homo sapiens
MEELTEVITAAEFHPNSCNTFVYSSSKGTIRLCDMRASALCDRHSKLFEEPEDPSNRSFFSEIISSISDVKFSHSGRYMMTRDYLSVKIWDLNMENRPVETYQVHEYLRSKLCSLYENDCIFDKFECCWNGSDSVVMTGSYNNFFRMFDRNTKRDITLEASRENNKPRTVLKPRKVCASGKRKKDEISVDSLDFNKK

SEQ ID NO: 85570 - protein, 141 aa, Homo sapiens
MSTFRQEDVEDHYEMGEELGSGQFAIVRKCRQKGTGKEYAAKFIKKRRLSSSRRGVSREEIEREVNILREIRHPNIITLHDIFENKTDVVLILELVSGGELFDFLAEKESLTEDEATQFLKQILDGVHYLHSKRIAHFDLK

SEQ ID NO: 85571 - protein, 269 aa, Homo sapiens
MLPFHHRDPGIVGLLTSDRLPAGRCIFYGMIADGTHTNPAALRIAHRAHPQGLVLVTDAIPALGLGNGRHTLGQQEVEVDGLTAYVAGERPDPLGPRSQPACQVAHDPPRACPLCSQGTKTLSGSIAPMDVCVRHFLQATGCSMESALEAASLHPAQLLGLEKSKGTLDFGADADFVVLDDSLHVQATYISGPVLAGCGDPAWCWRAVWEAPVCPAHPISVILPSSVSPWPWHTPMWQTRAVRLPEQLRGGWASGALLALRTATVGSDV

SEQ ID NO: 85572 - protein, 15 aa, Homo sapiens
MWNPHIRRANCNLSL

SEQ ID NO: 85573 - protein, 86 aa, Homo sapiens
MLWKLLLRSQSCRLCSFRKMRSPPKYRPFLACFTYTTDKQSSKENTRTVEKLYKCSVDIRKIRRLKGWVLLEDETYVEEIANILQE

SEQ ID NO: 85574 - protein, 80 aa, Homo sapiens
WDKENGVYTLNFHGRVTRASVKNFQIVDPKHRELLETSLAGPEEHLVLQFGRVGPDTFTMDFCFPFSPLQAFSICLSSFN

SEQ ID NO: 85575 - protein, 314 aa, Homo sapiens
MIRNGRGAAGGAEQPGPGGRRAVRVWCDGCYDMVHYGHSNQLRQARAMGDYLIVGVHTDDDITLTVDGRDTYEEVKQAGRYRECKRTQGVSTTDLVGRMLLVTKAHHSSQEMSSEYREYADSFGKCPGGRNPWTGVSQFLQTSQKIIQFASGKEPQPGETVIYVAGAFDLFHIGHVDFLEKVHRLAERPYIIAGLHFDQEVNHYKGKNYPIMNLHERTLSVLACRYVSEVVIGAPYAVTAELLSHFKVDLVCHGKTEIIPDRDGSDPYQEPKRRGIFRQIDSGSNLTTDLIVQRIITNRLEYEARNQKKEAKEL

SEQ ID NO: 85576 - protein, 831 aa, Homo sapiens
MGGRVFLVFLAFCVWLTLPGAETQDSRGCARWCPQDSSCVNATACRCNPGFSSFSEIITTPMETCDDINECATLSKVSCGKFSDCWNTEGSYDCVCSPGYEPVSGAKTFKNESENTCQDVDECQQNPRLCKSYGTCVNTLGSYTCQCLPGFKLKPEDPKLCTDVNECTSGQNPCHSSTHCLNNVGSYQCRCRPGWQPIPGSPNGPNNTVCEDVDECSSGQHQCDSSTVCFNTVGSYSCRCRPGWKPRHGIPNNQKDTVCEDMTFSTWTPPPGVHSQTLSRFFDKVQDLGRDYKPGLANNTIQSILQALDELLEAPGDLETLPRLQQHCVASHLLDGLEDVLRGLSKNLSNGLLNFSYPAGTELSLEVQKQVDRSVTLRQNQAVMQLDWNQAQKSGDPGMGKLLAEAPLVLEPEKQMLLHETHQGLLQDGSPILLSDVISAFLSNNDTQNLSSPVTFTFSHRSVIPRQKVLCVFWEHGQNGCGHWATTGCSTIGTRDTSTICRCTHLSSFAVLMAHYDVQEEDPVLTVITYMGLSVSLLCLLLAALTFLLCKAIQNTSTSLHLQLSLCLFLAHLLFLVAIDQTGHKVLCSIIAGTLHYLYLATLTWMLLEALYLFLTARNLTVVNYSSINRFMKKLMFPVGYGVPAVTVAISAASRPHLYGTPSRCWLQPEKGFIWGFLGPVCAIFSVNLVLFLVTLWILKNRLSSLNSEVSTLRNTRMLAFKATAQLFILGCTWCLGILQVGPAARVMAYLFTIINSLQGVFIFLVYCLLSQQVREQYGKWSKGIRKLKTESEMHTLSSSAKADTSKPSTPGTVVQACNASTLGGQSRKIT

SEQ ID NO: 85577 - protein, 76 aa, Homo sapiens
MSWSPSLTTQTCGAWEMKERLGTGGFGNVIRWHNQVGPLCSLGRGGEPGPLLTASTFSDPAGPRAHLWLWSSWDSE

SEQ ID NO: 85578 - protein, 59 aa, Homo sapiens
MTLHATRGAALLSWVNSLHVADPVEAVLQLQDCSIFIKIIDRIHGTEEGQQILKQPVSE

SEQ ID NO: 85579 - protein, 41 aa, Homo sapiens
  MOD_RES (1)..(1): Any amino acid
XPFFIFNLAETAHMPSKVKAQLYAQAYDCTDSIKSDKRGFL

SEQ ID NO: 85580 - protein, 78 aa, Homo sapiens
MRDLARGMFVFGYDNYMAHAFPQDELNPIHCRGRGPDRGDPSNLNINDVLGNYSLTLVDALDTLAGPGKPPFCSQNNN

SEQ ID NO: 85581 - protein, 64 aa, Homo sapiens
  MOD_RES (1)..(1): Any amino acid
XLGIHFDHIWQKTLTVLNPMKPVDGSIMNETDLTGPILFCVALGATLLLGHLWNHVIPGHHWLV

SEQ ID NO: 85582 - protein, 336 aa, Homo sapiens
MPHSYPALSAEQKKELSDIALRIVAPGKGILAADESVGSMAKRLSQIGVENTEENRRLYRQVLFSADDRVKKCIGGVIFFHETLYQKDDNGVPFVRTIQDKGIVVGIKVDKGVVPLAGTDGETTTQGLDGLSERCAQYKKDGADFAKWRCVLKISERTPSALAILENANVLARYASICQQVLAAVYKALSDHHVYLEGTLLKPNMVTPGHACPIKYTPEEIAMATVTALRRTVPPAVPGVTFLSGGQSEEEASFNLNAINRCPLPRPWALTFSYGRALQASALNAWRGQRDNAGAATEEFIKRAEVNGLAAQGKYEGSGEDGGAAAQSLYIANHAY

SEQ ID NO: 85583 - protein, 93 aa, Homo sapiens
MNQVWIGCTGCNLGCPLTLSFTSVCLYSRLNKICSGLSFQRKNQFMQRLHNYWLLKRQARNGVPLIRRLHSHLQSQRNAEQREQDEKTSAVKE

SEQ ID NO: 85584 - protein, 121 aa, Homo sapiens
MKRRNKIQPCLSKPAFASLLRFHQFHPFLCAADFRKIASLYGSDKFDLPYGMRTSAEYFRLALSKLQSCDLFDEFDNIPCKKCVVVGNGGVLKNKTLGEKIDSYDVIIRMNNGPVLGHEEE

SEQ ID NO: 85585 - protein, 256 aa, Homo sapiens
GSSTPPSSPTLLDALLQNLYDFGGTEGETEQKKIIKKRENKKRDVMASAALAAEPSPLPGSLIRGQRKSASSFFKELREERHCAPSGTPTGPEILAAAVPPSSLKNNREQVEVVEFHSNKKRKLTPDHNKNTKARLEVHRFGITGYGKGKERILEQERAIMLGAKPPKKSYVNYKVLQEQIKEKKAAKEEEKRLAQETDIFKKKKRKGQEDRKSKKKSAPSILSNGRIGQVGKFKNGTLILSPVDIKKINSSRVAK

SEQ ID NO: 85586 - protein, 85 aa, Homo sapiens
MSAHSMLCERIAIAKELIKRAESLSRSRKGGIEGGAKLCSKLKAELKFLQKVEAGKVAIKESHLQSTNLTHLRAIVESAENLEEV

SEQ ID NO: 85587 - protein, 216 aa, Homo sapiens
  MOD_RES (1)..(1): Any amino acid
XPKSLSPPQSQSKLSDSYSNTLPVRKSVTPKNSYATTAENKTLPRSSSMAAGLERNGRMRVKAIFSHAAGDNSTLLSFKEGDLITLLVPEARDGWHYGESEKTKMRGWFPFSYTRVLDSDGSDRLHMSLQQGKSSSTGNLLDKDDLAIPPPDYGAASRAFPAQTASGFKQRPYSVAVPAFSQGLDDYGARSMSRNPFAHVQLKPTVTNDRSAPLLS

SEQ ID NO: 85588 - protein, 63 aa, Homo sapiens
MELPAVNLKVILLGHWLLTTWHKDCTPCRSWEGDVEVLIRAPQGLPHSEASALQLDFHLYHLF

SEQ ID NO: 85589 - protein, 601 aa, Homo sapiens
MARLTKRRQADTKAIQHLWAAIEIIRNQKQIANIDRITKYMSRVHGMHPKETTRQLSLAVKDGLIVETLTVGCKGSKAGIEQEGYWLPGDEIDWETENHDWYCFECHLPGEVLICDLCFRVYHSKCLSDEFRLRDSSSPWQCPVCRSIKKKNTNKQEMGTYLRFIVSRMKERAIDLNKKGKDNKHPMYRRLVHSAVDVPTIQEKVNEGKYRSYEEFKADAQLLLHNTVIFYGDSEQADIARMLYKDTCHELDELQLCKNCFYLSNARPDNWFCYPCIPNHELVWAKMKGFGFWPAKVMQKEDNQVDVRFFGHHHQRAWIPSENIQDITVNIHRLHVKRSMGWKKACDELELHQRFLREGRFWKSKNEDRGEEEAESSISSTSNEQLKVTQEPRAKKGRRNQSVEPKKEEPEPETEAVSSSQEIPTMPQPIEKVSVSTQTKKLSASSPRMLHRSTQTTNDGVCQSMCHDKYTKIFNDFKDRMKSDHKRETERVVREALEKLRSEMEEEKRQAVNKAVANMQGEMDRKCKQVKEKCKEEFVEEIKKLATQHKQLISQTKKKQWCYNCEEEAMYHCCWNTSYCSIKCQQEHWHAEHKRTCRRKR

SEQ ID NO: 85590 - protein, 82 aa, Homo sapiens
MAPVKISHVVSFSSQDPKYPVENLLNPDSPRRPWLGCPQDKSGQLKVELQLERAVPTGYIDVGNCGCAFLQIDVGHSSWPLD

SEQ ID NO: 85591 - protein, 16 aa, Homo sapiens
MKDVNVENVNQQRGEK

SEQ ID NO: 85592 - protein, 143 aa, Homo sapiens
MTSSRLWFSLLLAAAFAGRATALWPWPQNFQTSDQRYVLYPNNFQFQYDVSSAAQPGCSVLDEAFQRYRDLLFGSGSWPRPYLTGKRHTLEKNVLVVSVVTPGCNQLPTLESVENYTLTINDDQCLLLSETVWGALRVLYQQD

SEQ ID NO: 85593 - protein, 414 aa, Homo sapiens
MSEKTRQNKLAEAKKKFTDYRQWNIAGVGTRATDTKKKKINNGTNPETTTSEGCHSPEDTQQNRAQLKEEKKASHQHQEALRREIEAQDHTIRILTCQKTELETALYYSQDAARKFEDGNLGTPSSFNLALSQAFRGSPLGCVSTSLIPGESKDLAGRLHHSWHFAGELQRALSAVSTWHKKADRYIEELTKERDALSLELYRNTITNEELKKKNAELQEKLRLAESEKSEIQLNVKELKRKLERAKFLLPQVQTNTLQEEMWRQEEELREQEKKIRKQEEKMWRQEERLREQEGKMREQEEKMRRQEEMREKEERIRDQKEKMQERLPEHEERCSEPCLPPSKVLCNMSHTGSVEPAGGEAGEGSPQDNPTAQEIMQLFCGMKNAQQCPGLGSTSCIPFFYRGDKRKMKIINI

SEQ ID NO: 85594 - protein, 360 aa, Homo sapiens
MAEGYGACLINKPELVQDMVKQVRNQVETPGFSVSIKIRIHDDLKRTVDLCQKAEATGVSWITVHGRTAEERHQPVHYDSIKIIKENMSIPVIANGDIRSLKEAENVWRITGTDGVKKKMTLQWAAVATFLYAEIGLILIFCLPFIPPQRWQKIFSFNVWGKIATFWNKAFLTIIILLIVLFLDAVREVRKYSSVHTIEKSSTSRPDAYEHTQMKLFRSQRNLYISGFSLFFWLVLRRLVTLITQLAKELSNKGVLKTQAENTNKAAKKFMEENEKLKRILKSHGKDEECVLEAENKKLVEDQEKLKTELRKTSDALSKAQNDVMEMKMQSERLSKEYDQLLKEHSELQDRLERGNKKRL

SEQ ID NO: 85595 - protein, 73 aa, Homo sapiens
RGNLYKAYMQLVQVPRAENPTINKRTLQRLMYNTCPARLAQDCHSLQNFFGAERQIVQITTFTLSKPDTKKTT

SEQ ID NO: 85596 - protein, 64 aa, Homo sapiens
MVAKQHGKVVMAKVDIDDHTDLAIEYEVSAVPTVLAMKNGDVVDKFVGIKDEDQLEAFLKKLIG

SEQ ID NO: 85597 - protein, 135 aa, Homo sapiens
MPAVASVPKELYLSSSLKDLNKKTEVKPEKISTKSYVHSALKIFKTAEECRLDRDEERAYVLYMKYVTVYNLIKKRPDFKQQQDYFHSILGPGNIKKAVEEAERLSESLKLRYEEAEVRKKLEEKDRQEEAQRLQ

SEQ ID NO: 85598 - protein, 142 aa, Homo sapiens
MPCGFSPSPVAHHLVPGPPDTPAQQLRCGWTVGGWLLSLVRGLLPCLPPGARTAEGPIMVLAGPLAVSLLLPSLTLLVSHLSSSQDVSSEPSSEQQLCALSKHPTVAFEDLQPWVSNFTYPGARDFSQLALDPSGNQLIVGA

SEQ ID NO: 85599 - protein, 149 aa, Homo sapiens
SWGIPFKIGQPKKQIVPKTVERDFEREYGKLQQLEEQTRRLQKDMKKSTDADLAMSKSAVKISLDLLSNPLCEQDQDLLNMVTALDTAMKRMDAFNQEKVNQIQKTVIEPLKKRNQLFWSWVTSEWPQSHELPGLRSLILDTAGLWLAW

SEQ ID NO: 85600 - protein, 69 aa, Homo sapiens
MLLTLAGGALFFPGLFALCTWALRRSQPGWSRTDCVMISTRLVSSVHAVLATGSGIVIIRSCDDVITGS

SEQ ID NO: 85601 - protein, 195 aa, Homo sapiens
SRMEDTEPFSAELLSAMMRLWGDSGIQECFNRSREYQLNDSAKYYLDSLDRIGAADYQPTEQDILRTRVKTTGIVETHFTFKNLHFRLFDVGGQRSERKKWIHCFEDVTAIIFCVALSGYDQVLHEDETTNRMHESLMLFDSICNNKFFIDTSIILFLNKKDLFGEKIKKSPLTICFPEYTDCFTDSLLLTLISW

SEQ ID NO: 85602 - protein, 375 aa, Homo sapiens
MGRKKIQISRILDQRNRQVTFTKRKFGLMKKAYELSVLCDCEIALIIFNSANRLFQYASTDMDRVLLKYTEYSEPHESRTNTDILETLKRRGIGLDGPELEPDEGPEEPGEKFRRLAGEGGDPALPRPRLYPAAPAMPSPDVVYGALPPPGCDPSGLGEALPAQSRPSPFRPAAPKAGPPGLVHPLFSPSHLTSKTPPPLYLPTEGRRSDLPGGLAGPRGGLNTSRSLYSGLQNPCSTATPGPPLGSFPFLPGGPPAPNSCPPEYGLGDPPPPPGLLQPPTLAPWQPSRGDGPPAVSSQPSGGRSLGEEGPPTRGASPPTPPVSIKSERLSPAPGGPGDFPKTFPYPLLLARSLAEPLRPGPALRRLPLADGWPR

SEQ ID NO: 85603 - protein, 730 aa, Homo sapiens
MGVRNCLYGNNMSGQRDIPPEIGEQPEQPPLEAPGAAAPGAGPSPAEEMETEPPHNEPIPVENDGEACGPPEVSRPNFQVLNPAFREAGAHGSYSPPPEEAMPFEAEQPSLGGFWPTLEQPGFPSGVHAGLEAFGPALMEPGAFSGARPGLGGYSPPPEEAMPFEFDQPAQRGCSQLLLQVPDLAPGGPGAAGVPGAPPEEPQALRPAKAGSRGGYSPPPEETMPFELDGEGFGDDSPPPGLSRVIAQVDGSSQFAAVAASSAVRLTPAANAPPLWVPGAIGSPSQEAVRPPSNFTGSSPWMEISGPPFEIGSAPAGVDDTPVNMDSPPIALDGPPIKVSGAPDKRERAERPPVEEEAAEMEGAADAAEGGKVPSPGYGSPAAGAASADTAARAAPAAPADPDSGATPEDPDSGTAPADPDSGAFAADPDSGAAPAAPADPDSGAAPDAPADPDSGAAPDAPADPDAGAAPEAPAAPAAAETRAAHVAPAAPDAGAPTAPAASATRAAQVRRAASAAPASGARRKIHLRPPSPEIQAADPPTPRPTRASAWRGKSESSRGRRVYYDEGVASSDDDSSGDESDDGTSGCLRWFQHRRNRRRRKPQRNLLRNFLVQAFGGCFGRSESPQPKASRSLKVKKVPLAEKRRQMRKEALEKRAQKRAEKKRSKLIDKQLQDEKMGYMCTHRLLLLGAGESGKSTIVKQMRILHVNGFNGEGGEEDPQAARSNSDGI

SEQ ID NO: 85604 - protein, 102 aa, Homo sapiens
MKSQEEVEVAGIKLCKAMSLGSVTFTDVAIDFSQDEWEWLNLAQRSLYKKVMLENYRNLVSVGLCISKPDVISLLEQEKDPWVIKGGMNRGLCPDILKMPHQ

SEQ ID NO: 85605 - protein, 103 aa, Homo sapiens
MEAVGDTLEELWISYNFIEKLKGIHIMKKLKILYMSNNLVKDWAEFVKLAELPCLEDLVFVGNPLEEKHSAENNWIEEATKRVPKLKKLDGTPVIKGDEEEDN

SEQ ID NO: 85606 - protein, 113 aa, Homo sapiens
MTLLWCVVSLYFYGILQSDASERCDDWGLDTMRQIQVFEDEPARIKCPLFEHFLKFNYSTAHSAGLTLIWYWTRQDRDLEEPINFRLPENRISKEKDVLWFRPTLLNDTGNYT

SEQ ID NO: 85607 - protein, 100 aa, Homo sapiens
MATRGHVQDPNDRRLRPIYDYLDNGNNKMAIQQADKLLKKHKDLHCAKVLKAIGLQRTGKQEEAFTLAQEVAALEPTDDNSLQALTILYREMHRRWHGSI

SEQ ID NO: 85608 - protein, 121 aa, Homo sapiens
  MOD_RES (1)..(1): Any amino acid
XNQRPAPCYDPCDLSNTPMDGQLSTHLPALALRHRMADSIPHPPEQCWWKAFLRAWTSPMPPRGTLPPARPGWACSPVRTAAWTSPPSTGPSPTMTPTRRSPLPSRVRRSSGSCRPWHQRA

SEQ ID NO: 85609 - protein, 338 aa, Homo sapiens
EDEEGLGPPGPASLGTTALFPRKAQPPQAFRGDGVPRVLGGQERPGPGPAHPGGAAHVAPQLQPPDHGDWTYEEQFKQLYELDGDPKRKEFLDDLFSFMQKRGTPVNRIPIMAKQVLDLFMLYVLVTEKGGLVEVINKKLWREITKGLNLPTSITSAAFTLRTQYMKYLYPYECEKRGLSNPNELQAAIDSNRREGRRQSFGGSLFAYSPGGAHGMLSSPKLPVSSLGLAASTNGSSITPAPKIKKASESRQDSAVNLTGTNGSNSISMSVEINGIMYTGVLFAQPPAPTPTSAPNKGGGGGGGSSSNAGGRGGNTGTSGGQAGPAGLSTPSTSTSNN

SEQ ID NO: 85610 - protein, 36 aa, Homo sapiens
MNKVFWREMVECFNKISRDADCRAVVISGAGKMFTA

SEQ ID NO: 85611 - protein, 121 aa, Homo sapiens
MAQEKMKLGFKSLPSSTTADGNILRRVNSAPLINGLGFNSQVLQADMLRIRTNRTTFRNRRSLLLPPPPFHGSISRLHQIKQEEAMDLINRETMSEWKLQSEIQISHSWEEGLKLSTSSYF

SEQ ID NO: 85612 - protein, 97 aa, Homo sapiens
  MOD_RES (1)..(1): Any amino acid
XVVPLSFEVTPTVEEQMDTVTGPNEEFTPVLGSPVTPPGIMVGEPSISPALPALEASSERRTVVPSITRVNTAASYGLDQLESEGIHALKGIFSRTG

SEQ ID NO: 85613 - protein, 202 aa, Homo sapiens
MASDEGKLFVGGLSFDTNEQSLEQVFSKYGQISEVVVVKDRETQRSRGFGFVTFENIDDAKDAMMAMNGKSVDGRQIRVDQAGKSSDNRSRGYRGGSAGGRGFFRGGRGRGRGFSRGGGDRGYGGNRFESRSGGYGGSRDYYSSRSQSGGYSDRSSGGSYRDSYDSYEAGQRAEARGIPGRPQTASRLASSAVASRVLSILC

SEQ ID NO: 85614 - protein, 243 aa, Homo sapiens
  MOD_RES (1)..(1): Any amino acid
XLPCEFLRPGCGAPLSPGAQLGRGAPTSAFPPPAAEAHPAARRGLRSPQLPSGAMSQNGAPGMQEESLQGSWVELHFSNNGNGGSVPASVSIYNGDMEKILLDAQHESGRSSSKSSHCDSPPRSQTPQDTNRASETDTHSIGEKNSSQSEEDDIERRKEVESILKKNSDWIWDWSSRPENIPPKEFLFKHPKRTATLSMRNTSVMKKGGIFSAEFLKVFLPSLLLSHLLAIGLGDGASPRCPG

SEQ ID NO: 85615 - protein, 44 aa, Homo sapiens
  MOD_RES (1)..(1): Any amino acid
XTPWRVYHLISVMILGRVIMQIIKDMVLSRTRGAQLWRSLSERS

SEQ ID NO: 85616 - protein, 17 aa, Homo sapiens
RALAYALGLCEVLMNEG

SEQ ID NO: 85617 - protein, 244 aa, Homo sapiens
MFCVTPPELETKMNITKGGLVLFSANSNSSCMELSKKIAERLGVEMGKVQVYQEPNRETRVQIQESVRGKDVFIIQTVSKDVNTTIMELLIMVYACKTSCAKSIIGVIPYFPYSKQCKMRKRGSIVSKLLASMMCKAGLTHLITMDLHQKEIQGFFNIPVDNLRASPFLLQYIQEEIPDYRNAVIVAKSPASAKRAQSFAERLRLGIAVIHGEAQDAESDLVDGRHSPPMVRSVAAIHPSLEIP

SEQ ID NO: 85618 - protein, 749 aa, Homo sapiens
MMDLVLEEDVTVPGTLSGCSGLVPSVPDDLDGINPNAGLGNVLPNVSEETVSPTRARNMKDFENQITELKKENFNLKLRIYFLEERMQQEFHGPTEHIYKTNIELKVEVESLKRELQEREQLLIKASKAVESLAEAGGSEIQRVKEDARKKVQQVEDLLTKRILLLEKDVTAAQAELEKAFAGTETEKALRLRLESKLSEMKKMHEGDLAMALVLDEKDRLIEELKLSLKSKEALIQCLKEEKSQMACPDENVSSGELRGLCAAPREEKERETEAAQMEHQKERNSFEERIQALEEDLREKEREIATEKKNSLKRDKAIQGLTMALKSKEKKVEELNSEIEKLSAAFAKAREALQKAQTQEFQGSEDYETALSGKEALSAALRSQNLTKSTENHRLRRSIKKITQELSDLQQERERLEKDLEEAHREKSKGDCTIRDLRNEVEKLRNEVNEREKAMENRYKSLLSESNKKLHNQEQVIKHLTESTNQKDVLLQKFNEKDLEVIQQNCYLMAAEDLELRSEGLITEKCSSQQPPGSKTIFSKEKKQSSDYEELIQVLKKEQDIYTHLVKSLQESDSINNLQAELNKIFALRKQLEQDVLSYQNLRKTLEEQISEIRRREEESFSLYSDQTSYLSICLEENNRFQVEHFSQEELKKKVSDLIQLVKELYTDNQHLKKTIFDLSCMGFQGNGFPDRLASTEQTETSLTYSYIFMLHTFLGCIFTPFHAPCSFWLARRTRTRSKLGRMTRLIS

SEQ ID NO: 85619 - protein, 17 aa, Homo sapiens
MRETFRNLASVGKQWED

SEQ ID NO: 85620 - protein, 1433 aa, Homo sapiens [sequence omitted]

SEQ ID NO: 85621 - protein, 1274 aa, Homo sapiens
MPEPGKKPVSAFSKKPRSVEVAAGSPAVFEAETERAGVKVRWQRGGSDISASNKYGLATEGTRHTLTVREVGPADQGSYAVIAGSSKVKFDLKVIEAEKAEPMLAPAPAPAEATGAPGEAPAPAAELGESAPSPKGSSSAALNGPTPGAPDDPIGLFVMRPQDGEVTVGGSITFSARVAGASLLKPPVVKWFKGKWVDLSSKVGQHLQLHDSYDRASKVYLFELHITDAQPAFTGSYRCEVSTKDKFDCSNFNLTVHEAMGTGDLDLLSAFRRTSLAGGGRRISDSHEDTGILDFSSLLKKSSSFRTPRDSKLEAPAEEDVWEILRQAPPSEYERIAFQYGVTDLRGMLKRLKGMRRDEKKSTAFQKKLEPAYQVSKGHKIRLTVELADHDAEVKWLKNGQEIQMSGSKYIFESIGAKRTLTISQCSLADDAAYQCVVGGEKCSTELFVKEPPVLITRPLEDQLVMVGQRVEFECEVSEEGAQVKWLKDGVELTREETFKYRFKKDGQRHHLIINEAMLEDAGHYALCTSGGQALAELIVQEKKLEVYQSIADLMVGAKDQAVFKCEVSDENVRGVWLKNGKELVPDSRIKVSHIGRVHKLTIDDVTPADEADYSFVPEGFACNLSAKLHFMEVKIDFVPRQEPPKIHLDCPGRIPDTIVVVAGNKLRLDVPISGDPAPTVIWQKAITQGNKAPARPAPDAPEDTGDSDEWVFDKKLLCETEGRVRVETTKDRSIFTVEGAEKEDEGVYTVTVKNPVGEDQVNLTVKVIDVPDAPAAPKISNVGEDSCTVQWEPPAYDGGQPILGYILERKKKKSYRWMRLNFDLIQELSHEARRMIEGVVYEMRVYAVNAIGMSRPSPASQPFMPIGPPSEPTHLAVEDVSDTTVSLKWRPPERVGAGGLDGYSVEYCPEGCSEWVAALQGLTEHTSILVKDLPTGARLLFRVRAHNMAGPGAPVTTTEPVTVQEILQRPRLQLPRHLRQTIQKKVGEPVNLLIPFQGKPRPQVTWTKEGQPLAGEEVSIRNSPTDTILFIRAARRVHSGTYQVTVRIENMEDKATLVLQVVDKPSPPQDLRVTDAWGLNVALEWKPPQDVGNTELWGYTVQKADKKTMEWFTVLEHYRRTHCVVPELIIGNGYYFRVFSQNMVGFSDRAATTKEPVFIPRPGITYEPPNYKALDFSEAPSFTQPLVNRSVIAGYTAMLCCAVRGSPKPKISWFKNGLDLGEDARFRMFSKQGVLTLEIRKPCPFDGGIYVCRATNLQGEARCECRLEVRVPQ

SEQ ID NO: 85622 - protein, 35 aa, Homo sapiens
  MOD_RES (1)..(1): Any amino acid
XEGFQCWRGCWWVLPRPWLFLGSRRIALEASSLAR

SEQ ID NO: 85623 - protein, 163 aa, Homo sapiens
  MOD_RES (1)..(1): Any amino acid
XGHEFVLTEELDKALACFRNAIRVNPRHYNAWYGLGMIYYKQEKFSLAEMHFQKALDINPQSSVLLCHIGVVQHALKKSEKALDTLNKAIVIDPKNPLCKFHRASVLFANEKYKSALQELEELKQIVPKESLVYFLIGKILKEPITRLKRQLISVIFQMMRSQ

SEQ ID NO: 85624 - protein, 66 aa, Homo sapiens
MASPFSGALQLTDLDDFIGPSQECIKPVKVEKRAGSGVAKIRIEDDGSYFQINQSPPSAFSCPTAL

SEQ ID NO: 85625 - protein, 88 aa, Homo sapiens
  MOD_RES (1)..(1): Any amino acid
XDRSGPGHRLRGAPTSREGFALGGARVPSARIYSSETTTGTSSNSSQSTSNSGLAPNPTNATTKAAGGALQSTASLFVVSLSLLHLYS

SEQ ID NO: 85626 - protein, 121 aa, Homo sapiens
MAGPGVPGAPAARWKRHIVRQLRLRDRTQKALFLELVPAYNHLLEKAELLDKFSKKLQPEPNSVTPTTHQGPWEESELDSDQVPSLVALRVKWQEEEEGLRLVCGELAFQEGGGQVSSRLP

SEQ ID NO: 85627 - protein, 153 aa, Homo sapiens
IFSRLERLEILSSKEPPNKRQNARLRVDQLKYDVQHLQTALRNFQHRRHAREQQERQREELLSRTFTTNDSDTTIPMDESLQFNSSLQKVHNGMDDLILDGHNILDGLRTQRLTLKGTQKKILDIANMLGLSNTVMRLIEKRAFQDKYFMIAM

SEQ ID NO: 85628 - protein, 112 aa, Homo sapiens
MGPLEFRDVAIEFSLEEWHCLDTAQQNLYRDVMLENYRHLVFLGIVVTKPDLITCLEQGKKPFTVKRHEMIAKSPDGVHFLIQAGVQQRNLCVIIATFTSQVQAILLPQSPK

SEQ ID NO: 85629 - protein, 647 aa, Homo sapiens
MQQRAGSKTAGPPCQWSRMASEGTNIPSPVVRQIDKQFLICSICLERYKNPKVLPCLHTFCERCLQNYIPAHSLTLSCPVCRQTSILPEKGVAALQNNFFITNLMDVLQRTPGSNAEESSILETVTAVAAGKPLSCPNHDGNVMEFYCQSCETAMCRECTEGEHAEHPTVPLKDVVEQHKASLQVQLDAVNKRLPEIDSALQFISEIIHQLTNQKASIVDDIHSTFDELQKTLNVRKSVLLMELEVNYGLKHKVLQSQLDTLLQGQESIKSCSNFTAQALNHGTETEVLLVKKQMSEKLNELADQDFPLHPRENDQLDFIVETEGLKKSIHNLGTILTTNAVASETVATGEGLRQTIIGQPMSVTITTKDKDGELCKTGNAYLTAELSTPDGSVADGEILDNKNGTYEFLYTVQKEGDFTLSLRLYDQHIRGSPFKLKVIRSADVSPTTEGVKRRVKSPGSGHVKQKAVKRPASMYSTGKRKENPIEDDLIFRVGTKGRNKGEFTNLQGVAASTNGKILIADSNNQCVQIFSNDGQFKSRFGIRGRSPGQLQRPTGVAVHPSGDIIIADYDNKWVSIFSSDGKFKTKIGSGKLMGPKGVSVDRNGHIIVVDNKACCVFIFQPNGKIVTRFGSRGNGDRQFAGTLDGV

SEQ ID NO: 85630 - protein, 722 aa, Homo sapiens
MQGKNVLAKALYDNVAESPDELSFRKGDIMTVLEQDTQGLDGWWLCSLHGRQGIVPGNRLKILVVVPTRVGQGYVYEAAQPEQDEYDIPRHLLAPGPQDIYDVPPVRGLLPSQYGQEVYDTPPMAVKGPNGRDPLLEVYDVPPSVEKGLPPSNHHAVYDVPPSVSKDVPDGPLLREETYDVPPAFAKAKPFDPARTPLVLAAPPPDSPPAEDVYDVPPPAPDLYDVPPGLRRPGPGTLYDVPRERVLPPEVADGGVVDSGVYAVPPPAEREAPAEGKRLSASSTGSTRSSQSASSLEVAGPGREPLELEVAVEALARLQQGVSATVAHLLDLAGSAGATGSWRSPSEPQEPLVQDLQAAVAAVQSAVHELLEFARSAVGNAAHTSDRALHAKLSRQLQKMEDVHQTLVAHGQALDAGRGSSGATLEDLDRLVACSRAVPEDAKQLASFLHGNASLLFRRTKATAPGPEGGGTLHPNPTDKTSSIQSRPLPSPPKFTSQDSPDGQYENSEGGWMEDYDYVHLQGKEEFEKTQKELLEKGSITRQGKSQLELQQLKQFERLEQEVSRPIDHDLANWTPAQPLAPGRTGGLGPSDRQLLLFYLEQCEANLTTLTNAVDAFFTAVATNQPPKIFVAHSKFVILSAHKLVFIGDTLSRQAKAADVRSQVTHYSNLLCDLLRGIVATTKAAALQYPSPSAAQDMVERVKELGHSTQQFRRVLGQLAAA

SEQ ID NO: 85631 - protein, 108 aa, Homo sapiens
MNWQPDKLVVVWTRRSRRKSSKAHSWQPGIKNPYRGVVVWPVPENIEITVTLFKDPHAEEFEDKEWTFVIENESPSGRRKALATSSINMKQYASPMPTQTDVKLKFKP

SEQ ID NO: 85632 - protein, 1480 aa, Homo sapiens
MLSFPNLNQVLENYSDAPMTPKQILQVIEAEGLKEMRSGTSPLACLNAMLHSNSRGGEGLFYKLPGRISLFTLKKDALQWSRHPATVEGEEPEDTADVESCGSNEASTVSGENDVSLDETSSNASCSTESQSRPLSNPRDSYRASSQANKQKKKTGVMLPRVVLTPLKVNGAHVESASGQMKRNRGEEIDFETPGSILVNTNLRALINSRTFHALPSHFQQQLLFLLPEVDRQVGTDGLLRLSSSALNNEFFTHAAQSWRERLADGEFTHEMQVRIRQEMEKEKKVEQWKEKFFEDYYGQKLGLTKEESLQQNVGQEEAEIKSGLCVPGESVRIQRGPATRQRDGHFKKRSRPDLRTRARRNLYKKQESEQAGVAKDAKSVASDVPLYKDGEAKTDPAGLSSPHLPGTSSAAPDLEGPEFPVESVASRIQAEPDNLARASASPDRIPSLPQETVDQEPKDQKRKSFEQAASASFPEKKPRLEDRQSFRNTIESVHTEKPQPTKEEPKVPPIRIQLSRIKPPWVVKGQPTYQICPRIIPTTESSCRGWTGARTLADIKARALQVRGARGHHCHREAATTAIGGGGGPGGGGGGATDEGGGRGSSSGDGGEACGHPEPRGGPSTPGKCTSDLQRTQLLPPYPLNGEHTQAGTAMSRARREDLPSLRKEESCLLQRATVGLTDGLGDASQLPVAPTGDQPCQALPLLSSQTSVAERLVEQPQLHPDVRTECESGTTSWESDDEEQGPTVPADNGPIPSLVGDDTLEKGTGQALDSHPTMKDPVNVTPSSTPESSPTDCLQNRAFDDELGLGGSCPPMRESDTRQENLKTKALVSNSSLHWIPIPSNDEVVKQPKPESREHIPSVEPQVGEEWEKAAPTPPALPGDLTAEEGLDPLDSLTSLWTVPSRGGSDSNGSYCQQVDIEKLKINGDSEALSPHGESTDTASDFEGHLTEDSSEADTREAAVTKGSSVDKDEKPNWNQSAPLSKVNGDMRLVTRTDGMVAPQSWVSRVCAVRQKIPDSLLLASTEYQPRAVCLSMPGSSVEATNPLVMQLLQGSLPLEKVLPPAHDDSMSESPQVPLTKDQSHGSLRMGSLHGLGKNSGMVDGSSPSSLRALKEPLLPDSCETGTGLARIEATQAPGAPQKNCKAVPSFDSLHPVTNPITSSRKLEEMDSKEQFSSFSCEDQKEVRAMSQDSNSNAAPGKSPGDLTTSRTPRFSSPNVISFGPEQTGRALGDQSNVTGQGKKLFGSGNVAATLQRPRPADPMPLPAEIPPVFPSGKLGPSTNSMSGGVQTPREDWAPKPHAFVGSVKNEKTFVGGPLKANAENRKATGHSPLELVGHLEGMPFVMDLPFWKLPREPGKGLSEPLEPSSLPSQLSIKQAFYGKLSKLQLSSTSFNYSSSSPTFPKGLAGSVVQLSHKANFGASHSASLSLQMFTDSSTVESISLQCACSLKAMIMCQGCGAFCHDDCIGPSKLCVLCLVVR

SEQ ID NO: 85633 - protein, 96 aa, Homo sapiens
MAPRKRGGRGISFIFCCFRNNDHPEITYRLRNDSNFALQTMEPALPMPPVEELDVMFSELVDELDLTDKHREAMFALPAEKKWQIYCSKKKVRFSL

SEQ ID NO: 85634 - protein, 1358 aa, Homo sapiens
MAANVGSMFQYWKRFDLQQLQRELDATATVLANRQDESEQSRKRLIEQSREFKKNTPEDLRKQVAPLLKSFQGEIDALSKRSKEAEAAFLNVYKRLIDVPDPVPALDLGQQLQLKVQRLHDIETENQKLRETLEEYNKEFAEVKNQEVTIKALKEKIREYEQTLKNQAETIALEKEQKLQNDFAEKERKLQETQMSTTSKLEEAEHKVQSLQTALEKTRTELFDLKTKYDEETTAKADEIEMIMTDLERANQRAEVAQREAETLREQLSSANHSLQLASQIQKAPDVEQAIEVLTRSSLEVELAAKEREIAQLVEDVQRLQASLTKLRENSASQISQLEQQLSAKNSTLKQLEEKLKGQADYEEVKKELNILKSMEFAPSEGAGTQDAAKPLEVLLLEKNRSLQSENAALRISNSDLSGPYSTNSISSQSPLQQSPDVNGMAPSPSQSESAGSVSEGEEMDTAEIARQVKEQLIKHNIGQRIFGHYVLGLSQGSVSEILARPKPWNKLTVRGKEPFHKMKQFLSDEQNILALRSIQGRQRAEPAQPSSASGSGNSDDAIRSILQQARREMEAQQAALDPALKQAPLSQSDITILTPKLLSTSPMPTVSSYPPLAISLKKPSAAPEAGASALPNPPALKKEAQDAPGLDPQGAADCAQGVLRQVKNEVGRSGAWKDHWWSAVQPERRNAASSEEAKAEETGGGKEKGSGGSGGGSQPRAERSQLQGPSSSEYWKEWPSAESPYSQSSELSLTGASRSETPQNSPLPSSPIVPMSKPTKPSVPPLTPEQYEVYMYQEVDTIELTRQVKEKLAKNGICQRIFGEKVLGLSQGSVSDMLSRPKPWSKLTQKGREPFIRMQLWLNGELGQGVLPVQGQQQGPVLHSVTSLQDPLQQGCVSSESTPKTSASCSPAPESPMSSSESVKSLTELVQQPCPPIEASKDSKPPEPSDPPASDSQPTTPLPLSGHSALSIQELVAMSPELDTYGITKRVKEVLTDNNLGQRLFGETILGLTQGSVSDLLARPKPWHKLSLKGREPFVRMQLWLNDPNNVEKLMDMKRMEKKAYMKRRHSSVSDSQPCEPPSVGTEYSQGASPQPQHQLKKPRVVLAPEEKEALKRAYQQKPYPSPKTIEDLATQLNLKTSTVINWFHNYRSRIRRELFIEEIQAGSQGQAGASDSPSARSGRAAPSSEGDSCDGVEATEGPGSADTEEPKSQGEAEREEVPRPAEQTEPPPSGTPGPDDARDDDHEGGPVEGPGPLPSPASATATAAPAAPEDAATSAAAAPGEGPAAPSSAPPPSNSSSSSAPRRPSSLQSLFGLPEAAGARDSRDNPLRKKKAANLNSIIHRLEKAASREEPIEWEF

SEQ ID NO: 85635 - protein, 188 aa, Homo sapiens
MREWWVQVGLLAVPLLAAYLHIPPPQLSPALHSWKSSGKFFTYKGLRIFYQDSVGVVGSPEIVVLLHGFPTSSYDWYKIWEGLTLRFHRVIALDFLGFGFSDKPRPHHYSIFEQASIVEALLRHLGLQNRRINLLSHDYGDIVAQELLYRYKQNRSGRLTIKSLCLSNGGIFPETHRPLLLQKLLKDG

SEQ ID NO: 85636 - protein, 650 aa, Homo sapiens
MAAATADPGAGNPQPGDSSGGGAGGGLPSPGEQELSRRLQRLYPAVNQQETPLPRSWSPKDKYNYIGLSQGNLRVHYKGHGKNHKDAASVRATHPIPAACGIYYFEVKIVSKGRDGYMGIGLSAQGVNMNRLPGWDKHSYGYHGDDGHSFCSSGTGQPYGPTFTTGDVIGCCVNLINGTCFYTKNGHSLGIAFTDLPANLYPTVGLQTPGEIVDANFGQQPFLFDIEDYMREWRAKVQGTVHCFPISARLGEWQAVLQNMVSSYLVHHGYCATATAFARMTETPIQEEQASIKNRQKIQKLVLEGRVGEAIETTQRFYPGLLEHNPNLLFMLKCRQFVEMVNGTDSEVRSLSSRSPKSQDSYPGSPSLSPRHGPSSSHMHNTGADSPSCSNGVASTKSKQNHSKYPAPSSSSSSSSSSSSSSPSSVNYSESNSTDSTKSQHHSSTSNQETSNPWLQLERRPNQAAPTTPPGPTPTSTPPHSDSEMEMEAEHYPNGVLGSMSTRIVNGAYKHEDLQTDESSMDDRHPRRQLCGGNQAATERIILFGRELQALSEQLGREYGKNLAHTEMLQDAFSLLAYSDPWSCPVGQQLDPIQREPVCAALNSAILESQNLPKQPPLMLALGQASECLRLMARAGLGSCSFARVDDYLH

SEQ ID NO: 85637 - protein, 167 aa, Homo sapiens
VWVTWNVFIICFYLEVGGLLKDSELLTFSLSRHRSWWRERWPGCLHEEVPAVGLGAPHGQALVSGAGCALEPSYVEALHSCLQILIANPRWLAPQRRRNPWWLLAGVGWGQSFWALSVAARWSACLRRKRTALISLVDLIHFLSTMSMKSHPVSCPSRCTSPQARPH

SEQ ID NO: 85638 - protein, 427 aa, Homo sapiens
MVFLSGNASDSSNCTQPPAPVNISKAILLGVILGGLILFGVLGNILVILSVACHRHLHSVTHYYIVNLAVADLLLTSTVLPFSAIFEVLGYWAFGRVFCNIWAAVDVLCCTASIMGLCIISIDRYIGVSYPLRYPTIVTQRRGLMALLCVWALSLVISIGPLFGWRQPAPEDETICQINEEPGYVLFSALGSFYLPLAIILVMYCRVYVVAKRESRGLKSGLKTDKSDSEQVTLRIHRKNAPAGGSGMASAKTKTHFSVRLLKFSREKKAAKTLGIVVGCFVLCWLPFFLVMPIGSFFPDFKPSETVFKIVFWLGYLNSCINPIIYPCSSQEFKKAFQNVLRIQCLCRKQSSKHALGYTLHPPSQAVEGQHKDMVRIPVGSRETFYRISKTDGVCEWKFFSSMPRGSARITVSKDQSSCTTARSSGF

SEQ ID NO: 85639 - protein, 1212 aa, Homo sapiens
MANGGGGGGGSSGGGGGGGGSSLRMSSNIHANHLSLDASSSSSSSSSSSSSSSSSSSSSSVHEPKMDALIIPVTMEVPCDSRGQRMWWAFLASSMVTFFGGLFIILLWRTLKYLWTVCCHCGGKTKEAQKINNGSSQADGTLKPVDEKEEAVAAEVGWMTSVKDWAGVMISAQTLTGRVLVVLVFALSIGALVIYFIDSSNPIESCQNFYKDFTLQIDMAFNVFFLLYFGLRFIAANDKLWFWLEVNSVVDFFTVPPVFVSVYLNRSWLGLRFLRALRLIQFSEILQFLNILKTSNSIKLVNLLSIFISTWLTAAGFIHLVENSGDPWENFQNNQALTYWECVYLLMVTMSTVGYGDVYAKTTLGRLFMVFFILGGLAMFASYVPEIIELIGNRKKYGGSYSAVSGRKHIVVCGHITLESVSNFLKDFLHKDRDDVNVEIVFLHNISPNLELEALFKRHFTQVEFYQGSVLNPHDLARVKIESADACLILANKYCADPDAEDASNIMRVISIKNYHPKIRIITQMLQYHNKAHLLNIPSWNWKEGDDAICLAELKLGFIAQSCLAQGLSTMLANLFSMRSFIKIEEDTWQKYYLEGVSNEMYTEYLSSAFVGLSFPTVCELCFVKLKLLMIAIEYKSANRESRSRKRILINPGNHLKIQEGTLGFFIASDAKEVKRAFFYCKACHDDITDPKRIKKCGCKRLIYFEDEQPSTLSPKKKQRNGGMRNSPNTSPKLMRHDPLLIPGNDQIDNMDSNVKKYDSTGMFHWCAPKEIEKVILTRSEAAMTVLSGHVVVCIFGDVSSALIGLRNLVMPLRASNFHYHELKHIVFVGSIEYLKREWETLHNFPKVSILPGTPLSRADLRAVNINLCDMCVILSANQNNIDDTSLQDKECILASLNIKSMQFDDSIGVLQANSQGFTPPGMDRSSPDNSPVHGMLRQPSITTGVNIPIITELAKPGKLPLVSVNQEKNSGTHILMITELVNDTNVQFLDQDDDDDPDTELYLTQPFACGTAFAVSVLDSLMSATYFNDNILTLIRTLVTGGATPELEALIAEENALRGGYSTPQTLANRDRCRVAQLALLDGPFADLGDGGCYGDLFCKALKTYNMLCFGIYRLRDAHLSTPSQCTKRYVITNPPYEFELVPTDLIFCLMQFDHNAGQSRASLSHSSHSSQSSSKKSSSVHSIPSTANRQNRPKSRESRDKQNRKEMVYR

SEQ ID NO: 85640 - protein, 394 aa, Homo sapiens
  MOD_RES (1)..(1): Any amino acid
XDQQDAAHNMGNHLPLLPAESEEEDEMEVEDQDSKEAKKPNIINFDTSLPTSHTYLGADMEEFHGRTLHDDDSCQVIPVLPQVMMILIPGQTLPLQLFHPQEVSMVRNLIQKDRTFAVLAYSNVQEREAQFGTTAEIYAYREEQDFGIEIVKVKAIGRQRFKVLELRTQSDGIQQAKVQILPECVLPSTMSAVQLESLNKCQIFPSKPVSREDQCSYKWWQKYQKRKFHCANLTSWPRWLYSLYDAETLMDRIKKQLREWDENLKDDSLPSNPIDFSYRVAACLPIDDVLRIQLLKIGSAIQRLRCELDIMNKCTSLCCKQCQETEITTKNEIFRYAWTVAQCKICASHIGWKFTATKKDMSPQKFWGLTRSALLPTIPDTEDEISPDKVILCL

SEQ ID NO: 85641 - protein, 197 aa, Homo sapiens
MPTRPVSFHERGGVGSRADYDTLSLRSLRLGPGGLDDRYSLVSEQLEPAATSTYRAFAYERQASSSSSRAGGLDWPEATEVSPSRTIRAPAVRTLQRFQSSHRSRGVGGAVPGAVLEPVARAPSVRSLSLSLADSGHLPDVHGFNSYGSHRTLQRLSSGFDDIDLPSAVKYLMASDPNLQVLGAAYIQHKCYSDAAA

SEQ ID NO: 85642 - protein, 244 aa, Homo sapiens
  MOD_RES (1)..(1): Any amino acid
XAVSSLASTGLSLTKVDEREKQAALEEEQARLKALKEQRLKELAKKPHTSLTTAASPVSTSAGGIMTAPAIDIFSTPSSSNSTSKLPNDLLDLQQPTFHPSVHPMSTASQVASTWGGFTPSPVAQPHPSAGLNVDFESVFGNKSTNVIVDSGGFDELGGLLKPTVASQNQNLPVAKLPPSKLVSDDLDSSLANLVGNLGIGNGTTKNDVNWSQPGEKKLTGGSNWQPKVAPTTAWNAATMIQFM

SEQ ID NO: 85643 - protein, 69 aa, Homo sapiens
MIVILLNVYYIIVLAWALFYLFSSFTIDLPWGGCYHEWNTGGDFAQDAYIEMLACLEAADLKSTFPVAI

SEQ ID NO: 85644 - protein, 314 aa, Homo sapiens
MQNSHSGVNQLGGVFVNGRPLPDSTRQKIVELAHSGARPCDISRILQTHADAKVQVLDNQNVSNGCVSSINRVLRNLASEKQQMGADGMYDKLRMLNGQTGSWGTRPGWYPGTSVPGQPTQDGCQQQEGGGENTNSISSNGEDSDEAQMRLQLKRKLQRNRTSFTQEQIEALEKEFERTHYPDVFARERLAAKIDLPEARIQVWFSNRRAKWRREEKLRNQRRQASNTPSHIPISSSFSTSVYQPIPQPTTPVSSFTSGSMLGRTDTALTNTYSALPPMPSFTMANNLPMQPPVPSQTSSYSCMLPTSPSVNGR

SEQ ID NO: 85645 - protein, 31 aa, Homo sapiens
LICGALSWLRDFEQKKRDRGPAPLCGWRKDE

SEQ ID NO: 85646 - protein, 106 aa, Homo sapiens
MAADEGSAEKQAGEAHMAADGETNGSCENSDASSHANAAKHTQDSARVNPQDGTNTLTRIAENGVSERDSEAAKQNHVTADDFVQTSVIGSNGYILNKPALQAQPL

SEQ ID NO: 85647 - protein, 62 aa, Homo sapiens
MTTSSIRRQMKNIVNNYSEAEIKVREATSNDPWGPSSSLMTEIADLTYNVVAFSEIMSMVWK

SEQ ID NO: 85648 - protein, 160 aa, Homo sapiens
MPYSTNKELILGIMVGTAGISLLLLWYHKVRKPGIAMKLPEFLSLGNTFNSITLQDEIHDDQGTTVIFQERQLQILEKLNELLTNMEELKEEIRFLKEAIPKLEEYIQDELGGKITVHKISPQHRARKRRLPTIQSSATSNSSEEAESEGGAFYGLRMTA

SEQ ID NO: 85649 - protein, 305 aa, Homo sapiens
  MOD_RES (1)..(1): Any amino acid
XAERAEGAFTLQSVAQPMRPIASTATKCGNCGPGYSTPLEAMKGPREEIVYLPCIYRNTGTEAPDYLATVDVDPKSPQYCQVIEPKDIHAKCELAFLHTSHCLASGEVMISSLGDVKGNGKGGFVLLDGETFEVKGTWERPGGAAPLGYDFWYQPRHNVMISTEWAAPNVLRDGFNPADVEAGLYGSHLYVWDWQRHEIVQTLSLKDGLIPLEIRFLHNPDAAQGFVGCALSSTIQRFYKNEGGTWSVEKVIQVPPKKVKGWLLPEMPGLITDILLSLDDRFLYFSNWLHGDLRQYDISDPQRPR

SEQ ID NO: 85650 - protein, 90 aa, Homo sapiens
MTGDKGPQRLSGSSYGSISSPTSPTSPGPQQAPPRETYLSEKIPIPDTKPETSSQIFRLAPWRDSNFSGCCSGPPCWACSASDWLHVWAW

SEQ ID NO: 85651 - protein, 76 aa, Homo sapiens
MNRRRKFLLASVLALQNSSFIYPSCQKCFSRIILVSKRSNCPKCGSTGESGNANYRYKLSLKVAESNKLFVITVFG

SEQ ID NO: 85652 - protein, 76 aa, Homo sapiens
MWGDSRPANRTGPFRGSQEERFAPGWNRDYPPPPLKSHAQERHSGNFPGRDSLPFDFQGHSGPPFANVEEHSFSYG

SEQ ID NO: 85653 - protein, 233 aa, Homo sapiens
MGRAGAGSPGRRRQRCQSRGRRRPRAPRRRKAPACRRRRARRRRKKPCPRSLRPEIHECPKSQDPCASRDDWRCARSMHEFSAKDIDGHMVNLDKYRGFVCIVTNVASQGKTEVNYTQLVDLHARYAECGLRILAFPCNQFGKQEPGSNEEIKEFAAGYNVKFDMFSKICVNGDDAHPLWKWMKIQPKGKGILGNAIKWNFTKFLIDKNGCVVKRYGPMEEPLVIEKDLPHYF

SEQ ID NO: 85654 - protein, 2852 aa, Homo sapiens
MASEDNRVPSPPPTGDDGGGGGREETPTEGGALSLKPGLPIRGIRMKFAVLTGLVEVGEVSNRDIVETVFNLLVGGQFDLEMNFIIQEGESINCMVDLLEKCDITCQAEVWSMFTAILKKSIRNLQVCTEVGLVEKVLGKIEKVDNMIADLLVDMLGVLASYNLTVRELKLFFSKLQGDKGRWPPHAGKLLSVLKHMPQKYGPDAFFNFPGKSAAAIALPPIAKWPYQNGFTFHTWLRMDPVNNINVDKDKPYLYCFRTSKGLGYSAHFVGGCLIVTSIKSKGKGFQHCVKFDFKPQKWYMVTIVHIYNRWKNSELRCYVNGELASYGEITWFVNTSDTFDKCFLGSSETADANRVFCGQMTAVYLFSEALNAAQIFAIYQLGLGYKGTFKFKAESDLFLAEHHKLLLYDGKLSSAIAFTYNPRATDAQLCLESSPKDNPSIFVHSPHALMLQDVKAVLTHSIQSAMHSIGGVQVLFPLFAQLDYRQYLSDEIDLTICSTLLAFIMELLKNSIAMQEQMLACKGFLVIGYSLEKSSKSHVSRAVLELCLAFSKYLSNLQNGMPLLKQLCDHVLLNPAIWIHTPAKVQLMLYTYLSTEFIGTVNIYNTIRRVGTVLLIMHTLKYYYWAVNPQDRSGITPKGLDGPRPNQKEMLSLRAFLLMFIKQLVMKDSGVKEDELQAILNYLLTMHEDDNLMDVLQLLVALMSEHPNSMIPAFDQRNGLRVIYKLLASKSEGIRVQALKAMGYFLKHLAPKRKAEVMLGHGLFSLLAERLMLQTNLITMTTYNVLFEILIEQIGTQVIHKQHPDPDSSVKIQNPQILKVIATLLRNSPQCPESMEVRRAFLSDMIKLFNNSRENRRSLLQCSVWQEWMLSLCYFNPKNSDEQKITEMVYAIFRILLYHAVKYEWGGWRVWVDTLSITHSKVTFEIHKENLANIFREQQGKVDEEIGLCSSTSVQAASGIRRDINVSVGSQQPDTKDSPVCPHFTTNGNENSSIEKTSSLESASNIELQTTNTSYEEMKAEQENQELPDEGTLEETLTNETRNADDLEVSSDIIEAVAISSNSFITTGKDSMTVSEVTASISSPSEEDASEMPEFLDKSIVEEEEDDDYVELKVEGSPTEEANLPTELQDNSLSPAASEAGEKLDMFGNDDKLIFQEGKPVTEKQTDTETQDSKDSGIQTMTASGSSAMSPETTVSQIAVESDLGQMLEEGKKATNLTRETKLINDCHGSVSEASSEQKIAKLDVSNVATDTERLELKASPNVEAPQPHRHVLEISRQHEQPGQGIAPDAVNGQRRDSRSTVFRIPEFNWSQMHQRLLTDLLFSIETDIQMWRSHSTKTVMDFVNSSDNVIFVHNTIHLISQVMDNMVMACGGILPLLSAATSATHELENIEPTQGLSIEASVTFLQRLISLVDVLIFASSLGFTEIEAEKSMSSGGILRQCLRLVCAVAVRNCLECQQHSQLKTRGDKALKPMHSLIPLGKSAAKSPVDIVTGGISPVRDLDRLLQDMDINRLRAVVFRDIEDSKQAQFLALAVVYFISVLMVSKYRDILEPQNERHSQSCTETGSENENVSLSEITPAAFSTLTTASVEESESTSSARRRDSGIGEETATGLGSHVEVTPHTAPPGVSAGPDAISEVLSTLSLEVNKSPETKNDRGNDLDTKATPSVSVSKNVNVKDILRSLVNIPADGVTVDPALLPPACLGALGDLSVEQPVQFRSFDRSVIVAAKKSAVSPSTFNTSIPTNAVSVVSSVDSAQASDMGGESPGSRSSNAKLPSVPTVDSVSQDPVSNMSITERLEHALEKAAPLLREIFVDFAPFLSRTLLGSHGQELLIEGTSLVCMKSSSSVVELVMLLCSQEWQNSIQKNAGLAFIELVNEGRLLSQTMKDHLVRVANEAEFILSRQRAEDIHRHAEFESLCAQYSADKREDEKMCDHLIRAAKYRDHVTATQLIQKIINILTDKHGAWGNSAVSRPLEFWRLDYWEDDLRRRRRFVRNPLGSTHPEATLKTAVEHATDEDILAKGKQSIRSQALGNQNSENEILLEGDDDTLSSVDEKDLENLAGPVSLSTPAQLVAPSVVVKGTLSVTSSELYFEVDEEDPNFKKIDPKILAYTEGLHGKWLFTEIRSIFSRRYLLQNTALEIFMANRVAVMFNFPDPATVKKVVNYLPRVGVGTSFGLPQTRRISLASPRQLFKASNMTQRWQHREISNFEYLMFLNTIAGRSYNDLNQYPVFPWVITNYESEELDLTLPTNFRDLSKPIGALNPKRAAFFAERYESWEDDQVPKFHYGTHYSTASFVLAWLLRIEPFTTYFLNLQGGKFDHADRTFSSISRAWRNSQRDTSDIKELIPEFYYLPEMFVNFNNYNLGVMDDGTVVSDVELPPWAKTSEEFVHINRLALESEFVSCQLHQWIDLIFGYKQQGPEAVRALNVFYYLTYEGAVNLNSITDPVLREAVEAQIRSFGQTPSQLLIEPHPPRGSAMQVSPLMFTDKAQQDVIMVLKFPSNSPVTHVAANTQPGLATPAVITVTANRLFAVNKWHNLPAHQGAVQDQPYQLPVEIDPLIASNTGMHRRQITDLLDQSIQVHSQCFVITSDNRYILVCGFWDKSFRVYSTDTGRLIQVVFGHWDVVTCLARSESYIGGNCYILSGSRDATLLLWYWNGKCSGIGDNPGSETAAPRAILTGHDYEVTCAAVCAELGLVLSGSQEGPCLIHSMNGDLLRTLEGPENCLKPKLIQASREGHCVIFYENGLFCTFSVNGKLQATMETDDNIRAIQLSRDGQYLLTGGDRGVVVVRQVSDLKQLFAYPGCDAGIRAMALSYDQRCIISGMASGSIVLFYNDFNRWHHEYQTRY

SEQ ID NO: 85655 - protein, 310 aa, Homo sapiens
MAMESAKETRYCAVCNDYASGYHYGVWSCEGCKAFFKRSIQGHNDYMCPATNQCTIDKNRRKSCQACRLRKCYEVGMMKGGIRKDRRGGRMLKHKRQRDDGEGRGEVGSAGDMRAANLWPSPLMIKRSKKNSLALSLTADQMVSALLDAEPPILYSEYDPTRPFSEASMMGLLTNLADRELVHMINWAKRVPGFVDLTLHDQVHLLECAWLEILMIGLVWRSMEHPGKLLFAPNLLLDRNQGKCVEGMVEIFDMLLATSSRFRMMNLQGEEFVCLKSIILLNSGISHVEAKKRILNLHPKIFGNKWFPRV

SEQ ID NO: 85656 - protein, 50 aa, Homo sapiens
MILQFISRESSLILAVTPANMDLANSDALKLAKEVDPQGLRTIGVITKLD

SEQ ID NO: 85657 - protein, 443 aa, Homo sapiens
MAFTLQERQMLGLQGLLPPKIETQDIQALRFHRNLKKMTSPLEKYIYIMGIQERNEKLFYRILQDDIESLMPIVYTPTVGLACSQYGHIFRRPKGLFISISDRGHVRSIVDNWPENHVKAVVVTDGERILGLGDLGVYGMGIPVGKLCLYTACAGIRPDRCLPVCIDVGTDNIALLKDPFYMGLYQKRDRTQQYDDLIDEFMKAITDRYGRNTLIQFEDFGNHNAFRFLRKYREKYCTFNDDIQGTAAVALAGLLAAQKVISKPISEHKILFLGAGEAALGIANLIVMSMVENGLSEQEAQKKIWMFDKYGLLVKGRKAKIDSYQEPFTHSAPESIPDTFEDAVNILKPSTIIGVAGAGRLFTPDVIRAMASINERPVIFALSNPTAQAECTAEEAYTLTEGRCLFASGSPFGPVKLTDGRVFTPGQGNNVYIFPGPDKPIDR

SEQ ID NO: 85658 - protein, 146 aa, Homo sapiens
ELNQSSEWETFSERSSSSQTLTQFDSNIAPADPDTAIVHPVPIRMTPSKIHMQEMELKRTGSDHTNPTSPLLVKPSDLLEENKINSSVKFASGNTVGQQQAGVVAHPPAVPPRPQPSQAPGPAVHRPVDADGLITHTSTSPQQIPE

SEQ ID NO: 85659 - protein, 149 aa, Homo sapiens
MDTRTATAELGWTANPASGWEEVSGYDENLNTIRTYQVCNVFEPNQNNWLLTTFINRRGAHRIYTEMRFTVRDCSSLPNVPGSCKETFNLYYYETDSVIATKKSAFWSEAPYLKVDTIAADESFSQVDFGGRLMKVNTEVRSFGPLTRN

SEQ ID NO: 85660 - protein, 458 aa, Homo sapiens
MATITCTRFTEEYQLFEELGKGAFSVVRRCVKVLAGQEYAAKIINTKKLSARVRLHDSISEEGHHYLIFDLVTGGELFEDIVAREYYSEADASHCIQQILEAVLHCHQMGVVHRDLKPENLLLASKLKGAAVKLADFGLAIEVEGEQQAWFGFAGTPGYLSPEVLRKDPYGKPVDLWACGVILYILLVGYPPFWDEDQHRLYQQIKAGAYDFPSPEWDTVTPEAKDLINKMLTINPSKRITAAEALKHPWISHRSTVASCMHRQETVDCLKKFNARRKLKGAILTTMLATRNFSGGKSGGNKKSDGVKESSESTNTTIEDEDTKVRKQEIIKVTEQLIEAISNGDFESYTKMCDPGMTAFEPEALGNLVEGLDFHRFYFENLWSRNSKPVHTTILNPHIHLMGDESACIAYIRITQYLDAGGIPRTAQSEETRVWHRRDGKWQIVHFHRSGAPSVLPH

SEQ ID NO: 85661 - protein, 108 aa, Homo sapiens
CCSPGVGWAQRCGQGACRREDPQACIEEQLCYSCRVNMKDLPSLDPLPPYILAEAQLRTQRYWGPHCRGAWVRGLGAGAHCSFLSRAWGLQEIRDCLIEDSDDEAGQS

SEQ ID NO: 85662 - protein, 636 aa, Homo sapiens
MGELCRRDSALTALDEETLWEMMESHRHRIVRCICPSRLTPYLRQAKVLCQLDEEEVLHSPRLTNSAMRAGHLLDLLKTRGKNGAIAFLESLKFHNPDVYTLVTGLQPDVDFSNFSGLMETSKLTECLAGAIGSLQEELNQEKGQKEVLLRRCQQLQEHLGLAETRAEGLHQLEADHSRMKREVSAHFHEVLRLKDEMLSLSLHYSNALQEKELAASRCRSLQEELYLLKQELQRANMVSSCELELQEQSLRTASDQESGDEELNRLKEENEKLRSLTFSLAEKDILEQSLDEARGSRQELVERIHSLRERAVAAERQREQYWEEKEQTLLQFQKSKMACQLYREKVNALQAQVCELQKERDQAYSARDSAQREISQSLVEKDSLRRQVFELTDQVCELRTQLRQLQAEPPGVLKQEARTREPCPREKQRLVRMHAICPRDDSDCSLVSSTESQLLSDLSATSSRELVDSFRSSSPAPPSQQSLYKRVAEDFGEEPWSFSSCLEIPEGDPGALPGAKAGDPHLDYELLDTADLPQLESSLQPVSPGRLDVSESGVLMRRRPARRILSQVTMLAFQGDALLEQISVIGGNLTGIFIHRVTPGSAADQMALRPGTQIVMTGKCLSQRTPDLDWGRVGS

SEQ ID NO: 85663 - protein, 122 aa, Homo sapiens
MPVQLTSRREIRKIMGVEEEDDDDDDDDNLPQLKKESELPFVPNYLANPAFPFIYTPTAEDSAQMQNGGPSTPPASPPADGSPPLLPPGEPPLLGTFPRDHTSLALVQNGDVSAPSAILRTP

SEQ ID NO: 85664 - protein, 132 aa, Homo sapiens
MKEGRLEESVALRIITEGASILRQEKNLLDIDAPVTVCGDIHGQFFDLMKLFEVGGSPANTRYLFLGDYVDRGYFSIECVLYLWALKILYPKTLFLLRGNHECRHLTEYFTFKQECKIKYSERVYDACMDAF

SEQ ID NO: 85665 - protein, 161 aa, Homo sapiens
MAAAAAAVGPGAGGAGSAVPGGAGPCATVSVFPGARLLTIGDANGEIQRHAEQQALRLEVRAGPDSAGIALYSHEDVCVFKCSVSRETECSRVGKQSFIITLGCNSVLIQFATPNDFCSFYNILKTCRGHTLERSVFSERTEESSAVQYFQMRKLRLREVK

SEQ ID NO: 85666 - protein, 670 aa, Homo sapiens
MDSVAFEDVAVTFTQEEWALLDPSQKNLCRDVMQETFRNLASIGKKWKPQNIYVEYENLRRNLRIVGERLFESKEGHQHGEILTQVPDDMLKKTTTGVKSCESSVYGEVGSAHSSLNRHIRDDTGHKAYEYQEYGQKPYKCKYCKKPFNCLSSVQTHERAHSGRKLYVCEECGKTFISHSNLQRHRIMHRGDGPYKCKFCGKALMFLSLYLIHKRTHTGEKPYQCKQCGKAFSHSSSLRIHERTHTGEKPYKCNECGKAFHSSTCLHAHKRTHTGEKPYECKQCGKAFSSSHSFQIHERTHTGEKPYECKECGKAFKCPSSVRRHERTHSRKKPYECKHCGKVLSYLTSFQNHLGMHTGEISHKCKICGKAFYSPSSLQTHEKTHTGEKPYKCNQCGKAFNSSSSFRYHERTHTGEKPYECKQCGKAFRSASLLQTHGRTHTGEKPYACKECGKPFSNFSFFQIHERMHREEKPYECKGYGKTFSLPSLFHRHERTHTGGKTYECKQCGRSFNCSSSFRYHGRTHTGEKPYECKQCGKAFRSASQLQIHGRTHTGEKPYECKQCGKAFGSASHLQMHGRTHTGEKPYECKQCGKSFGCASRLQMHGRTHTGEKPYKCKQCGKAFGCPSNLRRHGRTHTGEKPYKCNQCGKVFRCSSQLQVHGRAHCIDTP

SEQ ID NO: 85667 - protein, 105 aa, Homo sapiens
MAEAQSGTGQLQEQKKGLLIAVSVSVDKIISHFGAARNLVQKAQLGDSRLSPDVGHLVLTTLCPALHALVADGLKPFRKDLITGQRRSSPWSVVEASVKPARSAV

SEQ ID NO: 85668 - protein, 353 aa, Homo sapiens
MLKSCSRASFSPSVRKPPLILRRLLSEDVGMDIPFEEGVLSPSAADMRPEPPNSLDLNDTHPRRIKLTAPNINLSLDQSEGSILSDDNLDSPDEIDINVDELDTPDEADSFEYTGHEDPTANKDSGQESESIPEYTAEEEREDNRLWRTVVIGEQEQRIDMKVIEPYRRVISHGGYYGDGLNAIIVFAACFLPDSSRADYHYVMENLFLYVISTLELMVAEDYMIVYLNGATPRRRMPGLGWMKKCYQMIDRRLRKNLKSFIIVHPSWFIRTILAVTRPFISSKFSSKIKYVNSLSELSGLIPMDCIHIPESIIKLDEELREASEAAKTSCLYNDPEMSSMEKDIDLKLKEKP

SEQ ID NO: 85669 - protein, 37 aa, Homo sapiens
MQTNEGEVSEESSSKVEQEDFVMEGHGKTPPPGEESK

SEQ ID NO: 85670 - protein, 78 aa, Homo sapiens
  MOD_RES (1)..(1): Any amino acid
XVKLRSDCSRPSLQWYTRAQSKMRRPSLLLKDILKCTLLVFGVWILYILKLNYTTEECDMKKMHYVDPDHVKVVSSSF

SEQ ID NO: 85671 - protein, 90 aa, Homo sapiens
MASPTDGTDLEASLLSFEKLDRASPDLWPEQFLFFFLVPGVAEFAASFKSPITSSPPKWMAEIERDDIDMLKAREMTRGKFLNILEKPKK

SEQ ID NO: 85672 - protein, 168 aa, Homo sapiens
MTTSALRRQVKNIVHNYSEAEIKVREATSNDPWGPPSSLMSEIADLTFNTVAFTEVMGMLWRRLNDSGKNWRHVYKALTLLDYLLKTGSERVAHQCRENLYTIQTLKDFQYIDRDGKDQGVNVREKVKQVMALLKDEERLRQERTHALKTKERMALEGIGIGSGQLGF

SEQ ID NO: 85673 - protein, 501 aa, Homo sapiens
MAAMAVALRGLGGRFRWRTQAVAGGVRGAARGAAAAQLGRKVAVVDYVEPSPQGTRWGLGGTCVNVGCIPKKLMHQAALLGGLIQDAPNYGWEVAQPVPHDWRKMAEAVQNHVKSLNWGHRVQLQDRKVKYFNIKASFVDEHTVCGVAKGGKEILLSADHIIIATGGRPRYPTHIEGALEYGITSDDIFWLKESPGKTLVVGASYVALECAGFLTGIGLDTTIMMRSIPLRGFDQQMSSMVIEHMASHGTRFLRGCAPSRVRRLPDGQLQVTWEDSTTGKEDTGTFDTVLWAIGRVPDTRSLNLEKAGVDTSPDTQKILVDSREATSVPHIYAIGDVVEGRPELTPIAIMAGRLLVQRLFGGSSDLMDYDNVPTTVFTPLEYGCVGLSEEEAVARHGQEHVEVYHAHYKPLEFTVAGRDASQCYVKMVCLREPPQLVLGLHFLGPNAGEVTQGFALGIKCGASYAQVMRTVGIHPTCSEEVVKLRISKRSGLDPTVTGCCG

SEQ ID NO: 85674 - protein, 186 aa, Homo sapiens
MVYTCHRDKNCIINKVTRNRCQYCRLQKCFEVGMSKESVRNDRNKKKKEVPKPECSESYTLTPEVGELIEKVRKAHQETFPALCQLGKYTTNNSSEQRVSLDIDLWDKFSELSTKCIIKTVEFAKQLPGFTTLTIADQITLLKAACLDILILRICTRYTPEQDTMTFSDGLTLNRTQMHNAGFGPL

SEQ ID NO: 85675 - protein, 64 aa, Homo sapiens
MAERQEEQRGSPPLRAEGKADAEVKLILYHWTHSFSSQKVRLVIAEKALKCEEHDAKLETQSLS

SEQ ID NO: 85676 - protein, 116 aa, Homo sapiens
MKKKLVVLGLLAVVLVLVIVGLCLWLPSASKEPDNHVYTRAAVAADAKQCSKIGRDALRDGGSAVDAAIAALLCVGLMNAHSMGIGGGLFLTIYNSTTRKAEVINAREVAPRLAFA

SEQ ID NO: 85677 - protein, 382 aa, Homo sapiens
MAEGLKFKDVVIYFSQKEWECLHSAQKDLYRDVMLENYGNLVLLGLSDTKPNVISLLEQKKEPWMVKRKETKEWCPDWEFGRETKNLSPKENIYEIRSPQQEKARVIREIRCQVERQQGHQEGHFRPAVIPFTSMQCTAHREYQWLHTGEKSCECRKCKNAFRYQSCPIQHEIIHNKEKEPECGECRKIFNSGSDLIKHQTLHESKKHSENNKCAFNHDSGITQPQSINTGEKPHKCKECGKAFRSSSQISQHQRMHLGEKPYKCRECGKAFPSTAQLNLHQRIHTDEKYYESKACGKAFTRPSHLFRHQRIHTGEKPHKCKECGKAFRYDTQLSLHQIIHTGERRYECRECGKVYSCASQLSLHQRIHTGEKPHECKECGK

SEQ ID NO: 85678 - protein, 111 aa, Homo sapiens
LHLYSNTLNFQISEVEPKYYADGEDAYAMKRDLSQMADELRRQMDLKKGGYVVLGSRENQETQGSTLSDSEEACQQKNPATEESGSDSKEPKESVESTNVQDSSESSDSTS

SEQ ID NO: 85679 - protein, 149 aa, Homo sapiens
MAGLQELRFPEEKPLLRGQDATELESSDAFLLAADTDWKEHDIETPYGLLHVVIRGSPKGNRPAILTYHDVGLNHKLCFNTFFNFEDMQEITKHFVVCHVDAPGQQVGASQFPQGYQFPSMEQLAAMLPSVVQHFGFKYVIGIGVGAGA

SEQ ID NO: 85680 - protein, 70 aa, Homo sapiens
  MOD_RES (1)..(1): Any amino acid
XMGTTDHVIVLASTNRADILDGALMRPGRLDRHVFIDLPTLQRKGVALSPRLECSAAITTHCGLNLQGSS

SEQ ID NO: 85681 - protein, 266 aa, Homo sapiens [sequence omitted]

SEQ ID NO: 85682 - protein, 178 aa, Homo sapiens
MSLLRNRLQALPALCLCVLVLACIGACQPEAQEGTLSPPPKLKMSRWSLVRGRMKELLETVVNRTRDGWQWFWSLDTMGTRLLPALFLVLLVLGFEVQGTQQPQQDEMPSPTFLTQVKESLSSYWESAKTAAQNLYEKTYLPAVDEKLRDLYSKSTAAMSTYTGIFTDQVLSVLKGEE

SEQ ID NO: 85683 - protein, 471 aa, Homo sapiens
MRYFIKSMEHSVCPSSAVHLIPVSTPKNGMSSKSRKRIMPDPVTEPPVTDPVYEALLYCNIPSVAERSMEGHAPHHFKLVSVHVFIRHGDRYPLYVIPKTKRPEIDCTLVANRKPYHPKLEAFISHMSKGSGASFESPLNSLPLYPNHPLCEMGELTQTGVVQHLQNGQLLRDIYLKKHKLLPNDWSADQLYLETTGKSRTLQSGLALLYGFLPDFDWKKIYFRHQPSALFCSGSCYCPVRNQYLEKEQRRQYLLRLKNSQLEKTYGEMAKIVDVPTKQLRAANPIDSMLCHFCHNVSFPCTRNGCVDMEHFKVIKTHQIEDERERREKKLYFGYSLLGAHPILNQTIGRMQRATEGRKEELFALYSAHDVTLSPVLSALGLSEARFPRFAARLIFELWQDREKPSEHSVRILYNGVDVTFHTSFCQDHHKRSPKPMCPLENLVRFVKRDMFVALGGSGTNYYDACHREGF

SEQ ID NO: 85684 - protein, 180 aa, Homo sapiens
MMLIPMASVMAVTEPKWVSVWSRFLWVTLLSMVLGSLLALLLPLGAVEEQCLAVLKGLYLLRSKPDRAQHAATKCTSPSTELSITSRGATLLVAKTKASPESRRLGSQGGASQNTREWLWGHTDSDCIPPHGWGNRVVPGMLSTHDAAATSSSRPGTQAGHHGFLRRPAQGTAPRMSSAP

SEQ ID NO: 85685 - protein, 133 aa, Homo sapiens
MAALRPLVKPKIVKKRTKKFIRHQSDRYVKIKRNWRKPRGIDNRVRRRFKGQILMPNIGYGSNKKTKHMLPSGFRKFLVHNVKELEVLLMCNKSYCAEIAHNVSSKNRKAIVERAAQLAIRVTNPNARLRSEE

SEQ ID NO: 85686 - protein, 113 aa, Homo sapiens
MSTRTPLPTVNERDTENHTSHGDGRQEVTSRTSRSGARCRNSIASCADEQPHIGNYRLLKTIGKGNFAKVKLARHILTGREVAIKIIDKTQLNPTSLQKTEFCSCCPGWSAMA

SEQ ID NO: 85687 - protein, 235 aa, Homo sapiens
MEVMNLMEQPIKVTEWQQTYTYDSGIHSGANTCVPSVSSKGIMEEDEACGRQYTLKKTTTYTQGVPPSQGDLEYQMSTTARAKRVREAMCPGVSGEDSSLLLATQVEGQATNLQRLAEPSQLLKSAIVHLINYQDDAELATRALPELTKLLNDEDPVVVTKAAMIVNQLSKKEASRRALMGSPQLVAAVVRTMQNTSDLDTARCTTSILHNLSHHREGLLAIFKSGGIPALVRML

SEQ ID NO: 85688 - protein, 334 aa, Homo sapiens
MHPLPGYWSCYCLLLLFSLGVQGSLGAPSAAPEQVHLSYPGEPGSMTVTWTTWVPTRSEVQFGLQPSGPLPLRAQGTFVPFVDGGILRRKLYIHRVTLRKLLPGVQYVYRCGSAQGWSRRFRFRALKNGAHWSPRLAVFGDLGADNPKAVPRLRRDTQQGMYDAVLHVATSLTTRLASACRGIMRACGTAGIWVPPTSSPSPPRSISFSIMAATWYRGSFAGWRATSRKPIRTGQPGRGSSLWGTGPCTAPTQIWTTAHDMKARSAKASKASCTGWRIFSTNMEWICSCGLMSTRMNDCGQFTTTRYLTAAERCPTPTREGLSTSSQDLLMGRS

SEQ ID NO: 85689 - protein, 40 aa, Homo sapiens
MTTGDCCHLPGSLCDCSGSPAFSKVVEATGLGPPQYVTPV

SEQ ID NO: 85690 - protein, 1503 aa, Homo sapiens
MEAATTLHPGPRPALPLGGPGPLGEFLPPPECPVFEPSWEEFADPFAFIHKIRPIAEQTGICKVRPPPDWQPPFACDVDKLHFTPRIQRLNELELVAEEGGFAVVCKDRKWTKIATKMGFAPGKAVGSHIRGHYERILNPYNLFLSGDSLRCLQKPNLTTDTKDKEYKPHDIPQRQSVQPSETCPPARRAKRMRAEAMNIKIEPEETTEARTHNLRRRMGCPTPKCENEKEMKSSIKQEPIERKDYIVENEKEKPKSRSKKATNAVDLYVCLLCGSGNDEDRLLLCDGCDDSYHTFCLIPPLHDVPKGDWRCPKCLAQECSKPQEAFGFEQAARDYTLRTFGEMADAFKSDYFNMPVHMVPTELVEKEFWRLVSTIEEDVTVEYGADIASKEFGSGFPVRDGKIKLSPEEEEYLDSGWNLNNMPVMEQSVLAHITADICGMKLPWLYVGMCFSSFCWHIEDHWSYSINYLHWGEPKTWYGVPGYAAEQLENVMKKLAPELFVSQPDLLHQLVTIMNPNTLMTHEVPVYRTNQCAGEFVITFPRAYHSGFNQGFNFAEAVNFCTVDWLPLGRQCVEHYRLLHRYCVFSHDEMICKMASKADVLDVVVASTVQKDMAIMIEDEKALRETVRKLGVIDSERMDFELLPDDERQCVKCKTTCFMSAISCSCKPGLLVCLHHVKELCSCPPYKYKLRYRYTLDDLYPMMNALKLRAESYNEWALNVNEALEAKINKKKSLVSFKALIEESEMKKFPDNDLLRHLRLVTQDAEKCASVAQQLLNGKRQTRYRSGGGKSQNQLTVNELRQFVTQLYALPCVLSQTPLLKDLLNRVEDFQQHSQKLLSEETPSAAELQDLLDVSFEFDVELPQLAEMRIRLEQARWLEEVQQACLDPSSLTLDDMRRLIDLGVGLAPYSAVEKAMARLQELLTVSEHWDDKAKSLLKARPRHSLNSLATAVKEIEEIPAYLPNGAALKDSVQRARDWLQDVEGLQAGGRVPVLDTLIELVTRGRSIPVHLNSLPRLETLVAEVQAWKECAVNTFLTENSPYSLLEVLCPRCDIGLLGLKRKQRKLKEPLPNGKKKSTKLESLSDLERALTESKETASAMATLGEARLREMEALQSLRLANEGKLLSPLQDVDIKICLCQKAPAAPMIQCELCRDAFHTSCVAVPSISQGLRIWLCPHCRRSEKPPLEKILPLLASLQRIRVRLPEGDALRYMIERTVNWQHRAQQLLSSGNLKFVQDRVGSGLLYSRWQASAGQVSDTNKVSQPPGTTSFSLPDDWDNRTSYLHSPFSTGRSCIPLHGVSPEVNELLMEAQLLQVSLPEIQELYQTLLAKPSPAQQTDRSSPVRPSSEKNDCCRGKRDGINSLERKLKRRLEREGLSSERWERVKKMRTPKKKKIKLSHPKDMNNFKLERERSYELVRSAETHSLPSDTSYSEQEDSEDEDAICPAVSCLQPEGDEVDWVQCDGSCNQWFHQVCVGVSPEMAEKEDYICVRCTVKDAPSRK

SEQ ID NO: 85691 - protein, 300 aa, Homo sapiens
MDGTMEDSEAVQRATALIEQRLAQEEENEKLRGDARQKLPMDLLVLEDEKHHGAQSAALQKVKGQERVRKTSLDLRREIIDVGGIQNLIELRKKRKQKKRDALAASHEPPPEPEEITGPVDEETFLKAAVEGKMKVIEKFLADGGSADTCDQFRRTALHRASLEGHMEILEKLLDNGATVDFQDRLDCTAMHWACRGGHLEVVKLLQSHGADTNVRDKEGDTALHDAVRLNRYKIIKLLLLHGADMMTKNLAGKTPTDLVQLWQADTRHALEHPEPGAEHNGLEGPNDSGRETPQPVPAQ

SEQ ID NO: 85692 - protein, 1665 aa, Homo sapiens
MSAGGRDEERRKLADIIHHWNANRLDLFEISQPTEDLEFHGVMRFYFQDKAAGNFATKCIRVSSTATTQDVIETLAEKFRPDMRMLSSPKYSLYEVHVSGERRLDIDEKPLVVQLNWNKDDREGRFVLKNENDAIPPKKAQSNGPEKQEKEGVIQNFKRTLSKKEKKEKKKREKEALRQASDKDDRPFQGEDVENSRLAAEVYKDMPETSFTRTISNPEVVMKRRRQQKLEKRMQEFRSSDGRPDSGGTLRIYADSLKPNIPYKTILLSTTDPADFAVAEALEKYGLEKENPKDYCIARVMLPPGAQHSDEKGAKEIILDDDECPLQIFREWPSDKGILVFQLKRRPPDHIPKKTKKHLEGKTPKGKERADGSGYGSTLPPEKLPYLVELSPGRRNHFAYYNYHTYEDGSDSRDKPKLYRLQLSVTEVGTEKLDDNSIQLFGPGIQPHHCDLTNMDGVVTVTPRSMDAETYVEGQRISETTMLQSGMKVQFGASHVFKFVDPSQDHALAKRSVDGGLMVKGPRHKPGIVQETTFDLGGDIHSGTALPTSKSTTRLDSDRVSSASSTAERGMVKPMIRVEQQPDYRRQESRTQDASGPELILPASIEFRESSEDSFLSAIINYTNSSTVHFKLSPTYVLYMACRYVLSNQYRPDISPTERTHKVIAVVNKMVSMMEGVIQKQKNIAGALAFWMANASELLNFIKQDRDLSRITLDAQDVLAHLVQMAFKYLVHCLQSELNNYMPAFLDDPEENSLQRPKIDDVLHTLTGAMSLLRRCRVNAALTIQLFSQLFHFINMWLFNRLVTDPDSGLCSHYWGAIIRQQLGHIEAWAEKQGLELAADCHLSRIVQATTLLTMDKYAPDDIPNINSTCFKLNSLQLQALLQNYHCAPDEPFIPTDLIENVVTVAENTADELARSDGREVQLEEDPDLQLPFLLPEDGYSCDVVRNIPNGLQEFLDPLCQRGFCRLIPHTRSPGTWTIYFEGADYESHLLRENTELAQPLRKEPEIITVTLKKQNGMGLSIVAAKGAGQDKLGIYVKSVVKGGAADVDGRLAAGDQLLSVDGRSLVGLSQERAAELMTRTSSVVTLEVAKQGAIYHGLATLLNQPSPMMQRISDRRGSGKPRPKSEGFELYNNSTQNGSPESPQLPWAEYSEPKKLPGDDRLMKNRADHRSSPNVANQPPSPGGKSAYASGTTAKITSVSTGNLCTEEQTPPPRPEAYPIPTQTYTREYFTFPASKSQDRMAPPQNQWPNYEEKPHMHTDSNHSSIAIQRVTRSQEELREDKAYQLERHRIEAAMDRKSDSDMWINQSSSLDSSTSSQEHLNHSSKSVTPASTLTKSGPGRWKTPAAIPATPVAVSQPIRTDLPPPPPPPPVHYAGDFDGMSMDLPLPPPPSANQIGLPSAQVAAAERRKREEHQRWYEKEKARLEEERERKRREQERKLGQMRTQSLNPAPFSPLTAQQMKPEKPSTLQRPQETVIRELQPQQQPRTIERRDLQYITVSKEELSSGDSLSPDPWKRDAKEKLEKQQQMHIVDMLSKEIQELQSKPDRSAEESDRLRKLMLEWQFQKRLQESKQKDEDDEEEEDDDVDTMLIMQRLEAERRARQTAMPAISVLDLLQDEERRRQQQLEEMRKREAEDRARQEEERRRQEEERTKRDAEEKVMVL

SEQ ID NO: 85693 - protein, 75 aa, Homo sapiens
MATDTSQGELVHPKALPLIVGAQLIHADKLGEKVEDSTMPIRRTVNSTRETPPKSKLAEGEEEKPEPDISSEESV

SEQ ID NO: 85694 - protein, 78 aa, Homo sapiens
HPQVGPGEDCQWHPAGDPLVRPWRVSGSPASASGVAGTTGARHHARRDGVSLCWPGWSRSPDLMIRPPRPPKVLGLQE

SEQ ID NO: 85695 - protein, 58 aa, Homo sapiens
MGPEALSSLLLLLLVASGDADMKGHFDPAKCRYALGMQDRTIPDSDISASSSWSDSTA

SEQ ID NO: 85696 - protein, 993 aa, Homo sapiens
MLFPLQVAAVTSSVRDDPLEHCVSPRTRARSPEICKMADNLDEFIEEQKARLAEDKAELESDPPYMEMKGKLSAKLSENSKILISMAKENIPPNSQQTRGSLGIDYGLSLPLGEDYERKKHKLKEELRQDYRRYLTQERLKLERNKEYNQFLRGKEESSEKFRQVEKSTEPKSQRNKKPIGQVKPDLTSQIQTSCENSEGPRKDVLTPSEAYEELLNQRRLEEDRYRQLDDEIELRNRRIIKKANEEVGISNLKHQRFASKAGIPDRRFHRFNEDRVFDRRYHRPDQDPEVSEEMDERFRYESDFDRRLSRVYTNDRIAPLPPPPLLPPLATNYRTPYDDAYYFYGSRNTFDPSLAYYGSGMMGVQPAAYVSAPVTHQLAQPVVNTVGQNELKITSDQVINSGLIFEDKPKPSKQSLQSYQEALQQQIREREERRKKEREEKEEYEAKLEAEMRTYNPWGKGGGGAPLRDAKGNLISHMQTQSSPFARGNVFGEPPTELQIKQQELYKNFLRFQIEEKKQREEAERERLRIAEEKEERRLAEQRARIQQEYEEEQEKKREKEEEQRLKNEEHIRLAEERQKEAERKKKEEEEKYNLQLQHYCERDNLIGEETKHMRQPSPIVPALQNKIASKLQRPPSVDSIIRSFIHESSMSRAQSPPVPARKNQLRAEEEKKNVIMELSEMRKQLRSEERRLQERLLHMDSDDEIPIRKKERNPMDIFDMARHRLQAPVRRQSPKGLDAATFQNVHDFNELKDRDSETRVDLKFMYLDPPRDHHTLEIQQQALLREQQKRLNRIKMQEGAKVDLDAIPSAKVREQRMPRDDTSDFLKNSLLESDSAFIGAYGETYPAIEDDVLPPPSQLPSARERRRNKWKGLDIDSSRPNVAPDGLSLKSISSVNVDELRVRNEERMRRLNEFHNKPINTDDESSLVDPDDIMKHIGDDGSNSVATEPWLRPGTSETLKRFMAEQLNQEQQQIPGKPGTFTWQGLSTAHG

SEQ ID NO: 85697 - protein, 243 aa, Homo sapiens
ADVLIVYAKTDLAAVPASRGITAFIVEKGMPGFSTSKKLDKLGMRGSNTCELIFEDCKIPAANILGHENKGVYVLMSGLDLERLVLAGGPLGLMQAVLDHTIPYLHVREAFGQKIGHFQLMQGKMADMYTRLMACRQYVYNVAKACDEGHCTAKDCAGVILYSAECATQVALDGIQCFGHAPQPFLYTEPVNYQAPRKFFSGSQHLADLFRPTPTWEGGRDPRSDVPGAGEHCEGTEMQDPPA

SEQ ID NO: 85698 - protein, 138 aa, Homo sapiens
MSLLQSALDFLAGPGSLGGASGRDQSDFVGQTVELGELRLRVRRVLAEGGFAFVYEAQDVGSGREYALKVENLLLSNQGTIKLCDFGSATTISHYPDYSWSAQRRALVEEEITRNTTPMYRTPEIIDLYSNFPIGEKQ

SEQ ID NO: 85699 - protein, 156 aa, Homo sapiens
MNFVKEAEEISSNRRMNSLTLNRHTEILEILEIPQLMDTCVRNSYYEEALELAAYVRRLERKYSSIPVIQGIVNEVRQSMQLMLSQLIQQLRTNIQLPACLRVIGYLRRMDVFTEAELRVKFLQARDAWLRSILTAIPNDDPYFHITKTIEASRVH

SEQ ID NO: 85700 - protein, 158 aa, Homo sapiens
MLIDDTSSEIFDELYKVTKEHTHNKKEAHKIMKDLIKVAIKIGILYRNNQFSQEELVIVEKFRKKLNQTAMTIVSFYEVEYTFDRNVLSNLLHECKDLVHELVQRHLTPRTHGRINHVFNHFADVEFLSTLYSLDGDCRPNLKRICEGINKLLDEKVL

SEQ ID NO: 85701 - protein, 60 aa, Homo sapiens
  MOD_RES (1)..(1): Any amino acid
XRRRSRSRDRRRRRSRSTSRERRKLSRSRSRDRHRRHRSRSRSHSRGHRRASRDRSAKYK

SEQ ID NO: 85702 - protein, 28 aa, Homo sapiens
MQRLLYRDVMLENFAVMASLGIIECFQE

SEQ ID NO: 85703 - protein, 153 aa, Homo sapiens
MATSFRTASCWVVLLRRSLLMSSSVKFGNLLGVPWAQGNSALPEGLLSFKDISMEFTWDEWQLLDSTQKYLYRDVILENYHNLISVGYHGTKPDLIFKLEQGEDPWIINAKISRQSCPDGWEEWYQNNQDELESIERSYACSVLGRLNLSKTH

SEQ ID NO: 85704 - protein, 54 aa, Homo sapiens
MELLDPDELRGEAGYYLTTWFGALHHIAHYQPETDRAPRGLSSEARASLHQWHR

SEQ ID NO: 85705 - protein, 189 aa, Homo sapiens
MADISLDELIRKRGAAAKGRLNARPGVGGVRSRVGIQQGLLSQSTRTATFQQRFDARQKIGLSDARLKLGVKDAREKLLQKDARFRIKGKVQDAREMLNSRKQQTTVPQKPRQVADAREKISLKRSSPAAFINPPIGTVTPALKLTKTIQNLYDLDEDDDGIASVPTKQMKFAASGGFLHHMGPGLSSN

SEQ ID NO: 85706 - protein, 1198 aa, Homo sapiens
  MOD_RES (1)..(1): Any amino acid
XTEKLEKQQKIEQERKRRQKHQEYLNSILQHAKDFKEYHRSVTGKIQKLTKAVATYHANTEREQKKENERIEKERMRRLMAEDEEGYRKLIDQKKDKRLAYLLQQTDEYVANLTELVRQHKAAQVAKEKKKKKKKKKAENAEGQTPAIGPDGEPLDETSQMSDLPVKVIHVESGKILTGTDAPKAGQLEAWLEMNPGYEVAPRSDSEESGSEEEEEEEEEEQPQAAQPPTLPVEEKKKIPDPDSDDVSEVDARHIIENAKQDVDDEYGVSQALARGLQSYYAVAHAVTERVDKQSALMVNGVLKQYQIKGLEWLVSLYNNNLNGILADEMGLGKTIQTIALITYLMEHKRINGPFLIIVPLSTLSNWAYEFDKWAPSVVKVSYKGSPAARRAFVPQLRSGKFNVLLTTYEYIIKDKHILAKIRWKYMIVDEGHRMKNHHCKLTQVLNTHYVAPRRLLLTGTPLQNKLPELWALLNFLLPTIFKSCSTFEQWFNAPFAMTGEKVDLNEEETILIIRRLHKVLRPFLLRRLKKEVEAQLPEKVEYVIKCDMSALQRVLYRHMQAKGVLLTDGSEKDKKGKGGTKTLMNTIMQLRKICNHPYMFQHIEESFSEHLGFTGGIVQGLDLYRASGKFELLDRILPKLRATNHKVLLFCQMTSLMTIMEDYFAYRGFKYLRLDGTTKAEDRGMLLKTFNEPGSEYFIFLLSTRAGGLGLNLQSADTVIIFDSDWNPHQDLQAQDRAHRIGQQNEVRVLRLCTVNSVEEKILAAAKYKLNVDQKVIQAGMFDQKSSSHERRAFLQAILEHEEQDESRHCSTGSGSASFAHTAPPPAGVNPDLEEPPLKEEDEVPDDETVNQMIARHEEEFDLFMRMDLDRRREEARNPKRKPRLMEEDELPSWIIKDDAEVERLTCEEEEEKMFGRGSRHRKEVDYSDSLTEKQWLKTLKAIEEGTLEEIEEEVRQKKSSRKRKRDSDAGSSTPTTSTRSRDKDDESKKQKKRGRPPAEKLSPNPPNLTKKMKKIVDAVIKYKDSSGRQLSEVFIQLPSRKELPEYYELIRKPVDFKKIKERIRNHKYRSLNDLEKDVMLLCQNAQTFNLEGSLIYEDSIVLQSVFTSVRQKIEKEDDSEGEESEEEEEGEEEGSESESRSVKVKIKLGRKEKAQDRLKGGRRRPSRGSRAKPVVSDDDSEEEQEEDRSGSGSEED

SEQ ID NO: 85707 - protein, 162 aa, Homo sapiens
MNKHQKPVLTGQRFKTRKRDEKEKFEPTVFRDTLVQGLNEAGDDLEAVAKFLDSTGSRLDYRRYADTLFDILVAGSMLAPGGTRIDDGDKTKMTNHCVFSANEDHETIRNYAQVFNKLIRRYKYLEKAFEDEMKKLLLFLKAFSETEQTKLAMLSGILLGNG

SEQ ID NO: 85708 - protein, 2067 aa, Homo sapiens
  MOD_RES (1)..(1): Any amino acid
XSDIKIKEENLFCDNIKGNEIFPSQQIARLIECERVLVALELSNFLNDSSYALQAVTQCYGLLAPIIYHNIVLVPVVQILIKCIVVLQGLPSIVCSKKHTASFESIQHMIACCIFYITKILRSWREYDLAVMIINYGKKMLDITPGCKSLFDGSNEQEEMPEEDSSKKSLKTKKPQQILLPEKINEQLALLETHLLKLTKQYVTSELSGGEDPIFLYPVVLNWSVKGAVKEVMKFKQKPRFLEFFTQVMLKCMNEEKFHLMVEVTTPVHDFLKRRNESLLGLIKVKYKDSALNKKANKSLKFKAAVMEIGRSAEMQQRIRSKKKETLRDFIFKNPAISEMVAHERNRRTSVRKAAQRYLMDYLNPLILSYVKRKRFHRLSLEEMPWRAQMNLYLAGAHFNLVLQKLWECTKMKFGTSHMMVSFRSCDPNMFSLYNSGTVLPTRKLTVENYKAMLDFLLTAKKRKANLPSDAEEFSTFINSIMSDENMSKTQTVYDSDSQSGSSAKEKDRGANLCVMDHFMKIFLYCRRAMVLAHRGGYWTLLQNCCRALWNFTQELQILLKQAVDLDKTFPISQDGFLCTSVLPFYLGAELLIDMLIQLQNTSSIKPIEDKGEFSVPSCYGNIKNDNGGSSLTFEHPLDDVNVVDLKWIHDFVLKSLEVLYQVEKWETLVSLAIQFNTVSHERYTEQVTPLLVYAQRQLLLRIQKFKGPDITQQPCARYEAEYGEKITCRNFIGKQLKINSSTIEATSNCTDLLKMLISSEYSRAKALVCVPVDVTDTLRCFRETLEKSKYHNRSIRHSRKLLSLFLAQTQGEKGEINDSKCTSGKVEFCLGTEEMHMSIPPDLSQEHFRVFSSVEKSKLPYSQLGLVISSYHQTIDVLQASNQRSLKVQALHSLGSLLIFAEKKRAAFKCWCQALDDIFRKPDVLHTWKEFGPSLTNVTNSHSPPGFKDYSEEFLSRVGIWGCLQGAVISAKIAQFIKSLNVEKKTDCCILSALLFQGLLRTTLPHPKAERCYAQYEITQLLPGIELFSDRYRADICSVIASLYYIIRELHFVRQNLIVLPLLALYQYFVSGICQDITRNLEARILKIEVLIDLRFFSEAFYEISQIFYGKNMPCPIPAGYKATGKMKIFQSFDSGKLLTSKENIQAIDELRNKGLPAVLVTIGQPHLLNKFNFVKAYFFLSVAATINCVPENKFKTVITNKSKPNLPNLEEIYSKDDGSSFYNLTKLKDEITLSMLKSMLLMEAEDRLNFLLSEVEQKTLSQCSAGELEIVVEARLQLAAVALQRHRAAYSAAIVFSTLTLLQDSKLFEKKVVQDDTENPVSPGTSVTENKDDSEFLDPISLNAREYFNIHLWLRCRLALVTAFVAQIHGIGIVKEDDMTDCLSLINEVCMEAKSAGDTELQAEFLTQAVILGLQEKHLKADIMTNLQDIIHLLEGNEFISPQSRLTLARSLVLLDDLTKAEKFKESPSSKTGKLNLLTRAHSILTEQMLAFGETIEFRSSNTKYANPLQPLKNIYLPHVMLLAKIKMRIGHTVAKQVYYKNKRKDPSKWLPALHLFDVALKLCRTTAVEEHEVEAEILFQKGKIERQILMEEKSPSFQLESLYEAIQLSLKNDQNSGLIRDSYLEMALLYFHLKKPKIKISGSPLTLKPPLRRSSSVKETSANKFEMYSSLAWIAIRAAAQVSEAVLAINLLIGKKNTRMHKVNQVALPNIPEFAALDLLSSYTDYLLDNYQVLFQTSCTFLYQNDDVCDSADGRKKTQTKVDITWILLLRYYIHLQRINNLSKLLASATPVSGISLPDDTLLTSLYNSELILRQKEVHFFLKKFLQLYSSSCIDEFPKELLCQLENPPLSEKDLRESSAKLYRDSSVQSILSFKPVSGSSCVDITPIEMVTQASNKELCFQWYIPPLDRPPKETEPMVLLLYAYNLKPLKISDVRHSTYNSTCVGSLWIPLNRVIAIHEKLSNLAQIAELSLPAAPEITSNENIYEVEVEEESVDNEMEDMIIQCCSEIASLFLNDKEPTPLSEVPFDISLPSIFNLERLFDLANGCILSGGSLFNWIVSIIP

SEQ ID NO: 85709 - protein, 218 aa, Homo sapiens
MMKECMVRLIYCEMLGYDASFGYIHAIKLAQQGNLLEKRVGYLAVSLFLHESHELLLLLVNTVVKDLQSTNLVEVCMALTVVSQIFPCEMIPAVLPLIEDKLQHSKEIVRRKAVLALYKFHLIAPNQVQHIHIKFRKALCDRDVGVMAASLHIYLRMIKENSSGYKDLTGSFVTILKQVVGGKLPVEFNYHSVPAPWLQIQLLRILGLLGKDDQSYFV

SEQ ID NO: 85710 - protein, 97 aa, Homo sapiens
LHPGPGHGEPDVLKDELQLYGDEFFHFVLLCFAIGALLVCYHYYADWFMSLGVGLLTFASLETVGIYFGLVYRIHSVLQGFIPLFQKFRLTGFRKTD

SEQ ID NO: 85711 - protein, 137 aa, Homo sapiens
MPVERMRMRPWLEEQINSNTIPGLKWLNKEKKIFQIPWMHAARHGWDVEKDAPLFRNWAIHTGKHQPGVDKPDPKTWKANFRCAMNSLPDIEEVKDKSIKKGNNAFRVYRMLPLSERPSKKGKKPKTEKEDKVKHIK

SEQ ID NO: 85712 - protein, 70 aa, Homo sapiens
MRRPLCATGLVRVGDHWEDALPDHAYAAAGPGPGCTCRTSWWPEPPQQCSGSHLQVCEHAGSRDGHEVSD

SEQ ID NO: 85713 - protein, 100 aa, Homo sapiens
MDSFGQPRPEDNQSVVRRMQKKYWKTKQVFIKATGKKEDEHLVASDAELDAKLEVFHSVQETCTELLKIIEKYQLRLNVISEEENELGLFLKFQAERDAT

SEQ ID NO: 85714 - protein, 123 aa, Homo sapiens
MGAAAAEADRTLFVGNLETKVTEELLFELFHQAGPVIKVKIPKDKDGKPKQFAFVNFKHEVSVPYAMNLLNGIKLYGRPIKIQFRSVVMPHKMSVCHIPNIMLEIQALPPHLLAAGTKGLWIT

SEQ ID NO: 85715 - protein, 173 aa, Homo sapiens
MSALACGLPVPVPCLNSHLSMGQKGAPGPKGFKGDPGVGVPGSPGPPGPPGVKGDLGLPGLPGAPGVVGFPGQTGPRGEMGQPGPSGERGLAGPPGREGIPGPLGPPGPPGSVGPPGASGLKGDKGDPGVGLPGPRGERGEPGIRGEDGRPGQEGPRGLTGPPGSRGERGEKG

SEQ ID NO: 85716 - protein, 135 aa, Homo sapiens
RHIRVEHRSRNHLGILGSLMGGDGRYVLNGHWVVSPPGTYEAAGTHVVYTRDTGPQETLQAAGPTSHDLLLQVLLQEPNPGIEFEFWLPRERYSPFQARVQALGWPLRQPQPRGVEPQPPAAPAVTPAQTPTLAP

SEQ ID NO: 85717 - protein, 111 aa, Homo sapiens
  MOD_RES (1)..(1): Any amino acid
XPPDRRQSSVDSRQSRSGQGGISTESDCAFEPDYAVPPLPVSEGMQHIRIMEGMSRSLPSSPLLTHQSISVRLQPVKKLTGDAEQELGPPPSVDEAANTLMTRLGFLLGEK

SEQ ID NO: 85718 - protein, 209 aa, Homo sapiens
MCGAGFGHFEWLAGGGAGQDVGRSCILVSIAGKNVMLDCGMHMGFNDDRRFPDFSYITQNGRLTDFLDCVIISHFHLDHCGALPYFSEMVGYDGPIYMTHPTQAICPILLEDYRKIAVDKKGEANFFTSQMIKDCMKKVVAVHLHQTVQVDDELEIKAYYAGHVLGAAMFQIKVGSESVVYTGDYNMTPDRHLGAAWIDKCRPNLLITE

SEQ ID NO: 85719 - protein, 202 aa, Homo sapiens
MKVQVVTQDEREQLYTPASLKCSLQNAQEALIVTWQKKKAVSPENMVTFSENHGVVIQPAYKDKINITQLGLQNSTITFWNITLEDEGCYMCLFNTFGFGKISGTACLTVYVQPIVSLHYKFSEDHLNITCSATARPAPMVFWKVPRSGIENSTVTLSHPNGTTSVTSILHIKDPKNQVGKEVICQVLHLGTVTDFKQTVNK

SEQ ID NO: 85720 - protein, 255 aa, Homo sapiens
MPRSVVGTACMYFKRFYLNNSVMEYHPRIIMLTCAFLACKVDEFNVSSPQFVGNLRESPLGQEKALEQILEYELLLIQQLNFHLIVHNPYRPFEGFLIDLKTRYPILENPEILRKTADDFLNRIALTDAYLLYTPSQIALTAILSSASRAGITMESYLSESLMLKENRTCLSQLLDIMKSMRNLVKKYEPPRSEEVAVLKQKLERCHSAELALNVITKKRKGYEDDDYVSKKSKHEEVCFTPKMNSKLFLLYILV

SEQ ID NO: 85721 - protein, 191 aa, Homo sapiens
MTQDRPLLAVQEALKKCFPVVEEQQGLWQSALRDCQPLLSSLSNLAEQLQAAQNLRFEDVPALRAFPDLKERLRRKQLVAGDIVLDKLGERLAILLKVRDMVSSHVERVFQIYEQHADTVGIDAVLQPSAVSPSVADMLEWLQDIERHYRKSYLKRKYLLSSIQWGDLANIQALPKAWDRISKDEHQDLVQ

SEQ ID NO: 85722 - protein, 142 aa, Homo sapiens
MVLKAFFPTCCVSTDSGLLVGRWVPEQSSAVVLAVLHFPFIPIQVKQLLAQVRQASQVGVAVLGTWCHCRQEPEESLGRFLESLGAVFPHEPWLRLCRERGGTFWSCEATHRQAPTAPGAPGWSHHCQHGGPGCRLRHGSTQ

SEQ ID NO: 85723 - protein, 90 aa, Homo sapiens
MRWRTILLQYCFLLITCLLTALEAVPIDIDKTKVQNIHPVESAKIEPPDTGLYYDEYLKQVIDVLETDKHFREKLQKADIEEIKSGRLSK

SEQ ID NO: 85724 - protein, 366 aa, Homo sapiens
MESERGGAVSWNPVVVWCMKCEQQDPRYSPYTLVRITEAEMRAYHRLVGSCIRLEYMAKKDEIMQQEVRPLMAVEIIEQLHRQFAILSGGRGEDGAPIITFPEFSGFKHIPDEDFLNVMTYLTSIPSVEAASIGFIVVIDRRRDKWSSVKASLTRIAVAFPGNLQLIFILRPSRFIQRTFTDIGIKYYRNEFKTKVPIIMVNSVSDLHGYIDKSQLTRELGGTLEYRHGQWVNHRTAIENFALTLKTTAQMLQTFGSCLATAELPRSMLSTEDLLMSHTRQRDKLQDELKLLGKQGTTLLSCIQEPATKCPNSKLNLNQLENVTTMERLLVQLDETEKAFSHFWSEHHLKLNQCLQLQHFEHDFCK

SEQ ID NO: 85725 - protein, 128 aa, Homo sapiens
MFNNCEVVLGNLEITYVQRNYDLSFLKTIQEVAGYVLIALNTVERIPLENLQIIRGNMYYENSYALAVLSNYDANKTGLKELPMRNLQEILHGAVRFSNNPALCNVESIQWRDIVSSDFLSNMSMDFQ

SEQ ID NO: 85726 - protein, 224 aa, Homo sapiens
MSLSENSVFAYESSVHSTNVLLSLNDQRKKDVLCDVTIFVEGQRFRAHRSVLAACSSYFHSRIVGQADGELNITLPEEVTVKGFEPLIQFAYTAKLILSKENVDEVCKCVEFLSVHNIEESCFQFLKFKFLDSTADQQECPRKKCFSSHCQKTDLKLSLLDQRDLETDEVEEFLENKNVQTPQCKLRRYQGNAKASPPLQDSASQTYESMCLEKDAALALPSLC

SEQ ID NO: 85727 - protein, 790 aa, Homo sapiens
MEATSREAAPAKSSASGPNAPPALFELCGRAVSAHMGVLESGVWALPGPILQSILPLLNIYYLERIEETALKKGLSTQAIWRRLWDELMKTRPSSLESVTCWRAKFMEAFFSHVLRGTIDVSSDRRLCDQRFSPLLHSSRHVRQLTICNMLQGATELVAEPNRRVLETLASSLHTLKFRHLLFSDVAAQQSLRQLLHQLIHHGAVSQVSLYSWPVPESALFILILTMSAGFWQPGPGGPPCRLCGEASRGRAPSRDEGSLLLGSRRPRRDAAERCAAALMASRRKSEAKQMPRAAPATRVTRRSTQESLTAGGTDLKRELHPPATSHEAPGTKRSPSAPAATSSASSSTSSYKRAPASSAPQPKPLKRFKRAAGKKGARTRQGPGAESEDLYDFVFIVAGEKEDGEEMEIGEVACGALDGSDPSCLGLPALEASQRFRSISTLELFTVPLSTEAALTLCHLLSSWVSLESLTLSYNGLGSNIFRLLDSLRALSGQAGCRLRALHLSDLFSPLPILELTRAIVRALPLLRVLSIRVDHPSQRDNPGVPGNAGPPSHIIGDEEIPENCLEQLEMGFPRGAQPAPLLCSVLKASGSLQQLSLDSATFASPQDFGLVLQTLKEYNLALKRLSFHDMNLADCQSEVLFLLQNLTLQEITFSFCRLFEKRPAQFLPEMVAAMKGNSTLKGLRLPGNRLGNAGLLALADVFSEDSSSSLCQLDISSNCIKPDGLLEFAKRLERWGRGAFGHLRLFQNWLDQDAVTAREAIRRLRATCHVVSDSWDSSQAFADYVSTM

SEQ ID NO: 85728 - protein, 1521 aa, Homo sapiens
MAAVGSGGYARNDAGEKLPSVMAGVPARRGQSSPPPAPPICLRRRTRLSTASEETVQNRVSLEKVLGITAQNSSGLTCDPGTGHVAYLAGCVVVILDPKENKQQHIFNTARKSLSALAFSPDGKYIVTGENGHRPAVRIWDVEEKNQVAEMLGHKYGVACVAFSPNMKHIVSMGYQHDMVLNVWDWKKDIVVASNKVSCRVIALSFSEDSSYFVTVGNRHVRFWFLEVSTETKVTSTVPLVGRSGILGELHNNIFCGVACGRGRMAGSTFCVSYSGLLCQFNEKRVLEKWINLKVSLSSCLCVSQELIFCGCTDGIVRIFQAHSLHYLANLPKPHYLGVDVAQGLEPSFLFHRKAEAVYPDTVALTFDPIHQWLSCVYKDHSIYIWDVKDINRVGKVWSELFHSSYVWNVYPEFEDQRACLPSGSFLTCSSDNTIRFWNLDSSPDSHWQKNIFSNTLLKVVYVENDIQHLQDMSHFPDRGSENGTPMDVKAGVRVMQVSPDGQHLASGDRSGNLRIHELHFMDELVKVEAHDAEVLCLEYSKPETGLTLLASASRDRLIHVLNVEKNYNLEQTLDDHSSSITAIKFAGNRDIQMISCGADKSIYFRSAQQGSDGLHFVRTHHVAEKTTLYDMDIDITQKYVAVACQDRNVRVYNTVNGKQKKCYKGSQGDEGSLLKVHVDPSGTFLATSCSDKSISVIDFYSGECIAKMFGHSEIITSMKFTYDCHHLITVSGDSCVFIWHLGPEITNCMKQHLLEIDHRQQQQHTNDKKRSGHPRQDTYVSTPSEIHSLSPGEQTEDDLEEECEPEEMLKTPSKDSLDPDPRCLLTNGKLPLWAKRLLGDDDVADGLAFHAKRSYQPHGRWAERAGQEPLKTILDAQDLDCYFTPMKPESLENSILDSLEPQSLASLLSESESPQEAGRGHPSFLPQQKESSEASELILYSLEAEVTVTGTDSQYCRKEVEAGPGDQQGDSYLRVSSDSPKDQSPPEDSGESEADLECSFAAIHSPAPPPDPAPRFATSLPHFPGCAGPTEDELSLPEGPSVPSSSLPQTPEQEKFLRHHFETLTESPCRELFPAALGDVEASEAEDHFFNPRLSISTQFLSSLQKASRFTHTFPPRATQCLVKSPEVKLMDRGGSQPRAGTGYASPDRTHVLAAGKAEETLEAWRPPPPCLTSLASCVPASSVLPTDRNLPTPTSAPTPGLAQGVHAPSTCSYMEATASSRARISRSISLGDSEGPIVATLAQPLRRPSSVGELASLGQELQAITTATTPSLDSEGQEPALRSWGNHEARANLRLTLSSACDGLLQPPVDTQPGVTVPAVSFPAPSPVEESALRLHGSAFRPSLPAPESPGLPAHPSNPQLPEARPGIPGGTASLLEPTSGALGLLQGSPARWSEPWVPVEALPPSPLELSRVGNILHRLQTTFQEALDLYRVLVSSGQVDTGQQQARTELVSTFLWIHSQLEAECLVGTSVAPAQALPSPGPPSPPTLYPLASPDLQALLEHYSELLVQAVRRKARGH

SEQ ID NO: 85729 - protein, 216 aa, Homo sapiens
MNPASDGGTSESIFDLDYASWGIRSTLMVAGFVFYLGVFVVCHQLSSSLNATYRSLVAREKVFWDLAATRAVFGVQSTAAGLWALLGDPVLHADKARGQQNWCWFHITTATGFFCFENVAVHLSNLIFRTFDLFLVIHHLFAFLGFLGCLVNLQAGHYLAMTTLLLEMSTPFTCVSWMLLKESWVIGTQGAENALASDSRSVQIQSFSHPQELPPE

SEQ ID NO: 85730 - protein, 198 aa, Homo sapiens
MPGEATETVPATEQELPQPQAETGSGTESDSDESVPELEEQDSTQATTQQAQLAAAAEIDEEPVSKAKQSRSEKKARKAMSKLGLRQVTGVTRVTIRKSKNILFVITKPDVYKSPASDTYIVFGEAKIEDLSQQAQLAAAEKFKVQGEAVSNIQENTQTPTVQEESEEEEVDETGVEVKDIELVMSQANVSRAKAVRA

SEQ ID NO: 85731 - protein, 618 aa, Homo sapiens
MCGICCSVNFSAEHFSQDLKEDLLYNLKQRGPNSSKQLLKSDVNYQCLFSAHVLHLRGVLTTQPVEDERGNVFLWNGEIFSGIKVEAEENDTQILFNYLSSCKNESEILSLFSEVQGPWSFIYYQASSHYLWFGRDFFGRRSLLWHFSNLGKSFCLSSVGTQTSGLANQWQEVPASGLFRIDLKSTVISGCIILQLYPWKYISRENIIEENVNSLSQISADLPAFVSVVANEAKLYLEKPVVPLNMMLPQAALETHCSNISNVPPTREILQVFLTDVHMKEVIQQFIDVLSVAVKKRVLCLPRDENLTANEVLKTCDRKANVAILFSGGIDSMVIATLADRHIPLDEPIDLLNVAFIAEEKTMPTTFNREGNKQKNKCEIPSEEFSKDVAAAAADSPNKHVSVPDRITGRAGLKELQAVSPSRIWNFVEINVSMEELQKLRRTRICHLIRPLDTVLDDSIGCAVWFASRGIGWLVAQEGVKSYQSNAKVVLTGIGADEQLAGYSRHRVRFQSHGLEGLNKEIMMELGRISSRNLGRDDRVIGDHGKEARFPFLDENVVSFLNSLPIWEKANLTLPRGIGEKLLLRLAAVELGLTASALLPKRAMQFGSRIAKMEKINE

SEQ ID NO: 85732 - protein, 152 aa, Homo sapiens
MGCVQCKDKEATKLTEERDGSLNQSSGYRYGTDPTPQHYPSFGVTSIPNYNNFHAAGGQGLTVFGGVNSSSHTGTLRTRGGTGVTLFVALYDYEARTEDDLSFHKGEKFQILNSSEGDWWEARSLTTGETGYIPSNYVAPVDSIQAEEWYFG

SEQ ID NO: 85733 - protein, 46 aa, Homo sapiens
MKSAGGSGRSLLPSPRVCEEQRCEEEVFPLAMNYLDRYLSCVPTRK

SEQ ID NO: 85734 - protein, 245 aa, Homo sapiens
MEWDNGTGQALGLPPTTCVYRENFKQLLLPPVYSAVLAAGLPLNICVITQICTSRRALTRTAVYTLNLALADLLYACSLPLLIYNYAQGDHWPFGDFACRLVRFLFYANLHGSILFLTCISFQRYLGICHPLAPWHKRGGRRAAWLVCVAVWLAVTTQCLPTAIFAATGIQRNRTVCYDLSPPALATHYMPYGMALTVIGFLLPFAALLACYCLLACRLCRQDGPAEPVAQERRGKAARMAVVVA

SEQ ID NO: 85735 - protein, 174 aa, Homo sapiens
MRGCFSMPPEAEKEQKHWNRSPAHYDLAISVALQWLDPSEDLTWLEWEELKIPLHGRPIYPNRREREAMILSSYAGILMNSIPIEEVFKIYGADSSADSGTIKVPRVSSLCLSLHPFAMLTAPKAAAYARKQSVKSRKVTTNKNATSISAKEANATEWKSSQRFSDTQPKHKVT

SEQ ID NO: 85736 - protein, 225 aa, Homo sapiens
MARLLQASCLLSLLLAGFVSQSRGQEKSKMDCHGGISGTIYEYGALTIDGEEYIPFKQYAGKYVLFVNVASYGLTGQYIELNALQEELAPFGLVILGFPCNQFGKQEPGENSEILPTLKYVRPGGGFVPNFQLFEKGDVNGEKEQKFYTFLKNSCPPTSELLGTSDRLFWEPMKVHDIRWNFEKFLVGPDGIPIMRWHHRTTVSNVKMDILSYMRRQAALGVKRK

SEQ ID NO: 85737 - protein, 345 aa, Homo sapiens
MWLRCCRLWAARKASPGEGYNNPPISGENLIGLSRARRPHNAIFVNFEDEEVPKQPLEAAAQTWRRVCTNPVDRKVEEELRKLFDIRPIWSRNAVKANISVHPDKLKVLLPFIAYYMITGPWRSLWIRFGYDPRKNPDAKIYQVLDFRIRCGMKHGYAPSDLPVKAKRSTYNYSLPITVKKTSSQLVTMHDLKQGLGPSGTSGARKPASSKYKLKDSVYIFREGALPPYRQMFYQLCDLNVEELQKIIHRNDGAENSCTERDGWCLPKTSDELRDTMSLMIRQTIRSKRPALFSSSAKADGGKEQLTYESGEDEEDEEEEEEEEEDFKPSDGSENEMETEILDYV

SEQ ID NO: 85738 - protein, 422 aa, Homo sapiens
MADGEEPMAVDGGCGDTGDWEGRWNHVKKFLERSGPFTHPDFEPSTEALSGFRQIHVIDMDTIDVSNLNRQFLFRPKDIGRPKAEVAAEFLNDRVPNCNVVPHFNKIQDFNDTFYRQFHIIVCGLDSIIARRWINGMLISLLNYEDGVLDPSSIVPLIDGGTEGFKGNARVILPGMTACIECTLELYPPQVNFPMCTIASMPRLPEHCIEYVRMLQWPKEQPFGEGVPLDGDDPEHIQWIFQKSLERASQYNIRGVTYRLTQGVVKRIIPAVASTNAVIAAVCATEVFKIATSAYIPLNNYLVFNDVDGLYTYTFEAERKENCPACSQLPQNIQFSPSAKLQEVLDYLTNSASLQMKSPAITATLEGKNRTLYLQSVTSIEERTRPNLSKTLKELGLVDGQELAVADVTTPQTVLFKLHFTS

SEQ ID NO: 85739 - protein, 32 aa, Homo sapiens
MVTPLSNANQPEQVILYQGGQMFDGAPRFHGR

SEQ ID NO: 85740 - protein, 194 aa, Homo sapiens
MKQLPAATVRLLSSSQIITSVVSVVKELIENSLDAGATSVDVKLENYGFDKIEVRDNGEGIKAVDAPVMAMKYYTSKINSHEDLENLTTYGFRGEALGSICCIAEVLITTRTAADNFSTQYVLDGSGHILSQKPSHLGQGTTVTALRLFKNLPVRKQFYSTAKKCKDEIKKIQDLLMSFGILKPDLRIVFVHNK

SEQ ID NO: 85741 - protein, 141 aa, Homo sapiens
MNFVDPKEIDIPRHGTKNRYKTILPNPLSRVCLRPKNVTDSLSTYINANYIRGYSGKEKAFIATQGPMINTVDDFWQMVWQEDSPVIVMITKLKEKNEKRRLTGLAPAHTWHSTFPWAKLSGSRCPHPMTRACAGAITPPC

SEQ ID NO: 85742 - protein, 220 aa, Homo sapiens
MIPWPASDRKKSECAFKKKSNETQCFNFIRVLVSYNVTHLYTCGTFAFSPACTFIELQDSYLLPISEDKVMEGKGQSPFDPAHKHTAVLVDGMLYSGTMNNFLGSEPILMRTLGSQPVLKTDNFLRWLHHDASFVAAIPSTQVVYFFFEETASEFDFFERLHTSRVARVCKNDVGGEKLLQKKWTTFLKAQLLCTQPGQLPFNVIRHAVLLPADSPTAPH

SEQ ID NO: 85743 - protein, 40 aa, Homo sapiens
MQNCSDHGAVPLAPLPPSPVRLAAGRDHGYLSAGFWFPRK

SEQ ID NO: 85744 - protein, 582 aa, Homo sapiens
DMAVNEIFFDRYPDSILEHQIQVRPFNALKTKNMRNLNPEDIDQLITISGMVIRTSQLIPEMQEAFFQCQIKLQESPEDMPAGQTPHTVILFAHNDLVDKVQPGDRVNVTGIYRAVPIRVNPRVSNVKSVYKTHIDVIHYRKTDAKRLHGLDEEAEQKLFSEKRVELLKELSRKPDIYERLASALAPSIYEHEDIKKGILLQLFGGTRKDFSHTGRGKFRAEINILLCGDPGTSKSQLLQYVYNLVPRGQYTSGKGSSAVGLTAYVMKDPETRQLVLQTGALVLSDNGICCIDEFDKMNESTRSVLHEVMEQQTLSIAKAGIICQLNARTSVLAAANPIESQWNPKKTTIENIQLPHTLLSRFDLIFLLLDPQDEAYDRRLAHHLVALYYQSEEQAEEELLDMAVLKDYIAYAHSTIMPRLSEEASQALIEAYVDMRKIGSSRGMVSAYPRQLESLIRLAEAHAKVRLSNKVEAIDVEEAKRLHREALKQSATDPRTGIVDISILTTGMSATSRKRKEELAEALKKLILSKGKTPALKYQQLFEDIRGQSDIAITKDMFEEALRALADDDFLTVTGKTVRLL

SEQ ID NO: 85745 - protein, 100 aa, Homo sapiens
GFRLLRWQLCLAGPLALASDLGASSLVAFRRLLGNSIFPAPVRHSGDHGKRLFVIRPSRFYDRRFLKLLRFYIALTGIPVAIFITLVNVFIASHIKMDCP

SEQ ID NO: 85746 - protein, 41 aa, Homo sapiens
MGKRQHQKDKMYITCAEYTHFYGGKKPAVKTIKTTITRALS

SEQ ID NO: 85747 - protein, 159 aa, Homo sapiens
MMGRSPGFAMQHIVGVPHVLVRRGLLGRDLFMTRTLCSPGPSQPGEKRPEEVALGLHHRLPALGRALGHSIQQRATSTAKTWWDRYEEFVGLNEVREAQGKVTEAEKVFMVARGLVREAREDLEVHQAKLKEVRDRLDRVSREDSQYLELATLEHRMLQ

SEQ ID NO: 85748 - protein, 206 aa, Homo sapiens
MDSELMHSIVGSYHKPPERVFVPSFTQNEPSQNCHPANLEVTSPKILHSPNSQALILALKTLQEKIHRLELERTQAEDNLNILSREAAQYKKALENETNERNLAHQELIKQKKDISIQLSSAQSRCTLLEKQLEYTKRMVLNVEREKNMILEQQAQLQREKEQDQMKLYAKLEKLDVLEKECFRLTTTQKTAEDKIKHLEEKLKEE

SEQ ID NO: 85749 - protein, 229 aa, Homo sapiens
TESGAAVCEFFLKAACGKGGMCPFRHISGEKTVVCKHWLRGLCKKGDQCEFLHEYDMTKMPECYFYSKFGECSNKECPFLHIDPESKIKDCPWYDRGFCKHALDLNCPWEPPSSPHCRSRHSLQQSREPRRSSGSCRVKTAARATGDPGHWSRSPVTSVARKDTTPTDAPKGTWPFSVDSDSSWSQLRAARGPRCWECAFNCFMRLLARLWLELARRHVGFITLRGHVC

SEQ ID NO: 85750 - protein, 1362 aa, Homo sapiens
MALEQALQAARQGELDVLRSLHAAGLLGPSLRDPLDALPVHHAARAGKLHCLRFLVEEAALPAAARARNGATPAHDASATGHLACLQWLLSQGGCRVQDKDNSGATVLHLAARFGHPEVVNWLLHHGGGDPTAATDMGALPIHYAAAKGDFPSLRLLVEHYPEGVNAQTKNGATPLYLACQEGHLEVTQYLVQECGADPHARAHDGMTPLHAAAQMGHSPVIVWLVSCTDVSLSEQDKDGATAMHFAASRGHTKVLSWLLLHGGEISADLWGGTPLHDAAENGELECCQILVVNGAELDVRDRDGYTAADLSDFNGHSHCTRYLRTVENLSVEHRVLSRDPSAELEAKQPDSGMSSPNTTVSVQPLNFDLSSPTSTLSNYDSCSSSHSSIKGQHPPCGLSSARAADIQSYMDMLNPELGLPRGTIGKPTPPPPPPSFPPPPPPPGTQLPPPPPGYPAPKPPVGPQAADIYMQTKNKLRHVETEALKKELSSCDGHDGLRRQDSSRKPRAFSKQPSTGDYYRQLGRCPGETLAARPGMAHSEEVRARQPARAGCPRLGPAARGSLEGPSAPPQAALLPGNHVPNGCAADPKASRELPPPPPPPPPPLPEAASSPPPAPPLPLESAGPGCGQRRSSSSTGSTKSFNMMSPTGDNSELLAEIKAGKSLKPTPQSKGLTTVFSGIGQPAFQPDSPLPSVSPALSPVRSPTPPAAGFQPLLNGSLVPVPPTTPAPGVQLDVEALIPTHDEQGRPIPEWKRQVMVRKMQLKMQEEEEQRRKLTAASSCCYPREGWRYSREHNAILGPFGELMTEADILRIEQQIENLQVLHKAQKLEARLEQLELELEQLLPISAALSAPRFTVDPRRMHGRAASLPAWCSKISTLLKNMATLLAALGGRPAHLAELLTADTGQPLAPLPDAPWLPGPLCLGRSHSLSWCREAVAREILECGVSVQHLRATYELRARGAAPARCPRRKPPQSAGAPGREPILEEDYVAARSGQPSAAAAHGPLVDWEPLGTLGPPEVQDRQAALPEPEQLARRPPLCTKLRGVQDYLDLRKERIVYLFLEHWRRWACRGPGRRAQARLRGLLPRVAAAGAGPGLEATDAPRLPASNSEAHSPDERLRQLLRQRQAVGKLLGHWRSLLRRVPASPGLAHGLYWPQHFLPPLDGGAPPHYDSLTLDLFMLGYFQLLEMGLSREERKFRHLLCYEMFDRLGSHPWERIRLFHRVVLEEVEAGRRGWSDGFEDLRHRFFGNGLEAEPAPEEQAKEKEEEGKEQERTEEAAPFQTGDPPEGQPEALAPAPQPPPPPPPAAPPPTSDSPGSEAPAEDPLELVSEMGEFSNEDICRYIDRSFSFWKEKEAELFDI

SEQ ID NO: 85751 - protein, 204 aa, Homo sapiens
MRAKLFRFASENDLPEWKERGTGDVKLLKHKEKGAIRLLMRRDKTLKICANHYITPMMELKPNAGSDRAWVWNTHADFADECPKPELLAIRFLNAENAQKFKTKFEECRKEIEEREKKGDVVPWVGGLLCRLTLHLTILPGGCFFCLPDKHSRVLWPPHVSRVMQLPGDTGASWGALSTCQCCWPQSNWAGIGVRALPGAHQKV

SEQ ID NO: 85752 - protein, 216 aa, Homo sapiens
  MOD_RES (1)..(1): Any amino acid
XCEKPVVSPNQNARPCKKPCSLRTSCSNCTSNGMECMWCSSTKRCVDSNAYIISFPYGQCLEWQTATCSPQNCSGLRTCGQCLEQPGCGWCNDPSNTGRGHCIEGSSRGPMKLIGMHHSEMVLDTNLCPKEKNYEWSFIQCPACTCSGHANICHLHTGKCFCTTKGIKGDQCQLCDSENRYVGNPLRGTCYYSLLIDYQFTFSLLQEDDRHHTAIN

SEQ ID NO: 85753 - protein, 83 aa, Homo sapiens
MTTSHQPQDRYKAVWLIFFMLGLGTLLPWNFFMTATQYFTNRLDMSQNVSLVTAELSKDAQASAAPAAPLPERNSLSAIFNNV

SEQ ID NO: 85754 - protein, 542 aa, Homo sapiens
FSNPPDWSKNVEYTFTGIYTFESLVKIIARGFCIDGFTFLRDPWNWLDFSVIMMAYVTEFVDLGNVSALRTFRVLRALKTISVIPGLKTIVGALIQSVKKLSDVMILTVFCLSVFALIGLQLFMGNLRNKCVVWPINFNESYLENGTKGFDWEEYINNKTNFYTVPGMLEPLLCGNSSDAGQCPEGYQCMKAGRNPNYGYTSFDTFSWAFLALFRLMTQDYWENLYQLTLRAAGKTYMIFFVLVIFVGSFYLVNLILAVVAMAYEEQNQATLEEAEQKEAEFKAMLEQLKKQQEEAQAAAMATSAGTVSEDAIEEEGEEGGGSPRSSSEISKLSSKSAKERRNRRKKRKQKELSEGEEKGDPEKVFKSESEDGMRRKAFRLPDNRIGRKFSIMNQSLLSIPGSPFLSRHNSKSSIFSFRGPGRFRDPGSENEFADDEHSTVEESEGRRDSLFIPIRARERRSSYSGYSGYSQGSRSSRIFPSLRRSVKRNSTVDCNGVVSLIGGPGSHIGGRLLPEVKIDKAATDDSATTEVEIKKKGPGSL

SEQ ID NO: 85755 - protein, 1571 aa, Homo sapiens
MWPSQLLIFMMLLAPIIHGGKHSERHPALAAPLRHAERSPGGALPPRHLLQQPAAERTAAHRGQGPRGATRGVRGPGAQGAQIAAQAFSRAPIPMAVVRRELSCESYPIELRCPGTDVIMIESANYGRTDDKICDSDPAQMENIRCYLPDAYKIMSQRCNNRTQCAVVAGPDVFPDPCPGTYKYLEVQYECVPYKVEQKVFLCPGLLKGVYQSEHLFESDHQSGAWCKDPLQASDKIYYMPWTPYRTDTLTEYSSKDDFIAGRPTTTYKLPHRVDGTGFVVYDGALFFNKERTRNIVKFDLRTRIKSGEAIIANANYHDTSPYRWGGKSDIDLAVDENGLWVIYATEQNNGKIVISQLNPYTLRIEGTWDTAYDKRSASNAFMICGILYVVKSVYEDDDNEATGNKIDYIYNTDQSKDSLVDVPFPNSYQYIAAVDYNPRDNLLYVWNNYHVVKYSLDFGPLDSRSGQAHHGQVSYISPPIHLDSELERPSVKDISTTGPLGMGSTTTSTTLRTTTLSPGRSTTPSVSGRRNRSTSTPSPAVEVLDDMTTHLPSASSQIPALEESCEAVEAREIMWFKTRQGQIAKQPCPAGTIGVSTYLCLAPDGIWDPQGPDLSNCSSPWVNHITQKLKSGETAANIARELAEQTRNHLNAGDITYSVRAMDQLVGLLDVQLRNLTPGGKDSAARSLNKLQKRERSCRAYVQAMVETVNNLLQPQALNAWRDLTTSDQLRAATMLLHTVEESAFVLADNLLKTDIVRENTDNIKLEVARLSTEGNLEDLKFPENMGHGSTIQLSANTLKQNGRNGEIRVAFVLYNNLGPYLSTENASMKLGTEALSTNHSVIVNSPVITAAINKEFSNKVYLADPVVFTVKHIKQSEENFNPNCSFWSYSKRTMTGYWSTQGCRLLTTNKTHTTCSCNHLTNFAVLMAHVEVKHSDAVHDLLLDVITWVGILLSLVCLLICIFTFCFFRGLQSDRNTIHKNLCISLFVAELLFLIGINRTDQPIACAVFAALLHFFFLAAFTWMFLEGVQLYIMLVEVFESEHSRRKYFYLVGYGMPALIVAVSAAVDYRSYGTDKVCWLRLDTYFIWSFIGPATLIIMLNVIFLGIALYKMFHHTAILKPESGCLDNIKSWVIGAIALLCLLGLTWAFGLMYINESTVIMAYLFTIFNSLQGMFIFIFHCVLQKKVRKEYGKCLRTHCCSGKSTESSIGSGKTSGSRTPGRYSTGSQSRIRRMWNDTVRKQSESSFITGDINSSASLNRGAMANHLISNALLRPHGTNNPYNTLLGEPAVCNNPSVSMYNAQEGLLNNARDTSVMDTLPLNGNHGNSYSIASGEYLSNCVQIIDRGYNHNETALEKKILKELTSNYIPSYLNNHERSSEQNRNLMNKLVNNLGSGREDDAIVLDDATSFNHEESLGLELIHEESDAPLLPPRVYSTENHQPHHYTRRRIPQDHSESFFPLLTNEHTEDLQSPHRDSLYTSMPTLAGVAATESVTTSTQTEPPPAKCGDAEDVYYKSMPNLGSRNHVHQLHTYYQLGRGSSDGFIVPPNKDGTPPEGSSKGPAHLVTSL

SEQ ID NO: 85756 - protein, 85 aa, Homo sapiens
MYSQDSIDLLANSGLQFQKHEEEGIDTLHFAELLMTSGVVLCDNVKWLSFHSGYDFGYMVKLLTDSRLPEEEHEFFHILNLFFPS

SEQ ID NO: 85757 - protein, 103 aa, Homo sapiens
MSYMLPHLHNGWQVDQAILSEEDRVVVIRFGHDWDPTCMKMDEVLYSIAEKVKNFAVIYLVDITEVPDFNKMYELYDPCTVMFFFRYVILKLLLKLNIVSLEA

SEQ ID NO: 85758 - protein, 78 aa, Homo sapiens
MAVVLPAVVEELLSEMAAAVQESARSTGPRLKFLFGSSATQALDLVDRQSITLISSPSGRRVYQRQGLTMLPRLVSNS

SEQ ID NO: 85759 - protein, 47 aa, Homo sapiens
  MOD_RES (1)..(1): Any amino acid
XNRRTTVASTESRTNRPGGVRSPGLQLEGTSTLQWEQGPIAHPRHRC

SEQ ID NO: 85760 - protein, 545 aa, Homo sapiens
MEPSPERPACSQQEPTLGMDAMASEHRDVLVLLPSREQLRLAVGVKATGRELFQQVCNVASIRDAQFFGLCVVRNNEYIFMDLEQKLSKYFSKDWKKERNEGNEKPRAPFVAFLRVQHYVENGRVISDHRARHLYYCHLKERVLRSQCAHREEAYFLLAACALQADLGEHRESAHAGRYFEPHSYFPQWIITKRGIDYILRHMPTLHRERQGLSPKEAMLCFIQEACRLEDVPVHFFRLHKDKKEGRPTVILGLALRGVHIYQEVDRAPQLLYDLPWPHVGKLAFLGKKLEIQLDGLPAAQKLVYYTGCTWRSRHLLHLLRASHQLHLRVRPTLQQLRQREEAEEKQHYRESYISDELELDLASRSFPGSGVSSQHCPHCLSRHSADSHGSSYTSGIKANSWLRESREMSVDVPLEVHGLHEKEPSSSPRTSRSHPSTRGDSQATRQEPCTQVRTRGQSAEAVHQIQEMTAGVSEEQHSHGLDDMQLHQLALHPAPTSLSHTFHRALDCRLAGPCETRATLPSKRSSNCLALDLFGEAPPQEFVV

SEQ ID NO: 85761 - protein, 152 aa, Homo sapiens
MPVKKKRKSPGVAAAVAEDGGLKKCKISRCDCTEKLQNKFDFLRSQLNDISSFKNIYRYAFDFARDKDQRSLDIDTAKSMLALLLGRTWPLFSVFYQYLEQSKYRVMNKDQWYNVLEFSRTVHADLSNYDEDGAWPVLLDEFVEWQKVRQTS

SEQ ID NO: 85762 - protein, 193 aa, Homo sapiens
ETSSSKVKAKTIVMIPDSQKLLRCELESLKSQLQAQTKAFEFLNHSVTMLEKESCLQQIKIQQLEEAQEDEISENLVNIQKMQKTQVKCRKILTKMKQQGHETAACPETEEIPQGASGCWKDDLQKELSDIWSAVHVLQNSIDSLTLCSGACPKASSLRGHKGHQCLSPPLPSWDSDSDCDQDLSQPPFSKSG

SEQ ID NO: 85763 - protein, 168 aa, Homo sapiens
MASERPEPEVEEAGQVFLLMKKDYRISRNVRLAWFLSHLHQTVQATPQEMLLQSEQELEVLSVLPPGWQPDEPVVPRPFLLVPSTRVTFLAWQYRFVIELDLSPSTGIVDDSTGEILFDEVFHALSRCLGGLLRPFRVPGSCIDFQPEIYVTIQAYSSIIGLQSHQMI

SEQ ID NO: 85764 - protein, 70 aa, Homo sapiens
MNLFNLDRFRFEKRNKIEEAPEATPQPSQPGPSSPISLSAEEENAEGEVSRANTPDSDITEKTVSLEGLK

SEQ ID NO: 85765 - protein, 158 aa, Homo sapiens
MKMKKDLFPVGREIAGIVLDVGSKVSFFQPDDEVVGILPLDSEDPGLCEVVRVHEHYLVHKPEKVTWTEAAGSIRDGVRAYTALHYLSHLSPGKSVLIMDGASAFGTIAIQLAHHRGAKVISTACSLEDKQCLERFRPPIARVIDVSNGKVHVAESCL

SEQ ID NO: 85766 - protein, 71 aa, Homo sapiens
MNNLPHLQVVGLTWGHISWDLLALPPQDIILASDVFFEPEDFEDILATIYFLMHKNPKVQLWSTYQVRRQC

SEQ ID NO: 85767 - protein, 108 aa, Homo sapiens
  MOD_RES (1)..(1): Any amino acid
XYRQVNCFSHLSQTYCGSFAYACPEILRGLPYNPFLSDTWSMGVILYTLVVAHLPFDDTNLKKLLRETQKEVTFPANHTISQECKVQLLIACVAQWRKTQARPLSPLL

SEQ ID NO: 85768 - protein, 351 aa, Homo sapiens
GEITAHWLLTNSTTSADVTGSSASYPEGVNASVLTQFSDSTVQSGGSHTALGDRSYSESSSTSSSESLNSSAPRGERSTLEDSREPGQALGDSSANAEDRTSGVPSLGTHTLATVTGNGERTLRSVTLTNTSMSTTSGEAGSPAAAMHQETEGASLHVNVTDDMGLVSRSLAASSALGVAGISYGQVRGTAIEQRTSSDHTDHTYLSSTFTKGERALLSITDNSSSSDIVESSTSYIKISNSSHSEYSSFFHAQTERSNISSYDGEYAQPSTESPVLHTSNLPSYTPTINMPNTSVVLDTDAEFVSDSSSSSSSSSSSSSSGPPLPLPSVSQSHHLFSSILPSTRASVHLL

SEQ ID NO: 85769 - protein, 158 aa, Homo sapiens
MLLLLSDQLLLTALRKPNPQAMAALFLSAPPQAEVTFEDVAVYLSREEWGRLGPAQRGLYRDVMLETYGNLVSLALGTRTEYKELTSQETFGEEDPQGSEPVEACDHISKSEGSLEKLVEQRGPRAVTLTNGESSRESGGNLRLLSRPVPDQRPHKCD

SEQ ID NO: 85770 - protein, 389 aa, Homo sapiens
MYSWSPLQQNFMVEDETVLHNIPYMGDEVLDQDGTFIEELIKNYDGKVHGDRECGFINDEIFVELVNALGQYNDDDDDDDGDDPEEREEKQKDLEDHRDDKESRPPRKFPSDKIFEAISSMFPDKGTAEELKEKYKELTEQQLPGALPPECTPNIDGPNAKSVQREQSLHSFHTLFCRRCFKYDCFLHPFHATPNTYKRKNTETALDNKPCGPQCYQHLEGAKEFAAALTAERIKTPPKRPGGRRRGRLPNNSSRPSTPTINVLESKDTDSDREAGTETGGENNDKEEEEKKDETSSSSEANSRCQTPIKMKPNIEPPENVEWSGAEASMFRVLIGTYYDNFCAIARLIGTKTCRQVYEFRVKESSIIAPAPAEDVDTPPRKKKRKHRL

SEQ ID NO: 85771 - protein, 125 aa, Homo sapiens
MELFRIGGKSPDTNYLFMGDYVDRGYYSVETVTLLVALKVRYPERITILRGNHESRQITQVYGFYDECLRKYGNANVWKYFTDLFDYLPLTALVDGQIFCLHGGLSPSIDTLDHIRALDRLQEVP

SEQ ID NO: 85772 - protein, 142 aa, Homo sapiens
  MOD_RES (1)..(1): Any amino acid
XPDQKNSKQTGVKRKTQKPVFEERYTFEIPFLEAQRRTLLLTVVDFDKFSRHCVIGKVSVPLCEVDLVKGGHWWKALIPSSQNEVELGELLLSLNYLPSAGRLNVDVIRAKQLLQTDVSQGSAGAWTQTCENQEDVLLKGHN

SEQ ID NO: 85773 - protein, 188 aa, Homo sapiens
MAEAEESPGDPGTASPRPLMRDLKAVGKKFMHVLYPRKSNTLLRDWDLWGPLILCVTLALMLQRDSADSEKDGGPQFAEVFVIVWFGAVTITLNSKLLGGNISFFQSLCVLGYCILPLTVAMLICRLVLLADPGPVNFMVRLFVVIVMFAWSIVASTAFLADSQPPNRRALAVYPVFLFYFVISWMIL

SEQ ID NO: 85774 - protein, 208 aa, Homo sapiens
MFYVIGGITVSVVAFFFTIKFLFELAARVVSFLQNEDRERRGDRTIYDYVRGNYLDPRSCKVSWDWKDPYEVGHSMAFRVHLFYKNGQPFPAHRPVGLRVHISHVELAVEIPVTQEVLQEPNSNVVKVAFTVRKAGRYEITVKLGGLNVAYSPYYKIFQPGIGSHYVAQGGLELLDSSNLPALAFQSVGITGVSQVTQPDYCSSYNKS

SEQ ID NO: 85775 - protein, 98 aa, Homo sapiens
EIYMLPRIRSSTKKAQTNDSDSDTESKRQAQRSSASESETEDSDDDKKPKRRGRPRSVRKDLVEGFTDAEIRRFIKAYKKFGLPLERGMTKMIKTGHP

SEQ ID NO: 85776 - protein, 130 aa, Homo sapiens
MVDTEMPFWPTNFGISSVDLSVMEDHSHSFDIKPFTTVDFSSISTPHYEDIPFTRTDPVVADYKYDLKLQEYQSAIKVEPASPPYYSEKTQLYNKPHEEPSNSLMAIECRVCGDKASGFHYGVHACEGCK

SEQ ID NO: 85777 - protein, 428 aa, Homo sapiens
  MOD_RES (1)..(1): Any amino acid
XKTDYTRIKSLSINVNLGNKEVMDTTKSQVRDYPKHNGQISDPQRDQKVTPEQTTQHTVSLNELWNKYRERQRQQRQPELGDRKELSLVDRLDRLAKILQNPITHSLQVSESTHDDSRGERSVKEWSGRQQQRNKLQKKKRFKSLEKSHKNTGELKKSKVLSHHRAGRSNQIKIEQIKFDKYILSKQPGFNYISNTSSDCRPSEESELLTDTTTNILSGTTSTVESDILTQTDREVALHERSSSVSTIDTARLIQAFGHERVCLSPRRIKLYSSITNQQRRYLEKRSKHSKKVLNTGHPLVTSEHTRRRHIQVANHVISSDSISSSASSFLSSNSTFCNKQNVHMLNKGIQAGNLEIVNGAKKHTRDVGITFPTPSSSEAKLEENSDVTSWSEEKREEKMLFTGYPEDRKLKKNKKNSHEGIASVSQT

SEQ ID NO: 85778 - protein, 151 aa, Homo sapiens
MMYWIVFAFFTTAETLTDIVLSWFPFYFELKIAFVIWLLSPYTKGSSVLYRKFVHPTLSNKEKEIDEYITQARDKSYETMMRVGKRGLNLAANAAVTAAAKGQGVLSEKLRSFSMQDLTLIRDEDALPLQRPDGPPTQPWQPPGHHRGLRR

SEQ ID NO: 85779 - protein, 841 aa, Homo sapiens
MAALLRSARWLLRAGAAPRLPLSLRLLPGGPGRLHAASYLPAARAGPVAGGLLSPARLYAIAAKEKDIQEESTFSSRKISNQFDWALMRLDLSVRRTGRIPKKLLQKVFNDTCRSGGLGGSHALLLLRSCGSLLPELKLEERTEFAHRIWDTLQKLGAVYDVSHYNALLKVYLQNEYKFSPTDFLAKMEEANIQPNRVTYQRLIASYCNVGDIEGASKILGFMKTKDLPVTEAVFSALVTGHARAGDMENAENILTVMRDAGIEPGPDTYLALLNAYAEKGDIDHVKQTLEKVEKSELHLMDRDLLQIIFSFSKAGYPQYVSEILEKVTCERRYIPDAMNLILLLVTEKLEDVALQILLACPVSKEDGPSVFGSFFLQHCVTMNTPVEKLTDYCKKLKEVQMHSFPLQFTLHCALLANKTDLAKALMKAVKEEGFPIRPHYFWPLLVGRRKEKNVQGIIEILKGMQELGVHPDQETYTDYVIPCFDSVNSARAILQENGCLSDSDMFSQAGLRSEAANGNLDFVLSFLKSNTLPISLQSIRSSLLLGFRRSMNINLWSEITELLYKDGRYCQEPRGPTEAVGYFLYNLIDSMSDSEVQAKEEHLRQYFHQLEKMNVKIPENIYRGIRNLLESYHVPELIKDAHLLVESKNLDFQKTVQLTSSELESTLETLKAENQPIRDVLKQLILVLCSEENMQKALELKAKYESDMVTGGYAALINLCCRHDKVEDALNLKEEFDRLDSSAVLDTGKYVGLVRVLAKHGKLQDAINILKEMKEKDVLIKDTTALSFFHMLNGAALRGEIETVKQLHEAIVTLGLAEPSTNISFPLVTVHLENSINRES

SEQ ID NO: 85780 - protein, 115 aa, Homo sapiens
MCCWPLLLLWGLLPGTAAGGSGRTYPHRTLLDSEGKYWLGWSQRGSQIAFRLQVRTAGYVGFGFSPTGAMASADIVVGGVAHGRPYLQPCLLVSKTEACDAKCLQQQGNCCRATC

SEQ ID NO: 85781 - protein, 46 aa, Homo sapiens
  MOD_RES (1)..(1): Any amino acid
XTGLADPGAVASMFWVDAELGSDIYLDGIITIVDSKYGLKAKNWTT

SEQ ID NO: 85782 - protein, 178 aa, Homo sapiens
  MOD_RES (1)..(1): Any amino acid
XGLLGVRGRKGSLEGKREQKSYKAVLEDPMLKFSGLYQETCSDLYVTCQVFAEGKPLALPVRTSYKAFSTRWNWNEWLKLPVKYPDLPRNAQVALTIWDVYGPGKAVPVGGTTVSLFGKYGMFRQGMHDLKVWPNVEADGSEPTKTPGRTSSTLSEDQMSRLAKVKKVIWNRCKALTD

SEQ ID NO: 85783 - protein, 101 aa, Homo sapiens
  MOD_RES (1)..(1): Any amino acid
XDRAGKSTQSRKLVEALCAAGHRAELLRFPERSTEIGKLLSSYLQKKSDVEDHSVHLLFSANRWEQVQGLCVMQAECSAQSQLTAASTSRVQVIFPPQPPK

SEQ ID NO: 85784 - protein, 52 aa, Homo sapiens
  MOD_RES (1)..(1): Any amino acid
XMGLTSSFESAAYPGWFLCTVPEADQPVRLTQLPENGGWNAPITDFYFQQCD

SEQ ID NO: 85785 - protein, 213 aa, Homo sapiens
MAATLLAARGAGPAPAWGPEAFTPDWESREVSTGTTIMAVQFDGGVVLGADSRTTTGSYIANRVTDKLTPIHDRIFCCRSGSAADTQAVADAVTYQLGFHSIELNEPPLVHTAASLFKEMCYRYREDLMAGIIIAGWDPQEGGQVYSVPMGGMMVRQSFAIGGSGSSYIYGYVDATYREGMTKEECLQFTANAFFFYPQLSLWPWSGMAPVEE

SEQ ID NO: 85786 - protein, 170 aa, Homo sapiens
MAALTRDPQFQKLQQWYREHRSELNLRRLFDANKDRFNHFSLTLNTNHGHILVDYSKNLVTEDVMRMLVDLAKSRGVEAARERMFNGEKINYTEGRAVLHVALRNRSNTPILVDGKDVMPEVNKVLDKMKSFCQTFTTQETITNAETAKEWFLQAAKDPSAVAKHFVALS

SEQ ID NO: 85787 - protein, 76 aa, Homo sapiens
  MOD_RES (1)..(1): Any amino acid
XPHSVAEQLKRGETVQAEAFDSVTIYFSDIVGFTALSAESTPMQVVTLLNDLYTCFDAIIDNFDVYKGQSVLGLLA

SEQ ID NO: 85788 - protein, 3939 aa, Homo sapiens
MAHAAASIKKVREADLDEKEKNLERDRKKQRKIPRERMERKRKSDSNASFLRAARAGNLDKVVEYLKGGIDINTCNQNGLNALHLAAKEGHVGLVQELLGRGSSVDSATKKGNTALHIASLAGQAEVVKVLVKEGANINAQSQNGFTPLYMAAQENHIDVVKYLLENGANQSTATEDGFTPLAVALQQGHNQAVAILLENDTKGKVRLPALHIAARKDDTKSAALLLQNDHNADVQSKMMVNRTTESGFTPLHIAAHYGNVNVATLLLNRGAAVDFTARNGITPLHVASKRGNTNMVKLLLDRGGQIDAKTRDGLTPLHCAARSGHDQVVELLLERGAPLLARTKNGLSPLHMAAQGDHVECVKHLLQHKAPVDDVTLDYLTALHVAAHCGHYRVTKLLLDKRANPNARALNGFTPLHIACKKNRIKVMELLVKYGASIQAITESGLTPIHVAAFMGHLNIVLLLLQNGASPDVTNIRGETALHMAARAGQVEVVRCLLRNGALVDARAREEQTPLHIASRLGKTEIVQLLLQHMAHPDAATTNGYTPLHISAREGQVDVASVLLEAGAAHSLATKKGFTPLHVAAKYGSLDVAKLLLQRRAAADSAGKNGLTPLHVAAHYDNQKVALLLLEKGASPHATAKNGYTPLHIAAKKNQMQIASTLLNYGAETNIVTKQGVTPLHLASQEGHTDMVTLLLDKGANIHMSTKSGLTSLHLAAQEDKVNVADILTKHGADQDAHTKLGYTPLIVACHYGNVKMVNFLLKQGANVNAKTKNGYTPLHQAAQQGHTHIINVLLQHGAKPNATTANGNTALAIAKRLGYISVVDTLKVVTEEVTTTTTTITEKHKLNVPETMTEVLDVSDEEGDDTMTGDGGEYLRPEDLKELGDDSLPSSQFLDGMNYLRYSLEGGRSDSLRSFSSDRSHTLSHASYLRDSAVMDDSVVIPSHQVSTLAKEAERNSYRLSWGTENLDNVALSSSPIHSGFLVSFMVDARGGAMRGCRHNGLRIIIPPRKCTAPTRVTCRLVKRHRLATMPPMVEGEGLASRLIEVGPSGAQFLGPVIVEIPHFAALRGKERELVVLRSENGDSWKEHFCDYTEDELNEILNGMDEVLDSPEDLEKKRICRIITRDFPQYFAVVSRIKQDSNLIGPEGGVLSSTVVPQVQAVFPEGALTKRIRVGLQAQPMHSELVKKILGNKATFSPIVTLEPRRRKFHKPITMTIPVPKASSDVMLNGFGGDAPTLRLLCSITGGTTPAQWEDITGTTPLTFVNECVSFTTNVSARFWLIDCRQIQESVTFASQVYREIICVPYMAKFVVFAKSHDPIEARLRCFCMTDDKVDKTLEQQENFAEVARSRDVEVLEGKPIYVDCFGNLVPLTKSGQHHIFSFFAFKENRLPLFVKVRDTTQEPCGRLSFMKEPKSTRGLVHQAICNLNITLPIYTKESESDQEQEEEIDMTSEKNDETESTETSVLKSHLVNEVPVLASPDLLSEVSEMKQDLIKMTAILTTDVSDKAGSIKVKELVKAAEEEPGEPFEIVERVKEDLEKVNEILRSGTCTRDESSVQSSRSERGLVEEEWVIVSDEEIEEARQKAPLEITEYPCVEVRIDKEIKGKVEKDSTGLVNYLTDDLNTCVPLPKEQLQTVQDKAGKKCEALAVGRSSEKEGKDIPPDETQSTQKQHKPSLGIKKPVRRKLKEKQKQKEEGLQASAEKAELKKGSSEESLGEDPGLAPEPLPTVKATSPLIEETPIGSIKDKVKALQKRVEDEQKGRSKLPIRVKGKEDVPKKTTHRPHPAASPSLKSERHAPGSPSPKTERHSTLSSSAKTERHPPVSPSSKTEKHSPVSPSAKTERHSPASSSSKTEKHSPVSPSTKTERHSPVSSTKTERHPPVSPSGKTDKRPPVSPSGRTEKHPPVSPGRTEKRLPVSPSGRTDKHQPVSTAGKTEKHLPVSPSGKTEKQPPVSPTSKTERIEETMSVRELMKAFQSGQDPSKHKTGLFEHKSAKQKQPQEKGKVRVEKEKGPILTQREAQKTENQTIKRGQRLPVTGTAESKRGVRVSSIGVKKEDAAGGKEKVLSHKIPEPVQSVPEEESHRESEVPKEKMADEQGDMDLQISPDRKTSTDFSEVIKQELEDNDKYQQFRLSEETEKAQLHLDQVLTSPFNTTFPLDYMKDEFLPALSLQSGALDGSSESLKNEGVAGSPCGSLMEGTPQISSEESYKHEGLAETPETSPESLSFSPKKSEEQTGETKESTKTETTTEIRSEKEHPTTKDITGGSEERGATVTEDSETSTESFQKEATLGSPKDTSPKRQDDCTGSCSVALAKETPTGLTEEAACDEGQRTFGSSAHKTQTDSEVQESTATSDETKALPLPEASVKTDTGTESKPQGVIRSPQGLELALPSRDSEVLSAVADDSLAVSHKDSLEASPVLEDNSSHKTPDSLEPSPLKESPCRDSLESSPVEPKMKAGIFPSHFPLPAAVAKTELLTEVASVRSRLLRDPDGSAEDDSLEQTSLMESSGKSPLSPDTPSSEEVSYEVTPKTTDVSTPKPAVIHECAEEDDSENGEKKRFTPEEEMFKMVTKIKMFDELEQEAKQKRDYKKEPKQEESSSSSDPDADCSVDVDEPKHTGSGEDESGVPVLVTSESRKVSSSSESEPELAQLKKGADSGLLPEPVIRVQPPSPLPSSMDSNSSPEEVQFQPVVSKQYTFKMNEDTQEEPGKSEEEKDSESHLAEDRHAVSTEAEDRSYDKLNRDTDQPKICDGHGCEAMSPSSSAAPVSSGLQSPTGDDVDEQPVIYKESLALQGTHEKDTEGEELDVSRAESPQADCPSESFSSSSSLPHCLVSEGKELDEDISATSSIQKTEVTKTDETFENLPKDCPSQDSSITTQTDRFSMDVPVSDLAENDEIYDPQITSPYENVPSQSFFSSEESKTQTDANHTTSFHSSEVYSVTITSPVEDVVVASSSSGTVLSKESNFEGQDIKMESQQESTLWEMQSDSVSSSFEPTMSATTTVVGEQISKVIITKTDVDSDSWSEIREDDEAFEARVKEEEQKIFGLMVDRQSQGTTPDTTPARTPTEEGTPTSEQNPFLFQEGKLFEMTRSGAIDMTKRSYADESFHFFQIGQESREETLSEDVKEGATGADPLPLETSAESLALSESKETVDDEADLLPDDVSEEVEEIPASDAQLNSQMGISASTETPTKEAVSVGTKDLPTVQTGDIPPLSGVKQISCPDSSEPAVQVQLDFSTLTRSVYSDRGDDSPDSSPEEQKSVIEIPTAPMENVPFTESKSKIPVRTMPTSTPAPPSAEYESSVSEDFLSSVDEENKADEAKPKSKLPVKVPLQRVEQQLSDLDTSVQKTVAPQGQDMASIAPDNRSKSESDASSLDSKTKCPVKTRSYTETETESRERAEELELESEEGATRPKILTSRLPVKSRSTTSSCRGGTSPTKESKEHFFDLYRNSIEFFEEISDEASKLVDRLTQSEREQEIVSDDESSSALEVSVIENLPPVETEHSVPEDIFDTRPIWDESIETLIERIPDENGHDHAEDPQDEQERIEERLAYIADHLGFSWTELARELDFTEEQIHQIRIENPNSLQDQSHALLKYWLERDGKHATDTNLVECLTKINRMDIVHLMETNTEPLQERISHSYAEIEQTITLDHSEGFSVLQEELCTAQHKQKEEQAVSKESETCDHPPIVSEEDISVGYSTFQDGVPKTEGDSSATALFPQTHKEQVQQDFSGKMQDLPEESSLEYQQEYFVTTPGTETSETQKAMIVPSSPSKTPEEVSTPAEEEKLYLQTPTSSERGGSPIIQEPEEPSEHREESSPRKTSLVIVESADNQPETCERLDEDAAFEKGDDMPEIPPETVTEEEYIDEHGHTVVKKVTRKIIRRYVSSEGTEKEEIMVQGMPQEPVNIEEGDGYSKVIKRVVLKSDTEQSEDNNE

SEQ ID NO: 85789 - protein, 64 aa, Homo sapiens
DKSSASIGDMEKEPGIPSLTPQAELPEPGGVLLCHPGWSAVARSRLTATSASQVQVILLSHPPE

SEQ ID NO: 85790 - protein, 132 aa, Homo sapiens
  MOD_RES (1)..(1): Any amino acid
XSGILKERYSDFVVHEIGKDGRISHLNDLSIPVDEEVIEDTKEKRTIIHQAIKSLFPGLETKTEDREGKKYIVAYHAAGKKALANPRKHSWPKSRGSYCHFVLYKENKDTMDAINVLSKYLRVKPNIFSYMG

SEQ ID NO: 85791 - protein, 335 aa, Homo sapiens
MQKHGEDPFCPFSIISNAVSNIICSLCFGQRFDYTNSEFKKMLGFMSRGLEICLNSQVLLVNICPWLYYLPFGPFKELRQIEKDITSFLKKIIKDHQESLDRENPQDFIDMYLLHMEEERKNNSNSSFDEEYLFYIIGDLFIAGTDTTTNSLLWCLLYMSLNPDVQEKVHEEIERVIGANRAPSLTDKAQMPYTEATIMEVQRLTVVVPLAIPHMTSENTVLQGYTIPKGTLILPNLWSVHRDPAIWEKPEDFYPNRFLDDQGQLIKKETFIPFGIGKRVCMGEQLAKMELFLMFVSLMQSFAFALPEDSKKPLLTGRFGLTLAPHPFNITISRR

SEQ ID NO: 85792 - protein, 383 aa, Homo sapiens
MEAAVAAPRPRLLLLVLAAAAAAAAALLPGATALQCFCHLCTKDNFTCVTDGLCFVSVTETTDKVIHNSMCIAEIDLIPRDRPFVCAPSSKTGSVTTTYCCNQDHCNKIELPTTGPFSVKSSPGLGPVELAAVIAGPVCFVCISLMLMVYICHNRTVIHHRVPNEEDPSLDRPFISEGTTLKDLIYDMTTSGSGSGLPLLVQRTIARTIVLQESIGKGRFGEVWRGKWRGEEVAVKIFSSREERSWFREAEIYQTVMLRHENILGFIAADNKDNGTWTQLWLVSDYHEHGSLFDYLNRYTVTVEGMIKLALSTASGLAHLHMEIVGTQGKPAIAHRDLKSKNILVKKNGTCCIADLGLAVRHDSATDTIDIAPNHRVGTKRNS

SEQ ID NO: 85793 - protein, 120 aa, Homo sapiens
FGVQELKILQSDLLFEQSRSAVQAKRADSPGRLVPCGAAISWSAVPEQPLDVTANGFPQGTTKKTIGSLQARSQISKVELFRSFQKLLSRIARDKWPHSLRRPRWADHDVRRSRPSWPTW

SEQ ID NO: 85794 - protein, 88 aa, Homo sapiens
MSSQPAGNQTSPGATEDYSYGSWYIDEPQGGEELQPEGEVPSCHTSIPPGLYHACLASLSILVLLLLAMLVRRRQLWPDCVRGRPGLP

SEQ ID NO: 85795 - protein, 161 aa, Homo sapiens
MSTVDLARVGACILKHAVTGEAVELRSLWREHACVVAGLRRFGCVVCRWIAQDLSSLAGLLDQHGVRLVGVGPEALGLQEFLDGDYFAGELYLDESKQLYKELGFKRYNSLSILPAALGKPVRDVAAKSPGDYVPKEHILQVLGISAEVCASDPPQCDREV

SEQ ID NO: 85796 - protein, 207 aa, Homo sapiens [sequence omitted]

SEQ ID NO: 85797 - protein, 300 aa, Homo sapiens
  MOD_RES (1)..(1): Any amino acid
XCEVVSKANCAKLKQGIAVRFHGEEGMGQGVVREWFDILSNEIVNPDYALFTQSADGTTFQPNSNSYVNPDHLNYFRFAGQILGLALNHRQLVNIYFTRSFYKHILGIPVNYQDVASIDPEYAKNLQWILDNDISDLGLELTFSVETDVFGAMEEVPLKPGGGSILVTQNNKELLLSGMPEIDVSDWIKNTEYTSGYEREDPVIQWFWEVVEDITQEERVLLLQFVTGSSRVPHGGFANIMGGSGLQNFTIAAVPYTPNLLPTSSTCINMLKLPEYPSKEILKDRLLVALHCGSYGYTMA

SEQ ID NO: 85798 - protein, 53 aa, Homo sapiens
MDWKEVLRRRLATPNTCPNSRETVIMRLKLHEVRGWGCLAHPSFRVYYSVLCT

SEQ ID NO: 85799 - protein, 100 aa, Homo sapiens
MAQSKLDCRSPVGLDCCNCCLDLAHRSGLQRGSSGENNNPGSPTVSNFRQLQEKLVFENLNTDKLNSIMRQDSLEPVLRDPCYLINEGICNRNIDQTMLS

SEQ ID NO: 85800 - protein, 489 aa, Homo sapiens
MHSETPKSQVGTLLFRSRSRLTHLSLSRRASESSLSSESSESSDAGLCMDSPSPMDPHMAEQTFEQAIQAASRIIRNEQFAIRRFQSMPVRLLGHSPVLRNITNSQAPDGRRKSEAGSGAASSSGEDKENDGFVFKMPWKPTHPSSTHALAEWASRREAFAQRPSSAPDLMCLSPDRKMEVEELSPLALGRFSLTPAEGDTEEDDGFVDILESDLKDLVMYSKCQRLFRSPSMPCSVIRPILKRLERPQDRDTPVQNKRRRSVTPPEEQQEAEEPKARVLRSKSLCHDEIENLLDSDHRELIGDYSKAFLLQTVDGKHQDLKYISPETMVALLTGKFSNIVDKFVIVDCRYPYEYEGGHIKTAVNLPLERDAESFLLKSPIAPCSLDKRVILIFHCEFSSERGPRMCRFIRERDRAVNDYPSLYYPEMYILKGGYKEFFPQHPNFCEPQDYRPMNHEAFKDELKTFRLKTRSWAGERSRRELCSRLQDQ

SEQ ID NO: 85801 - protein, 51 aa, Homo sapiens
MSSSMWYIMQSIQSKYSLSERLIRTIAAIRSFPHDNVEDLIRGGADVNCTH

SEQ ID NO: 85802 - protein, 139 aa, Homo sapiens
AIESPSKDDDTVWLTYWVVYALFGLAEFFSDLLLSWFPFYYVGKCAFLLFCMAPRPWNGALMLYQRVVRPLFLRHHGAVDRIMNDLSGRALDAAAGITRNVLQVLARSRAGITPVAVAGPSTPLEADLKPSQTPQPKDK

SEQ ID NO: 85803 - protein, 184 aa, Homo sapiens
MENLTKHSIECSSFRGDWECKNQFERKQGSQEGHFSEMIFTPEDMPTFSIQHQRIHTDEKLLECKECGKDFSFVSVLVRHQRIHTGEKPYECKECGKAFGSGANLAYHQRIHTGEKPFECKECGKAFGSGSNLTHHQRIHTGEKPYECKECGKAFSFGSGLIRHQIIHSGEKPYECKECGKSFS

SEQ ID NO: 85804 - protein, 306 aa, Homo sapiens
MEAGQRDYDLLVVGGGSGGLACAKEAAQLGRKVAVVDYVEPSPQGTRWGLGGTCVNVGCIPKKLMHQAALLGGLIQDAPNYGWEVAQPVPHDWRKMAEAVQNHVKSLNWGHRVQLQDRKVKYFNIKASFVDEHTVCGVAKGGKEILLSADHIIIATGGRPRYPTHIEGALEYGITSDDIFWLKESPGKTLVVGASYVALECAGFLTGIGLDTTIMMRSIPLRGFDQQMSSMVIEHMASHGTRFLRGCAPSRVRRLPDGQLQVTWEDSTTGKEDTGTFDTVLWAIAPCISACLPTTVGHAGKNQRRD

SEQ ID NO: 85805 - protein, 131 aa, Homo sapiens
SGEAFVELESEDEVKLALKKDRETMGHRYVEVFKSNNVEMDWVLKHTGPNSPDTANDGFVRLRGLPFGCSKEEIVQFFSGILKSLRAVELKLELIMIHHESLWPCSGQVLMTDLGLVEGITALAEELALRG

SEQ ID NO: 85806 - protein, 295 aa, Homo sapiens
GDHRVELYKVLSSLGYHVVTFDYRGWGDSVGTPSERGMTYDALHVFDWIKARSGDNPVYIWGHSLGTGVATNLVRRLCERETPPDALILESPFTNIREEAKSHPFSVIYRYFPGFDWFFLDPITSSGIKFANDENVKHISCPLLILHAEDDPVVPFQLGRKLYSIAAPARSFRDFKVQFVPFHSDLGYRHKYIYKSPELPRILRTVHMIMQGEPPPCCKGCTDPHGGAHTLTGGHVWEHSDTDTPATCRPRISSTHLSRRTQLLKSLFVPSCFLKGRGAPDCPALAGHGRQPREP

SEQ ID NO: 85807 - protein, 324 aa, Homo sapiens
MELDFGHFDERDKTSRNMRGSRMNGLPSPTHSAHCSFYRTRTLQALSNEKKAKKVRFYRNGDRYFKGIVYAVSSDRFRSFDALLADLTRSLSDNINLPQGVRYIYTIDGSRKIGSMDELEEGESYVCSSDNFFKKVEYTKNVNPNWSVNVKTSANMKAPQSLASSNSAQARENKDFVRPKLVTIIRSGVKPRKAVRVLLNKKTAHSFEQVLTDITEAIKLETGVVKKLYTLDGKQVTCLHDFFGDDDVFIACGPEKFRYAQDDFSLDENECRVMKGNPSATAGPKASPTPQKTSAKSPGPMRRSKSPADSGNDQDGPVPASVLG

SEQ ID NO: 85808 - protein, 24 aa, Homo sapiens
MFLNTLTPKFYVALTGTSSLISGL

SEQ ID NO: 85809 - protein, 416 aa, Homo sapiens
MEIKEEGASEEGQHFLPTAQANDPGDCQFTSIQKTPNEPQLEFILACKDLVAPVRDRKLNTLVQISVIHPVEQSLTRYSSTEIVEGTRDPLFLTGVTFPSEYPIYEETKIKLTVYDVKDKSHDTVRTSVLPEHKDPPPEVGRSFLGYASFKVGELLKSKEQLLVLSLRTSDGGKVVGTIEVSVVKMGEIEDGEADHITTDVQGQKCALVCECTAPESVSGKDNLPFLNSVLKNPVCKLYRFPTSDNKWMRIREQMSESILSFHIPKELISLHIKEDLCRNQEIKELGELSPHWDNLRKNVLTHCDQMVNMYQDILTELSKETGSSFKSSSSKGEKTLEFVPINLHLQRMQMLSTMSSLWEPQLPIFRDLRMVVFGSYSIDLKQKEEIPDTSLFTIHLKTQPKQRKFSATSINYNLL

SEQ ID NO: 85810 - protein, 74 aa, Homo sapiens
MVIMGQCYYNETIGFFYNNSGKELSSHWRPKDVVVVALGLTVSVLVLLTNLLVIAAIASNRRFHQPIYYLLGNL

SEQ ID NO: 85811 - protein, 118 aa, Homo sapiens
MVQSCSAYGCKNRYDKDKPVSFHKFPLTRPSLCKEWEAAVRRKNFKPTKYSSICSEHFTPDCFKRECNNKLLKENAVPTIFLCTEPHDKTPVNLSVFCDHNYTVEDTMHQRKRIHQLE

SEQ ID NO: 85812 - protein, 1304 aa, Homo sapiens
MAAASYDQLLKQVEALKMENSNLRQELEDNSNHLTKLETEASNMKEVLKQLQGSIEDEAMASSGQIDLLERLKELNLDSSNFPGVKLRSKMSLRSYGSREGSVSSRSGECSPVPMGSFPRRGFVNGSRESTGYLEELEKERSLLLADLDKEEKEKDWYYAQLQNLTKRIDSLPLTENFSLQTDMTRRQLEYEARQIRVAMEEQLGTCQDMEKRAQRRIARIQQIEKDILRIRQLLQSQATEAERSSQNKHETGSHDAERQNEGQGVGEINMATSGNGQGSTTRMDHETASVLSSSSTHSAPRRLTSHLGTKVEMVYSLLSMLGTHDKDDMSRTLLAMSSSQDSCISMRQSGCLPLLIQLLHGNDKDSVLLGNSRGSKEARARASAALHNIIHSQPDDKRGRREIRVLHLLEQIRAYCETCWEWQEAHEPGMDQDKNPMPAPVEHQICPAVCVLMKLSFDEEHRHAMNELGGLQAIAELLQVDCEMYGLTNDHYSITLRRYAGMALTNLTFGDVANKATLCSMKGCMRALVAQLKSESEDLQQVIASVLRNLSWRADVNSKKTLREVGSVKALMECALEVKKESTLKSVLSALWNLSAHCTENKADICAVDGALAFLVGTLTYRSQTNTLAIIESGGGILRNVSSLIATNEDHRQILRENNCLQTLLQHLKSHSLTIVSNACGTLWNLSARNPKDQEALWDMGAVSMLKNLIHSKHKMIAMGSAAALRNLMANRPAKYKDANIMSPGSSLPSLHVRKQKALEAELDAQHLSETFDNIDNLSPKASHRSKQRHKQSLYGDYVFDTNRHDDNRSDNFNTGNMTVLSPYLNTTVLPSSSSSRGSLDSSRSEKDRSLERERGIGLGNYHPATENPGTSSKRGLQISTTAAQIAKVMEEVSAIHTSQEDRSSGSTTELHCVTDERNALRRSSAAHTHSNTYNFTKSENSNRTCSMPYAKLEYKRSSNDSLNSVSSSDGYGKRGQMKPSIESYSEDDESKFCSYGQYPADLAHKIHSANHMDDNDGELDTPINYSLKYSDEQLNSGRQSPSQNERWARPKHIIEDEIKQSEQRQSRNQSTTYPVYTESTDDKHLKFQPHFGQQECVSPYRSRGANGSETNRVGSNHGINQNVSQSLCQEDDYEDDKPTNYSERYSEEEQHEEEERPTNYSIKYNEEKRHVDQPIDYSLKYATDIPSSQKQSFSFSKSSSGQSSKTEHMSSSSENTSTPSSNAKRQNQLHPSSAQSRSGQPQKAATCKVSSINQETIQTYCVEDTPICFSRCSSLSSLSSAEDEIGCNQTTQEADSANTLQI

SEQ ID NO: 85813 - protein, 153 aa, Homo sapiens
MSVPGPYQAATGPSSAPSAPPSYEETVAVNSYYPTPPAPMPGPTTGLVTGPDGKGMNPPSYYTQPAPIPNNNPITVQTVYVQHPITFLDRPIQMCCPSCNKMIVSQLSYNAGALTWLSCGSLCLLGCIAGCCFIPFCVDALQDVDHYCPNCRA

SEQ ID NO: 85814 - protein, 371 aa, Homo sapiens
MLQCYRCRQWFHEACTQCLNEPMMFGDRFYLFFCSVCNQGPEYIERLPLRWVDVVHLALYNLGVQSKKKYFDFEEILAFVNHHWELLQLGKLTSTPVTDRGPHLLNALNSYKSRFLCGKEIKKKKCIFRLRIRVPPNPPGKLLPDKGLLPNENSASSELRKRGKSKPGLLPHEFQQQKRRVYRRKRSKFLLEDAIPSSDFTSAWSTNHHLASIFDFTLDEIQSLKSASSGQTFFSDVDSTDAASTSGSASTSLSYDSRWTVGSRKRKLAAKAYMPLRAKRWAAELDGRCPSDSSAEGASVPERPDEGIDSHTFESISEDDSSLSHLKSSITNYFGAAGRLACGEKYQVLARRVTPEGKVQYLVEWEGTTPY

SEQ ID NO: 85815 - protein, 81 aa, Homo sapiens
  MOD_RES (1)..(1): Any amino acid
XARAVPVGSGLRGLQRTLPLVVILGATGTGKSTLALQLGQRLGGEIVSADSMQFWIPQKLESDQDPVGLLIPLGLCLSMKA

SEQ ID NO: 85816 - protein, 270 aa, Homo sapiens
MKPILLQGHERSITQIKYNREGDLLFTVAKDPIVNVWYSVNGERLGTYMGHTGAVWCVDADWDTKHVLTGSADNSCRLWDCETGKQLALLKTNSAVRTCGFDFGGNIIMFSTDKQMGYQCFSGEVLVNVKEHSRQINDIQLSRDMTMFVTASKDNTAKLFDSTTLEHQKTFRTERPVNSAALSPNYDHVVLGGGQEAMDVTTTSTRIGKFEARFFHLAFEEEFGRVKGHFGPINSVAFHPDGKSYSSGGEDGYVRIHYFDPQYFEFEFEA

SEQ ID NO: 85817 - protein, 200 aa, Homo sapiens
MLGSGLGAEIDSAECVFRMNQAPTVGFEADVGQRSTLRVVSHTSVPLLLRNYSHYFQKARDTLYMVWGQGRHMDRVLGGRTYRTLLQLTRMYPGLQVYTFTERMMAYCDQIFQDETGKNRRQSGSFLSTGWFTMILALELCEEIVVYGMVSDSYCREKSHPSVPYHYFEKGRLDECQMYLAHEQAPRSAHRFITEKAVFS

SEQ ID NO: 85818 - protein, 101 aa, Homo sapiens
MNGEEEFFDAVTGFDSDNSSGEFSEANQKVTGMIDLDTSKNNRIGKTGERPSQENGIQKHRTSLPAPMFSRSDFSVWTILKKCVGLYRQGFAVLARLVLNS

SEQ ID NO: 85819 - protein, 162 aa, Homo sapiens
MRPRGLPPLLVVLLGCWASVSAQTDATPAVTTEGLNSTEAALATFGTFPSTRPPGTPRAPGPSSGPRPTPVTDVAVLCVCDLSPAQCDINCCCDPDCSSVDFSVFSACSVPVVTGDSQFCSQKAVIYSLNFTANPPQRVFELVDQINPSIFCIHITNCRCSV

SEQ ID NO: 85820 - protein, 76 aa, Homo sapiens
  MOD_RES (1)..(1): Any amino acid
XSLAAIVRAMDTLGIEYGDKERKADAKMVCDVVSRMEDTEPFSAELLSAMMRLWGDSGIQECFNRSREYQLNDSAK

SEQ ID NO: 85821 - protein, 591 aa, Homo sapiens
MKKQFNRMRQLANQTVGRAEKTEVLSEDLLQVEKRLELVKQVSHSTHKKLTACLQGQQGAEADKRSKKLPLTTLAQCLMEGSAILGDDTLLGKMLKLCGETEDKLAQELIHFELQVERDVIEPLFLLAEVEIPNIQKQRKHLAKLVLDMDSSRTRWQQTSKSSGLSSSLQPAGAKADALREEMEEAANRVEICRDQLSADMYSFVAKEIDYANYFQTLIEVQAEYHRKSLTLLQAVLPQIKAQQEAWVEKPSFGKPLEEHLTISGREIAFPIEACVTMLLECGMQEEGLFRVAPSASKLKKLKAALDCCVVDVQEYSADPHAIAGALKSYLRELPEPLMTFELYDEWIQASNVQEQDKKLQALWNACEKLPKANHNNIRYLIKFLSKLSEYQDVNKMTPSNMAIVLGPNLLWPQAEGNITEMMTTVSLQIVGIIEPIIQHADWFFPGEIEFNITGNYGSPVHVNHNANYSSMPSPDMDPADRRQPEQARRPLSVATDNMMLEFYKKDGFKEAGTDSTQGPLWPAGGYGRPVRWPAVPSQPVPHPAQHPVTLWTELPSGVLLGLGPALPSCSSSPGLSFCLYKHFEQIAAHS

SEQ ID NO: 85822 - protein, 8 aa, Homo sapiens
MARGQQKI

SEQ ID NO: 85823 - protein, 204 aa, Homo sapiens
  MOD_RES (1)..(1): Any amino acid
XFTHPSLMLGSGVPGHPAAIPHPAIVPPSGKQELQPFDRNLKTQAESKAEKEAKKPTIKKPLNAFMLYMKEMRAKVIAECTLKESAAINQILGRRWHALSREEQAKYYELARKERQLHMQLYPGWSARDNYGKKKRRSREKHQESTTGGKRNAFELLTSPAEPAPTSPGLSTALSLPTPGPPQAPRSTLQSTQVQQQESQRQVA

SEQ ID NO: 85824 - protein, 167 aa, Homo sapiens
LKKDSCGDQFLSVPSPFTWSKPKPGHTPIFRTSSLPPLDWPLPAHFGQCELKIEVQPKTHHRAHYETEGSRGAVKASTGGHPVVKESKIRSSFDVVFDAQLLLSMGKKKVYGKHSRYLTTLTWKLLSIITTYNFLATSSHMALLTCRSTGKSSPWLGSLSSSKLCIL

SEQ ID NO: 85825 - protein, 123 aa, Homo sapiens
MAPQSLPSSRMAPLGMLLGLLMAACFTFCLSHQNLKEFALTNPEKSSTKETERKETKAEEELDAEVLEVFHPTHEWQALQPGQAVPAGSHVRLNLQTGEREAKLQYEDKFRNNLKGKRLDINT

SEQ ID NO: 85826 - protein, 211 aa, Homo sapiens
MGQRPGPVLPAVAVLGQVAKRKVAWLLRWKAVTRTETAGNSSGVYGFGKMKIFVKYFQKMADPWQECMDYAVTLARQAGEVVCEAIKNEMNVMLKSSPVDLVTATDQKVEKMLISSIKEKYPSHSFIGEESVAAGEKSILTDNPTWIIDPIDGTTNFVHRFPFVAVSIGFAVNKKIEFGVVYSCVEGKMYTARKGKGAFCNGQKLQVSQQE

SEQ ID NO: 85827 - protein, 53 aa, Homo sapiens
MAVQLVPDSALGLLMMESHCVVQAGGQWCHLGSLQSPISASRVQAILLLHPPE

SEQ ID NO: 85828 - protein, 72 aa, Homo sapiens
MEGTAGTITSNEWSSPTSPEGSTASGGSQALDKPIDNDAEGVWSPDIEQSFQEALAIYPPCGRRKIILSDEG

SEQ ID NO: 85829 - protein, 307 aa, Homo sapiens
  MOD_RES (1)..(1): Any amino acid
XTSVPALVSPRLCPCPGFSSSLFLSWSLLVSVPGICLTLSLASGSRLSGRLGRSESLRVSDRRRPSRGSLGAKGRGGGRSRSDVDMDPSSATAVLGPARRATPEPGDEGEPGRSGLELEPEEPPGWRELVPPDTLHSLPKSQVKRQEVISELLVTEAAHVRMLRVLHDLFFQPMAECLFFPLEELQNIFPSLDELIEVHSLFLDRLMKRRQESGYLIEEIGDVLLARFDGAEGSWFQKISSRFCSRQSFALEQLKAKQRKDPRFCAFVQEAESRPRCRRLQLKDMIPTEMQRLTKYPLLLQSIGQNT

SEQ ID NO: 85830 - protein, 174 aa, Homo sapiens
MAAPRVFPLSCAVQQYAWGKMGSNSEVARLLASSDPLAQIAEDKPYAEWRKSQSIGRLSPLLLKLEDLWMGTHPRGDAKILDNRISQKTLSQWIAENQDSLGSKVKDTFNGNLPFLFKVLSVETPLSIQAHPNKELAEKLHLQAPQHYPDANHKPEMAIALTPFQGLCGFRPVE

SEQ ID NO: 85831 - protein, 483 aa, Homo sapiens
MASRCWRWWGWSAWPRTRLPPAGSTPSFCHHFSTQEKTPQICVVGSGPAGFYTAQHLLKHPQAHVDIYEKQPVPFGLVRFGVAPDHPEVKTAHSGRCAFWGNVEVGRDVTVPELQEAYHAVVLSYGAEDHRALEIPGEELPGVCSARAFVGWYNGLPENQELEPDLSCDTAVILGQGNVALDVARILLTPPEHLERTDITKAALGVLRQSRVKTVWLVGRRGPLQVAFTIKELREMIQLPGARPILDPVDFLGLQDKIKEVPRPRKRLTELLLRTATEKPGPAEAARQASASRAWGLRFFRSPQQVLPSPDGRRAAGVRLAVTRLEGVDEATRAVPTGDMEDLPCGLVLSSIGYKSRPVDPSVPFDSKLGVIPNVEGRVMDVPGLYCSGWVKRGPTGVIATTMTDSFLTGQMLLQDLKAGLLPSGPRPGYAAIQALLSSRGVRPVSFSDWEKLDAEEVARGQGTGKPREKLVDPQEMLRLLGH

SEQ ID NO: 85832 - protein, 187 aa, Homo sapiens
MKFPIHHLALSCDNLTLSACMMSSEYGSIIAFFDVRTFSNEAKQQKRPFAYHKLLKDAGGMVIDMKWNPTVPSMVAVCLADGSIAVLQVTETVKVCATLPSTVAVTSVCWSPKGKQLAVGKQNGTVVQYLPTLQEKKVIPCPPFYESDHPVRVLDVLWIGTYVFAIVYAAADGTLETSPDVVMALLP

SEQ ID NO: 85833 - protein, 288 aa, Homo sapiens
GEVPSAMIVSFLRPSQPFRTHVSEKTSESPSKPGEKKGSDEKKAASLGSSQSSRTYAGGTASATKVSASSGATSKSSSMNPTETKAIPVSQQMEGPHLPNKKKHKKQAVKTEPEKKSQSTKLSVVHEKKSQEGKPKEHTEPKSLPKQASDTGSNDAHNKKAVSRSAEQQPSEKSTEPKTKPQDMISAGGESVAGITAISGKPGDKKKEKKSLTPAVPVESKPDKPSGKSGMDAALDDLIDTLGGPEETEEENTTYTGPEVSDPMSSTYIEELGKREVTIPPKYRELLA

SEQ ID NO: 85834 - protein, 184 aa, Homo sapiens
MAPPLPRREKAAASRSTQALGPRAQKTERTDCRVATTGWTMDPQEMVVKNPYAHISIPRAHLRPDLGQQLEVASTCSSSSEMQPLPVGPCAPEPTHLLQPTEVPGPKGAKGNQGAAPIQNQQAWQQPGNPYSSSQRQAGLTYAGPPPAGRGDDIAHHCCCCPCCHCCHCPPFCRCHSCCCCVIS

SEQ ID NO: 85835 - protein, 154 aa, Homo sapiens
  MOD_RES (1)..(1): Any amino acid
XALQPGKKHPTVLFVYGGPQVQLVNNSFKGIKYLRLNTLASLGYAVVVIDGRGSCQRGLRFEGALKNQMGQVEIEDQVEGLQFVAEKYGFIDLSRVAIHGWSYGGFLSLMGLIHKPQVFKQPHGAEPPSSLPATADRRMASGCTKPRQQLSVGG

SEQ ID NO: 85836 - protein, 50 aa, Homo sapiens
MEIPAPEPEKTEWELKAVPSQQQGICKEEPAQEPIMERPLGGAQAWGRQA

SEQ ID NO: 85837 - protein, 154 aa, Homo sapiens
MNRPIQVKPADSESRGDRKLFVGMLNKQQSEDDVRRLFEAFGNIEECTILRGPDGNSKGCAFVKYSSHAEAQAAINALHGSQTMPGASSSLVVKFADTDKERTMRRMQQMAGQMGMFNPMAIPFGAYGAYAQALMQQQAALMASVAQGGYLNPM

SEQ ID NO: 85838 - protein, 1222 aa, Homo sapiens
MSVKEGAQRKWAALKEKLGPQDSDPTEANLESADPELCIRLLQMPSVVNYSGLRKRLEGSDGGWMVQFLEQSGLDLLLEALARLSGRGVARISDALLQLTCVSCVRAVMNSRQGIEYILSNQGYVRQLSQALDTSNVMVKKQVFELLAALCIYSPEGHVLTLDALDHYKTVCSQQYRFSIVMNELSGSDNVPYVVTLLSVINAVILGPEDLRARTQLRNEFIGLQLLDVLARLRDLEDADLLIQLEAFEEAKAEDEEELLRVSGGVDMSSHQEVFASLFHKVSCSPVSAQLLSVLQGLLHLEPTLRSSQLLWEALESLVNRAVLLASDAQECTLEEVVERLLSVKGRPRPSPLVKAHKSVQANLDQSQRGSSPQNTTTPKPSVEGQQPAAAAACEPVDHAQSESILKVSQPRALEQQASTPPPPPPPPLLPGSSAEPPPPPPPPPLPSVGAKALPTAPPPPPLPGLGAMAPPAPPLPPPLPGSCEFLPPPPPPLPGLGCPPPPPPLLPGMGWGPPPPPPPLLPCTCSPPVAGGMEEVIVAQVDHGLGSAWVPSHRRVNPPTLRMKKLNWQKLPSNVAREHNSMWASLSSPDAEAVEPDFSSIERLFSFPAAKPKEPTMVAPRARKEPKEITFLDAKKSLNLNIFLKQFKCSNEEVAAMIRAGDTTKFDVEVLKQLLKLLPEKHEIENLRAFTEERAKLASADHFYLLLLAIPCYQLRIECMLLCEGAAAVLDMVRPKAQLVLAACESLLTSRQLPIFCQLILRIGNFLNYGSHTGDADGFKISTLLKLTETKSQQNRVTLLHHVLEEAEKSHPDLLQLPRDLEQPSQAAGINLEIIRSEASSNLKKLLETERKVSASVAEVQEQYTERLQASISAFRALDELFEAIEQKQRELADYLCEDAQQLSLEDTFSTMKAFRDLFLRALKENKDRKEQAAKAERRKQQLAEEEARRPRGEDGKPVRKGPGKQEEVCVIDALLADIRKGFQLRKTARGRGDTDGGSKAASMDPPRATEPASESRGWDLVDAVTPGPQPTLEQLEEGGPRPLERRSSWYVDASDVLTTEDPQCPQPLEGAWPVTLGDAQALKPLKFSSNQPPAAGSSRQDAKDPTSLLGVLQAEADSTSEGLEDAVHSRGARPPAAGPGGDEDEDEEDTAPESALDTSLDKSFSEDAVTDSSGSGTLPRARGRASKGTGKRRKKRPSRSQEEVPPDSDDNKTKKLCVIQ

SEQ ID NO: 85839 - protein, 317 aa, Homo sapiens
MATPPKRSCPSFSASSEGTRIKKISIEGNIAAGKSTFVNILKQLCEDWEVVPEPVARWCNVQSTQDEFEELTMSQKNGGNVLQMMYEKPERWSFTFQTYACLSRIRAQLASLNGKLKDAEKPVLFFERSVYSDRYIFASNLYESECMNETEWTIYQDWHDWMNNQFGQSLELDGIIYLQATPETCLHRIYLRGRNEEQGIPLEYLEKLHYKHESWLLHRTLKTNFDYLQEVPILTLDVNEDFKDKYESLVEKSCSVAQAGVQWHNLGSLPSPPPRFNQFCLSLLSQRVFEYFVILLKTTGSQMVPDTSALCIFVTSY

SEQ ID NO: 85840 - protein, 100 aa, Homo sapiens
  MOD_RES (1)..(1): Any amino acid
XASSCGLSAWRVLSGSPYYKQVTNGGDGVTAVPKTLGLLRMLSVKFYSRQGQEQDGIFKMSLSPDGMLLAAIHFSGKLSIWAIPSLKQQGEWGQNEQVLD

SEQ ID NO: 85841 - protein, 194 aa, Homo sapiens
  MOD_RES (1)..(1): Any amino acid
XFDFAYTEENGSVLQVGRNITRIKLLVRKFLQTQDDRPFFLYVAFHDPHRCGHSQPQYGTFCEKFGNGESGMGRIPDWTPQAYDPLDVLVPYFVPNTPAARADLAAQYTTVGRMDQGVGLVLQELRDAGVLNDTLVIFTSDNGIPFPSGRTNLYWPGTAEPLLVSSPEHPKRWGQVSEAYVSLLVTRLLLPTVK

SEQ ID NO: 85842 - protein, 155 aa, Homo sapiens
VEEWGPFDLVYGATPPLGHTCDRPPSWYLFQFHRLLQYARPKPGSPRPFFWMFVDNLVLNKEDLDVASRFLEMEPVTIPDVHGGSLQNAVRVWSNIPAIRSRHWALVSEEELSLLAQNKQSSKLAAKWPTKLVKNCFLPLREYFKYFSTELTSSL

SEQ ID NO: 85843 - protein, 162 aa, Homo sapiens
MSCIAFSFGGSLADAISENYRIMSYFKEAELKDLLLQVGRGLRYIHSMSLVHMDIKPSNIFISRTSIPNAASEEGDEDDWASNKVMFKIGDLGHVTRISSPQVEEGDSRFLANEVLQENYTHLPKADIFALALTVVCAAGAEPLPRNGDQWHEIRQGRLPRI

SEQ ID NO: 85844 - protein, 277 aa, Homo sapiens
MIQLTATPVSALVDEPVHIRATGLIPFQMVSFQASLEDENGDMFYSQAHYRANEFGEVDLNHASSLGGDYMGVHPMGLFWSLKPEKLLTRLLKRDVMNRPFQVQVKLYDLELIVNNKVASAPKASLTLERWYVAPGVTRIKVREGRLRGALFLPPGEGLFPGVIDLFGGLGGLLEFRASLLASRGFASLALAYHNYEDLPRKPEVTDLEYFEEAANFLLRHPKVFGSGVGVVSVCQGVQIGLSMAIYLKQVTATAQTAKAGGNISVSKEEAWKPVGP

SEQ ID NO: 85845 - protein, 146 aa, Homo sapiens
MGCTLSAEERAALERSKAIEKNLKEDGISAAKDVKLLLLGAGESGKSTIVKQMKIIHEDGFSGEDVKQYKPVVYSNTIQSLAAIVRAMDTLGIEYGDKERKLPGQPGSDWGRRLPAHRAGHPPNQGQNHWHRRNPLHIQEPPLQAV

SEQ ID NO: 85846 - protein, 65 aa, Homo sapiens
MDYGLQFTSSRKFLSISPIVLYLLASFYTKYDAAHFLINTASLLSVLLPKLPQFHGVRVFGINKY

SEQ ID NO: 85847 - protein, 102 aa, Homo sapiens
MEFFISMSETIKYNDDDHKTLFLKTLNEQRLEGEFCDIAIVVEDVKFRAHRCVLAACSTYFKKLFKKLEVDSSSVIEIDFLRSDIFEEVLNYMYTAKISVKK

SEQ ID NO: 85848 - protein, 72 aa, Homo sapiens
MKMWLLVSHLVIISITTCLAEFTWYRRYGHGVSEEDKGFGPIFEEQPINTIYPEESLEGKVSLNCRARASPF

SEQ ID NO: 85849 - protein, 71 aa, Homo sapiens
MKQLKRKRKSNFSVQETQTLLKEITKRKEVIFSKQLNTTINVMKRMAWEEIAQCVNAVGEGEQRTGTEVKR

SEQ ID NO: 85850 - protein, 1102 aa, Homo sapiens
  MOD_RES (1)..(1): Any amino acid
XDPIEEALGLPSSLDSLDQMNQDGGGGDVGNSSASELVPPPEETAPTELSKESTAPAPESITLHDYTTQPASQEQPAQPVLQTSTPTSGLLQVSKSQEILSQGNPFMGVSATAVSSSSAGGQPPQSAPKIVILKAPPSSSVTGAHVAQIQAQGITSTAQPLVAGTANGGKVTFTKVLTGTPLRPGVSIVSGNTVLAAKVPGNQAAVQRIVQPSRPVKQLVLQPVKGSAPAGNPGATGPPLKPAVTLTSTPTQGESKRITLVLQQPQSGGPQGHRHVVLGSLPGKIVLQGNQLAALTQAKNAQGQPAKVVTIQLQVQQPQQKIQIVPQPPSSQPQPQQPPSTQPVTLSSVQQAQIMGPGQSPGQRLSVPVKVVLQPQAGSSQGASSGLSVVKVLSASEVAALSSPASSAPHSGGKTGMEENRRLEHQKKQEKANRIVAEAIARARARGEQNIPRVLNEDELPSVRPEEEGEKKRRKKSAGERLKEEKPKKSKTSGASKTKGKSKLNTITPVVGKKRKRNTSSDNSDVEVMPAQSPREDEESSIQKRRSNRQVKRKKYTEDLDIKITDDEEEEEVDVTGPIKPEPILPEPVQEPDGETLPSMQFFVENPSEEDAAIVDKVLSMRIVKKELPSGQYTEAEEFFVKYKNYSYLHCEWATISQLEKDKRIHQKLKRFKTKMAQMRHFFHEDEEPFNPDYVEVDRILDESHSIDKDNGEPVIYYLVKWCSLPYEDSTWELKEDVDEGKIREFKRIQSRHPELKRVNRPQASAWKKLELSHEYKNRNQLREYQLEGVNWLLFNWYNRQNCILADEMGLGKTIQSIAFLQEVYNVGIHGPFLVIAPLSTITNWEREFNTWTEMNTIVYHGSLASRQMIQQYEMYCKDSRGRLIPGAYKFDALITTFEMILSDCPELREIEWRCVIIDEAHRLKNRNCKLLDSLKHMDLEHKVLLTGTPLQNTVEELFSLLHFLEPSQFPSESEFLKDFGDLKTEEQVQKLQAILKPMMLRRLKEDVEKNLAPKQETIIEVELTNIQKKYYRAILEKNFSFLSKGAGHTNMPNLLNTMMELRKCCNHPYLINGEGMLGIYLNFCSTCVYFPDDSPWGQWMH

SEQ ID NO: 85851 - protein, 101 aa, Homo sapiens
MAAVATCGSVAASTGSAVATASKSNVTSFQRRGPRASVTNDSGPRLVSIAGTRPSVRNGQLLVSTGLPALDQLLGSSRFRPACKSFYNCERQTSLEDAGKK

SEQ ID NO: 85852 - protein, 103 aa, Homo sapiens
MKNEIAAVVFFFTRLVRKHDKLKKEAVERFAEKLTLILQEKYKNHWYPEKPSKGQAYRCIRVNKFQRVDPDVLKACENSCILYSDLGLPKELTLWVDPCEVCC

SEQ ID NO: 85853 - protein, 1387 aa, Homo sapiens
MPEQERQITAREGASRKILSKLSLPTRAWEPAMKKSFAFDNVGYEGGLDGLGPSSQVATSTVRILGMTCQSCVKSIEDRISNLKGIISMKVSLEQGSATVKYVPSVVCLQQVCHQIGDMGFEASIAEGKAASWPSRSLPAQEAVVKLRVEGMTCQSCVSSIEGKVRKLQGVVRVKVSLSNQEAVITYQPYLIQPEDLRDHVNDMGFEAAIKSKVAPLSLGPIDIERLQSTNPKRPLSSANQNFNNSETLGHQGSHVVTLQLRIDGMHCKSCVLNIEENIGQLLGVQSIQVSLENKTAQVKYDPSCTSPVALQRAIEALPPGNFKVSLPDGAEGSGTDHRSSSSHSPGSPPRNQVQGTCSTTLIAIAGMTCASCVHSIEGMISQLEGVQQISVSLAEGTATVLYNPSVISPEELRAAIEDMGFEASVVSESCSTNPLGNHSAGNSMVQTTDGTPTSVQEVAPHTGRLPANHAPDILAKSPQSTRAVAPQKCFLQIKGMTCASCVSNIERNLQKEAGVLSVLVALMAGKAEIKYDPEVIQPLEIAQFIQDLGFEAAVMEDYAGSDGNIELTITGMTCASCVHNIESKLTRTNGITYASVALATSKALVKFDPEIIGPRDIIKIIEEIGFHASLAQRNPNAHHLDHKMEIKQWKKSFLCSLVFGIPVMALMIYMLIPSNEPHQSMVLDHNIIPGLSILNLIFFILCTFVQSKTSEALAKLMSLQATEATVVTLGEDNLIIREEQVPMELVQRGDIVKVVPGGKFPVDGKVLEGNTMADESLITGEAMPVTKKPGSTVIAGSINAHGSVLIKATHVGNDTTLAQIVKLVEEAQMSKAPIQQLADRFSGYFVPFIIIMSTLTLVVWIVIGFIDFGVVQRYFPNPNKHISQTEVIIRFAFQTSITVLCIACPCSLGLATPTAVMVGTGVAAQNGILIKGGKPLEMAHKIKTVMFDKTGTITHGVPRVMRVLLLGDVATLPLRKVLAVVGTAEASSEHPLGVAVTKYCKEELGTETLGYCTDFQAVPGCGIGCKVSNVEGILAHSERPLSAPASHLNEAGSLPAEKDAVPQTFSVLIGNREWLRRNGLTISSDVSDAMTDHEMKGQTAILVAIDGVLCGMIAIADAVKQEAALAVHTLQSMGVDVVLITGDNRKTARAIATQVGINKVFAEVLPSHKVAKVQELQNKGKKVAMVGDGVNDSPALAQADMGVAIGTGTDVAIEAADVVLIRNDLLDVVASIHLSKRTVRRIRINLVLALIYNLVGIPIAAGVFMPIGIVLQPWMGSAAMAASSVSVVLSSLQLKCYKKPDLERYEAQAHGHMKPLTASQVSVHIGMDDRWRDSPRATPWDQVSYVSQVSLSSLTSDKPSRHSAAADDDGDKWSLLLNGRDEEQYI

SEQ ID NO: 85854 - protein, 40 aa, Homo sapiens
MAAACGPGAAGYCLLLGLHLFLLTAGPALGWNDPECCCGM

SEQ ID NO: 85855 - protein, 148 aa, Homo sapiens
  MOD_RES (1)..(1): Any amino acid
XQPPKVPSRMVPRPKDDWDWSDTETSEENAQPPGQGSGTLVQSMVKNLEKQLEAPAKKPAGGVSLFFMPNAGPQRAATPGRKPQVGCRMLRVYSGILYRTSSEFGGPGVKVGEGPASVILCPSGTLWVTSLCPCAHGEMASLEYLYPS

SEQ ID NO: 85856 - protein, 797 aa, Homo sapiens
MQQRAGSKTAGPPCQWSRMASEGTNIPSPVVRQIDKQFLICSICLERYKNPKVLPCLHTFCERCLQNYIPAHSLTLSCPVCRQTSILPEKGVAALQNNFFITNLMDVLQRTPGSNAEESSILETVTAVAAGKPLSCPNHDGNRQSFAVVPRLVSNPWPQVILPPWPSKVLGLQVMEFYCQSCETAMCRECTEGEHAEHPTVPLKDVVEQHKASLQVQLDAVNKRLPEIDSALQFISEIIHQLTNQKASIVDDIHSTFDELQKTLNVRKSVLLMELEVNYGLKHKVLQSQLDTLLQGQESIKSCSNFTAQALNHGTETEVLLVKKQMSEKLNELADQDFPLHPRENDQLDFIVETEGLKKSIHNLGTILTTNAVASETVATGEGLRQTIIGQPMSVTITTKDKDGELCKTGNAYLTAELSTPDGSVADGEILDNKNGTYEFLYTVQKEGDFTLSLRLYDQHIRGSPFKLKVIRSADVSPTTEGVKRRVKSPGSGHVKQKAVKRPASMYSTGKRKENPIEDDLIFRVGTKGRNKGEFTNLQGVAASTNGKILIADSNNQCVQIFSNDGQFKSRFGIRGRSPGQLQRPTGVAVHPSGDIIIADYDNKWVSIFSSDGKFKTKIGSGKLMGPKGVSVDRNGHIIVVDNKACCVFIFQPNGKIVTRFGSRGNGDRQFAGTLDGPHFAAVNSNNEIIITDFHNHSVKVFNQEGEFMLKFGSNGEGNGQFNAPTGVAVDSNGNIIVADWGNSRIQVFDGSGSFLSYINTSADPLYGPQGLALTSDGHVVVADSGNHCFKVYRYLQ

SEQ ID NO: 85857 - protein, 288 aa, Homo sapiens
MALQGISVVELSGLAPGPFCAMVLADFGARVVRVDRPGSRYDVSRLGRGKRSLVLDLKQPRGAAVLRRLCKRSDVLLEPFRRGVMEKLQLGPEILQRENPRLIYARLSGFGQSGSFCRLAGHDINYLALSGVLSKIGRSGENPYAPLNLLADFAGGGLMCALGIIMALFDRTRTGKGQVIDANMVEGTAYLSSFLWKTQKLSLWEAPRGQNMLDGGAPFYTTYRTADGEFMAVGAIEPQFYELLIKGLGELILLKIQQEAVSCQARQTLVSVKQWPSLQPKSWGFVWQ

SEQ ID NO: 85858 - protein, 9 aa, Homo sapiens
MRHDVGEFP

SEQ ID NO: 85859 - protein, 223 aa, Homo sapiens
MSMDVTFLGTGAAYPSPTRGASAVVLRCEGECWLFDCGEGTQTQLMKSQLKAGRITKIFITHLHGDHFFGLPGLLCTISLQSGSMVSKQPIEIYGPVGLRDFIWRTMELSHTELVFHYVVHELVPTADQCPAEELKEFAHVNRADSPPKEEQGRTILLDSEENSYLLFDDEQFVVKAFRLFHRIPSFGFSVVEKKRPGKLNAQKLKDLGKCFFVFCFFPPSHQ

SEQ ID NO: 85860 - protein, 733 aa, Homo sapiens
MVKLANPLYTEWILEAIQKIKKQKQRPSEERICHAVSTSHGLDKKTVSEQLELSVQDGSVLKVTNKGLASYKDPDNPGRFSSVKPGTFPKSAKGSRGSCNDLRNVDWNKLLRRAIEGLEEPNGSSLKNIEKYLRSQSDLTSTTNNPAFQQRLRLGAKRAVNNGRLLKDGPQYRVNYGSLDGKGAPQYPSAFPSSLPPVSLLPHEKDQPRADPIPICSFCLGTKESNREKKPEELLSCADCGSSGHPSCLKFCPELTTNVKALRWQCIECKTCSACRVQGRNADNMLFCDSCDRGFHMECCDPPLSRMPKGMWICQVCRPKKKGRKLLHEKAAQIKRRYAKPIGRPKNKLKQRLLSVTSDEGSMNAFTGRGSPDTEIKINIKQESADVNVIGNKDVVTEEDLDVFKQAQELSWEKIECESGVEDCGRYPSVIEFGKYEIQTWYSSPYPQEYARLPKLYLCEFCLKYMKSKNILLRHSKKCGWFHPPANEIYRRKDLSVFEEKLCQQKYNVSCIMIMPQHQRQGFGRFLIDFSYLLSRREGQAGSPEKPLSDLGRLSYLAYWKSVILEYLYHHHERHISIKAISRATGMCPHDIATTLQHLHMIDKRDGRFVIIRREKLILSHMEKLKTCSRANELDPDSLRWTPILISNAAVSEEEREAEKEAERLMEQASCWEKEEQEILSTRANSRQSPAKVQSKNKYLHSPESRPVTGERGQLLELSKESSEEEEEEEDEE

SEQ ID NO: 85861 - protein, 105 aa, Homo sapiens
MSSTSSKRAPTTATQRLKQDYLRIKKDPVPYICAEPLPSNILEWHYVVRGPEMTPYEGIPVLDHLQLGQPECGSTSVGWALHHRVIAHDQRWGCQQAVVAIIMEN

SEQ ID NO: 85862 - protein, 561 aa, Homo sapiens
MAETVWSTDTGEAVYRSRDPVRNLRLRVHLQRITSSNFLHYQPAAELGKDLIDLATFRPQPTASGHRPEEDEEEEIVIGWQEKLFSQFEVDLYQNETACQSPLDYQYRQEILKLENSGGKKNRRIFTYTDSDRYTNLEEHCQRMTTAASEVPSFLVERMANVRRRRQDRRGMEGGILKSRIVTWEPSEEFVRNNHVINTPLQTMHIMADLGPYKKLGYKKYEHVLCTLKVDSNGVITVKPDFTGLKGPYRIETEGEKQELWKYTIDNVSPHAQPEEEERERRVFKDLYGRHKEYLSSLVGTDFEMTVPGALRLFVNGEVVSAQGYEYDNLYVHFFVELPTAHWSSPAFQQLSGVTQTCTTKSLAMDKVAHFSYPFTFEAFFLHEDESSDALPEWPVLYCEVLSLDFWQRYRVEGYGAVVLPATPGSHTLTVSTWRPVELGTVAELRRFFIGGSLELEDLSYVRIPGSFKGLHGIELPSEKDAECVGPSGRVQPAEFHSQCARGLPSSPAPHAGGPGKPPAGPSEPLWNPGLLAHSSPGPQCKRTRWGISEASALLPLRLSD

SEQ ID NO: 85863 - protein, 16 aa, Homo sapiens
MTFNSFEGSKTCVPAD

SEQ ID NO: 85864 - protein, 686 aa, Homo sapiens
MYVGSKDYVLSLDLHDINREPLIIHWAASPQRIEECVLSGKDVNGECGNFVRLIQPWNRTHLYVCGTGAYNPMCTYVNRGRRAQDYIFYLEPERLESGKGKCPYDPKLDTASALINEELYAGVYIDFMGTDAAIFRTLGKQTAMRTDQYNSRWLNDPSFIHAELIPDSAERNDDKLYFFFRERSAEAPQSPAVYARIGRICLNDDGGHCCLVNKWSTFLKARLVCSVPGEDGIETHFDELQDVFVQQTQDVRNPVIYAVFTSSGSVFRGSAVCVYSMADIRMVFNGPFAHKEGPNYQWMPFSGKMPYPRPGTCPGGTFTPSMKSTKDYPDEVINFMRSHPLMYQAVYPLQRRPLVVRTGAPYRLTTIAVDQVDAADGRYEVLFLGTDRGTVQKVIVLPKDDQELEELMLEEVEVFKDPAPVKTMTISSKRQQLYVASAVGVTHLSLHRCQAYGAACADCCLARDPYCAWDGQACSRYTASSKRRSRRQDVRHGNPIRQCRGFNSNANKNAVESVQYGVAGSAAFLECQPRSPQATVKWLFQRDPGDRRREIRAEDRFLRTEQGLLLRALQLSDRGLYSCTATENNFKHVVTRVQLHVLGRDAVHAALFPPLSMSAPPPPGAGPPTPPYQELAQLLAQPEVGLIHQYCQGYWRHVPPSPREAPGAPRSPEPQDQKKPRNRRHHPPDT

SEQ ID NO: 85865 - protein, 155 aa, Homo sapiens
MQFVEKFQRALGLQRAEMTMTANKNSSITHGAGGTKAPRGTLSRSQSVSPPPVLSPPRSPIYPLSDSETSACRYPSHSSSRVLLKDRHPPAPSPQNPQDPSPDTSPPTCPFKTASFGYLDRSPSACKRDAQKESVQGAAQDVAGVAACLPLAQST

SEQ ID NO: 85866 - protein, 736 aa, Homo sapiens
MEPWSSRWKTKRWLWDFTVTTLALTFLFQAREVRGAAPVDVLKALDFHNSPEGISKTTGFCTNRKNSKGSDTAYRVSKQAQLSAPTKQLFPGGTFPEDFSILFTVKPKKGIQSFLLSIYNEHGIQQIGVEVGRSPVFLFEDHTGKPAPEDYPLFRTVNIADGKWHRVAISVEKKTVTMIVDCKKKTTKPLDRSERAIVDTNGITVFGTRILDEEVFEGDIQQFLITGDPKAAYDYCEHYSPDCDSSAPKAAQAQEPQIDEYAPEDIIEYDYEYGEAEYKEAESVTEGPTVTEETIAQTEANIVDDFQEYNYGTMESYQTEAPRHVSGTNEPNPVEEIFTEEYLTGEDYDSQRKNSEDTLYENKEIDGRDSDLLVDGDLGEYDFYEYKEYEDKPTSPPNEEFGPGVPAETDITETSINGHGAYGEKGQKGEPAVVEPGMLVEGPPGPAGPAGIMGPPGLQGPTGPPGDPGDRGPPGRPGLPGADGLPGPPGTMLMLPFRYGGDGSKGPTISAQEAQAQAILQQARIALRGPPGPMGLTGRPGPVGGPGSSGAKGESGDPGPQGPRGVQGPPGPTGKPGKRGRPGADGGRGMPGEPGAKGDRGFDGLPGLPGDKGHRGERGPQGPPGPPGDDGMRGEDGEIGPRGLPGEAGPRGLLGPRGTPGAPGQPGMAGVDGPPGPKGNMGPQGEPGPPGQQGNPGPQGLPGPQGPIGPPGEKVSYSVVLVKPGEHVCFSNLRQV

SEQ ID NO: 85867 - protein, 252 aa, Homo sapiens
MIQNSRPSLLQPQDVGDTVETLMLHPVIKAFLCGSISGTCSTLLFQPLDLLKTRLQTLQPSDHGSRRVGMLAVLLKVVRTESLLGLWKGMSPSIVRCVPGVGIYFGTLYSLKQYFLRGHPPTALESVMLGVGSRSVAGVCMSPITVIKTRYESGKYGYESIYAALRSIYHSEGHRGLFSGLTATLLRDAPFSGIYLMFYNQTKNIVPHVETELHHVAQAGLELPGSSDPPASASESVGITAVGYLLVFWPHW

SEQ ID NO: 85868 - protein, 189 aa, Homo sapiens
WLHNEYVRDLPVLQGQVPEYPAWFEQFVLQWLDENEDVSLEFLRGALERDKKDGTIGKVLMQYADILSKDFPAYCTKEKLPCILMNNVQQLRVQLEKMFEAMGGKELDLEAADSLKELQVKLNTVLDELSMVFGNSFQVRIDECVRQMADILGQVRGTGNASPDARASAAQDADSVLRPLMDFLDGNLT

SEQ ID NO: 85869 - protein, 27 aa, Homo sapiens
  MOD_RES (1)..(1): Any amino acid
XSVSSSVDFDQRDNGFCSWLTAIFRIK

SEQ ID NO: 85870 - protein, 33 aa, Homo sapiens
  MOD_RES (1)..(1): Any amino acid
XQIELLKELLDLLQDMVVMLLSLLEDRFHEPAK

SEQ ID NO: 85871 - protein, 659 aa, Homo sapiens
MYRERLRTLLVIAVVMSLLNALSTSGGSISWNDFVHEMLAKGEVQRVQVVPESDVVEVYLHPGAVVFGRPRLALMYRMQVANIDKFEEKLRAAEDELNIEAKDRIPVSYKRTGFFGNALYSVGMTAVGLAILWYVFRLAGMTGREGGFSAFNQLKMARFTIVDGKMGKGVSFKDVAGMHEAKLEVREFVDYLKSPERFLQLGAKVPKGALLLGPPGCGKTLLAKAVATEAQVPFLAMAGPEFVEVIGGLGAARVRSLFKEARARAPCIVYIDEIDAVGKKRSTTMSGFSNTEEEQTLNQLLVEMDGMGTTDHVIVLASTNRADILDGALMRPGRLDRHVFIDLPTLQERREIFEQHLKSLKLTQSSTFYSQRLAELTPGFSGADIANICNEAALHAAREGHTSVHTLNFEYAVERVLAGTAKKSKILSKEEQKVVAFHESGHALVGWMLEHTEAVMKVSITPRTNAALGFAQMLPRDQHLFTKEQLFERMCMALGGRASEALSFNEVTSGAQDDLRKVTRIAYSMVKQFGMAPGIGPISFPEAQEGLMGIGRRPFSQGLQQMMDHEARLLVAKAYRHTEKVLQDNLDKLQALANALLEKEVINYEDIEALIGPPPHGPKKMIAPQRWIDAQREKQDLGEEETEETQQPPLGGEEPTWPK

SEQ ID NO: 85872 - protein, 142 aa, Homo sapiens
  MOD_RES (1)..(1): Any amino acid
XLKNANKNEIPQLVGEIYQNFFVESKEISVEKSLYKEIQQCLVGNKGIEVFYKIQEDVYETLKDRYYPSFIVSDLYEKLLIKEEEKHASQMISNKDEMGPRDEAGEEAVDDGTNQINEQASFAVNKLRELNEKLEYKRLFPS

SEQ ID NO: 85873 - protein, 114 aa, Homo sapiens
MRLLLALLGVLLSVPGPPVLSLEASEEVELEPCLAPSLEQQEQELTVALGQPVRLCCGRAERGGHWYKEGSRLAPAGRVRGWRGRLEIASFLPEDAGRYLCLARGSMIVLQNLT

SEQ ID NO: 85874 - protein, 190 aa, Homo sapiens
  MOD_RES (1)..(1): Any amino acid
XFKLCFVELSTQPEFMLTDSKAYFHLLNQIAPKGQKEGEPRIDINMSGFNETDDLKRAESMLQQADKLGCRQFVTPADVVSGNPKLNLAFVANLFNKYPALTKPENQDIDWTLLEGETREERTFRNWMNSLGVNPHVNHLYADLQDALVILQLYERIKVPVDWSKVNKPPYPKLGANMKKLENCNYAVEL

SEQ ID NO: 85875 - protein, 153 aa, Homo sapiens
ILKQWEEYSVLAWVDGNHNLLTKLSLEEENCLIQLKCENLQQKLEQMDAENKELEKKLANQEECLKHSNLKFKEKSAEYTALARQLEAALEEGRQKVAEEIEKMSSRESALQIKILDLETELRKKNEEQNQLVCKMNSKAQHQEVCLKEVQNS

SEQ ID NO: 85876 - protein, 496 aa, Homo sapiens
MASTEGANNMPKQVEVRMHDSHLGSEEPKHRHLGLRLCDKLGKNLLLTLTVFGVILGAVCGGLLRLASPIHPDVVMLIAFPGDILMRMLKMLILPLIISSLITGLSGLDAKASGRLGTRAMVYYMSTTIIAAVLGVILVLAIHPGNPKLKKQLGPGKKNDEVSSLDAFLDLIRNLFPENLVQACFQQIQTVTKKVLVAPPPDEEANATSAVVSLLNETVTEVPEETKMVIKKGLEFKDGMNVLGLIGFFIAFGIAMGKMGDQAKLMVDFFNILNEIVMKLVIMIMCAGTLPVTFRCLEENLGIDKRVTRFVLPVGATINMDGTALYEAVAAIFIAQMNGVVLDGGQIVTVSLTATLASVGAASIPSAGLVTMLLILTAVGLPTEDISLLVAVDWLLDRMRTSVNVVGDSFGAGIVYHLSKSELDTIDSQHRVHEDIEMTKTQSIYDDMKNHRESNSNQCVYAAHNSVIVDECKVTLAANGKSADCSVEEEPWKREK

SEQ ID NO: 85877 - protein, 488 aa, Homo sapiens
MGRHLALLLLLLLLFQHFGDSDGSQRLEQTPLQFTHLEYNVTVQENSAAKTYVGHPVKMGVYITHPAWEVRYKIVSGDSENLFKAEEYILGDFCFLRIRTKGGNTAILNREVKDHYTLIVKALEKNTNVEARTKVRVQVLDTNDLRPLFSPTSYSVSLPENTAIRTSIARVSATDADIGTNGEFYYSFKDRTDMFAIHPTSGVIVLTGRLDYLETKLYEMEILAADRGMKLYGSSGISSMAKLTVHIEQANECAPVITAVTLSPSELDRDPAYAIVTVDDCDQGANGDIASLSIVAGDLLQQFRTVRSFPGSKEYKVKAIGGIDWDSHPFGYNLTLQAKDKGTPPQFSSVKVIHVTSPQFKAGPVKFEKDVYRAEISEFAPPNTPVVMVKAIPAYSHLRYVFKSTPGKAKFSLNYNTGLISILEPVKRQQAAHFELEVTTSDRKASTKVLVKVLGANSNPPEFTQTAYKAAFDENVPIGTTVMSLSAV

SEQ ID NO: 85878 - protein, 87 aa, Homo sapiens
LLAAVLSLQLAAAEAIWCHQCTGFGGCSHGSRCLRDSTHCVTTATRPRTLSPHSPHSLAPGLTAAPPSRLASPPLPASAATVQHRLS

SEQ ID NO: 85879 - protein, 81 aa, Homo sapiens
MAAAVAAALARLLAAFLLLAAQVACEYGMVHVVSQAGGPEGKDYCILYNPQWAHLPHDLSKAMPGRGGAAVGTHLVLLSDL

SEQ ID NO: 85880 - protein, 308 aa, Homo sapiens
MFQTKLRNETWEDLPKMSCTTEIQAAFILSSFVTFFSGLIILLIFRLIWRSVKKWQIIKGTGIILELFTSGTIARSHVRSLHFQGQFRDHIEMLLSAQTFVGQVLVILVFVLSIGSLIIYFINSADPVGSCSSYEDKTIPIDLVFNAFFSFYFGLRFMAADDKIKFWLEMNSIVDIFTIPPTFISYYLKSNWLGLRFLRALRLLELPQILQILRAIKTSNSVKFSKLLSIILSTWFTAAGFIHLVENSGDPWLKGRNSQNISYFESIYLVMATTSTVGFGDVVAKTSLGRTFIMFFTLGSLVKNIFNI

SEQ ID NO: 85881 - protein, 50 aa, Homo sapiens
MGRRRAPELYRAPFPLYALQVDPSTGLLIAAGGGGAAKTGIKNGVRHGPP

SEQ ID NO: 85882 - protein, 779 aa, Homo sapiens
MAAEEGVASAASAGGSWGTAAMGRVLPMLLVPVPAEAMGQLGSRAQLRTQPEALGSLTAAGSLQVLSLTPGSRGGGRCCLEGPFWHFLWEDSRNSSTPTEKPKLLALGENYELLIYEFNLKDGRCDATILYSCSREALQKLIDDQDISISLLSLRILSFHNNTSLLFINKCVILHIIFPERDAAIRVLNCFTLPLPAQAVDMIIDTQLCRGILFVLSSLGWIYIFDVVDGTYVAHVDLALHKEDMCNEQQQEPAKISSFTSLKVSQDLDVAVIVSSSNSAVALNLNLYFRQHPGHLLCERILEDLPIQGPKGVDEDDPVNSAYNMKLAKFSFQIDRSWKAQLSSLNETIKNSKLEVSCCAPWFQDILHLESPESGNHSTSVQSWAFIPQDIMHGQYNVLQKDHAKTSDPGRSWKIMHISEQEEPIELKCVSVTGFTALFTWEVERMGYTITLWDLETQGMQCFSLGTKCIPVDSSGDQQLCFVLTENGLSLILFGLTQEEFLNRLMIHGSASTVDTLCHLNGWGRCSIPIHALEAGIENRQLDTVNFFLKSKENLFNPSSKSSVSDQFDHLSSHLYLRNVEELIPALDLLCSAIRESYSEPQSKHFSEQLLNLTLSFLNNQIKELFIHTEELDEHLQKGVNILTSYINELRTFMIKFPWKLTDAIDEYDVHENVPKVKESNIWKKLSFEEVIASAILNNKIPEAQTFFRIDSHSAQKLEELIGIGLNLVFDNLKKNNIKEASELLKNMGFDVKGQLLKICFYTTNKNIRDFLVGKGETT

SEQ ID NO: 85883 - protein, 283 aa, Homo sapiens
MGRRSSDTEEESRSKRKKKHRRRSSSSSSSDSRTYSRKKGGRKSRSKSRSWSRDLQPRSHSYDRRRRHRSSSSSSYGSRRKRSRSRSRGRGKSYRVQRSRSKSRTRRSRSRPRLRSHSRSSERSSHRRTRSRSRDRERRKGRDKEKREKEKDKGKDKELHNIKRGESGNIKAGLEHLPPAEQAKARLQLVLEAAAKADEALKAKERNEEEAKRRKEEDQATLVEQVKRVKEIEAIESDSFVQQTFRSSKEVKKLFIEKADAEEKWFKRLIALRQERLMGSPVA

SEQ ID NO: 85884 - protein, 53 aa, Homo sapiens
  MOD_RES (1)..(1): Any amino acid
XVTCEEKDLPGDLFNQLMRDDPSTVNGAEVLMLGEMLTLPQNFGLIFRQVLSV

SEQ ID NO: 85885 - protein, 112 aa, Homo sapiens
MVVLRAGKKTFLPPLCRAFACRGCQLAPERGAERRDTAPSGVSRFCPPRKSCHDWIGPPDKYSNLRPVHFYIPENESPLEQKLRKLRQETQEWNQQFWANQNLTFSKVRKQH

SEQ ID NO: 85886 - protein, 95 aa, Homo sapiens
MQPSGHRLRDVEHHPLLAENDNYDSSSSSSSEADVADRVWFIRDGCGMICAVMTWLLVAYADFVVTFVMLLPSKDFWYSVVNGVIFNCLAVLALS

SEQ ID NO: 85887 - protein, 148 aa, Homo sapiens
MERLQKAKMDNQVLGYKDLAAIPKDKAILDIERPDLMIYEPHFTYSLLEHVELPRSRERSLSPKSTSPPPSPEVWADSRSPGIISQASAPRTTGTPRTSLPHFHHPETSRPDSNIYKKPPIYKQRESVGGSPQTKHLIEDLIIESSKF

SEQ ID NO: 85888 - protein, 1105 aa, Homo sapiens
NATSLSNPNPIDPSSMQRAYAALGLPYMNQPQTQLQPQVPGQQPAQPQTHQQMRTLNPLGNNPMNIPAGGITTDQQPPNLISESALPTSLGATNPLMNDGSNSGNIGTLSTIPTAAPPSSTGVRKGWHEHVTQDLRSHLVHKLVQAIFPTPDPAALKDRRMENLVAYAKKVEGDMYESANSRDEYYHLLAEKIYKIQKELEEKRRSRLHKQGILGNQPALPAPGAQPPVIPQAQPVRPPNGPLSLPVNRMQVSQGMNSFNPMSLGNVQLPQAPMGPRAASPMNHSVQMNSMGSVPGMAISPSRMPQPPNMMGAHTNNMMAQAPAQSQFLPQNQFPSSSGAMSVGMGQPPAQTGVSQGQVPGAALPNPLNMLGPQASQLPCPPVTQSPLHPTPPPASTAAGMPSLQHTTPPGMTPPQPAAPTQPSTPVSSSGQTPTPTPGSVPSATQTQSTPTVQAAAQAQVTPQPQTPVQPPSVATPQSSQQQPTPVHAQPPGTPLSQAAASIDNRVPTPSSVASAETNSQQPGPDVPVLEMKTETQAEDTEPDPGESKGEPRSEMMEEDLQGASQVKEETDIAEQKSEPMEVDEKKPEVKVEVKEEEESSSNGTASQSTSPSQPRKKIFKPEELRQALMPTLEALYRQDPESLPFRQPVDPQLLGIPDYFDIVKNPMDLSTIKRKLDTGQYQEPWQYVDDVWLMFNNAWLYNRKTSRVYKFCSKLAEVFEQEIDPVMQSLGYCCGRKYEFSPQTLCCYGKQLCTIPRDAAYYSYQNSSPKYGLLADRYHFCEKCFTEIQGENVTLGDDPSQPQTTISKDQFEKKKNDTLDPEPFVDCKECGRKMHQICVLHYDIIWPSGFVCDNCLKKTGRPRKENKFSAKRLQTTRLGNHLEDRVNKFLRRQNHPEAGEVFVRVVASSDKTVEVKPGMKSRFVDSGEMSESFPYRTKALFAFEEIDGVDVCFFGMHVQEYGSDCPPPNTRRVYISYLDSIHFFRPRCLRTAVYHEILIGYLEYVKKLGYVTGHIWACPPSEGDDYIFHCHPPDQKIPKPKRLQEWYKKMLDKAFAERIIHDYKDIFKQATEDRLTSAKELPYFEGDFWPNVLEESIKELEQEE

SEQ ID NO: 85889 - protein, 168 aa, Homo sapiens
MARKRAAGGEPRGRELRSQKSKAKSKARHAFEDEKPPKKSLLSKVSQGKRKRGCSHPGGSADGPAKKKVAKVTVKSENLKVIKDEALSDGDDLRDFPSDLKKAHHLKRGATMNEDSNEEEEESENDWEEVEELSEPVLGDVRESTAFSRSLLPVKPVEIEIETPEQAK

SEQ ID NO: 85890 - protein, 39 aa, Homo sapiens
MGQACGHSILCRSQQYPAARPAEPSLQLPEHCFHTCDLI

SEQ ID NO: 85891 - protein, 743 aa, Homo sapiens
MRRREGHGTDSEMGQGPVRESQSSDPPALQFRISEYKPLNMAGVEQPPSPELRQEGVTEYEDGGAPAGDGEAGPQQAEDHPQNPPEDPNQDPPEDDSTCQCQACGPHQAAGPDLGSSNDGCPQLFQERSVIVENSSGSTSASELLKPMKKRKRREYQSPSEEESEPEAMEKQEEGKDPEGQPTASTPESEEWSSSQPATGEKKECWSWESYLEEQKAITAPVSLFQDSQAVTHNKNGFKLGMKLEGIDPQHPSMYFILTVAEVCGYRLRLHFDGYSECHDFWVNANSPDIHPAGWFEKTGHKLQPPKGYKEEEFSWSQYLRSTRAQAAPKHLFVSQSHSPPPLGFQVGMKLEAVDRMNPSLVCVASVTDVVDSRFLVHFDNWDDTYDYWCDPSSPYIHPVGWCQKQGKPLTPPQDYPDPDNFCWEKYLEETGASAVPTWAFKVRPPHSFLVNMKLEAVDRRNPALIRVASVEDVEDHRIKIHFDGWSHGYDFWIDADHPDIHPAGWCSKTGHPLQPPLGPREPSSASPGGCPPLSYRSLPHTRTSKYSFHHRLFFPRKCPTPGCDGSGHVTGKFTAHHCLSGCPLAERNQSRLKAELSDSEASARKKNLSGFSPRKKPRHHGRIGRPPKYRKIPQEDFQTLTPDVVHQSLFMSALSAHPDRSLSVCWEQHCKLLPGVAGISASTVAKWTIDEVFGFVQTLTGCEDQARLFKDEVRCKCRVGDRAGVTVLKTAGSRCPPQRHFC

SEQ ID NO: 85892 - protein, 152 aa, Homo sapiens
VSGALLTDWSDDTMKELHLAIPAKITREKLDQVATAVYQMMDQLYQGKMYFPGYFPNELRNIFREQVHLIQNAIIESIFQYETISCNNCTDSHVACFGYNCESSAQWKSAVQGLLNYINNWHNLVSPALRCLEPPHLANLTLEDAAECLKQH

SEQ ID NO: 85893 - protein, 439 aa, Homo sapiens
MIRSSSQDSEVSNSSGETLGADSDLSSNAGDGPGGEGSVHLASSRGTLSDSEIETNSATSTIFGKAHSLKPSIKEKLAGSPIRTSEDVSQRVYLYEGLLGRDKGSMWDQLEDAAMETFSISKERSTLWDQMQFWEDAFLDAVMLEREGMGMDQGPQEMIDRYLSLGEHDRKRLEDDEDRLLATLLHNLISYMLLMKVNKNDIRKKVRRLMGKSHIGLVYSQQINEVLDQLANLNGRDLSIWSSGSRHMKKQTFVVHAGTDTNGDIFFMEVCDDCVVLRSNIGTVYERWWYEKLINMTYCPKTKVLCLWRRNGSETQLNKFYTKKCRELYYCVKDSMERAAARQQSIKPGPELGGEFPVQDLKTGEGGLLQVTLEGINLKFMHNQVGASGSTRLPVVPSVRRTNVQAPSTSPASMREGPLELEGELEQLDPGKKPQGRAQ

SEQ ID NO: 85894 - protein, 61 aa, Homo sapiens
MSGDGATEQAAEYVPEKVKKAEKKLEENPYDLDAWSILIREAQNQPIDKARKTYERLVAQF

SEQ ID NO: 85895 - protein, 32 aa, Homo sapiens
  MOD_RES (1)..(1): Any amino acid
XDKKFARKPPRFSCLLPDPRELIEIKNKKKLK

SEQ ID NO: 85896 - protein, 38 aa, Homo sapiens
RRPPAHISSVRQASTQVPRTVPHTQRVALGNCHSTLSL

SEQ ID NO: 85897 - protein, 4484 aa, Homo sapiens
  MOD_RES (1)..(1): Any amino acid
XTTEDTLITGSKTAAPVTSTGSTTATLEGQSTAASSRTSNQDISASSQNHQTKSTETTSKAQTDTLTQMMTSTLFSSPSVHNVMETAPPDEMTTSFPSSVTNTLMMTSKTITMTTSTDSTLGNTEETSTAGTESSTPVTSAVSITAGQEGQSRTTSWRTSIQDTSASSQNHWTRSTQTTRESQTSTLTHRTTSTPSFSPSVHNVTGTVSQKTSPSGETATSSLCSVTNTSMMTSEKITVTTSTGSTLGNPGETSSVPVTGSLMPVTSAALVTFDPEGQSPATFSRTSTQDTTAFSKNHQTQSVETTRVSQINTLNTLTPVTTSTVLSSPSGFNPSGTVSQETFPSGETTTSSPSSVSNTFLVTSKVFRMPTSRDSTLGNTEETSLSVSGTISAITSKVSTIWWSDTLSTALSPSSLPPKISTAFHTQQSEGAETTGRPHERSSFSPGVSQEIFTLHETTTWPSSFSSKGHTTWSQTELPSTSTGAATRLVTGNPSTGTAGTIPRVPSKVSAIGEPGEPTTYSSHSTTLPKTTGAGAQTQWTQETGTTGEALLSSPSYSVTQMIKTATSPSSSPMLDRHTSQQITTAPSTNHSTIHSTSTSPQESPAVSQRGHTQAPQTTQESQTTRSVSPMTDTKTVTTPGSSFTASGHSPSEIVPQDAPTISAATTFAPAPTGDGHTTQAPTTALQAAPSSHDATLGPSGGTSLSKTGALTLANSVVSTPGGPEGQWTSASASTSPDTAAAMTHTHQAESTEASGQTQTSEPASSGSRTTSAGTATPSSSGASGTTPSGSEGISTSGETTRFSSNPSRDSHTTQSTTELLSASASHGAIPVSTGMASSIVPGTFHPTLSEASTAGRPTGQSSPTSPSASPQETAAISRMAQTQRTRTSRGSDTISLASQATDTFSTVPPTPPSITSTGLTSPQTETHTLSPSGSGKTFTTALISNATPLPVTYASSASTGHTTPLHVTDASSVSTGHATPLPVTSPSSVSTGHTTPLPVTDTSSESTGHVTPLPVTSFSSASTGDSTPLPVTDTSSASTGHVTPLPVTSLSSASTGDTTPLPVTDTSSASTGHATSLPVTDTSSVSTGHTTPLPVTDTSSASTGHATSLPVTDTSSVSTGHTTPLHVTDASSASTGQATPLPVTSLSSVSTGDTTPLPVTSPSSASTGHATPLLVTDTSSASTGHATPLPVTDASSVSTDHATSLPVTIPSAASTGHTTPLPVTDTSSASTGQATSLLVTDTSSVSTGDTTPLPVTSTSSASTGHVTPLHVTSPSSASTGHATPLPVTSLSSASTGDTMPLPVTSPSSASTGDTTPLPVTDASSVSTGHTTPLHVTDASSASTGQATPLPVTSLSSVSTGDTTPLPVTSPSSASTGHATPLLVTDTSSASTGHATPLPVTDASSVSTDHATSLPVTIPSAASTGHTTPLPVTDTSSASTGQATSLLVTDTSSVSTGDTTPLPVTSTSSASTGHVTPLHVTSPSSASTGHATPLPVTSLSSASTGDTMPLPVTSPSSASTGDTTPLPVTDASSVSTGHTTPLPVTSPSSASTGHTTPLPVTDTSSASKGDTTPLPVTSPSSASTGHTTPLPVTDTSSASTGDTTPLPVTNASSLSTGHATPLHVTSPSSASTGHATPLPVTSTSSASTGHATPLPVTGLSSATTDDTTRLPVTDVSSASTGQATPLPVTSLSSVSTGDTTPLPVTSPSSASTGHASPLLVTDASSASTGQATPLPVTDTSSVSTAHATPLPVTGLSSASTDDTTRLPVTDVSSASTGQAIPLPVTSPSSASTGDTTPLPVTDASSASTGDTTSLPVTIPSSASSGHTTSLPVTDASSVSTGHATSLLVTDASSVSTGDTTPLPVTDTNSASTGDTTPLHVTDASSVSTGHATSLPVTSLSSASTGDTTPLPVTSPSSASSGHTTPLPVTDASSVPTGHATSLPVTDASSVSTGHATPLPVTDASSVSTGHATPLPVTDTSSVSTGQATPLPVTSLSSASTGDTTPLPVTDTSSASTGHAPHLPVTGLSSASTGDTTRLPVTNVSSASTGHATPLPVTSTSSASTGDTTPLPGTDTSSVSTGHTTPLLVTDASSVSTGDTTRLPVTSPSSASTGHTTPLHVTDASSVSTGHTTPLPVTDTSSASTGQATSLLVTDTSSVSTGDTTPLPVTSTSSASTGHVTPLHVTSPSSASTGHATPLPVTSLSSASTGDTTPLPVTDTSSVSTGHTTPLPVTSPSSASTGHTTPLPVTDTSSASKGDTTPLPVTSPSSASTGHTTPLPVTDTSSASTGDTTPLPVTNASSLSTGHATPLHVTSPSSASTGHATPLPVTSTSSASTGHATPLPVTSTSSASTGHATPLPVTDNSSVSTGHATPLPVTGLSSATTDDTTRLPVTDVSSASTGQATPLPVTSLSSVSTGDTTPLPVTSPSSASTGHASPLLVTDASSASTGQATPLPVTDTSSVSTAHATPLPVTGLSSASTDDTTRLPVTDVSSASTGQAIPLPVTSPSSASTGDTTPLPVTDASSASTGDTTSLPVTIPSSASSGHTTSLPVTDASSVSTGHATSLLVTDASSVSTGDTTPLPVTDTNSASTGDTTPLHVTDASSVSTGHATSLPVTSLSSASTGDTTPLPVTSPSSASSGHTTSLPVTDASSVSTGHATSLPVTIPSSASSGHTTPLPVTDASSVPTGHATSLPVTDASSVSTGHATPLPVTDASSVSTGHATPLPVTDTSSVSTGQATPLPVTSLSSASSTGDTTPLPVTDTSSASTGQDTPLPVTSLFSVSTGDTTPLPVTSPSSASTGHATHLLVTDASSVSTGHATSLLVTDASSVSTGHATALHVTDASSLSTGDTTPLPVTSPSSASTGDTTPLPVTDTSSVSTGHATSLPVTDTSSASTGHATSLPVTDTSSASTGQATPLPVTSPSSASTGHAIPLLVTDTSSASTGQATPLPVTSLSSASTGDTTPLPVTDASSVSTGHATSLPVTSLSSVSTGDTTPLPVTSPSSASTGHATPLHVTSPSSASTGHATPLPVTSLSSASTGDTTPLPVTSPSSASTGHATPLHVTDASSVSTGDTTPLPVTSPSSASSGHTTPLPVTDASSASTGDTTPLPVTDTSSASTGHATHLPVTGLSSASTGDTTRLPVTDVSSASTGHATPLPVTSTSSASTGDTTPLPGTDTSSVSTGHTTPLLVTDASSVSTGDTTRLPVTSPSSASTGHTTPLPVTDTPSASTGDTTPLPVTNASSLSTRHATSLHVTSPSSASTGHATPLPVTDTSAASTGHATPLPVTSTSSASTGDTTPLPVTDTSSASTGHATPLPVTNTSSVSTGHATPLHVTSPSSASTGHTTPLPVTDASSVSTGHATSLPVTDASSVSTGHATPLPVTDASSVSTGHATPLPLTSLSSVSTGDTTPLPVTDTSSASTGQATPLPVTSLSSVSTGDTTPLPVTDTSSASTGHATSLPVTDTSSASTGHATPLHVTSPSSASTGHATPLPVTDTSSASTGHATPLPVTSLSSVSTGDTTPLPVTSPSSASTGHATPLLVTDASSASTGQATPLPVTSLSSVSTGDTTPLPVTSPSSASTGHATSLPVTDTSSASTGDTTSLPVTDTSSAYTGDTTSLPVTDTSSSSTGDTTPLLVTETSSASTGDTTPVPVTDTSSVSTGHATPLPVTGLSSASTGDTTRLPVTDISSASTGQATPLPVTNTSSVSTGDTMPLPVTSPSSASTGHATPLPVTSTSSASTGHATPVPVTSTSSASTGHTTPLPVTSPSSASTGHTTPLPVTDTSSASTGDTTPLPVTNASSLSTGHTTPLHVTIPSSASTGDTSTLPVTGASSASTGHATPLPVTDTSSVSTGHATPLPVTSFSSVSTGDTTPLPVTDASSASTGHATPLPVTDTSSASTGDTTPLPVTDASSASTGQATPLPVTSLSSVSTGDTTPLPVTIPSSASSGHTTSLPVSDTSSASTGQATPLPVTSLSSVSTGDTTPLLVTDASSVSTGHATPLPVTDTSSASTGDTTRLPVTDTSSASTGQATPLPVTSLSSVSTGDTTPLLVTNTSSVSTGHATSLPVTIPSSSSSGHTTPLPVTSTSSVSTGHVTPLHVTSPSSSSTGQATPLPVTSTSSSSTGQATPLPVTSTSSASTGHATPLPVTDASSVSTGHATPLPVTDTSSASTGDTTPLPVTDTSSASTGQATPLPVTSLSSVSTGHATPLAVSSATSASTVSSDSPLKMETSGMTTPSLKTDGGRRTATSPPPTTSQTIISTIPSTAMHTRSTAAPIPILPERGVSLFPYGADAGDLEFVRRTVDFTSPLFKPATGFPLGSSLRDSLYFTDNGQIIFPESDYQIFSYPNPLPTGFTGRDPVALVAPFWDDADFSTGRGTTFYQEYETFYGEHSLLVQQAESWIRKITNNGGYKARWALKVTWVNAHAYPAQWTLGSNTYQAILSTDGSRSYALFLYQSGGMQWDVAQRSVEMAISKTAH

SEQ ID NO: 85898 - protein, 229 aa, Homo sapiens
  MOD_RES (1)..(1): Any amino acid
XNMGKILPEYLSNWTMEKVRREGVKVMPNAIVQSVGVSSGKLLIKLKDGRKAGDAACFYDIKLGRRRVEHHDHAVVSGRLAGENMTGAAKPYWHQSMFWSDLGPDVGYEAIGLVDSSLPTVGVFAKATAQDNPKSATEQSGTGIRSESETESEASEITIPPSTPAVPQAPVQGEDYGKGVIFYLRDKVVVGIVLWNIFNRMPIARKIIKDGEQHEDLNEVAKLFNIHED

SEQ ID NO: 85899 - protein, 191 aa, Homo sapiens
MTPALTALLCLGLSLGPRTRVQAGPFPKPTLWAEPGSVISWGSPVTIWCQGSQEAQEYRLHKEGSPEPLDRNNPLEPKNKARFSIPSMTEHHAGRYRCHYYSSAGWSEPSDPLEMVMTGAYSKPTLSALPSPVVASGGNMTLRCGSQKGYHHFVLMKEGEHQLPRTLDSQQLHSRGFQALFPVGPVTPSHS

SEQ ID NO: 85900 - protein, 180 aa, Homo sapiens
MTVWTGDVVGGGTDSNIFMTLYGINGSTEEMQLDKKKARFEREQNDTFIMEILDIAPFTKMRIRIDGLGSRPEWFLERILLKNMNTGDLTMFYYGDWLSQRKGKKTLVCEMCAVIDEEEMMEWTSYTVAVKTSDILGAGTDANVFIIIFGENGDSGTLALKQSANWNKFERNNTDTFNFP

SEQ ID NO: 85901 - protein, 211 aa, Homo sapiens
  MOD_RES (1)..(1): Any amino acid
XLLGLTQSQDIQLLVFVLILIFYLIILPGNFLIIFTIRSDPGLTAPLYFFLGNLAFLDASYSFIVAPRMLVDFFSEKKVIKLACTDMFVVELLMVFNSGLMTLLCFLGLLASYAVILCHVRRAASEGKNKAMSMCTTRVIIILLMFGPAIFIYMCPFRALPADKMVSLFHTVIFPLMNPMIYTLRNQEVKTSMKRLLSRHVVCQVDFIIRN

SEQ ID NO: 85902 - protein, 104 aa, Homo sapiens
  MOD_RES (1)..(1): Any amino acid
XAQGQSEPVPSLTSIQVLENSMSITSQYCAPGDACRPGNFTYHIPVSSGTPLHLSLTLQMNSSSPVSVVLCSLRSKEEPCEEGSLPQSLHTHQDTQTPGLRRPW

SEQ ID NO: 85903 - protein, 261 aa, Homo sapiens; identical to SEQ ID NO: 83244
  MOD_RES (1)..(1): Any amino acid

SEQ ID NO: 85904 - protein, 81 aa, Homo sapiens
  MOD_RES (1)..(1): Any amino acid
XKSSKPRQQSILQNLCWWNSLGHQGVSFLWCNQQVFQYESHRNQDKIKLYLGLCSYIRPFQSANRWKDHIFLTRKNTKNRL

SEQ ID NO: 85905 - protein, 547 aa, Homo sapiens
MTVLEITLAVILTLLGLAILAILLTRWARRKQSEMYISRYSSEQSARLLDYEDGRGSRHAYSTQSERSKRDYTPSTNSLALSRSSIALPQGSMSSIKCLQTTEEPPSRTAGAMMQFTAPIPGATGPIKLSQKTIVQTLGPIVQYPGSNAGPPSAPRGPPMAPIIISQRTASQLAAPIRIPQVHTMDSSGKITLTPVVILTGYMDEELAKKSCSKIQILKCGGTARSQNSREENKEALKNDIIFTNSVESLKSAHIKEPEREGKGTDLEKDKIGMEVKVDSDAGIPKRQETQLKISEMSIPQGQGAQIKKSVSDVPRGQESQVKKSESGVPKGQEAQVTKSGLVVLKGQEAQVEKSEMGVPRRQESQVKKSQSGVSKGQEAQVKKRESVVLKGQEAQVEKSELKVPKGQEGQVEKTEADVPKEQEVQEKKSEAGVLKGPESQVKNTEVSVPETLESQVKKSESGVLKGQEAQEKKESFEDKGNNDKEKERDAEKDPNKKEKGDKNTKGDKGKDKVKGKRESEINGEKSKGSKRAKANTGRKYNKKVEE

SEQ ID NO: 85906 - protein, 121 aa, Homo sapiens
MCGKHWCGTSPLMSPLKAPTPTAGHRSCSACMDQMCSGTMWFEAMGPCTCPSHLAGTKGPSPCLSQNLRLNCRSLQAGSWGGGPSTQTPRWWLRVKAGKSSHLQGCLSKIAVFQDESGLSP

SEQ ID NO: 85907 - protein, 134 aa, Homo sapiens
  MOD_RES (1)..(1): Any amino acid
XAWLAGVLTTGELFLWNKDQDCLKTIPITEKPKEMIKATVASSLRLYLYVSGNGKRIVLITPSGCIFLWEYLELKNILSSKSLSLAGRWSQVIPEEAVLLPSTEDKEAVVNAVFIKNEIIAIPCSLGSTRLSSL

SEQ ID NO: 85908 - protein, 196 aa, Homo sapiens
  MOD_RES (1)..(1): Any amino acid
XAGNRESGSREPGLAAAAMSTVDLARVGACILKHAVTGEAVELRSLWREHACVVAGLRRFGCVVCRWIAQDLSSLAGLLDQHGVRLVGVGPEALGLQEFLDGDYFAGELYLDESKQLYKELGFKRYNSLSILPAALGKPVRDVAAKAVPTPDRPRLLASRGTCLGTCCRAEGCWWSAKVVIKCSCISSRSPQATTS

SEQ ID NO: 85909 - protein, 40 aa, Homo sapiens
  MOD_RES (1)..(1): Any amino acid
XKAEGKATSTTELPPEYLTSPLSQQSQNSSAPLAEDIDPE

SEQ ID NO: 85910 - protein, 64 aa, Homo sapiens
VKHLKKDTSLALVDYISFHGLSIYIFPNCPFLEPTNSRESLGIWASPRSSATRPTSLESVRRHP

SEQ ID NO: 85911 - protein, 105 aa, Homo sapiens
MIQAIQVLRFHLLELEKVHELCDNFCHRYISCLKGKMPIDLVIDERDGSSKSDHEELSGSSTNLADHNPSSWRDHDDATSTHSAGTPGPSSGGHASQSGDNSSEQ

SEQ ID NO: 85912 - protein, 482 aa, Homo sapiens
VEYHTFFRLLDQPKPKAKAVFFSRGSSFRYSGRTQKQLVDYFKDSGMKRIPYERRHSKTHTSVRALTADLPKQSISFPEGLRTPASPSSANAFYSLSPSTLVPSGLPEFKDSSSSLTDPQVSYVKSPAAERRSGAVAGGPDTPSAQPLGPPALQPGPGVGFCHVVSSCGSVCAGGQSFSALDLDTGRAGRELSAACKNDNGGDDFTTGSFPSGGEHRCDRQCRGGAPAFTLTNAQLQVSEEFIDDDPADISFFAGGSEAFSFPYGSVVPQESQASAQPLVAPPLCELPGSARSSPDRYSMEAVDMNTEDGFAFEEESDFNGNAHPSDTSELFEVKAQASRMQRLLGPSETSSLRNSQSENSSLNNMPLRGGLSVHTCSSASQSEASSMVNFPAYSVRSESSSAFQFSDIIDQLEQLSYPPTTAEDSSSTESDSWDSETEAPLDISLFFSNPFAHTSGERVPFDLQNNLKNLTPGEQIDKNPS

SEQ ID NO: 85913 - protein, 220 aa, Homo sapiens
MNSQPQTRSPPSRTVPIHCTDNWKRRKVLEQTPVYRSLAGRGWIKYCIFFQRPQIQPPRATIPNSSPSIRPGAQTPTAVYQANQHIMMVNHLPMPYPVPQGPQYCIPQYRHSGPPYVGPPQQYPVQPPGPGPFYPGPGPGDFPNAYGTPFYPSQPVYQSAPIIVPTQQQPPPAKREKKTIRIRDPNQGGKDITEEIMSGGGSRNPTPPIGRPTSTPTPPQ

SEQ ID NO: 85914 - protein, 219 aa, Homo sapiens
MNVHRRCETNVAPNCGVDARGIAKVLADLGVTPDKITNSGQRRKKLIAGAESPQPASGSSPSEEDRSKSAPTSPCDQEIKELENNIRKALSFDNRGEEHRAASSPDGQLMSPGENGEVRQGQAKRLGLDEFNFIKVLGKGSFGKVMLAELKGKDEVYAVKVLKKDVILQDDDVDCTMTEKRILALARKHPYLTQLYCCFQTKGTGFSIQGCACEGMREL

SEQ ID NO: 85915 - protein, 162 aa, Homo sapiens
MVPSCCFFRCRKQKDNRYQPNKDVVEQMEKCIQEKDEKLKTVEELLETGLIQAIRTENSSLTKEVQDLKAKQNDQVSFASLVEELKKVIHEKDGKIKSVEELLEAELLKVANKEKTVQDLKQEIKALKEEIGNVQLEKAQQLSITSKVQELQNLLKGKEEQM

SEQ ID NO: 85916 - protein, 81 aa, Homo sapiens
MPEIRVTPLGAGQDVGRSCILVSIAGKNVMLDCGMHMGFNDDRRFPDFSYITQNGRLTDFLDCVIIRPSAPSCWRTTARSP

SEQ ID NO: 85917 - protein, 434 aa, Homo sapiens
MNSHSYNGSVGRPLGSGPGALGRDPPDPEAGHPPQPPHSPGLQVVVAKSEPARPSPGSPRGQPQDQDDDEDDEEDEAGRQRASGKPSNVGHRLGHRRALFEKRKRLSDYALIFGMFGIVVMVTETELSWGVYTKESLYSFALKCLISLSTAILLGLVVLYHAREIQLFMVDNGADDWRIAMTCERVFLISLELAVCAIHPVPGHYRFTWTARLAFTYAPSVAEADVDVLLSIPMFLRLYLLGRVMLLHSKIFTDASSRSIGALNKITFNTRFVMKTLMTICPGTVLLVFSISSWIIAAWTVRVCERENMYHDKQEVTSNFLGAMWLISITFLSIGYGDMVPHTYCGKGVCLLTGIMGAGCTALVVAVVARKLELTKAEKHVHNFMMDTQLTKRVKNAAANVLRETWLIYKHTRLVKKPDQARVRKHQRLRSSGV

SEQ ID NO: 85918 - protein, 199 aa, Homo sapiens
  MOD_RES (1)..(1): Any amino acid
XFGKSHRDPYATSVGHLIEKATFAGVQTEDWGQFMHICDIINTTQDGPKDAVKALKKRISKNYNHKEIQLTLSLIDMCVQNCGPSFQSLIVKKEFVKENLVKLLNPRYNLPLDIQNRILNFIKTWSQGFPGGVDVSEVKEVYLDLVKKGVQFPPSEAEAETARQEIGKLHSELDMVKMNVRVMSAILMENTPGSENHED

SEQ ID NO: 85919 - protein, 39 aa, Homo sapiens
MAFTFAAFCYMLTLVLCASLIFFVIWHEKHHLDLSCDCQ

SEQ ID NO: 85920 - protein, 262 aa, Homo sapiens
MATQAKRPRVAGPVDGGDLDPVACFLSWCRRVGLELSPKVAVSRQGTVAGYGMVARESVQAGELLFVVPRAALLSQHTCSIGGLLERERVALQSQSGWVPLLLALLHELQAPASRWRPYFALWPELGRLEHPMFWPEEERRCLLQGTGVPEAVEKDLANIRSEYQSIVLPFMEAHPDLFSLRVRSLELYHQLVALVMAYSFQEPLEEEEDEKEPNSPVMVPAADILNHLANHNANLEYSAAWPQLLPFTSELSSDGSHSAHS

SEQ ID NO: 85921 - protein, 55 aa, Homo sapiens
MLDDNRLSNPSCFASLAGLRRLKKLSLDENRIIRIPYLQQVQLYDESVDWNGGRG

SEQ ID NO: 85922 - protein, 222 aa, Homo sapiens
  MOD_RES (1)..(1): Any amino acid
XVVWVEESDKRSFLLDLLNATGKDSLTLVFVETKKGADSLEDFLYHEGYACTSIHGDRSQRDREEALHQFRSGKSPILVATAVAARGLDISNVKHVINFDLPSDIEEYVHRIGRTGRVGNLGLATSFFNERNINITKDLLDLLVEAKQEVPSWLENMAYEHHYKGSSRGRSKSRFSGGFGARDYRQSSGASSSSFSSSRASSSRSGGGGHGSSRGFGGELGA

SEQ ID NO: 85923 - protein, 192 aa, Homo sapiens
  MOD_RES (1)..(1): Any amino acid
XSVVIVDVKEPSPRVDVSCEPLEGVEKCSDSQSWEDIAPEIEPCAENRLDTKEEKSVEYEGDLKSGTAETEPVEQDSSQPSLPLVRADDPLRLDQELQQPQTQEKTSNSLTEDSKMANAKQLSSDAEAQKLGKPSAHASQSFCESSSETPFHFTLPKEGDIIPPLTGATPPLIGHLKLEPKRHSTPIVSAGR

SEQ ID NO: 85924 - protein, 796 aa, Homo sapiens
MSTRTPLPTVNERDTENHTSHGDGRQEVTSRTSRSGARCRNSIASCADEQPHIGNYRLLKTIGKGNFAKVKLARHILTGREVAIKIIDKTQLNPTSLQKLFREVRIMKILNHPNIVKLFEVIETEKTLYLIMEYASGGEVFDYLVAHGRMKEKEARSKFRQIVSAVQYCHQKRIVHRDLKAENLLLDADMNIKIADFGFSNEFTVGGKLDTFCGSPPYAAPELFQGKKYDGPEVDVWSLGVILYTLVSGSLPFDGQNLKELRERVLRGKYRIPFYMSTDCENLLKRFLVLNPIKRGTLEQIMKDRWINAGHEEDELKPFVEPELDISDQKRIDIMVGMGYSQEEIQESLSKMKYDEITATYLLLGRKSSELDASDSSSSSNLSLAKVRPSSDLNNSTGQSPHHKVQRSVSSSQKQRRYSDHAGPAIPSVVAYPKRSQTSTADSDLKEDGISSRKSSGSAVGGKGIAPASPMLGNASNPNKADIPERKKSSTVPSSNTASGGMTRRNTYVCSERTTADRHSVIQNGKENSLTEMFAYAASPASVCTSTCRLRHQKSMSMSASGHPKMMLPPIDSEGDNFKAITIPDQRTPVASTHSISSAATPDRIRFPRGTASRSTFHGQPRERRTATYNGPPASPSLSHEATPLSQTRSRGSTNLFSKLTSKLTRRLPTEYERNGRYEGSSRNVSAEQKDENKEAKPRSLRFTWSMKTTSSMDPGDMMREIRKVLDANNCDYEQRERFLLFCVHGDGHAENLVQWEMEVCKLPRLSLNGVRFKRISGTSIAFKNIASKIANELKL

SEQ ID NO: 85925 - protein, 203 aa, Homo sapiens
MAVAGPAPGAGARPRLDLQFLQRFLQILKVLFPSWSSQNALMFLTLLCLTLLEQFVIYQVGLIPSQYYGVLGNKDLEGFKTLTFLAVMLIVLNSTLKSFDQFTCNLLYVSWRKDLTEHLHRLYFRGRAYYTLNVLRDDIDNPDQRISQDVERFCRQLSSMASKLIISPFTLVYYTYQCFQRFKHMQIRVNAEPAAFYSRHQHL

SEQ ID NO: 85926 - protein, 508 aa, Homo sapiens
MREPEELMPDSGAVFTFGKSKFAENNPGKFWFKNDVPVHLSCGDEHSAVVTGNNKLYMFGSNNWGQLGLGSKSAISKPTCVKALKPEKVKLAACGRNHTLVSTEGGNVYATGGNNEGQLGLGDTEERNTFHVISFFTSEHKIKQLSAGSNTSAALTEDGRLFMWGDNSEGQIGLKNVSNVCVPQQVTIGKPVSWISCGYYHSAFVTTDGELYVFGEPENGKLGLPNQLLGNHRTPQLVSEIPEKVIQVACGGEHTVVLTENAVYTFGLGQFGQLGLGTFLFETSEPKVIENIRDQTISYISCGENHTALITVLLDLLSMQSLCRLKPEVPKDIGLMYTFGDGRHGKLGLGLENFTNHFIPTLCSNFLRFIVKLVACGGCHMVVFAAPHRGVAKEIEFDEINDTCLSVATFLPYSSLTSGNVLQRTLSARMRRRERERSPDSFSMRRTLPPIEGTLGLSACFLPNSVFPRCSERNLQESVLSEQDLMQPEEPDMRFHRVSQDGLDLLTL

SEQ ID NO: 85927 - protein, 124 aa, Homo sapiens
MQSNKTFNLEKQNHTPRKHHQHHHQQQHHQQQQQQPPPPPIPANGQQASSQNEGLTIDLKNFRKPGEKTFTQRSRLFVGNLPPDITEEEMRKLFEKYGKETRTLAEIAKVELDNMPLRGKQLRV

SEQ ID NO: 85928 - protein, 153 aa, Homo sapiens
  MOD_RES (1)..(1): Any amino acid
XSDMFNYEEYCTANAVTGPCRASFPRWYFDVERNSCNNFIYGGCRGNKNSYRSEEACMLRCFRQQENPPLPLGSKALEPTSQKPGVGAGHGGDPKLSPHKVQGRSEAGAGPGPKASNFRGLGKGRRLTAAPPSSKDTTALPTPAAAPAIRTRM

SEQ ID NO: 85929 - protein, 166 aa, Homo sapiens
  MOD_RES (1)..(1): Any amino acid
XLPGRLSRALSLGTIPSLTRADSGYLFSGSRPPSQVSRSGEFPVSDYFSLLSGSCPSSPLPSPAPSVAGSVASSSGSLRHRRPLISPARLNLKGQKLLLFPSPPGEAPTTPSSSDEHSPHNGSLFTMEPPHVPRKPPLQDVKHALVDLQGPLFLGTDRKHITHCQT

SEQ ID NO: 85930 - protein, 164 aa, Homo sapiens
  MOD_RES (1)..(1): Any amino acid
XNFRTFLQALMLLFRSATGEAWHEIMLSCLSNQACDEQANATECGSDFAYFYFVSFIFLCSFLMLNLFVAVIMDNFEYLTRDSSILGPHHLDEFIRVWAEYDPAACCRIHYKDMYSLLRCIAPPVGLGKNCPRRLAYKRLVRMNMPISNEDMTVHFTSTLMALI

SEQ ID NO: 85931 - protein, 3773 aa, Homo sapiens
MEDEERQKKLEAGKAKLAQFRQRKAQSDGQSPSKKQKKKRKTSSSKHDVSAHHDLNIDQSQCNEMYINSSQRVESTVIPESTIMRTLHSGEITSHEQGFSVELESEISTTADDCSSEVNGCSFVMRTGKPTNLLREEEFGVDDSYSEQGAQDSPTHLEMMESELAGKQHEIEELNRELEEMRVTYGTEGLQQLQEFEAAIKQRDGIITQLTANLQQARREKDETMREFLELTEQSQKLQIQFQQLQASETLRNSTHSSTAADLLQAKQQILTHQQQLEEQDHLLEDYQKKKEDFTMQISFLQEKIKVYEMEQDKKVENSNKEEIQEKETIIEELNTKIIEEEKKTLELKDKLTTADKLLGELQEQIVQKNQEIKNMKLELTNSKQKERQSSEEIKQLMGTVEELQKRNHKDSQFETDIVQRMEQETQRKLEQLRAELDEMYGQQIVQMKQELIRQHMAQMEEMKTRHKGEMENALRSYSNITVNEDQIKLMNVAINELNIKLQDTNSQKEKLKEELGLILEEKCALQRQLEDLVEELSFSREQIQRARQTIAEQESKLNEAHKSLSTVEDLKAEIVSASESRKELELKHEAEVTNYKIKLEMLEKEKNAVLDRMAESQEAELERLRTQLLFSHEEELSKLKEDLEIEHRINIEKLKDNLGIHYKQQIDGLQNEMSQKIETMQFEKDNLITKQNQLILEISKLKDLQQSLVNSKSEEMTLQINELQKEIEILRQEEKEKGTLEQEVQELQLKTELLEKQMKEKENDLQEKFAQLEAENSILKDEKKTLEDMLKIHTPVSQEERLIFLDSIKSKSKDSVWEKEIEILIEENEDLKQQCIQLNEEIEKQRNTFSFAEKNFEVNYQELQEEYACLLKVKDDLEDSKNKQELEYKSKLKALNEELHLQRINPTTVKMKSSVFDEDKTFVAETLEMGEVVEKDTTELMEKLEVTKREKLELSQRLSDLSEQLKQKHGEISFLNEEVKSLKQEKEQVSLRCRELEIIINHNRAENVQSCDTQVSSLLDGVVTMTSRGAEGSVSKVNKSFGEESKIMVEDKVSFENMTVGEESKQEQLILDHLPSVTKESSLRATQPSENDKLQKELNVLKSEQNDLRLQMEAQRICLSLVYSTHVDQVREYMENEKDKALCSLKEELIFAQEEKIKELQKIHQLELQTMKTQETGDEGKPLHLLIGKLQKAVSEECSYFLQTLCSVLGEYYTPALKCEVNAEDKENSGDYISENEDPELQDYRYEVQDFQENMHTLLNKVTEEYNKLLVLQTRLSKIWGQQTDGMKLEFGEENLPKEETEFLSIHSQMTNLEDIDVNHKSKLSSLQDLEKTKLEEQVQELESLISSLQQQLKETEQNYEAEIHCLQKRLQAVSESTVPPSLPVDSVVITESDAQRTMYPGSCVKKNIDGTIEFSGEFGVKEETNIVKLLEKQYQEQLEEEVAKVIVSMSIAFAQQTELSRISGGKENTASSKQAHAVCQQEQHYFNEMKLSQDQIGFQTFETVDVKFKEEFKPLSKELGEHGKEILLSNSDPHDIPESKDCVLTISEEMFSKDKTFIVRQSIHDEISVSSMDASRQLMLNEEQLEDMRQELVRQYQEHQQATELLRQAHMRQMERQREDQEQLQEEIKRLNRQLAQRSSIDNENLVSERERVLLEELEALKQLSLAGREKLCCELRNSSTQTQNGNENQGEVEEQTFKEKELDRKPEDVPPEILSNERYALQKANNRLLKILLEVVKTTAAVEETIGRHVLGILDRSSKSQSSASLIWRSEAEASVKSCVHEEHTRVTDESIPSYSGSDMPRNDINMWSKVTEEGTELSQRLVRSGFAGTEIDPENEELMLNISSRLQAAVEKLLEAISETSSQLEHAKVTQTELMRESFRQKQEATESLKCQEELRERLHEESRAREQLAVELSKAEGVIDGYADEKTLFERQIQEKTDIIDRLEQELLCASNRLQELEAEQQQIQEERELLSRQKEAMKAEAGPVEQQLLQETEKLMKEKLEVQCQAEKVRDDLQKQVKALEIDVEEQVSRFIELEQEKNTELMDLRQQNQALEKQLEKMRKFLDEQAIDREHERDVFQQEIQKLEQQLKVVPRFQPISEHQTREVEQLANHLKEKTDKCSELLLSKEQLQRDIQERNEEIEKLEFRVRELEQALLVEDRKHFGAVEAKPELSLEVQLQAERDAIDRKEKEITNLEEQLEQFREELENKNEEVQQLHMQLEIQKKESTTRLQELEQENKLFKDDMEKLGLAIKESDAMSTQDQHVLFGKFAQIIQEKEVEIDQLNEQVTKLQQQLKITTDNKVIEEKNELIRDLETQIECLMSDQECVKRNREEEIEQLNEVIEKLQQELANIGQKTSMNAHSLSEEADSLKHQLDVVIAEKLALEQQVETANEEMTFMKNVLKETNFKMNQLTQELFSLKRERESVEKIQSIPENSVNVAIDHLSKDKPELEVVLTEDALKSLENQTYFKSFEENGKGSIINLETRLLQLESTVSAKDLELTQCYKQIKDMQEQGQFETEMLQKKIVNLQKIVEEKVAAALVSQIQLEAVQEYAKFCQDNQTISSEPERTNIQNLNQLREDELGSDISALTLRISELESQVVEMHTSLILEKEQVEIAEKNVLEKEKKLLELQKLLEGNEKKQREKEKKRSPQDVEVLKTTTELFHSNEESGFFNELEALRAESVATKAELASYKEKAEKLQEELLVKETNMTSLQKDLSQVRDHLAEAKEKLSILEKEDETEVQESKKACMFEPLPIKLSKSIASQTDGTLKISSSNQTPQILVKNAGIQINLQSECSSEEVTEIISQFTEKIEKMQELHAAEILDMESRHISETETLKREHYVAVQLLKEECGTLKAVIQCLRSKEGSSIPELAHSDAYQTREICSSDSGSDWGQGIYLTHSQGFDIASEGRGEESESATDSFPKKIKGLLRAVHNEGMQVLSLTESPYSDGEDHSIQQVSEPWLEERKAYINTISSLKDLITKMQLQREAEVYDSSQSHESFSDWRGELLLALQQVFLEERSVLLAAFRTELTALGTTDAVGLLNCLEQRIQEQGVEYQAAMECLQKADRRSLLSEIQALHAQMNGRKITLKREQESEKPSQELLEYNIQQKQSQMLEMQVELSSMKDRATELQEQLSSEKMVVAELKSELAQTKLELETTLKAQHKHLKELEAFRLEVKDKTDEVHLLNDTLASEQKKSRELQWALEKEKAKLGRSEERDKEELEDLKFSLESQKQRNLQLNLLLEQQKQLLNESQQKIESQRMLYDAQLSEEQGRNLELQVLLESEKVRIREMSSTLDRERELHAQLQSSDGTGQSRPPLPSEDLLKELQKQLEEKHSRIVELLNETEKYKLDSLQTRQQMEKDRQVHRKTLQTEQEANTEGQKKMHELQSKVEDLQRQLEEKRQQVYKLDLEGQRLQGIMQEFQKQELEREEKRESRRILYQNLNEPTTWSLTSDRTRNWVLQQKIEGETKESNYAKLIEMNGGGTGCNHELEMIRQKLQCVASKLQVLPQKASERLQFETADDEDFIWVQENIDEIILQLQKLTGQQGEEPSLVSPSTSCGSLTERLLRQNAELTGHISQLTEEKNDLRNMVMKLEEQIRWYRQTGAGRDNSSRFSLNGGANIEAIIASEKEVWNREKLTLQKSLKRAEAEVYKLKAELRNDSLLQTLSPDSEHVTLKRIYGKYLRAESFRKALIYQKKYLLLLLGGFQECEDATLALLARMGGQPAFTDLEVITNRPKGFTRFRSAVRVSIAISRCRKD

SEQ ID NO: 85932 - protein, 168 aa, Homo sapiens
MIPTLTALLCLGLSLGPRTHMQAGPLPKPTLWAEPGSVISWGNSVTIWCQGTLEAREYRLDKEESPAPWDRQNPLEPKNKARFSIPSMTEDYAGRYRCYYRSPVGWSQPSDPLELVMTGAYSKPTLSALPSPLVTSGKSVTLLCQSRSPMDTFLLIKERAAHPLLHLR

SEQ ID NO: 85933 - protein, 237 aa, Homo sapiens
MVESLHGLDSRKGVLCLPDSLNLHRDPQRSNKPGELPMFSQSELRTIEQSLLATRVGSIAELSDLVSRAMHHLQPLNAKHHGNGTPLHHKQGALYWEPEALYTLCYFMHCPQMEWENPNVEPSKVNLQVERPFLVLPPLMEWIRVAVAHAGHRRSFSMDSDDVRQAARLLLPGVDCEPRQLRADDCFCASRKLDAVAIEAKFKQDLGFRMLNCGRTDLVKQAVSLLGPDGINTMSEQ

SEQ ID NO: 85934 - protein, 133 aa, Homo sapiens
MAGQGLPLHVATLLTGLLECLGFAGVLFGWPSLVFVFKNEDYFKDLCGPDAGPIGNATGQAGRLGCMGDLFSTPDCKAQDERFSLIFTLGSFMNNFMTFPTGYIFDRFKTTVARLIAIFFYTTATLIIAFTSA

SEQ ID NO: 85935 - protein, 27 aa, Homo sapiens
MAPLPGAELVRRPLQLYRYLLRCCQQL

SEQ ID NO: 85936 - protein, 621 aa, Homo sapiens
MSTRTPLPTVNERDTENHTSHGDGRQEVTSRTSRSGARCRNSIASCADEQPHIGNYRLLKTIGKGNFAKVKLARHILTGREVAIKIIDKTQLNPTSLQKLFREVRIMKILNHPNIVKLFEVIETEKTLYLIMEYASGGEVFDYLVAHGRMKEKEARSKFRQIVSAVQYCHQKRIVHRDLKAENLLLDADMNIKIADFGFSNEFTVGGKLDTFCGSPPYAAPELFQGKKYDGPEVDVWSLGVILYTLVSGSLPFDGQNLKELRERVLRGKYRIPFYMSTDCENLLKRFLVLNPIKRGTLEQIMKDRWINAGHEEDELKPFVEPELDISDQKRIDIMVGMGYSQEEIQESLSKMKYDEITATYLLLGRKSSELDASDSSSSSNLSLAKVRPSSDLNNSTGQSPHHKVQRSVSSSQKQRRYSDHAGPAIPSVVAYPKRSQTSTADSDLKEDGISSRKSSGSAVGGKGIAPASPMLGNASNPNKADIPERKKSSTVPSSNTASGGMTRRNTYVCSERTTADRHSVIQNGKENSTIPDQRTPVASTHSISSAATPDRIRFPRGTASRSTFHGQPRERRTATYNGPPASPSLSHEATPLSQTRSRGSTNLFSKLTSKLTRSMLLFEE

SEQ ID NO: 85937 - protein, 72 aa, Homo sapiens
  MOD_RES (1)..(1): Any amino acid
XENPAQLMRCGPALVSAGLGRPTRWPLCCWTWPWASCCCPGSTGEAASGIWPTPSFLWLTTWPRSSSICCSG

SEQ ID NO: 85938 - protein, 172 aa, Homo sapiens
  MOD_RES (1)..(1): Any amino acid
XTWFQGRGKRSPRAEVSRPEPGAPLLGCWLQWGAPSPGPLCLLFRLCSCTCFAPLPAGADMDPNPRAALERQQLRLRERQKFFEDILQPETEFVFPLSHLHLESQRPPIGSISSMEVNVDTLEQVELIDLGDPDAADVFLPCEDPPPTPQSSGMPLCFGDFSASQPEPDVRL

SEQ ID NO: 85939 - protein, 232 aa, Homo sapiens
HIVKEESDTEAELALAASQPARLEERLIRDQDLGASLLPAAPQEQWRQLDSTQKEQYWDLMLETYGKMVSGGDRQENDKENLNLENHRDQELLHASCQASGEVPSQASLRGFFTEDEPGCFGEGENLPEALQNIQDEGTGEQLSPQERISEKQLGQHLPNPHSGEMSTMWLEEKRETSQKGQPRAPMAQKLPTCRECGKTFYRNSQLIFHQRTHTGETYFQCTICKKAFLRS

SEQ ID NO: 85940 - protein, 61 aa, Homo sapiens
MGTGPGVSGRLAASRPGPGLPLRDSEPSWAGGRARDGDSQNFIVNQICSTKSETTWFRSWG

SEQ ID NO: 85941 - protein, 9 aa, Homo sapiens
MDASERGRL

SEQ ID NO: 85942 - protein, 141 aa, Homo sapiens
MEPGSVENLSIVYRSRDFLVVNKHWDVRIDSKAWRETLTLQKQLRYRFPELADPDTCYGFRFCHQLDFSTSGALCVALNKAAAGSAYRCFKERRVTKAYLALVRPAAGAHPGEPGNHQPCHWQEQHGGPGPHHVHRGLAGL

SEQ ID NO: 85943 - protein, 130 aa, Homo sapiens
MAKPSHSSYVLQQLNNQREWGFLCDCCIAIDDIYFQAHKAVLAACSSYFRMFFMNHQHSTAQLNLSNMKISAECFDLILQFMYLGKIMTAPSSFEQFKVAMNYLQLYNVPDCLEDIQDADCSSSKCSSSA

SEQ ID NO: 85944 - protein, 434 aa, Homo sapiens
  MOD_RES (424)..(424): Any amino acid
MAGKRSGWSRAALLQLLLGVNLVVMPPTRARSLRFVTLLYRHGDRSPVKTYPKDPYQEEEWPQGFGQLTKEGMLQHWELGQALRQRYHGFLNTSYHRQEVYVRSTDFDRTLMSAEANLAGLFPPNGMQRFNPNISWQPIPVHTVPITEDRLLKFPLGPCPRYEQLQNETRQTPEYQNESSRNAQFLDMVANETGLTDLTLETVWNVYDTLFCEQTHGLRLPPWASPQTMQRLSRLKDFSFRFLFGIYQQAEKARLQGGVLLAQIRKNLTLMATTSQLPKLLVYSAHDTTLVALQMALDVYNGEQAPYASCHIFELYQEDSGNFSVEMYFRNESDKAPWPLSLPGCPHRCPLQDFLRLTEPVVPKDWQQECQLASGPADTEVIVALAVCGSILFLLIVLLLTVLFRMQAQPPGYRHVADGEDHAXQPLSPLPSTS

SEQ ID NO: 85945 - protein, 1083 aa, Homo sapiens
MDGKRRPGPGPGVPPKRARGGLWDDDDAPRPSQFEEDLALMEEMEAEHRLQEQEEEELQSVLEGVADGQVPPSAIDPRWLRPTPPALDPQTEPLIFQQLEIDHYVGPAQPVPGGPPPSRGSVPVLRAFGVTDEGFSVCCHIHGFAPYFYTPAPPGFGPEHMGDLQRELNLAISRDSRGGRELTGPAVLAVELCSRESMFGYHGHGPSPFLRITVALPRLVAPARRLLEQGIRVAGLGTPSFAPYEANVDFEIRFMVDTDIVGCNWLELPAGKYALRLKEKATQCQLEADVLWSDVVSHPPEGPWQRIAPLRVLSFDIECAGRKGIFPEPERDPVIQICSLGLRWGEPEPFLRLALTLRPCAPILGAKVQSYEKEEDLLQAWSTFIRIMDPDVITGYNIQNFDLPYLISRAQTLKVQTFPFLGRVAGLCSNIRDSSFQSKQTGRRDTKVVSMVGRVQMDMLQVLLREYKLRSYTLNAVSFHFLGEQKEDVQHSIITDLQNGNDQTRRRLAVYCLKDAYLPLRLLERLMVLVNAVEMARVTGVPLSYLLSRGQQVKVVSQLLRQAMHEGLLMPVVKSEGGEDYTGATVIEPLKGYYDVPIATLDFSSLYPSIMMAHNLCYTTLLRPGTAQKLGLTEDQFIRTPTGDEFVKTSVRKGLLPQILENLLSARKRAKAELAKETDPLRRQVLDGRQLALKSVTGFGRQMIEKTKQLVESKYTVENGYSTSAKVVYGDTDSVMCRFGVSSVAEAMALGREAADWVSGHFPSPIRLEFEKVYFPYLLISKKRYAGLLFSSRPDAHDRMDCKGLEAVRRDNCPLVANLVTASLRRLLIDRDPEGAVAHAQDVISDLLCNRIDISQLVITKELTRAASDYAGKQAHVELAERMRKRDPGSAPSLGDRVPYVIISAAKGVAAYMKSEDPLFVLEHSLPIDTQYYLEQQLAKPLLRIFEPILGEGRAEAVLLRGDHTRCKTVLTGKVGGLLAFAKRRNCCIGCRTVLSHQGAVCEFCQPRESELYQKEVSHLNALEERFSRLWTQCQRCQGSLHEDVICTSRDCPIFYMRKKVRKDLEDQEQLLRRFGPPGPEAW

SEQ ID NO: 85946 - protein, 272 aa, Homo sapiens
MSPKRIAKRRSPPADAIPKSKKVKVSHRSHSTEPGLVLTLGQGDVGQLGLGENVMERKKPALVSIPEDVVQAEAGGMHTVCLSKSGQVYSFGCNDEGALGRDTSVEGSEMVPGKVELQEKVVQVSAGDSHTAALTDDGRVFLWGSFRDNNGVIGLLEPMKKSMVPVQVQLDVPVVKVASGNDHLVMLTADGDLYTLGCGEQGQLGRVPELFANRGGRQGLERLLVPKCVMLKSRGSRGHVRFQDAFCGAYFTFAISHEGHVYGFGLSNYHQL

SEQ ID NO: 85947 - protein, 1311 aa, Homo sapiens
  MOD_RES (1)..(1): Any amino acid
XREIVTRNLSQPESPVLLPATEMASLLSLQEENQLLQQELSRVEDLLAQSRAERDELAIKYNAVSERDTEHSQDLESALIRLEEEQQRSASLAQVNAMLREQLDQAGSANQALSEDIRKVTNDWTRCRKELEHREAAWRREEESFNAYFSNEHSRLLLLWRQVVGFRRLVSEVKMFTERDLLQLGGELARTSRAVQEAGLGLSTGLRLAESRAEAALEKQALLQAQLEEQLRDKVLREKDLAQQQMQSDLDKADLSARVTELGLAVKRLEKQNLEKDQVNKDLTEKLEALESLRLQEQAALETEDGEGLQQTLRDLAQAVLSDSESGVQLSGSERTADASNGSLRGLSGQRTPSPPRRSSPGRGRSPRRGPSPACSDSSTLALIHSALHKRQLQVQDMRGRYEASQDLLGTLRKQLSDSESERRALEEQLQRLRDKTDGAMQAHEDAQREVQRLRSANELLSREKSNLAHSLQVAQQQAEELRQEREKLQAAQEELRRQRDRLEEEQEDAVQDGARVRRELERSHRQLEQLEGKRSVLAKELVEVREALSRATLQRDMLQAEKAEVAEALTKAEAGRVELELSMTKLRAEEASLQDSLSKLSALNESLAQDKLDLNRLVAQLEEEKSALQGRQRQAEQEATVAREEQERLEELRLEQEVARQGLEGSLRVAEQAQEALEQQLPTLRHERSQLQEQLAQLSRQLSGREQELEQARREAQRQVEALERAAREKEALAKEHAGLAVQLVAAEREGRTLSEEATRLRLEKEALEGSLFEVQRQLAQLEARREQLEAEGQALLLAKETLTGELAGLRQQIIATQEKASLDKELMAQKLVQAEREAQASLREQRAAHEEDLQRLQREKEAAWRELEAERAQLQSQLQREQEELLARLEAEKEELSEEIAALQQERDEGLLLAESEKQQALSLKESEKTALSEKLMGTRHSLATISLEMERQKRDAQSRQEQDRSTVNALTSELRDLRAQREEAAAAHAQEVRRLQEQARDLGKQRDSCLREAEELRTQLRLLEDARDGLRRELLEAQRKLRESQEGREVQRQEAGELRRSLGEGAKEREALRRSNEELRSAVKKAESERISLKLANEDKEQKLALLEEARTAVGKEAGELRTGLQEVERSRLEARRELQELRRQMKMLDSENTRLGRELAELQGRLALGERAEKESRRETLGLRQRLLKGEASLEVMRQELQVAQRKLQEQEGEFRTRERRLLGSLEEARGTEKQQLDHARGLELKLEAARAEAAELGLRLSAAEGRAQGLEAELARVEVQRRAAEAQLGGLRSALRRGLGLGRAPS

SEQ ID NO: 85948 - protein, 133 aa, Homo sapiens
  MOD_RES (1)..(1): Any amino acid
XRAPPPSLPQATAQMEEKLRDFTRAYEPDSVLPLADGVLSFIHHQIIELARDCLTKSRDGLITTVYFYELQENLEKLLQDAYERSESLEVAFVTQLVKKLLIIISRPARLLECLEFNPEEFYHLLEAAEGHAK

SEQ ID NO: 85949 - protein, 2967 aa, Homo sapiens
MASEKPGPGPGLEPQPVGLIAVGAAGGGGGGSGGGGTGGSGMGELRGASGSGSVMLPAGMINPSVPIRNIRMKFAVLIGLIQVGEVSNRDIVETVLNLLVGGEFDLEMNFIIQDAESITCMTELLEHCDVTCQAEIWSMFTAILRKSVRNLQTSTEVGLIEQVLLKMSAVDDMIADLLVDMLGVLASYSITVKELKLLFSMLRGESGIWPRHAVKLLSVLNQMPQRHGPDTFFNFPGCSAAAIALPPIAKWPYQNGFTLNTWFRMDPLNNINVDKDKPYLYCFRTSKGVGYSAHFVGNCLIVTSLKSKGKGFQHCVKYDFQPRKWYMISIVHIYNRWRNSEIRCYVNGQLVSYGDMAWHVNTNDSYDKCFLGSSETADANRVFCGQLGAVYVFSEALNPAQIFAIHQLGPGYKSTFKFKSESDIHLAEHHKQVLYDGKLASSIAFTYNAKATDAQLCLESSPKENASIFVHSPHALMLQDVKAIVTHSIHSAIHSIGGIQVLFPLFAQLDNRQLNDSQVETTVCATLLAFLVELLKSSVAMQEQMLGGKGFLVIGYLLEKSSRVHITRAVLEQFLSFAKYLDGLSHGAPLLKQLCDHILFNPAIWIHTPAKVQLSLYTYLSAEFIGTATIYTTIRRVGTVLQLMHTLKYYYWVINPADSSGITPKGLDGPRPSQKEIISLRAFMLLFLKQLILKDRGVKEDELQSILNYLLTMHEDENIHDVLQLLVALMSEHPASMIPAFDQRNGIRVIYKLLASKSESIWVQALKVLGYFLKHLGHKRKVEIMHTHSLFTLLGERLMLHTNTVTVTTYNTLYEILTEQVCTQVVHKPHPEPDSTVKIQNPMILKVVATLLKNSTPSAELMEVRRLFLSDMIKLFSNSRENRRCLLQCSVWQDWMFSLGYINPKNSEEQKITEMVYNIFRILLYHAIKYEWGGWRVWVDTLSIAHSKVTYEAHKEYLAKMYEEYQRQEEENIKKGKKGNVSTISGLSSQTTGAKGGMEIREIEDLSQSQSPESETDYPVSTDTRDLLMSTKVSDDILGNSDRPGSGVHVEVHDLLVDIKAEKVEATEVKLDDMDLSPETLVGGENGALVEVESLLDNVYSAAVEKLQNNVHGSVGIIKKNEEKDNGPLITLADEKEDLPNSSTSFLFDKIPKQEEKLLPELSSNHIIPNIQDTQVHLGVSDDLGLLAHMTGSVDLTCTSSIIEEKEFKIHTTSDGMSSISERDLASSTKGLEYAEMTATTLETESSSSKIVPNIDAGSIISDTERSDDGKESGKEIRKIQTTTTTQAVQGRSITQQDRDLRVDLGFRGMPMTEEQRRQFSPGPRTTMFRIPEFKWSPMHQRLLTDLLFALETDVHVWRSHSTKSVMDFVNSNENIIFVHNTIHLISQMVDNIIIACGGILPLLSAATSPTGSKTELENIEVTQGMSAETAVTFLSRLMAMVDVLVFASSLNFSEIEAEKNMSSGGLMRQCLRLVCCVAVRNCLECRQRQRDRGNKSSHGSSKPQEVPQSVTATAASKTPLENVPGNLSPIKDPDRLLQDVDINRLRAVVFRDVDDSKQAQFLALAVVYFISVLMVSKYRDILEPQRETTRTGSQPGRNIRQEINSPTSTVVVIPSIPHPSLNHGFLAKLIPEQSFGHSFYKETPAAFPDTIKEKETPTPGEDIQVESSIPHTDSGIGEEQVASILNGAELETSTGPDAMSELLSTLSSEVKKSQESLTENPSETLKPATSISSISQTKGINVKEILKSLVAAPVEIAECGPEPIPYPDPALKRETQAILPMQFHSFDRSVVVPVKKPPPGSLAVTTVGATTAGSGLPTGSTSNIFAATGATPKSMINTTGAVDSGSSSSSSSSSFVNGATSKNLPAVQTVAPMPEDSAENMSITAKLERALEKVAPLLREIFVDFAPFLSRTLLGSHGQELLIEGLVCMKSSTSVVELVMLLCSQEWQNSIQKNAGLAFIELINEGRLLCHAMKDHIVRVANEAEFILNRQRAEDVHKHAEFESQCAQYAADRREEEKMCDHLISAAKHRDHVTANQLKQKILNILTNKHGAWGAVSHSQLHDFWRLDYWEDDLRRRRRFVRNAFGSTHAEALLKAAIEYGTEEDVVKSKKTFRSQAIVNQNAETELMLEGDDDAVSLLQEKEIDNLAGPVVLSTPAQLIAPVVVAKGTLSITTTEIYFEVDEDDSAFKKIDTKVLAYTEGLHGKWMFSEIRAVFSRRYLLQNTALEVFMANRTSVMFNFPDQATVKKVVYSLPRVGVGTSYGLPQARRISLATPRQLYKSSNMTQRWQRREISNFEYLMFLNTIAGRTYNDLNQYPVFPWVLTNYESEELDLTLPGNFRDLSKPIGALNPKRAVFYAERYETWEDDQSPPYHYNTHYSTATSTLSWLVRIEPFTTFFLNANDGKFDHPDRTFSSVARSWRTSQRDTSDVKELIPEFYYLPEMFVNSNGYNLGVREDEVVVNDVDLPPWAKKPEDFVRINRMALESEFVSCQLHQWIDLIFGYKQRGPEAVRALNVFHYLTYEGSVNLDSITDPVLREIPEAYFIRDPHTFLLTKDFIKAMEAQIQNFGQTPSQLLIEPHPPRSSAMHLCFLPQSPLMFKDQMQQDVIMVLKFPSNSPVTHVAANTLPHLTIPAVVTVTCSRLFAVNRWHNTVGLRGAPGYSLDQAHHLPIEMDPLIANNSGVNKRQITDLVDQSIQINAHCFVVTADNRYILICGFWDKSFRVYSTETGKLTQIVFGHWDVVTCLARSESYIGGDCYIVSGSRDATLLLWYWSGRHHIIGDNPNSSDYPAPRAVLTGHDHEVVCVSVCAELGLVISGAKEGPCLVHTITGDLLRALEGPENCLFPRLISVSSEGHCIIYYERGRFSNFSINGKLLAQMEINDSTRAILLSSDGQNLVTGGDNGVVEVWQACDFKQLYIYPGCDAGIRAMDLSHDQRTLITGMASGSIVAFNIDFNRWHYEHQNRY

SEQ ID NO: 85950 - protein, 257 aa, Homo sapiens
MAEKFDCHYCRDPLQGKKYVQKDGHHCCLKCFDKFCANTCVECRKPIGADSKEVHYKNRFWHDTCFRCAKCLHPLANETFVAKDNKILCNKCTTREDSPKCKGCFKAIVAGDQNVEYKGTVWHKDCFTCSNCKQVIGTGSFFPKGEDFYCVTCHETKFAKHCVKCNKAITSGGITYQDQPWHADCFVCVTCSKKLAGQRFTAVEDQYYCVDCYKNFVAKKCAGCKNPITGFGKGSSVVAYEGQSWHDYCFHCKKCSV

SEQ ID NO: 85951 - protein, 241 aa, Homo sapiens
MTSVTRSEIIDEKGPVMSKTHDHQLESSLSPVEVFAKTSASLEMNQGVSEERIHLGSSPKKGGNCDLSHQERLQSKSLHLSPQEQSASYQDRRQSWRRASMKETNRRKSLHPIHQGITELSRSISVDLAESKRLGCLLLSSFQFSIQKLEPFLRDTKGFSLESFRAKASSLSEELKHFADGLETDGTLQKCFEDSNGKASDFSLEASVAEMKEYITKFSLERQTWDQLLLHYQQEAKEILS

SEQ ID NO: 85952 - protein, 250 aa, Homo sapiens
MKLYSLSVLYKGEAKVVLLKAAYDVSSFSFFQRSSVQEFMTFTSQLIVERSSKGTRASVKEQDYLCHVYVRNDSLAGVVIADNEYPSRVAFTLLEKVLDEFSKQVDRIDWPVGSPATIHYPALDGHLSRYQNPREADPMTKVQAELDETKIILGTKLGTSGTLKSPFLMATACLTIYWVPRVWLLKTWIPTLVPLLGFRVPPHPTGASPCSVCIEGEQIEAPCTDHRAASGIWAQGCHIGPFEKSQNPAF

SEQ ID NO: 85953 - protein, 133 aa, Homo sapiens
MAQGFAVGFDPLGLGDLSSGSLSSLSSRGHLGSDSGSTATRYLLRKQQRLLNGPPRGIRASSPMGRVILINSPIEANSDESDIIHSVRVEKSPAGRLGFSVRGGSEHGLGIFVSKVEEGSSAGKQNPQAEVHA

SEQ ID NO: 85954 - protein, 46 aa, Homo sapiens
MISVAFLRVIGDQLEKLCDSLLSGTPPAPQPWYADQRFTLPLLSVL

SEQ ID NO: 85955 - protein, 41 aa, Homo sapiens
MVAGMLGLREEKSEDQDLQGLKDKPLKFKKVKKDKKEEKEG

SEQ ID NO: 85956 - protein, 192 aa, Homo sapiens
MATAATEEPFPFHGLLPKKETGAASFLCRYPEYDGRGVLIAVLDTGVDPGAPGMQVTTDGKPKIVDIIDTTGSGDVNTATEVEPKDGEIVGLSGRVLKIPASWTNPSGKYHIGIKNGYDFYPKALKERIQKERKEKIWDPVHRVALAEACRKQEEFDVANNGSSQAGVQWCDLGSLQPLPSGFKLFSPQPPE

SEQ ID NO: 85957 - protein, 522 aa, Homo sapiens
MEIYSPDMSEVAAERSSSPSTQLSADPSLDGLPAAEDMPEPQTEDGRTPGLVGLAVPCCACLEAERLRGCLNSEKICIVPILACLVSLCLCIAGLKWVFVDKIFEYDSPTHLDPGGLGQDPIISLDATAASAVWVSSEAYTSPVSRAQSESEVQVTVQGDKAVVSFEPSAAPTPKNRIFAFSFLPSTAPSFPSPTRNPEVRTPKSATQPQTTETNLQTAPKLSTSTSTTGTSHLVKCAEKEKTFCVNGGECFMVKDLSNPSRYLCKCPNEFTGDRCQNYVMASFYKHLGIEFMEAEELYQKRVLTITGICIALLVVGIMCVVAYCKTKKQRKKLHDRLRQSLRSERNNMMNIANGPHHPNPPPENVQLVNQYVSKNVISSEHIVEREAETSFSTSHYTSTAHHSTTVTQTPSHSWSNGHTESILSESHSVIVMSSVENSRHSSPTGGPRGRLNGTGGPRECNSFLRHARETPDSYRDSPHSERHNLIAELRRNKAHRSKCMQIQLSATHLRSSSIPHLGFIL

SEQ ID NO: 85958 - protein, 354 aa, Homo sapiens
MVSKSRWKLLAMLALVLVVMVWYSISREDRYIELFYFPIPEKKEPCLQGEAESKASKLFGNYSRDQPIFLRLEDYFWVKTPSAYELPYGTKGSEDLLLRVLAITSSSIPKNIQSLRCRRCVVVGNGHRLRNSSLGDAINKYDVVIRLNNAPVAGYEGDVGSKTTMRLFYPESAHFDPKVENNPDTLLVLVAFKAMDFHWIETILSDKKRVRKGFWKQPPLIWDVNPKQIRILNPFFMEIAADKLLSLPMQQPRKIKQTPTTRSRPFTTMSRSRSSPWRGQAIMSPKRPWPLSGCWRWELSRTSRPSDLGKSCSLSVAYSAVWVTPMRGCGGGWCQYDPLGLTPSWGGSSGPGQV

SEQ ID NO: 85959 - protein, 73 aa, Homo sapiens
  MOD_RES (1)..(1): Any amino acid
XWIEEGQAQGRFGNLIEVYLVSGKNVGYAKYADRISANDAIATLHGKILNGVRLKVMLADSPREESNKRQRTY

SEQ ID NO: 85960 - protein, 128 aa, Homo sapiens
  MOD_RES (1)..(1): Any amino acid
XFISNKYLVKRQSRDYDVEWGYAFDVHLNAFYPLLVILHFIQLFFINHVILTDTFIGYLVGNTLWLVAVGYYIYVTFLGYSVWIPFFSSIAIFEKYSNSSVSICTSDSALRAFPGTGMELHPYSLFFL

SEQ ID NO: 85961 - protein, 78 aa, Homo sapiens
RSENNLQEDLFDQILAGKLEFPAPYWDNITDSAKDDASQENNMQAEVTGKLKQHFNNALPKQNSTTTGVSVIMFDLTV

SEQ ID NO: 85962 - protein, 99 aa, Homo sapiens
MDTLPDNRTRVVVWEGTGSTGSAWELVGNVECRSPQTCRIRIRFPGGQPQLLCVPSLWPQRAPQPGTVGRCGRGQPEPSEDPHNTLQHPPAGFESGLVL

SEQ ID NO: 85963 - protein, 476 aa, Homo sapiens
MDHISDSFLETNVPLLVLIEAAKSGNEKEVKEYAQVFREHANKLVEVANLACSISNNEEGVKLVRMAATQIDSLCPQVINAALTLAARPQSKVAQDNMDVFKDQWEKQVRVLTEAVDDITSVDDFLSVSENHILEDVNKCVIALQEGDVDTLDRTAGAIRGRAARVIHIINAEMENYEAGVYTEKVLEATKLLSETVMPRFAEQVEVAIEALSANVPQPFEENEFIDASRLVYDGVRDIRKAVLMIRTPEELEDDSDFEQEDYDVRSRTSVQTEDDQLIAGQSARAIMAQLPQEEKAKIAEQVEIFHQEKSKLDAEVAKWDDSGNDIIVLAKQMCMIMMEMTDFTRGKGPLKNTSDVINAAKKIAEAGSRMDKLARAVADQLDSATSLIQAAKNLMNAVVLTVKASYVASTKYQKVYGTAAVNSPVVSWKMKAPEKKPLVKREKPEEFQTRVRRGSQKKHISPVQALSEFKAMDSF

SEQ ID NO: 85964 - protein, 165 aa, Homo sapiens
MPGGRRGPSRQQLSRSALPSLQTLVGGGCGNGTGLRNRFGVYVPLCCFHQDSRAHLLLTDYNYVVQHEAVEESASTVGGLAKSKDFLSLLLESLKEQFNNATPIPTHSCPLSPDLIRNEVECLKADFNHRIKEVLFNSLFSAYYVAFLPLCFVKSTQYYDMRWSC

SEQ ID NO: 85965 - protein, 121 aa, Homo sapiens
MEHAFTPLEPLLSTGNLKYCLVILNQPLDNYFRHLWNKALLRACADGGANRLYDITEGERESFLPEFINGDFDSIRPEVREYYATKGCELISTPDQDHTDFTKCLKMLQKKIEEKDLKKKQ

SEQ ID NO: 85966 - protein, 121 aa, Homo sapiens
MHRLQLSDTGTYTCQAITEVNVYGSGTLVLVTEEQSQGWHRCSDAPPRASALPAPPTGSALPDPQTASALPDPPAASALPAALAVISFLLGLGLGVACVLARTQVSVSPSCHLHPKDCSLS

SEQ ID NO: 85967 - protein, 70 aa, Homo sapiens
MPTTTALRWTAAARVRRKGRGGWVPAALRSVSQDGVPGCTVMGGETRSPEKSVPQSLEEPPPTPQDPAGK

SEQ ID NO: 85968 - protein, 141 aa, Homo sapiens
MKPILLQGHERSITQIKYNREGDLLFTVAKDPIVNVWYSVNGERLGTYMGHTGAVWCVDADWDTKHVLTGSADNSCRLWDCETGKQLALLKTNSAVRTCGFDFGGNIIMFSTDKQMGYQCFVSFFDLRDPSQIVWRGVGEC

SEQ ID NO: 85969 - protein, 75 aa, Homo sapiens
MIFTQSSEKTAVSCLSQNDWKLDVATDNFFQNPELYIRESVKGSLDRKKLEQLYNRYKDPQDENKIGIDGIQQFC

SEQ ID NO: 85970 - protein, 113 aa, Homo sapiens
MIKGVTLGFRYKMRSVYAHFPINVVIQENGSLVEIRNFLGEKYIRRVRMRPGVACSVSQAQKDELILEGNDIELVSNSAALIQQATTVKNKDIRKFLDGIYVSEKGTVQQADE

SEQ ID NO: 85971 - protein, 137 aa, Homo sapiens
NENERYDAVQHCRYVDEVVRNAPWTLTPEFLAEHRIDFVAHDDIPYSSAGSDDVYKHIKEAGMFAPTQRTEGISTSDIITRIVRDYDVYARRNLQRGYTAKELNVSFINAMSPPRVDSDTRHTTSHTDLSFKFGLTK

SEQ ID NO: 85972 - protein, 243 aa, Homo sapiens
MLPRRPLAWPAWLLRGAPGAAGSWGRPVGPLARRGCCSAPGTPEVPLTRERYPVRRLPFSTVSKQDLAAFERIVPGGVVTDPEALQAPNVDWLRTLRGCSKVLLRPRTSEEVSHILRHCHERNLAVNPQGGNTGMVGGSVPVFDEIILSTARMNRVLSFHSVSGGLRPGGAEPVCGGTGLHHAAGLRSQGQLPHRGKRGNQRWRPAVSSIWLTAWDCPGPGSGAGRRHCPGLPDLPEEGQHGL

SEQ ID NO: 85973 - protein, 105 aa, Homo sapiens
MEDFSNDLFSSFFDDPVLDEKSPLLDMELDSPTPGIQAEHSYSLSGDSAPQSPLVPIKMEDTTQDAEHGAWALGHKLCSIMVKQEQSPELPVDPLAAPSAMAAAA

SEQ ID NO: 85974 - protein, 194 aa, Homo sapiens
MEAAVAPGRDAPAPAASQPSGCGKHNSPERKVYMDYNATTPLEPEVIQAMTKAMWEAWGNPSSPYSAGRKAKDIINAARESLAKMIGGKPQDIIFTSGGTEAAELVTQNCEAYEAHMRDVRDYLEERLEAEFGQKRIHLNSQFPGTQRLPNTCNFSIRGPRLQGHVVLAQCRVLMASVGAACHSDHGDQPSPVL

SEQ ID NO: 85975 - protein, 47 aa, Homo sapiens
MASVLSRRLGKRSLLGARVLGPSASEGPSAAPPSEPLLEGAAPQPFT

SEQ ID NO: 85976 - protein, 67 aa, Homo sapiens
  MOD_RES (1)..(1): Any amino acid
XKFQVAVAGSVSGLVTRALISPFDVIKIRFQLQHERLSRSDPSAKYHGILQGSPHERIRGNAGRGLW

SEQ ID NO: 85977 - protein, 44 aa, Homo sapiens
MGGLFWRSALRGLRCGPRAPGPSLLVRHGSASPPEEDGWGGAQR

SEQ ID NO: 85978 - protein, 115 aa, Homo sapiens
MATEPEAAEPVVPSLVDRYFTRWYKPDVKGKFCEDHCILQHSNRICVITLAESHPVLQSGKTIKSISYQISTNCSRLQNKVSGKFKRRIIYLEKVEDVIKRKMMPLSLGLHLPHS

SEQ ID NO: 85979 - protein, 151 aa, Homo sapiens
MAKSLLKTASLSGRTKLLHQTGLSLYSTSHGFYEEEVKKTLQQFPGGSIDLQKEDNGIGILTLNNPSRMNAFSGVMMLQLLEKVIELENWTEGKGLIVRGAKNTFSSGSDLNAVKSLGTPEDGMAVCMFMQNTLTRFMRLPLISVALVQGW

SEQ ID NO: 85980 - protein, 52 aa, Homo sapiens
MTMTANKNSSITHGAGGTKAPRGTLSRSQSVSPPPVLSPPRSPIYPLSDSET

SEQ ID NO: 85981 - protein, 209 aa, Homo sapiens
MMVQGQEYEAGGSVIHPLNLHMKRFVKDLGLSAVQASGGLLGIYNGETLVFEESNWFIINVIKLVWRYGFQSLRMHMWVEDVLDKFMRIYRYQSHDYAFSSVEKLLHALGGDDFLGMLNRTLLETLQKAGFSEKFLNEMIAPVMRVNYGQSTDINAFVGAVSLSCSDSGLWAVEGGNKLVCSGLLQASKSNLISGSVMYIEEKTKTKYT

SEQ ID NO: 85982 - protein, 412 aa, Homo sapiens
MEVTAVGEEANQGDLLGFGQRCCSLGSSNPWLYRTAGIFPEHCTEEKKIGTYFRVAPQASKSQRSRCHGMAASEARPGEATAASYGRPFPTHPRRQEFRARVVRGPTMLVTAYLAFVGLLASCLGLELSRCRAKPPGRACSNPSFLRFQLDFYQVYFLALAADWLQAPYLYKLYQHYYFLEGQIAILYVCGLASTVLFGLVASSLVDWLGRKNSCVLFSLTYSLCCLTKLSQDYFVLLVGRALGGLSTALLFSAFEAWYIHEHVERHDFPAEWIPATFARAAFWNHVLAVVAGVAAEAVASWIGLGPVAPFVAAIPLLALAGALALRNWGENYDRQRAFSRTCAGGLRCLLSDRRVLLLGTIQALFESVIFIFVFLWTPVLDPHGAPLGIIFSSFMAASLLGSSLYRIATSK

SEQ ID NO: 85983 - protein, 138 aa, Homo sapiens
MMRVCWLVRQDSRHQRIRLPHLEAVVIGRGPETKITDKKCSRQQEFEEEAKNPGLETHRKRKRSGNSDSIERDAAQEAEAGTGLEPGSNSGQCSVPLKKGKDAPIKKESLGHWSQGLKISMQDPKMQPCTSSCDQPGF

SEQ ID NO: 85984 - protein, 222 aa, Homo sapiens
MLENFRNLLSVGHQPFHRDTFHFLREEKFWMMDIATQREGNSGGKIQPEMKTFPEAGPHEGWSCQQIWEEIASDLTRPQDSTIKSSQFFEQGDAHSQVEEGLSIMHTGQKPSNCGKCKQSFSDMSIFDLPQQIRSAEKSHSCDECGKSFCYISALHIHQRVHLGEKLFKCDVCGKEFSQSLHLQTHQRVHTGEKPFKCEQCGRGFRCRSALTVHCKLHMGEK

SEQ ID NO: 85985 - protein, 102 aa, Homo sapiens
MVDQAIWSKKMSNGTRRIPVSPEQARSYNKQMRPAILDHCSGNKWTNTSHHPEYLVGEEALYVNPLDCYNIHWPIRRGQLNIHPGPGGSLTAVLADIEVIWS

SEQ ID NO: 85986 - protein, 503 aa, Homo sapiens
MFTSEKGVVEEWLSEFKTLPETSLPNYATNLKDKSSLVSSLYKVIQEPQSELLEPVCHQLFEFYRSGEEQLLQFTLQFLPELIWCYLAVSASRNVHSSGCIEALLLGVYNLEIVDKQGHTKVLSFTIPSLSKPSVYHEPSSIGSMALTESALSQHGLSKVVYSGPHPQREMLTAQNRFEVLTFLLLCYNAALTYMPSVSLQSLCQICSRICVCGYPRQHVRKYKGISSRIPVSSGFMVQMLTGIYFALAQLELYPEPLLVANAIKASLPHGPMKSNKEGTRCIQVEITPTSSRISRNAVTSMSIRGHRWKRHGNTELTGQEELMEISEVDEGFYSRAASSTSQSGLSNSSHNCSNKPSIGKNHRRSGGSKTGGKEKETTGESCKDHFARKQTQRAQSENLELLSLKRLTLTTSQSLPKPSSHGLAKTAATVFSKSFEQVSGVTVPHNPSSAVGCGAGTDANRFSACSLQEEKLIYVSERTELPMKHQSGQQRPPSISITLSTD

SEQ ID NO: 85987 - protein, 215 aa, Homo sapiens
MTERRVPFSLLRGPSWDPFRDWYPHSRLFDQAFGLPRLPEEWSQWLGGSSWPGYVRPLPPAAIESPAVAAPAYSRALSRQLSSGVSEIRHTADRWRVSLDVNHFAPDELTVKTKDGVVEITACSPGCFQAGGKHEERQDEHGYISRCFTRKYTLPPGVDPTQVSSSLSPEGTLTVEAPMPKLATQSNEITIPVTFESRAQLGGPEAAKSDETAAK

SEQ ID NO: 85988 - protein, 155 aa, Homo sapiens
MLSPKDILRKDLKLVHGYPMTCAFASNWEKIEQFHSRPDDIVIATYPKSGTTWVSEIIDMILNDGDIEKCKRGFITEKVPMLEMTLPGLRTSGIEQLEKNPSPRIVKTHLPTDLLPKSFWENNCKMIYLARNAKDVSVSYYHFDLMNNLQPFPGT

SEQ ID NO: 85989 - protein, 61 aa, Homo sapiens
MLFEGKVNPQTQSLLAECGEWTRRSLHLRVLGRQLILPTDKGVQHFQGSTPASAVHRPPLS

SEQ ID NO: 85990 - protein, 95 aa, Homo sapiens
MLAQAQEVFFLKATRDKMKDAIIAKLANQAADYFGDAFKQCQYKDTLPKEVFPVLAAKHCIMQANAEYHQSILAKQQKKFGEEIARLQIHPFTES

SEQ ID NO: 85991 - protein, 253 aa, Homo sapiens
MLQFPHISQCEELRLSLERDYHSLCERQPIGRLLFREFCATRPELSRCVAFLDGVAEYEVTPDDKRKACGRQLTQNFLSHTGPDLIPEVPRQLVTNCTQRLEQGPCKDLFQELTRLTHEYLSVAPFADYLDSIYFNRFLQWKWLERQPVTKNTFRQYRVLGKGGFGEVCACQVRATGKMYACKKLEKKRIKKRKGEAMALNEKQILEKVNSRFVVSLAYAYETKDALCLVLTLMNGGDLKFHIYHMGQAGFPE

SEQ ID NO: 85992 - protein, 129 aa, Homo sapiens
MRIVKPKVASMEEMATFHTDAYLQHLQKVSQEGDDDHPDSIEYGLGYDCPATEGIFDYAAAIGGATITAAQCLIDGMCKVAINWSGGWHHAKKDEASGFCYLNDAVLGILRLRRKFERILYVDLDLHHG

SEQ ID NO: 85993 - protein, 34 aa, Homo sapiens
  MOD_RES (1)..(1): Any amino acid
XDNIWISKSLKKDAPRNGSGVALERSEANIKHER

SEQ ID NO: 85994 - protein, 83 aa, Homo sapiens
MDFLLGNPFSSPVGQRIEKATDGSLQSEDWALNMEICDIINETEEGPKDALRAVKKRIVGNKNFHEVMLALTVLDGTSRPSRS

SEQ ID NO: 85995 - protein, 49 aa, Homo sapiens
MNTEAEQQLLHHARNGNAEEVRQLLETMARNEVIADINCKGVGNASLRI

SEQ ID NO: 85996 - protein, 59 aa, Homo sapiens
METPLDVLSRAASLVHADDEKREAALRGEPRIQTLPVASALSSHRTGPPPISPSKRKFS

SEQ ID NO: 85997 - protein, 334 aa, Homo sapiens
MSLQSRLSGRLAQLRAAGQLLVPPRPRPGHLAGATRTRSSTCGPPAFLGVFGRRARTSAGVGAWGAAAVGRTAGVRTWAPLAMAAKVDLSTSTDWKEAKSFLKGLSDKQREEHYFCKDFVRLKKIPTWKEMAKGVAVKVEEPRYKKDKQLNEKISLLRSDITKLEVDAIVNAANSSLLGGGGVDGCIHRAAGPLLTDECRTLQSCKTGKAKITGGYRLPAKYVIHTVGPIAYGEPSASQAAELRSCYLSSLDLLLEHRLRSVAFPCISTGVFGYPCEAAAEIVLATLREWLEQHKDKVDRLIICVFLEKDEDIYRSRLPHYFPVDPPSGPRSQL

SEQ ID NO: 85998 - protein, 268 aa, Homo sapiens
MEKPINILYPRVEDWLLMSSPLPQTILLGFYVYFVTSLGPKLMENRKPFELKKAMITYNFFIVLFSVYMCYEFVMSGWGIGYSFRCDIVDYSRSPTALRMARTCWLYYFSKFIELLDTIFFVLRKKNSQVTFLHVFHHTIMPWTWWFGVKFAAGGLGTFHALLNTAVHVVMYSYYGLSALGPAYQKYLWWKKYLTSLQLVQFVIVAIHISQFFFMEDCKYQFPVFACIIMSYSFMFLLLFLHFWYRAYTKGQRLPKTVKNGTCKNKDN

SEQ ID NO: 85999 - protein, 55 aa, Homo sapiens
MTRAGDHNRQRGCCGSLADYLTSAKFLLYLGHSLSTWGDRMWHFAVSVFLVELYG

SEQ ID NO: 86000 - protein, 736 aa, Homo sapiens
MDIVDTFNHLIPTEHLDDALFLGSNLENEVCEDFSASQNVLEDSLKNMLSDKDPMLGSASNQFCLPVLDSNDPNFQMPCSTVVGLDDIMDEGVVKESGNDTIDEEELILPNRNLRDKVEENSVRSPRKSPRLMAQEQVRSLRQSTIAKRSNAAPLSNTKKASGKTVSTAKAGVKQPERSQVKEEVCMSLKPEYHKENRRCSRNSGQIEVVPEVSVSSSHSSVSSCLEMKDEDGLDSKHKCNNPGEIDVPSHELNCSLLSETCVTIGEKKNEALMECKAKPVGSPLFKFSDKEEHEQNDSISGKTGETVVEEMIATRKVEQDSKETVKLSHEDDHILEDAGSSDISSDAACTNPNKTENSLVGLPSCVDEVTECNLELKDTMGIADKTENTLERNKIEPLGYCEDAESNRQLESTEFNKSNLEVVDTSTFGPESNILENAICDVPDQNSKQLNAIESTKIESHETANLQDDRNSQSSSVSYLESKSVKSKHTKPVIHSKQNMTTDAPKKIVAAKYEVIHSKTKVNVKSVKRNTDVPESQQNFHRPVKVRKKQIDKEPKIQSCNSGVKSVKNQAHSVLKKTLQDQTLVQIFKPLTHSLSDKSHAHPGCLKEPHHPAQTGHVSHSSQKQCHKPQQQAPAMKTNSHVKEELEHPGVEHFKEEDKLKLKKPEKNLQPRQRRSSKSFSLDEPPLFIPDNIATIRREGSDHSSSFESKYMWTPSKQCGFCKKPHGNRCVCMCV

SEQ ID NO: 86001 - protein, 194 aa, Homo sapiens
MSSSGSSHPFLLTGFPGLEEAHHWISVFFLFMYISILFGNGTLLLLIKEDHNLHEPMYFFLAMLAATDLGLALTTMPTVLGVLWLDHREIGSAACFSQAYFIHSLSFLESGILLAMAYDRFIAICNPLRYTSVLTNTRVVKIGLGVLMRGFVSVVPPIRPLYFFLYCHSHVLSHAFCLHQDVIKLACADTTFNR

SEQ ID NO: 86002 - protein, 539 aa, Homo sapiens
MRSVDVTLMPIDCELSSWSSWTTCDPCQKKRYRYAYLLQPSQFHGEPCNFSDKEVEDCVTNRPCGSQVRCEGFVCAQTGRCVNRRLLCNGDNDCGDQSDEANCRRIYKKCQHEMDQYWGIGSLASGINLFTNSFEGPVLDHRYYAGGCSPHYILNTRFRKPYNVESYTPQTQGKYEFILKEYESYSDFERNVTEKMASKSGFSFGFKIPGIFELGISSQSDRGKHYIRRTKRFSHTKSVFLHARSDLEVAHYKLKPRSLMLHYEFLQRVKRLPLEYSYGEYRDLFRDFGTHYITEAVLGGIYEYTLVMNKEAMERGDYTLNNVHACAKNDFKIGGAIEEVYVSLGVSVGKCRGILNEIKDRNKRDTMVEDLVVLVRGGASEHITTLAYQELPTADLMQEWGDAVQYNPAIIKVKVEPLYELVTATDFAYSSTVRQNMKQALEEFQKEVSSCHCAPCQGNGVPVLKGSRCDCICPVGSQGLACEVSYRKNTPIDGKWNCWSNWSSCSGRRKTRQRQCNNPPPQNGGSPCSGPASETLDCS

SEQ ID NO: 86003 - protein, 693 aa, Homo sapiens
MLNNLLLFSLQISLIGTTLGGNVLIWPMEGSHWLNVKIIIDELIKKEHNVTVLVASGALFITPTSNPSLTFEIYKVPFGKERIEGVIKDFVLTWLENRPSPSTIWRFYQEMAKVIKDFHMVSQEICDGVLKNQQLMAKLKKSKFEVLVSDPVFPCGDIVALKLGIPFMYSLRFSPASTVEKHCGKVPYPPSYVPAVLSELTDQMSFTDRIRNFISYHLQDYMFETLWKSWDSYYSKALDGSHWLNIKIILEELIQRNHNVTVLASSATLFINSNPDSPVNFEVIPVSYKKSNIDSLIEHMIMLWIDHRPTPLTIWAFYKELGKLLDTFFQINIQLCDGVLKNPKLMARLQKGGFDVLVADPVTICGDLVALKLGIPFMYTLRFSPASTVERHCGKIPAPVSYVPAALSELTDQMTFGERIKNTISYSLQDYIFQSYWGEWNSYYSKILGRPTTLCETMGKAEIWLIRTYWDFEFPRPYLPNFEFVGGLHCKPAKPLPKVLWRYKGKKPATLGNNTQLFDWIPQNDLLGHPKTKAFITHGGTNGIYEAIYHGVPMVGVPMFADQPDNIAHMKAKGAAVEVNLNTMTSVDLLSALRTVINEPSYKENAMRLSRIHHDQPVKPLDRAVFWIEFVMRHKGAKHLRVAAHDLTWFQYHSLDVIGFLLVCVTTAIFLVIQCCLFSCQKFGKIGKKKKRE

SEQ ID NO: 86004 - protein, 127 aa, Homo sapiens
MTDGKLSTSTNGVAFMGILDGRPGNPLQNLQHVNLKAPRLLSAPEYGPKLKLRALEDRHSLQSVDSGIPTLEIGNPEPVPCSAVHVRRKQSDSDLIPERAFQSACALPSCAPPAPSSTEREQSVRKS

SEQ ID NO: 86005 - protein, 317 aa, Homo sapiens [sequence omitted]

SEQ ID NO: 86006 - protein, 97 aa, Homo sapiens
  MOD_RES (1)..(1): Any amino acid
XYYDYYGYDYHNYRGGYEDPYYGYEDFQVGARGRGGRGARGAAPSRGRGAAPPRGRAGYSQRGGPGSARGVRGARGGAQQQRGRGGKGVEAGPDLLQ

SEQ ID NO: 86007 - protein, 128 aa, Homo sapiens
MMGSPVSHLLAGFCVWVVLGWVGGSVPNLGPAEQEQNHYLAQLFGLYGENGTLTAGGLARLLHSLGLGRVQGLRLGQHGPLTGRAASPAADNSTHRPQNPELSVDVWAGMPLGPSGWGDLEESKAPHL

SEQ ID NO: 86008 - protein, 54 aa, Homo sapiens
MHRRRLALGLGFCLLAGTSLSVLWVYLENWLPVSYVPYYLPCPEIFILAAPCMV

SEQ ID NO: 86009 - protein, 154 aa, Homo sapiens
MAGIPGLLFLLFFLLCAVGQVSPYSAPWKPTWPAYRLPVVLPQSTLNLAKPDFGAEAKLEVSSSCGPQCHKGTPLPTYEEAKQYLSYETLYANGSRTETQVGIYILSSSGDGAQHRDSGSSGKSRRKRQIYGYDSRFSIFGKDFLLNYPFSTSV

SEQ ID NO: 86010 - protein, 35 aa, Homo sapiens
MPKGGCPKAPQQEELPLSSDMVEKQTGKKIFPKES

SEQ ID NO: 86011 - protein, 40 aa, Homo sapiens
MGPLSAPPCTQRITWKGVLLTGHSLDSALSLEVTGSSQSP

SEQ ID NO: 86012 - protein, 204 aa, Homo sapiens
  MOD_RES (1)..(1): Any amino acid
XDPRNADKIRVKIADLGNACWVHKHFTEDIQTRQYRSIEVLIGAGYSTPADIWSTACMAFELATGDYLFEPHSGEDYSRDEDHIAHIIELLGSIPRHFALSGKYSREFFNRRDHIALIIELLGKVPRKYAMLGKYSKEFFTRKGELRHITKLKPWSLFDVLVEKYGWPHEDAAQFTDFLIPMLEMVPEKRASAGECLRHPWLNS

SEQ ID NO: 86013 - protein, 91 aa, Homo sapiens
MPAPIRLRELIRTIRTARTQAEEREMIQKECAAIRSSFREEDNTYRCRNVAKLLYMHMLGYPAHFGQLECLKLIASQKFTDKRIGYLGAML

SEQ ID NO: 86014 - protein, 46 aa, Homo sapiens
  MOD_RES (1)..(1): Any amino acid
XLKGLMPASLRQELEDTISSLKSQVNFLQKRASILQEELTTYQGRR

SEQ ID NO: 86015 - protein, 489 aa, Homo sapiens
MTPALTALLCLGLSLGPRTRMQAGPFPKPTLWAEPGSVISWGSPVTIWCQGSLEAQEYQLDKEGSPEPWDRNNPLEPKNKARFSIPSMTQHHAGRYRCHYYSSAGWSEPSDPLELVMTGFYNKPTLSALPSPVVASGGNMTLRCGSQKGYHHFVLMKEGEHQLPRTLDSQQLHSGGFQALFPVGPVTPSHRWRFTCYYYYTNTPWVWSHPSDPLEILPSGVSRKPSLLTLQGPVLAPGQSLTLQCGSDVGYDRFVLYKEGERDFLQRPGQQPQAGLSQANFTLGPVSRSYGGQYRCYGAHNLSSEWSAPSDPLDILITGQIYDTVSLSAQPGPTVASGENVTLLCQSRGYFDTFLLTKEGAAHPPLRLRSMYGAHKYQAEFPMSPVTSAHAGTYRCYGSRSSNPHLLSFPSEPLELMVSGHSGGSSLPPTGPPSTPGLGRYLEVLIGVSVAFVLLLFLLLFLLLRRQRHSKHRTSGLRLCPSSPRPEKD

SEQ ID NO: 86016 - protein, 406 aa, Homo sapiens
  MOD_RES (1)..(1): Any amino acid
XFQAMRLGVEEINNSTALLPNITLGYQLYDVCSDSANVYATLRVLSLPGQHHIELQGDLLHYSPTVLAVIGPDSTNRAATTAALLSPFLVPMISYAASSETLSVKRQYPSFLRTIPNDKYQVETMVLLLQKFGWTWISLVGSSDDYGQLGVQALENQATGQGICIAFKDIMPFSAQVGDERMQCLMRHLAQAGATVVVVFSSRQLARVFFESVVLTNLTGKVWVASEAWALSRHITGVPGIQRIGMVLGVAIQKRAVPGLKAFEEAYARADKKAPRPCHKGSWCSSNQLCRECQAFMAHTMPKLKAFSMSSAYNAYRAVYAVAHGLHQLLGCASGACSRGRVYPWQTSTDASLVGKKSGHLREARPASRALWCFWLCVSTPLGCCWQLTRCCCCCCLGLLACLPGT

SEQ ID NO: 86017 - protein, 249 aa, Homo sapiens
MIQHHIEACAQVPGMQEILLIGFYQPDEPLTQFLEAAQQEFNLPVRYLQEFAPLGTGGGLYHFRDQILAGSPEAFFVLNADVCSDFPLSAMLEAHRRQRHPFLLLGTTANRTQSLNYGCIVENPQTHEVLHYVEKPSTFISDIINCGIYLFSPEALKPLRDVFQRNQQDGQLEDSPGLWPGAGTIRLEQDVFSALAGQGQIYVHLTDGIWSQIKSAGSALYASRLYLSRYQDTHPERLAKHTPGGPWIR

SEQ ID NO: 86018 - protein, 62 aa, Homo sapiens
MAQLWLSCFLLPALVVSVAANVAPKFLANMTSVILPEDLPVVQNGIQECRKLPDETRDTKGY

SEQ ID NO: 86019 - protein, 247 aa, Homo sapiens
MGMTFSSAYVPSALCCPSRASILTGKYPHNHHVVNNTLEGNCSSKSWQKIQEPNTFPAILRSMCGYQTFFAGKYLNEYGAPDAGGLEHVPLGWSYWYALEKNSKYYNYTLSINGKARKHGENYSVDYLTDVLANVSLDFLDYKSNFEPFFMMIATPAPHSPWTAAPQYQKAFQNVFAPRNKNFNIHGTNKHWLIRQAKTPMTNSSIQFLDNAFRKRWQTLLSVDDLVEKLVKRLEFTGELNNTYIFY

SEQ ID NO: 86020 - protein, 330 aa, Homo sapiens
MEIGTEISRKIRSAIKGKLQELGAYVDEELPDYIMVMVANKKSQDQMTEDLSLFLGNNTIRFTVWLHGVLDKLRSVTTEPSSLKSSDTNIFDSNVPSNKSNFSRGDERRHEAAVPPLAIPSARPEKRDSRVSTSSQESKTTNVRQTYDDGAATRLMSTVKPLREPAPSEDVIDIKPEPDDLIDEDLNFVQENPLSQKKPTVTLTYGSSRPSIEIYRPPASRNADSGVHLNRLQFQQQQNSIHAAKQLDMQSSWVYETGRLCEPEVLNSLEETYSPFFRNNSEKMSMEQRQGFTVLARLVLKSWPCDPPTLILAHCNLCFPGSSDSSDSAS

SEQ ID NO: 86021 - protein, 116 aa, Homo sapiens
MIVAAVGVTTWLQFLFCFSYIKLAVTLVKYFPQAYMNFYYKSTEGWSIGNVLLDFTGGSFSLLQMFLQSYNNDQWTLIFGDPTKFGLGVFSIVFDVVFFIQHFCLYRKRPGYDQLN

SEQ ID NO: 86022 - protein, 996 aa, Homo sapiens
MKQQALTEFEAYKHRVEDMQLCAEAQHVQRIVTMSREVEEIRRKFEEKLRSFGQLQVQFEKDKRLALEDLQAAHRREIQELLKSQQDHSASVNKGQEKAEELHRMEVESLNKMLEELRLERKKLIEDYEGKLNKAQSFYERELDTLKRSQLFTAESLQASKEKEADLRKEFQGQEAILRKTIGKLKTELQMVQDEAGSLLDKCQKLQTALAIAENNVQVLQKQLDDAKEGEMALLSKHKEVESELAAARERLQQQASDLVLKASHIGMLQATQMTQEVTIKDLESEKSRVNERLSQLEEERAFLRSKTQSLDEEQKQQILELEKKVNEAKRTQQEYYERELKNLQSRLEEEVTQLNEAHSKTLEELAWKHHMAIEAVHSNAIRDKKKLQMDLEEQHNKDKLNLEEDKNQLQQELENLKEVLEDKLNTANQEIGHLQDMVRKSEQGLGSAEGLIASLQDSQERLQNELDLTKDSLKETKDALLNVEGELEQERQQHEETIAAMKEEEKLKVDKMAHDLEIKWTENLRQECSKLREELRLQHEEDKKSAMSQLLQLKDREKNAARDSWQKKVEDLLNQISLLKQNLEIQLSQSQTSLQQLQAQFTQERQRLTQELEELEEQHQQRHKSLKEAHVLAFQTMEEEKEKEQRALENHLQQKHSAELQSLKDAHRESMEGFRIEMEQELQTLRFELEDEGKAMLASLRSELNHQHAAAIDLLRHNHHQELAAAKMELERSIDISRRQSKEHICRITDLQEELRHREHHISELDKEVQHLHENISALTKELEFKGKEILRIRSESNQQIRLHEQDLNKRLEKELDVMTADHLREKNIMRADFNKTNELLKEINAALQVSLEEMEEKYLMRESKPEDIQMITELKAMLTERDQIIKKLIEDNKFYQLELVNRETNFNKVFNSSPTVGVINPLAKQKKKNDKSPTNRFVSVPNLSALESGGVGNGHPNRLDPIPNSPVHDIEFNSSKPLPQPVPPKGPKTFLRYQ

SEQ ID NO: 86023 - protein, 482 aa, Homo sapiens
MTMAGGRRGLVAPQNTFLENIVRRSNDTNFVLGNAQIVDWPIVYSNDGFCKLSGYHRAEVMQKSSTCSFMYGELTDKDTIEKVRQTFENYEMNSFEILMYKKNSWGKFARLTRALTSSRGVLQQLAPSVQKGENVHKHSRLAEVLQLGSDILPQYKQEAPKTPPHIILHYCVFKTTWDWIILILTFYTAILVPYNVSFKTRQNNVAWLVVDSIVDVIFLVDIVLNFHTTFVGPAGEVISDPKLIRMNYLKTWFVIDLLSCLPYDVINAFENVDEGISSLFSSLKVVRLLRLGRVARKLDHYIEYGAAVLVLLVCVFGLAAHWMACIWYSIGDYEIFDEDTKTIRNNSWLYQLAMDIGTPYQFNGSGSGKWEGGPSKNSVYISSLYFTMTSLTSVGFGNIAPSTDIEKIFAVAIMMIGYADEELWEEDPYEYIRMKFDVSEDFISFATAAQKLLFTAHSKRKEVLQKTMGFCYQILTEPNADL

SEQ ID NO: 86024 - protein, 136 aa, Homo sapiens
  MOD_RES (1)..(1): Any amino acid
XGSLLLLQRVRVALPQGPRAPGPLQTLPVAAVALGVGLLDSRALHDPRVSPELLLGVDMLQSPLTRPRPGPRWLRSRNSELRQLRRRWFHHFMSDSQGPPALGPEAARPAIHSRGPMSTPAWRPGRSVTAGTGCQR

SEQ ID NO: 86025 - protein, 51 aa, Homo sapiens
  MOD_RES (1)..(1): Any amino acid
XDFDEFERQLNENKQASSPAPLRDDPGVRPLSPRGGPGASLLCLLWLPSSS

SEQ ID NO: 86026 - protein, 2296 aa, Homo sapiens
MADLSLADALTEPSPDIEGEIKRDFIATLEAEAFDDVVGETVGKTDYIPLLDVDEKTGNSESKKKPCSETSQIEDTPSSKPTLLANGGHGVEGSDTTGSPTEFLEEKMAYQEYPNSQNWPEDTNFCFQPEQVVDPIQTDPFKMYHDDDLADLVFPSSATADTSIFAGQNDPLKDSYGMSPCNTAVVPQGWSVEALNSPHSESFVSPEAVAEPPQPTAVPLELAKEIEMASEERPPAQALEIMMGLKTTDMAPSKETEMALAKDMALATKTEVALAKDMESPTKLDVTLAKDMQPSMESDMALVKDMELPTEKEVALVKDVRWPTETDVSSAKNVVLPTETEVAPAKDVTLLKETERASPIKMDLAPSKDMGPPKENKKETERASPIKMDLAPSKDMGPPKENKIVPAKDLVLLSEIEVAQANDIISSTEISSAEKVALSSETEVALARDMTLPPETNVILTKDKALPLEAEVAPVKDMAQLPETEIAPAKDVAPSTVKEVGLLKDMSPLSETEMALGKDVTPPPETEVVLIKNVCLPPEMEVALTEDQVPALKTEAPLAKDGVLTLANNVTPAKDVPPLSETEATPVPIKDMEIAQTQKGISEDSHLESLQDVGQSAAPTFMISPETVTGTGKKCSLPAEEDSVLEKLGERKPCNSQPSELSSETSANFMYCGTPPTQAKQVCRPSDRRSTRPKPARVPPELLGGSPPWKTLDHRLGHCSLSESGWVSGSSSCGGPGNQRKSIHVDSLEPQRDLGREAWDIESTPIMMKKKKKKPKQKRYSQPRAGGPSDDDNADKPKGHPFAADTQKSGVLPSQPTTMGTEYGLVSGENLKRECLVNSSAARLVAENFVSESLRIPLYPSEEAPKTAISSQSKLRVEEESKSNKSVLQNQDKKLLKQHEYKPQPAPHLKTPVDKSQSVGPLNLKGPLAEVSAYNVETPLDIRLKEGCSPFLDQEVMGVVSKPTAAKEIPNLVPTLIASNPLECNLKEGNNESKMTKLQNVKLKEFPEGAEEDKELKKEAFPNERQEISIFTSEQLQGQVLVQVPGVENEPFKRMAGDGKSRKGRGSSGKMRTDSGKVKAKSELPFLLDSQKDGRAVLIPSEPVSKTEGMTTQDKSEELGLNSSKQPGTKADLTEAVVMGEPKEMTQPKVAGTMQALIPLESGSGMTQTSGVSTETGDVVKDMGVNNQSKEGRCPWKDHEAAPWISEKPKKRGNEGKSKKFKNNYSTQPARMERKEEILNPPFEGKDGDTGSIPHKSKEIGFTFPKMHDSSFSHTPDTPTVEAVDRKGGNFQVNFVELGTLGENKISTVKASTVTEPPAKVTDVSCQEQIQGAGFVPSVVSEENKTDAANRYTAVADKPSKRSNDGKSKKVKNSSPEKHILENKIDATKIHVPMETTGDQGIEGMAYMDENRNITFTCPRTPSELINKSSPLEVLESAACEKLPTPTPQVVKEGDSFPDTLAKNGQEIAPAQISKSLMVDNYTKDGVPGQERPKGPSAVVPSTSTGGVALPITTAIETVNIHGDHSLKNKAELADSMKNEAGIDEGHVIGESESVHSGASKHSVEKVTELAKGHLLPGVPVEDQSLPGEARALEGYADRGNFPAHPVNEEKETKEGSVAVQIPDLLEDKAQKLSFCEDQNAQDRNSKGSDSLNKKVDLTLLSPKSENDKLKEISLACKITELESVSLPTPEIQSDFLHSKVEAPPSEVADTLVIMTASKGVRLPEPKDKILETPQKMTEKSESKTPGEGKKEDKSRMAEPMKGYMRPTKSRGLTPLLPKSTIQEQERHKQLKSAVCLSSSTVYQQLGMSVYGIARPEEGRPVVSGTGNDITTPPNKELPPSPEKKTKPLATTQPAKTSTSKAKTQPTSLPKQPAPTTIGGLNKKPMSLASGLVPAAPPKRPAVASARPSILPSKDVKPKPIADAKAPEKRASPSKPASAPASRSGSKSTQTVAKTTTAAAVASTGPSSRSPSTLLPKKPTAIKTEGKPAEVKKMTAKSVPADLSRPKSTSTSSMKKTTTLSGTAPAAGVVPSRVKATPMPSRPSTTPFIDKKPTSAKPSSTTPRLSRLATNTSAPDLKNVRSKVGSTENIKHQPGGGRAKVEKKTEAAATTRKPESNAVTKTAGPIASAQKQPAGKVQIVSKKVSYSHIQSKCGSKDNIKHVPGGGNVQIQNKKVDISKVSSKCGSKANIKHKPGGGDVKIESQKLNFKEKAQAKVGSLDNVGHLPAGGAVKTEGGGSEAPLCPGPPAGEEPAISEAAPEAGAPTSASGLNGHPTLSGGGDQREAQTLDSQIQETN

SEQ ID NO: 86027 - protein, 172 aa, Homo sapiens
MKNKTCVLVCVSVFGGERGQVTVPRVGVRRPSLAGPLQKCTLRETRVWLPQGSGFQSSRREKYGNVFKTHLLGRPLIRVTGAENVRKILMGEHHLVSTEWPRSTRMLLGPNTVSNSIGDIHRNKRKVFSKIFSHEALESYLPKIQLVIQDTLRAWSSHPEAINVYQEAQKLT

SEQ ID NO: 86028 - protein, 123 aa, Homo sapiens
MPRPALSVTSFCHRLGKRERKQSFMGNSGNSWSHTPFPKLELGLGPQPMAPRELPTCSICLERLRDPISLDCGHDFCIRCFSTHRLPGCEPPCCPECRKICKQKRGLRSLGEKMKLLPQRPLP

SEQ ID NO: 86029 - protein, 7818 aa, Homo sapiens
MIAAAFLVLLRPYSIQCALFLLLLLLGTIATIVFFCCWHRKLQKGRHPMKSVFSGRSRSRDAVLRSHHFRSEGFRASPRHLRRRVAAAAAARLEEVKPVVEVHHQSEQETSVRKRRIKKSSRVQPEFYHSVQGASIRRPSSGNASYRCSMSSSADFSDEDDFSQKSGSASPAPGDTLPWNLPKHERSKRKIQGGSVLDPAERAVLRIADERDKVQKKTFTKWINQHLMKVRKHVNDLYEDLRDGHNLISLLEVLSGDTLPRERDFLKTLRLVSATEACEYEQHEDVEDEDKGPREKGRMRFHRLQNVQIALDYLKRRQVKLVNIRNDDITDGNPKLTLGLIWTIILHFQISDIHVTGESEDMSAKERLLLWTQQATEGYAGIRCENFTTCWRDGKLFNAIIHKYRPDLIDMNTVAVQSNLANLEHAFYVAEKIGVIRLLDPEDVDVSSPDEKSVITYVSSLYDAFPKVPEGGEGIGANDVEVKWIEYQNMVNYLIQWIRHHVTTMSERTFPNNPVELKALYNQYLQFKETEIPPKETEKSKIKRLYKLLEIWIEFGRIKLLQGYHPNDIEKEWGKLIIAMLEREKALRPEVERLEMLQQIANRVQRDSVICEDKLILAGNALQSDSKRLESGVQFQNEAEIAGYILECENLLRQHVIDVQILIDGKYYQADQLVQRVAKLRDEIMALRNECSSVYSKGRILTTEQTKLMISGITQSLNSGFAQTLHPSLTSGLTQSLTPSLTSSSMTSGLSSGMTSRLTPSVTPAYTPGFPSGLVPNFSSGVEPNSLQTLKLMQIRKPLLKSSLLDQNLTEEEINMKFVQDLLNWVDEMQVQLDRTEWGSDLPSVESHLENHKNVHRAIEEFESSLKEAKISEIQMTAPLKLTYAEKLHRLESQYAKLLNTSRNQERHLDTLHNFVSRATNELIWLNEKEEEEVAYDWSERNTNIARKKDYHAELMRELDQKEENIKSVQEIAEQLLLENHPARLTIEAYRAAMQTQWSWILQLCQCVEQHIKENTAYFEFFNDAKEATDYLRNLKDAIQRKYSCDRSSSIHKLEDLVQESMEEKEELLQYKSTIANLMGKAKTIIQLKPRNSDCPLKTSIPIKAICDYRQIEITIYKDDECVLANNSHRAKWKVISPTGNEAMVPSVCFTVPPPNKEAVDLANRIEQQYQNVLTLWHESHINMKSVVSWHYLINEIDRIRASNVASIKTMLPGEHQQVLSNLQSRFEDFLEDSQESQVFSGSDITQLEKEVNVCKQYYQELLKSAEREEQEESVYNLYISEVRNIRLRLENCEDRLIRQIRTPLERDDLHESVFRITEQEKLKKELERLKDDLGTITNKCEEFFSQAAASSSVPTLRSELNVVLQNMNQVYSMSSTYIDKLKTVNLVLKNTQAAEALVKLYETKLCEEEAVIADKNNIENLISTLKQWRSEVDEKRQVFHALEDELQKAKAISDEMFKTYKERDLDFDWHKEKADQLVERWQNVHVQIDNRLRDLEGIGKSLKYYRDTYHPLDDWIQQVETTQRKIQENQPENSKTLATQLNQQKMLVSEIEMKQSKMDECQKYAEQYSATVKDYELQTMTYRAMVDSQQKSPVKRRRMQSSADLIIQEFMDLRTRYTALVTLMTQYIKFAGDSLKRLEEEEKSLEEEKKEHVEKAKELQKWVSNISKTLKDAEKAGKPPFSKQKISSEEISTKKEQLSEALQTIQLFLAKHGDKMTDEERNELEKQVKTLQESYNLLFSESLKQLQESQTSGDVKVEEKLDKVIAGTIDQTTGEVLSVFQAVLRGLIDYDTGIRLLETQLMISGLISPELRKCFDLKDAKSHGLIDEQILCQLKELSKAKEIISAASPTTIPVLDALAQSMITESMAIKVLEILLSTGSLVIPATGEQLTLQKAFQQNLVSSALFSKVLERQNMCKDLIDPCTSEKVSLIDMVQRSTLQENTGMWLLPVRPQEGGRITLKCGRNISILRAAHEGLIDRETMFRLLSAQLLSGGLINSNSGQRMTVEEAVREGVIDRDTASSILTYQVQTGGIIQSNPAKRLTVDEAVQCDLITSSSALLVLEAQRGYVGLIWPHSGEIFPTSSSLQQELITNELAYKILNGRQKIAALYIPESSQVIGLDAAKQLGIIDNNTASILKNITLPDKMPDLGDLEACKNARRWLSFCKFQPSTVHDYRQEEDVFDGEEPVTTQTSEETKKLFLSYLMINSYMDANTGQRLLLYDGDLDEAVGMLLEGCHAEFDGNTAIKECLDVLSSSGVFLNNASGREKDECTATPSSFNKCHCGEPEHEETPENRKCAIDEEFNEMRNTVINSEFSQSGKLASTISIDPKVNSSPSVCVPSLISYLTQTELADISMLRSDSENILTNYENQSRVETNERANECSHSKNIQNFPSDLIENPIMKSKMSKFCGVNETENEDNTNRDSPIFDYSPRLSALLSHDKLMHSQGSFNDTHTPESNGNKCEAPALSFSDKTMLSGQRIGEKFQDQFLGIAAINISLPGEQYGQKSLNMISSNPQVQYHNDKYISNTSGEDEKTHPGFQQMPEDKEDESEIEEYSCAVTPGGDTDNAIVSLTCATPLLDETISASDYETSLLNDQQNNTGTDTDSDDDFYDTPLFEDDDHDSLLLDGDDRDCLHPEDYDTLQEENDETASPADVFYDVSKENENSMVPQGAPVGSLSVKNKAHCLQDFLMDVEKDELDSGEKIHLNPVGSDKVNGQSLETGSERECTNILEGDESDSLTDYDIVGGKESFTASLKFDDSGSWRGRKEEYVTGQEFHSDTDHLDSMQSEESYGDYIYDSNDQDDDDDDGIDEEGGGIRDENGKPRCQNVAEDMDIQLCASILNENSDENENINTMILLDKMHSCSSLEKQQRVNVVQLASPSENNLVTEKSNLPEYTTEIAGKSKENLLNHEMVLKDVLPPIIKDTESEKTFGPASISHDNNNISSTSELGTDLANTKVKLIQGSELPELTDSVKGKDEYFKNMTPKVDSSLDHIICTEPDLIGKPAEESHLSLIASVTDKDPQGNGSDLIKGRDGKSDILIEDETSIQKMYLGEGEVLVEGLVEEENRHLKLLPGKNTRDSFKLINSQFPFPQITNNEELNQKGSLKKATVTLKDEPNNLQIIVSKSPVQFENLEEIFDTSVSKEISDDITSDITSWEGNTHFEESFTDGPEKELDLFTYLKHCAKNIKAKDVAKPNEDVPSHVLITAPPMKEHLQLGVNNTKEKSTSTQKDSPLNDMIQSNDLCSKESISGGGTEISQFTPESIEATLSILSRKHVEDVGKNDFLQSERCANGLGNDNSSNTLNTDYSFLEINNKKERIEQQLPKEQALSPRSQEKEVQIPELSQVFVEDVKDILKSRLKEGHMNPQEVEEPSACADTKILIQNLIKRITTSQLVNEASTVPSDSQMSDSSGVSPMTNSSELKPESRDDPFCIGNLKSELLLNILKQDQHSQKITGVFELMRELTHMEYDLEKRGITSKVLPLQLENIFYKLLADGYSEKIEHVGDFNQKACSTSEMMEEKPHILGDIKSKEGNYYSPNLETVKEIGLESSTVWASTLPRDEKLKDLCNDFPSHLECTSGSKEMASGDSSTEQFSSELQQCLQHTEKMHEYLTLLQDMKPPLDNQESLDNNLEALKNQLRQLETFELGLAPIAVILRKDMKLAEEFLKSLPSDFPRGHVEELSISHQSLKTAFSSLSNVSSERTKQIMLAIDSEMSKLAVSHEEFLHKLKSFSDWVSEKSKSVKDIEIVNVQDSEYVKKRLEFLKNVLKDLGHTKMQLETTAFDVQFFISEYAQDLSPNQSKQLLRLLNTTQKCFLDVQESVTTQVERLETQLHLEQDLDDQKIVAERQQEYKEKLQGICDLLTQTENRLIGHQEAFMIGDGTVELKKYQSKQEELQKDMQGSAQALAEVVKNTENFLKENGEKLSQEDKALIEQKLNEAKIKCEQLNLKAEQSKKELDKVVTTAIKEETEKVAAVKQLEESKTKIENLLDWLSNVDKDSERAGTKHKQVIEQNGTHFQEGDGKSAIGEEDEVNGNLLETDVDGQVGTTQENLNQQYQKVKAQHEKIISQHQAVIIATQSAQVLLEKQGQYLSPEEKEKLQKNMKELKVHYETALAESEKKMKLTHSLQEELEKFDADYTEFEHWLQQSEQELENLEAGADDINGLMTKLKRQKSFSEDVISHKGDLRYITISGNRVLEAAKSCSKRDGGKVDTSATHREVQRKLDHATDRFRSLYSKCNVLGNNLKDLVDKYQHYEDASCGLLAGLQACEATASKHLSEPIAVDPKNLQRQLEETKALQGQISSQQVAVEKLKKTAEVLLDARGSLLPAKNDIQKTLDDIVGRYEDLSKSVNERNEKLQITLTRSLSVQDGLDEMLDWMGNVESSLKEQGQVPLNSTALQDIISKNIMLEQDIAGRQSSINAMNEKVKKFMETTDPSTASSLQAKMKDLSARFSEASHKHKETLAKMEELKTKVELFENLSEKLQTFLETKTQALTEVDVPGKDVTELSQYMQESTSEFLEHKKHLEVLHSLLKEISSHGLPSDKALVLEKTNNLSKKFKEMEDTIKEKKEAVTSCQEQLDAFQVLVKSLKSWIKETTKKVPIVQPSFGAEDLGKSLEDTKKLQEKWSLKTPEIQKVNNSGISLCNLISAVTTPAKAIAAVKSGGAVLNGEGTATNTEEFWANKGLTSIKKDMTDISHGYEDLGLLLKDKIAELNTKLSKLQKAQEESSAMMQWLQKMNKTATKWQQTPAPTDTEAVKTQVEQNKSFEAELKQNVNKVQELKDKLTELLEENPDTPEAPRWKQMLTEIDSKWQELNQLTIDRQQKLEESSNNLTQFQTVEAQLKQWLVEKELMVSVLGPLSIDPNMLNTQRQQVQILLQEFATRKPQYEQLTAAGQGILSRPGEDPSLRGIVKEQLAAVTQKWDSLTGQLSDRCDWIDQAIVKSTQYQSLLRSLSDKLSDLDNKLSSSLAVSTHPDAMNQQLETAQKMKQEIQQEKKQIKVAQALCEDLSALVKEEYLKAELSRQLEGILKSFKDVEQKAENHVQHLQSACASSHQFQQMSRDFQAWLDTKKEEQNKSHPISAKLDVLESLIKDHKDFSKTLTAQSHMYEKTIAEGENLLLKTQGSEKAALQLQLNTIKTNWDTFNKQVKERENKLKESLEKALKYKEQVETLWPWIDKCQNNLEEIKFCLDPAEGENSIAKLKSLQKEMDQHFGMVELLNNTANSLLSVCEIDKEVVTDENKSLIQKVDMVTEQLHSKKFCLENMTQKFKEFQEVSKESKRQLQCAKEQLDIHDSLGSQAYSNKYLTMLQTQQKSLQALKHQVDLAKRLAQDLVVEASDSKGTSDVLLQVETIAQEHSTLSQQVDEKCSFLETKLQGIGHFQNTIREMFSQFAEFDDELDSMAPVGRDAETLQKQKETIKAFLKKLEALMASNDNANKTCKMMLATEETSPDLVGIKRDLEALSKQCNKLLDRAQAREEQVEGTIKRLEEFYSKLKEFSILLQKAEEHEESQGPVGMETETINQQLNMFKVFQKEEIEPLQGKQQDVNWLGQGLIQSAAKSTSTQGLEHDLDDVNARWKTLNKKVAQRAAQLQEALLHCGRFQDALESLLSWMVDTEELVANQKPPSAEFKVVKAQIQEQKLLQRLLDDRKSTVEVIKREGEKIATTAEPADKVKILKQLSLLDSRWEALLNKAETRNRQLEGISVVAQQFHETLEPLNEWLTTIEKRLVNCEPIGTQASKLEEQIAQHKALEDDIINHNKHLHQAVSIGQSLKVLSSREDKDMVQSKLDFSQVWYIEIQEKSHSRSELLQQALCNAKIFGEDEVELMNWLNEVHDKLSKLSVQDYSTEGLWKQQSELRVLQEDILLRKQNVDQALLNGLELLKQTTGDEVLIIQDKLEAIKARYKDITKLSTDVAKTLEQALQLARRLHSTHEELCTWLDKVEVELLSYETQVLKGEEASQAQMRPKELKKEAKNNKALLDSLNEVSSALLELVPWRAREGLEKMVAEDNERYRLVSDTITQKVEEIDAAILRSQQFDQAADAELSWITETEKKLMSLGDIRLEQDQTSAQLQVQKTFTMEILRHKDIIDDLVKSGHKIMTACSEEEKQSMKKKLDKVLKNYDTICQINSERYLQLERAQSLVNQFWETYEELWPWLTETQSIISQLPAPALEYETLRQQQEEHRQLRELIAEHKPHIDKMNKTGPQLLELSPGEGFSIQEKYVAADTLYSQIKEDVKKRAVALDEAISQSTQFHDKIDQILESLERIVERLRQPPSISAEVEKIKEQISENKNVSVDMEKLQPLYETLKQRGEEMIARSGGTDKDISAKAVQDKLDQMVFIWENIHTLVEEREAKLLDVMELAEKFWCDHMSLIVTIKDTQDFIRDLEDPGIDPSVVKQQQEAAETIREEIDGLQEELDIVINLGSELIAACGEPDKPIVKKSIDELNSAWDSLNKAWKDRIDKLEEAMQAAVQYQDGLQAVFDWVDIAGGKLASMSPIGTDLETVKQQIEELKQFKSEAYQQQIEMERLNHQAELLLKKVTEESDKHTVQDPLMELKLIWDSLEERIINRQHKLEGALLALGQFQHALDELLAWLTHTEGLLSEQKPVGGDPKAIEIELAKHHVLQNDVLAHQSTVEAVNKAGNDLIESSAGEEASNLQNKLEVLNQRWQNVLEKTEQRKQQLDGALRQAKGFHGEIEDLQQWLTDTERHLLASKPLGGLPETAKEQLNVHMEVCAAFEAKEETYKSLMQKGQQMLARCPKSAETNIDQDINNLKEKWESVETKLNERKTKLEEALNLAMEFHNSLQDFINWLTQAEQTLNVASRPSLILDTVLFQIDEHKVFANEVNSHREQIIELDKTGTHLKYFSQKQDVVLIKNLLISVQSRWEKVVQRLVERGRSLDDARKRAKQFHEAWSKLMEWLEESEKSLDSELEIANDPDKIKTQLAQHKEFQKSLGAKHSVYDTTNRTGRSLKEKTSLADDNLKLDDMLSELRDKWDTICGKSVERQNKLEEALLFSGQFTDALQALIDWLYRVEPQLAEDQPVHGDIDLVMNLIDNHKAFQKELGKRTSSVQALKRSARELIEGSRDDSSWVKVQMQELSTRWETVCALSISKQTRLEAALRQAEEFHSVVHALLEWLAEAEQTLRFHGVLPDDEDALRTLIDQHKEFMKKLEEKRAELNKATTMGDTVLAICHPDSITTIKHWITIIRARFEEVLAWAKQHQQRLASALAGLIAKQELLEALLAWLQWAETTLTDKDKEVIPQEIEEVKALIAEHQTFMEEMTRKQPDVDKVTKTYKRRAADPSSLQSHIPVLDKGRAGRKRFPASSLYPSGSQTQIETKNPRVNLLVSKWQQVWLLALERRRKLNDALDRLEELREFANFDFDIWRKKYMRWMNHKKSRVMDFFRRIDKDQDGKITRQEFIDGILSSKFPTSRLEMSAVADIFDRDGDGYIDYYEFVAALHPNKDAYKPITDADKIEDEVTRQVAKCKCAKRFQVEQIGDNKYRFFLGNQFGDSQQLRLVRILRSTVMVRVGGGWMALDEFLVKNDPCRVHHHGSKMLRSESNSSITTTQPTIAKGRTNMELREKFILADGASQGMAAFRPRGRRSRPSSRGASPNRSTSVSSQAAQAASPQVPATTTPKILHPLTRNYGKPWLTNSKMSTPCKAAECSDFPVPSAEGTPIQGSKLRLPGYLSGKGFHSGEDSGLITTAAARVRTQFADSKKTPSRPGSRAGSKAGSRASSRRGSDASDFDISEIQSVCSDVETVPQTHRPTPRAGSRPSTAKPSKIPTPQRKSPASKLDKSSKR

SEQ ID NO: 86030 - protein, 361 aa, Homo sapiens
MGCDGRVSGLLRRNLQPTLTYWSVFFSFGLCIAFLGPTLLDLRCQTHSSLPQISWVFFSQQLCLLLGSALGGVFKRTLAQSLWALFTSSLAISLVFAVIPFCRDVKVLASVMALAGLAMGCIDTVANMQLVRMYQKDSAVFLQVLHFFVGFGALLSPLIADPFLSEANCLPANSTANTTSRGHLFHVSRVLGQHHVDAKPWSNQTFPGLTPKDGAGTRVSYAFWIMALINVGVVVTFLVLLIFSYNVVFLFVGTASLGLFLSSTFPSMLAYTEDSLQYKGCATTVLVTGAGVGEMVLQMLVGSIFQAQGSYSFLVCGVIFGCLAFTFYILLLFFHRMHPGLPSVPTQDRSIGMENSECYQR

SEQ ID NO: 86031 - protein, 128 aa, Homo sapiens
  MOD_RES (1)..(1): Any amino acid
XELEAVRKYFQLDVTLAQLYHHWGSVDSHFQEVAQKFQGVRLLRQDPIECLFSFICSSNNNIARITGMVERLCQAFGPRLIQLDDVTYHGFPSLQALAGVPVPAEGLLTSASAFQSPLRSRQPEADRR

SEQ ID NO: 86032 - protein, 86 aa, Homo sapiens
MKKNTSKTTMRINKQDALCTPHSHDPRDLQNMLDGGEYAPFVSPPMLESNFIQPAPLRASHLNRTMIAASSRRYSSHPGGSVSWWL

SEQ ID NO: 86033 - protein, 139 aa, Homo sapiens
MMKTLLLFVGLLLTWESGQVLGDQTVSDNELQEMSNQGSKYVNKEIQNAVNGVKQIKTLIEKTNEERKTLLSNLEEAKKKKEDALNETRESETKLKELPGVCNETMMALWEECKPCLKQTCMKFYARVCRSGSGLVGRQ

SEQ ID NO: 86034 - protein, 69 aa, Homo sapiens
MDNSNIVAMFEMMDSSGRGTISFVQYKEALKTLGLCTEDEDLQDDGHKITLDKFKEEVNKRMKEIWSAF

SEQ ID NO: 86035 - protein, 123 aa, Homo sapiens
MALFEEEMDTSPMVSSLLSGLANYTNLPQGSREHEEAENNEGGKKKPVQAPRMGTFMGVYLPCLQNIFGVILFLRLTWVVGIAGIMESFCMVFICCSCTMLTAISMSAIATNGVVPAGGSYYM

SEQ ID NO: 86036 - protein, 32 aa, Homo sapiens
MIITKAGRRMFPAMRVKISGLDPHQQYYIAMD

SEQ ID NO: 86037 - protein, 60 aa, Homo sapiens
MELPAVGEHVFAVESIEKKRIRKGRVEYLVKWRGWSPKYNTWEPEENILDPRLLIAFQNS

SEQ ID NO: 86038 - protein, 124 aa, Homo sapiens
MGRKSSKAKEKKQKRLEERAAMDAVCAKVDAANRLGDPLEAFPVFKKYDRNGTQMKKVMLTVFKHNHGAYQFFREALQFEIDDSSPSMSGCCGEDCSYEILSRRTKFGDSHHSHAGGHCGGCCH

SEQ ID NO: 86039 - protein, 148 aa, Homo sapiens
MAVCGLGSRLGLGSRLGLRGCFGAARLLYPRFQSRGPQGVEDGDRPQPSSKTPRIPKIYTKTGDKGFSSTFTGERRPKDDQVFEAVGTTDELSSAIGRSFALVAQTGVQWCDLGSLQPLPPGFKRVSSLLLFLTLTCSWLPFLHGGPD

SEQ ID NO: 86040 - protein, 160 aa, Homo sapiens
MFSDIYKIREIADGLCLEVEGKMVSRTEGNIDDSLIGGNASAEGPEGEGTESTVITGVDIVMNHHLQETSFTKEAYKKYIKDYMKSIKGKLEEQRPERVKPFMTGAAEQIKHILANFKNYQFFIGENMNPDGMVALLDYREDGVTPYMIFFKDGLEMEKC

SEQ ID NO: 86041 - protein, 91 aa, Homo sapiens
MSALGAVIALLLWGQLFAVDSGNDVTDIADDGCPKPPEIAHGYVEHSVRYQCKNYYKLRTEGDGVYTLNNEKQWINKAVGDKLPECEAGGC

SEQ ID NO: 86042 - protein, 505 aa, Homo sapiens [sequence omitted]

SEQ ID NO: 86043 - protein, 269 aa, Homo sapiens
  MOD_RES (1)..(1): Any amino acid
XDDRTPDVIALTVAFFLFEFLAATQDIAVDGWALTMLSRENIGFSAADAVTGLKLVEEGVPKEHLALLAVPMVPLQIILPLIISKYTAGPQPLNTFYKAMPYRLLLGLEYALLVWWTPKVEHQGGFPIYYYIVVLLSYALHQVTVYSMYVSIMAFNAKVSDPLIGGTYMTLLNTVSNLGGNWPSTVALWLVDPLTVKECVGASNQNCRTPDAVELCKKLGGSCVTALDGYYVESIICVFIGFGWWFFLGPKFKKLQDEGSSSWKCKRNN

SEQ ID NO: 86044 - protein, 801 aa, Homo sapiens
MKEKAMIKTAKMQGNVMELVGSNPPQRNWKGIAIALLVILVICSLIVTSVILLTPAEDNSLSQKKKVTVEDLFSEDFKIHDPEAKWISDTEFIYREQKGTVRLWNVETNTSTVLIEGKKIESLRAIRYEISPDREYALFSYNVEPIYQHSYTGYYVLSKIPHGDPQSLDPPEVSNAKLQYAGWGPKGQQLIFIFENNIYYCAHVGKQAIRVVSTGKEGVIYNGLSDWLYEEEILKTHIAHWWSPDGTRLAYAAINDSRVPIMELPTYTGSIYPTVKPYHYPKAGSENPSISLHVIGLNGPTHDLEMMPPDDPRMREYYITMVKWATSTKVAVTWLNRAQNVSILTLCDATTGVCTKKHEDESEAWLHRQNEEPVFSKDGRKFFFIRAIPQGGRGKFYHITVSSSQPNSSNDNIQSITSGDWDVTKILAYDEKGNKIYFLSTEDLPRRRQLYSANTVGNFNRQCLSCDLVENCTYFSASFSHSMDFFLLKCEGPGVPMVTVHNTTDKKKMFDLETNEHVKKAINDRQMPKVEYRDIEIDDYNLPMQILKPATFTDTTHYPLLLVVDGTPGSQSVAEKFEVSWETVMVSSHGAVVVKCDGRGSGFQGTKLLHEVRRRLGLLEEKDQMEAVRTMLKEQYIDRTRVAVFGKDYGGYLSTYILPAKGENQGQTFTCGSALSPITDFKLYASAFSERYLGLHGLDNRAYEMTKVAHRVSALEEQQFLIIHPTADEKIHFQHTAELITQLIRGKANYSLQIYPDESHYFTSSSLKQHLYRSIINFFVECFRIQDKLLTVTAKEDEEED

SEQ ID NO: 86045 - protein, 96 aa, Homo sapiens
MFNGIISIRNKNGEEKVKIERPGGSLSPIWSICWNPSREERNDILAVADWGQKVSFYQLSGKQIGKDRALNFDPCCISYFTKGEYILLGGSDKQVS

SEQ ID NO: 86046 - protein, 256 aa, Homo sapiens
MSILDEPGEPPSPSLTTTSTSQWKKHWFVLTDSSLKYYRDSTAEEADELDGEIDLRSCTDVTEYAVQRNYGFQIHTKDAVYTLSAMTSGIRRNWIEALRKTVRPTSAPDVTKLSDSNKENALHSYSTQKGPLKAGEQRAGSEVISRGGPRKADGQRQALDYVELSPLTQASPQRARTPARTPDRLAKQEELERDLAQRSEERRKWFEATDSRTPEVPAGEGPRRGLGAPLTEDQQNRLSEEIEKKWQELEKLPLRE

SEQ ID NO: 86047 - protein, 88 aa, Homo sapiens
MADESETAVKPPAPPLPQMMEGNGNGHEHCSDCENEEDNSYNRGGLSPANDTGAKKKKKKQKKKKEKGSETDSAQDQPVKVTRRFCFL

SEQ ID NO: 86048 - protein, 104 aa, Homo sapiens
MEPRVVKPPGQDLVVESLKSRYGLGGSCPDEYDFSNFYQSKYKRRTLTSPGDLDIYSGDKVGSSLKYSDESKHCRTPLGSLFKHVNVNCLKNVFTFFLSYAVNI

SEQ ID NO: 86049 - protein, 207 aa, Homo sapiens
MAAAAVSGALGRAGWRLLQLRCLPVARCRQALVPRAFHASAVGLRSSDEQKQQPPNSFSQQHSETQGAEKPDPESSHSPPRYTDQGGEEEEDYESEEQLQHRILTAALEFVPAHGWTAEAIAEGAQFNWYTRRAMLAAIYNTTELVMMQDSSPDFEDTWRFLENRVNDAMNMGHTAKQVKSTGEALVQGLMGAAVTLKNLTGLNQRR

SEQ ID NO: 86050 - protein, 56 aa, Homo sapiens
MNCFQGTNASALEKDIGPEQFPINEHYFGLVNELSTELGPSVTEGCLGKVWKHMLL

SEQ ID NO: 86051 - protein, 155 aa, Homo sapiens
MAFLVRCYANCLQPWASKLPADLTKMHLTENPHPQVTHVSSSQSGCSIASDSGSSSLSDIYQATESEVGDVDLTRLPEGPVDSEDDEEEDEEIDRTDPLQGRDLVRECLEKEPADKTDDDIEQLLEFMHQLPAFANMTMSVRRELCSVMIFEVVE

SEQ ID NO: 86052 - protein, 10 aa, Homo sapiens
MEEVVIAGMS

SEQ ID NO: 86053 - protein, 160 aa, Homo sapiens
MDGGDDGNLIIKKRFVSEAELDERRKRRQEEWEKVRKPEDPEECPEEVYDPRSLYERLQEQKDRKQQEYEEQFKFKNMVRGLDEDETNFLDEVSRQQELIEKQRREEELKELKEYRNNLKKVGISQENKKEVEKKLTVKPIETKNKFSQAKLLAGAVKHK

SEQ ID NO: 86054 - protein, 22 aa, Homo sapiens
MRPTNIMKGNLLYSKSIGLNNL

SEQ ID NO: 86055 - protein, 706 aa, Homo sapiens
MTDTRRRVKVYTLNEDRQWDDRGTGHVSSGYVERLKGMSLLVRAESDGSLLLESKINPNTAYQKQQDTLIVWSEAENYDLALSFQEKAGCDEIWEKICQVQGKDPSVDITQDLVDESEEERFDDMSSPGLELPSCELSRLEEIAELVASSLPSPLRREKLALALENEGYIKKLLELFHVCEDLENIEGLHHLYEIIKGIFLLNRTALFEVMFSEECIMDVIGCLEYDPALSQPRKHREFLTKTAKFKEVIPISDPELKQKIHQTYRVQYIQDMVLPTPSVFEENMLSTLHSFIFFNKVEIVGMLQEDEKFLTDLFAQLTDEATDEEKRQELVNFLKEFCAFSQTLQPQNRDAFFKTLSNMGILPALEVILGMDDTQVRSAATDIFSYLVEYNPSMVREFVMQEAQQNDDDILLINLIIEHMICDTDPELGGAVQLMGLLRTLVDPENMLATANKTEKTEFLGFFYKHCMHVLTAPLLANTTEDKPSKDDFQTAQLLALVLELLTFCVEHHTYHIKNYIINKDILRRVLVLMASKHAFLALCALRFKRKIIGLKDEFYNRYIMKSFLFEPVVKAFLNNGSRYNLMNSAIIEMFEFIRVEDIKSLTAHVIENYWKALEDVDYVQTFKGLKLRFEQQRERQDNPKLDSMRSILRNHRYRRDARTLEDEEEMWFNTDEDDMEDGEAVVSPSDKTKNDDDIMDPISKFMER

SEQ ID NO: 86056 - protein, 51 aa, Homo sapiens
MPGKLLWGDIMELEAPLEESESQKKERQKSFMDIAISDKGLWTCTSLIGLL

SEQ ID NO: 86057 - protein, 102 aa, Homo sapiens
MGLEDEQKMLTESGDPEEEEEEEEELVIGLRLSVHTGNLGRQECETFPYYLASELNGRPHSAISGGSVALPAGLLHGSPNNSERAMRAVGEMCKGPGAARAL

SEQ ID NO: 86058 - protein, 124 aa, Homo sapiens
MSDNDDIEVESDEEQPRFQSAASRAQILDKATEYIQYMRRKNHTHQQDIDDLKRQNALLEQQVRALEKARSSAQLQTNYPSSDNSLYTNAKGSTISAFDGGSDSSSESEPEEPQSRKKLRMEAS

SEQ ID NO: 86059 - protein, 237 aa, Homo sapiens
  MOD_RES (1)..(1): Any amino acid
XDSQHRAAINTYCSLAACVLTSVAISSALHKKGKLDMVHIQNATLAGGVAVGTAAEMMLMPYGALIIGFVCGIISTLGFVYLTPFLESRLHIQDTCGINNLHGIPGIIGGIVGAVTAASASLEVYGKEGLVHSFDFQGFNGDWTARTQGKFQIYGLLVTLAMALMGGIIVGLILRLPFWGQPSDENCFEDAVYWEMPEGNSTVYIPEDPTFKPSGPSVPSVPMVSPLPMASSVPLVP

SEQ ID NO: 86060 - protein, 427 aa, Homo sapiens
MAASCLVLLALCLLLPLLLLGGWKRWRRGRAARHVVAVVLGDVGRSPRMQYHALSLAMHGFSVTLLGFCNSKPHDELLQNNRIQIVGLTELQSLAVGPRVFQYGVKVVLQAMYLLWKLMWREPGAYIFLQNPPGLPSIAVCWFVGCLCGSKLVIDWHNYGYSIMGLVHGPNHPLVLLAKWYEKFFGRLSHLNLCVTNAMREDLADNWHIRAVTVYDKPASFFKETPLDLQHRLFMKLGSMHSPFRARSEPEDPVTERSAFTERDAGSGLVTRLRERPALLVSSTSWTEDEDFSILLAALEKFEQLTLDGHNLPSLVCVITGSADLGVCLHTSSSGLDLPMKVVDMFGCCLPVCAVNFKCLHELVKHEENGLVFEDSEELAAQLQMLFSNFPDPAGKLNQFRKNLRESQQLRWDESWVQTVLPLVMDT

SEQ ID NO: 86061 - protein, 389 aa, Homo sapiens
  MOD_RES (1)..(1): Any amino acid
XYFRVILLLLLALTLLLLAGFLHSDLELDTPLFGGQAEGPPVTNIMFLKTHKTASSTVLNILYRFAETHNLSVALPAGSRVHLGYPWLFLARYVEGVGSQQRFNIMCNHLRFNLPQVQKVMPNDTFYFSILRNPVFQLESSFIYYKTYAPAFRGAPSLDAFLASPRTFYNDSRHLRNVYAKNNMWFDFGFDPNAQCEEGYVRARIAEVERRFRLVLIAEHLDESLVLLRRRLRWALDDVVAFRLNSRSARSVARLSPETRERARSWCALDWRLYEHFNRTLWAQLRAELGPRRLRGEVERLRARRRELASLCLQDGGALKNHTQIRDPRLRPYQSGKADILGYNLRPGLDNQTLGVCQRLVMPELQYMARLYALQFPEKPLKNIPFLGA

SEQ ID NO: 86062 - protein, 446 aa, Homo sapiens
MEIIRSNFKSNLHKVYQAIEEADFFAIDGEFSGISDGPSVSALTNGFDTPEERYQKLKKHSMDFLLFQFGLCTFKYDYTDSKYITKSFNFYVFPKPFNRSSPDVKFVCQSSSIDFLASQGFDFNKVFRNGIPYLNQEEERQLREQYDEKRSQANGAGALSYVSPNTSKCPVTIPEDQKKFIDQVVEKIEDLLQSEENKNLDLEPCTGFQRKLIYQTLSWKYPKGIHVETLETEKKERYIVISKVDEEERKRREQQKHAKEQEELNDAVGFSRVIHAIANSGKLVIGHNMLLDVMHTVHQFYCPLPADLSEFKEMTTCVFPRLLDTKLMASTQPFKDIINNTSLAELEKRLKETPFNPPKVESAEGFPSYDTASEQLHEAGYDAYITGLCFISMANYLGSFLSPPKIHVSARSKLIEPFFNKVSLCCQAGVQWRNLDSLQLLPPGFK

SEQ ID NO: 86063 - protein, 192 aa, Homo sapiens
MSSEMEPLLLAWSYFRRRKFQLCADLCTQMLEKSPYDQAAWILKARALTEMVYIDEIDVDQEGIAEMMLDENAIAQVPRPGTSLKLPGTNQTGGPSQAVRPITQAGRPITGFLRPSTQSGRPGTMEQAIRTPRTAYTARPITSSSGRFVRLGTASMLTSPDGPFINLSRLNLTKYSQKPKLAKALDLAALST

SEQ ID NO: 86064 - protein, 162 aa, Homo sapiens
MTKFQEMVTFKDVAVVFTREELGLLDLAQRKLYQDVMLENFRNLLSVGYQPFKLDVILQLGKEDKLRMMETEIQGDGCSGHKNQNEIDTLQEVRLRFLSYEDLICWQIWEQFTSKLTSNQDLIINLQGKRSKLLKQGDSPCQVWTGESSQVSEDENYVIKLQ

SEQ ID NO: 86065 - protein, 138 aa, Homo sapiens
MSDRYLEQRISIKFCVKLNKSASETHHLLKEAYGDEVMSRARVFDWHKRFKEGREDVRDDARSGRPVTHRTDDNIQKVKDLVCSNRQLTVRMMAEELNLDKETVRLILKENLNMRKISAKVISGVLKGLHGRCIFNEQ

SEQ ID NO: 86066 - protein, 598 aa, Homo sapiens
  MOD_RES (1)..(1): Any amino acid
XWSYEDKDQRPLNGFKDQLCSLVFMALTDPSTQLQLVGIRTLTVLGAQPDLLSYEDLELAVGHLYRLSFLKEDSQSCRVAALEASGTLAALYPVAFSSHLVPKLAEELRVGESNLTNGDEPTQCSRHLCCLQALSAVSTHPSIVKETLPLLLQHLWQVNRGNMVAQSSDVIAVCQSLRQMAEKCQQDPESCWYFHQTAIPCLLALAVQASMPEKEPSVLRKVLLEDEVLAAMVSVIGTATTHLSPELAAQSVTHIVPLFLDGNVSFLPENSFPSRFQPFQDGSSGQRRLIALLMAFVCSLPRNVEIPQLNQLMRELLELSCCHSCPFSSTAAAKCFAGLLNKHPAGQQLDEFLQLAVDKVEAGLGSGPCRSQAFTLLLWVTKALVLRYHPLSSCLTARLMGLLSDPELGPAAADGFSLLMSDCTDVLTRAGHAEVRIMFRQRFFTDNVPALVQGFHAAPQDVKPNYLKGLSHVLNRLPKPVLLPELPTALSCPDCVVQLSTLSCLQPLLLEAPQVMSLHVDTLVTKFLNLSSSPSMAVRIAALQCMHALTRLPTPVLLPYKPQVIRALAKPLDDKKRLVRKEAVSARGEWFLLGSPGS

SEQ ID NO: 86067 - protein, 86 aa, Homo sapiens
MNWHLPLFLLASVTLPSICSHFNPLSLEELGSNTGIQVFNQIVKSRPHDNIVISPHGIASVLGMLQLGADGRTKKQLAMVMRYGVN

SEQ ID NO: 86068 - protein, 103 aa, Homo sapiens [sequence omitted]

SEQ ID NO: 86069 - protein, 179 aa, Homo sapiens
MRILHVNGFNPEEKKQKILDIRKNVKDAIVTIVSAMSTIIPPVPLANPENQFRSDYIKSIAPITDFEYSQEFFDHVKKLWDDEGVKACFERSNEYQLIDCAQYFLERIDSVSLVDYTPTDQDLLRCRVLTSGIFETRFQVDKVNFHMFDVGGQRDERRKWIQCFNDVTAIIYVAACSSY

SEQ ID NO: 86070 - protein, 314 aa, Homo sapiens
GRMSANTSMVTEFLLLGFSHLADLQGLLFSVFLTIYLLTVAGNFLIVVLVSTDAALQSPMYLFLRTLSALEIGYTSVTVPLLLHHLLTGRRHISRSGCALQMFFFLFFGATECCLLAAMAYDRYAAICEPLRYPLLLSHRVCLQLAGSAWACGVLVGLGHTPFIFSLPFCGPNTIQQFFCEIQPVLQLVCGDTSLNELQIILATALLILCPFGLILGSYGRILVTIFRIPSVAGRRKAFSTCSSHLIVVSLFYGTALFIYIRPKASYDPATDPLVSLFYAVVTPILNPIIYSLRNTEVKAALKRTIQKTVPMEI

SEQ ID NO: 86071 - protein, 147 aa, Homo sapiens
MILQAHLHSLCLLMLYLATGYGQEGKFSGPLKPMTFSIYEGQEPSQIIFQFKANPPAVTFELTGETDNIFVIEREGLLYYNRALDRETRSTHNLQVAALDANGIIVEGPVPITIKVKDINDNRPTFLQSKYEGSVRQNSRPGKPFLY

SEQ ID NO: 86072 - protein, 281 aa, Homo sapiens
  MOD_RES (1)..(1): Any amino acid
XKERELNWFYRRQRVLFAHVYPTFTNTSCLCKCKITALKIKYNPFAKAFLDAKERNHLRDVPEAISESQHVTYSHLGGWIFSNPDGVCTAGNSNYQYAAPLPLPAPHTHHGCEHYSGLRGHRQAPYPSAYMHRNHSPSVNLIESSSNNLQVFSGPDSWTSLSSTPHASILSVPHTNGPINPGPSPYPCLWTISNGAGGPSGPGPEVHASTPGAFLLGNPAVTSPPSVLSTQAPTSAGVEVLGEPSLTSIAVSTWTAVASHPFAGWGGPGAGGHHSPSSLDG

SEQ ID NO: 86073 - protein, 763 aa, Homo sapiens
MAQWNQLQQLDTRYLEQLHQLYSDSFPMELRQFLAPWIESQDWAYAASKESHATLVFHNLLGEIDQQYSRFLQESNVLYQHNLRRIKQFLQSRYLEKPMEIARIVARCLWEESRLLQTAATAAQQGGQANHPTAAVVTEKQQMLEQHLQDVRKRVQDLEQKMKVVENLQDDFDFNYKTLKSQGDMQDLNGNNQSVTRQKMQQLEQMLTALDQMRRSIVSELAGLLSAMEYVQKTLTDEELADWKRRQQIACIGGPPNICLDRLENWITSLAESQLQTRQQIKKLEELQQKVSYKGDPIVQHRPMLEERIVELFRNLMKSAFVVERQPCMPMHPDRPLVIKTGVQFTTKVRLLVKFPELNYQLKIKVCIDKDSGDVAALRGSRKFNILGTNTKVMNMEESNNGSLSAEFKHLTLREQRCGNGGRANCDASLIVTEELHLITFETEVYHQGLKIDLETHSLPVVVISNICQMPNAWASILWYNMLTNNPKPPIGTWDQVAEVLSWQFSSTTKRGLSIEQLTTLAEKLLGPGVNYSGCQITWAKFCKENMAGKGFSFWVWLDNIIDLVKKYILALWNEGYIMGFISKERERAILSTKPPGTFLLRFSESSKEGGVTFTWVEKDISGKTQIQSVEPYTKQQLNNMSFAEIIMGYKIMDATNILVSPLVYLYPDIPKEEAFGKYCRPESQEHPEADPGSAAPYLKTKFICVTPTTCSNTIDLPMSPRTLDSLMQFGNNGEGAEPSAGGQFESLTFDMELTSECATSPM

SEQ ID NO: 86074 - protein, 329 aa, Homo sapiens
MGTPKPRILPWLVSQLDLGQLEGVAWVNKSRTRFRIPWKHGLRQDAQQEDFGIFQAWAEATGAYVPGRDKPDLPTWKRNFRSALNRKEGLRLAEDRSKDPHDPHKIYEFVNSGVGDFSQPDTSPDTNGGGSTSDTQEDILDELLGNMVLAPLPDPGPPSLAVAPEPCPQPLRSPSLDNPTPFPNLGPSENPLKRLLVPGEEWEFEVTAFYRGRQVFQQTISCPEGLRLVGSEVGDRTLPGWPVTLPDPGMSLTDRGVMSYVRHVLSCLGGGLALWRAGQWLWAQRLGHCHTYWAVSEELLPNSGHGPDGEVPKDKEGGVFDLGPFIVGE

SEQ ID NO: 86075 - protein, 213 aa, Homo sapiens
  MOD_RES (1)..(1): Any amino acid
XSRVLVPCHVKGSVALQVGDVRTSQGRPGVLVIDVTFPSVAPFELQEITFKNYYTAFLSIRVRQYTSAHTPAKWVTCLRDYCLMPDPHSEEGAQEYVSLFKHQMLCDMARISELRLILRQPSPLWLSFTVEELQIYQQGPKSPSVTFPKWLSHPVPCEQPALLREGLPDPSRVSSEVQQMWALTEMIRASHTSARIGRFDVDGCYDLNLLSYT

SEQ ID NO: 86076 - protein, 206 aa, Homo sapiens
  MOD_RES (1)..(1): Any amino acid
XFQSVESSTRKLDHINICSSNFPKRSFALVTQAGVQWHNLDSLQSPPPGFKRFPCLSLPSSWDCREVADFQLSVDSLLEKDNDHSRPDIQVQAKRLAEKLRCDTVVSEISTGQRTVNFKINRELLTKTVLQQVIEDGSKYGLKSELFSGLPQKKIVVEFSSPNVAKKFHVGHLRSTIIGNFIANLKEALGHQVIRINYLGDWGMQF

SEQ ID NO: 86077 - protein, 54 aa, Homo sapiens
MGNSASRSDFEWVYTDQPHTQRRKEILGAEDRARVLRPPAAAPLLGEGALGFCV

SEQ ID NO: 86078 - protein, 117 aa, Homo sapiens
MELLHSGGRVKDIQSVYLDTTFCDPRFYQIPSREECLSGVLELVRSWITRSPYHVVWLNCKAAYGYEYLFTNLSEELGVQVHVNKLDMFRNMPEILHHLTTDRNTQIHACRHPKAEE

SEQ ID NO: 86079 - protein, 198 aa, Homo sapiens
  MOD_RES (1)..(1): Any amino acid
XMTDGAQQALRRTMEIYSKTTRFALACNASDKIIEPIQSRCAVLRYTKLTDAQILTRLMNVIEKERVPYTDDGLEAIIFTAQGDMRQALNNLQSTFSGFGFINSENVFKVCDEPHPLLVKEMIQHCVNANIDEAYKILAHLWHLGYSPEDIIGNIFRVCKTFQMAEYLKLEFIKELPNGFPKWLQHVHSHQHSGGSST

SEQ ID NO: 86080 - protein, 159 aa, Homo sapiens
MRSEALLLYFTLLHFAGAGFPEDSEPISISHGNYTKQYPVFVGHKPGRNTTQRHRLDIQMIMIMNGTLYIAARDHIYTVDIDTSHTEEIYCSKKLTWKSRQADVDTCRMKGKHKDECHNFIKVLLKKNDDALFVCGTNAFNPSCRNYKMDTLEPFGDEF

SEQ ID NO: 86081 - protein, 151 aa, Homo sapiens
IPDQMTLKTIYERISKNIPTTKDVEPLLEIDGDIRNFEVFLSSRTPVLVARDVKVFLPCTVNLDPKLREIIADVRAAREQISIGGLAYPPLPLHEGPPRAPSGYSQPPSVCSSTSFNGPFAGGVVSPQPHSSYYSGMTGPQHPFYNRENGA

SEQ ID NO: 86082 - protein, 466 aa, Homo sapiens
MLRRALLCLAVAALVRADAPEEEDHVLVLRKSNFAEALAAHKYLLVEFYAPWCGHCKALAPEYAKAAGKLKAEGSEIRLAKVDATEESDLAQQYGVRGYPTIKFFRNGDTASPKEYTAGREADDIVNWLKKRTGPAATTLPDGAAAESLVESSEVAVIGFFKDVESDSAKQFLQAAEAIDDIPFGITSNSDVFSKYQLDKDGVVLFKKFDEGRNNFEGEVTKENLLDFIKHNQLPLVIEFTEQILFIFIDSDHTDNQRILEFFGLKKEECPAVRLITLEEEMTKYKPESEELTAERITEFCHRFLEGKIKPHLMSQELPEDWDKQPVKVLVGKNFEDVAFDEKKNVFVEFYAPWCGHCKQLAPIWDKLGETYKDHENIVIAKMDSTANEVEAVKVHSFPTLKFFPASADRTVIDYNGERTLDGFKKFLESGGQDGAGDDDDLEDLEEAEEPDMEEDDDQKAVKDEL

SEQ ID NO: 86083 - protein, 38 aa, Homo sapiens
MFADLDYDIEEDKLGIPTVPGKVTLQKDAQNLIGISIG

SEQ ID NO: 86084 - protein, 23 aa, Homo sapiens
MTSIFHFAIIFMLILQIRIQLSE

SEQ ID NO: 86085 - protein, 203 aa, Homo sapiens
MAEAGTGEPSPSVEGEHGTEYDTLPSDTVSLSDSDSDLSLPGGAEVEALSPMGLPGEEDSGPDEPPSPPSGLLPATVQPFHLRGMSSTFSQRSRDIFDCLEGAARRAPSSVAHTSMSDNGGFKRPLAPSGRSPVEGLGRAHRSPASPRVPPVPDYVAHPERWTKYSLEDVTEVSEQSNQATALAFLGSQSLAAPTDCVSSFNQ

SEQ ID NO: 86086 - protein, 337 aa, Homo sapiens
MPSEAQCVIYHELQLSLACKVADKVLEGQLLETISQLYLSLGTERAYKSALDYTKRSLGIFIDLQKKEKEAHAWLQAGKIYYILRQSELVDLYIQVAQNVALYTGDPNLGLELFEAAGDIFFDGAWEREKAVSFYRDRALPLAVTTGNRKAELRLCNKLVALLATLEEPQEGLEFAHMALALSITLGDRLNERVAYHRLAALQHRLGHGELAEHFYLKALSLCNSPLEFDEETLYYVKVYLVLGDIIFYDLKDPFDAAGYYQLALAAAVDLGNKKAQLKIYTRLATIYHNFLLDREKSLFFYQKARTFATELNVRRVNLPPLPLCGWAPWLAPSHPR

SEQ ID NO: 86087 - protein, 138 aa, Homo sapiens
  MOD_RES (1)..(1): Any amino acid
XATLQQLEPVTGQVSVLVMCHTRELAFQISKEYERFSKYMPNVKVAVFFGGLSIKKDEEVLKKNCPHIVVGTPGRILALARNKSLNLKHIKHFILDECDKMLEQLDMRRDVQEIFRMTPHEKQVMMFSATLSKEIRPV

SEQ ID NO: 86088 - protein, 185 aa, Homo sapiens
MASADKNGGSVSSVSSSRLQSRKPPNLSITIPPPEKETQAPGEQDSMLPEGFQNRRLKKSQPRTWAAHTTACPPSFLPKRKNPAYLKSVSLQEPRSRWQESSEKRPGFRRQASLSQSIRKGAAQWFGVSGDWEGQRQQWQRRSLHHCSMRYGRLKASCQRDLELPSQEAPSFQGTESPKPCKMPK

SEQ ID NO: 86089 - protein, 79 aa, Homo sapiens
  MOD_RES (1)..(1): Any amino acid
XGQVGTKLYMSPEQIHGNSYSHKVDIFSLGLILFELLYPFSTQMERVRTLTDVRNLKFPPLFTQKYPCEVCVILIFYLL

SEQ ID NO: 86090 - protein, 202 aa, Homo sapiens
MLLRDVKALTLHYDRYTTSRRLDPIPQLKCVGGTAGCDSYTPKVIQCQNKGWDGYDVQWECKTDLDIAYKFGKTVVSCEGYESSEDQYVLRGSCGLEYNLDYTELGLQKLKESGKQHGFASFSDYYYKWSSADSCNMSGLITIVVLLGIAFVVYKLFLSDGQYSPPPYSEYPPFSHRYQRFTNSAGPPPPGFKSEFTGPQNT

SEQ ID NO: 86091 - protein, 11 aa, Homo sapiens
DAFVVIGRDTR

SEQ ID NO: 86092 - protein, 83 aa, Homo sapiens
MAKSLLKTASLSGRTKLLHQTGLSLYSTSHGFYEEEVKKTLQQFPGGSIDLQKEDNGIGILTLNNPSRMNAFSEFREISLYQC

SEQ ID NO: 86093 - protein, 220 aa, Homo sapiens
MKFGGVQGSSLTFAQPLQGLSSLAEEAARATENPEQVASEGLPEPVLRKVELPVPTHRRPVQAWVESLRGFEQERVGLADLHPDVFATAPRLDILHQVAMWQKNFKRISYAKTKTRAEVRGGGRKPWPQKGTGRARHGSIRSPLWRGGGVAHGPRGPTSYYYMLPMKVRALGLKVALTVKLAQDDLHIMDSLELPTGDPQYLTELAHYRRWGDSVLLVDL

SEQ ID NO: 86094 - protein, 93 aa, Homo sapiens
MGEIEGTYRVLQTAGMRLGAQTPVGVSTLEPGQTLLPRMQEKHLHLRVKLLDNTMEIFDIEPKCDGQVLLTQVWKRLNLVECDYFGMEFQNTQ

SEQ ID NO: 86095 - protein, 82 aa, Homo sapiens
RGGDEVRRVRESNVLHEKSKGKTREGAEDKMTSGDVLSNRKMFYLLKTAFPSVQINTEEHVDAADQEAGAGESLEPERWRLQ

SEQ ID NO: 86096 - protein, 102 aa, Homo sapiens
MFEIDYSRDSFLKDGQPFRYISGSIHYSRVPRFYWKDRLLKMKMAGLNAIQTYVPWNFHEPWPGQYQFSEDHDVEYFLRLAHELGLLVILRPGPYICAEWEM

SEQ ID NO: 86097 - protein, 218 aa, Homo sapiens
MEASKVLDKSKAAESSCCFCTPPVPPSCAGPLRGIISPKTGMERPLCSHLCSCLAMLALLSPLSLAQYDSWPHYPEYFQQPAPEYHQPQAPANVAKIQLRLAGQKRKHSEGRVEVYYDGQWGTVCDDDFSIHAAHVVCRELGYVEAKSWTASSSYGKGEGPIWLDNLHCTGNEATLAACTSNGWGVTDCKHTEDVGVVCSDKRIPGFKFDNSLINQIE

SEQ ID NO: 86098 - protein, 342 aa, Homo sapiens
MPHSAGGTAGVGLEAAEPTALLTRAEPPSEPTEIRPQKRKKGPAPKMLGNELCSVCGDKASGFHYNVLSCEGCKGFFRRSVIKGAHYICHSGGHCPMDTYMRRKCQECRLRKCRQAGMREECVLSEEQIRLKKLKRQEEEQAHATSLPPRASSPPQILPQLSPEQLGMIEKLVAAQQQCNRRSFSDRLRVTVMLLETSRRYNPGSESITFLKDFSYNREDFAKAGLQVEFINPIFEFSRAMNELQLNDAEFALLIAISIFSADRPNVQDQLQVERLQHTYVEALHAYVSIHHPHDRLMFPRMLMKLVSLRTLSSVHSEQVFALRLQDKKLPPLLSEIWDVHE

SEQ ID NO: 86099 - protein, 138 aa, Homo sapiens
MLQNAQMHQLLLSRLVAGALQPRPASPCPQVYLEVPQEEPEEEEEEMDVREKGPLVFHHHYLPYLMPSPGALLPWPAPFFPTPACQPYLQDVPRIQHCPASREREVRAVPPPPPPSATGTVGADVPPASDYYDAESLL

SEQ ID NO: 86100 - protein, 168 aa, Homo sapiens
MRKSPGLSDCLWAWILLLSTLTGRSYGQPSLQDELKDNTTVFTRILDRLLDGYDNRLRPGLGERVTEVKTDIFVTSFGPVSDHDMEYTIDVFFRQSWKDERLKFKGPMTVLRLNNLMASKIWTPDTFFHNGKKSVAHNMTMPNKLLRITEDGTLLYTMRLTVRAECPM

SEQ ID NO: 86101 - protein, 104 aa, Homo sapiens
  MOD_RES (1)..(1): Any amino acid
XVKLRSDCSRPSLQWYTRAQSKMRRPSLLLKDILKCTLLVFGVWILYILKLNYTTEECDMKKMHYVDPDHVKTYTVPLKEAGPSLLKHSVSPGTSIFKPSLFSP

SEQ ID NO: 86102 - protein, 321 aa, Homo sapiens [sequence omitted]

SEQ ID NO: 86103 - protein, 2898 aa, Homo sapiens
MSEPGGGGGEDGSAGLEVSAVQNVADVSVLQKHLRKLVPLLLEDGGEAPAALEAALEEKSALEQMRKFLSDPQVHTVLVERSTLKEDVGDEGEEEKEFISYNINIDIHYGVKSNSLAFIKRTPVIDADKPVSSQLRVLTLSEDSPYETLHSFISNAVAPFFKSYIRESGKADRDGDKMAPSVEKKIAELEMGLLHLQQNIEIPEISLPIHPMITNVAKQCYERGEKPKVTDFGDKVEDPTFLNQLQSGVNRWIREIQKVTKLDRDPASGTALQEISFWLNLERALYRIQEKRESPEVLLTLDILKHGKRFHATVSFDTDTGLKQALETVNDYNPLMKDFPLNDLLSATELDKIRQALVAIFTHLRKIRNTKYPIQRALRLVEAISRDLSSQLLKVLGTRKLMHVAYEEFEKVMVACFEVFQTWDDEYEKLQVLLRDIVKRKREENLKMVWRINPAHRKLQARLDQMRKFRRQHEQLRAVIVRVLRPQVTAVAQQNQGEVPEPQDMKVAEVLFDAADANAIEEVNLAYENVKEVDGLDVSKEGTEAWEAAMKRYDERIDRVETRITARLRDQLGTAKNANEMFRIFSRFNALFVRPHIRGAIREYQTQLIQRVKDDIESLHDKFKVQYPQSQACKMSHVRDLPPVSGSIIWAKQIDRQLTAYMKRVEDVLGKGWENHVEGQKLKQDGDSFRMKLNTQEIFDDWARKVQQRNLGVSGRIFTIESTRVRGRTGNVLKLKVNFLPEIITLSKEVRNLKWLGFRVPLAIVNKAHQANQLYPFAISLIESVRTYERTCEKVEERNTISLLVAGLKKEVQALIAEGIALVWESYKLDPYVQRLAETVFNFQEKVDDLLIIEEKIDLEVRSLETCMYDHKTFSEILNRVQKAVDDLNLHSYSNLPIWVNKLDMEIERILGVRLQAGLRAWTQVLLGQAEDKAEVDMDTDAPQVSHKPGGEPKIKNVVHELRITNQVIYLNPPIEECRYKLYQEMFAWKMVVLSLPRIQSQRYQVGVHYELTEEEKFYRNALTRMPDGPVALEESYSAVMGIVSEVEQYVKVWLQYQCLWDMQAENIYNRLGEDLNKWQALLVQIRKARGTFDNAETKKEFGPVVIDYGKVQSKVNLKYDSWHKEVLSKFGQMLGSNMTEFHSQISKSRQELEQHSVDTASTSDAVTFITYVQSLKRKIKQFEKQVELYRNGQRLLEKQRFQFPPSWLYIDNIEGEWGAFNDIMRRKDSAIQQQVANLQMKIVQEDRAVESRTTDLLTDWEKTKPVTGNLRPEEALQALTIYEGKFGRLKDDREKCAKAKEALELTDTGLLSGSEERVQVALEELQDLKGVWSELSKVWEQIDQMKEQPWVSVQPRKLRQNLDALLNQLKSFPARLRQYASYEFVQRLLKGYMKINMLVIELKSEALKDRHWKQLMKRLHVNWVVSELTLGQIWDVDLQKNEAIVKDVLLVAQGEMALEEFLKQIREVWNTYELDLVNYQNKCRLIRGWDDLFNKVKEHINSVSAMKLSPYYKVFEEDALSWEDKLNRIMALFDVWIDVQRRWVYLEGIFTGSADIKHLLPVETQRFQSISTEFLALMKKVSKSPLVMDVLNIQGVQRSLERLADLLGKIQKALGEYLERERSSFPRFYFVGDEDLLEIIGNSKNVAKLQKHFKKMFAGVSSIILNEDNSVVLGISSREGEEVMFKTPVSITEHPKINEWLTLVEKEMRVTLAKLLAESVTEVEIFGKATSIDPNTYITWIDKYQAQLVVLSAQIAWSENVETALSSMGGGGDAAPLHSVLSNVEVTLNVLADSVLMEQPPLRRRKLEHLITELVHQRDVTRSLIKSKIDNAKSFEWLSQMRFYFDPKQTDVLQQLSIQMANAKFNYGFEYLGVQDKLVQTPLTDRCYLTMTQALEARLGGSPFGPAGTGKTESVKALGHQLGRFVLVFNCDETFDFQAMGRIFVGLCQVGAWGCFDEFNRLEERMLSAVSQQVQCIQEALREHSNPNYDKTSAPITCELLNKQVKVSPDMAIFITMNPGYAGRSNLPDNLKKLFRSLAMTKPDRQLIAQVMLYSQGFRTAEVLANKIVPFFKLCDEQLSSQSHYDFGLRALKSVLVSAGNVKRERIQKIKREKEERGEAVDEGEIAENLPEQEILIQSVCETMVPKLVAEDIPLLFSLLSDVFPGVQYHRGEMTALREELKKVCQEMYLTYGDGEEVGGMWVEKVLQLYQITQINHGLMMVGPSGSGKSMAWRVLLKALERLEGVEGVAHIIDPKAISKDHLYGTLDPNTREWTDGLFTHVLRKIIDSVRGELQKRQWIVFDGDVDPEWVENLNSVLDDNKLLTLPNGERLSLPPNVRIMFEVQDLKYATLATVSRCGMVWFSEDVLSTDMIFNNFLARLRSIPLDEGEDEAQRRRKGKEDEGEEAASPMLQIQRDAATIMQPYFTSNGLVTKALEHAFQLEHIMDLTRLRCLGSLFSMLHQACRNVAQYNANHPDFPMQIEQLERYIQRYLVYAILWSLSGDSRLKMRAELGEYIRRITTVPLPTAPNIPIIDYEVSISGEWSPWQAKVPQIEVETHKVAAPDVVVPTLDTVRHEALLYTWLAEHKPLVLCGPPGSGKTMTLFSALRALPDMEVVGLNFSSATTPELLLKTFDHYCEYRRTPNGVVLAPVQLGKWLVLFCDEINLPDMDKYGTQRVISFIRQMVEHGGFYRTSDQTWVKLERIQFVGACNPPTDPGRKPLSHRFLRHVPVVYVDYPGPASLTQIYGTFNRAMLRLIPSLRTYAEPLTAAMVEFYTMSQERFTQDTQPHYIYSPREMTRWVRGIFEALRPLETLPVEGLIRIWAHEALRLFQDRLVEDEERRWTDENIDTVALKHFPNIDREKAMSRPILYSNWLSKDEDVYRVTVLTCISLRSPR

SEQ ID NO: 86104 - protein, 162 aa, Homo sapiens
MAEQVLPQALYLSNMRKAVKIRERTPEDIFKPTNGIIHHFKTMHRYTLEMFRTCQFCPQFREIIHKALIDRNIQATLESQKKLNWCREVRKLVALKTNGDGNCLMHATSQYMWGVQDTDLVLRKALFSTLKETDTRNFKFRWQLESLKSQEFVETGLCYDTR

SEQ ID NO: 86105 - protein, 701 aa, Homo sapiens
MATRGGAGVAMAVWSLLSARAVTAFLLLFLPRFLQAQTFSFPFQQPEKCDNNQYFDISALSCVPCGANQRQDARGTSCVCLPGFQMISNNGGPAIICKKCPENMKGVTEDGWNCISCPSDLTAEGKCHCPIGHILDSNSGKWLLTRRIFLVDAVSGRENDLGTQPRVIRVATQISLSVHLVPNTINGNIYPPLITIAYSDIDIKDANSQSVKVSFSVTYEMDHGEAHVQTDIALGVLGGLAVLASLLKTAGWKRRIGSPMIDLQTVVKFLVYYAGDLANVFFIITVGTGLYWLIFFKAQKSVSVLLPMPIQEERFVTYVGCAFALKALQFLHKLISQITIDVFFIDWERPKGKVLKAVEGEGGVRSATVPVSIWRTYFVANEWNEIQTVRKINSLFQVLTVLFFLEVVGFKNLALMDSSSSLSRNPPSYIAPYSCILRYAVSAALWLAIGIIQVVFFAVFYERFIEDKIRQFVDLCSMSNISVFLLSHKCFGYYIHGRSVHGHADTNMEEMNMNLKREAENLCSQRGLVPNTDGQTFEIAISNQMRQHYDRIHETLIRKNGPARLLSSSASTFEQSIKAYHMMNKFLGSFIDHVHKEMDYFIKDKLLLERILGMEFMEPMEKSIFYNDEGYSFSSVLYYGNEATLLIFDLLFFCVVDLACQNFILASFLTYLQQEIFRYIRNTVGQKNLASKTLVDQRFLI

SEQ ID NO: 86106 - protein, 808 aa, Homo sapiens
MPEPGKKPVSAFSKKPRSVEVAAGSPAVFEAETERAGVKVRWQRGGSDISASNKYGLATEGTRHTLTVREVGPADQGSYAVIAGSSKVKFDLKVIEAEKAEPMLAPAPAPAEATGAPGEAPAPAAELGESAPSPKGSSSAALNGPTPGAPDDPIGLFVMRPQDGEVTVGGSITFSARVAGASLLKPPVVKWFKGKWVDLSSKVGQHLQLHDSYDRASKVYLFELHITDAQPAFTGSYRCEVSTKDKFDCSNFNLTVHEAMGTGDLDLLSAFRRTSLAGGGRRISDSHEDTGILDFSSLLKKRDSFRTPRDSKLEAPAEEDVWEILRQAPPSEYERIAFQYGVTDLRGMLKRLKGMRRDEKKSTAFQKKLEPAYQVSKGHKIRLTVELADHDAEVKWLKNGQEIQMSGSKYIFESIGAKRTLTISQCSLADDAAYQCVVGGEKCSTELFVKEPPVLITRPLEDQLVMVGQRVEFECEVSEEGAQVKWLKDGVELTREETFKYRFKKDGQRHHLIINEAMLEDAGHYALCTSGGQALAELIVQEKKLEVYQSIADLMVGAKDQAVFKCEVSDENVRGVWLKNGKELVPDSRIKVSHIGRVHKLTIDDVTPADEADYSFVPEGFACNLSAKLHFMEVKIDFVPRQEPPKIHLDCPGRIPDTIVVVAGNKLRLDVPISGDPAPTVIWQKAITQGNKAPARPAPDAPEDTGDSDEWVFDKKLLCETEGRVRVETTKDRSIFTVEGAEKEDEGVYTVTVKNPVGEDQVNLTVKVIDVPDAPAAPKISNVGEDSCTVQWEPPAYDGGQPILGAES

SEQ ID NO: 86107 - protein, 242 aa, Homo sapiens
MTVVGNPRSWSCQWLPILILLLGTGHGPGVEGVTHYKAGDPVILYVNKVGPYHNPQETYHYYQLPVCCPEKIRHKSLSLGEVLDGDRMAESLYEIRFRENVEKRILCHMQLSSAQVEQLRQAIEELYYFEFVVDDLPIRGFVGYMEESGFLPHSHKIGLWTHLDFHLEFHGDRIIFANVSVRDVKPHSLDGLRPDEFLGLTHTYSVRWSETSVERRSDRRRGDDGGFFPRTLEIHWLSIINS

SEQ ID NO: 86108 - protein, 455 aa, Homo sapiens
MLTKFETKSARVKGLSFHPKRPWILTSLHNGVIQLWDYRMCTLIDKFDEHDGPVRGIDFHKQQPLFVSGGDDYKIKVWNYKLRRCLFTLLGHLDYIRTTFFHHEYPWILSASDDQTIRVWNWQSRTCVCVLTGHNHYVMCAQFHPTEDLVVSASLDQTVRVWDISGLRKKNLSPGAVESDVRGITGVDLFGTTDAVVKHVLEGHDRGVNWAAFHPTMPLIVSGADDRQVKIWRMNESKAWEVDTCRGHYNNVSCAVFHPRQELILSNSEDKSIRVWDMSKRTGVQTFRRDHDRFWVLAAHPNLNLFAAGHDGGMIVFKLERERPAYAVHGNMLHYVKDRFLRQLDFNSSKDVAVMQLRSGSKFPVFNMSYNPAENAVLLCTRASNLENSTYDLYTIPKDADSQNPDAPEGKRSSGLTAVWVARNRFAVLDRMHSLLIKNLKNEITKKDSGICEDF

SEQ ID NO: 86109 - protein, 192 aa, Homo sapiens [sequence omitted]

SEQ ID NO: 86110 - protein, 576 aa, Homo sapiens
MEEFVGLREGSSGNPVTLQELWGPCPRIRRGIRGGLEWLKQKLFRLGEDWYFLMTLGVLMALVSCAMDLAVESVVRAHQWLYREIGDSHLLRYLSWTVYPVALVSFSSGFSQSITPSSGGSGIPEVKTMLAGVVLEDYLDIKNFGAKVVGLSCTLACGSTLFLGKVGPFVHLSVMMAAYLGRVRTTTIGEPENKSKQNEMLVAAAAVGVATVFAAPFSGVLFSIEVMSSHFSVWDYWRGFFAATCGAFMFRLLAVFNSEQETITSLYKTSFRVDVPFDLPEIFFFVALGGLCGILGSAYLFCQRIFFGFIRNNRFSSKLLATSKPVYSALATLVLASITYPPSAGRFLASRLSMKQHLDSLFDNHSWALMTQNSSPPWPEELDPQHLWWEWYHPRFTIFGTLAFFLVMKFWMLILATTIPMPAGYFMPIFVYGAAIGRLFGETLSFIFPEGIVAGGITNPIMPGGYALAGAAAFSGAVTHTISTALLAFEVTGQIVHALPVLMAVLAANAIAQSCQPSFYDGTVIVKKLPYLPRILGRNIGSHRVRVEHFMNHSITTLAKDMPLEEVVKSPRSWWA

SEQ ID NO: 86111 - protein, 49 aa, Homo sapiens
  MOD_RES (1)..(1): Any amino acid
XLRVFRSGRPRRLRVLRINRTSVALRLAGTGRFVAKTPGHPGSWEMGPV

SEQ ID NO: 86112 - protein, 1202 aa, Homo sapiens
MKQPIMADGPRCKRRKQANPRRKNVVNYDNVVDTGSETDEEDKLHIAEDDGIANPLDQETSPASVPNHESSPHVSQALLPREEEEDEIREGGVEHPWHNNEILQASVDGPEEMKEDYDTMGPEATIQTAINNGTVKNANCTSDFEEYFAKRKLEERDGHAVSIEEYLQRSDTAIIYPEAPEELSRLGTPEANGQEENDLPPGTPDAFAQLLTCPYCDRGYKRLTSLKEHIKYRHEKNEENFSCPLCSYTFAYRTQLERHMVTHKPGTDQHQMLTQGAGNRKFKCTECGKAFKYKHHLKEHLRIHSGEKPYECPNCKKRFSHSGSYSSHISSKKCIGLISVNGRMRNNIKTGSSPNSVSSSPTNSAITQLRNKLENGKPLSMSEQTGLLKIKTEPLDFNDYKVLMATHGFSGTSPFMNGGLGATSPLGVHPSAQSPMQHLGVGMEAPLLGFPTMNSNLSEVQKVLQIVDNTVSRQKMDCKAEEISKLKGYHMKDPCSQPEEQGVTSPNIPPVGLPVVSHNGATKSIIDYTLEKVNEAKACLQSLTTDSRRQISNIKKEKLRTLIDLVTDDKMIENHNISTPFSCQFCKESFPGPIPLHQHERYLCKMNEEIKAVLQPHENIVPNKAGVFVDNKALLLSSVLSEKGMTSPINPYKDHMSVLKAYYAMNMEPNSDELLKISIAVGLPQEFVKEWFEQRKVYQYSNSRSPSLERSSKPLAPNSNPPTKDSLLPRSPVKPMDSITSPSIAELHNSVTNCDPPLRLTKPSHFTNIKPVEKLDHSRSNTPSPLNLSSTSSKNSHSSSYTPNSFSSEELQAEPLDLSLPKQMKEPKSIIATKNKTKASSISLDHNSVSSSSENSDEPLNLTFIKKEFSNSNNLDNKSTNPVFSMNPFSAKPLYTALPPQSAFPPATFMPPVQTSIPGLRPYPGLDQMSFLPHMAYTYPTGAATFADMQQRRKYQRKQGFQGELLDGAQDYMSGLDDMTDSDSCLSRKKIKKTESGMYACDLCDKTFQKSSSLLRHKYEHTGKRPHQCQICKKAFKHKHHLIEHSRLHSGEKPYQCDKCGKRFSHSGSYSQHMNHRALPLRGTLTRRRGRVCRGMARARRSTRKKARMATGSWADRMATRSSRRKRKKVKIKVWIRIPKRYEMKKRLEITPWTIVRRMGKWKPNQTTRKTIWKMACNKLLHFKLPIFFSSSIVTCLKTLLC

SEQ ID NO: 86113 - protein, 220 aa, Homo sapiens
MFAWEIRDRLLAERVCDNDTVPSVSSINRIIRTKVQQPPNQPVPASSHSIVSTGSVTQVSSVSTDSAGSSYSISGILGITSPSADTNKRKRDEGIQESPVPNGHSLPGRDFLRKQMRGDLFTQQQLEVLDRVFERQHYSDIFTTTEPIKPEQTTEYSAMASLAGGLDDMKANLASPTPADIGSSVPGPQSYPIVTGSPYYYSAAARGAAPPAAATAYDRH

SEQ ID NO: 86114 - protein, 400 aa, Homo sapiens
  MOD_RES (1)..(1): Any amino acid
XGRADPEEELSLTFALRQQNVERLSELVQAVSDPSSPQYGKYLTLENVADLVRPSPLTLHTVQKWLLAAGAQKCHSVITQDFLTCWLSIRQAELLLPGAEFHHYVGGPTETHVVRSPHPYQLPQALAPHVDFGRHEGQEPFLQWLMLLSNESALPHVHTVSYGDDEDSLSSAYIQRVNTELMKAAARGLTLLFASGDSGAGCWSVSGRHQFRPTFPASSPYVTTVGGTSFQEPFLITNEIVDYISGGGFSNVFPRPSYQEEAVTKFLSSSPHLPPSSYFNASGRAYPDVAALSDGYWVVSNRVPIPWVSGTSASTPVFGGILSLINEHRILSGRPPLGFLNPRLYQQHGAGLFDVTRGCHESCLDEEVEGQGFCSGPGWDPVTGWGTPNFPALLKTLLNP

SEQ ID NO: 86115 - protein, 97 aa, Homo sapiens
MLSVQPDTKPKGCAGCNRKIKDRYLLKALDKYWHEDCLKCACCDCRLGEVGSTLYTKANLILCRRDYLRLFGVTGNCAACSKLIPAFEMVMRAKDNV

SEQ ID NO: 86116 - protein, 1522 aa, Homo sapiens
MLKRKQSSRVEAQPVTDFGPDESLSDNADILWINKPWVHSLLRICAIISVISVCMNTPMTFEHYPPLQYVTFTLDTLLMFLYTAEMIAKMHIRGIVKGDSSYVKDRWCVFDGFMVFCLWVSLVLQVFEIADIVDQMSPWGMLRIPRPLIMIRAFRIYFRFELPRTRITNILKRSGEQIWSVSIFLLFFLLLYGILGVQMFGTFTYHCVVNDTKPGNVTWNSLAIPDTHCSPELEEGYQCPPGFKCMDLEDLGLSRQELGYSGFNEIGTSIFTVYEAASQEGWVFLMYRAIDSFPRWRSYFYFITLIFFLAWLVKNVFIAVIIETFAEIRVQFQQMWGSRSSTTSTATTQMFHEDAAGGWQLVAVDVNKPQGRAPACLQKMMRSSVFHMFILSMVTVDVIVAASNYYKGENFRRQYDEFYLAEVAFTVLFDLEALLKIWCLGFTGYISSSLHKFELLLVIGTTLHVYPDLYHSQFTYFQVLRVVRLIKISPALEDFVYKIFGPGKKLGSLVVFTASLLIVMSAISLQMFCFVEELDRFTTFPRAFMSMFQILTQEGWVDVMDQTLNAVGHMWAPVVAIYFILYHLFATLILLSLFVAVILDNLELDEDLKKLKQLKQSEANADTKEKLPLRLRIFEKFPNRPQMVKISKLPSDFTVPKIRESFMKQFIDRQQQDTCCLLRSLPTTSSSSCDHSKRSAIEDNKYIDQKLRKSVFSIRARNLLEKETAVTKILRACTRQRMLSGSFEGQPAKERSILSVQHHIRQERRSLRHGSNSQRISRGKSLETLTQDHSNTVRYRNAQREDSEIKMIQEKKEQAEMKRKVQEEELRENHPYFDKPLFIVGREHRFRNFCRVVVRARFNASKTDPVTGAVKNTKYHQLYDLLGLVTYLDWVMIIVTICSCISMMFESPFRRVMHAPTLQIAEYVFVIFMSIELNLKIMADGLFFTPTAVIRDFGGVMDIFIYLVSLIFLCWMPQNVPAESGAQLLMVLRCLRPLRIFKLVPQMRKVVRELFSGFKEIFLVSILLLTLMLVFASFGVQLFAGKLAKCNDPNIIRREDCNGIFRINVSVSKNLNLKLRPGEKKPGFWVPRVWANPRNFNFDNVGNAMLALFEVLSLKGWVEVRDVIIHRVGPIHGIYIHVFVFLGCMIGLTLFVGVVIANFNENKGTALLTVDQRRWEDLKSRLKIAQPLHLPPRPDNDGFRAKMYDITQHPFFKRTIALLVLAQSVLLSVKWDVEDPVTVPLATMSVVFTFIFVLEVTMKIIAMSPAGFWQSRRNRYDLLVTSLGVVWVVLHFALLNAYTYMMGACVIVFRFFSICGKHVTLKMLLLTVVVSMYKSFFIIVGMFLLLLCYAFAGVVLFGTVKYGENINRHANFSSAGKAITVLFRIVTGEDWNKIMHDCMVQPPFCTPDEFTYWATDCGNYAGALMYFCSFYVIIAYIMLNLLVAIIVENFSLFYSTEEDQLLSYNDLRHFQIIWNMVDDKRETFRRPAGKGSQRDSVGISLGLRPEKEVTLKLPKGQYITNS

SEQ ID NO: 86117 - protein, 102 aa, Homo sapiens
DGGKMAAAGALERSFVELSGAERERPRHFREFTVCSIGTANAVAGAVKYSESAGGFYYVESGKLFSVTRNRFIHWYGVSRGTETEFSNATIAYRLDANSYQG

SEQ ID NO: 86118 - protein, 1126 aa, Homo sapiens
MISDGRPNFEEGGPTSVGRKHEFIRSESENWRIFREEQNGEDEDGGWRLAGSRRDGERWRPHSPDGPRSAGWREHMERRRRFEFDFRDRDDERGYRRVRSGSGSIDDDRDSLPEWCLEDAEEEMGTFDSSGAFLSLKKVQKEPIPEEQEMDFRPVDEGEECSDSEGSHNEEAKEPDKTNKKEGEKTDRVGVEASEETPQTSSSSARPGTPSDHQSQEASQFERKDEPKTEQTEKAEEETRMENSLPAKVPSRGDEMVADVQQPLSQIPSDTASPLLILPPPVPNPSPTLRPVETPVVGAPGMGSVSTEPDDEEGLKHLEQQAEKMVAYLQDSALDDERLASKLQEHRAKGVSIPLMHEAMQKWYYKDPQGEIQGPFNNQEMAEWFQAGYFTMSLLVKRACDESFQPLGDIMKMWGRVPFSPGPAPPPHMGELDQERLTRQQELTALYQMQHLQYQQFLIQQQYAQVLAQQQKAALSSQQQQQLALLLQQFQTLKMRISDQNIIPSVTRSVSVPDTGSIWELQPTASQPTVWEGGSVWDLPLDTTTPGPALEQLQQLEKAKAAKLEQERREAEMRAKREEEERKRQEELRRQQEEILRRQQEEERKRREEEELARRKQEEALRRQREQEIALRRQREEEERQQQEEALRRLEERRREEEERRKQEELLRKQEEEAAKWAREEEEAQRRLEENRLRMEEEAARLRHEEEERKRKELEVQRQKELMRQRQQQQEALRRLQQQQQQQQLAQMKLPSSSTWGQQSNTTACQSQATLSLAEIQKLEEERERQLREEQRRQQRELMKALQQQQQQQQQKLSGWGNVSKPSGTTKSLLEIQQEEARQMQKQQQQQQQHQQPNRARNNTHSNLHTSIGNSVWGSINTGPPNQWASDLVSSIWSNADTKNSNMGFWDDAVKEVGPRNSTNKNKNNASLSKSVGVSNRQNKKVEEEEKLLKLFQGVNKAQDGFTQWCEQMLHALNTANNLDVPTFVSFLKEVESPYEVHDYIRAYLGDTSEAKEFAKQFLERRAKQKANQQRQQQQLPQQQQQQPPQQPPQQPQQQDSVWGMNHSTLHSVFQTNQSNNQQSNFEAVQSGKKKKKQKMVRADPSLLGFSVNASSERLNMGEIETLDDY

SEQ ID NO: 86119 - protein, 39 aa, Homo sapiens
MKLYLRTGEGLPEADGKAKEQEALSNMDDYDKTCLESAL

SEQ ID NO: 86120 - protein, 417 aa, Homo sapiens
MNDRCPRPGSSSLARGCLLSVADGAGREGGPGPALPGLGRCCWRLALHQASLWQESELCRGRRLRMMPQLQFKDAFWCRDFTAHTGYEVLLQRLLDGRKMCKDMEELLRQRAQAEERYGKELVQIARKAGGQTEINSLRASFDSLKQQMENVGSSHIQLALTLREELRSLEEFRERQKEQRKKYEAVMDRVQKSKLSLYKKAMESKKTYEQKCRDADDAEQAFERISANGHQKQVEKSQNKARQCKDSATEAERVYRQSIAQLEKVRAEWEQEHRTTCEAFQLQEFDRLTILRNALWVHSNQLSMQCVKDDELYEEVRLTLEGCSIDADIDSFIQAKSTGTEPPGEVRLADSAASSSGALPELLRSGGHPADQQPWHTAVLRHDKEVLWTAARKSQDHFVGSFCCVHRDPDPHPRAE

SEQ ID NO: 86121 - protein, 176 aa, Homo sapiens
MRVRWGIQQNSGFGKTSLNRRGRVMPGKRRPNGVITGLAARKTTGIRKGISPMNRPPLSDKNIEQYFPVLKRKANLLRQNEGQRKPVAVLKRPSQLSRKNNIPANFTRSGNKLNHQKDTRQATFLFRRGLKVQAQLNTEQLLDDVVAKRTRQWRTSTTNGGILTVSIDNPGAVQCP

SEQ ID NO: 86122 - protein, 376 aa, Homo sapiens
MTTLVLDNGAYNAKIGYSHENVSVIPNCQFRSKTARLKTFTANQIDEIKDPSGLFYILPFQKGYLVNWDVQRQVWDYLFGKEMYQVDFLDTNIIITEPYFNFTSIQESMNEILFEEYQFQAVLRVNAGALSAHRYFRDNPSELCCIIVDSGYSFTHIVPYCRSKKKKEAIIRINVGGKLLTNHLKEIISYRQLHVMDETHVINQVKEDVCYVSQDFYRDMDIAKLKGEENTVMIDYVLPDFSTIKKGFCKPREEMVLSGKYKSGEQILRLANERFAVPEILFNPSDIGIQEMGIPEAIVYSIQNLPEGFRDRVYSEVRCLTPTDYDVSVVLPENPITYAWEGGKLISENDDFEDMVVTREDYEENGHSVCEEKFDI

SEQ ID NO: 86123 - protein, 173 aa, Homo sapiens
MTAEETVNVKEVEIIKLILDFLNSKKLHISMLALEKESGVINGLFSDDMLFLRQLILDGQWDEVLQFIQPLECMEKFDKKRFRYIILKQKFLEALCVNNAMSAEDEPQHLEFTMQEAVQCLHALEEYCPSKDDYSKLCLLLTLPRLTNHAEFKDWNPSTARVHCFEEACVMVA

SEQ ID NO: 86124 - protein, 68 aa, Homo sapiens
MSTRKRRGGAINSRQAQKRTREATSTPEISLEAEPIELVETAGDEIVDLTCESLEPVVVDLTHNDSVV

SEQ ID NO: 86125 - protein, 262 aa, Homo sapiens
  MOD_RES (1)..(1): Any amino acid
XFLTLSVTWIGAAPLILSRIVGGWECEKHSQPWQVLVASRGRAVCGGVLVHPQWVLTAAHCIRNKSVILLGRHSLFHPEDTGQVFQVSHSFPHPLYDMSLLKNRFLRPGDDSSHDLMLLRLSEPAELTDAVKVMDLPTQEPALGTTCYASGWGSIEPEECTPGPDVLTPKKLQCVDLHVISNDVCAQVHPQKVTKFMLCAGRWTGGKSTCSGDSGGPLVCNGVLQGITSWGSEPCALPERPSLYTKVVHYRKWIKDTIVANP

SEQ ID NO: 86126 - protein, 526 aa, Homo sapiens
MVSLVSDLDPLKNWKVLRETATELAGSLPSNGTANKMNGALDHSDQPDPDAIKMFVGQIPRSWSEKELKELFEPYGAVYQINVLRDRSQNPPQSKGCCFVTFYTRKAALEAQNALHNIKTLPGMHHPIQMKPADSEKSNAVEDRKLFIGMVSKKCNENDIRVMFSPFGQIEECRILRGPDGLSRGCAFVTFSTRAMAQNAIKAMHQSQTMEGCSSPIVVKFADTQKDKEQRRLQQQLAQQMQQLNTATWGNLTGLGGLTPQYLALLQQATSSSNLGAFSGIQQMAGMNALQLQNLATLAAAAAAAQTSATSTNANPLSTTSSALGALTSPVAASTPNSTAGAAMNSLTSLGTLQGLAGATVGLNNINALAVAQMLSGMAALNGGLGATGLTNGTAGTMDALTQAYSGIQQYAAAALPTLYSQSLLQQQSAAGSQKEGPEGANLFIYHLPQEFGDQDILQMFMPFGNVISAKVFIDKQTNLSKCFGFVSYDNPVSAQAAIQAMNGFQIGMKRLKVQLKRSKNDSKPY

SEQ ID NO: 86127 - protein, 187 aa, Homo sapiens
MPSLPHSHRVMLDSVTHSTFLPNASFCDPLMSWTDLFSNEEYYPAFEHQTGYSFFNDAEESKATIKDYADSNCLKTSGIKSQDCHSHSRTSLQSSHLWEFVRDLLLSPEENCGILEWEDREQGIFRVVKSEALAKMWGQRKKNDRMTYEKLSRALRYYYKTGILERVDRRLVYKFGKNAHGWQEDKL

SEQ ID NO: 86128 - protein, 639 aa, Homo sapiens
MPSTSFPVPSKFPLGPAAAVFGRGETLGPAPRAGGTMKSAEEEHYGYASSNVSPALPLPTAHSTLPAPCHNLQTSTPGIIPPADHPSGYGAALDGGPAGYFLSSGHTRPDGAPALESPRIEITSCLGLYHNNNQFFHDVEVEDVLPSSKRSPSTATLSLPSLEAYRDPSCLSPASSLSSRSCNSEASSYESNYSYPYASPQTSPWQSPCVSPKTTDPEEGFPRGLGACTLLGSPRHSPSTSPRASVTEESWLGARSSRPASPCNKRKYSLNGRQPPYSPHHSPTPSPHGSPRVSVTDDSWLGNTTQYTSSAIVAAINALTTDSSLDLGDGVPVKSRKTTLEQPPSVALKVEPVGEDLGSPPPPADFAPEDYSSFQHIRKGGFCDQYLAVPQHPYQWAKPKPLSPTSYMSPTLPALDWQLPSHSGPYELRIEVQPKSHHRAHYETEGSRGAVKASAGGHPIVQLHGYLENEPLMLQLFIGTADDRLLRPHAFYQVHRITGKTVSTTSHEAILSNTKVLEIPLLPENSMRAVIDCAGILKLRNSDIELRKGETDIGRKNTRPSAQLRSCLWWRSRARTAIRSWAGRRWSCLATTSCRTPRSFSWRKPQMATMSGRWKRKLTGTCASRILWWLRSRHFGIRG

SEQ ID NO: 86129 - protein, 53 aa, Homo sapiens
MGDPGSEIIESVPPAGPEASESTTDENEDDIQFVSITKELHIQYLSHLLQRNF

SEQ ID NO: 86130 - protein, 359 aa, Homo sapiens
MGRRRAPELYRAPFPLYALQVDPSTGLLIAAGGGGAAKTGIKNGVHFLQLELINGRLSASLLHSHDTETRATMNLALAGDILAAGQDAHCQLLRFQAHQQQGNKAEKAGSKEQGPRQRKGAAPAEKKCGAETQHEGLELRVENLQAVQTDFSSDPLQKVVCFNHDNTLLATGGTDGYVRVWKVPSLEKVLEFKAHEGEIEDLALGPDGKLVTVGRDLKASVWQKDQLVTQLHWQENGPTFSSTPYRYQACSESGTFLGLGTVTGSVAIYIAFSLQCLYYVREAHGIVVTDVAFLPEKGRGPELLGSHETALFSVAVDSRCQLHLLPSRRSVPVWLLLLLCVGLIIVTILLLQSAFPGFL

SEQ ID NO: 86131 - protein, 55 aa, Homo sapiens
MAAGETQLYAKVSNKLKSRSSPSLLEPLLAMGFPVHTALKALAATGRKTAEEALA

SEQ ID NO: 86132 - protein, 170 aa, Homo sapiens
MKCFFLRRRTFTRSACLGEEPDSEASQSPQYSFESLPQKICLICGDEASGCHYGVLTCGSCKVFFKRAMEGQHNYLCAGRNDCIVDKIRRKNCPACRLRKCCQAGMVLGGRKFKKFNKVRVVRALDAVALPQPVGVPNESQALSQRFTFSPGQDIQLIPPLINLLMSIEP

SEQ ID NO: 86133 - protein, 60 aa, Homo sapiens
MFRSDAYHPDHFNCTHCGTLSVPSVRSHSWGTGTMRRRAWPTARLTTTSSSGTSATTAAM

SEQ ID NO: 86134 - protein, 332 aa, Homo sapiens
  MOD_RES (1)..(1): Any amino acid
XFDVAESVIPSSGTFHVKLPKKRSVELGITISSASRKRGEPLIISDIKKGSVAHRTGTLEPGDKLLAIDNIRLDNCPMEDAVQILRQCEDLVKLKIRKDEDNSDELETTGAVSYTVELKRYGGPLGITISGTEEPFDPIVISGLTKRGLAERTGAIHVGDRILAINNVSLKGRPLSEAIHLLQVAGETVTLKIKKQLDRPLLPRKSGSLSETSDADEDPADALKGGLPAARFSPAVPSVDSAVESWDSSATEGGFGGPGSYTPQAAARGTTPQERRPGWLRGSPPPTEPRRTSYTPTPADESFPEEEEEDDWEPPTRHPVSPLSTPSHLPLF

SEQ ID NO: 86135 - protein, 679 aa, Homo sapiens
  MOD_RES (1)..(1): Any amino acid
XRLDETVVNRIAAGEVIQRPANAIKEMIENCLDAKSTSIQVIVKEGGLKLIQIQDNGTGIRKEDLDIVCERFTTSKLQSFEDLASISTYGFRGEALASISHVAHVTITTKTADGKCAYRASYSDGKLKAPPKPCAGNQGTQITVEDLFYNIATRRKALKNPSEEYGKILEVVGRYSVHNAGISFSVKKQGETVADVRTLPNASTVDNIRSIFGNAVSRELIEIGCEDKTLAFKMNGYISNANYSVKKCIFLLFINHRLVESTSLRKAIETVYAAYLPKNTHPFLYLSLEISPQNVDVNVHPTKHEVHFLHEESILERVQQHIESKLLGSNSSRMYFTQTLLPGLAGPSGEMVKSTTSLTSSSTSGSSDKVYAHQMVRTDSREQKLDAFLQPLSKPLSSQPQAIVTEDKTDISSGRARQQDEEMLELPAPAEVAAKNQSLEGDTTKGTSEMSEKRGPTSSNPRKRHREDSDVEMVEDDSRKEMTAACTPRRRIINLTSVLSLQEEINEQGHEVLREMLHNHSFVGCVNPQWALAQHQTKLYLLNTTKLSEELFYQILIYDFANFGVLRLSEPAPLFDLAMLALDSPESGWTEEDGPKEGLAEYIVEFLKKKAEMLADYFSLEIDESEVPGSIPNSWKWTVEHIVYKALRSHILPPKHFTEDGNILQLANLPDLYKVFERC

SEQ ID NO: 86136 - protein, 107 aa, Homo sapiens
MAAAALRAPTQDEWGLLDEAQRLLYLEVMLENFALVASLGCGHGTEDEETPSDQNVSVGVSQSKAGSSTQKTQSCEMCVPVLKDILHLADLPGQKPYLVGECTNHHQ

SEQ ID NO: 86137 - protein, 176 aa, Homo sapiens
MADAASPCSVVNDLRWDLSAQQIEERTRELIEQTKRVYDQVGTQEFEDVSYESTLKALADVEVTYTVQRNILDFPQHVSPSKDIRTASTEADKKLSEFDVEMSMREDVYQRIVWLQEKVQKDSLRPEAARYLERLIKLGRRNGLHLPRETQENIKRIKKKLSLLCIDFNKNLNEDT

SEQ ID NO: 86138 - protein, 127 aa, Homo sapiens
MKKKLVVLGLLAVVLVLVIVGLCLWLPSASKEPDNHVYTRAAVAADAKQCSKIGRDALRDGGSAVDAAIAALLCVGLMNAHSMGIGGGLFLTIYNSTTRKAEVINAREVAPRLAFATMFNSSEQSQK

SEQ ID NO: 86139 - protein, 198 aa, Homo sapiens
ANLLIFILLLTLTILTIWLFKHRRARFLHETGLAMIYGLLVGLVLRYGIHVPSDVNNVTLSCEVQSSPTTLLVNVSGKFYEYMLKGEISSHELNNVQDNEMLRKVTFDPEVFFNILLPPIIFYAGYSLKRRHFFRNLGSILAYAFLGTAISCFVIGSIMYGCVTLMKVTGQLAGDFYFTDCLLFGAIVSATDPGLLPE

SEQ ID NO: 86140 - protein, 489 aa, Homo sapiens
  MOD_RES (1)..(1): Any amino acid
XEYLQVRRVKRQQNEMAERFHHVTVLQIYFCDWQQAWERRESLYAHHAQVEKLARKMALRRAFTHWKHYMLLCAEEAAQFEMAEEHHRHSQLYFCFRALKDNVTHAHLQQIRRNLAHQQHGVTLLHRFWNLWRSQIEQKKERELLPLLHAAWDHYRIALLCKCIELWLQYTQKRRYKQLLQARADGHFQQRALPAAFHTWNRLWRWRHQENVLSARATRFHRETLEKQVFSLWRQKMFQHRENRLAERMAILHAERQLLYRSWFMWHQQAAARHQEQEWQTVACAHHRHGRLKKAFCLWRESAQGLRTESWSSGGKLCQCRCITDSRRTVPSGRPRRCWTGAVCGPGFSAGGTAAGGQPSRDCSWRGQCNTTTGSCCWRGWPGGRRTICSVSGRGSCTGRAPNCWHRDSAGPASASGDNSWQPGGRSSGRQCGPCGSGPSRCRQRCGPRGWPLYWKGGERRRGCSGRSRPTRGSSSRRVPRGSCALQPA

SEQ ID NO: 86141 - protein, 140 aa, Homo sapiens
MGWRPGRGAPHFLGENEILATLHAISSKNQIWRSYIGMGYYNCSVPQTILRNLLENSGWITQYTPYQPEVSQGRLESLLNYQTMVCDITGLDMANASLLDEGTAAAEALQLCYRHNKRRKFLVDPRCHPQTIAVVQTRAK

SEQ ID NO: 86142 - protein, 65 aa, Homo sapiens
MAETLFWTPLLVGKLGPCSAGRPRMRGQDLGVFSWQGWGTPRPSRPRYTHLWAVSLCTPWTMRRF

SEQ ID NO: 86143 - protein, 909 aa, Homo sapiens
  MOD_RES (1)..(1): Any amino acid
XIRLSDVTRERRNIPETLELSAEAKAALLEFEERERQHKQGRYSSRRGGRRGGPLMCRGVGDQRRESTERGRMKDHRPALLPTQPPVVPQAPPPPPPPPQQQPIRSLFQPQPLQPLLPVQHPHHPSPPQGMHMPPQLETPRMMMTPPPVTPQQPKNIHINPHFKGTVVTPVQVPLLPVPSQPRPAVGPQRFPGPPEFPQHTPGPVPNSFSQPPRLPLQDQWRAPPPPQDRDPFFLGVSGEPRFPSHLFLEQRSPPPPPPPPTLLNSSHPVPTQSPLPFTQPGPAFNQQGQQPVFPRERPVRPALQPPGPVGILHFSQPGSATTRPFIPPRQPFLPGPGQPFLPTHTQPNLQGPLHPPLPPPHQPQPQQPQQQPPPQHQPPHQPPHQPPPQHQPPPQHPPQHPPQHQHHHHHHHLSVPPPPLMPMSQPQFRPHVQTAQPQASSSRMQCPQRQGLRHNTTSQNVSKRPMQQMQPTAPRNSNLRELPIAPSHVIEMSSSRCSATPSAQVKPIVSASPPSRAVAGSRSSQGKTEVKVKPASPVAQPKEEAKTETEFPDEDEETRLYRLKIEEQKRLREEILKQKELRRQQQAGARKKELLERLAQQQQQLYAPPPPAEQEEQALSPSPTNGNPLLPFPGAQVRQNVKNRLLVKNQDVSISNVQPKTSNFVPSSANMQYQGQQMKALKHLRQTRTVPQSQTQPLHKVLPIKPADVEEPAVPQTPRVASIQGRPQDTKPGVKRTVTHRTNSGGGDGPHISSKVRVIKLSGGQGGESDGFFHPEGQPQRLPQPPEVGPQPARKVTLTRGGLQQPPHLPAGPHAHSPVPPGIKSIQGIHPAKKAIMHGRGRGVAGPMGRGRLMPNKQNLRVVECKPQPCVVSVEGLSSSTTDAQLKSLLMSVGPIQVAAWGWHLCHG

SEQ ID NO: 86144 - protein, 188 aa, Homo sapiens
VLSFKGYWEKLNSNLEYVKYAKPHFHYNNSVVRREWHNLISEEKTGKRRSAAYVRNILDNAVKVISNLEARNLGPRLTPLLQEEDSHQRLLMGLLDLICHIVETNWRKHNLHSWVLHFNSRGSAAEFAVFHIMTRILEATNSLFLPLPPGFHTLHTILGVQCLPLHNLLHCIDSGVLLLTETAVIRLM

SEQ ID NO: 86145 - protein, 136 aa, Homo sapiens
MSVPGPYQAATGPSSAPSAPPSYEETVAVNSYYPTPPAPMPGPTTGLVTGPDGKGMNPPSYYTQPAPIPNNNPITVQTVYVQHPITFLDRPIQMCCPSCNKMIVSQLSYNAGALTWLSCGSLCLLGQECSGTIVAL

SEQ ID NO: 86146 - protein, 70 aa, Homo sapiens
  MOD_RES (1)..(1): Any amino acid
XPHHSTQSDTCPLAQEEILEINRAGHSAEMDNSIWFFLRETEPSHVSTYGVPIEDSTFAIASWNLESLLR

SEQ ID NO: 86147 - protein, 8 aa, Homo sapiens
SQTYQQRT

SEQ ID NO: 86148 - protein, 99 aa, Homo sapiens
AIMRKPRAAVGSGHRKQAASQEGRQKHAKNNSQAKPSACDGGRGARGPHATYSRDPAAAPAWRGALHSWGHCLYRLWPGNRCGGWQRSTGAVPCPSHWC

SEQ ID NO: 86149 - protein, 1278 aa, Homo sapiens
MRTGSAASSAAAAAAAAAASASPATGVCMKTPGGGRRGIRRDPGAEPGAAALRGPRQRPILSRLTNNSRIVGLLAQLEKINAEPSESDTARYVTSKILHLAQSQEKTRREMTAKGSTGMEILLSTLENTKDLQTTLNILSILVELVSAGGGRRVSFLVTKGGSQILLQLLMNASKESPPHEDLMVQIHSILAKIGPKDKKFGVKARINGALNITLNLVKQNLQNHRLVLPCLQLLRVYSANSVNSVSLGKNGVVELMFKIIGPFSKKNSSLIKVALDTLAALLKSKTNARRAVDRGYVQVLLTIYVDWHRHDNRHRNMLIRKGILQSLKSVTNIKLGRKAFIDANGMKILYNTSQECLAVRTLDPLVNTSSLIMRKCFPKNRLPLPTIKSSFHFQLPVIPVTGPVAQLYSLPPEVDDVVDESDDNDDIDVEAENETENEDDLDQNFKNDDIETDINKLKPQQEPGRTIEDLKMYEHLFPELVDDFQDYDLISKEPKPFVFEGKVRGPIVVPTAGEETSGNSGNLRKVVMKENISSKGDEGEKKSTFMDLAKEDIKDNDRTLQQQPGDQNRTISSVHGLNNDIVKALDRITLQNIPSQTAPGFTAEMKKDCSLPLTVLTCAKACPHMATCGNVLFEGRTVQLGKLCCTGVETEDDEDTESNSSVEQASVEVPDGPTLHDPDLYIEIVKNTKSVPEYSEVAYPDYFGHIPPPFKEPILERPYGVQRTKIAQDIERLIHQSDIIDRVVYDLDNPNYTIPEEGDILKFNSKFESGNLRKVIQIRKNEYDLILNSDINSNHYHQWFYFEVSGMRPGVAYRFNIINCEKSNSQFNYGMQPLMYSVQEALNARPWWIRMGTDICYYKNHFSRSSVAAGGQKGKSYYTITFTVNFPHKDDVCYFAYHYPYTYSTLQMHLQKLESAHNPQQIYFRKDVLCETLSGNSCPLVTITAMPESNYYEHICHFRNRPYVFLSARVHPGETNASWVMKGTLEYLMSNNPTAQSLRESYIFKIVPMLNPDGVINGNHRCSLSGEDLNRQWQSPSPDLHPTIYHAKGLLQYLAAVKRLPLVYCDYHGHSRKKNVFMYGCSIKETVWHTNDNATSCDVVEDTGYRTLPKILSHIAPAFCMSSCSFVVEKSKESTARVVVWREIGVQRSYTMESTLCGCDQGKYKGLQIGTRELEEMGAKFCVGLLRLKRLTSPLEYNLPSSLLDFENDLIESSCKVTSPTTYVLDEDEPRFLEEVDYSAESNDELDIELAENVGDYEPSAQEEVLSDSELSRTYLP

SEQ ID NO: 86150 - protein, 794 aa, Homo sapiens
MASLLQDQLTTDQDLLLMQEGMPMRKVRSKSWKKLRYFRLQNDGMTVWHARQARGSAKPSFSISDVETIRNGHDSELLRSLAEELPLEQGFTIVFHGRRSNLDLMANSVEEAQIWMRGLQLLVDLVTSMDHQERLDQWLSDWFQRGDKNQDGKMSFQEVQRLLHLMNVEMDQEYAFSLFQAADTSQSGTLEGEEFVQFYKALTKRAEVQELFESFSADGQKLTLLEFLDFLQEEQKERDCTSELALELIDRYEPSDSGKLRHVLSMDGFLSYLCSKDGDIFNPACLPIYQDMTQPLNHYFICSSHNTYLVGDQLCGQSSVEGYIRALKRGCRCVEVDVWDGPSGEPVVYHGHTLTSRILFKDVVATVAQYAFQTSDYPVILSLETHCSWEQQQTMARHLTEILGEQLLSTTLDGVLPTQLPSPEELRRKILVKGKKLTLEEDLEYEEEEAEPELEESELALESQFETEPEPQEQNLQNKDKKKVVTCPLFCPSICCQIVAQAPISKPESLLLSRQKSKPILCPALSSLVIYLKSVSFRSFTHSKEHYHFYEISSFSETKAKRLIKEAGNEFVQHNTWQLSRVYPSGLRTDSSNYNPQELWNAGCQMVAMNMQTAGLEMDICDGHFRQNGGCGYVLKPDFLRDIQSSFHPEKPISPFKAQTLLIQVISGQQLPKVDKTKEGSIVDPLVKVQIFGVRLDTARQETNYVENNGFNPYWGQTLCFRVLVPELAMLRFVVMDYDWKSRNDFIGQYTLPWTCMQQGYRHIHLLSKDGISLRPASIFVYICIQEGLEGDES

SEQ ID NO: 86151 - protein, 168 aa, Homo sapiens
  MOD_RES (1)..(1): Any amino acid
XLGLPRVLAPPPEEVQKAKTPTPEPFDSETRKVIQMQCNLERSEDKARWHLTLLLVLEDRLHRQLTYDLLPRRPDEAGRLPGEHLPQVPWDPGLTRSPSPRGPCRGAAWAGHVGETPAPWGCPPPCAWEHKGPGSEGTPRLLRVGLTLPWAPRGWGVGVGEPLGLPGP

SEQ ID NO: 86152 - protein, 125 aa, Homo sapiens
MMKEFSSTAQGNREVIHTGTLQRHESHHTGDFRFQEIDKDIHNLEFQWQEDERNSHEAPMTEIKKLTGSADRYDQRHAGNKPIKDQLGSSFHSHLPELHMFQTQGKIGNQVEKSINDASSISTSQ

SEQ ID NO: 86153 - protein, 795 aa, Homo sapiens
MGDPDLLEVLAEEGEKVNKHIDYSFQMSEQSLSSRETSFLINEETMFQKNQQSKDSIFFRDGIRQIDFVLSYVDDVKKDAELKAERRKEFETNLRKTGLELEIEDKRDSEDGRTYFVKIHAPWEVLVTYAEVLGIKMPIKESDIPRPKHTPISYVLGPVRLPLSVKYPHPEYFTAQFSRHRQELFLIEDQATFFPSSSRNRIVYYILSRCPFGIEDGKKRFGIERLLNSNTYSSAYPLHDGQYWKPSEPPNPTNERYTLHQNWARFSYFYKEQPLDLIKNYYGEKIGIYFVFLGFYTEMLFFAAVVGLACFIYGLLSMEHNTSSTEICDPEIGGQMIMCPLCDQVCDYWRLNSTCLASKFSHLFDNESTVFFAIFMGIWVTLFLEFWKQRQARLEYEWDLVDFEEEQQQLQLRPEFEAMCKHRKLNAVTKEMEPYMPLYTRIPWYFLSGATVTLWMSLVVTSMVAVIVYRLSVFATFASFMESDASLKQVKSFLTPQITTSLTGSCLNFIVILILNFFYEKISAWITKMEIPRTYQEYESSLTLKMFLFQFVNFYSSCFYVAFFKGKFVGYPGKYTYLFNEWRSEECDPGGCLIELTTQLTIIMTGKQIFGNIKEAIYPLALNWWRRRKARTNSEKLYSRWEQDHDLESFGPLGLFYEYLETVTQFGFVTLFVASFPLAPLLALINNIVEIRVDAWKLTTQYRRTVASKAHSIGVWQDILYGMAVLSVATNAFIVAFTSDIIPRLVYYYAYSTNATQPMTGYVNNSLSVFLIADFPNHTAPSEKRDFITCSMLCF

SEQ ID NO: 86154 - protein, 77 aa, Homo sapiens
  MOD_RES (1)..(1): Any amino acid
XSPSSNELIHYRPRTFNVGDLVWGQIKGLTSWPGKLVREDDVHNSCQQSPEEGKVHQIPQGDRQMRPPKPKRRKISR

SEQ ID NO: 86155 - protein, 228 aa, Homo sapiens
  MOD_RES (1)..(1): Any amino acid
XGNTLKVLGNFDEAIVCCQRHLDISRELNDKVGEARALYNLGNVYHAKGKSFGCPGPQDVGEFPEEVRDALQAAVDFYEENLSLVTALGDRAAQGRAFGNLGNTHYLLGNFRDAVIAHEQRLLIAKEFGDKAAERRAYSNLGNAYIFLGEFETASEYYKIGEGRACWSLGNAYTALGNHDQAMHFAEKHLEISREVGDKSGELTARLNLSDLQMVLGLSYSTNNSIMS

SEQ ID NO: 86156 - protein, 78 aa, Homo sapiens
MHFSYSAGGGVHIEPRYRQFPQLTRSQVFQSEFFSGLMWFWILWRFWHDSEEVLGHFPYPDPSQWTDEELGIPPDDED

SEQ ID NO: 86157 - protein, 296 aa, Homo sapiens
VTLEDAGTVSFHVGTCSSEAQLKVTEAVPCLVRGLQNVDVFAGEVATFSCEVSHAGGPEARWWLDGTLLQDGPQSAIAVRDGIFHSLMLSGLGVADSGTVIFRAGPLVSTAKLLIKDPVVEVVSAMQDLAVEEGGSAELLCQYSRPVQATWKMDEREVHTDGHRVIIEQDWNVARLTFRPALPCDSGIYSCEAAGTRVVALLQVQAKNTVVRGLENVEALEGGEALFECQLSQPEVAAHTWLLDDEPVHTSENAEVVFFENGLRHLLLLKNLRPQDSCRVTFLAGDMVTSAFLTVR

SEQ ID NO: 86158 - protein, 15 aa, Homo sapiens
MAEAELHKERLQAIA

SEQ ID NO: 86159 - protein, 267 aa, Homo sapiens
MCNQDSESVWSDIECAALVGEDQPLCPDLPELDLSELDVNDLDTDSFLGGLKWCSDQSEIISNQYNNEPSNIFEKIDEENEANLLAVLTETLDSLPVDEDGLPSFDALTDGDVTTDNEASPSSMPDGTPPPQEAEEPSLLKKLLLAPANTQLSYNECSGLSTQNHANHNHRIRTNPAIVKTENSWSNKAKSICQQQKPQRRPCSELLKYLTTNDDPPHTKPTENRNSSRDKCTSKKKSHTQSQSQHLQAKPTTLSLPLTPESPNLFL

SEQ ID NO: 86160 - protein, 51 aa, Homo sapiens
KKLEFAFANSDYLALLQAYKGWQLSTKEGVRASYNYCRQNFLSGRVLQEKR

SEQ ID NO: 86161 - protein, 237 aa, Homo sapiens
MKRLTCFFICFFLSEVSGFEIPINGLSERSLPGESEEMMEEVDQVTLYSYKVQSTITSRMATTMIQSKVVNNSPQPQNVVFDVQIPKGAFISNFSMTVDGKTFRSSIKEKTVGRALYAQARAKGKTAGLVRSSALDMENFRTEVNVLPGAKVQFELHYQEVKWRKLGSYEHRIYLQPGRLAKHLEVDVWVIEPQGLRFLHVPDTFEGHFDGVPVISKGQQKAHVSFKPTVAQQRICP

SEQ ID NO: 86162 - protein, 57 aa, Homo sapiens
MEQKPSKVECGSDPEENSARSPDGKRKRKNGQCSLKTSMSGYIPSYLDKDEQCVVCG

SEQ ID NO: 86163 - protein, 220 aa, Homo sapiens
MSRRYDSRTTIFSPEGRLYQVEYAMEAIGHAGTCLGILANDGVLLAAERRNIHKLLDEVFFSEKIYKLNEDMACSVAGITSDANVLTNELRLIAQRYLLQYQEPIPCEQLVTALCDIKQAYTQFGGKRPFGVSLLYIGWDKHYGFQLYQSDPSGNYGGWKATCIGNNSAAAVSMLKQDYKEGEMTLKSALALAIKVLNKTMDVSKLSAEKVEIATLTREN

SEQ ID NO: 86164 - protein, 231 aa, Homo sapiens
LKRAVELDSESRYPQALVCYQEGIDLLLQVLKGTKDNTKRCNLREKISKYMDRAENIKKYLDQEKEDGKYHKQIKIEENATGFSYESLFREYLNETVTEVWIEDPYIRHTHQLYNFLRFCEMLIKRPCKVKTIHLLTSLDEGIEQVQQSRGLQEIEESLRSHGVLLEVQYSSSIHDREIRFNNGWMIKIGRGLDYFKKPQSRFSLGYCDFDLRPCHETTVDIFHKKHTKNI

SEQ ID NO: 86165 - protein, 170 aa, Homo sapiens
MAEPLLRKTFSRLRGREKLPRKKSDAKERGHPAQRPEPSPPEPEPQAPEGSQAGAEGPSSPEASRSPARGAYLQSLEPSSRRWVLGGAKPAEDTSLGPGVPGTGEPAGEIWYNPIPEEDPRPPAPEPPGPQPGSAESEGLAPQGKNKLPIPFPKVSTSSTSLPFRVAPAS

SEQ ID NO: 86166 - protein, 171 aa, Homo sapiens
MAAAQEADGARSAVVAAGGGSSGQVTSNGSIGRDPPAETQPQNPPAQPAPNAWQVIKGVLFRIFIIWAISSWFRRGPAPQDQAGPGGAPRVASRNLFPKDTLMSVQQNGSIYIHVYFTKSGFHPDPRQKALYRRLATVHMSRMINKYKRRRFQKTKNLLTGETEADPEMIK

SEQ ID NO: 86167 - protein, 55 aa, Homo sapiens
TPGIRARSARLQWFCDRCVANNQVETLEKLVELTQKLFECDRDQMYYNLLKLYRS

SEQ ID NO: 86168 - protein, 51 aa, Homo sapiens
MATLSVIGSSSLIAYAVFHNIQKSPEIRPLFYLSFCDLLLGLCWLTETLLY

SEQ ID NO: 86169 - protein, 159 aa, Homo sapiens
MLRNNKTIIIKYFLNLINGAFLVLGLLFMGFGAWLLLDRNNFLTAFDENNHFIVPISQILIGMGSSTVLFCLLGYIGIHNEIRWLLIVVESRSVTRLECSGTISAHCNLHLPDSSDSPASDSEVAGITVCSIDNMDLCCSGCTFSIHHHKERGGSATMA

SEQ ID NO: 86170 - protein, 69 aa, Homo sapiens
MIAPLLCILSYNFNTFAILNVYSKLTMFCTTNSLPMDLLLKQGSLKQEVESFCYQIVSESNDQKVGILQ

SEQ ID NO: 86171 - protein, 98 aa, Homo sapiens
MAAQIPIVATTSTPGIVRNSKKRPASPSHNGSSGGGYGASKKKKASASSFAQTSVLMLLHPLSQLRSILMFQVCLPTTQTPRANCGSAPLKSFPTFGG

SEQ ID NO: 86172 - protein, 234 aa, Homo sapiens
MAAQCVTKVALNVSCANLLDKDIGSKSDPLCVLFLNTSGQQWYEVERTERIKNCLNPQFSKTFIIDYYFEVVQKLKFGVYDIDNKTIELSDDDFLGECECTLGQIVSSKKLTRPLVMKTGRPAGKGSITISAEEIKDNRVVLFEMEARKLDNKDLFGKSDPYLEFHKQTSDGNWLMVHRTEVVKNNLNPVWRPFKISLNSLCYGDMDKTIKVECYDYDNDGSHDLIGTFQTTMT

SEQ ID NO: 86173 - protein, 188 aa, Homo sapiens
MGRRSSDTEEESRSKRKKKHRRRSSSSSSSDSRTYSRKKGGRKSRSKSRSWSRDLQPRSHSYDRRRRHRSSSSSSYGSRRKRSRSRSRGRGKSYRVQRSRSKSRTRRSRSRPRLRSHSRSSERSSHRRTRSRSRDRERRKGRDKEKREKEKDKGKDKELHNIKRGHQLNRPKPDYSWFLKLLQKLMKH

SEQ ID NO: 86174 - protein, 42 aa, Homo sapiens
  MOD_RES (1)..(1): Any amino acid
XRKKIQITRIMDERNRQLSYFERIGEVTFTKRKFGLMKKAYE

SEQ ID NO: 86175 - protein, 101 aa, Homo sapiens
MWSRRQGRLRPTVCGVEELRRRRREREAALRKARREQQLVSKRLLRNDAPEEAGEGCVAAILGETEVRGQGAAVPAASPAGDRGKGERGGSGQPSSRLAAP

SEQ ID NO: 86176 - protein, 90 aa, Homo sapiens
MTSLHTKLEGFHTQISKYFSERGDAVTKAAKQPHVGDYRQLVHELDEAEYRDIRLMVMEIRNAYAVLYDIILKNFEKLKKPRGETKGMIY

SEQ ID NO: 86177 - protein, 117 aa, Homo sapiens
MGSMAPGDTMAAGSMAAGFFQPFMSPRFPGGPRPTLRMPSQPPAGLPGSQPLLPGAMEPSPRAQGHPSMGGPMQRVTPPRGMASVGPQSYGGGMRPPPNSLAGPGLPAMNMGPGVRG

SEQ ID NO: 86178 - protein, 92 aa, Homo sapiens
MADWARAQSPGAVEEILDRENKRMADSLASKVTRLKSDSDFTSMTSLLTGSVKRFSTMARSGQDNRKLLCGMAVGLIVAFFILSYFLSRART

SEQ ID NO: 86179 - protein, 53 aa, Homo sapiens
MRQGLQCKICKMNVHIRCQANVAPNCGVNAVELAKTLAGMGLQPGNISPTSKL

SEQ ID NO: 86180 - protein, 200 aa, Homo sapiens
MAGNAEPPPAGAACPQDRRSCSGRAGGDRVWEDGEHPAKKLKSGGDEERREKPPKRKIVLLMAYSGKGYHGMQRNVGSSQFKTIEDDLVSALVRSGCIPENHGEDMRKMSFQRCARTDKSQDLILLPRLECSGMIMAHCSLKLLGSSNPPASASRVGLKRVTGGFNSKNRCDARTYCYLLPTFAFAHKDRDVQDETYRLS

SEQ ID NO: 86181 - protein, 538 aa, Homo sapiens
  MOD_RES (1)..(1): Any amino acid
XKIEDNEFHYQEQTDPVEYVENMCENMQLYPLQDILTGDQLLFEYKPEVIGEALNQLVPQKANLVLLSGANEGKCDLKEKWFGTQYSIEDIENSWAELWNSNFELNPDLHLPAENKYIAYIRFHLISPLIQKSAANVVLFDIFVNILTHNLAEPAYEADVAQLEYKLVAGEHGLIIRVKGFNHKLPLLFQLIIDYLAEFNSTPAVFTMITEQLKKTYFNILIKPETLAKDVRLLILEYARWSMIDKYQALMDGLSLESLLSFVKEFKSQLFVEGLVQGNVTSTESMDFLKYVVDKLNFKPLEQEMPVQFQVVELPSGHHLCKVKALNKGDANSEVTVYYQSGTRSLREYTLMELLVMHMEEPCFDFLRTKQTLGSEVVDKKIEEFLSSFEEKIENLTEEAFNTQVTALIKLKECEDTHLGEEVDRNWNEVVTQQYLFDRLAHEIEALKSFSKSDLVNWFKAHRGPGSKMLSVHVVGYGKYELEEDGTPSSEDSNSSCEVMQLTYLPTSPLLADCIIPITDIRAFTTTLNLLPYHKIVK

SEQ ID NO: 86182 - protein, 190 aa, Homo sapiens
MPWKEESEFTKQDKAARVIQQAWKSFLNVAIFQHFKSLIDLRRQGEPRQIVKYINPKEVKFPPDIYYKIFTHRPIEDLCANSPRNYAKLPAKHTSHNKNDHLQEEDHSGWYHRIENNGWRPVSDTFWLSTDGMVVEDKKESEFHFSKLKRRQDLEKKRKLRKIEWMRQMYYSGSLEAKSTHHETLGLIHT

SEQ ID NO: 86183 - protein, 378 aa, Homo sapiens
MALRSAQGDGPTSGHWDGGAEKADFNAKRKKKVAEIHQALNSDPTDVAALRRMAISEGGLLTDEIRRKVWPKLLNVNANDPPPISGKNLRQMSKDYQQVLLDVRRSLRRFPPGMPEEQREGLQEELIDIILLILERNPQLHYYQGYHDIVVTFLLVVGERLATSLVEKLSTHHLRDFMDPTMDNTKHILNYLMPIIDQVNPELHDFMQSAEVGTIFALSWLITWFGHVLSDFRHVVRLYDFFLACHPLMPIYFAAVIPQDLPYETLISRAGDLFVQFPPSELAREAAAQQQAERTAASTFKDFELASAQQRPDMVLRQRFRGLLRPEDRTKDVLTKPRTNRFVKLAVMGLTVALGAAALAVVKSALEWAPKFQLQLFP

SEQ ID NO: 86184 - protein, 100 aa, Homo sapiens
MSIYKEPPPGMFVVPDTVDMTKIHALITGPFDTPYEGGFFLFVFRCPPDYPIHPPRVKLMTTGNNTVRFNPNFYRNGKVCLSILGTWTGPAWSPAQSISS

SEQ ID NO: 86185 - protein, 75 aa, Homo sapiens
  MOD_RES (1)..(1): Any amino acid
XKAPGSAGHYELPWVEKYRPVKLNEIVGNEDTVSRLEVFAREGNVPNIIIAGSEVTEMQTAVNITQELPEVLLVV

SEQ ID NO: 86186 - protein, 106 aa, Homo sapiens
MHGRGRGVAGPMGRGRLMPNKQNLRVVECKPQPCVVSVEGLSSSTTDAQLKSLLMSVGPIQSLQMLPQQRKAIAKFKEPAHALAFQQKFHRHMIDLSHINVALIVE

SEQ ID NO: 86187 - protein, 103 aa, Homo sapiens
MATVVVEATEPEPSGSIANPAASTSPSLSHRFLDSKFYLLVVVGEIVTEEHLRRAIGNIELGIRSWDTNLIECNLDQELKLFVSRHSARFSPEVPEMKKNIKE

SEQ ID NO: 86188 - protein, 106 aa, Homo sapiens
MDELVHDLASALEQTSEQNKLGELWEEMALSPRQQRRQLRKRRGRKRRSDFTHLAEHTCCYSEASESSLDEATKDCREVAPVTNFSDSDDTMVAKRHPALNAIVKS

SEQ ID NO: 86189 - protein, 226 aa, Homo sapiens
MRRSLAPSQLAKRKPEGRSCDDEDWQPGLVTPRKRKSSSETQIQECFLSPFRKPLSQLTNQPPCLDSSQHEAFIRSILSKPFKVPIPNYQGPLGSRALGLKRAGVRRALHDPLEKDALVLYEPPPLSAHDQLKLDKEKLPVHVVVDPILSKVLRPHQREGVKFLWECVTSRRIPGSHGCIMADEMGLGKTLQCITLMWTLLRQSPECKPEIDKAVVVSPSSLVKNW

SEQ ID NO: 86190 - protein, 86 aa, Homo sapiens
MFRKGKKRHSSSSSQSSEISTKSKSVDSSLGGLSRSSTVASLDTDSTKSSGQSNNNSDTCAEFRIKYVGAIEKLKLSEGKGLEGPL

SEQ ID NO: 86191 - protein, 124 aa, Homo sapiens
VDFRGKKVIELGAGTGIVGILAALQGWVSSASVAPAKAHILCWAPSVCLGLQQGAPHEAAAENRLLLCKLQESSGDLWRGPQTDGVLLCGPGRRAMAEIWLHKEAQKEGWSKAAKLQGRKTKEG

SEQ ID NO: 86192 - protein, 104 aa, Homo sapiens
SNSSSASSGSSKGQQPPRSASAGPAGESKPKSDGKNSSGSKRYNRKRELSYPKNESFNNQSRRSSSQKSKTFNKMPPQRGGGSSKLFSSSFNGGRRDELPICGV

SEQ ID NO: 86193 - protein, 115 aa, Homo sapiens
MNLEQERPFVCSAPGCSQRFPTEDHLMIHRHKHEMTLKFPSIKTDNMLSDQTPTPTRFLKNCEEVGLFSELDCSLEHEFRKAQEEESSKRNISMHNAVGGAMTGPGTHQLSSARL

SEQ ID NO: 86194 - protein, 159 aa, Homo sapiens
MCDRNGGRRLRQWLIEQIDSSMYPGLIWENEEKSMFRIPWKHAGKQDYNQEVDASIFKAWAVFKGKFKEGDKAEPATWKTRLRCALNKSPDFEEVTDRSQLDISEPYKVYRIVPEEEQKCKLGVATAGCVNEVTEMECGRSEIDELIKEPSVDDYMGMI

SEQ ID NO: 86195 - protein, 102 aa, Homo sapiens
MSLCEDMLLCNYRKCRIKLSGYAWVTACSHIFCDQHGSGEFSRSPAICPACNSTLSGKLDIVRTELSPSEEYKAMVLAGLRPEIVLDISSRALAFWTYQYFL

SEQ ID NO: 86196 - protein, 100 aa, Homo sapiens
MSEGVDLIDIYADEEFNQDPEFNNTDQIDLYDDVLTATSQPSDDRSSSTEPPPPVRQEPSPKPNNKTPAILYTYSGLRNRRAAVYVGSFSWGHLRDEISE

SEQ ID NO: 86197 - protein, 67 aa, Homo sapiens
GKKEIKPFKRFLRKKSKPKKCVKKFVEYCDVNNDKSISVQELMGCLGVAKEDGKADTKKRHRSKRNL

SEQ ID NO: 86198 - protein, 45 aa, Homo sapiens
  MOD_RES (1)..(1): Any amino acid
XFDDCTQQFKAEKLKEKLKMKEREEAWVKIENLAKANPQACRGSA

SEQ ID NO: 86199 - protein, 130 aa, Homo sapiens
  MOD_RES (1)..(1): Any amino acid
XACLVSLCLCIAGLKWVFVDKIFEYDSPTHLDPGGLGQDPIISLDATAASAVWVSSEAYTSPVSRAQSESEVQVTVQGDKAVVSFEPSAAPTPKNRIFAFSFLPSTAPSFPSPTRNPELHLHPPLGQAIL

SEQ ID NO: 86200 - protein, 689 aa, Homo sapiens
MIAAAFLVLLRPYSIQCALFLLLLLLGTIATIVFFCCWHRKLQKGRHPMKSVFSGRSRSRDAVLRSHHFRSEGFRASPRHLRRRVAAAAAARLEEVKPVVEVHHQSEQETSVRKRRIKKSSRVQPEFYHSVQGASIRRPSSGNASYRCSMSSSADFSDEDDFSQKSGSASPAPGDTLPWNLPKHERSKRKIQGGSVLDPAERAVLRIADERDKVQKKTFTKWINQHLMKVRKHVNDLYEDLRDGHNLISLLEVLSGDTLPREKGRMRFHRLQNVQIALDYLKRRQVKLVNIRNDDITDGNPKLTLGLIWTIILHFQISDIHVTGESEDMSAKERLLLWTQQATEGYAGIRCENFTTCWRDGKLFNAIIHKYRPDLIDMNTVAVQSNLANLEHAFYVAEKIGVIRLLDPEDVDVSSPDEKSVITYVSSLYDAFPKVPEGGEGIGANDVEVKWIEYQNMVNYLIQWIRHHVTTMSERTFPNNPVELKALYNQYLQFKETEIPPKETEKSKIKRLYKLLEIWIEFGRIKLLQGYHPNDIEKEWGKLIIAMLEREKALRPEVERLEMLQQIANRVQRDSVICEDKLILAGNALQSDSKRLESGVQFQNEAEIAGYILECENLLRQHVIDVQILIDGKYYQADQLVQRVAKLRDEIMALRNECSSVYSKGRILTTEQTKLMISGITQSLNSGFA

SEQ ID NO: 86201 - protein, 184 aa, Homo sapiens
MPWVDSDLKRFLVPGPRPHCGLLLWRSLRHHHPQVLPGPPQQSHGEEPHSLQPRRPFPHHLLHQPQPPADGARQHPGPLAAQAQLHSLQPGQPSLHRAYEFLPDGPAASEVLSRQDGHSASSPLLCDAREGAGTVPPPHRPASSVPKEEVAPFKTSPREPEDLPDLPIREEGLSTGAEKERLLL

SEQ ID NO: 86202 - protein, 197 aa, Homo sapiens
LLLLVLKLMRDHVPPVHPEMPPGVRLSRGLVWAATTARNALVVSFAALVAYSFEVTGYQPFILTGETAEGLPPVRIPPFSVTTANGTISFTEMVQGRFSCFGLQLRMNLPCSSQHLAPLQTRRRILQLTSTCSCYLWGGDMGAGLAVVPLMGLLESIAVAKAFASQNNYRIDANQELLAIGLTNMLGSLVSSYPVTG

SEQ ID NO: 86203 - protein, 180 aa, Homo sapiens
  MOD_RES (1)..(1): Any amino acid
XRNRGSGSWIRVLASECIKKLCPVYFHSNGSEYIMALTTGKHEGYVHFGTIRASDDLELLYHIPEFIPEARGLEFLMILGTESYTSTAMAPKGIFCNPYNNLIFIWGNFLLQSSNKENFIYLADFPKELSIKYMARSFRGAVAIVTETEEIWYLLEGSYRVYQLFPSKGWQVHISLKLMQ

SEQ ID NO: 86204 - protein, 147 aa, Homo sapiens
MKEGRLEESVALRIITEGASILRQEKNLLDIDAPVTVCGDIHGQFFDLMKLFEVGGSPANTRYLFLGDYVDRGYFSIECVLYLWALKILYPKTLFLLRGNHECRHLTEYFTFKQECKIKYSERVYDACMDAFDCLPLAALMNQQFLC

SEQ ID NO: 86205 - protein, 189 aa, Homo sapiens
  MOD_RES (1)..(1): Any amino acid
XQHARTLWYDRPSCKNADGVELYNEIEFYAKVNSKDSQDKRSSRSITCFVRKWKEKVAWPRLTKEDIKPVWLSVDFDNWRDWEGDEEMELAHVEHYAELLKKVSTKRPPPAMDDLDFTTTVVSCCPAELQTEGSNGKKEVLSGFQVVLEDTVLFPEGGGQPDDRGTINDISVLRVTRRGEQADHFTQTP

SEQ ID NO: 86206 - protein, 1738 aa, Homo sapiens
MAKPTSKDSGLKEKFKILLGLGTPRPNPRSAEGKQTEFIITAEILRELSMECGLNNRIRMIGQICEVAKTKKFEEHAVEALWKAVADLLQPERPLEARHAVLALLKAIVQGQGERLGVLRALFFKVIKDYPSNEDLHERLEVFKALTDNGRHITYLEEELADFVLQWMDVGLSSEFLLVLVNLVKFNSCYLDEYIARMVQMICLLCVRTASSVDIEVSLQVLDAVVCYNCLPAESLPLFIVTLCRTINVKELCEPCWKLMRNLLGTHLGHSAIYNMCHLMEDRAYMEDAPLLRGAVFFVGMALWGAHRLYSLRNSPTSVLPSFYQAMACPNEVVSYEIVLSITRLIKKYRKELQVVAWDILLNIIERLLQQLQTLDSPELRTIVHDLLTTVEELCDQNEFHGSQERYFELVERCADQRPESSLLNLISYRAQSIHPAKDGWIQNLQALMERFFRSESRGAVRIKVLDVLSFVLLINRQFYEEELINSVVISQLSHIPEDKDHQVRKLATQLLVDLAEGCHTHHFNSLLDIIEKVMARSLSPPPELEERDVAAYSASLEDVKTAVLGLLVILQTKLYTLPASHATRVYEMLVSHIQLHYKHSYTLPIASSIRLQAFDFLLLLRADSLHRLGLPNKDGVVRFSPYCVCDYMEPERGSEKKTSGPLSPPTGPPGPAPAGPAVRLGSVPYSLLFRVLLQCLKQESDWKVLKLVLGRLPESLRYKVLIFTSPCSVDQLCSALCSMLSGPKTLERLRGAPEGFSRTDLHLAVVPVLTALISYHNYLDKTKQREMVYCLEQGLIHRCASQCVVALSICSVEMPDIIIKALPVLVVKLTHISATASMAVPLLEFLSTLARLPHLYRNFAAEQYASVFAISLPYTNPSKFNQYIVCLAHHVIAMWFIRCRLPFRKDFVPFITKGLRSNVLLSFDDTPEKDSFRARSTSLNERPKRIQTSLTSASLGSADENSVAQADDSLKNLHLELTETCLDMMARYVFSNFTAVPKRSPVGEFLLAGGRTKTWLVGNKLVTVTTSVGTGTRSLLGLDSGELQSGPESSSSPGVHVRQTKEAPAKLESQAGQQVSRGARDRVRSMSGGHGLRVGALDVPASQFLGSATSPGPRTAPAAKPEKASAGTRVPVQEKTNLAAYVPLLTQGWAEILVRRPTGNTSWLMSLENPLSPFSSDINNMPLQELSNALMAAERFKEHRDTALYKSLSVPAASTAKPPPLPRSNTDSAVVMEEGSPGEVPVLVEPPGLEDVEAALGMDRRTDAYSRSSSVSSQEEKSLHAEELVGRGIPIERVVSSEGGRPSVDLSFQPSQPLSKSSSSPELQTLQDILGDPGDKADVGRLSPEVKARSQSGTLDGESAAWSASGEDSRGQPEGPLPSSSPRSPSGLRPRGYTISDSAPSRRGKRVERDALKSRATASNAEKVPGINPSFVFLQLYHSPFFGDESNKPILLPNESFERSVQLLDQIPSYDTHKIAVLYVGEGQSNSELAILSNEHGSYRYTEFLTGLGRLIELKDCQPDKVYLGGLDVCGEDGQFTYCWHDDIMQAVFHIATLMPTKDVDKHRCDKKRHLGNDFVSIVYNDSGEDFKLGTIKGQFNFVHVIVTPLDYECNLVSLQCRKDMEGLVDTSVAKIVSDRNLPFVARQMALHANMASQVHHSRSNPTDIYPSKWIARLRHIKRLRQRICEEAAYSNPSLPLVHPPSHSKAPAQTPAEPTPGYEVGQRKRLISSVEDFTEFV

SEQ ID NO: 86207 - protein, 149 aa, Homo sapiens
MRVGAEYQARIPEFDPGATKYTDKDNGGMLVWSPYHSIPDAKLDEYIAIAKEKHGYNVEQALGMLFWHKHNIEKSLADLPNFTPFPDEWTVEDKVLFEQAFSFHGKSFHRIQQMLPDKTIASLVKYYYSWKKTRSRTSLMDRQARKLAN

SEQ ID NO: 86208 - protein, 137 aa, Homo sapiens
MAHCVTLVQLSISCDHLIDKDIGSKSDPLCVLLQDVGGGSWAELGRTERVRNCSSPEFSKTLQLEYRFETVQKLRFGIYDIDNKTPELRDDDFLGGAECSLGQIVSSQVLTLPLMLKPGKPAGRGTITDFLGKSDPF

SEQ ID NO: 86209 - protein, 334 aa, Homo sapiens
MASGADSKGDDLSTAILKQKNRPNRLIVDEAINEDNSVVSLSQPKMDELQLFRGDTVLLKGKKRREAVCIVLSDDTCSDEKIRMNRVVRNNLRVRLGDVISIQPCPDVKYGKRIHVLPIDDTVEGITGNLFEVYLKPYFLEAYRPIRKGDIFLVRGGMRAVEFKVVETDPSPYCIVAPDTVIHCEGEPIKREDEEESLNEVGYDDIGGCRKQLAQIKEMVELPLRHPALFKAIGVKPPRGILLYGPPGTGKTLIARAVANETGAFFFLINGPEIMSKLAGESESNLRKAFEEAEKNAPAIIFIDELDAIAPKREKTSCSGRLMARWSGALYHSC

SEQ ID NO: 86210 - protein, 42 aa, Homo sapiens
SIRAEIPCEDEQEQEHNGPLDNKVLLMMPVVCRKIHGWKFSC

SEQ ID NO: 86211 - protein, 345 aa, Homo sapiens
MSSFLPEGGCYELLTVIGKGFEDLMTVNLARYKPTGEYVTVRRINLEACSNEMVTFLQGELHVSKLFNHPNIVPYRATFIADNELWVVTSFMAYGSAKDLICTHFMDGMNELAIAYILQGVLKALDYIHHMGYVHRSVKASHILISVDGKVYLSGLRSNLSMISHGQRQRVVHDFPKYSVKVLPWLSPEVLQQNLQGYDAKSDIYSVGITACELANGHVPFKDMPATQMLLEKLNGTVPCLLDTSTIPAEELTMSPSRSVANSGLSDSLTTSTPRPSNGDSPSHPYHRTFSPHFHHFVEQCLQRNPDARSSDVPQRLCPNCFVLSPPSPILRAASLRTTVESLAW

SEQ ID NO: 86212 - protein, 5360 aa, Homo sapiens; identical to SEQ ID NO: 24950

SEQ ID NO: 86213 - protein, 136 aa, Homo sapiens
MVLAELYVSDREGSDATGDGTKEKPFKTGLKALMTVGKEPFPTIYVDSQKENERWNVISKSQLKNIKKMWHREQMKSESREKKEAEDSLRREKNLEEAKKITIKNDPSLPEPKCVKIGALEITSLIGGTMKLLLQH

SEQ ID NO: 86214 - protein, 349 aa, Homo sapiens
MMAFAPPKNTDGPKMQTKMSTWTPLNHQLLNDRVFEERRALLGKWFDKWTDSQRRRILTGLLERCSLSQQKFCCRKLQEKIPAEALDFTTKLPRVLSLYIFSFLDPRSLCRCAQVCWHWKNLAELDQLWMLKCLRFNWYINFSPTPFEQGIWKKHYIQMVKELHITKPKTPPKDGFVIADVQLVTSNSPEEKQSPLSAFRSSSSLRKKNNSGEKALPPWRSSDKHPTDIIRFNYLDNRDPMETVQQGRRKRNQMTPDFSRQSHDKKNKLQDRTRLRKAQSMVMGRGFSVPFASAGEERQQHGECPVPTPWKAVPPGSPGVGTQCLGGALGCPTLGATARRGRSPAFHHL

SEQ ID NO: 86215 - protein, 61 aa, Homo sapiens
MEGKWLLCMLLVLGTAIVEAHDGHDDDVIDIEDDLDDVIEEVEDSKPDTTAPPSSPKESGR

SEQ ID NO: 86216 - protein, 472 aa, Homo sapiens
MLRRALLCLAVAALVRADAPEEEDHVLVLRKSNFAEALAAHKYLLVDATEESDLAQQYGVRGYPTIKFFRNGDTASPKEYTAGREADDIVNWLKKRTGPAATTLPDGAAAESLVESSEVAVIGFFKDVESDSAKQFLQAAEAIDDIPFGITSNSDVFSKYQLDKDGVVLFKKFDEGRNNFEGEVTKENLLDFIKHNQLPLVIEFTEQTAPKIFGGEIKTHILLFLPKSVSDYDGKLSNFKTAAESFKGKILFIFIDSDHTDNQRILEFFGLKKEECPAVRLITLEEEMTKYKPESEELTAERITEFCHRFLEGKIKPHLMSQELPEDWDKQPVKVLVGKNFEDVAFDEKKNVFVEFYAPWCGHCKQLAPIWDKLGETYKDHENIVIAKMDSTANEVEAVKVHSFPTLKFFPASADRTVIDYNGERTLDGFKKFLESGGQDGAGDDDDLEDLEEAEEPDMEEDDDQKAVKDEL

SEQ ID NO: 86217 - protein, 67 aa, Homo sapiens
MEVHGKPKASPSCSSPTRDSSGVPVSKELLTAGSDGRGGIWDRLLINSQPKSRKTSTLQTVRIERSP

SEQ ID NO: 86218 - protein, 183 aa, Homo sapiens
ENTSPMVKSKKQEIFRKLNSSGGGDSDMAAQPGTEIFNLPAVTTSGSVSSRGHSFADPASNLGLEDIIRKALMGSFDDKVEDHGVVMSQPMGVVPGTANTSVVTSGETRREEGDPSPHSGGVCKPKLISKSNSRKSKSPIPGQGYLGTERPSSVSSVHSEGDYHRQTPGWAWEDRPSSTGSTQ

SEQ ID NO: 86219 - protein, 172 aa, Homo sapiens
MTVGLLPPPEKLTAEVLGIICIVLMATVLKTIVLIPFLEQNNFSPNTRTQKARHCGHCPEEWITYSNSCYYIGKERRTWEESLLACTSKNSSLLSIDNEEEMKFLASILPSSWIGVFRNSSHHPWVTINGLAFKHKIKDSDNAELNCAVLQVNRLKSAQCGSSMIYHCKHKL

SEQ ID NO: 86220 - protein, 710 aa, Homo sapiens
MGMACLTMTEMEGTSTSSIYQNGDISGNANSMKQIDPVLQVYLYHSLGKSEADYLTFPSGEYVAEEICIAASKACGITPVYHNMFALMSETERIWYPPNHVFHIDESTRHNVLYRIRFYFPRWYCSGSNRAYRHGISRGAEAPLLDDFVMSYLFAQWRHDFVHGWIKVPVTHETQEECLGMAVLDMMRIAKENDQTPLAIYNSISYKTFLPKCIRAKIQDYHILTRKRIRYRFRRFIQQFSQCKATARNLKLKYLINLETLQSAFYTEKFEVKEPGSGPSGEEIFATIIITGNGGIQWSRGKHKESETLTEQDLQLYCDFPNIIDVSIKQANQEGSNESRVVTIHKQDGKNLEIELSSLREALSFVSLIDGYYRLTADAHHYLCKEVAPPAVLENIQSNCHGPISMDFAISKLKKAGNQTGLYVLRCSPKDFNKYFLTFAVERENVIEYKHCLITKNENEEYNLSGTKKNFSSLKDLLNCYQMETVRSDNIIFQFTKCCPPKPKDKSNLLVFRTNGVSDVPTSPTLQRPTHMNQMVFHKIRNEDLIFNESLGQGTFTKIFKGVRREVGDYGQLHETEVLLKVLDKAHRNYSESFFEAASMMSKLSHKHLVLNYGVCVCGDENILVQEFVKFGSLDTYLKKNKNCINILWKLEVAKQLAWAMHFLEENTLIHGNVCAKNILLIREEDRKTGNPPFIKLSDPGISITVLPKD

SEQ ID NO: 86221 - protein, 373 aa, Homo sapiens
MSTRTPLPTVNERDTENHTSHGDGRQEVTSRTSRSGARCRNSIASCADEQPHIGNYRLLKTIGKGNFAKVKLARHILTGREVAIKIIDKTQLNPTSLQKLFREVRIMKILNHPNIVKLFEVIETEKTLYLIMEYASGGEVFDYLVAHGRMKEKEARSKFRQIVSAVQYCHQKRIVHRDLKAENLLLDADMNIKIADFGFSNEFTVGGKLDTFCGSPPYAAPELFQGKKYDGPEVDVWSLGVILYTLVSGSLPFDGQNLKELRERVLRGKYRIPFYMSTDCENLLKRFLVLNPIKRGTLEQIMKDRWINAGHEEDELKPFVEPELDISDQKRIDIMVGMGYSQEEIQESLSKMKYDEITATYLLLGRKSSEAEQ

SEQ ID NO: 86222 - protein, 43 aa, Homo sapiens
  MOD_RES (1)..(1): Any amino acid
XKTAVHAGVISNESGGDVDVMPVDKKKTYVGSLRNGVQSERNM

SEQ ID NO: 86223 - protein, 120 aa, Homo sapiens
MSRSGTDPQQRQQASEADAAAATFRANDHQHIRYNPLQDEWVLVSAHRMKRPWQGQVEPQLLKTVPRHDPLNPLCPGAIRANGELCSLMPPVQDPVIIPFSKQSLLEESVRSCASTPGRM

SEQ ID NO: 86224 - protein, 375 aa, Homo sapiens
MQQRAGSKTAGPPCQWSRMASEGTNIPSPVVRQIDKQFLICSICLERYKNPKVLPCLHTFCERCLQNYIPAHSLTLSCPVCRQTSILPEKGVAALQNNFFITNLMDVLQRTPGSNAEESSILETVTAVAAGKPLSCPNHDGNIFSNDGQFKSRFGIRGRSPGQLQRPTGVAVHPSGDIIIADYDNKWVSIFSSDGKFKTKIGSGKLMGPKGVSVDRNGHIIVVDNKACCVFIFQPNGKIVTRFGSRGNGDRQFAGPHFAAVNSNNEIIITDFHNHSVKVFNQEGEFMLKFGSNGEGNGQFNAPTGVAVDSNGNIIVADWGNSRIQVFDGSGSFLSYINTSADPLYGPQGLALTSDGHVVVADSGNHCFKVYRYLQ

SEQ ID NO: 86225 - protein, 344 aa, Homo sapiens
  MOD_RES (1)..(1): Any amino acid
XEDSNSVVLSFDSAGQTLGSEYDRLGFLLNLDSKLPAELATKYANFSEGACKPGYASALMTAIFPRFSKPAPMFLDDSFRKWARIREFVPPFGIKGQDNLIKAILSVTKEYRLTPALDSLRCRRCIIVGNGGVLANKSLGSRIDDYDIVVRLNSAPVKGFEKDVGSKTTLRITYPEGAMQRPEQYERDSLFVLAGFKWQDFKWLKYIVYKERVSASDGFWKSVATRVPKEPPEIRILNPYFIQEAAFTLIGLPFNNGLMGRGNIPTLGSVAVTMALHGCDEVAVAGFGYDMSTPNAPLHYYETVRMAAIKEVRGWSWTHNIQREKEFLRKLVKARVITDLSSGI

SEQ ID NO: 86226 - protein, 757 aa, Homo sapiens
MPEICKSYKGEGRQQICNQQPPCSRLHICDHFTRGNCRFPNCLRSHNLMDRKVLAIMREHGLNPDVVQNIQDICNSKHMQKNPPGPRAPSSHRRNMAYRARSKSRDRFFQGSQEFLASASASAERSCTPSPDQISHRASLEDAPVDDLTRKFTYLGSQDRARPPSGSSKATDLGGTSQAGTSQRFLENGSQEDLLHGNPGSTYLASNSTSAPNWKSLTSWTNDQGARRKTVFSPTLPAARSSLGSLQTPEAVTTRKGTGLLSSDYRIINGKSGTQDIQPGPLFNNNADGVATDITSTRSLNYKSTSSGHREISSPRIQDAGPASRDVQATGRIADDADPRVALVNDSLSDVTSTTSSRVDDHDSEEICLDHLCKGCPLNGSCSKVHFHLPYRWQMLIGKTWTDFEHMETIEKGYCNPGIHLCSVGSYTINFRVMSCDSFPIRRLSTPSSVTKPANSVFTTKWIWYWKNESGTWIQYGEEKDKRKNSNVDSSYLESLYQSCPRGVVPFQAGSRNYELSFQGMIQTNIASKTQKDVIRRPTFVPQWYVQQMKRGPDHQPAKTSSVSLTATFRPQEDFCFLSSKKYKLSEIHHLHPEYVRVSEHFKASMKNFKIEKIKKIENSELLDKFTWKKSQMKEEGKLLFYATSRAYVESICSNNFDSFLHETHENKYGKGIYFAKDAIYSHKNCPYDAKNVVMFVAQVLVGKFTEGNITYTSPPPQFDSCVDTRSNPSVFVIFQKDQVYPQYVIEYTEDKACVIS

SEQ ID NO: 86227 - protein, 466 aa, Homo sapiens
MFVGVARHSGSQDEVSRGVEPLEAARAQPAKDRRAKGTPKSSKPGKKHRYLRLLPEALIRFGGFRKRKKAKSSVSKKPGEVDDSLEQPCGLGCLVSTCCECCNNIRCFMIFYCILLICQGVVFGLIDVSIGDFQKEYQLKTIEKLALEKSYDISSGLVAIFIAFYGDRKKVIWFVASSFLIGLGSLLCAFPSINEENKQSKVGIEGIAECTSMIGYALGYVLGAPLVKVPENTTSATKTGKLGNLTAPCNEKCRCSSSIYSSICGRDDIEYFSPCFAGCTYSKAQNQKKMYYNCSCIKEGLITADAEGDFIDARPGKCDAKCYKLPLFIAFIFSTLIFSGFSGVPIVLAMTRVVPDKLRSLALGVSYVILRIFGTIPGPSIFKMSGETSCILRDVNKCGHTGRCWIYNKTKMAFLLVGICFLCKLCTIIFTTIAFFIYKRRLNENTDFPDVTVKNPKVKKKEETDL

SEQ ID NO: 86228 - protein, 126 aa, Homo sapiens
AAPPLSSGGPRLPQGQKTAALPRTRGAGLLESELRDGSGKKVAVADVQFGPMRFHQDQLQVLLVFTKEDNQCNGFCRACEKAGFKCTVTKEAQAVLACFLDKHHDIIIIDHRNPRQLDAEALCRGM

SEQ ID NO: 86229 - protein, 73 aa, Homo sapiens
DAAIVIKNTKEPPLSLTIHLTSPVVREEMEKVLAGGQSQRAEVLCHCDPGLEGPVHSRAHLGSPPRLASRAPV

SEQ ID NO: 86230 - protein, 78 aa, Homo sapiens
  MOD_RES (1)..(1): Any amino acid
XASGDQRVSVWASDWLRNHCELVDWLSFPMPATTETQGHLPPSLAAFCPWDGALLMYVGPGVYKEVIIYNLCQKQSAC

SEQ ID NO: 86231 - protein, 33 aa, Homo sapiens
MKGFIDDANYSVGLLDEGTNLGNVIDNYVYEHT

SEQ ID NO: 86232 - protein, 1539 aa, Homo sapiens
MFRQFYLWTCLASGIILGSLFEICLGQYDDDCKLARGGPPATIVAIDEESRNGTILVDNMLIKGTAGGPDPTIELSLKDNVDYWVLMDPVKQMLFLNSTGRVLDRDPPMNIHSIVVQVQCINKKVGTIIYHEVRIVVRDRNDNSPTFKHESYYATVNELTPVGTTIFTGFSGDNGATDIDDGPNGQIEYVIQYNPDDPTSNDTFEIPLMLTGNIVLRKRLNYEDKTRYFVIIQANDRAQNLNERRTTTTTLTVDVLDGDDLGPMFLPCVLVPNTRDCRPLTYQAAIPELRTPEELNPIIVTPPIQAIDQDRNIQPPSDRPGILYSILVGTPEDYPRFFHMHPRTAELSLLEPVNRDFHQKFDLVIKAEQDNGHPLPAFAGLHIEILDENNQSPYFTMPSYQGYILESAPVGATISDSLNLTSPLRIVALDKDIEDTKDPELHLFLNDYTSVFTVTQTGITRYLTLLQPVDREEQQTYTFSITAFDGVQESEPVIVNIQVMDANDNTPTFPEISYDVYVYTDMRPGDSVIQLTAVDADEGSNGEITYEILVGAQGDFIINKTTGLITIAPGVEMIVGRTYALTVQAADNAPPAERRNSICTVYIEVLPPNNQSPPRFPQLMYSLEISEAMRVGAVLLNLQATDREGDSITYAIENGDPQRVFNLSETTGILTLGKALDRESTDRYILIITASDGRPDGTSTATVNIVVTDVNDNAPVFDPYLPRNLSVVEEEANAFVGQVKATDPDAGINGQVHYSLGNFNNLFRITSNGSIYTAVKLNREVRDYYELVVVATDGAVHPRHSTLTLAIKVLDIDDNSPVFTNSTYTVLVEENLPAGTTILQIEAKDVDLGANVSYRIRSPEVKHFFALHPFTGELSLLRSLDYEAFPDQEASITFLVEAFDIYGTMPPGIATVTVIVKDMNDYPPVFSKRIYKGMVAPDAVKGTPITTVYAEDADPPGLPASRVRYRVDDVQFPYPASIFEVEEDSGRVITRVNLNEEPTTIFKLVVVAFDDGEPVMSSSATVKILVLHPGEIPRFTQEEYRPPPVSELATKGTMVGVISAAAINQSIVYSIVSGNEEDTFGINNITGVIYVNGPLDYETRTSYVLRVQADSLEVVLANLRVPSKSNTAKVYIEIQDENNHPPVFQKKFYIGGVSEDARMFTSVLRVKATDKDTGNYSVMAYRLIIPPIKEGKEGFVVETYTGLIKTAMLFHNMRRSYFKFQVIATDDYGKGLSGKADVLVSVVNQLDMQVIVSNVPPTLVEKKIEDLTEILDRYVQEQIPGAKVVVESIGARRHGDAFSLEDYTKCDLTVYAIDPQTNRAIDRNELFKFLDGKLLDINKDFQPYYGEGGRILEIRTPEAVTSIKKRGESLGYTEGALLALAFIIILCCIPAILVVLVSYRQFKVRQAECTKTARIQAALPAAKPAVPAPAPVAAPPPPPPPPPGAHLYEELGDSSMHKNYPWSLELILARNMDKIITVMSMGMKCLNMGVAVDCYHQLDRRNMVRWLVKLRKNMRRKRKSQRKLKNQRLKLESLVRRKK

SEQ ID NO: 86233 - protein, 132 aa, Homo sapiens
MEKKECPEKSSSSEEELPRRVYRELPCVSETLCDISHFFQEDDETEAEPLLFRAVPECQLSGGDIPSVSEEQESSEGQDSGDICSEENQIVSSYASKVCFEIEEDYKNRQFLGPEGNVDVELIDKSTNRYRR

SEQ ID NO: 86234 - protein, 14 aa, Homo sapiens
MGNSMKSTPAPAER

SEQ ID NO: 86235 - protein, 73 aa, Homo sapiens
  MOD_RES (1)..(1): Any amino acid
XSPGPTLDFTFRADPSAIGLADPPIPSPVPSPILGTIPSAISLQNCTETFPSSSENFALDKRVLIRVTYCTFY

SEQ ID NO: 86236 - protein, 77 aa, Homo sapiens
MLQCLVTGHPRPQVRWTKTAGSASDKFQETSVFNETLRIERIARTQGGRYYCKAENGVGVPAIKSIRVDVQYLDEPM

SEQ ID NO: 86237 - protein, 1983 aa, Homo sapiens
MANFLLPRGTSSFRRFTRESLAAIEKRMAEKQARGSTTLQESREGLPEEEAPRPQLDLQASKKLPDLYGNPPQELIGEPLEDLDPFYSTQKTFIVLNKGKTIFRFSATNALYVLSPFHPIRRAAVKILVHSLFNMLIMCTILTNCVFMAQHDPPPWTKYVEYTFTAIYTFESLVKILARGFCLHAFTFLRDPWNWLDFSVIIMAYVSENIKLGNLSALRTFRVLRALKTISVIPGLKTIVGALIQSVKKLADVMVLTVFCLSVFALIGLQLFMGNLRHKCVRNFTALNGTNGSVEADGLVWESLDLYLSDPENYLLKNGTSDVLLCGNSSDAGTCPEGYRCLKAGENPDHGYTSFDSFAWAFLALFRLMTQDCWERLYQQTLRSAGKIYMIFFMLVIFLGSFYLVNLILAVVAMAYEEQNQATIAETEEKEKRFQEAMEMLKKEHEALTIRGVDTVSRSSLEMSPLAPVNSHERRSKRRKRMSSGTEECGEDRLPKSDSEDGPRAMNHLSLTRGLSRTSMKPRSSRGSIFTFRRRDLGSEADFADDENSTAGESESHHTSLLVPWPLRRTSAQGQPSPGTSAPGHALHGKKNSTVDCNGVVSLLGAGDPEATSPGSHLLRPVMLEHPPDTTTPSEEPGGPQMLTSQAPCVDGFEEPGARQRALSAVSVLTSALEELEESRHKCPPCWNRLAQRYLIWECCPLWMSIKQGVKLVVMDPFTDLTITMCIVLNTLFMALEHYNMTSEFEEMLQVGNLVFTGIFTAEMTFKIIALDPYYYFQQGWNIFDSIIVILSLMELGLSRMSNLSVLRSFRLLRVFKLAKSWPTLNTLIKIIGNSVGALGNLTLVLAIIVFIFAVVGMQLFGKNYSELRDSDSGLLPRWHMMDFFHAFLIIFRILCGEWIETMWDCMEVSGQSLCLLVFLLVMVIGNLVVLNLFLALLLSSFSADNLTAPDEDREMNNLQLALARIQRGLRFVKRTTWDFCCGLLRQRPQKPAALAAQGQLPSCIATPYSPPPPETEKVPPTRKETRFEEGEQPGQGTPGDPEPVCVPIAVAESDTDDQEEDEENSLGTEEESSKQESQPVSGGPEAPPDSRTWSQVSATASSEAEASASQADWRQQWKAEPQAPGCGETPEDSCSEGSTADMTNTAELLEQIPDLGQDVKDPEDCFTEGCVRRCPCCAVDTTQAPGKVWWRLRKTCYHIVEHSWFETFIIFMILLSSGALAFEDIYLEERKTIKVLLEYADKMFTYVFVLEMLLKWVAYGFKKYFTNAWCWLDFLIVDVSLVSLVANTLGFAEMGPIKSLRTLRALRPLRALSRFEGMRVVVNALVGAIPSIMNVLLVCLIFWLIFSIMGVNLFAGKFGRCINQTEGDLPLNYTIVNNKSQCESLNLTGELYWTKVKVNFDNVGAGYLALLQVATFKGWMDIMYAAVDSRGYEEQPQWEYNLYMYIYFVIFIIFGSFFTLNLFIGVIIDNFNQQKKKLGGQDIFMTEEQKKYYNAMKKLGSKKPQKPIPRPLNKYQGFIFDIVTKQAFDVTIMFLICLNMVTMMVETDDQSPEKINILAKINLLFVAIFTGTVLSDIIQKYFFSPTLFRVIRLARIGRILRLIRGAKGIRTLLFALMMSLPALFNIGLLLFLVMFIYSIFGMANFAYVKWEAGIDDMFNFQTFANSMLCLFQITTSAGWDGLLSPILNTGPPYCDPTLPNSNGSRGDCGSPAVGILFFTTYIIISFLIVVNMYIAIILENFSVATEESTEPLSEDDFDMFYEIWEKFDPEATQFIEYSVLSDFADALSEPLRIAKPNQISLINMDLPMVSGDRIHCMDILFAFTKRVLGESGEMDALKIQMEEKFMAANPSKISYEPITTTLRRKHEEVSAMVIQRAFRRHLLQRSLKHASFLFRQQAGSGLSEEDAPEREGLIAYVMSENFSRPLGPPSSSSISSTSFPPSYDSVTRATSDNLQVRGSDYSHSEDLADFPPSPDRDRESIV

SEQ ID NO: 86238 - protein, 119 aa, Homo sapiens
MADANSPPKPLSKPRTPRRSKSDGEAKPEPSPSPRITRKSTRQTTITSHFAKGPAKRKPQEESERAKSDESIKEEDKDQDEKRRRVTSRERVARPLPAEEPERAKSGTRTEKEEERDEK

SEQ ID NO: 86239 - protein, 52 aa, Homo sapiens
  MOD_RES (1)..(1): Any amino acid
XIFSAPNYCYRCGNQAAIMELDDTLKYSFLQFDPAPRRGEPHVTRRTPDYFL

SEQ ID NO: 86240 - protein, 126 aa, Homo sapiens
MGRKKIQITRIMDERNRQVTFTKRKFGLMKKAYELSVLCDCEIALIIFNSTNKLFQYASTDMDKVLLKYTEYNEPHESRTNSDIVETLRKKGLNGCDSPDPDADDSVGHSPESEDKYRKINEDIDL

SEQ ID NO: 86241 - protein, 39 aa, Homo sapiens
MLIPFSMKNCFQLLCNCQVPAAGFKKTVKNGLILQSISN

SEQ ID NO: 86242 - protein, 933 aa, Homo sapiens
MRALAVLSVTLVMACTEAFFPFISRGKELLWGKPEESRVSSVLEESKRLVDTAMYATMQRNLKKRGILSPAQLLSFSKLPEPTSGVIARAAEIMETSIQAMKRKVNLKTQQSQHPTDALSEDLLSIIANMSGCLPYMLPPKCPNTCLANKYRPITGACNNRDHPRWGASNTALARWLPPVYEDGFSQPRGWNPGFLYNGFPLPPVREVTRHVIQVSNEVVTDDDRYSDLLMAWGQYIDHDIAFTPQSTSKAAFGGGSDCQMTCENQNPCFPIQLPEEARPAAGTACLPFYRSSAACGTGDQGALFGNLSTANPRQQMNGLTSFLDASTVYGSSPALERQLRNWTSAEGLLRVHARLRDSGRAYLPFVPPRAPAACAPEPGIPGETRGPCFLAGDGRASEVPSLTALHTLWLREHNRLAAALKALNAHWSADAVYQEARKVVGALHQIITLRDYIPRILGPEAFQQYVGPYEGYDSTANPTVSNVFSTAAFRFGHATIHPLVRRLDASFQEHPDLPGLWLHQAFFSPWTLLRGGGLDPLIRGLLARPAKLQVQDQLMNEELTERLFVLSNSSTLDLASINLQRGRDHGLPGYNEWREFCGLPRLETPADLSTAIASRSVADKILDLYKHPDNIDVWLGGLAENFLPRARTGPLFACLIGKQMKALRDGDWFWWENSHVFTDAQRRELEKHSLSRVICDNTGLTRVPMDAFQVGKFPEDFESCDSITGMNLEAWRETFPQDDKCGFPESVENGDFVHCEESGRRVLVYSCRHGYELQGREQLTCTQEGWDFQPPLCKDVNECADGAHPPCHASARCRNTKGGFQCLCADPYELGDDGRTCVDSGRLPRVTWISMSLAALLIGGFAGLTSTVICRWTRTGTKSTLPISETGGGTPELRCGKHQAVGTSPQRAAAQDSEQESAGMEGRDTHRLPRAL

SEQ ID NO: 86243 - protein, 342 aa, Homo sapiens
  MOD_RES (1)..(1): Any amino acid
XHKVCRCLLSGFGGRVDAGQPELLTERSSPKGGHVKSHAELEGNGEHPEAPGSGEGSEALLEICQRRHFLSGSKQQLSRDSLLSGCHPGFGPLGVELRKNLAAEWWTSVVVFREQVFPVDALHHKPGPLLPGDSAFRLVSAETLREILQDKELSKEQLVAFLENVLKTSGKLRENLLHGALEHYVNCLDLVNKRLPYGLAQIGVCFHPVFDTKQIRNGVKSIGEKTEASLVWFTPPRTSNQWLDFWLRHRLQWWRKFAMSPSNFSSSDCQDEEGRKGNKLYYNFPWGKELIETLWNLGDHELLHMYPGNVSKLHHLTLLPRLECSVAIPRFKQFFCLSLLSS

SEQ ID NO: 86244 - protein, 81 aa, Homo sapiens
MRRGERRDAGGPRPESPVPAGRASLEEPPDGPSAGQATGPGEGRRSTESEVYDDGTNTFFCCDPGLALCRCSSVRRIKPST

SEQ ID NO: 86245 - protein, 681 aa, Homo sapiens [sequence omitted]

SEQ ID NO: 86246 - protein, 213 aa, Homo sapiens
DGMTPLHAAAQMGHSPVIVWLDKDGATAMHFAASRGHTKVLSWLLLHGGEISADLWGGTPLHDAAENGELECCQILVVNGAELDVRDRDGYTAADLSDFNGHSHCTRYLRTVENLSVEHRVLSRDPSAELEAKQPDSGMSSPNTTVSVQPLNFDLSSPTSTLSNYDSCSSSHSSIKGQHPPCGLSSARAADIQSYMDMLNPELGLPRGTIGKP

SEQ ID NO: 86247 - protein, 163 aa, Homo sapiens
MTDTVFSNSSNRWMYPSDRPLQSNDKEQLQAGWSVHPGGQPDRQRKQEELTDEEKEIINRVIARAEKMEEMEQERIGRLVDRLENMRKNVAGDGVNRCILCGEQLGMLGSACVVCEDCKKNVCTKCGVETNNRLHSVWLCKICIEQREVWKRSGAWFFKGFPK

SEQ ID NO: 86248 - protein, 170 aa, Homo sapiens
MEPGGARLRLQRTEGLGGERERQPCGDGNTETHRAPDLVQWTRHMEAVKAQLLEQAQGQLRELLDRAMREAIQSYPSQDKPLPPPPPGSLSSELMEVQHFRTIYHMFIAGLCVFIISTLAIDFIDEGRLLLEFDLLIFSFGQLPLALVTWVPMFLSTLLAPYQALRLWAR

SEQ ID NO: 86249 - protein, 183 aa, Homo sapiens
MEGEQGEDGKTAAGPGRSTSGCRRSRPWAPARLRRQSGRVRLPAAQSAAPEPPSTACAPEPLSAPRSGAAFPRRLLWADALPGLLFRFPAPNCGSFPGFGRPGSPGHPRLSPSLRPKLLRAHRPLRHLWGAAPGLASVFAPGSAAPCNPASRARASPRRPRGQRPLVHPCGLRLASRCLRLIG

SEQ ID NO: 86250 - protein, 88 aa, Homo sapiens
  MOD_RES (1)..(1): Any amino acid
XAVGEAGSWRAGAASRPSWPGRNSAGKWPAGNTGPPRALHPRLWGLAPARASDSDKGDPDFQLLEEGCGRESATPFLIWASALMWHGS

SEQ ID NO: 86251 - protein, 65 aa, Homo sapiens
MAADQRPKADTLALRQRLISSSCRLFFPEDPVKIVRAQGQYMYDEQGAEYIDCISNVAHVRITAT

SEQ ID NO: 86252 - protein, 241 aa, Homo sapiens
MSASSLLEQRPKGQGNKVQNGSVHQKDGLNDDDFEPYLSPQNNAYTAMSDSYLPSYYSPSIGFSYSLGEAAWSTGGDTAMPYLTSYGQLSNGEPHFLPDAMFGQPGALGSTPFLGQHGFNFFPSGIDFSAWGNNSSQGQSTQSSGYSSNYAYAPSSLGGAMIDGQSAFANETLNKAPGMNTIDQGMAALKLGSTEVASNVPKVVGSAVGSGSITSNIVASNSLPPATIAPPKPASWADIAS

SEQ ID NO: 86253 - protein, 36 aa, Homo sapiens
MEADSPAGPGAPEPLAEGAAAEFSSLLRRIKGKLFT

SEQ ID NO: 86254 - protein, 154 aa, Homo sapiens
MARRGPGWRPLLLLVLLAGAAQGGLYFRRGQTCYRPLRGDGLAPLGRRWAPAGRQPWGDGRPIARARRALCLLGALRRQQALEGQIQPLRFGGRSFSSTSRVSPDVCGVGQAPPGQKARPAPPPRPLGVALTARHGWGSNPVPSFRGCPASFTF

SEQ ID NO: 86255 - protein, 93 aa, Homo sapiens
MMDVSGVGFPSKVPWKKMSAEELENQYCPSRWVVRLGAEEALRTYSQIGIEALPFFLFFHGGYWQSGRPCVKESGKPHLKSSTMWTTLKLLRI

SEQ ID NO: 86256 - protein, 525 aa, Homo sapiens
  MOD_RES (1)..(1): Any amino acid
XLDSSLISFGPCQTPTLGFCVERHDKIQSFKPETYWVLQAKVNTDKDRSLLLDWDRVRVFDREIAQMFLNMTKLEKEAQVEATSRKEKAKQRPLALNTVEMLRVASSSLGMGPQHAMQTAERLYTQGYISYPRTETTHYPENFDLKGSLRQQANHPYWADTVKRLLAEGINRPRKGHDAGDHPPITPMKSATEAELGGDAWRLYEYITRHFIATVSHDCKYLQSTISFRIGPELFTCSGKTVLSPGFTEVMPWQSVPLEESLPTCQRGDAFPVGEVKMLEKQTNPPDYLTEAELITLMEKHGIGTDASIPVHINNICQRNYVTVESGRRLKPTNLGIVLVHGYYKIDAELVLPTIRSAVEKQLNLIAQGKADYRQVLGHTLDVFKRKFHYFVDSIAGMDELMEVSFSPLAATGKPLSRCGKCHRFMKYIQAKPSRLHCSHCDETYTLPQNGTIKLYKELRCPLDDFELVLWSSGSRGKSYPLCPYCYNHPPFRDMKKGECSHSLLSTGSCSLFSVPTPALHQAGL

SEQ ID NO: 86257 - protein, 43 aa, Homo sapiens
  MOD_RES (1)..(1): Any amino acid
XIVDGQELRTNPAASMESIQKFLGLMMIRDFGARDLKVVRLAV

SEQ ID NO: 86258 - protein, 34 aa, Homo sapiens
MMCDVRKGTSTRKPRPVSQLVAQQVTQQFVPPTQ

SEQ ID NO: 86259 - protein, 922 aa, Homo sapiens
MDHYDSQQTNDYMQPEEDWDRDLLLDPAWEKQQRKTFTAWCNSHLRKAGTQIENIEEDFRDGLKLMLLLEVISGERLAKPERGKMRVHKISNVNKALDFIASKGVKLVSIGAEEIVDGNVKMTLGMIWTIILRFAIQDISVEETSAKEGLLLWCQRKTAPYKNVNIQNFHISWKDGLGFCALIHRHRPELIDYGKLRKDDPLTNLNTAFDVAEKYLDIPKMLDAEDIVGTARPDEKAIMTYVSSFYHAFSGAQKAETAANRICKVLAVNQENEQLMEDYEKLASDLLEWIRRTIPWLENRVPENTMHAMQQKLEDFRDYRRLHKPPKVQEKCQLEINFNTLQTKLRLSNRPAFMPSEGRMVSDINNAWGCLEQVEKGYEEWLLNEIRRLERLDHLAEKFRQKASIHEAWTDAMWPSLNPGKEAMLRQKDYETATLSEIKALLKKHEAFESDLAAHQDRVEQIAAIAQELNELDYYDSPSVNARCQKICDQWDNLGALTQKRREALERTEKLLETIDQLYLEYAKRAAPFNNWMEGAMEDLQDTFIVHTIEEIQGLTTAHEQFKATLPDADKERLAILGIHNEVSKIVQTYHVNMAGTNPYTTITPQEINGKWDHVRQLVPRRDQALTEEHARQQHNERLRKQFGAQANVIGPWIQTKMEEIGRISIEMHGTLEDQLSHLRQYEKSIVNYKPKIDQLEGDHQLIQEALIFDNKHTNYTMEHIRVGWEQLLTTIARTINEVENQILTRDAKGISQEQMNEFRASFNHFDRDHSGTLGPEEFKACLISLGYDIGNDPQKKTGMMDTDDFRACLISMGYNMGEAEFARIMSIVDPNRLGVVTFQAFIDFMSRETADTDTADQVMASFKILAGDKNYITMDELRRELPPDQAEYCIARMAPYTGPDSVPGALDYMSFSTALYGESDL

SEQ ID NO: 86260 - protein, 143 aa, Homo sapiens
MDQFGDILEGEVDHSFFDSDFEEGKKCETNSVFDKQNDDPKERIDKDTKNVNSNTGMQTTENYLTEKGNERNVKFPPEHPVENDVTQTVSSFSLPASSRSKKLCDVTTGLKIHVSIPNRIPKIVKEGEDDYYTDGEESSDDGK

SEQ ID NO: 86261 - protein, 115 aa, Homo sapiens
MASVPVYCLCRLPYDVTRFMIECDMCQDWFHGSCVGVEEEKAADIDLYHCPNCEVLHGPSIMKKRRGSSKGHDTHKGKPVKTGSPTFVRELRSRTFDSSDEVILKPTGNQLTVEF

SEQ ID NO: 86262 - protein, 34 aa, Homo sapiens
AYNRTRYELREFLEDTCVQYVQKHISAENTKDLY

SEQ ID NO: 86263 - protein, 132 aa, Homo sapiens
MSFFQLLMKRKELIPLVVFMTVAAGGASSFAVYSLWKTDVILDRKKNPEPWETVDPTVPQKVSAPAYCKLGAFLLQNPCPLARKPWNFPRSLRQLQATGRSQMVRKGMNLKEEEPALPTLSGAPPKGTGKLH

SEQ ID NO: 86264 - protein, 628 aa, Homo sapiens
MFKTVSKQHAQRHFSGISVLDRFKCSGSEKMSPSIKNLDCFSPMLCHCKVACSNSTISLMFGCKKYRYQDEDTPPQEHISPQITNEVIGPELVHVSEKNLSEIENVHGFVSHSHISPIKANPPPVLVNTDSLETPTYVNGTDADYEYEEITLERGNSGLGFSIAGGTDNPHIGDDSSIFITKIITGGAAAQDGRLRVNDCILRVNEVDVRDVTHSKAVEALKEAGSIVRLYVKRRKPVSEKIMEIKLIKGPKGLGFSIAGGVGNQHIPGDNSIYVTKIIEGGAAHKDGKLQIGDKLLAVNNVCLEEVTHEEAVTALKNTSDFVYLKVAKPTSMYMNDGYAPPDITNSSSQPVDNHVSPSSFLGQTPASPARYSPVSKAVLGDDEITREPRKVVLHRGSTGLGFNIVGGEDGEGIFISFILAGGPADLSGELRKGDRIISVNSVDLRAASHEQAAAALKNAGQAVTIVAQYRPEEYSRFEAKIHDLREQMMNSSISSGSGSLRTSQKRSLYVRALFDYDKTKDSGLPSQGLNFKFGDILHVINASDDEWWQARQVTPDGESDEVGVIPSKRRVEKKERARLKTVKFNSKTRDKGSFNDKRKKNLFSRKFPFYKNKDQSEQETSDADRDP

SEQ ID NO: 86265 - protein, 93 aa, Homo sapiens
MAQFDTEYQRLEASYSDSPPGEEDLLVHVAEGSKSPWHHIENLDLFFSRVYNLHQKNGFTCMLIGEIFELMQFLFVVAFTTFLVSCVDYDILF

SEQ ID NO: 86266 - protein, 66 aa, Homo sapiens
  MOD_RES (1)..(1): Any amino acid
XYVNKKFSNQYKATIGADFLTKEVMVDDRLVTMQSFRIMCCSYRLVLVDMSLLPAGPVYPPEVSNF

SEQ ID NO: 86267 - protein, 362 aa, Homo sapiens
  MOD_RES (1)..(1): Any amino acid
XGLLHGVAPWRSSLHPCEITALSQSLQPLRKLPFRAFRTDARKIHTAPARTMFLLRPLPILLVTGGGYAGYRQYEKYRERELEKLGLEIPPKLAGHWEVALYKSVPTRLLSRAWGRLNQVELPHWLRRPVYSLYIWTFGVNMKEAAVEDLHHYRNLSEFFRRKLKPQARPVCGLHSVISPSDGRILNFGQVKNCEVEQVKGVTYSLESFLGPRMCTEDLPFPPAASCDSFKNQLVTREGNELYHCVIYLAPGDYHCFHSPTDWTVSHRRHFPAVGATNVGSIRIYFDRDLHTNSPRHSKGSYNDFSFVTHTNREGVPMRKGEHLGEFNLGSTIVLIFEAPKDFNFQLKTGQKIRFGEALGSL

SEQ ID NO: 86268 - protein, 129 aa, Homo sapiens
MELLEEDLTCPICCSLFDDPRVLPCSHNFCKKCLEGILEGSVRNSLWRPAPFKCPTCRKETSATGINSLQVNYSLKGIVEKYNKIKISPKMPVCKGHLGQPLNIFCLTDMQLICGICATRGEHTKHVFC

SEQ ID NO: 86269 - protein, 38 aa, Homo sapiens
MEAADASRSNGSSPEARDARSPSGPSGSLENGTKADGK

SEQ ID NO: 86270 - protein, 828 aa, Homo sapiens
MSAETPITLNIDPQDLQVQTFTVEKLLEPLIIQVTTLVNCPQNPSSRKKGRSKRASVLLASVEEATWNLLDKGEKIAQEATVLKDELTASLEEVRKESEALKVSAERFTDDPCFLPKREAVVQAARALLAAVTRLLILADMIDVMCLLQHVSAFQRTFESLKNVANKSDLQKTYQKLGKELENLDYLAFKRQQDLKSPNQRDEIAGARASLKENSPLLHSICSACLEHSDVASLKASKDTVCEEIQNALNVISNASQGIQNMTTPPEPQAATLGSALDELENLIVLNPLTVTEEEIRPSLEKRLEAIISGAALLADSSCTRDLHRERIIAECNAIRQALQDLLSEYMNNAGKKERSNTLNIALDNMCKKTRDLRRQLRKAIIDHVSDSFLDTTVPLLVLIEAAKNGREKEIKEYAAIFHEHTSRLVEVANLACSMSTNEDGIKIVKIAANHLETLCPQIINAALALAARPKSQAVKNTMEMYKRTWENHIHVLTEAVDDITSIDDFLAVSVIPEFVTQVNVALEALSKSSLNVLDDNQFVDISKKIYDTIHDIRCSVMMIRTPEELEDVSDLEEEHEVRSHTSIQTEGKTDRAKMTQLPEAEKEKIAEQVADFKKVKSKLDAEIEIWDDTSNDIIVLAKNMCMIMMEMTDFTRGKGPLKHTTDVIYAAKMISESGSRMDVLARQIANQCPDPSCKQDLLAYLEQIKFYSHQLKICSQVKAEIQNLGGELIMSALDSVTSLIQAAKNLMNAVVQTVKMSYIASTKIIRIQSPAGPRHPVVMWRMKAPAKKPLIKREKPEETCAAVRRGSAKKKIHPLQVMSEFRGRQIY

SEQ ID NO: 86271 - protein, 443 aa, Homo sapiens
  MOD_RES (1)..(1): Any amino acid
XFGTGQPLPPLQIPQQTAQHSIVLPLKKPPKWIRRPVGASFSFGGKLVTFENVRMPSHQGAEQQQQQHHVFISQVVTEKEFLSRSDQLQQAVQSQGFINYCQKKIDASQTEFEKNVWSFLKVNFEDDSRGKYLELLGYRKEDLGKKIALALNKVDGANVHIKEEKEESEFLPSSGGTFNISVSGDIDGLITQALLTGNFESAVDLCLHDNRMADAIILAIAGGQELLARTQKKYFAKSQSKITRLITAVVMKNWKEIVESCDLKNWREALAAVLTYAKPDEFSALCDLLGTRLENEGDSLLQTQACLCYICAGNVEKLVACWTKAQDGSHPLSLQDLIEKVVILRKAVQLTQAMDTSTVGVLLAAKMSQYANLLAAQGSIAAALAFLPDNTNQPNIMQLRDRLCRAQGEPVAGHESPKIPYEKQQLPKGRPGPVAGHHQMPRV

SEQ ID NO: 86272 - protein, 405 aa, Homo sapiens
MAAALRVAAVGARLSVLASGLRAAVRSLCSQATSVNERIENKRRTALLGGGQRRIDAQHKRGKLTARERISLLLDPGSFVESDMFVEHRCADFGMAADKNKFPGDSVVTGRGRINGRLVYVFSQDFTVFGGSLSGAHAQKICKIMDQAITVGAPVIGLNDSGGARIQEGVESLAGYADIFLRNVTASGVIPQISLIMGPCAGGAVYSPALTDFTFMVKDTSYLFITGPDVVKSVTNEDVTQEELGGAKTHTTMSGVAHRAFENDVDALCNLRDFFNYLPLSSQDPAPVRECHDPSDRLVPELDTIVPLESTKAYNMVDIIHSVVDEREFFEIMPNYAKNIIVGFARMNGRTVGIVGNQPKVASGCLDINSSVKGARFVRFCDAFNIPLITFVDVPGFLPGLWRCL

SEQ ID NO: 86273 - protein, 26 aa, Homo sapiens
  MOD_RES (1)..(1): Any amino acid
XWTPYSYVNVLDQCPGGQVPARGLLH

SEQ ID NO: 86274 - protein, 932 aa, Homo sapiens [sequence omitted]

SEQ ID NO: 86275 - protein, 207 aa, Homo sapiens
MVVSGAPPALGGGCLGTFTSLLLLASTAILNAARIPVPPACGKPQQLNRVVGGEDSTDSEWPWIVSIQKNGTHHCAVPLPHPQTLQKLKVPIIDSEVCSHLYWRGAGQGPITEDMLCAGYLEGERDACLGDSGGPLMCQVDGAWLLAGIISWGEGCAERNRPGVYISLSAHRSWVEKIVQGVQLRGRAQGGGALRAPSQGSGAAARS

SEQ ID NO: 86276 - protein, 185 aa, Homo sapiens; identical to SEQ ID NO: 82873
  MOD_RES (1)..(1): Any amino acid

SEQ ID NO: 86277 - protein, 349 aa, Homo sapiens
MAPPPPPLAASTPLLHGEFGSYPARGPRFALTLTSQALHIQRLRPKPEARPRGGLVPLAEVSGCCTLRSRSPSDSAAYFCIYTYPRGRRGARRRATRTFRADGAATYEENRAEAQRWATALTCLLRGLPLPGDGEITPDLLPRPPRLLLLVNPFGGRGLAWQWCKNHVLPMISEAGLSFNLIQTERQNHARELVQGLSLSEWDGIVTVSGDGLLHEVLNGLLDRPDWEEAVKMPVGILPCGSGNALAGAVNQHGGPREDSDSSTSSSACPLWTTARSCPRAAASMPGSCPLLPQQLALGFSRFIQDRVNGGGGRIGSLTCRGHTQRTLPAPAREGGGSLFLKNINVFIC

SEQ ID NO: 86278 - protein, 130 aa, Homo sapiens
MQSNKTFNLEKQNHTPRKHHQHHHQQQHHQQQQQQPPPPPIPANGQQASSQNEGLTIDLKNFRKPGEKTFTQRSRLFVGNLPPDITEEEMRKLFEKYGKAGEVFIHKDKGFGFIRLISSSCDCGAHGPVR

SEQ ID NO: 86279 - protein, 91 aa, Homo sapiens
MRQATCFLGRSIGVRHAGSCAGADAGRGHRPVLGAGEPPALRPQCSYRPLQAPLRSRQVVSLQKRKRTSCEPAGQAWAWCPRPPIIPCYLL

SEQ ID NO: 86280 - protein, 225 aa, Homo sapiens
MCFPKVLSDDMKKLKARMVMLLPTSAQGLGAWVSACDTEDTVGHLGPWRDKDPALWCQLCLSSQHQAIERFYDKMQNAESGRGQVMSSLAELEDDFKEGYLETVAAYYEEQHPELTPLLEKERDGLRCRGNRSPVPDVEDPATEEPGESFCDKVMRWFQAMLQRLQTWWHGVLAWVKEKVVALVHAVQALWKQFQSFCCSLSELFMSSFQSYGAPRGDKEELTPQ

SEQ ID NO: 86281 - protein, 322 aa, Homo sapiens
FGIQWVTETALVNSSRELFHLFRQQLYNLETLLQSSCDFGKVSTLHCKADNIRQQCVLFLHYVKVFIFRYLKVQNAESHVPVHPYEALEAQLPSVLIDELHGLLLYIGHLSELPSVNIGAFVNQNQIKLFPPSWHLLHLHLDIHWLVLEILYMLGEKLKQVVYGHQFMNLASDNLTNISLFEEHCETLLCDLISLSLNRYDKSFWNWLNKLLKTLLEKSSDRRRSSMPVIQSRDPLGFSWWIITHVASFYKFDRHGVPDEMRKVESNWNFVEELLKKSISVQGVILEEQLRMYLHCCLTLCDFWEPNIAIVTILWEYYSKNL

SEQ ID NO: 86282 - protein, 56 aa, Homo sapiens
MDSSIHLSSLISRHDDEATRTSTSEGLEEGEVEGETLLIVESEDQASVDLSHDQSG

SEQ ID NO: 86283 - protein, 103 aa, Homo sapiens
MTENKTVSSSSTRDDQTNIGLTCQEVKALREKAWSRTNEGNAMSQSLVLYGASKENSEGFHESKMTNTEGVNKGIYFSYPCRRHSCAVVNIPAPCVNKMISHI

SEQ ID NO: 86284 - protein, 37 aa, Homo sapiens
  MOD_RES (1)..(1): Any amino acid
XRLNYSYPGSDSSLLINDIYQEMKNIVTVFPFSKAGR

SEQ ID NO: 86285 - protein, 158 aa, Homo sapiens
MSSRKQGSQPRGQQSAEEENFKKPTRSNMQRSKMRGASSGKKTAGPQQKNLEPALPGRWGGRSAENPPSGSVRKTRKNKQKTPGNGDGGSTSEAPQPPRKKRARADPTVESEEAFKNRMEVKVKIPEELKPWLVEDWDLVTRQKQLFQLPAKKNVDAI

SEQ ID NO: 86286 - protein, 390 aa, Homo sapiens
MLLLLLLLPLLWGTKGMEGDRQYGDGYLLQVQELVTVQEGLCVHVPCSFSYPQDGWTDSDPVHGYWFRAGDRPYQDAPVATNNPDREVQAETQGRFQLLGDIWSNDCSLSIRDARKRDKGSYFFRLERGSMKWSYKSQLNYKTKQLSVFVTASTALGNGSSLSVLEGQSLRLVCAVNSNPPARLSWTRGSLTLCPSRSSNPGLLELPRVHVRDEGEFTCRAQNAQGSQHISLSLSLQNEGTGTSRPVSQVTLAAVGGAGATALAFLSFCIIFIIVRSCRKKSARPAAGVGDTGMEDAKAIRGSASQGPLTESWKDGNPLKKPPPAVAPSSGEEGELHYATLSFHKVKPQDPQGQEATDSEYSEIKIHKRETAETQACLRNHNPSSKEVRG

SEQ ID NO: 86287 - protein, 367 aa, Homo sapiens
MVRGRISRLSVRDVRFPTSLGGHGADAMHTDPDYSAAYVVIETDAEDGIKGCGITFTLGKGTEVDWSRKGRGAPGDSGRPKRGVGLVGQAGGKACLEVTCGHEKQMLAQGYPAYTTSCAWLGYSDDTLKQLCAQALKDGWTRFKVKVGADLQDDMRRCQIIRDMIGPEKTLMMDANQRWDVPEAVEWMSKLAKFKPLWIEEPTSPDDILGHATISKALVPLGIGIATGEQCHNRVIFKQLLQAKALQFLQIDSCRLGSVNENLSVLLMAKKFEIPVCPHAGGVGLCELVQHLIIFDYISVSASLENRVCEYVDHLHEHFKYPVMIQRASYMPPKDPGYSTEMKEESVKKHQYPDGEVWKKLLPAQEN

SEQ ID NO: 86288 - protein, 207 aa, Homo sapiens
SFAAQEKQMEVCEVCGAFLIVGDAQSRVDDHLMGKQHMGYAKIKATVEELKEKLRKRTEEPDRDERLKKEKQEREEREKEREREREERERKRRREEEEREKERARDRERRKRSRSRSRHSSRTSDRRCSRSRDHKRSRSRERRRSRSRDRRRSRSHDRSERKHRSRSRDRRRSKSRDRKSYKHRSKSRDREQDRKSKEKGQKIRLLD

SEQ ID NO: 86289 - protein, 505 aa, Homo sapiens
MKLSPQPSCVNLGMMWTWALWMLPSLCKFSLAALPAKPENISCVYYYRKNLTCTWSPGKETSYTQYTVKRTYAFGEKHDNCTTNSSTSENRASCSFFLPRITIPDNYTIEVEAENGDGVIKSHMTYWRLENIAKTEPPKIFRVKPVLGIKRMIQIEWIKPELAPVSSDLKYTLRFRTVNSTSWMEVNFAKNRKDKNQTYNLTGLQPFTEYVIALRCAVKESKFWSDWSQEKMGMTEEEAPCGLELWRVLKPAEADGRRPVRLLWKKARGAPVLEKTLGYNIWYYPESNTNLTETMNTTNQQLELHLGGESFWVSMISYNSLGKSPVATLRIPAIQEKSFQCIEVMQACVAEDQLVVKWQSSALDVNTWMIEWFPDVDSEPTTLSWESVSQATNWTIQQDKLKPFWCYNISVYPMLHDKVGEPYSIQAYAKEGVPSEGPETKVENIGVKTVTITWKEIPKSERKGIICNYTIFYQAEAKTVNSSILQYGLESLKRKTSYIVQVMAS

SEQ ID NO: 86290 - protein, 221 aa, Homo sapiens
MVTFVCRVHESSPAQLAGLTPGDTIASVNGLNVEGIRHREIVDIIKASGNVLRLETLYGTSIRKAELEARLQYLKQTLYEKWGEYRSLMVQEQRLVHGLVVKDPSIYDTLESVRSCLYGAGLLPGSLPFGPLLAVPGRPRGGARRARGDADDAVYHTCFFGDSEPPALPPPPPPARAFGPGPAETPAVGPGPGPRAALSRSASVRCAGPGGGGGGGAPGAL

SEQ ID NO: 86291 - protein, 197 aa, Homo sapiens
VLEGVPHQLLPPEPPSPARAPVPSATKNKVAITVPAPQLGHHRHPRVGEGSSSDEESGGTLPPPDFPPPPLPDSAIFLPPSLDPLPGPVVRGRGGAEARGPPPPKAHPRPPLPPGPSPASTFLGEVASGDDRSCSVLQMAKTLSEVDYAPAGPARSALLPGPLELQPPRGLPSDYGRPLSFPPPRIRESIQEDLAEE

SEQ ID NO: 86292 - protein, 108 aa, Homo sapiens
VAIGRREALNVFGNDYDTEDGTGVRDYIHVVDLAKGHIAALRKLKEQCGCRIPYKVVARREGDVAACYANPSLAQEELGWTAALGLDRMCEDLWRWQKQNPSGFGTQA

SEQ ID NO: 86293 - protein, 56 aa, Homo sapiens
  MOD_RES (1)..(1): Any amino acid
XQKYHTVNGHNCEVRKALSKQEMASASSSQRGGFGGSRGGGGYGGSGDGYNGFGND

SEQ ID NO: 86294 - protein, 128 aa, Homo sapiens
MLLVTPRPERGGRGTELGEFCGTPLLFSKSQGLATRPRGDRYEGSYFCYDNPAALQTQVKRDMQVNTTKFMLLYAWYSWPNVVLCFFGGFLIDRVFGIRWGTIIFSCFVCIGQVVFALGGIFNAFWLM

SEQ ID NO: 86295 - protein, 55 aa, Homo sapiens
MWQLWASLCCLLVLANARSRPSFHPLSDELVNYVNKRNTTWQAGHNFYNVDMSYL

SEQ ID NO: 86296 - protein, 105 aa, Homo sapiens
MKKQKYGRIIMTSSASGIYGNFGQANYSAAKLGLLGLANSLAIEGRKSNIHCNTIAPNAGSRMTQTVMPEGYLLYLSNALKESHFWKQKYSSEYLAHCNARYPDI

SEQ ID NO: 86297 - protein, 136 aa, Homo sapiens
MWIQVRTIDGSKTCTIEDVSRKATIEELRERVWALFDVRPECQRLFYRGKQLENGYTLFDYDVGLNDIIQLLVRPDPDHLPGTSTQIEAKPCSNSPPKVKKAPRVGPSNQPSTSARARLIDPGFGIYKGLALSPRL

SEQ ID NO: 86298 - protein, 164 aa, Homo sapiens
MDFENQDKEKDSNSSSGSFNGNSTNNSIQTIDSTQALFLPIGASVSLLVMFFFFDSVQVVFTICTAVLATIAFAFLLLPMCQYLTRPCSPQNKISFGCCGRFTAAELLSFSLSVMLVLIWVLTGHWLLMDALAMGLCVAMIAFVRLPSLKVSCLLLSGLLIYDV

SEQ ID NO: 86299 - protein, 309 aa, Homo sapiens
MMSFLHIVFSILVVVAFILGNFANGFIALINFIAWVKRQKISSADQIIAALAVSRVGLLWVILLHWYSTVLNPTSSNLEVIIFISNAWAVTNHFSIWLATSLSIFYLLKIVNFSRLIFHHLKRKAKSVVLVIVLGSLFFLVCHLVMKHTYINVWTEECEGNVTWKIKLRNAMHLSNLTVAMLANLIPFTLTLISFLLLIYSLCKHLKKMQLHGKGSQDPSTKIHIKALQTVTSFLILLAIYFLCLIISFWNFKMRPKEIVLMLCQAFGIIYPSFHSFILIWGNKTLKQTFLSVLWQVTCWAKGQNQSTP

SEQ ID NO: 86300 - protein, 101 aa, Homo sapiens
  MOD_RES (1)..(1): Any amino acid
XFVSDQAPRGMAALCQHKLLGALEQSQLASGATRAHPPTQLEWLAGWRRGRMALDVFTFSEECYSAEVESWTTGEQLAGWILQSRSEKKCPCWSPCGSGGP

SEQ ID NO: 86301 - protein, 137 aa, Homo sapiens
  MOD_RES (1)..(1): Any amino acid
XFDLCFLVQSSDFKVMVNGILFVQYFHRVPFHRVDTISVNGSVQLSYISFQTQTVIHTVQSAPGQMFSTPAIPPMMYPHPAYPMPFITTILGGLYPSKSILLSGTVLPSAQRCGSCVKLTASRWPWMVSTCLNTTIA

SEQ ID NO: 86302 - protein, 28 aa, Homo sapiens
MMSEHDLADVVQIAVEDLSPDHPVVLEN

SEQ ID NO: 86303 - protein, 749 aa, Homo sapiens
MSGDGATEQVETRSHCVSQAGLELLDLSDPPASAFQTVGLQAAEYVPEKVKKAEKKLEENPYDLDAWSILIREAQNQPIDKARKTYERLVAQFPSSGRFWKLYIEAEIKAKNYDKVEKLFQRCLMKVLHIDLWKCYLSYVRETKGKLPSYKEKMAQAYDFALDKIGMEIMSYQIWVDYINFLKGVEAVGSYAENQRITAVRRVYQRGCVNPMINIEQLWRDYNKYEEGINIHLAKKMIEDRSRDYMNARRVAKEYETVMKGLDRNAPSVPPQNTPQEAQQVDMWKKYIQWEKSNPLRTEDQTLITKRVMFAYEQCLLVLGHHPDIWYEAAQYLEQSSKLLAEKGDMNNAKLFSDEAANIYERAISTLLKKNMLLYFAYADYEESRMKYEKVHSIYNRLLAIEDIDPTLVYIQYMKFARRAEGIKSGRMIFKKAREDTRTRHHVYVTAALMEYYCSKDKSVAFKIFELGLKKYGDIPEYVLAYIDYLSHLNEDNNTRVLFERVLTSGSLPPEKSGEIWARFLAFESNIGDLASILKVEKRRFTAFKEEYEGKETALLVDRYKFMDLYPCSASELKALGYKDVSRAKLAAIIPDPVVAPSIVPVLKDEVDRKPEYPKPDTQQMIPFQPRHLAPPGLHPVPGGVFPVPPAAVVLMKLLPPPICFQGPFVQVDELMEIFRRCKIPNTVEEAVRIITGGAPELAVEGNGPVESNAVLTKAVKRPNEDSDEDEEKGAVVPPVHDIYRARQQKRIR

SEQ ID NO: 86304 - protein, 194 aa, Homo sapiens
LKAYWQRKSPGIPAGANRKKKINGSSPDTATSGGYHSPGDSATGIYGEGRASSTTLEDLESQYQELAVALDSSSAIISQLTENINSLVRTSKEEKKHEIHLVQKLGRSLFKLKNQTGGAEEPRGSESAAAARPVAGAPVPQGAWMCGQAGWTPQEHPGLSGEAVGTGEAAGGAGEAACHSFRAAENRELNITII

SEQ ID NO: 86305 - protein, 88 aa, Homo sapiens
MVAMRCLGASPTPGEVQRHLQTHGIDGNGELDFSTFLTIMHMQIKQEDPKKEILLAMLMVDKEKKGYVMASDLRSKLTSLGEKLTHKE

SEQ ID NO: 86306 - protein, 43 aa, Homo sapiens
MAATQKLVKDIIDSKTGETASKRWKGAKNSETAAKVALMKLKM

SEQ ID NO: 86307 - protein, 78 aa, Homo sapiens
MSGRSVRAETRSRAKDDIKKVMAAIEKVRKWEKKWVTVGDTSLRIFKWVPVTDSKERQSLAMLSRLVVNSWPQAVPQP

SEQ ID NO: 86308 - protein, 455 aa, Homo sapiens
MLKPLWKAAVAPTWPCSMPPRRPWDREAGTLQVLGALAVLWLGSVALICLLWQVPRPPTWGQVQPKDVPRSWEHGSSPAWEPLEAEARQQRDSCQLVLVESIPQDLPSAAGSPSAQPLGQAWLQLLDTAQESVHVASYYWSLTGPDIGVNDSSSQLGEALLQKLQQLLGRNISLAVATSSPTLARTSTDLQVLAARGAHVRQVPMGRLTRGVLHSKFWVVDGRHIYMGSANMDWRSLTQVKELGAVIYNCSHLAQDLEKTFQTYWVLGVPKAVLPKTWPQNFSSHFNRFQPFHGLFDGVPTTAYFSASPPALCPQGRTRDLEALLAVMGSAQEFIYASVMEYFPTTRFSHPPRYWPVLDNALRAAAFGKGVRVRLLVGCGLNTDPTMFPYLRSLQALSNPAANVSVDVKVFIVPVGNHSNIPFSRVNHSKFMVTEKAAYIELLSRDQECVGGKPW

SEQ ID NO: 86309 - protein, 526 aa, Homo sapiens
MTKTYNDIDAVTRLLEEKERDLELAARIGQSLLKKNKTLTERNELLEEQVEHIREEVSQLRHELSMKDELLQFYTSAAEESEPESVCSTPLKRNESSSSVQNYFHLDSLQKKLKDLEEENVVLRSEASQLKTETITYEEKEQQLVNDCVKELRDANVQIASISEELAKKTEDAARQQEEITHLLSQIVDLQKKAKACAVENEELVQHLGAAKDAQRQLTAELRELEDKYAECMEMLHEAQEELKNLRNKTMPNTTSRRYHSLGLFPMDSLAAEIEGTMRKELQLEEAESPDITHQKRVFETVRNINQVVKQRSLTPSPMNIPGSNQSSAMNSLLSSCVSTPRSSFYGSDIGNVVLDNKTNSIILETEAADLGNDERSKKPGTPGTPGSHDLETALRRLSLRRENYLSERRFFEEEQERKLQELAEKGELRSGSLTPTESIMSLGTHSRFSEFTGFSGMSFSSRSYLPEKLQIVKPLEGDHAGPRPLSVLLGDSLWSLIHLRKAGHLCHAYSFFFRDSHPRCWFEFL

SEQ ID NO: 86310 - protein, 666 aa, Homo sapiens
MKKLQGAHLRKPVTPDLLMTPSDQGDVDLDVDFAAHRGNWTGKLDFLLSCIGYCVGLGNVWRFPYRAYTNGGGAFLVPYFLMLAICGIPLFFLELSLGQFSSLGPLAVWKISPLFKGAGAAMLLIVGLVAIYYNMIIAYVLFYLFASLTSDLPWEHCGNWWNTELCLEHRVSKDGNGALPLNLTCTVSPSEEYWSRYVLHIQGSQGIGSPGEIRWNLCLCLLLAWVIVFLCILKGVKSSGKVVYFTATFPYLILLMLLVRGVTLPGAWKGIQFYLTPQFHHLLSSKVWIEAALQIFYSLGVGFGGLLTFASYNTFHQNIYRDTFIVTLGNAITSILAGFAIFSVLGYMSQELGVPVDQVAKAGPGLAFVVYPQAMTMLPLSPFWSFLFFFMLLTLGLDSQFAFLETIVTAVTDEFPYYLRPKKAVFSGLICVAMYLMGLILTTDGGMYWLVLLDDYSASFGLMVVVITTCLAVTRVYGIQRFCRDIHMMLGFKPGLYFRACWLFLSPATLLALMVYSIVKYQPSEYGSYRFPPWAELLGILMGLLSCLMIPAGMLVAVLREEGSLWERLQQASRPAMDWGPSLEENRTGMYVATLAGSQSPKPLMVHMRKGTSARGLLYARMTVSATYIRSTDKMLSCLQGAHSSAETCLGDFKPEICGEEVTVVG

SEQ ID NO: 86311 - protein, 749 aa, Homo sapiens
MATYLEFIQQNEERDGVRFSWNVWPSSRLEATRMVVPLACLLTPLKERPDLPPVQYEPVLCSRPTCKAVLNPLCQVDYRAKLWACNFCFQRNQFPPAYGGISEVNQPAELMPQFSTIEYVIQEDDLQALKESLQMSLSLLPPDALVGLITFGRMVQVHELSCEGISKSYVFRGTKDLTAKQIQDMLGLTKPAMPMQQARPAQPQEHPFASSRFLQPVHKIDMNLTDLLGELQRDPWPVTQGKRPLRSTGVALSIAVGLLEGTFPNTGARIMLFTGGPPTQGPGMVVGDELKIPIRSWHDIEKDNARFMKKATKHYEMLANRTAANGHCIDIYACALDQTGLLEMKCCANLTGGYMVMGDSFNTSLFKQTFQRIFTKDFNGDFRMAFGATLDVKTSRELKIAGAIGPCVSLNVKGPCVSENELGVGGTSQWKICGLDPTSTLGIYFEVVNQHNTPIPQGGRGAIQFVTHYQHSSTQRRIRVTTIARNWADVQSQLRHIEAAFDQEAAAVLMARLGVFRAESEEGPDVLRWLDRQLIRLCQKFGQYNKEDPTSFRLSDSFSLYPQFMFHLRRSPFLQVFNNSPDESSYYRHHFARQDLTQSLIMIQPILYSYSFHGPPEPVLLDSSSILADRILLMDTFFQIVIYLGETIAQWRKAGYQDMPEYENFKHLLQAPLDDAQEILQARFPMPRYINTEHGGSQARFLLSKVNPSQTHNNLYAWGQETGAPILTDDVSLQVFMDHLKKLAVSSAC

SEQ ID NO: 86312 - protein, 214 aa, Homo sapiens
NTPGFMYKNLQCLVIDEADRILDVGFEEELKQIIKLLPTRRQTMLFSATQTRKVEDLARISLKKEPLYVGVDDDKANATVDGLEQKNRKKKLMVFFSSCMSVKYHYELLNYIDLPVLAIHGKQKQNKRTTTFFQFCNADSGTLLCTDVAARGLDIPEVDWIVQYDPPDDPKEYIHRVGRTARGLNGRGHALLILRPEELGFLRYLKQSKVPLSE

SEQ ID NO: 86313 - protein, 100 aa, Homo sapiens
MASTSYDYCRVPMEDGDKRCKLLLGIGILVLLIIVILGVPLIIFTIKANSEACRDGLRAVMECRNVTHLLQQELTEAQKGFQDVEAQAATCNHTVERSLH

SEQ ID NO: 86314 - protein, 184 aa, Homo sapiens
MDCRVHMRPIGLTWVLQLTLAWILLEACGGSRPLQARSQQHHGLAADLGKGKLHLAGPCCPSEMDTTETSGPGNHPERCGVPSPECESFLEHLQRALRSRFRLRLLGVRQAQPLCEELCQAWFANCEDDITCGPTWLPLSEKRGCEPSCLTYGQTFADGTDLCRSALGHALPVAAPGARHCFNI

SEQ ID NO: 86315 - protein, 868 aa, Homo sapiens
MALIMEPVSKWSPSQVVDWMKGLDDCLQQYIKNFEREKISGDQLLRITHQELEDLGVSRIGHQELILEAVDLLCALNYGLETENLKTLSHKLNASAKNLQNFITGRRRSGHYDGRTSRKLPNDFLTSVVDLIGAAKSLLAWLDRSPFAAVTDYSVTRNNVIQLCLELTTIVQQDCTVYETENKILHVCKTLSGVCDHIISLSSDPLVSQSAHLEVIQLANIKPSEGLGMYIKSTYDGLHVITGTTENSPADRCKKIHAGDEVIQVNHQTVVGWQLKNLVNALREDPSGVILTLKKRPQSMLTSAPALLKNMRWKPLALQPLIPRSPTSSVATPSSTISTPTKRDSSALQDLYIPPPPAEPYIPRDEKGNLPCEDLRGHMVGKPVHKGSESPNSFLDQEYRKRFNIVEEDTVLYCYEYEKGRSSSQGRRESTPTYENSLLRYMSNEKIAQEEYMFQRNSKKDTGKKSKKKGDKSNSPTHYSLLPSLQMDALRQDIMGTPVPETTLYHTFQQSSLQHKSKKKNKGPIAGKSKRRISCKDLGRGDCEGWLWKKKDAKSYFSQKWKKYWFVLKDASLYWYINEEDEKAEGFISLPEFKIDRASECRKKYAFKACHPKIKSFYFAAEHLDDMNRWLNRINMLTAGYAERERIKQEQDYWSESDKEEADTPSTPKQDSPPPPYDTYPRPPSMSCASPYVEAKHSRLSSTETSQSQSSHEEFRQEVTGSSAVSPIRKTASQRRSWQDLIETPLTSSGLHYLQTLPLEDSVFSDSAAISPEHRRQSTLPTQKCHLQDHYGPYPLAESERMQVLNGNGGKPRSFTLPRDSGFNHCCLNAPVSACDPQDDVQPPEVEEEEEEEEEEGEAAGENIGEKS

SEQ ID NO: 86316 - protein, 86 aa, Homo sapiens
MAGPGPGPGDPDEQYDFLFKLVLVGDASVGKTCVVQRFKTGAFSERQGSTIGVDFTMKTLEIQGKRVKLQIWDTAGQERFRTITQS

SEQ ID NO: 86317 - protein, 88 aa, Homo sapiens
MEEPEEPADSGQSLVPVYIYSPEYVSMCDSLAKIPKRASMVHSLIEAYALHKQMRLECSGAISAHCNLRLPGSSDSPASASRVAGTTG

SEQ ID NO: 86318 - protein, 213 aa, Homo sapiens
MAALRYAGLDDTDSEDELPPGWEERTTKDGWVYYANHTEEKTQWEHPKTGKRKRVAGDLPYGWEQETDENGQVFFVDHINKRTTYLDPRLAFTVDDNPTKPTTRQRYDGSTTAMEILQGRDFTGKVVVVTGANSGIGKASCHVGRILKHTRVEELSLLPTAINRELPPPCTVLLSQNWRVWEGCTSTTAAAACPHQKLRAKRRPGPCGRSARG

SEQ ID NO: 86319 - protein, 62 aa, Homo sapiens
AIIRELGGIPIVANKINHSNQSIKEKALNALNNLSVNVENQIKIKPRITFRGMENKTEEGGT

SEQ ID NO: 86320 - protein, 235 aa, Homo sapiens
MPGEATETVPATEQELPQPQAETVAAFPLESADPAGVAPTTAKGSGTESDSDESVPELEEQDSTQATTQQAQLAAAAEIDEEPVSKAKQSRSEKKARKAMSKLGLRQVTGVTRVTIRKSKNILFVITKPDVYKSPASDTYIVFGEAKIEDLSQQAQLAAAEKFKVQGEAVSNIQENTQTPTVQEESEEEEVDETGVEVKDIELVMSQANVSRAKAVRALKNNSNDIVNAIMELTM

SEQ ID NO: 86321 - protein, 39 aa, Homo sapiens
MADNLSDTLKKLKITAVDKTEDSLEGCLDCLLQALAQNR

SEQ ID NO: 86322 - protein, 106 aa, Homo sapiens
  MOD_RES (1)..(1): Any amino acid
XLSSQRGMEFVQGLSKPGRPHQWVFPKDVVKQQGLRQDHPGQMDRYLVYGDEYKALRDAVAKAVLECKPLGIKTALKVGWARGFSLIPGGIPWSLHVPWFMSNDAG

SEQ ID NO: 86323 - protein, 192 aa, Homo sapiens
MKVKVIPVLEDNYMYLVIEELTREAVAVDVAVPKRLLEIVGREGVSLTAVLTTHHHWDHARGNPELARLRPGLAVLGADERIFSLTRRLAHGEELRFGAIHVRCLLTPGHTAGHMSYFLWEDDCPDPPALFSGTRSAERAHPASRRPRPICSDPPSPARRRAVGGRLRLVPGGQRPADVPEPGRAGYPAPRD

SEQ ID NO: 86324 - protein, 247 aa, Homo sapiens
MKCLVTGGNVKVLGKAVHSLSRIGDELYLEPLEDGLSLRTVNSSRSAYACFLFAPLFFQQYQAATPGQDLLRCKILMKTVEKCCISLNGRSSRLVVQLHCKFGVRKTHNLSFQDCESLQAVFDPASCPHMLRAPARVLGEAVLPFSPALAEVTLGIGRGRRVILRSYHEEEADSTAKAMVTEMCLGEEDFQQLQAQEGVAITFCLKEFRGLLSFAESANLNLSIHFDAPGRPAIFTIKDSLLDGHFV

SEQ ID NO: 86325 - protein, 98 aa, Homo sapiens
MDEDALSRDDVIGKVCLTRDTIASHPKGFSGWAHLTEVDPDEEVQGEIHLRLEVWPGARACRLRCSVLEARDLAPKDRNGTSDPFVRVRYKGRTRETS

SEQ ID NO: 86326 - protein, 167 aa, Homo sapiens
MGSSWCLYGCCNAGVKTTRLEAHSEMGSTEILEKETPENLSNGTSSNVEAAKRLAKRLYQLDRFKRSDVAKHLGKNNEFSKLVAEEYLKFFDFTGMTLDQSLRYFFKAFSLVGETQERERVLIHFSNRYFYCNPDTIASQDGVHCLTCAIMLLNTDLHGHRWWLLQP

SEQ ID NO: 86327 - protein, 67 aa, Homo sapiens
MCGICLSSLCAGWRFSVKEMKSERQIQLIREMLMCDTSGSIQLSEEQKSALAFLNRGQPSSSNAGNK

SEQ ID NO: 86328 - protein, 29 aa, Homo sapiens
MISSTSVYATWRQCFPAFFIPEADGGKAL

SEQ ID NO: 86329 - protein, 158 aa, Homo sapiens
MAVTEASLLRQCPLLLPQNRSKTVYEGFISAQSSLISIYSQFLAAIESLKAFWDVMDEIDEKTWVLEPEKPPRSATARRIALGNNVSINIEVDPRHPTMLPECFFLGADHVVKPLGIKLSRNIHLWDPENSVLQNLKDVLEIDFPARAILEKSDFTMD

SEQ ID NO: 86330 - protein, 114 aa, Homo sapiens
DVSLEEDREAVRREAERQAQAQLEKAKTKPVAFAVRTNVSYSAAHEDDVPVPGMAISFEAKDFLHVKEKFNNDWWIGRLVKEGCEIGFIPSPVKLENMRLQHEQRAKQGKFYSS

SEQ ID NO: 86331 - protein, 137 aa, Homo sapiens
MLVNELNHSKEKKCQYEKEKAEREVAVRQLQQKQDDVLNKRSATKALLDASSRHCIYLENGMQDSRKKLDQMRSQFQEIQDQLTATIRCTKEMEGDAQKLEVENVMMRKIIKKQDEQIERFEKILQHSSLMLQVFES

SEQ ID NO: 86332 - protein, 39 aa, Homo sapiens
MEQLNELELLMEKSFWEEAELPAELTGVFFCRSGRGAVA

SEQ ID NO: 86333 - protein, 52 aa, Homo sapiens
  MOD_RES (1)..(1): Any amino acid
XDSDPEPEGEAEDRAASLPNGCPAESRTTPSGCILSLSACDSVWWVGRPQPR

SEQ ID NO: 86334 - protein, 328 aa, Homo sapiens
MSVVKSIELVLPEDRIYLAGSSIKGQVILTLNSTLVDPIVKVELVGRGYVEWSEEAGASCDYSRNVICNNKADYVHKTKTFPVEDNWLSAGSHTFDFHFNLPPRLPSTFTSKFGHVFYFVQASCMGREHILAKKRMYLLVQGTSTFHKETPFQNPLFVEAEEKVSYNCCRQGTVCLQIQMERNTFTPGEKVVFTTEINNQTSKCIKTVVFALYAHIQYEGFTPSAERRSRLDSSELLRQEANTPVTRFNTTKVVSTFNLPLLLSVSSSTQDGEIMHTRYELVTTVHLPWSLTSLKAKVPIIITSASVDSAICQLSEDGVLPVNPDHQN

SEQ ID NO: 86335 - protein, 67 aa, Homo sapiens
MKDPSRSSTSPSIINEDVIINGHSHEDDNPFAEYMWMENEEEFNRQVKSNLNPNAKEFVPGVKYGNI

SEQ ID NO: 86336 - protein, 152 aa, Homo sapiens
MTEDSQRNFRSVYYEKVGFRGVEEKKSLEILLKDDRLDTEKLCTFSQRFPLPSMYRALVWKVLLGILPPHHESHAKVMMYRKEQYLDVLHALKVVRFVSDATPQAEVYLRMYQLESGKLPRSPSFPLVSGHFCLTLSSTLDRPILPAFDYIM

SEQ ID NO: 86337 - protein, 663 aa, Homo sapiens
MPLFFRKRKPSEEARKRLEYQMCLAKEAGADDILDISKCELSEIPFGAFATCKVLQKKVLIVHTNHLTSLLPKSCSLLSLATIKVLDLHDNQLTALPDDLGQLTALQVLNVERNQLMQLPRSIGNLTQLQTLNVKDNKLKELPDTVGELRSLRTLNISGNEIQRLPQMLAHVRTLEMLSLDASAMVYPPREVCGAGTAAILQFLCKESGLEYYPPSQYLLPILEQDGIENSRDSPDGPTDRFSREELEWQNRFSDYEKRKEQKMLEKLEFERRLELGQREHTQLLQQSSSQKDEILQTVKEEQSRLEQGLSEHQRHLNAERQRLQEQLKQTEQNISSRIQKLLQDNQRQKKSSEILKSLENERIRMEQLMSITQEETESLRRRDVASAMQQMLTESCKNRLIQMAYESQRQNLVQQACSSMAEMDERFQQILSWQQMDQNKAISQILQESAMQKAAFEALQVKKDLMHRQIRSQEMISEQRWALSSLLQQLLKEKQQREEELREILEEGMERQLVALLEELSAEHYLPIFAHHRLSLDLLSQMSPGDLAKVGVSEAGLQHEILRRVQELLDAARIQPELKPPMGEVVTPTAPQEPPESVRPSAPPAELEVQASECVVCLEREAQMIFLNCGHVCCCQQCCQPLRTCPLCRQDIAQRLRIYHSS

SEQ ID NO: 86338 - protein, 182 aa, Homo sapiens
MPLRKRKSPERTASSKSPEISRSHVNSIKERTSSVGLPSVIPNSTRRVSFAPNLPSMKTSQDIGDSRISLKTLLNAIKTMEGRLEGKIEILASRPLINDESPNFLKQDSVKSILERSKEELSRTVKCRNAALKESQKLKEDLEAVEDRENKKVGNFQRQLAEAKEDNCKVTIMLENVLASHS

SEQ ID NO: 86339 - protein, 201 aa, Homo sapiens
MVRERKCILCHIVYSSKKEMDEHMRSMLHHRELENLKGRDISHECRVCGVTEVGLSAYAKHISGQLHKDNVDAQEREDDGKGEEEEEDYFDKELIQLIKQRKEQSRQDEPSNSNQEINSDDRRPQWRREDRIPYQDRESYSQPAWHHRGPPQRDWKWEKDGFNNTRKNSFPHSLRNGGGPRGRSGWHKGVAGGSSTWFHNH

SEQ ID NO: 86340 - protein, 75 aa, Homo sapiens
MSRKQNQKGRRARVNKEGTGGHECWNRLAASVPAGVNSVWAPWQHPGCGVPVTPEAPEGMLQCSSGSAICGRLKC

SEQ ID NO: 86341 - protein, 142 aa, Homo sapiens
  MOD_RES (1)..(1): Any amino acid
XEHTRSRGALHSHPGLGPIGCGEHGAGRVLWHRHHWPGPGPEGKEGHWGRAMPRGCGGRPGERPGQCLCRAPSNRVKGIPFRPVKAVAVDLFPQTPHCEMLILFERVEHPNGTGVLGPHSPPAQPTPGPPDNTLQETGTFPS

SEQ ID NO: 86342 - protein, 21 aa, Homo sapiens
MGDHLDLLLGVVLMAGPVFGI

SEQ ID NO: 86343 - protein, 225 aa, Homo sapiens
MARKKVRPRLIAELARRVRALREQLNRPRDSQLYAVDYETLTRPFSGRRLPVRAWADVRRESRLLQLLGRLPLFGLGRLVTRKSWLWQHDEPCYWRLTRVRPDYTAQNLDHGKAWGILTFKDASFSSSGKTESEAREIEHVMYHDWRLVPKHEEEAFTAFTPAPEDSLASVPYPPLLRAMIIAERQKNGDTSTEEPMLNVQRIRMEPWDYPAKQEDKGRAKGTPV

SEQ ID NO: 86344 - protein, 46 aa, Homo sapiens
MASKRKSTTPCMIPVKTVVLQDASMEAQPAETLPEGPQQDLPPEAS

SEQ ID NO: 86345 - protein, 238 aa, Homo sapiens
GTSLSLALREHEKLFMEVCRNCSAVLCCRMAPLQKAKVIRLIKISPEKPITLAVGDGANDVSMIQEAHVGIGIMGKEGRQAARNSDYAIARFKFLSKLLFVHGHFYYIRIATLVQYFFYKTLYDSVYLTLYNICFTSLPILIYSLLEQHVDPHVLQNKPTLYRDISKNRLLSIKTFLYWTILGFSHAFIFFFGSYLLIGKDTSLLGNGQMFGNWTFGTLVFTVMVITVTVKMALETHF

SEQ ID NO: 86346 - protein, 284 aa, Homo sapiens
  MOD_RES (1)..(1): Any amino acid
XSWRGARLVQSVLRVWQVGPHVARERVIPFSSLLGFQRRCVSCVAGSAFSGPRLASASRSNGQGSALDHFLGFSQPDSSVTPCVPAVSMNRDEQDVLLVHHPDMPENSRVLRVVLLGAPNAGKSTLSNQLLGRKVFPVSRKVHTTRCQALGVITEKETQVILLDTPGIISPGKQKRHHLELSLLEDPWKSMESADLVVVLVDVSDKWTRNQLSPQLLRCLTKYSQIPSVLVMNKQYLLTQAQPGPWEYHSAVLTSQTPEEICANIIREKLLEHLPQEVPYNVQQ

SEQ ID NO: 86347 - protein, 392 aa, Homo sapiens
MTSFSTSAQCSTSDSACRISPGQINQDHSMDIPSQDQLKQSAEESSTSRKRTTEDDIPTLPTSEHKCIHSREDEDLIENLAQDETSRLDLGFEEWDVAGLPWWFLGNLRSNYTPRSNGSTDLQTNQDVGTAIVSDTTDDLWFLNESVSEQLGVGIKVEAADTEQTSEEVGKVSDKKVIEVGKNDDLEDSKSLSDDTDVEVTSEDEWQCTECKKFNSPSKRYCFRCWALRKDWYSDCSKLTHSLSTSDITAIPEKENEGNDVPDCRRTISAPVVRPKDAYIKKENSKLFDPCNSVEFLDLAHSSESQETISSMGEQLDNLSEQRTDTENMEDCQNLLKPCSLCEKRPRDGNIIHGRTGHLVTCFHCARRLKKAGASCPICKKEIQLVIKVFIA

SEQ ID NO: 86348 - protein, 308 aa, Homo sapiens
MQIPKHISIEDITATSTSTTGTSHLVKCAEKEKTFCVNGGECFMVKDLSNPSRYLCKCQPGFTGARCTENVPMKVQNQEKAEELYQKRVLTITGICIALLVVGIMCVVAYCKTKKQRKKLHDRLRQSLRSERNNMMNIANGPHHPNPPPENVQLVNQYVSKNVISSEHIVEREAETSFSTSHYTSTAHHSTTVTQTPSHSWSNGHTESILSESHSVIVMSSVENSRHSSPTGGPRGRLNGTGGPRECNSFLRHARETPDSYRDSPHSERHNLIAELRRNKAHRSKCMQIQLSATHLRSSSIPHLGFIL

SEQ ID NO: 86349 - protein, 26 aa, Homo sapiens
MAPGNLWHMRNNFLFGSRCWMTRFSA

SEQ ID NO: 86350 - protein, 169 aa, Homo sapiens
MFSSSAKIVKPNGEKPDEFESGISQALLELEMNSDLKAQLRELNITAAKKIQVRLVRELEKKFSGKHVVFIAQRRILPKPTRKSRTKNKQKRPRSRTLTAVHDAILEDLVFPSEIVGKRIRVKLDGSRLIKVHLDKAQQNNVEHKVETFSGVYKKLTGKDVNFEFPEFQ

SEQ ID NO: 86351 - protein, 10 aa, Homo sapiens
MIHSLFLINS

SEQ ID NO: 86352 - protein, 731 aa, Homo sapiens
MARRGWRRAPLRRGVGSSPRARRLMRPLWLLLAVGVFDWAGASDGGGGEARAMDEEIVSEKQAEESHRQDSANLLIFILLLTLTILTIWLFKHRRARFLHETGLAMIYGLLVGLVLRYGIHVPSDVNNVTLSCEVQSSPTTLLVNVSGKFYEYMLKGEISSHELNNVQDNEMLRKVTFDPEVFFNILLPPIIFYAGYSLKRRHFFRNLGSILAYAFLGTAISCFVIGSIMYGCVTLMKVTGQLAGDFYFTDCLLFGAIVSATDPVTVLAIFHELQVDVELYALLFGESVLNDAVAIVLSSSIVAYQPAGDNSHTFDVTAMFKSIGIFLGIFSGSFAMGAATGVVTALVTKFTKLREFQLLETGLFFLMSWSTFLLAEAWGFTGVVAVLFCGITQAHYTYNNLSTESQHRTKQLFELLNFLAENFIFSYMGLTLFTFQNHVFNPTFVVGAFVAIFLGRAANIYPLSLLLNLGRRSKIGSNFQHMMMFAGLRGAMAFALAIRDTATYARQMMFSTTLLIVFFTVWVFGGGTTAMLSCLHIRYCARLWGYRDELRHGLYPQGTHSLFGETDRVGVDSDQEHLGVPENERRTTKAESAWLFRMWYNFDHNYLKPLLTHSGPPLTTTLPACCGPIARCLTSPQAYENQEQLKDDDSDLILNDGDISLTYGDSTVNTEPATSSAPRRFMGNSSEDALDRELAFGDHELVIRGTRLVLPMDDSEPPLNLLDNTRHGPA

SEQ ID NO: 86353 - protein, 234 aa, Homo sapiens
MMTSVGTNRARGNWEQPQNQNQTQHKQRPQATAEQIRLAQMISDHNDADFEEKVKQLIDITGKNQDECVIALHDCNGDVNRAINVLLEGNPDTHSWEMVGKKKGVSGQKDGGQTESNEEGKENRDRDRDYSRRRGGPPRRGRGASRGREFRGQENGLDGTKSGGPSGRGTERGRRGRGRGRGGSGRRGGRFSAQGMGTFNPADYAEPANTDDNYGNSSGNTWNNTGHFEPDDGT

SEQ ID NO: 86354 - protein, 69 aa, Homo sapiens
ADMQRWEEQSQGAIYTVEYACSAVKNLVDSSVYFRSVEGLLKQAISIRDHMNASAQGHSPEEPPPPSSA

SEQ ID NO: 86355 - protein, 86 aa, Homo sapiens
MPNSEPASLLELFNSIATQGELVRSLKAGNASKDEIDSAVKMLVSLKMSYKAAAGEDYKADCPPGNPAPTSNHGPDATEAEEDFVD

SEQ ID NO: 86356 - protein, 45 aa, Homo sapiens
MGGKLSKKKKGYNVNDEKAKEKDKKAEGAATEEEGTPKESEPQAA

SEQ ID NO: 86357 - protein, 516 aa, Homo sapiens
MGATEKGGQKSRKLFSLRRPWKATRRLWRPRSARQAAQGASSPDMEPSYGGGLFDMVKGGAGRLFSNLKDNLKDTLKDTSSRVIQSVTSYTKGDLDFTYVTSRIIVMSFPLDNVDIGFRNQVDDIRSFLDSRHLDHYTVYNLSPKSYRTAKFHSRVSECSWPIRQAPSLHNLFAVCRNMYNWLLQNPKNVCVVHCLDGRAASSILVGAMFIFCNLYSTPGPAIRLLYAKRPGIGLSPSHRRYLGYMCDLLADKPYRPHFKPLTIKSITVSPIPFFNKQRNGCRPYCDVLIGETKIYSTCTDFERMKEYRVQDGKIFIPLNITVQGDVVVSMYHLRSTIGSRLQAKVTNTQIFQLQFHTGFIPLDTTVLKFTKPELDACDVPEKYPQLFQVTLDVELQPHDKVIDLTPPWEHYCTKDVNPSILFSSHQEHQDTLALGGQAPIDIPPDNPRHYGQSGFFASLCWQDQKSEKSFCEEDHAALVNQESEQSDDELLTLSSPHGNANGDKPHGVKKPSKKQ

SEQ ID NO: 86358 - protein, 176 aa, Homo sapiens
MVIKLKDGGKAAQANVRIGDVVLSIDGINAQGMTHLEAQNKIKGCTGSLNMTLQRASAAPKPEPVPVQKGEPKEVVKPVPITSPAVSKVTSTNNMAYNKAPRPFGSVSSPKVTSIPSPSSAFTPAHATTSSHASPSPVAAVTPPLFAASGLHANANLSADQSPSALSAGKTAVNVP

SEQ ID NO: 86359 - protein, 191 aa, Homo sapiens
MASGQGPGPPRQECGEPALPSASEEQVAQDTEEVFRSYVFYRHQQQPSSTMGQVGRQLAIIGDDINRRYDSEFQTMLQHLQPTAENAYEYFTKIATSLFESGINWGRVVALLGFGYRLALHVYQHGLTGFLGQVTRFVVDFMLHHCIARWIAQRGGWVAALNLGNGPILNVLVVLGVVLLGQFVVRRFFKS

SEQ ID NO: 86360 - protein, 223 aa, Homo sapiens
  MOD_RES (1)..(1): Any amino acid
XNTNTATPFCNRQLSDQDEERRRQLRERARQLIAEARSGVKMSELPSYGEMAAEKLKERSKASGDENDNIEIDTNEEIPEGFVVGGGDELTNLENDLDTPEQNSKLVDLKLKKLLEVQPQVANSPSSAAQKAVTESSEQDMKSGTEDLRTERLQKTTERFRNPVVFSKDSTVRKTQLQSFSQYIENRPEMKRQRSIQEDTKKGNEEKAAITETQRKPSEDEVL

SEQ ID NO: 86361 - protein, 89 aa, Homo sapiens
MLASLYNGSVCVWNHETQTLVKTFEVCDLPVRAAKFVARKNWVVTGADDMQIRVFNYNTLERVHMFEAHSDYIRCIAVHPTQPFILTSS

SEQ ID NO: 86362 - protein, 79 aa, Homo sapiens
VLLSLRILLLMKPSVLSRVSHQVAYGLHELLKTNAANIHSGDDWATLFTLLECIGSGVKPPAALQATARADAPDAGWEG

SEQ ID NO: 86363 - protein, 148 aa, Homo sapiens
MDSNTAPLGPSCPQPPPAPQPQAQHTRSRERADGTGPTKGDMEIPFEEVLERAKAGDPKAQTEVGKHYLQLAGDTDEELNSCTAVDWLVLAAKQGRREAVKLLRRCLADRRGITSENEREVRQLSSETDLERAVRKAALVMYWKLNPK

SEQ ID NO: 86364 - protein, 173 aa, Homo sapiens
MPLFFRKRKPSEEARKRLEYQMCLAKEAGADDILDISKCELSEIPFGAFATCKVLQKKVLIVHTNHLTSLLPKSCSLLSLATIKVLDLHDNQLTALPDDLGQLTALQTESHSVAQAGVQWCNLSSPQPLPPGFKQFSCLSLPSSWDYRCVPPCPANFCIFSRDGISLCWPGWS

SEQ ID NO: 86365 - protein, 213 aa, Homo sapiens
  MOD_RES (1)..(1): Any amino acid
XPDPPPGRVPGAFTEHAYDGKDYISLNEDLRSWTAADTVAQITQRFYEAEEYAEEFRTYLEGECLELLRRYLENGKETLQRADPPKAHVAHHPISDHEATLRCWALGFYPAEITLTWQRDGEEQTQDTELVETRPAGDGTFQKWAAVVVPSGEEQRYTCHVQHEGLPQPLILRWEQSPQPTIPIVGIVAGLVVLGAVVTGAVVAAVMWRKKSS

SEQ ID NO: 86366 - protein, 121 aa, Homo sapiens
MAETVWSTDTGEAVYRSRDPVRNLRLRVHLQRITSSNFLHYQPAAELGKDLIDLATFRPQPTATLSENDHCSQRGAFILGRANGKCQASPAGQARDGGRHPQVTHRHLGALRRVCQEQPRH

SEQ ID NO: 86367 - protein, 561 aa, Homo sapiens
MPTAAAPIISSVQKLVLYETRARYFLVGSNNAETKYRVLKIDRTEPKDLVIIDDRHVYTQQEVRELLGRLDLGNRTKMGQKGSSGLFRAVSAFGVVGFVRFLEGYYIVLITKRRKMADIGGHAIYKVEDTNMIYIPNDSVRVTHPDEARYLRIFQNVDLSSNFYFSYSYDLSHSLQYNLTVLRMPLEMLKSEMTQNRQESFDIFEDEGLITQGGSELLIYGRPVYVTLIARRSSKFAGTRFLKRGANCEGDVANEVETEQILCDASVMSFTAGSYSSYVQVRGSVPLYWSQDISTMMPKPPITLDQADPFAHVAALHFDQMFQRFGSPIIILNLVKEREKRKHERILSEELVAAVTYLNQFLPPEHTIVYIPWDMAKYTKSKLCNVLDRLNVIAESVVKKTGFFVNRPDSYCSILRPDEKWNELGGCVIPTGRLQTGILRTNCVDCLDRTNTAQFMVGKCALAYQLYSLGLIDKPNLQFDTDAVRLFEELYEDHGDTLSLQYGGSQLVHRVKTYRKIAPWTQHSKDIMQTLSRYYSNAFSGNSEVIAIFKTYSEVHFLYVF

SEQ ID NO: 86368 - protein, 38 aa, Homo sapiens
  MOD_RES (1)..(1): Any amino acid
XAKQLVRGEPNVSYICSRYYRAPELIFGATDYTSSIGQ

SEQ ID NO: 86369 - protein, 79 aa, Homo sapiens
EQSDYLELLVKETSGGPDSPDTEPGSSAGTVPGTEASGFDAPRMRRNGLPSCELQWGEIVRMSNRNALIPIHAYTDKNI

SEQ ID NO: 86370 - protein, 235 aa, Homo sapiens; identical to SEQ ID NO: 80121
  MOD_RES (1)..(1): Any amino acid

SEQ ID NO: 86371 - protein, 52 aa, Homo sapiens
MAAGFGRCCRSSPNSRKNFKLLLVNLPERKSSQWLQNMIKLVNSFSSSIQSP

SEQ ID NO: 86372 - protein, 370 aa, Homo sapiens
  MOD_RES (1)..(1): Any amino acid
XFLLVFSCLVLSVFSTIKEYEKSSEGALYILEIVTIVVFGVEYFVRIWAAGCCCRYRGWRGRLKFARKPFCVIDIMVLIASIAVLAAGSQGNVFATSALRSLRFLQILRMIRMDRRGGTWKLLGSVVYAHSKELVTAWYIGFLCLILASFLVYLAEKGENDHFDTYADALWWGLITLTTIGYGDKYPQTWNGRLLAATFTLIGVSFFALPAGILGSGFALKVQEQHRQKHFEKRRNPAAGLIQSAWRFYATNLSRTDLHSTWQYYERTVTVPMYRLIPPLNQLELLRNLKSKSGLAFRKDPPPEPSPSPRGVAAKGKGSPQAQTVRRSPSADQSLEDSPSKVPKSWSFGDRSRARQAFRIKGAASRQNSE

SEQ ID NO: 86373 - protein, 47 aa, Homo sapiens
  MOD_RES (1)..(1): Any amino acid
XGLQVLLTPVLANILEADQEKCWGFDQFFAETSDILHRMNLSTKGDA

SEQ ID NO: 86374 - protein, 36 aa, Homo sapiens
MAATSLMSALAARLLQPAHSCSLRLRPFHLAAVRAY

SEQ ID NO: 86375 - protein, 46 aa, Homo sapiens
RQKSTYTSYPKAEPMPSASSAPPASSLYSSPVVSGPWAGAPSPGRQ

SEQ ID NO: 86376 - protein, 86 aa, Homo sapiens
MKAENRCRRRPPPALNAMSLGPRRARSAPTAVAAEAPVDAAELPQRRRHRLRHGQEQRLQQLLRLFGQQQRATAAPLRLGGASRRV

SEQ ID NO: 86377 - protein, 103 aa, Homo sapiens
  MOD_RES (1)..(1): Any amino acid
XCKSQEKRGKSHKYDSKGNRFKKKSKEGSMLRRPRTSSQHASRGGQSDDDEDEGVPASYHTVSLQVSQDVLFPLLTKLLENISPADVGGMEETRMRASTLLSK

SEQ ID NO: 86378 - protein, 62 aa, Homo sapiens
MVSEKSHLGNPQEPVQEEPKTRLLSMTVRRGPRRELVVKKSLGRPGTVTHVCNPSTLEGRGG

SEQ ID NO: 86379 - protein, 385 aa, Homo sapiens
  MOD_RES (1)..(1): Any amino acid
XWCGAEGDYNVMVMELLGPSLEDLFNFCSRKFSLKTVLLLADQMISRIEYIHSKNFIHRDVKPDNFLMGLGKKGNLVYIIDFGLAKKYRDARTHQHIPYRENKNLTGTARYASINTHLGIEQSRRDDLESLGYVLMYFNLGSLPWQGLKAATKRQKYERISEKKMSTPIEVLCKGYPSEFSTYLNFCRSLRFDDKPDYSYLRQLFRNLFHRQGFSYDYVFDWNMLKFVSHLEAKAGLGDWMGKALTQRARVSWWREGLPTDGRYELDSVVDLTGVPEPSSLIRADSLCHHGQQGPGRALSPVGTRRIWLHLGSLLGARSRAWVVLAAPPAALIAAYTVLLLLFCTSQVATCTMAPRASLDPVMVLAFFLVMGPWVWLGSCSVSLF

SEQ ID NO: 86380 - protein, 55 aa, Homo sapiens
MDKGRERMAAAAAAAAAAAAAAQCRSPRCAAERRGFRRELDSWRHRLMHCVLRVF

SEQ ID NO: 86381 - protein, 100 aa, Homo sapiens
MEFPGGNDNYLTITGPSHPFLSGAETFHTPSLGDEEFEIPPISLDSDPSLAVSDVVGHFDDLADPSSSQDGSFSAQYGVQTLDMPVGMTHAPCPVPIHCC

SEQ ID NO: 86382 - protein, 28 aa, Homo sapiens
DEERDPLLHSFGHLKEVLNSITAEMALI

SEQ ID NO: 86383 - protein, 418 aa, Homo sapiens
MKMQKGNVLLMFGLLLHLEAATNSNETSTSANTGSSVISSGASTATNSGSSVTSSGVSTATISGSSVTSNGVSIVTNSEFHTTSSGISTATNSEFSTASSGISIATNSESSTTSSGASTATNSESSTPSSGASTATNSDSSTTSSGASTATNSESSTTSSGASTATNSESSTTSSGAGTATNSESSTTSSGASTATNSESSTTTVSSGASTATNSESSTTSSGVSTATNSESSTTSSGASTATNSDSSTTSSEASTATNSESSTVSSGISTVTNSESSTTSSGANTATNSGSSVTSAGSGTAALTGMHTTSHSASTAVSEAKPGGSLVPWEIFLITLVSVVAAVGLFAGLFFCVRNSLSLRNTFNTAVYHPHGLNHGLGPGPGGNHGAPHRPRWSPNWFWRRPVSSIAMEMSGRNSGP

SEQ ID NO: 86384 - protein, 48 aa, Homo sapiens
  MOD_RES (1)..(1): Any amino acid
XLFDHAARIEAACFATIKDGKSLTKDLGGNAKCSDFTEEICRRVKDLD

SEQ ID NO: 86385 - protein, 292 aa, Homo sapiens
DQQLGIQTKDVAVDGQNWTFAFDFSFLSQQEDLAWAELRLQLSSPVDLPTEGSLAIEIFHQPKPDTEQASDSCLERFQMDLFTVTLSQVTFSLGSMVLEVTRPLSKWLKHPGALEKQMSRVAGECWPRPPTPPATNVLLMLYSNLSQEQRQLGGSTLLWEAESSWRAQEGQLSWEWGKRHRRHHLPDRSQLCRKVKFQVDFNLIGWGSWIIYPKQYNAYRCEGECPNPVGEEFHPTNHAYIQSLLKRYQPHRVPSTCCAPVKTKPLSMLYVDNGRVLLDHHKDMIVEECGCL

SEQ ID NO: 86386 - protein, 121 aa, Homo sapiens
MSAQESCLSLIKYFLFVFNLFFFVLGSLIFCFGIWILIDKTSFVSFAWPSCLCRSGPKSWPSQESSPWASPSWVVWGPSRSSAASWACILGCCCSCLPHRSPWESSSPLSGPSWSEACGTS

SEQ ID NO: 86387 - protein, 151 aa, Homo sapiens
MSHPSWLPPKSTGEPLGHVPARMETTHSFGNPSISVSTQQPPKKFAPVVAPKPKYNPYKQPGGEGDFLPPPPPPLDDSSALPSISGNFPPPPPLDEEAFKVQGNPGGKTLEERRSSLDAEIDSLTSILADLECSSPYKPRPPQSSTGSTAS

SEQ ID NO: 86388 - protein, 50 aa, Homo sapiens
MHPDLSPHLHTEECNVLINLLKECHKNVLALSPKLECSRVIVTHGSLKLK

SEQ ID NO: 86389 - protein, 10 aa, Homo sapiens
MGRVGYWTLL

SEQ ID NO: 86390 - protein, 112 aa, Homo sapiens
MAEAGTGEPSPSVEGEHGTEYDTLPSDTVSLSDSDSDLSLPGGAEVEALSPMGLPGEEDSGPDEPPSPPSGLLPATVQPFHLRGMSSTFSQRSRDIFDCLEGAARRAPSSVA

SEQ ID NO: 86391 - protein, 253 aa, Homo sapiens
MSVGTLYEKQNGKESSGAELPGQVISMAASTLANLAISITGYESSSEDQPSTQPAEAVDRGESAPTLSTSPSPSSPSPTSPSPTLGRRRPEIGTFLRKKKTSDIYFVSLVWAIVVMQIWLNLWIVQLLPVPIAVWILKKLVIHFGVVDFLEKRYHVWWGIIESFLKERQGALAPWPIVGLGKFLLKVDSKMIIWLEKMLDKIISIFIIFLLVIGTLLLALLLTAKVHQESVHMIEVTSNLINETLANHPEWAK

SEQ ID NO: 86392 - protein, 64 aa, Homo sapiens
MRAWDRSKPLLFCPAMNTAMWEHPITAQQVDQLKAFGYVEIPCVAKKLVCGDEGLGAMAEVGTI

SEQ ID NO: 86393 - protein, 28 aa, Homo sapiens
  MOD_RES (1)..(1): Any amino acid
XFPTISVAPSADTSSERSIYKLHQTASV

SEQ ID NO: 86394 - protein, 85 aa, Homo sapiens
MQMPQGNPLLLSHTLQELLARDTVQVELIPEKKGLFLKHVEYEVSSQRFKSSVYRRYNDFVVFQEMLLHKFPYRMVPALPPKRML

SEQ ID NO: 86395 - protein, 98 aa, Homo sapiens
MISKHSHEQSDRGEGVEVVQNEPFEDPHHGNGQFTEKRVYLNSKLPSWARAVVPKIFYVTEKAWNYYPYTITEYTCSFLPKFSIHIETKYEDNKGSND

SEQ ID NO: 86396 - protein, 139 aa, Homo sapiens
MTMTANKNSSITHGAGGTKAPRGTLSRSQSVSPPPVLSPPRSPIYPLSDSETSACRYPSHSSSRVLLKDRHPPAPSPQNPQDPSPDTSPPTCPFKTASFGYLDRSPSACKRDAQKESVQGAAQDVAGVAACLPLAQSTP

SEQ ID NO: 86397 - protein, 166 aa, Homo sapiens
  MOD_RES (1)..(1): Any amino acid
XHSPLSCCPQYKCECDPLKCPSISTPECREDQFMIQVRQEEPCCFSPFCVCESCTKPVPLCHDGEFLTVDLNSTHFCCPQYYCVCEPNLCPMPLLNCAEDMNLVKENVSGQCCPTWHCECNCENLIMPTCEVQPCADADIRTLGCLGRADQEHFHEAKFLRENLLQ

SEQ ID NO: 86398 - protein, 134 aa, Homo sapiens
MSWKKALRIPGGLRVATVTLMLAMLSTPVAEGRDSPVEPTVTISPSRTEALNHHNLLVCSVTDFYPAQIKVRWFRNDQEETTGVVSTPLIRNGDWTFQILVMLEMTPQRGDVYTCHVEHPSLQNPIIVEWRLLH

SEQ ID NO: 86399 - protein, 162 aa, Homo sapiens
MGHKARLPAGTRVFHTSCVVGSLTPFRLGGGKADPPSACRAHLAQASPPRGCCSHFCPFPRPGPRSLRPYHKVRSFFHTVSWAWQSLHLVASIPSGPFERISWSSLSELPGLRALGRSLRSWRSAGGRVALSWLSECRARGDGTGALLLGLVVPAAGKGQLV

SEQ ID NO: 86400 - protein, 136 aa, Homo sapiens
MAARVLIIGSGGREHTLAWKLAQSHHVKQVLVAPGNAGTACSEKISNTAISISDHTALAQFCKEKKIEFVVVGPEAPLAAGIVGNLRSAGVQCFGPTAEAAQLESSKRFAKEFMDRHGIPTAQWKAFTKPEEACSF

SEQ ID NO: 86401 - protein, 82 aa, Homo sapiens
  MOD_RES (1)..(1): Any amino acid
XPYSDGVLYGSPTAENVGKPTIIEITAYNRRTFETARHNLIINIMSAEDGVLLSSPRLECNGTISANCNLRLLGSGVYRYQL

SEQ ID NO: 86402 - protein, 108 aa, Homo sapiens
MGIQGGSVLFGLLLVLAVFCHSGHSLQCYNCPNPTADCKTAVNCSSDFDACLITKAGLQVYNKCWKFEHCNFNDVTTRLRENELTYYCCKKDLCNFNEQLENGSEPGA

SEQ ID NO: 86403 - protein, 86 aa, Homo sapiens
MGKKGKKEKKGRGAEKTAAKMEKKVSKRSRKEEEDLEALIAHFQTLDAKRTQTVELPCPPPSPRLNASLSVHPEKDELILFGDFFV

SEQ ID NO: 86404 - protein, 674 aa, Homo sapiens
MERRSESPCLRDSPDRRSGSPDVKGPPPVKVARLEQNGSPMGARGRPNGAVAKAVGGIIKLGRWNPLPLSYVTDAPDATVADMLQDVYHVVTLKIQLQSCSKLEDLPAEQWNHATVRNALKELLKEMNQSTLAKECPLSQSMISSIVNSTYYANVSATKCQEFGRWYKKYKKIKVERVERENLSDYCVLGQRPMHLPNMNQLASLGKTNEQSPHSQIHHSTPIRNQVPALQPIMSPGLLSPQLSPQLVRQQIAMAHLINQQIAVSRLLAHQHPQAINQQFLNHPPIPRAVKPEPTNSSVEVSPDIYQQVRDELKRASVSQAVFARVAFNRTQGLLSEILRKEEDPRTASQSLLVNLRAMQNFLNLPEVERDRIYQDERERSMNPNVSMVSSASSSPSSSRTPQAKTSTPTTDLPIKVDGANINITAAIYDEIQQEMKRAKVSQALFAKVAANKSQGWLCELLRWKENPSPENRTLWENLCTIRRFLNLPQHERDVIYEEESRHHHSERMQHVVQLPPEPVQVLHRQQSQPAKESSPPREEAPPPPPPTEDSCAKKPRSRTKISLEALGILQSFIHDVGLYPDQEAIHTLSAQLDLPKHTIIKFFQNQRYHVKHHGKLKEHLGSAVDVAEYKDEELLTESEENDSEEGSEEMYKVEAEEENADKSKAAPAEIDQR

SEQ ID NO: 86405 - protein, 299 aa, Homo sapiens
MLSVASHSGTLLVLAMAIRSDFHETFRRIARLFYWFPKSLTCSKNRKSKLLWSQGGEGKYICHAHCRDLVHLDYPQNGNVSSCMPTSEVRYSIKKNSQDVEKEKETHSYLSKEEIKEKVHKYNLAVTDKLKMTLNSNGIYTGFIKVQMELCKPPQTSPNSGKLSPSSNGCMNTLHISSTNTVGEVIEALLKKFLVTESPAKFALYKRCHREDQVYACKLSDREHPLYLRLVAGPRTDTLSFVLREHEIGEWEAFSLPELQNFLRILDKEEDEQLQNLKRRYTAYRQKLEEALREVWKPD

SEQ ID NO: 86406 - protein, 40 aa, Homo sapiens
MGLQAWALCPHPLWQMQLQPGARPAEDAAPRLGVPGPCGP

SEQ ID NO: 86407 - protein, 127 aa, Homo sapiens
  MOD_RES (1)..(1): Any amino acid
XENILVLDIFFEVLNYETIEQKKAYEIAGLLGDIGGQMGLFIGASILTVLELFDYAYEVIKHKLCRRGKCQKEAKRSSADKGVALSLDDVKRHNPCESLRGHPAGMTYAANILPHHPARGTFEDFTC

SEQ ID NO: 86408 - protein, 35 aa, Homo sapiens
MGHCVNLTDGAVEAVLTYCPQIRILLFHGCPLITG

SEQ ID NO: 86409 - protein, 583 aa, Homo sapiens
MAPELTPEEEQATKQFLEEINKWTVQYNVSPLSWNVAVKFLMARKFDVLRAIELFHSYRETRRKEGIVKLKPHEEPLRSEILSGKFTILNVRDPTGASIALFTARLHHPHKSVQHVVLQALFYLLDRAVDSFETQRNGLVFIYDMCGSNYANFELDLGKKVLNLLKGAFPARLKKVLIVGAPIWFRVPYSIISLLLKDKVRERIQILKTSEVTQHLPRECLPENLGGYVKIDLATWNFQFLPQVNGHPDPFDEIILFSLPPALDWDSVHVPGPHAMTIQELVDYVNARQKQGIYEEYEDIRRENPVGTFHCSMSPGNLEKNRYGDVPCLDQTRVKLTKRSGHTQTDYINASFMDGYKQKNAYIGTQGPLENTYRDFWLMVWEQKVLVIVMTTRFEEGGRRKCGQYWPLEKDSRIRFGFLTVTNLGVENMNHYKKTTLEIHNTEERQKRQVTHFQFLSWPDYGVPSSAASLIDFLRVVRNQQSLAVSNMGARSKGQCPEPPIVVHCSAGIGRTGTFCSLDICLAQLEELGTLNVFQTVSRMRTQRAFSIQTPEQYYFCYKAILEFAEKEGMVSSGQNLLAVESQ

SEQ ID NO: 86410 - protein, 64 aa, Homo sapiens
MRLSVRRVLLAAGCALVLVLAVQLGQQVLECRAVLAGLRSPRGAMRPEQEELVMVGTNHVEYRY

SEQ ID NO: 86411 - protein, 140 aa, Homo sapiens
MDNMSITNTPTSNDACLSIVHSLMCHRQGGESETFAKRAIESLVKKLKEKKDELDSLITAITTNGAHPSKCVTIQRTLDGRLQVAGRKGFPHVIYARLWRWPDLHKNELKHVKYCQYAFDLKCDSVCVNPYHYERVVSPG

SEQ ID NO: 86412 - protein, 99 aa, Homo sapiens
MIEVSERNYFIEMKTYIVYFSSLPMCCNTGSSDSVVPDLPVPTISAPSRWVWDQEEERKRQERWQKEQDRLLQEKYQREQEKLREEWQRAKQEAERENS

SEQ ID NO: 86413 - protein, 135 aa, Homo sapiens
MWRYRSWDVPQIPSEAPQTQKAITKSGLQHLAPPPPTPGAPCSESERQIRSTVDWSESATYGEHIWFETNVSGDFCYVGEQYCVARMLKSVSRRKCAACKIVVHTPCIEQLEKDSRDDLGVSPPCEDDSGLSWRE

SEQ ID NO: 86414 - protein, 255 aa, Homo sapiens
MKALILVGGYGTRLRPLTLSTPKPLVDFCNKPILLHQVEALAAAGVDHVILAVSYMSQVLEKEMKAQEQRLGIRISMSHEEEPLGTAGPLALARDLLSETADPFFVLNSDVICDFPFQAMVQFHRHHGQEGSILVTKVEEPSKYGVVVCEADTGRIHRFVEKPQVFVSNKINAGMYILSPAVLQRIQDPSARIGQNCSIGPNVSLGPGVVVEDGVCIRRCTVLRDARIRSHSWLESCIVGWRCRVGTHGERDSAG

SEQ ID NO: 86415 - protein, 108 aa, Homo sapiens
LKTGYRAVPLKNNYSEDLELASLLIKIDIFPAKENGDLSPFSGTSLRERGSDASGQLFHGRAREGSFESRYQQPFEDFRISQEHLADHFDSRERRAPRRTRVNGDNRL

SEQ ID NO: 86416 - protein, 43 aa, Homo sapiens
MSLHFLYYCSEPTLDVKIAFCQGFDKQVDVSYIAKHYNMSKSK

SEQ ID NO: 86417 - protein, 342 aa, Homo sapiens
MYLNVIINNTWQGDFSQIKVFLMTLKNMISKLKTECGCQFTSKLEGMFRDMSISNTTMDEFRQHLQATGVSLGGVDLTVRVLTTGYWPTQSATPKCNIPPAPRHAFEIFRRFYLAKHSGRQLTLQHHMGSADLNATFYGPVKKEDGSEVGVGGAQVTGSNTRKHILQVSTFQMTILMLFNNREKYTFEEIQQETDIPERELVRALQSLACGKPTQRVLTKEPKSKEIENGHIFTVNDQFTSKLHRVKIQTVAAKQGESDPERKETRQKVDDDRKHEIEAAIVRIMKSRKKMQHNVLVAEVTQQLKARFLPSPVVIKKRIEGLIEREYLARTPEDRKVYTYVA

SEQ ID NO: 86418 - protein, 38 aa, Homo sapiens
AAAALPAWLSLQSRARTLRAFSTAVYSATPVPTPSLQY

SEQ ID NO: 86419 - protein, 92 aa, Homo sapiens
MSLPLTEEQRKKIEENRQKALARRAEKLLAEQHQRTSSGTSIAGNPFQAKQGPSQNFPRESCKPVSHGVIFKQQNLSSSSNADQRPHDSHSF

SEQ ID NO: 86420 - protein, 697 aa, Homo sapiens
MEAPLGSILSPCPGRAATGRAGTGRVGTGLRPPAVLQLCPLLAFYRCVRKMRSGKASCTLETVWEDKHKYEEAERRFYEHEATQAAASAQQLPAEGPAMNGPGQDDPEDADEAEAPDGGSRRDPRKSQDSRKPLQKKRKRSPKSGLGPADLALLGLSAERVWLDKSLFDQAESSYRQKLADVAAQAAWPPALAPWGLCTHGNQVACHHVTWGIWVNKSSFDQAERAFVEWSQALLLAPDGSRRQGTPNTGQQVAVPDLAHQPSPPVNGQPPLGSLQALVREVWLEKPRYDAAERGFYEALFDGHPPGKVRLQERAGLAEGARRGRRDRRGRNILGNKRAGLRRADGEAPSALPYCYFLQKDAEAPWLSKPAYDSAECRHHAAEALRVAWCLEAASLSHRPGPRSGLSVSSLRPNRKMATNFLAHEKIWFDKFKYDDAERRFYEQMNGPVAGASRQENGASVILRDIARARENIQKSLAGSSGPGASSGTSGDHGELVVRIASLEVENQSLRGVVQELQQAISKLEARLNVLEKSSPGHRATAPQTQHVSPMRQVEPPAKKPATPAEDDEDDDIDLFGSDNEEEDKEAAQLREERLRQYAEKKAKKPALVAKSSILLDVKPWDDETDMAQLEACVRSIQLDGLVWGASKLVPVGYGIRKLQIQCVVEDDKVGTDLLEEEITKFEEHVQSVDIAAFNKI

SEQ ID NO: 86421 - protein, 312 aa, Homo sapiens
  MOD_RES (1)..(1): Any amino acid
XEIRTLLMEAENMALKRCNFPAPLARFRDISDISFIQSKKVVCFKEPSSTGVSNGDLLHRQPFTEESPSSRCIQKDIGTQTNLKCRRGIENWEFISSTTVRSPLQEAESKVSMALEETLRQYQAAKSVMRSEPEGCSGTIGNKIIIPMMTVIKSDSSSDASDGNGSCSWDSNLPESLESVSDVLLNFFPYVSPKTSITDSREEEGVSESEDGGGSSVDSLAAHVKNLLQCESSLNHAKEILRNAEEEESRVRAHAWNMKFNLAHDCGYSISELNEDDRRKVEEIKAELFGHGRTTDLSKITREDEDPTFCFL

SEQ ID NO: 86422 - protein, 55 aa, Homo sapiens
QRNILREKQTDEIKNCVVAEPEKMESSISSSSEEMSLSKCAEQFCRLNEYNQLQL

SEQ ID NO: 86423 - protein, 56 aa, Homo sapiens
MLGARAWLGRVLLLPRAGAGLAASRRCPGVWPRTWPHRSPSRPRRLGETNLARSPQ

SEQ ID NO: 86424 - protein, 94 aa, Homo sapiens
  MOD_RES (1)..(1): Any amino acid
XWDKETAPRLPQHRGWNPGDAPQTSQGRGTGTPVGAETKTLPSTDVAQPPSDSDAVGPRSGFPPQPSLPLCRAPGQLGEKQLPSSTSDDRRRLE

SEQ ID NO: 86425 - protein, 1430 aa, Homo sapiens
  MOD_RES (1)..(1): Any amino acid
XPGPGGGGGPSGSGSGPGSNGGLGSGGELHPRTGRLVSLSACGRTARRQQPGQEFNHGLVLSREPLRDGRVFTVRIDRKVNSWSGSIEIGVTALDPSVLDFPSSATGLKGGSWVVSGCSVLRDGRSVLEEYGQDLDQLGEGDRVGVERTVAGELRLWVNGRDCGVAATGLPPRVWAVVDLYGKCTQITVLPPEPGFSPPTPIPTPPLEPLAPTEDSALAEQGTSADEDFANMELSEVVSNTILSAYNGGLLNVNLSSPPAGEGLGSSGAATSPILTSNDALLFHEKCGTLIKLSNNNKTAERRRPLDEFNNGVVMTNRPLRDNEMFEIRIDKLVDKWSGSIEIGVTTHNPNSLEYPATMTNLQSGTIMMSGCGILTNGKGTRREYCEFSLDELQEGDHIGLTRKSNSALHFFINGIDQGVATPLTPPVVYGVVDLYGMAVKVTIVHNNNHSDRLRRNNAILRALSPEGALRRAAPAAQAEPERLLFHPNCGQKAAITHEGRTALRPHATDDFNHGVVLSSRALRDGEVFQVRIDKMVDKWAGSIEIGVTTHNPAYLQLPSTMTNLRSGTWMMTGNGVMHNGTTILDEYGHNLDRLKAGDTVGVVRREDGTLHFFVNGMTQGPAAWNVPPGVYAVVDLYGQAAQATIVDDVEVAPVPEPLPEGNNQVSPSSPSSGAGGSDLRFHQLHGSNAVITNGGRTALRHNCRSEFNDAIVISNRALRDGELFEIVIQKMVDRWSGSIEAGVTAIRPEDLEFPNTMTDIDYDTWMLSGTAIMQDGNTMRNNYGCDLDALGTGARIGMMRTAKGDLHYFINGQDQGAACSGLPPGKEVYAVVDLYGQCVQVSITNATGPMDNSLATSNTATEKSFPLHSPVAGVAHRFHSTCGKNVTLEEDGTRAVRAAGYAHGLVFSTKELRAEEVFEVKVEELDEKWAGSLRLGLTTLAPGEMGPGAGGGGPGLPPSLPELRTKTTWMVSSCEVRRDGQLQRMNYGRNLERLGVGSRVGVRRGADDTMHILVDGEDMGPAATGIAKNVWAVLDLYGPVRGVSIVSSTRLEESEGTQPPSPSSDTGSEGEEDDEGEEHGLGGQNEVGIIPTTLEFLENHGKNILLSNGNRTATRVASYNQGIVVINQPLVPQLLVQVRIDFLNRQWTSSLVLGVITCAPERLNFPASACALKRAAWLLRGRGVFHNGLKICEKFGPNLDTCPEGTILGLRLDSSGGLHLHVNGVDQGVAVPDVPQPCHALVDLYGQCEQVTIVNPEPGAASGKSAGTQGDMEKADMVDGIKESVCWGPPPAASPLKSCEYHALCSRFQELLLLPEDYFMPPPKRSLCYCESCRKLRGDEAHRRRGEPPREYALPFGWCRFNLRVNPRLEAGTLTKKWHMAYHGSNVAAVRRVLDRGELGAGTASILSCRPLKGEPGVGFEEPGENCAP

SEQ ID NO: 86426 - protein, 180 aa, Homo sapiens
MALVRGGWLWRQMHLEYRTGSILRRWKRNWFALWLDGTLGYYHDETAQDEEDRVLIHFNVRDIKIGPECHDVQPPEGRSRDGLLTVNLREGGRLHLCAETKDDALAWKTALLEANSTPVRVYSPYQDYYEVVPPNAHEATYVRSYYGPPYAGPGVTHVIVREDPCYSAGAPLAMGMLAGA

SEQ ID NO: 86427 - protein, 373 aa, Homo sapiens
MSTLCPPPSPAVAKTEIALSGKSPLLAATFAYWDNILGPRVRHIWAPKTEQVLLSDGEITFLANHTLNGEILRNAESGAIDVKFFVLSEKGVIIVSLIFDGNWNGDRSTYGLSIILPQTELSFYLPLHRVCVDRLTHIIRKGRIWMHKERQENVQKIILEGTERMEDQGQSIIPMLTGEVIPVMELLSSMKSHSVPEEIDIADTVLNDDDIGDSCHEGFLLNAISSHLQTCGCSVVVGSSAEKVNKIVRTLCLFLTPAERKCSRLCEAESSFKYESGLFVQGLLKDSTGSFVLPFRQVMYAPYPTTHIDVDVNTVKQMPPCHEHIYNQRRYMRSELTAFWRATSEEDMAQDTIIYTDESFTPDLYVMLCLLVL

SEQ ID NO: 86428 - protein, 136 aa, Homo sapiens
MMEEEELEFVEELEAVLQLTPEVQLAIEQVFPSQDPLDRADFNAVEYINTLFPTEQSLANIDEVVNKIRLKIRRLDDNIRTVVRGQTNVGQDGRQALEEAQKAIQQLFGKIKDIKDKAEKSEQMSHDQAKTIRRSC

SEQ ID NO: 86429 - protein, 175 aa, Homo sapiens
MAFSGSQAPYLSPAVPFSGTIQGGLQDGLQITVNGTVLSSSGTRFAVNFQTGFSGNDIAFHFNPRFEDGGYVVCNTRQNGSWGPEERKTHMPFQKGMPFDLCFLVQSSDFKVMVNGILFVQYFHRVPFHRVDTISVNGSVQLSYISFQPMPFITTILGGLYPSKSILLSGTVLPS

SEQ ID NO: 86430 - protein, 75 aa, Homo sapiens
  MOD_RES (1)..(1): Any amino acid
XLAEHGVAALFTAPTAIRAIRQQDPGAALGKQYSLTRFKTLFVAGERCDVETLEWSKNVFRVPVLDHWWQTGIKH

SEQ ID NO: 86431 - protein, 129 aa, Homo sapiens
ILLLPLHTGSNGLTIIEATHVLLVEPILNPAHELQAIGRVHRIGQTKPTIVHRFLIKATIEERMQAMLKTAERRFFEEQALFCFHDITPFSHPWSLTTAILQLRDLVICELFFIYFKNFLICFLSSFSI

SEQ ID NO: 86432 - protein, 33 aa, Homo sapiens
MAEERVATRTQFPVSTESQKPRQKKGDFLLAFS

SEQ ID NO: 86433 - protein, 54 aa, Homo sapiens
MSSIGTGYDLSASTFSPDGRVFQVEYAMKAVENSSYWNQMQRWCCLWGRKISPF

SEQ ID NO: 86434 - protein, 615 aa, Homo sapiens
MDSVAFEDVAVNFTHEEWALLGPSQKNLYRDVMRETIRNLNCIGMKWENQNIDDQHQNLRRNPRCDVVERFGKSKDGSQCGETLSQIRNSIVNKNTPARVDACGSSVNGEVIMGHSSLNCYIRVDTGHKHRECHEYAEKSYTHKQCGKGLSYRHSFQTCERPHTGKKPYDCKECGKTFSSPGNLRRHMVVKGGDGPYKCELCGKAFFWPSLLRMHERTHTGEKPYECKQCSKAFPVYSSYLRHEKIHTGEKPYECKQCSKAFPDYSSYLRHERTHTGEKPYKCKQCGKAFSVSGSLRVHERIHTGEKPYTCKQCGKAFCHLGSFQRHMIMHSGDGPHKCKICGKGFDFPGSARIHEGTHTLEKPYECKQCGKLLSHRSSFRRHMMAHTGDGPHKCTVCGKAFDSPSVFQRHERTHTGEKPYECKQCGKAFRTSSSLRKHETTHTGEQPYKCKCGKAFSDLFSFQSHETTHSEEEPYECKECGKAFSSFKYFCRHERTHSEEKSYECQICGKAFSRFSYLKTHERTHTAEKPYECKQCRKAFFWPSFLLRHERTHTGERPYECKHCGKAFSRSSFCREHERTHTGEKPYECKECGKAFSSLSSFNRHKRTHWKDIL

SEQ ID NO: 86435 - protein, 296 aa, Homo sapiens
MSLCSPTHSAEMSLFLQGPEEMLPLSSEGSEMGSEKEQSPEPHLPEEGEGGKPWRVDDSEGSWIPPGEKEHGQESLSDELQETHPKKPWQKVTVRARELGDPIAHPRHEADEKPFICAQCGKTFNNTSNLRTHQRIHTGEKPYKCSECGKSFSRSSNRIRHERIHLEEKHYKCPKCQESFRRRSDLTTHQQDHLGKRPYRCDICGKSFSQSATLAVHHRTHLEPAPYICCECGKSFSNSSSFGVHHRTHTGERPYECTECGRTFSDISNFGAHQRTHRGEKPYRCTVCGKHFSRSS

SEQ ID NO: 86436 - protein, 68 aa, Homo sapiens
MLRGSASSTSMEKAKGKEEHQQREPKKKCLSKAVKCSALRKRQSTLTTPDLRRRYQSLHYLLNCHLLI

SEQ ID NO: 86437 - protein, 121 aa, Homo sapiens
MAAAEAVHHIHLQNFSRSLLETLNGQRLGGHFCDVTVRIREASLRAHRCVLAAGSPFFQDKLLLGHSEIRVPPVVPAQTVRQLVEFLYSGSLVVAQGEALQVLTAASVLRIQTVIDECTQI

SEQ ID NO: 86438 - protein, 397 aa, Homo sapiens
MNKRIHYYSRLTTPADKALIAPDHVVPAPEECYVYSPLGSAYKLQSYTEGYGKNTSLVTIFMIWNTMMGTSILSIPWGIKQAGFTTGMCVIILMGLLTLYCCYRVVKSRTMMFSLDTTSWEYPDVCRHYFGSFGQWSSLLFSLVSLIGAMIVYWVLMSNFLFNTGKFIFNFIHHINDTDTILSTNNSNPVICPSAGSGGHPDNSSMIFYANDTGAQQFEKWWDKSRTVPFYLVGLLLPLLNFKSPSFFSKFNILGTVSVLYLIFLVTFKAVRLGFHLEFHWFIPTEFFVPEIRFQFPQLTGVLTLAFFIHNCIITLLKNNKKQENNVRDLCIAYMLVTLTYLYIGVLVFASFPSPPLSKDCIEQATWLVSSFWAISSVTFILGKGSSLDQQDVPSNK

SEQ ID NO: 86439 - protein, 101 aa, Homo sapiens
MSREMQDVDLAEVKPLVEKGETITGLLQEFDVQEQDIETLHGSVHVTLCGTPKGNRPVILTYHDIGMNHKTCYNPLFNYEDMQEITQHFAVCHVDAPGQQD

SEQ ID NO: 86440 - protein, 61 aa, Homo sapiens
MQIFVKTLTGKTITLEVEPSDTIENVKAKIQDKEGIPPDQQRLIFAGKQLEDGRTLSDYNI

SEQ ID NO: 86441 - protein, 207 aa, Homo sapiens
MYFPGCSTCHLASVGLIFKNSSFLKPQNAFLCYGRRKSSSRGQKAKDPKYPVENLLNPDSPRRPWLGCPQDKSGQLKVELQLERAVPTGYIDVGNCGCAFLQIDVGHSSWPLDRPFITLLPATTLMSLTDSKQGKNRSGVRMFKDVDFLAPASGELWDRLRLTCSRPFTRHQSFGLAFLRVCSSLDSLDDSVVGPSALLSSVLNKIR

SEQ ID NO: 86442 - protein, 243 aa, Homo sapiens
MRWLWPLAVSLAVILAVGLSRVSGGAPLHLGRHRAETQEQQSRSKRGTEDEEAKGVQQYVPEEWAEYPRPIHPAGLQPTKPLVATSPNPGKDGGTPDSGQELRGNLTGAPGQRLQIQNPLYPVTESSYSAYAIMLLALVVFAVGIVGNLSVMCIVWHSYYLKSAWNSILASLALWDFLVLFFCLPIVIFNEITKQRLLGDVSCRAVPFMEVSSLGVTTFSLCALGIDRFHVATSTLPKSPASW

SEQ ID NO: 86443 - protein, 97 aa, Homo sapiens
MAVCGLGSRLGLGSRLGLRGCFGAARLLYPRFQSRGPQGVEDGDRPQPSSKTPRIPKIYTKTGDKGFSSTFTGERRPKDDQVFEAVGTTDELSSAIG

SEQ ID NO: 86444 - protein, 60 aa, Homo sapiens
MNMVKRIMGRPRQEECSPQDNALGLMHLRRLFTELCHPPRHMTQKEQEEKLYMMLPVFNR

SEQ ID NO: 86445 - protein, 295 aa, Homo sapiens
MDLEKNYPTPRTSRTGHGGVNQLGGVFVNGRPLPDVVRQRIVELAHQGVRPCDISRQLRVSHGCVSKILGRYYETGSIKPGVIGGSKPKVATPKVVEKIAEYKRQNPTMFAWEIRDRLLAERVCDNDTVPSVSSINRIIRTKVQQPPNQPVPASSHSIVSTGSVTQVSSVSTDSAGSSYSISGILGITSPSADTNKRKRDEGIQESPVPNGHSLPGRDFLRKQMRGDLFTQQQLEVLDRVFERQHYSDIFTTTEPIKPEQAPPTIIALPPEEPPHLQPPLPMTVTDPWSQAGTKH

SEQ ID NO: 86446 - protein, 106 aa, Homo sapiens
MMLTIGDVIKQLIEAHEQGKDIDLNKVKTKTAAKYGLSAQPRLVDIIAAVPPQYRKVLMPKLKAKPIRTASGIAVVAVMCKPHRCPHISFTGNICVYCPGGPDSDF

SEQ ID NO: 86447 - protein, 57 aa, Homo sapiens
MVGQRVLLLVAFLLSGVLLSEAAKILTISTLGECLAGEFPDRRVPDPRTARAPANGD

SEQ ID NO: 86448 - protein, 34 aa, Homo sapiens
  MOD_RES (1)..(1): Any amino acid
XGGKQYLLGLYDTAGQEDTGELAVRSCDFDKSIF

SEQ ID NO: 86449 - protein, 851 aa, Homo sapiens
MTLHATRGAALLSWVNSLHVADPVEAVLQLQDCSIFIKIIDRIHGTEEGQQILKQPVSERLDFVCSFLQKNRKHPSSPECLVSAQKVLEGSELELAKMTMLLLYHSTMSSKSPRDWEQFEYKIQAELAVILKFVLDHEDGLNLNEDLENFLQKAPVPSTCSSTFPEELSPPSHQAKREIRFLELQKVASSSSGNNFLSGSPASPMGDILQTPQFQMRRLKKQLADERSNRDELELELAENRKLLTEKDAQIAMMQQRIDRLALLNEKQAASPLEPKELEELRDKNESLTMRLHETLKQCQDLKTEKSQMDRKINQLSEENGDLSFKLREFASHLQQLQDALNELTEEHSKATQEWLEKQAQLEKELSAALQDKKCLEEKNEILQGKLSQLEEHLSQLQDNPPQEKGEVLGDVLQLETLKQEAATLAANNTQLQARVEMLETERGQQEAKLLAERGHFEEEKQQLSSLITDLQSSISNLSQAKEELEQASQAHGARLTAQVASLTSELTTLNATIQQQDQELAGLKQQAKEKQAQLAQTLQQQEQASQGLRHQVEQLSSSLKQKEQQLKEVAEKQEATRQDHAQQLATAAEEREASLRERDAALKQLEALEKEKAAKLEILQQQLQVANEARDSAQTSVTQAQREKAELSRKVEELQACVETARQEQHEAQAQVAELELQLRSEQQKATEKERVAQEKDQLQEQLQALKESLKVTKGSLEEEKRRAADALEEQQRCISELKAETRSLVEQHKRERKELEEERAGRKGLEARLQQLGEAHQAETEVLRRELAEAMAAQHTAESECEQLVKEVAAWRERYEDSQQEEAQYGAMFQEQLMTLKEECEKARQELQE

SEQ ID NO: 86450 - protein, 194 aa, Homo sapiens
MSFLTNDASSESIASFSKQEVMSSFLPEGGCYELLTVIGKGFEDLMTVNLARYKPTGEYVTVRRINLEACSNEMVTFLQGELHVSKLFNHPNIVPYRATFIADNELWVVTSFMAYGSAKDLICTHFMDGMNELAIAYILQGVLKALDYIHHMGYVHRISRVMMPSLTSTVWESQPVNWPTAMSPLRICLPPRCC

SEQ ID NO: 86451 - protein, 293 aa, Homo sapiens
MWATLPLLCAGAWLLGVPVCGAAELCVNSLEKFHFKSWMSKHRKTYSTEEYHHRLQTFASNWRKINAHNNGNHTFKMALNQFSDMSFAEIKHKYLWSEPQNCSATKSNYLRGTGPYPPSVDWRKKGNFVSPVKNQGACGSCWTFSTTGALESAIAIATGKMLSLAEQQLVDCAQDFNNHGCQGGLPSQAFEYILYNKGIMGEDTYPYQGKDGYCKFQPGKAIGFVKDVANITIYDEEAMVEAVALYNPVSFAFEVTQDFMMYRTGIYSRYFLIERGKNMCGLAACASYPIPLV

SEQ ID NO: 86452 - protein, 3266 aa, Homo sapiens
MPAPVGLLGLVLLWPLMAVTAEKIPDSQVGQVASCMTACTGSAGPHLPVGTRYTYHFSTNTSTSLQDVLVEGSGLGLQGLAVLDVLGLCQMALWLQDFQVTSILGAKVELLKESESLSATLGRNPLRFILHSGRVAHLCPHPTEPRWVLNVKRAVLSLLQGHPGAHSPKTFDEVDILGRCPTTYQHHGDWLHKTKDLARCSLRRGRSSLHSQALPGVAPGLTSRLTCVQSFRAGVLREASCTELDSAGPLPAKASAVQMRTLSSLSLLHEMPQDPAGTDPDDRDDEDMTPSSLLYEWEETPSQAMVATAATLVRRLCLAQTTSLEAMDLFLTLVSQLQGLSGGELMELWQYSSFKCRDNGQPLLDALPSCGTEHCVGLMKELIASAAVEADEVEAWLSSLAFLPQPTDAMVHMLLPLLQTPRASPGAFLGISALVHNLCASLDGPCGQLPGVGSLVRILGDALGENCTIQEPSDDDKLQLVLKAVGNAGLAAMALTPTLSACASLRSSTPEIRLGAIQAFRRVPCSADRSVLSRLYQSLEEDAEIRINAYLALMRCPSEEVFAQVRRTQAGELSTQVGSFVWSHILQLLETHDPLKRALRDTLPEDILSQEFHPEMWKHSSYSDVTFRSVSGSLGANLEGTLLFSPASFLPRSATVNLTIHTMGRAFNLLELGLRLENAEEIAHRLFGRKSFWGQEDGREPEPEEPPGPEPGPAPQPASPECPGDRDRRMRYLQQKVTRRRGARQALRCELSVKLLGQELSFVNCGATGSHVNHWPLNLAELAIKLMKGQEVQMNRRLSLAAQELVFPTVSGLPARLTLNASAAISIRVRGTTDFQQRSDFSVNGYVKPSALLQISAQMGTAGILGQAGLRWVTSVRSAASLDGGIQVQKGRVLKVHLNTPEEAVELLSFSSQLYLITRDGVRSLRHVPGPSEVQSCTGEEVSYTWGWRLCTGVTWPVPGQPYLLSLPVFAAVTLQKRDPGLRQYLLEAAYTLQPQKGSWFPQEATAHVFMGTPGSEVLRDVGVDMSYSLPQNKFRLKLLHPKKKIELDGKMEALGSAHTGHLELVLDDRDVYYIKGWSDLQPAMGGEAERFQAQLEVKLVTGGSPVVFTGNLTRQVGSKLAFSASLSHLLSDQANVTALLERKEENGRRVAALGAELFVPGLVGLRALGLLQQRGQLWTNSLRIQYSLLGQAKQAAHECSTSQKLRADSGSDGAYRLELRHELHCTQILAFSHKVQLWHEEDSGHLHSQLEVSYGKHWDKNSNKRHLRVSQTFKNDSGPALSNHFMEFVLQVPERQVDCRVQLYHLSLRLPYVESSSHLKVQYNGRPLFVAGGQWKDTSRATLWKWEGALNLDSPWLMVSAAHRLYWPHRAVFQAVLELTLGKAWTLKDLVVSVGCRSQGPNREGKIQVYTAATTYLRVSTVTVLAQSLFHSWSELESAWNAAVQGEIHAENSRDRKILNCWLKGPQQELNLTAAYRHLEWPRKTQVSLTAVRIGAQGQPRGLQLEGELEELRQDRTLYRKRGALLLRHPLHLPIPQSLLLQETFTADRRHQRYSLETRVVLNGREETLQTMVLGCQAGHPYVCAGLMHPYDGKVIPRNTEGCLVTWNQHTAKNREVEATLKVHRKVVLHLKGLHHDRSQHGEIRHSLALDLAHSYQLSFPQALSLDGGIIFRQSPQGTFNFGMDARAAVNHNVTSQASVQLNGSDSDFAFFFQLRHPHGPTFPPNFQVQAAAGRYRVRSLNGSLSVQMSGRELVLLEVDASQDTRRSSRGWGVSVLLHQAVLSAPRAVRLQLSAKITPARIWLFSKALLDQNTAQLLLKASEEWRGGRILTFQSQTRHTVAGWAAMPRLLTLTGRLKQKETLQEGTLSVTADSAVLGFLLRDQHEKAGNGTSVRSVTCVLAQNSSQALPGELQLKGRLQAQTRNLRAQASIRAHAASLALGGACSWGPRHGQLAGGPTHNISTLSDAGLPSEAGMLLSLTHVASNCSARLALWNAGAQLDGAIGLEDVTPESSGLQLHASLRHTHTMPSLKHWGLPFSLDGHGHFQVNCSGDASPTQLLGWCRGDIAGQPLEVSVDIHNGSSGFEHSGRILMGPTFLNYSVSCYYHDGHLELSGRSWHNSEALLWAGFPGEACLSAELQIHETQTQARVALHGGDSGVSMDLAALVARPRRGPLQLVASASHTVPALQRLGLPFTNQLVFQGLWEAEEMSSSLQLTCDSQATLVLDVRGQNQAVSKELLFSGRHRLPFLLGLCPSSASASAKLHYSKGEVQSMFALGVEERHFHISTRQVAAKAGLNNFIKLEQTFLQLSALPRELFLQTAYERAHGTRVLRQVVLWDGQEVALTGSLSGPFPKPTRNLSLQVELTHPLPLPLPRHCSLRLSSEHLGGSHRDGLVVGWDGRDQVLVSSSLWLGKSELAARLALAHPFNLPWRQAEASGLAESRGGRQSRQVQLTWNRGQPATLQLTWADGSLAHSTAWDGCLAASPGQLQETWGLNSLQACGAFTQTPAVFVEQLNVSWGQHRMRQNLTYERHWPSQPDKIIMEATLEHVLGASCTRQSFWGEVQTDYARWLRHSLHLGLCDLPRALLVVGEHTLGQGGLLLRSRCHLGLAPDPDHGLHLSLTLQNHSRPRSADFSGALELRGSKAQRVGLLGRVSTSTSQSLVRLEGSVDNREEKVRLSVFRAPSCLQASVAHEEGGREESVVLRACAHGRTAEAEVLFRDGRQPSQPLGRLTLQAANQSLLLAARGCQGGLLGHVESRIAAVGSQVQARLEEKVQGLGASVRRFQQLVQPAGTLDGVAGLLLQLSQAGREAMQASGWAVATLWARSQALTQHLPLYLEWLQVGLEQLREELEWPLATLKDAYLEVTLRPLEEVWRERAEEAMRRLQAWVPGMPGKGGPRPIRAALGAMKGALELAAQQMLSWAEATFSRALKRLCKPLLDLYSLSARNRSVVVMLPLLPAGDEPLDVARVTSYLMEEKLLRPLRELSGANVLAEYYWLRRRLLAGPWEYHALVAGAQHVVTFDGRVWDLSTQCGSILLAQDFAHNTFSLTLSRTGSGLTALFVELNHKTLILYPSLQAYRLYNSSLPGDSCPDLKLHPATTRKDVSRIELASEDGVSVSCDVPTGLCSLTLGLWQHGISAGLLGTNDNEAGNELMLPDGSMARSLEELSLAWQVGGDCRATEKPQQEQACPGQLPACWAFFEGPHSSLRDCFRVVDPTPFLSLCVQVPCGTQELQPACNLAAAYIHLCARGFVPLAPPPQCV

SEQ ID NO: 86453 - protein, 39 aa, Homo sapiens
MDDWAPRCPRCCPLCDCACTCQLPDCQSLNCLCFEIKLR

SEQ ID NO: 86454 - protein, 133 aa, Homo sapiens
MEGSLAGSLAAPDRPQGPERLPGPAPRENIEGGAEAAEGEGGIFRSTRYLPVTKEGPRDILDGRGGISVANFDPGTFSLMRCDFCGAGFDTRAGLSSHARAHLRDFGITNWELTVSPINILQELLATSAAEQP

SEQ ID NO: 86455 - protein, 149 aa, Homo sapiens
MPMILGYWDIRGLAHAIRLLLEYTDSSYEEKKYTMGDAPDYDRSQWLNEKFKLGLDFPNLPYLIDGAHKITQSNAILCYIARKHNLCGETEEEKIRVDILENQTMDNHMQLGMICYNPEFGLEKISAYMKSSRFLPRPVFSKMAVWGNK

SEQ ID NO: 86456 - protein, 43 aa, Homo sapiens
MDAKSLTAWSRTLVTFKDVFVDFTREEWKLLDTAQQIVYRNVM

SEQ ID NO: 86457 - protein, 115 aa, Homo sapiens
  MOD_RES (1)..(1): Any amino acid
XFDGLRKLIFIKKKRDSPDSEKSSRAASSLLANLWQYNKLHRDFRAVRFPSPGQAGTRVQGMGRRGRVSEEAHGRMETRDPERKGPGHTQHTAGGTAGRGPHGQTCTLTLGLSPL

SEQ ID NO: 86458 - protein, 94 aa, Homo sapiens
MERKRREKIERRQQEVETELKMWDPHNDPNAQGDAFKTLFVARVNYDTTESKLRREFEVYGPIKRIHMVYSKRSGKPRGYAFIEYEHERDMHST

SEQ ID NO: 86459 - protein, 82 aa, Homo sapiens
LDLGSAGGRFQLMAKLAEGAGIQLPSTAAAAAAAAAQAAALQLNGAVPLGALNPAALTALSPALNLASQCFQLSSLFTPQTM

SEQ ID NO: 86460 - protein, 152 aa, Homo sapiens
METLEELDWCLDQLETIQTYRSVSEMASNKFKRMLNRELTHLSEMSRSGNQVSEYISNTFLDKQNDVEIPSPTQKDREKKKKQQLMTQISGVKKLMHSSSLNNTSISRFGVNTENEDHLAKELEDLNKWGLNIFNVAGYSHNRPLTCIMYAI

SEQ ID NO: 86461 - protein, 192 aa, Homo sapiens
TSLYCPQMAGALETQVLSFSSMSDITGSVTLKPWSPGLSSSSSSDSVWPLGKPEGLLARGCGLDFLNRSLAIRVSGRSPPGGPEPQDKGPDGLSFYGDRWSGAVVRRVLSGPGSARMEPREQRVEAAGLEGACLEAEAQQRTLLWNQGSTLPSLMDSKACQSFHEALEAWAKGPGAEPFYIRANLTLPERAD

SEQ ID NO: 86462 - protein, 224 aa, Homo sapiens
  MOD_RES (1)..(1): Any amino acid
XAVSERRGLGRGSPAEWGQRLLLVLLLGGCSGRIHQLALTGEKRADIQLNSFGFYTNGSLEVELSVLRLGLREAEEKSLLTRDFQDCPLQKNSSSFLVLFLINTKDLQVQVRKYGEQKTLFIFPGLLPEAPSKPGLPKPQATVPRKVDGGGTSAASKPKSTPAVIQGPSGKDKDLVLGLSHLNNSYNFSFHVVIGSQAEEGQYSLNFHNCNNSVPGKEHPFDIT

SEQ ID NO: 86463 - protein, 318 aa, Homo sapiens
MMEGLKKRTRKAFGIRKKEKDTDSTGSPDRDGIQPSPHEPPYNSKAECAREGGKKVSKKSNGAPNGFYAEIDWERYNSPELDEEGYSIRPEEPGSTKGKHFYSSSESEEEEESHKKFNIKIKPLQSKDILKNAATVDELKASIGNIALSPSPVGAIKRNLSSEEVARPRRSTPTPELISKKPPDDTTALAPLFGPPLESAFDEQKTEVLLDQPEIWGSGQPINPSMESPKLTRPFPTGTPPPLPPKNVPATPPRTGSPLTIGPGASSPARPATPLVPCRSTTPPPPPPRPPSRPKLPPGKPGVGDVVCSLLPWLAQKQ

SEQ ID NO: 86464 - protein, 129 aa, Homo sapiens
MRLFLSLPVLVVVLSIVLEGPAPAQGTPDVSSALDKLKEFGNTLEDKARELISRIKQSELSAKMRLEPFPGHGRAGVCFWVEPWQMVQDEQIEKKTSPGEADNIPLVTQLDLKGVVFRDISESEGETQD

SEQ ID NO: 86465 - protein, 50 aa, Homo sapiens
MPEGPELHLASQFVNEACRALVFGGCVEKSSVSRNPEVPFESSAYRISAS

SEQ ID NO: 86466 - protein, 189 aa, Homo sapiens
MNPASAPPPLPPPGQQVIHVTQDLDTDLEALFNSVMNPKPSSWRKKILPESFFKEPDSGSHSRQSSTDSSGGHPGPRLAGGAQHVRSHSSPASLQLGTGAGAAGSPAQQHAHLRQQSYDVTDELPLPPGWEMTFTATGQRYFLNHIEKITTWQDPRKAMNQPLNHMNLHPAVSSTPVPQRSMAVSQPNL

SEQ ID NO: 86467 - protein, 738 aa, Homo sapiens [sequence omitted]

SEQ ID NO: 86468 - protein, 257 aa, Homo sapiens
  MOD_RES (1)..(1): Any amino acid
XMNVPGGGAAAVMMTGYNNGRCPRNSLYSDCIIEEKTVVLQKKDNEGFGFVLRGAKADTPIEEFTPTPAFPALQYLESVDEGGVAWQAGLRTGDFLIEVNNENVVKVGHRQVVNMIRQGGNHLVLKVVTVTRNLDPDDTARKKAPPPPKRAPTTALTLRSKSMTSELEELVDKASVRKKKDKPEEIVPASKPSRAAENMAVEPRVATIKQRPSSRCFPAGSDMNSVYERQGIAVMTPTVPGSPKAPFLGIPREARRS

SEQ ID NO: 86469 - protein, 603 aa, Homo sapiens
MSAANPETPNSTISREASTQSSSAAASQGWVLPEGKIVPNTVFVGGIDARMDETEIGSCFGRYGSVKEVKIITNRTGVSKGYGFVSFVNDVDVQKIVGSQIHFHGKKLKLGPAIRKQKLCARHVQPRPLVVNPPPPPQFQNVWRNPNTETYLQPQITPNPVTQHVQSAANPETPNSTISREASTQSSSAAASQGWVLPEGKIVPNTVFVGGIDARMDETEIGSCFGRYGSVKEVKIITNRTGVSKGYGFVSFVNDVDVQKIVGSQIHFHGKKLKLGPAIRKQKLCARHVQPRPLVVNPPPPPQFQNVWRNPNTETYLQPQITPNPVTQHVQAYSAYPHSPGQVITGCQLLVYNYQEYPTYPDSAFQVTTGYQLPVYNYQPFPAYPRSPFQVTAGYQLPVYNYQAFPAYPNSPFQVATGYQFPVYNYQPFPAYPSSPFQVTAGYQLPVYNYQAFPAYPNSPFQVATGYQFPVYNYQAFPAYPNSPVQVTTGYQLPVYNYQAFPAYPNSPFQVATGYQFPVYNYQAFPAYPNSPVQVTTGYQLPVYNYQAFPAYPNSAVQVTTGYQFHVYNYQMPPQCPVGEQRRNLWTEAYKWWYLVCLIQRRD

SEQ ID NO: 86470 - protein, 430 aa, Homo sapiens
  MOD_RES (1)..(1): Any amino acid
XAASGAVEPGPPGAAVAPSPAPAPPPAPDHLFRPISAEDEEQQPTEIESLCMNCYCNGMTRLLLTKIPFFREIIVSSFSCEHCGWNNTEIQSAGRIQDQGVRYTLSVRALEDMNREVVKTDSAATRIPELDFEIPAFSQKGALTTVEGLITRAISGLEQDQPARRANKDATAERIDEFIVKLKELKQVASPFTLIIDDPSGNSFVENPHAPQKDDALVITHYNRTRQQEEMLGLQEEAPAEKPEEEDLRNEVLQFSTNCPECNAPAQTNMKLVQIPHFKEVIIMATNCENCGHRTNEVKSGGAVEPLGTRITLHITDASDMTRDLLKSETCSVEIPELEFELGMAVLGGKFTTLEGLLKDIRELIIEGNMKAHFIMDDPAGNSYLQNVYAPEDDPEMKVERYKRTFDQNEELGLNDMKTEGYEAGLAPQR

SEQ ID NO: 86471 - protein, 183 aa, Homo sapiens
MAAARDPPEVSLREATQRKLRRFSELRGKLVARGEFWDIVAITAADEKQELAYNQQLSEKLKRKELPLGVQYHVFVDPAGAKIGNGGSTLCALQCLEKLYGDKWNSFTILLIHSGGYSQRLPNASALGKIFTALPLDEWKKKVSESYVITIERLEDDLQIKEKELTELRNIFGFRVHVHNMQL

SEQ ID NO: 86472 - protein, 186 aa, Homo sapiens
VCAVFGGSRGIGRAVAQLMARKGYRLAVIARNLEGAKAAAGDLGGDHLAFSCDVAKEHDVQNTFEELEKHLGRVNFLVNAAGINRDGLLVRTKTEDMVSQLHTNLLGSMLTCKAAMRTMIQQQGGSIVNVGHRREMLLHKRSIVGLKGNSGQSVYSASKGGLVGFSRALAKEVARKKIRVNVVAPG

SEQ ID NO: 86473 - protein, 144 aa, Homo sapiens
MSQDGASQFQEVIRQELELSVKKELEKILTTASSHEFEHTKKDLDGFRKLFHRFLQEKGPSVDWGKIQRPPEDSIQPYEKIKARGLPDNISSVLNKLVVVKLNGGLGTSMGCKGPKSLIGVRNENTFLDLTVQQIEDKVINRTP

SEQ ID NO: 86474 - protein, 44 aa, Homo sapiens
MNSGAMRIHSKGHFQGGIQVKNEKNRPSLKSLKTDNRPEKSKSS

SEQ ID NO: 86475 - protein, 1002 aa, Homo sapiens
  MOD_RES (1)..(1): Any amino acid
XITITEITSHSTLSYTTSITTTETPSHSTLSFTSSITTTETTSHSTPSFTSSITTSEMPSHSTPSFTSSITTTENATHSTPNFTSSITTTETTSHSTPSFTSLITTTETTSHRWGTTETTSYSTPSFTSSNTITETTSHSTPSYITSITTTETPSSSTPSFSSSITTTETTSHSTPGFTSSITTTETTSHSTPSFTSSITTTETTSHDTPSFTSSITTSETPSHSTPSSTSLITTTKTTSHSTPSFTSSITTTETTSHSAHSFTSSITTTETTSHNTRSFTSSITTTETNSHSTTSFTSSITTTETTSHSTPSFSSSITTTETPLHSTPGLTSWVTTTKTTSHITPGLTSSITTTETTSHSTPGFTSSITTTETTSESTPSLSSSTIYSTVSTSTTAITSHFTTSETAVTPTPVTPSSLSTDIPTTSLRTLTPSSVGTSTSLTTTTDFPSIPTDISTLPTRTHIISSSPSIQSTETSSLVGTTSPTMSTVRMTLRITENTPISSFSTSIVVIPETPTQTPPVLTSATGTQTSPAPTTVTFGSTDSSTSTLHTLTPSTALSTIVSTSQVPIPSTHSSTLQTTPSTPSLQTSLTSTSEFTTESFTRGSTSTNAILTSFSTIIWSSTPTIIMSSSPSSASITPVFSTTIHSVPSSPYIFSTENVGSASITGFPSLSSSATTSTSSTSSSLTTALTEITPFSYISLPSTTPCPGTITITIVPASPTDPCVEMDPSTEATSPPTTPLTVFPFTTEMVTCPTSISIQTTLTTYMDTSSMMPESESSISPNASSSTGTGTVPTNTVFTSTRLPTSETWLSNSSVIPLPLPGVSTIPLTMKPSSSLPTILRTSSKSTHPSPPTTRTSETPVATTQTPTTLTSRRTTRITSQMTTQSTLTTTAGTCDNGGTWEQGQCACLPGFSGDRCQLQTRCQNGGQWDGLKCQCPSTFYGSSCEFAVEQVDLDAEDFCRHAGLHLQGCGDPVPEEWQHRGGLPGPAGDALQPPAGERV

SEQ ID NO: 86476 - protein, 862 aa, Homo sapiens
MEGHAEMEMLRTLKGPSTGEVSMHLVAGDSPGSGPHLPATAFIIPASSATLGLPSSALDVSCFPREPIHVGAPEQVAGCEPVSATVLPQLSAGPASSSTSTVRLLEWTEAAAPPPGGGLRFRISEYKPLNMAGVEQPPSPELRQEGVTEYEDGGAPAGDGEAGPQQAEDHPQNPPEDPNQDPPEDDSTCQCQACGPHQAAGPDLGSSNDGCPQLFQERSVIVENSSGSTSASELLKPMKKRKRREYQSPSEEESEPEAMEKQEEGKDPEGQPTASTPESEEWSSSQPATGEKKECWSWESYLEEQKAITAPVSLFQDSQAVTHNKNGFKLGMKLEGIDPQHPSMYFILTVAEVCGYRLRLHFDGYSECHDFWVNANSPDIHPAGWFEKTGHKLQPPKGYKEEEFSWSQYLRSTRAQAAPKHLFVSQSHSPPPLGFQVGMKLEAVDRMNPSLVCVASVTDVVDSRFLVHFDNWDDTYDYWCDPSSPYIHPVGWCQKQGKPLTPPQDYPDPDNFCWEKYLEETGASAVPTWAFKVRPPHSFLVNMKLEAVDRRNPALIRVASVEDVEDHRIKIHFDGWSHGYDFWIDADHPDIHPAGWCSKTGHPLQPPLGPREPSSASPGGCPPLSYRSLPHTRTSKYSFHHRKCPTPGCDGSGHVTGKFTAHHCLSGCPLAERNQSRLKAELSDSEASARKKNLSGFSPRKKPRHHGRIGRPPKYRKIPQEDFQTLTPDVVHQSLFMSALSAHPDRSLSVCWEQHCKLLPGVAGISASTVAKWTIDEVFGFVQTLTGCEDQARLFKDEARIVRVTHVSGKTLVWTVAQLGDLVCSDHLQEGKGILETGVHSLLCSLPTHLLAKLSFASDSQY

SEQ ID NO: 86477 - protein, 62 aa, Homo sapiens
  MOD_RES (1)..(1): Any amino acid
XNLVRAFSITQGLLKDRLLCSGHDVSDGGLVTCLLEMAFAGNCGLQVDVPVPRVDAELDGTG

SEQ ID NO: 86478 - protein, 149 aa, Homo sapiens
MSGQTLTDRIAAAQYSVTGSAVARAVCKATTHEVMGPKKKHLDYLIQATNETNVNIPQMADTLFERATNSSWVVVFKALVTTHHLMVHGNERFIQYLASRNTLFNLSNFLDKSGSHGYDMSTFIRRYSRYLNEKAFSYRQMAFDFARVK

SEQ ID NO: 86479 - protein, 171 aa, Homo sapiens
MWPRWKGEGVPLSVFFLCSSSFHLISISGLVCELKEFTHTWGGPLSPRQSGTEERGLKHYWFTSWPDQKTPDRAPPLLHLVREVEEAAQQEGPHCAPIIVHCSAGIGRTGCFIATSICCQQLRQEGVVDILKTTCQLRQDRGGMIQTCEQYQFVHHVMSLYEKQLSHQSPE

SEQ ID NO: 86480 - protein, 677 aa, Homo sapiens
GGLCIAQSVRIPQERKDRTIDFDRIIKQLLDTPNSRAVVIFANDEDIKQILAAAKRADQVGHFLWVGSDSWGSKINPLHQHEDIAEGAITIQPKRATVEGFDAYFTSRTLENNRRNVWFAEYWEENFNCKLTISGSKKEDTDRKCTGQERIGKDSNYEQEGKVQFVIDAVYAMAHALHHMNKDLCADYRGVCPEMEQAGGKKLLKYIRNVNFNGSAGTPVMFNKNGDAPGRYDIFQYQTTNTSNPGYRLIGQWTDELQLNIEDMQWGKGVREIPASVCTLPCKPGQRKKTQKGTPCCWTCEPCDGYQYQFDEMTCQHCPYDQRPNENRTGCQDIPIIKLEWHSPWAVIPVFLAMLGIIATIFVMATFIRYNDTPIVRASGRELSYVLLTGIFLCYIITFLMIAKPDVAVCSFRRVFLGLGMCISYAALLTKTNRIYRIFEQGKKSVTAPRLISPTSQLAITSSLISVQLLGVFIWFGVDPPNIIIDYDEHKTMNPEQARGVLKCDITDLQIICSLGYSILLMVTCTVYAIKTRGVPENFNEAKPIGFTMYTTCIVWLAFIPIFFGTAQSAEKLYIQTTTLTISMNLSASVALGMLYMPKVYIIIFHPELNVQKRKRSFKAVVTAATMSSRLSHKPSDRPNGEAKTELCENVDPNNCIPPVRKSVQKSVTWYTIPPTV

SEQ ID NO: 86481 - protein, 612 aa, Homo sapiens
MSYTGFVQGSETTLQSTYSDTSAQPTCDYGYGTWNSGTNRGYEGYGYGYGYGQDNTTNYGINQRLDMVPHLETDMMQGGVYGSGGERYDSYESCDSRAVLSERDLYRSGYDYSELDPEMEMAYEGQYDAYRDQFRMRGNDTFGPRAQGWARDARSGRPMASGYGRMWEDPMGARGQCMSGASRLPSLFSQNIIPEYGMFQGMRGGGAFPGGSRFGFGFGNGMKQMRRTWKTWTTADFRTKKKKRKQGGSPDEPDSKATRTDCSDNSDSDNDEGTEGEATEGLEGTEAVEKGSRVDGEDEEGKEDGREEGKEDPEKGALTTQDENGQTKRKLQAGKKSQDKQKKRQRDRMVERIQFVCSLCKYRTFYEDEMASHLDSKFHKEHFKYVGTKLPKQTADFLQEYVTNKTKKTEELRKTVEDLDGLIQQIYRDQDLTQEIAMEHFVKKVEAAHCAACDLFIPMQFGIIQKHLKTMDHNRNRRLMMEQSKKSSLMVARSILNNKLISKKLERYLKGENPFTDSPEEEKEQEEAEGGALDEGAQGEAAGISEGAEGVPAQPPVPPEPAPGAVSPPPPPPPEEEEEGAVPLLGGALQRQIRGIPGLDVEDDEEGGGGAP

SEQ ID NO: 86482 - protein, 23 aa, Homo sapiens
MMQLLQLLLGLLGPGGYLFLLGD

SEQ ID NO: 86483 - protein, 101 aa, Homo sapiens
MGAMAKPDCIITCDGKNLTIKTESTLKTTQFSCTLGEKFEETTADGRKTQTVCNFTDGALVQHQEWDGKESTITRKLKDGKLVVECVMNNVTCTRIYEKVE

SEQ ID NO: 86484 - protein, 61 aa, Homo sapiens
YVLKPTFTKQQIANLDKQAKLSRAYDGTTYLPGIVGLNNIKANDYANAVLQEMALTFCLGF

SEQ ID NO: 86485 - protein, 105 aa, Homo sapiens
YPDRPGWLRYIQRTPYSDGVLYGSPTAENVGKPTIIEITAYNRRTFETARHNLIINIMSAEDGVLLSSPRLECNGTISANCNLRLLGSGDSPASASRVGVYRYQL

SEQ ID NO: 86486 - protein, 237 aa, Homo sapiens
  MOD_RES (1)..(1): Any amino acid
XAVASIAGGIRNGSYDIGMACGVESMSLADRGNPGNITSRLMEKEKARDCLIPMGITSENVAERFGISREKQDTFALASQQKAARAQSKGCFQAEIVPVTTTVHDDKGTKRSITVTQDEGIRPSTTMEGLAKLKPAFKKDGSTTAGLTVSDVDIFEINEAFASQAAYCVEKLRLPPEKVNPLGGAVALGHPLGCTGARQVITLLNELKRRGKRAYGVVSMCIGTGMGAAAVFEYPGN

SEQ ID NO: 86487 - protein, 281 aa, Homo sapiens
  MOD_RES (1)..(1): Any amino acid
XFGKSDPFLEFYKPGDDGKWMLVHRTEVIKYTLDPVWKPFTVPLVSLCDGDMEKPIQVMCYDYDNDGGHDFIGEFQTSVSQMCEARDSVPLEFECINPKKQRKKKNYKNSGIIILRSCKINRDYSFLDYILGGCQLMFTPWARLLQSTCCGELPADRGDGHCSTRQPQVGIDFTASNGNPLDPSSLHYINPMGTNEYLSAIWAVGQIIQDYDSDKMFPALGFGAQLPPDWKVSHEFAINFNPTNPFCSGVDGIAQAYSACLPHIRFYGPTNFSPIVNHVAR

SEQ ID NO: 86488 - protein, 222 aa, Homo sapiens
MDTLPDNRTRVVEDNHSYYVSRLYGPSEPHSRELWVDVAEANRSQVKIHTILSNTHRQASRVVLSFDFPFYGHPLRQITIATGGFIFMGDVIHRMLTATQYVAPLMANFNPGYSDNSTVVYFDNGTVFVVQWDHVYLQGWEDKGSFTFQAALHHDGRIVFAYKEIPMSVPEISSSQHPVKTGLSDAFMILNPSPDVPESRRRSIFEYHRIELDPSKVTSMSA

SEQ ID NO: 86489 - protein, 513 aa, Homo sapiens
MAAAAAATAAAAASIRERQTVALKRMLNFNVPHIKNSTGEPVWKVLIYDRFGQDIISPLLSVKELRDMGITLHLLLHSDRDPIPDVPAVYFVMPTEENIDRMCQDLRNQLYESYYLNFISAISRSKLEDIANAALAASAVTQVAKVFDQYLNFITLEDDMFVLCNQNKELVSYRAINRPDITDTEMETVMDTIVDSLFCFFVTLGAVPIIRCSRGTAAEMVAVKLDKKLRENLRDARNSLFTGDTLGAGQFSFQRPLLVLVDRNIDLATPLHHTWTYQALVHDVLARKLDVYFEYEEKIMSKTTLDKSLLDIISDPDAGTPEDKMRLFLIYYISTQQAPSEADLEQYKKALTDAGCNLNPLQYIKQWKAFTKMASAPASYGSTTTKPMGLLSRVMNTGSQFVMEGVKNLVLKQQNLPVTRILDNLMEMKSNPETDDYRYFDPKMLRGNDSSVPRNKNPFQEAIVFVVGGGNYIEYQNLVDYIKGKQGKHILYGCSELFNATQFIKQLSQLGQK

SEQ ID NO: 86490 - protein, 142 aa, Homo sapiens
  MOD_RES (1)..(1): Any amino acid
XATSRSQGFRYPLGSVFTRIHFIQAAALQPLPGFPGPKPALISWMEQESEAWSPAAQDPEKGERLGGARRGDVPNRKEEEPEEVPRAKGPRKAPVKESPEVLVERNPDPAISVAPARAQPPKNAAWDPTTGAQPPAPIPSMD

SEQ ID NO: 86491 - protein, 79 aa, Homo sapiens
MQKSEGSGGTQLKNRATGNYDQRTSSSTQLKHRNAVQGSKSSLSTSSPESARKLHPRPSDKLNPKTINPVHSDDEVFER

SEQ ID NO: 86492 - protein, 635 aa, Homo sapiens
MAMRPRSHPPVGAGTGGGPACVPVAEASTGAWTAEGAAGTRCRASRAPCRPPPVPAPSQLPASSPTKCEICVKNTAILAITLITPQDPHLDPVPRGQPTFTKKKKTIRLFWNEVRPFDWPCKNNRRCREFLWSKLEPIKVDTSRLEHLFESKSKELSVSKKTAADGKRQEIIVLDSKRSNAINIGLTVLPPPRTIKIAILNFDEYALNKEGIEKILTMIPTDEEKQKIQEAQLANPEIPLGSAEQFLLTLSSISELSARLHLWAFKMDYETTEKEVAEPLLDLKEGIDQLENNKTLGFILSTLLAIGNFLNGTNAKAFELSYLEKVPEVKDTVHKQSLLHHVCTMVVENFPDSSDLYSEIGAITRSAKVDFDQLQDNLCQMERRCKASWDHLKAIAKHEMKPVLKQRMSEFLKDCAERIIILKIVHRRIINRFHSFLLFMGHPPYAIREVNINKFCRIISEFALEYRTTRERVLQQKQKRANHRERNKTRGKMITDSGKFSGSSPAPPSQPQGLSYAEDAAEHENMKAVLKTSSPSVEDATPALGVRTRSRASRGSTSSWTMGTDDSPNVTDDAADEIMDRIVKSATQVPSQRVVPRERKRSRANRKSLRRTLKSGLTPEEARALGLVGTSELQL

SEQ ID NO: 86493 - protein, 162 aa, Homo sapiens
  MOD_RES (1)..(1): Any amino acid
XRAIDQASFTTSMEWDTQVVKGSSPLGPAGLGAEEPAAGPQLPSWLQPERCAVFQCAQCHAVLADSVHLAWDLSRSLGAVVFSRVTNNVVLEAPFLVGIEGSLKGSYLLKTKAIVNASEMDIQNVPLSEKIAELKEKIVLTHNRLKSLMKILSEVTPDQSKP

SEQ ID NO: 86494 - protein, 37 aa, Homo sapiens
MADEALAGLDEGALRKLLEVTADLAERRRIRSAIREL

SEQ ID NO: 86495 - protein, 91 aa, Homo sapiens
MAEPGHSHHLSARVRGRTERRIPRLWRLLLWAGTAFQVTQGTGPELHACKESEYHYEYTACDSTGSRWRVAVPHTPGLCTSLPDPIKGTEC

SEQ ID NO: 86496 - protein, 226 aa, Homo sapiens
MGLLLLVPLLLLPGSYGLPFYNGFYYSNSANDQNLGNGHGKDLLNGVKLVVETPEETLFTYQGASVILPCRYRYEPALVSPRRVRVKWWKLSENGAPEKDVLVAIGLRHRSFGDYQGRVHLRQDKEHDVSLEIQDLRLEDYGRYRCEVIDGLEDESGLVELELRAESQERGGNGQEVWSFLTSPPTGATSSTSTRASRSVQSRLRWWPPLSSSSGPGRRAWTGATR

SEQ ID NO: 86497 - protein, 186 aa, Homo sapiens
MAVFVVLLALVAGVLGNEFSILKSPGSVVFRNGNWPIPGERIPDVAALSMGFSVKEDLSWPGLAVGNLFHRPRATVMVMVKGVNKLALPPGSVISYPLENAVPFSLDSVANSIHSLFSEETPVVLQLAPSEERVYMVGKANSVFEDLSVTLRQLRNRLFQENSVLSSLPLNSLSRNNENALFFWAL

SEQ ID NO: 86498 - protein, 58 aa, Homo sapiens
MAEGSAVSDPQHAARLLRALSSFREESRFCDAHLVLDGEEIPVQKNILAAASPYIRSG

SEQ ID NO: 86499 - protein, 239 aa, Homo sapiens
MAFANLRKVLISDSLDPCCRKILQDGGLQVVEKQNLSKEELIAELQDCEGLIVRSATKVTADVINAAEKLQVVGRAGTGVDNVDLEAATRKGILVMKQIPQATASMKDGKWERKKFMGTELNGKTLGILGLGRIGREVATRMQSFGMKTIGYDPIISPEVSASFGVQQLPLEEIWPLCDFITVHTPLLPSTTGLLNDNTFAQCKKGVRVVNCARGGIVDEGALLRALQSGQCAGAALDV

SEQ ID NO: 86500 - protein, 1176 aa, Homo sapiens
MASQLQVFSPPSVSSSAFCSAKKLKIEPSGWDVSGQSSNDKYYTHSKTLPATQGQANSSHQVANFNIPAYDQGLLLPAPAVEHIVVTAADSSGSAATSTFQSSQTLTHRSNVSLLEPYQKCGLKRKSEEVDSNGSVQIIEEHPPLMLQNRTVVGAAATTTTVTTKSSSSSGEGDYQLVQHEILCSMTNSYEVLEFLGRGTFGQVAKCWKRSTKEIVAIKILKNHPSYARQGQIEVSILSRLSSENADEYNFVRSYECFQHKNHTCLVFEMLEQNLYDFLKQNKFSPLPLKYIRPILQQVATALMKLKSLGLIHADLKPENIMLVDPVRQPYRVKVIDFGSASHVSKAVCSTYLQSRYYRAPEIILGLPFCEAIDMWSLGCVIAELFLGWPLYPGASEYDQIRYISQTQGLPAEYLLSAGTKTTRFFNRDPNLGYPLWRLKTPEEHELETGIKSKEARKYIFNCLDDMAQVNMSTDLEGTDMLAEKADRREYIDLLKKMLTIDADKRITPLKTLNHQFVTMTHLLDFPHSNHVKSCFQNMEICKRRVHMYDTASVLASSSTAAAATLSLANSDVSLLNYQSALYPSSAAPVPGVAQQGVSLQPGTTQICTQTDPFQQTFIVCPPAFQTGLQATTKHSGFPVRMDNAVPIVPQAPAAQPLQIQSGVLTQGSCTPLMVATLHPQVATITPQYAVPFTLSCAAGRPALVEQTAAVLQAWPGGTQQILLPSTWQQLPGVALHNSVQPTAMIPEAMGSGQQLADWRNAHSHGNQYSTIMQQPSLLTNHVTLATAQPLNVGVAHVVRQQQSSSLPSKKNKQSAPVSSKSSLDVLPSQVYSLVGSSPLRTTSSYNSLVPVQDQHQPIIIPDTPSPPVSVITIRSDTDEEEDNKYKPSSSGLKPRSNVISYVTVNDSPDSDSSLSSPYSTDTLSALRGNSGSVLEGPGRVVADGTGTRTIIVPPLKTQLGDCTVATQASGLLSNKTKPVASVSGQSSGCCITPTGYRAQRGGTSAAQPLNLSQNQQSSAAPTSQERSSNPAPRRQQAFVAPLSQAPYTFQHGSPLHSTGHPHLAPAPAHLPSQAHLYTYAAPTSAAALGSTSSIAHLFSPQGSSRHAAAYTTHPSTLVHQVPVSVGPSLLTSASVAPAQYQHQFATQSYIGSSRGSTIYTGYPLSPTKISQYSYL

SEQ ID NO: 86501 - protein, 29 aa, Homo sapiens
NTVRSFHHEGQSLPPVCVGEGWWDWLEGQ

SEQ ID NO: 86502 - protein, 420 aa, Homo sapiens
MAAAEHRHSSGLPYWPYLTAETLKNRMGHQPPPPTQQHSITDNSLSLKTPPECVLTPLPPSADDNLKTPPECVLTPLPPSADDNLKTPPECLLTPLPPSADDNLKTPPECLLTPLPPSADDNLKTPPECLLTPLPPSAPPSAPPSADDNLKTRAECLLHPLPPSADDNLKTPSERQLTPLPPSAPPSADDNIKTPAERLRGPLPPSADDNLKTPSERQLTPLPPSAPPSADDNIKTPAERLRGPLPPSADDNLKTPSERQLTPLPPSAPPSADDNIKTPAERLRGPLPPSADDNLKTPPLATQEAEAEKPRKPKRQRAAEMEPPPEPKRRRVGDVEPSRKPKRRRAADVEPSSPKPKRRRVGDVEPSRKPKRRRAADVEPSSPEPKRRRVGDVEPSRKPKRRRAADVEPSSPEPKRRRLS

SEQ ID NO: 86503 - protein, 31 aa, Homo sapiens
METPLDVLSRAASLVHADDEKRSCCVAQAGF

SEQ ID NO: 86504 - protein, 156 aa, Homo sapiens
MERKNPSRESPRRLSAKVGKGTEMKKVARQLGMAAAESDKDSGFSDGSSECLSSAEQMESEDMLSALGWSREDRPRQNSKTAKNAFPTLSPMVVMKNVLVKQGSSSSQLQSWTVQPSFEVISAQPQLLFLHPPVPSPVSPCHTGEKKSDSRNYLPI

SEQ ID NO: 86505 - protein, 199 aa, Homo sapiens
MVSGRFYLSCLLLGSLGSMCILFTIYWMQYWRGGFAWNGSIYMFNWHPVLMVAGMVVFYGGASLVYRLPQSWVGPKLPWKLLHAALHLMAFVLTVVGLVAVFTFHNHGRTANLYSLHSWLGITTVFLFACQWFLGFAVFLLPWASMWLRSLLKPIHVFFGAAILSLSIASVISGINEKLFFSLKNTTRPYHSLPSEAVF

SEQ ID NO: 86506 - protein, 87 aa, Homo sapiens
  MOD_RES (1)..(1): Any amino acid
XKEIRQQILDEKPKVELEQEYQDKFKRLPLEILEFVQEAMKGKISEDSNHGSAPLSLSSDPGKVNHKTPSSEELGGDIPGKEFDTPL

SEQ ID NO: 86507 - protein, 538 aa, Homo sapiens
MGCLWGLALPLFFFCWEVGVSGSSAGPSTRRADTAMTTDDTEVPAMTLAPGHAALETQTLSAETSSRASTPAGPIPEAETRGAKRISPARETRSFTKTSPNFMVLIATSVETSAASGSPEGAGMTTVQTITGSDPREAIFDTLCTDDSSEEAKTLTMDILTLAHTSTEAKGLSSESSASSDSPHPVITPSRASESSASSDGPHPVITPSRASESSASSDGPHPVITPSWSPGSDVTLLAEALVTVTNIEVINCSITEIETTTSSIPGASDTDLIPTEGVKASSTSDPPALPDSTEAKPHITEVTASAETLSTAGTTESAAPDATVGTPLPTNSATEREVTAPGATTLSGALVTVSRNPLEETSALSVETPSYVKVSGAAPVSIEAGSAVGKTTSFAGSSASSYSPSEAALKNFTPSETPTMDIATKGPFPTSRDPLPSVPPTTTNSSRGTNSTLAKITTSAKTTMKPPTATPTTARTRPTTDVSAGENGGFLLLRLSVASPEDLTDPRVAERLMQQLHRELHAHAPHFQVSLLRVRRG

SEQ ID NO: 86508 - protein, 34 aa, Homo sapiens
MAAAAAEQQQFYLLLGNLLSPDNVVRKQAEETYE

SEQ ID NO: 86509 - protein, 268 aa, Homo sapiens
MKRRNLFALETGVPPWGLLWVRSRRVGMDEMTFHIWYPQVRAPGQQPQAQLAMALCLKQVFAKDKTFRPRKRFEPGTQRFELYKKAQASLKSGLDLRSVVRLPPGENIDDWIAVHVVDFFNRINLIYGTMAERCSETSCPVMAGGPRYEYRWQDERQYRRPAKLSAPRYMALLMDWIEGLINDEEVFPTRVGVPFPKNFQQVCTKILTRLFRVFVHVYIHHFDSILSMGAEAHVNTCYKHFYYFIREFSLVDQRELEPLREMTERICH

SEQ ID NO: 86510 - protein, 49 aa, Homo sapiens
  MOD_RES (1)..(1): Any amino acid
XLDKFMGEMQYGLFHGEGVRQCGLGARPFRFSYKGNVVQLNISSQMTWP

SEQ ID NO: 86511 - protein, 104 aa, Homo sapiens
MLSNLYMTLYDEVTHGYLHSKELSGNHMVDIGDIIFTLNELQEQYEDVSITEGSPLNEITSDRKLSSVAGCYLKYKKKNSLSSKLPEPSISKKLNKKSNQYYSK

SEQ ID NO: 86512 - protein, 153 aa, Homo sapiens
KVDSPDVKRCLNALEELGTLQVTSQILQKNTDVVATLKKIRRYKANKDVMEKAAEVYTRLKSRVLGPKIEAVQKVNKAGMEKEKAEEKLAGEELAGEEAPQEKAEDKPSTDLSAPVNGEATSQKGESAEDKEHEEGRDSEEGPRCGSSEDLHE

SEQ ID NO: 86513 - protein, 136 aa, Homo sapiens
MLSNRPIFPGKHYLDQLNHILGILGSPSQEDLNCIINMKARNYLQSLPSKTKVAWAKLFPKSDSKALDLLDRMLTFNPNKRITVEEALAHPYLEQYYDPTDEPVAEEPFTFAMELDDLPKERLKELIFQETARFQP

SEQ ID NO: 86514 - protein, 692 aa, Homo sapiens
MMFRDQVGILAGWFKGWNECEQTVALLSLLKRVTRTQARFLQLCLEHSLADCNDIHLLESEANSAAIVSQWQQESKEKVVSLLLSHLPLLQPGNTEAKSEYMRLLQKVLAYSIESNAFIEESRQLLSYALIHPATTLEDRNALALWLSHLEERLASGFRSRPEPSYHSRQGSDEWGGPAELGPGEAGPGWQDKPPRENGHVPFHPSSSVPPAINSIGSNANTGLPCQIHPSPLKRSMSLIPTSPQVPGEWPSPEELGARAAFTTPDHAPLSPQSSVASSGSEQTEEQGSSRNTFQEDGSGMKDVPSWLKSLRLHKYAALFSQMSYEEMMTLTEQHLESQNVTKGARHKIALSIQKLRERQSVLKSLEKDVLEGGNLRNALQELQQIIITPIKAYSVLQATVAAATTTPTAKDGAPGEPPLPGAEPPLAHPGTDKGTEAKDPPAVENYPPPPAPAPTDGSEPAPAPVADGDIPSQFTRVMGKVCTQLLVSRPDEENITSYLQLIEKCLTHEAFTETQKKRLLSWKQQVLKLLRTFPRKAALEMQNYRQQKGWAFGSNSLPIAGSVGMGVARRTQRQFPMPPRALPPGRMGLLSPSGIGGVSPRHALTSPSLGGQGRQNLWFANPGGSNSMPSQSRSSVQRTHSLPVHSSPQAILMFPPDCPVPGPDLEINPTLESLCLSMTEHALGGPSRDLC

SEQ ID NO: 86515 - protein, 379 aa, Homo sapiens
MFPPSGSTGLIPPSHFQARPLSTLPRMAPTWLSDIPLVQPPGHQDVSERRLDTQRPQVTMWERDVSSDRQEPGRRGRSWGLEGSQALSQQAEVIVRQLQELRRLEEEVRLLRETSLQQKMRLEAQAMELEALARAEKAGRAEAEGLRAALAGAEVVRKNLEEGSQRELEEVQRLHQEQLSSLTQAHEEALSSLTSKAEGLEKSLSSLETRRAGEAKELAEAQREAELLRKQLSKTQEDLEAQVTLVENLRKYVGEQVPSEVHSQTWELERQKLLETMQHLQEDRDSLHATAELLQVRVQSLTHILALQEEELTRKVQPSDSLEPEFTRKCQSLLNRWREKVFALMVQLKAQELEHSDSVKQLKGQRQAFTMLVRLILNP

SEQ ID NO: 86516 - protein, 366 aa, Homo sapiens
MADDDVLFEDVYELCEVIGKGPFSVVRRCINRETGQQFAVKIVDVAKFTSSPGLSTEDLKREASICHMLKHPHIVELLETYSSDGMLYMVFEFMDGADLCFEIVKRADAGFVYSEAVASHYMRQILEALRYCHDNNIIHRDVKPHCVLLASKENSAPVKLGGFGVAIQLGESGLVAGGRVGTPHFMAPEVVKREPYGKPVDVWGCGVILFILLSGCLPFYGTKERLFEGIIKGKYKMNPRQWSHISESAKDLVRRMLMLDPAERITVYEALNHPWLKERDRYAYKIHLPETVEQLRKFNARRKLKVSFSLLLLSLSSTSPKKKKKKKKKKRKLGAVLAAVSSHKFNSFYGDPPEELPDFSEDPTSS

SEQ ID NO: 86517 - protein, 110 aa, Homo sapiens
MNVMLENYKNLVFLGIAVSKQDPITSLEQEKEPWNMKICEMVDESPGQVWCLTPVIPALWEARAGGLLEPRSLRPAWSTWKIPVSTKKKKKSQLGMGMVVHACNPSYSRG

SEQ ID NO: 86518 - protein, 88 aa, Homo sapiens
MGGQVSASNSFSRLHCRNANEDWMSALCPRLWDVPLHHLSIPGSHDTMTYCLNKKSPISHEESRLLQLLNKALPCITRPVVLKWSVTQ

SEQ ID NO: 86519 - protein, 59 aa, Homo sapiens
MVFAHRMDNSKPHLIIPTLLVPLQNRSCTETATPLPSQYLMELSEEHSWMSNQTDLHYV

SEQ ID NO: 86520 - protein, 63 aa, Homo sapiens
  MOD_RES (1)..(1): Any amino acid
XQSYQRMPGNAMVRGFRVAYKRHVLTMDDLGTLYGQNWLNDQLPPIFSPGDEHVWRPGHGHSP

SEQ ID NO: 86521 - protein, 84 aa, Homo sapiens
  MOD_RES (1)..(1): Any amino acid
XVNDFELARADFQKVLQLYPNNKAAKTQLAVCQQRIRRQLAREKKLYANMFERLAEEENKAPWLTPAIPALCRAKVGGSLEPSR

SEQ ID NO: 86522 - protein, 91 aa, Homo sapiens
MTQDRPLLAVQEALKKCFPVVEEQQGLWQSALRDCQPLLSSLSNLAEQLQAAQNLRFEDVPALRAFPDLKERLRRKQLVAGDIVLDKLGER

SEQ ID NO: 86523 - protein, 69 aa, Homo sapiens
  MOD_RES (1)..(1): Any amino acid
XCFTEQEWENLEDWQKELYRNVMESNYETLVSLKSCSIAQAGVQWHNLGSLQPLPHRFKRFSCLSLSSS

SEQ ID NO: 86524 - protein, 93 aa, Homo sapiens
MADQDPAGISPLQQMVASGTGAVVTSLFMTPLDVVKVRLQSQRPSMASELMPSSRLWSLSYTKWKCLLYCNGVLEPLYLCPNGARCATWFQDP

SEQ ID NO: 86525 - protein, 124 aa, Homo sapiens
  MOD_RES (1)..(1): Any amino acid
XALKRLDLRDPAALFETHGAEEIRGLERQVRAEIEHKKEELRQMVGERYRDLIEAADTIGQMRRCAVGLVDAVKATDQYCARLRQAGSAAPRPPRAQQFCAFPCSHSSHPRRSSTAWLPRSSYS

SEQ ID NO: 86526 - protein, 40 aa, Homo sapiens
MVSWIISRLVVLIFGTLYPAYSSYKAVKTKNVKEYVPLLL

SEQ ID NO: 86527 - protein, 108 aa, Homo sapiens
MLLLGLLLLLPLLAGARLLWNWWKLRSLHLPPLAPGFLHLLQPDLPIYLLGLTQKFGPIYRLHLGLQDVVVLNSKRTIEEAMVKKWADFAGRPEPLTSPTSSCRQAGV

SEQ ID NO: 86528 - protein, 31 aa, Homo sapiens
MTQESFDTSGAGAGRGADPRVPPSSPATQVC

SEQ ID NO: 86529 - protein, 126 aa, Homo sapiens
MAVAGAVSGEPLVHWCTQQLRKTFGLDVSEEIIQYVLSIESAEEIREYVTDLLQGNEGKKGQFIEELITKWQKNDQELISDPLQQCFKKDGTREQQLRKEEDKVCQFIHKRGTGQACSPAPWSSPL

SEQ ID NO: 86530 - protein, 170 aa, Homo sapiens
MGEFNEKKTTCGTVCLKYLLFTYNCCFWLAGLAVMAVGIWTLALKSDYISLLASGTYLATAYILVVAGTVVMVTGVLGCCATFKERRNLLRLYFILLLIIFLLEIIAGILAYAYYQQLNTELKENLKDTMTKRYHQPGHEAVTSAVDQLQQEFHCCGSNNSQDWRDSEWI

SEQ ID NO: 86531 - protein, 547 aa, Homo sapiens
MGSCSSQSVQKTRRGRKVVLQNILETENEYSKELQTVLSTYLRPLQTSEKLSSANISYLMGNLEEICSFQQMLVQSLEECTKLPEAQQRVGGCFLNLMPQMKTLYLTYCANHPSAVNVLTEHSEELGEFMETKGASSPGILVLTTGLSKPFMRLDKYPTLLKELERHMEDYHTDRQDIQKSMAAFKNLSAQCQEVRKRKELELQILTEAIRNWEGDDIKTLGNVTYMSQVLIQCAGSEEKNERYLLLFPNVLLMLSASPRMSGFIYQGKLPTTGMTITKLEDSENHRNAFEISGSMIERILVSCNNQQDLQEWVEHLQKQTKVTSVGNPTIKPHSVPSHTLPSHPVTPSSKHADSKPAPLTPAYHTLPHPSHHGTPHTTINWGPLEPPKTPKPWSLSCLRPAPPLRPSAALCYKEDLSKSPKTMKKLLPKRKPERKPSDEEFASRKSTAALEEDAQILKVIEAYCTSAKTRQTLNSTWQGTDLMHNHVLADDDQPSLDSLGRRSSLSRLEPSDLSEDSDYDSIWTAHSYRMGSTSRKSCCSYISHQN

SEQ ID NO: 86532 - protein, 66 aa, Homo sapiens
  MOD_RES (1)..(1): Any amino acid
XTSQQPPRQKNTACPALQTRSTRPRFRLLAINPTREMELHLLFLKMTPPTTKPVMTDSKCLHVYFS

SEQ ID NO: 86533 - protein, 594 aa, Homo sapiens
MESHSRAGKSRKSAKFRSISRSLMLCNAKTSDDGSSPDEKYPDPFEISLAQGKEGIFHSSVQLADTSEAGPSSVPDLALASEAAQLQAAGNDRGKTCRRIFFMKESSTASSREKPGKLEAQSSNFLFPKACHQRARSNSTSVNPYCTREIDFPMTKKSAAPTDRQPYSLCSNRKSLSQQLDCPAGKAAGTSRPTRSLSTAQLVQPSGGLQASVISNIVLMKGQAKGLGFSIVGGKDSIYGPIGIYVKTIFAGGAAAADGRLQEGDEILELNGESMAGLTHQDALQKFKQAKKGLLTLTVRTRLTAPPSLCSHLSPPLCRSLSSSTCITKDSSSFALESPSAPISTAKPNYRIMVEVSLQKEAGVGLGIGLCSVPYFQCISGIFVHTLSPGSVAHLDGRLRCGDEIVEISDSPVHCLTLNEVYTILSHCDPGPVPIIVSRHPDPQVSEQQLKEAVAQAVENTKFGKERHQWSLEGVKRLESSWHGRPTLEKEREKNSAPPHRRAQKVMIRSSSDSSYMSGSPGGSPGSGSAEKPSSDVDISTHSPSLPLAREPVVLSIASSRLPQESPPLPESRDSHPPLRLKKSFEILVRKPMS

SEQ ID NO: 86534 - protein, 57 aa, Homo sapiens
TDFAGLRNLGSGQRALVLPAAWLSVTCLPSRARRLRGAGAGGHRGLTACFVGDSNWH

SEQ ID NO: 86535 - protein, 534 aa, Homo sapiens
QVNGQQGGGSEPAAAAAVVAAGDKWKPPQGTDSIKMENGQSTAAKLGLPPLTPEQQEALQKAKKYAMEQSIKSVLVKQTIAHQQQQLTNLQMAAQRQRALAIMCRVYVGSIYYELGEDTIRQAFAPFGPIKSIDMSWDSVTMKHKGFAFVEYEVPEAAQLALEQMNSVMLGGRNIKVGRPSNIGQAQPIIDQLAEEARAFNRIYVASVHQDLSDDDIKSVFEAFGKIKSCTLARDPTTGKHKGYGFIEYEKAQSSQDAVSSMNLFDLGGQYLRVGKAVTPPMPLLTPATPGGLPPAAAVAAAAATAKITAQEAVAGAAVLGTLGTPGLVSPALTLAQPLGTLPQAVMAAQAPGVITGVTPARPPIPVTIPSVGVVNPILASPPTLGLLEPKKEKEEEELFPESERPEMLSEQEHMSISGSSARHMVMQKLLRKQESTVMVLRNMVDPKDIDDDLEGEVTEECGKFGAVNRVIIYQEKQGEEEDAEIIVKIFVEFSIASETHKAIQALNGRWFAGRKVVAEVYDQERFDNSDLSA

SEQ ID NO: 86536 - protein, 152 aa, Homo sapiens [sequence omitted]

SEQ ID NO: 86537 - protein, 35 aa, Homo sapiens
MKVTTKINHHDKINGKRKTAKKQKLSVKECEHAEK

SEQ ID NO: 86538 - protein, 280 aa, Homo sapiens
MGLSEYQRNFLWKKSYLSESCNSSVGRKYPWAGLRSDQLGITKEPSFISKRRVPYHDPQISKSLEWNGAISESNVVASPEPEAPETPKSQEAEQKDVTQERVHSLEASRVPKRTRSHSADSRAEGASDVENNEGVTNHTPVNENVELEHSTKVLSENVDNGLDRLLRKKAGLTVVPSYNALRNSEYQRQFVWKTSKETAPAFAANQVFHNKSQFVPPFKGNSVIHETEYKRNFKGLSPVKEPKLRNDLRENRNLETVSPERKSNKIDDRLKLEAEMELKD

SEQ ID NO: 86539 - protein, 48 aa, Homo sapiens
  MOD_RES (1)..(1): Any amino acid
XTLNFGPFETVHRWRRLPPCDEFVGARRSKHTVVAYKDAIYVFGGDNG

SEQ ID NO: 86540 - protein, 228 aa, Homo sapiens
  MOD_RES (1)..(1): Any amino acid
XSSSIENLKAKFCSTVANDVMLKTGIGVIRMWADEEKKKAGVFEQITKTHGTIIGITSGIVLVLLIISILVQVKQPRKKVMACKTAFNKTGFQEVFDPPHYELFSLRDKEISADLADLSEELDNYQKMRRSSTASRCIHDHHCGSQASSVKQSRTNLSSMELPFRNDFAQPQPMKTFNSTFKKSSYTFKQGHECPEQALEDRVMEEIPCEIYVRGREDSAQASISIDF

SEQ ID NO: 86541 - protein, 87 aa, Homo sapiens
MDLCKNRLVSGGRDCQVKVWDVDTGKCLKTFRHKDPILATRINDTYIVSSCERGLVKVWHIAMAQLVKEALMAWSWPGAWWGSTSAA

SEQ ID NO: 86542 - protein, 134 aa, Homo sapiens
MAPVKISHVVSFSSQDPKYPVENLLNPDSPRRPWLGCPQDKSGQLKVELQLERAVPTGYIDVGNCGCAFLQIDVGHSSWPLDRPFITLLPATTLMSLTDSKQGKNRSGVRMFKDGVVAHACNPSTLGDWDKWII

SEQ ID NO: 86543 - protein, 116 aa, Homo sapiens
MEEPTAVEGQVQLPSPHQGSLRKAVAAALALDGESTMGHRKKKRKESRPESIIIYRSDNEKTDEEPGESEGGDQPKEEEGDDFLDYPVDDDMWNLPLDSRYVTLTGTITRGKKKGQ

SEQ ID NO: 86544 - protein, 126 aa, Homo sapiens
MAAGWLTTWSQNSVTFQEVAVDFSQEEWALLDPAQKNLYKDVMLENFRNLASVGYQLCRHSLISKVDQEQLKTDERGILQGDCADWETQLKPKDTIAMQNIPGGKTSNGINTKIYTPRGGQRKDTK

SEQ ID NO: 86545 - protein, 439 aa, Homo sapiens
LKMADKTPGGSQKASSKTRSSDVHSSGSSDAHMDASGPSDSDMPSRTRPKSPRKHNYRNESARESLCDSPHQNLSRPLLENKLKAFSIGKMSTAKRTLSKKEQEELKKKEDEKAAAEIYEEFLAAFEGSDGNKVKTFVRGGVVNAAKEEHETDEKRGKIYKPSSRFADQKNPPNQSSNERPPSLLVIETKKPPLKKGEKEKKKSNLELFKEELKQIQEERDERHKTKGRLSRFEPPQSDSDGQRRSMDAPSRRNRSSGVLDDYAPGSHDVGDPSTTNLYLGNINPQMNEEMLCQEFGRFGPLASVKIMWPRTDEERARERNCGFVAFMNRRDAERALKNLNGKMIMSFEMKLGWGKAVPIPPHPIYIPPSMMEHTLPPPPSGLPFNAQPRERLKNPNAPMLPPPKNKEDFEKTLSQAIVKVVIPTERRNSYYCHEHWTY

SEQ ID NO: 86546 - protein, 193 aa, Homo sapiens
MSLNPPIFLKRSEENSSKFVETKQSQTTSIASEDPLQNLCLASQEVLQKAQQSGRSKCLKCGGSRMFYCYTCYVPVENVPIEQIPLVKLPLKIDIIKHPNETDGKSTAIHAKLLAPEFVNIYTYPCIPEYEEKDHERQVSLCCPDWSRTPRAQVILSPWPPKVPGLQVALIFPGPQSISIKDISFHLQKRIQN

SEQ ID NO: 86547 - protein, 87 aa, Homo sapiens
MMTKMLHVAHWNSAKYSSLAEAASKADGLAVIGVLMKVGEANPKLQKVLDALQAIKTKGKRAPFTNFDPSTLLPSSLDFWTYPGSLT

SEQ ID NO: 86548 - protein, 2099 aa, Homo sapiens [sequence omitted]

SEQ ID NO: 86549 - protein, 292 aa, Homo sapiens
MTQQPLRGVTSLRFNQDQSCFCCAMETGVRIYNVEPLMEKGHLGLCDLCPSLEKQLLVFPGHKCGSLQLVDLASTKPGTSSAPFTINAHQSDIACVSLNQPGTVVASASQKGTLIRLFDTQSKEKLVELRRGTDPATLYCINFSHDSSFLCASSDKGTVHIFALKDTRLNRRSAYVRPLHTLLSALVVAVALGVLVWAAETRAAVRRCRRSHPAACLAAVLAVGLLVLWVAGGACTFLFSIAGPVLLILVHASLRLRNLKNKIENKIESIGLKRTPMGLLLEALGQEQEAGS

SEQ ID NO: 86550 - protein, 61 aa, Homo sapiens
SPRPGRTALLMASSLLGLPGVAPSSPCWSWPQECLCPGMCFTEDGSARARARPPEAPPALP

SEQ ID NO: 86551 - protein, 284 aa, Homo sapiens
  MOD_RES (1)..(1): Any amino acid
XFYRCTDEAKSNPEECRGLFILYKDGDVDSPVVRERIWQNSDFNFDNVLSAMMALFTVSTFEGWPALLYKAIDSNGENIGPIYNHRVEISIFFIIYIIIVAFFMMNIFVGFVIVTFQEQGEKEYKNCELDKNQRQCVEYALKARPLRRYIPKNPYQYKFWYVVNSSPFEYMMFVLIMLNTLCLAMQHYEQSKMFNDAMDILNMVFTGVFTVEMVLKVIAFKPKNSEESNRISITFFRLFRVMRLVKLLSRGEGIRTLLWTFIKSFQALPYVALLIAMLFFIYAV

SEQ ID NO: 86552 - protein, 32 aa, Homo sapiens
METDLNSQDRKDLDKFIKFFALKTVQVIVQAR

SEQ ID NO: 86553 - protein, 713 aa, Homo sapiens
MDPRIAWFQPEQLGPSNSLWMQIWETTQGLRNLYFNHHCHSSGGASGGGGSSSSSSTATGGSGSSTGSPGGAASAPAPAPAGMYRSGERLLGSHALPAEQRDFLPLETTNNNNNHHQPGAWARRAGSSASSPPSASSSPHPSAAVPAADPADSASGSSNKRKRDNKASTYGLNYSLLQPSGGRAAGGGRADGGGVVYSGTPWKRRNYNQGVVGLHEEISDFYEYMSPRPEEEKMRMEVVNRIESVIKELWPSADVQIFGSFKTGLYLPTSDIDLVVFGKWENLPLWTLEEALRKHKVADEDSVKVLDKATVPIIKLTDSFTEVKVDISFNVQNGVRAADLIKDFTKKYPVLPYLVLVLKQFLLQRDLNEVFTGGIGSYSLFLMAVSFLQLHPREDACIPNTNYGVLLIEFFELYGRHFNYLKTGIRIKDGGSYVAKDEVQKNMLDGYRPSMLYIEDPLQPGNDVGRSSYGAMQVKQAFDYAYVVLSHAVSPIAKYYPNNETESILGRIIRVTDEVATYRDWISKQWGLKNRPEPSCNGNGVTLIVDTQQLDKCNNNLSEENEALGKCRSKTSESLSKHSSNSSSGPVSSSSATQSSSSDVDSDATPCKTPKQLLCRPSTGNRVGSQDVSLESSQAVGKMQSTQTTNTSNSTNKSQHGSARLFRSSSKGFQGTTQTSHGSLMTNKQHQGKSNNQYYHGKKRKHKRDAPLSDLCR

SEQ ID NO: 86554 - protein, 1614 aa, Homo sapiens
MDSKKRSSTEAEGSKERGLVHIWQAGSFPITPERLPGWGGKTVLQAALGVKHGVLLTEDGEVYSFGTLPWRSGPVEICPSSPILENALVGQYVITVATGSFHSGAVTDNGVAYMWGENSAGQCAVANQQYVPEPNPVSIADSEASPLLAVRILQLACGEEHTLALSISREIWAWGTGCQLGLITTAFPVTKPQKVEHLAGRVVLQVACGAFHSLALVQCLPSQDLKPVPERCNQCSQLLITMTDKEDHVIISDSHCCPLGVTLTESQAENHASTALSPSTETLDRQEEVFENTLVANDQSVATELNAVSAQITSSDAMSSQQNVMGTTEISSARNIPSYPDTQAVNEYLRKLSDHSVREDSEHGEKPVPSQPLLEEAIPNLHSPPTTSTSALNSLVVSCASAVGVRVAATYEAGALSLKKVMNFYSTTPCETGAQAGSSAIGPEGLKDSREEQVKQESMQGKKSSSLVDIREEETEGGSRRLSLPGLLSQVSPRLLRKAARVKTRTVVLTPTYSGEADALLPSLRTEVWTWGKGKEGQLGHGDVLPRLQPLCVKCLDGKEVIHLEAGGYHSLALTAKSQVYSWGSNTFGQLGHSDFPTTVPRLAKISSENGVWSIAAGRDYSLFLVDTEDFQPGLYYSGRQDPTEGDNLPENHSGSKTPVLLSCSKLGYISRVTAGKDSYLALVDKNIMGYIASLHELATTERRFYSKLSDIKSQILRPLLSLENLGTTTTVQLLQEVASRFSKLCYLIGQHGASLSSFLHGVKEARSLVILKHSSLFLDSYTEYCTSITNFLVMGGFQLLAKPAIDFLNKNQELLQDLSEVNDENTQLMEILNTLFFLPIRRLHNYAKVLLKLATCFEVASPEYQKLQDSSSCYECLALHLGRKRKEAEYTLGFWKTFPGKMTDSLRKPERRLLCESSNRALSLQHAGRFSVNWFILFNDALVHAQFSTHHVFPLATLWAEPLSEEAGGVNGLKITTPEEQFTLISSTPQEKTKWLRAISQAVDQALRGMSDLPPYGSGSSVQRQEPPISRSAKYTFYKDPRLKDATYDGRWLSGKPHGRGVLKWPDGKMYSGMFRNGLEDGYGEYRIPNKAMNKEDHYVGHWKEGKMCGQGVYSYASGEVFEGCFQDNMRHGHGLLRSGKLTSSSPSMFIGQWVMDKKAGYGVFDDITRGEKYMGMWQDDVCQGNGVVVTQFGLYYEGNFHLNKMMGNGVLLSEDDTIYEGEFSDDWTLSGKGTLTMPNGDYIEGYFSGEWGSGIKITGTYFKPSLYESDKDRPKVFRKLGNLAVPADEKWKAVFDECWRQLGCEGPGQGEVWKAWDNIAVALTTSRRQHRDSPEILSRSQTQTLESLEFIPQHVGAFSVEKYDDIRKYLIKACDTPLHPLGRLVETLVAVYRMTYVGVGANRRLLQEAVKEIKSYLKRIFQLVRFLFPELPEEGSTIPLSAPLPTERKSFCTGKSDSRSESPEPGYVVTSSGLLLPVLLPRLYPPLFMLYALDNDREEDIYWECVLRLNKQPDIALLGFLGVQRKFWPATLSILGESKKVLPTTKDACFASAVECLQQISTTFTPSDKLKVIQQTFEEISQSVLASLHEDFLWSMDDLFPVFLYVVLRARE

SEQ ID NO: 86555 - protein, 553 aa, Homo sapiens
MLSAVTDLGSIESTVSKNLPVVSIHQLGLCLSRASASVLNLNCSLILLPMCRTLLAYLRGSQKVPSRRTRRLLDKSRTFHITCGVTICIFSGVHVAAHLVNALNFSVNYSEDFVELNAARYRDEDPRKLLFTTVPGLTGVCMVVVLFLMITASTYAIRVSNYDIFWYTHNLFFVFYMLLTLHVSGGLLKYQTNLDTHPPGCISLNRTSSQNISLPEYFSEHFHEPFPEGFSKPAEFTQHKFVKICMEEPRFQANFPQTWLWISGPLCLYCAERLYRYIRSNKPVTIISVMSHPSDVMEIRMVKENFKARPGQYITLHCPSVSALENHPFTLTMCPTETKATFGVHLKIVGDWTERFRDLLLPPSSQDSEILPFIQSRNYPKLYIDGPFGSPFEESLNYEVSLCVAGGIGVTPFASILNTLLDDWKPYKLRRLYFIWVCRDIQSFRWFADLLCMLHNKFWQENRPDYVNIQLYLSQTDGIQKIIGEKYHALNSRLFIGRPRWKLLFDEIAKYNRGKTVGVFCCGPNSLSKTLHKLSNQNNSYGTRFEYNKESFS

SEQ ID NO: 86556 - protein, 120 aa, Homo sapiens
MASSSSLVPDRLRLPLCFLGVFVCYFYYGILQEKITRGKYGEGAKQETFTFALTLVFIQCVINAVFAKIWWIVPGAGSMLPVLSPIWVPWSPAIQHYSLSTTQLRSLVNPASQSQSCSLG

SEQ ID NO: 86557 - protein, 145 aa, Homo sapiens
MAQLFLPLLAALVLAQAPAALADVLEGDSSEDRAFRVRIAGDAPLQGVLGGALTIPCHVHYLRPPPSRRAVLGSPRVKWTFLSRGREAEVLVARGVRVKVNEAYRFRVALPAYPASLTDVSLALSELRPNDSGIYRCEVQHGIDD

SEQ ID NO: 86558 - protein, 243 aa, Homo sapiens
  MOD_RES (1)..(1): Any amino acid
XLSHIVKEESDTEAELALAASQPARLEERLIRDQDLGASLLPAAPQWRQLDSTQKEQYWDLMLETYGKMVSGGISHPKSDLTNSIEFGEELAGIYLHVNEKIPRPTCIGDRQENDKENLNLENHRDQELLHASCQASGEVPSQASLRGFFTEDEPGCFGEGENLPEALQNIQDEGTGEQLSPQERISEKQLGQHLPNPHSGEMSTMWLEEKRETSQKGQPRAPMAQKLPTCRECGKTFYRNSQ

SEQ ID NO: 86559 - protein, 173 aa, Homo sapiens
MSAAVTAGKLARAPADPGKAGVPGVAAPGAPAAAPPAKEIPEVLVDPRSRRRYVRGRFLGKGGFAKCFEISDADTKEVFAGKIVPKSLLLKPHQREKMSMEISIHRSLAHQHVVGFHGFFEDNDFVFVVLELCRRRVSVAAGELELPAGQLERPDLELLERVPSKGEPGTWSC

SEQ ID NO: 86560 - protein, 1306 aa, Homo sapiens
MQRGAALCLRLWLCLGLLDGLVSGYSMTPPTLNITEESHVIDTGDSLSISCRGQHPLEWAWPGAQEAPATGDKDSEDTGVVRDCEGTDARPYCKVLLLHEVHANDTGSYVCYYKYIKARIEGTTAASSYVFVRDFEQPFINKPDTLLVNRKDAMWVPCLVSIPGLNVTLRSQSSVLWPDGQEVVWDDRRGMLVSTPLLHDALYLQCETTWGDQDFLSNPFLVHITGNELYDIQLLPRKSLELLVGEKLVLNCTVWAEFNSGVTFDWDYPGKQAERGKWVPERRSQQTHTELSSILTIHNVSQHDLGSYVCKANNGIQRFRESTEVIVHENPFISVEWLKGPILEATAGDELVKLPVKLAAYPPPEFQWYKDGKALSGRHSPHALVLKEVTEASTGTYTLALWNSAAGLRRNISLELVVNVPPQIHEKEASSPSIYSRHSRQALTCTAYGVPLPLSIQWHWRPWTPCKMFAQRSLRRRQQQDLMPQCRDWRAVTTQDAVNPIESLDTWTEFVEGKNKTVSKLVIQNANVSAMYKCVVSNKVGQDERLIYFYVTTIPDGFTIESKPSEELLEGQPVLLSCQADSYKYEHLRWYRLNLSTLHDAHGNPLLLDCKNVHLFATPLAASLEEVAPGARHATLSLSIPRVAPEHEGHYVCEVQDRRSHDKHCHKKYLSVQALEAPRLTQNLTDLLVNVSDSLEMQCLVAGAHAPSIVWYKDERLLEEKSGVDLADSNQKLSIQRVREEDAGRYLCSVCNAKGCVNSSASVAVEGSEDKGSMEIVILVGTGVIAVFFWVLLLLIFCNMRRPAHADIKTGYLSIIMDPGEVPLEEQCEYLSYDASQWEFPRERLHLGRVLGYGAFGKVVEASAFGIHKGSSCDTVAVKMLKEGATASEHRALMSELKILIHIGNHLNVVNLLGACTKPQGPLMVIVEFCKYGNLSNFLRAKRDAFSPCAEKSPEQRGRFRAMVELARLDRRRPGSSDRVLFARFSKTEGGARRASPDQEAEDLWLSPLTMEDLVCYSFQVARGMEFLASRKCIHRDLAARNILLSESDVVKICDFGLARDIYKDPDYVRKGSARLPLKWMAPESIFDKVYTTQSDVWSFGVLLWEIFSLGASPYPGVQINEEFCQRLRDGTRMRAPELATPAIRRIMLNCWSGDPKARPAFSELVEILGDLLQGRGLQEEEEVCMAPRSSQSSEEGSFSQVSTMALHIAQADAEDSPPSLQRHSLAARYYNWVSFPGCLARGAETRGSSRMKTFEEFPMTPTTYKGSVDNQTDSGMVLASEEFEQIESRHRQESGFRGTRRTRGA

SEQ ID NO: 86561 - protein, 152 aa, Homo sapiens
  MOD_RES (1)..(1): Any amino acid
XRGRLGSPGAPQQEDAMDDKELIEYFKSQMKEDPDMASAVAAIRTLLEFLKRDKGETIQGLRANLTSAIETLCGVDSSVAVSSGGELFLRFISLASLEYSDYSKCKKIMIERGELFLRRISLSRNKIADLCHTFIKDGALHHGESRSCHSWC

SEQ ID NO: 86562 - protein, 308 aa, Homo sapiens
  MOD_RES (1)..(1): Any amino acid
XATTLSNAVSSLASTGLSLTKVDEREKQAALEEEQARLKALKEQRLKELAKKPHTSLTTAASPVSTSAGGIMTAPAIDIFSTPSSSNSTSKLPNDLLDLQQPTFHPSVHPMSTASQVASTWGGFTPSPVAQPHPSAGLNVDFESVFGNKSTNVIVDSGGGLLKPTVASQNQNLPVAKLPPSKLVSDDLDSSLANLVGNLGIGNGTTKNDVNWSQPGEKKLTGGSNWQPKVAPTTAWNAATMNGMHFPQYAPPVMAYPATTPTGMIGYGIPPQMGSVPVMTQPTLIYSQPVMRPPNPFGPVSGAQIQFM

SEQ ID NO: 86563 - protein, 108 aa, Homo sapiens
MALKRMGIVSDYEKIRTFAVAIVGVGGVGSVTAEMLTRCGIGKLLLFDYDKVELANMNRLFFQPHQAGLSKVQAAEHTLRNINPDVLFEVHNYNITTVENFQHFMDRI

SEQ ID NO: 86564 - protein, 355 aa, Homo sapiens
MNILSAVITEAFGVALVGYVASLALAQGSAKKFKYSIDDNQEFLAHGLSNIVSSFFFCIPSAAAMGRTAGLYSTGAKTQVACLISCIFVLIVIYAIGPLLYWLPMCVLASIIVVGLKGMLIQFRDLKKYWNVDKIDWGIWVSTYVFTICFAANVGLLFGVVCTIAIVIGRFPRAMTVSIKNMKEMEFKVKTEMDSETLQQVKIISINNPLVFLNAKKFYTDLMNMIQKENACNQPLDDISKCEQNTLLNSLSNGNCNEEASQSCPNEKCYLILDCSGFTFFDYSGVSMLVEVYMDCKGRSVDVLLAHCTASLIKAMTYYGNLDSEKPIFFESVSAAISHIHSNKNLSKLSDHSEV

SEQ ID NO: 86565 - protein, 1927 aa, Homo sapiens
MPGEQMDPTGSQLDSDFSQQDTPCLIIEDSQPESQVLEDDSGSHFSMLSRHLPNLQTHKENPVLDVVSNPEQTAGEERGDGNSGFNEHLKENKVADPVDSSNLDTCGSISQVIEQLPQPNRTSSVLGMSVESAPAVEEEKGEELEQKEKEKEEDTSGNTTHSLGAEDTASSQLGFGVLELSQSQDVEENTVPYEVDKEQLQSVTTNSGYTRLSDVDANTAIKHEEQSNEDIPIAEQSSKDIPVTAQPSKDVHVVKEQNPPPARSEDMPFSPKASVAAMEAKEQLSAQELMESGLQIQKSPEPEVLSTQEDLFDQSNKTVSSDGCSTPSREEGGCSLASTPATTLHLLQLSGQRSLVQDSLSTNSSDLVAPSPDAFRSTPFIVPSSPTEQEGRQDKPMDTSVLSEEGGEPFQKKLQSGEPVELENPPLLPESTVSPQASTPISQSTPVFPPGSLPIPSQPQFSHDIFIPSPSLEEQSNDGKKDGDMHSSSLTVECSKTSEIEPKNSPEDLGLSLTGDSCKLMLSTSEYSQSPKMESLSSHRIDEDGENTQIEDTEPMSPVLNSKFVPAENDSILMNPAQDGEVQLSQNDDKTKGDDTDTRDDISILATGCKGREETVAEDVCIDLTCDSGSQAVPSPATRSEALSSVLDQEEAMEIKEHHPEEGSSGSEVEEIPETPCESQGEELKEENMESVPLHLSLTETQSQGLCLQKEMPKKECSEAMEVETSVISIDSPQKLAILDQELEHKEQEAWEEATSEDSSVVIVDVKEPSPRVDVSCEPLEGVEKCSDSQSWEDIAPEIEPCAENRLDTKEEKSVEYEGDLKSGTAETEPVEQDSSQPSLPLVRADDPLRLDQELQQPQTQEKTSNSLTEDSKMANAKQLSSDAEAQKLGKPSAHASQSFCESSSETPFHFTLPKEGDIIPPLTGATPPLIGHLKLEPKRHSTPIGISNYPESTIATSDVMSESMVETHDPILGSGKGDSGAAPDVDDKLCLRMKLVSPETEASEESLQFNLEKPATGERKNGSTAVAESVASPQKTMSVLSCICEARQENEARSEDPPTTPIRGNLLHFPSSQGEEEKEKLEGDHTIRQSQQPMKPISPVKDPVSPASQKMVIQGPSSPQGEAMVTDVLEDQKEGRSTNKENPSKALIERPSQNNIGIQTMECSLRVPETVSAATQTIKNVCEQGTSTVDQNFGKQDATVQTERGSGEKPVSAPGDDTESLHSQGEEEFDMPQPPHGHVLHRHMRTIREVRTLVTRVITDVYYVDGTEVERKVTEETEEPIVECQECETEVSPSQTGGSSGDLGDISSFSSKASSLHRTSSGTSLSAMHSSGSSGKGAGPLRGKTSGTEPADFALPSSRGGPGKLRETAVPGPLGIEDISPNLSPDDKSFSRVVPRVPDSTRRTDVGAGALRRSDSPEIPFQAAAGPSDGLDASSPGNSFVGLRVVAKWSSNGYFYSGKITRDVGAGKYKLLFDDGYECDVLGKDILLCDPIPLDTEVTALSEDEYFSAGVVKGHRKESGELYYSIEKEGQRKWYKRMAVILSLEQGNRLREQYGLGPYEAVTPLTKAADISLDNLVEGKRKRRSNVSSPATPTASSSSSTTPTRKITESPRASMGVLSGKRKLITSEEERSPAKRGRKSATVKPGAVGAGEFVSPCESGDNTGEPSALEEQRGPLPLNKTLFLGYAFLLTMATTSDKLASRSKLPDGPTGSSEEEEEFLEIPPFNKQYTESQLRAGAGYILEDFNEAQCNTAYQCLLIADQHCRTRKYFLCLASGIPCVSHVWVHDSCHANQLQNYRNYLLPAGYSLEEQRILDWQPRENPFQNLKVLLVSDQQQNFLELWSEILMTGGAASVKQHHSSAHNKDIALGVFDVVVTDPSCPASVLKCAEALQLPVVSQEWVIQCLIVGERIGFKQHPKYKHDYVSH

SEQ ID NO: 86566 - protein, 474 aa, Homo sapiens
MTTLPPLPMTRPKLTALARQKLPCSSRKIPRSQLIKEKDDIDHYLEVNFKGLSKEEVAAYRNSYKKNICVDMLRDGYHKSFTELFALMERWDALREAARVRSLFWLQKPLEEQPDKLDYLYHYLTRAEDAERKESFEDVHNNLYALACYFNNSEDKWVRNHFYERCFKIAQLIKIDCGKKEAEAHMHMGLLYEEDGQLLEAAEHYEAFHQLTQGRIWKDETGRSLNLLACESLLRTYRLLSDKMLENKEYKQAIKILIKASEIAKEGSDKKMEAEASYYLGLAHLAAEEYETALTVLDTYCKISTDLDDDLSLGRGYEAIAKVLQSQGEMTEAIKYLKKFVKIARNNFQSLDLVRASTMLGDIYNEKGYYNKASECFQQAFDTTVELMSMPLMDETKVHYGIAKAHQMMLTVNNYIESADLTSLNYLLSWKESRGNIEPDPVTEFRGSTVEAVSQNSERLEELSRFPGDQKNET

SEQ ID NO: 86567 - protein, 110 aa, Homo sapiens
MPPSGPRGTLLLLPLLLLLLLRAVLAVPLERGAPNKEETPATESPDTGLYYHRYLQEVIDVLETDGHFREKLQAANAEDIKSGKLSRELDFVSHHVRTKLDELKRQEVSR

SEQ ID NO: 86568 - protein, 161 aa, Homo sapiens
MAYRRDEMWSEGRYEYERIPRERAPPRSHPSDGYNRLVNIVPKKPPLLDRPGEGSYNRYYSHVDYRDYDEGRSFSHDRRSGPPHRGDESGYRWTRDDHSASRQPEYRDMRDGFRRKSFYSSHYARERSPYKRDNTFFRESPVGRKDSPHSRSGSSVSSRSY

SEQ ID NO: 86569 - protein, 37 aa, Homo sapiens
MSKGPGPGGSAASSAPPAATAQVLQAQPEKPQHYTYG

SEQ ID NO: 86570 - protein, 151 aa, Homo sapiens
MWRGLWTLAAQAARGPRRLCTRRSSGAPAPGSGATIFALSSGQGRCGIAVIRTSGPASGHALRILTAPRDLPLARHASLRLLSDPRSGEPLDRALVLWFPGPQSFTGEDCVEFHVHGGPAVVSGVLQALGSVPGLRPAEAGAGRGSAQGCT

SEQ ID NO: 86571 - protein, 18 aa, Homo sapiens
MDQSGMEIPVTLIIKAPN

SEQ ID NO: 86572 - protein, 119 aa, Homo sapiens
MAQFGGQKNPPWATQFTATAVSQPAALGVQQPSLLGASPTIYTQQTALAAAGLTTQTPANYQLTQTAALQQQAAAAAAALQQQYSQPQQALYSVQQQLQQPQQTLLTQPAVALPTSLSL

SEQ ID NO: 86573 - protein, 153 aa, Homo sapiens
METRGPGLAVRAESRRLVGIGPRAPPGRVGLQPSGRLDRRGGAGTMGYKDNDGEEEEREGGAAGPRGSRLPPITGGASELAKRKVKKKKRKKKTKGSGKGDGILLWGKPAAVLCGLPEERCPPERNDVSAQQHGGPESCYQPHECAWKQVEPS

SEQ ID NO: 86574 - protein, 519 aa, Homo sapiens
MEASCLELALEGERLCKSGDCRAGVSFFEAAVQVGTEDLKTLSAIYSQLGNAYFYLHDYAKALEYHHHDLTLARTIGDQLGEAKASGNLGNTLKVLGNFDEAIVCCQRHLDISRELNDKVGEARALYNLGNVYHAKGKSFGCPGPQDVGEFPEEVRDALQAAVDFYEENLSLVTALGDRAAQGRAFGNLGNTHYLLGNFRDAVIAHEQRLLIAKEFGDKAAERRAYSNLGNAYIFLGEFETASEYYKKTLLLARQLKDRAVEAQSCYSLGNTYTLLQDYEKAIDYHLKHLAIAQELNDRIGEGRACWSLGNAYTALGNHDQAMHFAEKHLEISREVGDKSGELTARLNLSDLQMVLGLSYSTNNSIMSENTEIDSSLNGVRPKLGRRHSMENMELMKLTPEKVQNWNSEILAKQKPLIAKPSAKLLFVNRLKGKKYKTNSSTKVLQDASNSIDHRIPNSQRKISADTIGDEGFFDLLSRFQSNRMDDQRCCLQEKNCHTASTTTSSTPPKMMLKRIQIR

SEQ ID NO: 86575 - protein, 68 aa, Homo sapiens
MPASAARPRPGPGQPTASPFPLLLLAVLSGPVSGRVPRSVPRTSLPISVFRRKNRGGGYDPLKRCGRS

SEQ ID NO: 86576 - protein, 73 aa, Homo sapiens
MARGYGATVSLVLLGLGLALAVIVLAVVLSRHQAPCGPQAFAHAAVAADSKVCSDIGRGPVDRGARGAPWLCR

SEQ ID NO: 86577 - protein, 169 aa, Homo sapiens
MAERPTAAPRSMTHAKRARQPLSEASNQQPLSGGEEKSCTKPSPSKKRCSDNTEVEVSNLENKQPVESTSAKSCSPSPVSPQVQPQAADTISDSVAVPASLLGMRRGLNSRLEATAASSVKTRMQKLAEQRRRWDNDDMTDDIPESSLFSPMPSEEKAASPPRPLLSNA

SEQ ID NO: 86578 - protein, 199 aa, Homo sapiens
KVVQIKKSCLQSSTKQLFPDLQDLLKSIVSRMKKAVEDDVFIPLYPKSAVENKTSPHSKFQERQFWSGLKLFRNILLWNGLLTDDTLQELGLGKLLNRYLIIALLNATPGPDVVKKCNQVAACLPEKWFENSAMRTSIPQLENFIQFLLQSAHKLSRSEFRDEVEEIILILVKIKALNQAESFIGEHHLDHLKSLIKED

SEQ ID NO: 86579 - protein, 59 aa, Homo sapiens
MELDMAMEPDRKAAVSHWQQQSYLDSGIHSGATTTAPSLSGKGNPEEEDVDTSQVLYEW

SEQ ID NO: 86580 - protein, 106 aa, Homo sapiens
MVMEKPSPLLVGREFVRQYYTLLNQAPDMLHRFYGKNSSYVHGGLDSNGKPADAVYGQKEIHRKVMSQNFTNCHTKIRHVDAHATLNDGVVVQVMGLLSNNNQALR

SEQ ID NO: 86581 - protein, 162 aa, Homo sapiens
MENLMTSSTLPPLFADEDGSKESNDLATTGLNHPEVPYSSGATSSTNNPEFVEDLSQGQLLQSESSNAAEGNEQRHEDEQRSKRGGWSKGRKRKKPLRDSNAPKSPLTGYVRFMNERREQLRAKRPEVPFPEITRMLGNEWSKLPPEEKQRYLDEADRDKER

SEQ ID NO: 86582 - protein, 284 aa, Homo sapiens
MLKEVLQREGKSYKSETLMYIKKARASENKLSESILAHRENMRQMIRSFSEPFGRDLLSISDGRGRAHNRRGHNDGEDSLTHTDVSSFQTMDQMVSNMRNYMQKLERNFGQLSVDPNGHSFCSSSVMTYSKIGDEPPKVFQASTQTRRAPGGIKETRKAMRDSDSGLEKMAIGHHIHDRAHVIKKSKNKKTGDEEVNQEFINMNESDAHAFDEEWQSEVLKYKPGRHNLGNTRMRSVGHENPGSRELKRREKPQQSPAIEHGRRSNVLGDKLHIKGSSVKSNKK

SEQ ID NO: 86583 - protein, 118 aa, Homo sapiens
MCGIWALFGSDDCLSVQCLSAMKIAHRGPDAFRFENVNGYTNCCFGFHRLAVVDPLFGMQPIRVKKYPYLWLCYNGEIYNHKKMQQHFEFEYQTKVDGEIILHLYDKGGIEQTICMLD

SEQ ID NO: 86584 - protein, 175 aa, Homo sapiens
MAVSASPVISATSSGAGVPGGLFRAEPLYSTPREPPRLTPNMINSFVVNNHSNSAGGGGRGNTNTNECRMVDMHGMKVASFLMDGQELICLPQVFDLFLKHLVGGLHTVYTKLKRLDISPVVCTVEQVRILRGLGAIQPGVNRCKLITRKDFETLFTDCTNARVSLCCPGCSAVV

SEQ ID NO: 86585 - protein, 211 aa, Homo sapiens
MKRSGNPGAEADFCVMTRLLGYVDPLDPSFVAAVITITFNPLYWNVVARWEHKTRKLSRAFGSPYLACYSLSVTILLLNFLRSHCFTQAMLSQPRMESLDTPAAYSLGLALLGLGVVLVLSSFFALGFAGTFLGDYFGILKEARVTVFPFNILDNPMYWGSTANYLGWAIISPAPAGAVGSEARQPHGPAPDGAGGPHLHSGSPIRRALHR

SEQ ID NO: 86586 - protein, 103 aa, Homo sapiens
MYIGEIAPTALRGALGTFHQLAIVTGILISQIIGLEFILGNYDLWHILLGLSGVRAILQSLLLFFCPESPRYLYIKLDEEVKAKQSLKRLRGYDDVTKDINEM

SEQ ID NO: 86587 - protein, 200 aa, Homo sapiens
MPNIVLFSGSSHQDLSQRVADRLGLELGKVVTKKFSNQETSVEIGESVRGEDVYIIQSGCGEINDNLMELLIMINACKIASSSRVTAVIPCFPYARQDKKDKSRAPISAKLVANMLSVAGADHIITMDLHASQIQGFFDIPVDNLYAEPAVLQWIRENIAEWKNCIIVSPDAGGAKRYHAGYTLQISPSADWFFLFRCIR

SEQ ID NO: 86588 - protein, 593 aa, Homo sapiens
MAAAPPLRDRLSFLHRLPILLKGTSDDDVPCPGYLFEEIAKISHESPGSSQCLLEYLLSRLHSSSGHGKLKVLKILLYLCSHGSSFFLLILKRNSAFIQEAAAFAGPPDPLHGNSLYQKVRAAAQDLGSTLFSDTVLPLAPSQPLGTPPATGMGSQARPHSTLQGFGYSKEHGRTGSAGEAFLSTIQKAAEVVASAMRPGPESPSTRRLLPRGDTYQPAMMPSASHGPPTLGNLLPGAIPGPRAVRHQPGQAGGGWDELDSGPSSQNSSQNSDLSRVSDSGSHSGSDSHSGASREPGDLAERVEVVALSDCQQELSLVRTVTRGPRAFLSREEAQHFIKACGLLNCEAVLQLLTCHLRGTSECTQLRALCAIASLGSSDLLPQEHILLRTRPWLQELSMGSPGPVTNKATKILRHFEASCGQLSPARGTSAEPGPTAALPGPSDLLTDAVPLPGSQVFLQPLSSTPVSSRSPAPSSGMPSSPVPTPPPDASPIPAPGDPSEAEARLAESRRWRPERIPGGTDSPKRGPSSCAWSRDSLFAGMELVACPRLVGAGAAAGESCPDAPRAPQTSSQRTAAKEPPGSEPSAFAFLNA

SEQ ID NO: 86589 - protein, 234 aa, Homo sapiens
MSPALQDLSQPEGLKKTLRDEINAILQKRIMVLDGGMGTMIQREKLNEEHFRGQEFKDHARPLKGNNDILSITQPDVIYQIHKEYLLAGADIIETNTFSSTSIAQADYGLEHLELRGLWQGLWVRLIRHSLCPHLWKGRIIGTSHLMSLLKHTKSRPKDFWMAGLISYSLKLFLILPMPRQPCLHSKIFLRRNMLPGLSLFQGRSLIKVGGLFPDRQERDLSSACLMENHSALD

SEQ ID NO: 86590 - protein, 509 aa, Homo sapiens
MSVMSSKRPASPYGEADGEVAMVTSRQKVEEEESDGLPAFHLPLHVSFPNKPHSEEFQPVSLLTQETCGHRTPTSQHNTMEVDGNKVMSSFAPHNSSTSPQKAEEGGRQSGESLSSTALGTPERRKGSLADVVDTLKQRKMEELIKNEPEETPSIEKLLSKDWKDKLLAMGSGNFGEIKGTPESLAEKERQLMGMINQLTSLREQLLAAHDEQKKLAASQIEKQRQQMELAKQQQEQIARQQQQLLQQQHKINLLQQQIQVQGQLPPLMIPVFPPDQRTLAAAAQQGFLLPPGFSYKAGCSDPYPVQLIPTTMAAAAAATPGLGPLQLQQLYAAQLAAMQVSPGGKLPGIPQGNLGAAVSPTSIHTDKSTNSPPPKSKDEVAQPLNLSAKPKTSDGKSPTSPTSPHMPALRINSGAGPLKASVPAALASPSARVSTIGYLNDHDAVTKAIQEARQMKEQLRREQQVLDGKVAVVNSLGLNNCRTEKEVLESQSQEFIGNPEGVVAMNPT

SEQ ID NO: 86591 - protein, 82 aa, Homo sapiens
  MOD_RES (1)..(1): Any amino acid
XQTCISFCRSQRFKFAGMESGYACFCGNNPDYWKYGEAASTECNSVCFGDHTQPCGGDGRIILFDRTRRTWWSFWMATPTVS

SEQ ID NO: 86592 - protein, 957 aa, Homo sapiens
  MOD_RES (1)..(1): Any amino acid
XVDECRRVPPPCAPGRCENSPGSFRCVCGPGFRAGPRAAECLDVDECHRVPPPCDLGRCENTPGSFLCVCPAGYQAAPHGASCQDVDECARSPPPCTYGRCENTEGSFQCVCPMGFQPNTAGSECEDVDECENHLACPGQECVNSPGSFQCRTCPSGHHLHRGRCTDVDECSSGAPPCGPHGHCTNTEGSFRCSCAPGYRAPSGRPGPCADVNECLEGDFCFPHGECLNTDGSFACTCAPGYRPGPRGASCLDVDECSEEDLCQSGICTNTDGSFECICPPGHRAGPDLASCLDVDECRERGPALCGSQRCENSPGSYRCVRDCDPGYHAGPEGTCDDVDECQEYGPEICGAQRCENTPGSYRCTPACDPGYQPTPGGGCQDVDECRNRSFCGAHAVCQNLPGSFQCLCDQGYEGARDGRHCVDVNECETLQGVCGAALCENVEGSFLCVCPNSPEEFDPMTGRCVPPRTSAGTFPGSQPQAPASPVLPARPPPPPLPRRPSTPRQGPVGSGRRECYFDTAAPDACDNILARNVTWQECCCTVGEGWGSGCRIQQCPGTETAEYQSLCPHGRGYLAPSGDLSLRRDVDECQLFRDQVCKSGVCVNTAPGYSCYCSNGYYYHTQRLECIDNDECADEEPACEGGRCVNTVGSYHCTCEPPLVLDGSQRRCVSNESQSLDDNLGVCWQEVGADLVCSHPRLDRQATYTECCCLYGEAWGMDCALCPAQDSDDFEALCNVLRPPAYSPPRPGGFGLPYEYGPDLGPPYQGLPYGPELYPPPALPYDPYPPPPGPFARREAPYGAPRFDMPDFEDDGGPYGESEAPAPPGPGTRWPYRSRDTRRSFPEPEEPPEGGSYAGSLAEPYEELEAEECGILDGCTNGRCVRVPEGFTCRCFDGYRLDMTRMACVDINECDEAEAASPLCVNARCLNTDGSFRCICRPGFAPTHQPHHCAPARPRA

SEQ ID NO: 86593 - protein, 111 aa, Homo sapiens
MAAARPARGPELPLLGLLLLLLLGDPGRGAASSGNATGPGPRSAGGSARRSAAVTGPPPPLSHCGRAAPCEPLRYNVCLGSVLPYGATSTLLAGDSDSQEEAHGKLVLWSG

SEQ ID NO: 86594 - protein, 150 aa, Homo sapiens
MDSFGQPRPEDNQSVVRRMQKKYWKTKQVFIKATGKKEDEHLVASDAELDAKLEVFHSVQETCTELLKIIEKYQLRLNVISEEENELGLFLKFQAERDATQAGKMMDATGKALCSSAKQRLALCTPLSRLKQEVATFSQRAVSDTLMTIN

SEQ ID NO: 86595 - protein, 183 aa, Homo sapiens
  MOD_RES (1)..(1): Any amino acid
XPQEPYDRGRLGRNAHSCCLQWNGRSFSVWFHGLEAPLPHPFSPTVGVCLEYADRALAFYATQACLLPGECGRPLADRAPQEVLHIRAEEEVMPGTGAPAAVSAPGSCLLWALSFVWEGTSMSPTHPAFSFLEASTFLYTQPSLSQAGGPPDPVPLQTSLLGDRATAGTAPSYPNPSFPRFLE

SEQ ID NO: 86596 - protein, 59 aa, Homo sapiens
MGVSSVREKYELAHPPEEWKYELRIRYLPKGFLNQFTEDKPTLNFFYQQVKSDYMLEIA

SEQ ID NO: 86597 - protein, 86 aa, Homo sapiens
  MOD_RES (1)..(1): Any amino acid
XNATAFSSLDRPQLPQVLQQSYIFPSSISAMEATITERGITSRHLLIGLPSGAILSLPKALLDPRRPEIPTEQSRCTDTRRAIHQL

SEQ ID NO: 86598 - protein, 372 aa, Homo sapiens
MSSKYPRSVRRCLPLCALTLEAALILLFYFFTHYDASLEDQKGLVASYQVGQDLTVMAALGLGFLTSNFRRHSWSSVAFNLFMLALGVQWAILLDGFLSQFPPGKVVITLFSIRLATMSAMSVLISAGAVLGKVNLAQLVVMVLVEVTALGTLRMVISNIFNTDYHMNLRHFYVFAAYFGLTVAWCLPKPLPKGTEDNDQRATIPSLSAMLGALFLWMFWPSVNSALLRSPIQRKNAMFNTYYALAVSVVTAISGSSLAHPQRKISMTYVHSAVLAGGVAVGTSCHLIPSPWLAMVLGLVAGLISIGGAKCLPVCCNRVLGIHHISVMHSIFSLLGLLGEITYIVLLVLHTVWNGNGMFAPKSQNMESTSCG

SEQ ID NO: 86599 - protein, 44 aa, Homo sapiens
IQQGADAHSKELNKLPLPSKSVDWTHFGERSVEVTREGHPDVEG

SEQ ID NO: 86600 - protein, 71 aa, Homo sapiens
MVQARGIMLRENVKTIGHMIRLYTNKNSTLNGTDYPEGNNSSDYLVQTTTYLPENFTYSPYLPCPEKLPYM

SEQ ID NO: 86601 - protein, 43 aa, Homo sapiens
MNPSAPSYPMASLYVGDLHPDVTEAMLYEKFSPAGPILSIRVC

SEQ ID NO: 86602 - protein, 210 aa, Homo sapiens
MTTAHFYCQYCTASLLGKKYVLKDDSPYCVTCYDRVFSNYCEECKKPIESDSKDLCYKDRHWHEGCFKCTKCNHSLVEKPFAAKDERLLCTECYSNECSSKCFHCKRTIMPGSRKMEFKGNYWHETCFVCENCRQPIGTKPLISKESGNYCVPCFEKEFAHYCNFCKKVITSGGITFCDQLWHKECFLCSGCRKDLCEEQFMSRDDYPFC

SEQ ID NO: 86603 - protein, 38 aa, Homo sapiens
PSAKEAISEGYFSSLSLSQEREEDQDGFQQPRSTHPDP

SEQ ID NO: 86604 - protein, 1406 aa, Homo sapiens
MENEIFTPLLEQFMTSPLVTWVKTFGPLAAGNGTNLDEYVALVDGVFLNQVMLQINPKLESQRVNKKVNNDASLRMHNLSILVRQIKFYYQETLQQLIMMSLPNVLIIGKNPFSEQGTEEVKKLLLLLLGCAVQCQKKEEFIERIQGLDFDTKAAVAAHIQEVTHNQENVFDLQWMEVTDMSQEDIEPLLKNMALHLKRLIDERDEHSETIIELSEERDGLHFLPHASSSAQSPCGSPGMKRTESRQHLSVELADAKAKIRRLRQELEEKTEQLLDCKQELEQMEIELKRLQQENMNLLSDARSARMYRDELDALREKAVRVDKLESEVSRYKERLHDIEFYKARVEELKEDNQVLLETKTMLEDQLEGTRARSDKLHELEKENLQLKAKLHDMEMERDMDRKKIEELMEENMTLEMAQKQSMDESLHLGWELEQISRTSELSEAPQKSLGHEVNELTSSRLLKLEMENQSLTKTVEELRTTVDSVEGNASKILKMEKENQRLSKKVEILENEIVQEKQSLQNCQNLSKDLMKEKAQLEKTIETLRENSERQIKILEQENEHLNQTVSSLRQRSQISAEARVKDIEKENKILHESIKETSSKLSKIEFEKRQIKKELEHYKEKGERAEELENELHHLEKENELLQKKITNLKITCEKIEALEQENSELERENRKLKKTLDSFKNLTFQLESLEKENSQLDEENLELRRNVESLKCASMKMAQLQLENKELESEKEQLKKGLELLKASFKKTERLEVSYQGLDIENQRLQKTLENSNKKIQQLESELQDLEMENQTLQKNLEELKISSKRLEQLEKENKSLEQETSQLEKDKKQLEKENKRLRQQAEIKDTTLEENNVKIGNLEKENKTLSKEIGIYKESCVRLKELEKENKELVKRATIDIKTLVTLREDLVSEKLKTQQMNNDLEKLTHELEKIGLNKERLLHDEQSTDDSRYKLLESKLESTLKKSLEIKEEKIAALEARLEESTNYNQQLRQELKTVKKNYEALKQRQDEERMVQSSPPISGEDNKWERESQETTRELLKVKDRLIEVERNNATLQAEKQALKTQLKQLETQNNNLQAQILALQRQTVSLQEQNTTLQTQNAKLQVENSTLNSQSTSLMNQNAQLLIQQSSLENENESVIKEREDLKSLYDSLIKDHEKLELLHERQASEYESLISKHGTLKSAHKNLEVEHRDLEDRYNQLLKQKGQLEDLEKMLKVEQEKMLLENKNHETVAAEYKKLCGENDRLNHTYSQLLKETEVLQTDHKNLKSLLNNSKLEQTRLEAEFSKLKEQYQQLDITSTKLNNQCELLSQLKGNLEEENRHLLDQIQTLMLQNRTLLEQNMESKDLFHVEQRQYIDKLNELRRQKEKLEEKIMDQYKFYDPSPPRSGCTEKTALFEEQTEG

SEQ ID NO: 86605 - protein, 180 aa, Homo sapiens
MGKKYKNIVLLKGLEVINDYHFRMVKSLLSNDLKLNLKMREEYDKIQIADLMEEKFRGDAGLGKLIKIFEDIPTLEDLAETLKKEKLKVKGPALSRKRKKEVDATSPAPSTSSTVKTEGAEATPGAQKRKKSTKEKAGPKGSKVSEEQTQPPSPAGAGMSTAMGRSPSPKTSLSAPPNSS

SEQ ID NO: 86606 - protein, 459 aa, Homo sapiens
MGKEKTHINIVVIGHVDSGKSTTTGHLIYKCGGIDKRTIEKFEKEMGKGSFKYAWVLDKLKAERERGITIDISLWKFETSKYYVTIIDAPGHRDFIKNMITGTSQADCAVLIVAAGVGEFEAGISKNGQTREHALLAYTLGVKQLIVGVNKMDSTEPPYSQKRYEEIVKEVSTYIKKIGYNPDTVAFVPISGWNGDNMLEPSANMPWFKGWKVTRKDGNASGTTLLEALDCILPPTRPTDKPLRLPLQDVYKIGGIGTVPVGRVETGVLKPGMVVTFAPVNVTTEVKSVEMHHEALSEALPGDNVGFNVKNVSVKDVRRGNVAGDSKNDPPMEAAGFTAQVIILNHPGQISAGYAPVLDCHTAHIACKFAELKEKIDRRSGKKLEDGPKFLKSGDAAIVDMVPGKPMCVESFSDYPPLGRFAVRDMRQTVAVGVIKAVDKKAAGAGKVTKSAQKAQKAK

SEQ ID NO: 86607 - protein, 76 aa, Homo sapiens
  MOD_RES (1)..(1): Any amino acid
XTTSPLIPTTTPARPLLPFSTGPGSPLFQPLSFQSQGSPPKGPELSLASIHVPLESIKPINESEVAATFWDRTLSI

SEQ ID NO: 86608 - protein, 220 aa, Homo sapiens
MNSMDRHIQQTNDRLQCIKQHLQNPANFHNAATELLDWCGDPRAFQRPFEQSLMGCLTVVSRVAAQQGFDLDLGYRLLAVCAANRDKFTPKSAALLSSWCEELGRLLLLRHQKSRQSDPPGKLPMQPPLSSMSSMKPTLSHSDGSFPYDSVPWLPAYPACTPPPSQSHPNSCSLKQKQPLAFPPPLCSIWLTTLQGLLGSLSCVHFVSGWSVPREPHGLG

SEQ ID NO: 86609 - protein, 132 aa, Homo sapiens
  MOD_RES (1)..(1): Any amino acid
XNLEIGGDAGGRIGCKELVLMEEQDARVPALEPFRVEQAPPVIYYVPDFISKEEEEYLLRQVFNAPKPKWTQLSGRKLQNWGGPSGPHCLPQVGFLIPEGWFLSGCPHGSSATWTKCQTSASLEASQLTMSS

SEQ ID NO: 86610 - protein, 297 aa, Homo sapiens
MGPLSAPPCTQHITWKGLLLTVETPKPSISSSNFNPREATEAVILTCDPETPDASYLWWMNGQSLPMTHSLQLSETNRTLYLFGVTNYTAGPYECEIRNPVSASRSDPVTLNLLPKLPKPYITINNLNPRENKDVSTFTCEPKSENYTYIWWLNGQSLPVSPRVKRRIENRILILPSVTRNETGPYQCEIRDRYGGIRSDPVTLNVLYGPDLPRIYPSFTYYHSGQNLYLSCFADSNPPAQYSWTINGKFQLSGQKLSIPQITTKHSGLYACSVRNSATGKESSKSVTVRVSDWTLP

SEQ ID NO: 86611 - protein, 217 aa, Homo sapiens
MAEGSQSAPEAGNDMGNDDAIGGNVSKYIVLPTGYCGQPKKGHLIFDACFESGNLGRVDQVSEFEYDLFIRPDTCNPRFRVWFNFTVENVKESQRVIFNIVNFSKTKSLYRDGMAPMVKSTSRPKWQRLPPKNVYYYRCPDHRKNYVMSFAFCFDREEDIYQFAYCYPYTYTRFQHYLDSLQKRNMDYFFREQLGQSVQQRKLDLLTITSPAGRWSW

SEQ ID NO: 86612 - protein, 85 aa, Homo sapiens
MPMPSANTPFSYPLPKGPSDFNGLPMGTYQAFPNIHPPQIPATPPSYESLMCSTLGLSFSYALVLHASHNPQPLVGMRSKIFISI

SEQ ID NO: 86613 - protein, 265 aa, Homo sapiens
  MOD_RES (1)..(1): Any amino acid
XNGLPVQNGIDADVKDFSRTPGNCQNSANEVDLLGPNQNGSEGLAQLTSTNGAKPVEDFSNMESQSVPLDPMEHVGMEPLQFDYSGTQVPVDSAAATVGLFDYNSQQQLFQRPNALAVQQLTAAQQQQYALAAAHQPHIGPAVVPHQYYGVTPWGVYPASLFQQQAAAAAAATNSANQQTTPQAQQGQQQVLRGGASQRPLTPNQNQQGQQTDPLVAAAAVNSALAFGQGLAAGMPGYPVLAPAAYYDQTGALVVNAGARNGLGA

SEQ ID NO: 86614 - protein, 79 aa, Homo sapiens
MIVGQEKPYQNKNAINNGVRISGRGFCVKMFYIKPIKYKGPIKKGEKLGTLLPLQKVYPGIQSHVHIENCDSSDPTAYL

SEQ ID NO: 86615 - protein, 69 aa, Homo sapiens
MSCPTPGCDGSGHVSGSFLTHRRCMREVQREQLQATSHQGAVEFGGSCEGGRSQPAGEDRARRHTPQFP

SEQ ID NO: 86616 - protein, 109 aa, Homo sapiens
  MOD_RES (1)..(1): Any amino acid
XKNATGLGLIVTSTGILILLHYYVFSTAIGLTSFVIAILVIQVIAYILAVVGLSLCIAACIPMHGPLLISGLSILALAQLLGLVYMKFVASNQKTIQPPRKAVEEPLNE

SEQ ID NO: 86617 - protein, 92 aa, Homo sapiens
MIFTQSSEKTAVSCLSQNDWKLDVATDNFFQNPELYIRESVKGSLDRKKLEQLYNRYKDPQDENKIGIDGIQQFCDDLALDPASISVLIIAW

SEQ ID NO: 86618 - protein, 77 aa, Homo sapiens
SHYRLFPKALGQLISKYSLRELHLSFTQGFWRTRYWGPPFLQAPSGAELWVWFQDTVTEFSSQLWTLKEGAEVAPGQ

SEQ ID NO: 86619 - protein, 38 aa, Homo sapiens
MALRRPPRLRLCARLPDFFLLLLFRESSLVCFPRLHSK

SEQ ID NO: 86620 - protein, 56 aa, Homo sapiens
MLGPSWDGDEAESTGEIIRLGDTAHTFSLRSNGAQCPNEMLSKKALASPSSKSHED

SEQ ID NO: 86621 - protein, 52 aa, Homo sapiens
DGQVPPASRSRSVLLDVSAGQLLMVDGRHPDAVAWANLTNAIRETGSSTCTG

SEQ ID NO: 86622 - protein, 36 aa, Homo sapiens
MATSRGASRCPRDIANVMQRLQGIGNQVAVLLGFTF

SEQ ID NO: 86623 - protein, 88 aa, Homo sapiens
MFQRLSSLFFSTPSPPEDPDCPRAFVSEEDEVDGWLIIDLPEGPGLGPARLQSSPLEDLLIEHPSMSVYVTGSTIVLEPGSPSPLPDA

SEQ ID NO: 86624 - protein, 232 aa, Homo sapiens
  MOD_RES (1)..(1): Any amino acid
XKYVICVRFGGEHVPNSPFQVTALAGDQPSVQPPLRSQQLAPQYTYAQGGQQTWAPERPLVGVNGLDVTSLRPFDLVIPFTIKKGEITGEVRMPSGKVAQPTITDNKDGTVTVRYAPSEAGLHEMDIRYDNMHIPGSPLQFYVDYVNCGHVTAYGPGLTHGVVNKPATFTVNTKDAGEGDDSMRMSHLKVGSAADIPINISETDLSLLTATVVPPSGREEPCLLKRLRNGHV

SEQ ID NO: 86625 - protein, 105 aa, Homo sapiens
MVKLLVAKILCMVGVFFFMLLGSLLPVKIIETDFEKAHRSKKILSLCNTFGGGVFLATCFNALLPAVREKARSGVLAAGTSPPGPGRPPAAGKMPEQSNDYRVVV

SEQ ID NO: 86626 - protein, 21 aa, Homo sapiens
VKMLKGAHLVLFPPSPSPSPS

SEQ ID NO: 86627 - protein, 285 aa, Homo sapiens
MSQRDTLVHLFAGGCGGTVGAILTCPLEVVKTRLQSSSVTLYISEVQLNTMAGASVNRVVSPGPLHCLKAIYFAAYSNCKEKLNDVFDPDSTQVHMISAAMAGFTAITATNPIWLIKTRLQLDARNRGERRMGAFECVRKVYQTDGLKGFYRGMSASYAGISETVIHFVIYESIKQKLLEYKTASTMENDEESVKEASDFVGMMLAAATSKTCATTIAYPHEVVRTRLREEGTKYRSFFQTLSLLVQEEGYGSLYRGLTTHLVRQIPNTAIMMATYELVVYLLNG

SEQ ID NO: 86628 - protein, 94 aa, Homo sapiens
MHMMVSKPEQWVKPMAVAGANQYTFHLEATENPGALIKDIRENGMKSCSVTQAEVQWHSQGPLQVGLAIKPGTSVEYLAPWANQIDMALVMTVE

SEQ ID NO: 86629 - protein, 297 aa, Homo sapiens
MESGSTAASEEARSLRECELYVQKHNIQALLKDSIVQLCTARPERPMAFLREYFERLEKEEAKQIQNLQKAGTRTDSREDEISPPPPNPVVKGRRRRGAISAEVYTEEDAASYVRKVIPKDYKTMAALAKAIEKNVLFSHLDDNERSDIFDAMFSVSFIAGETVIQQGDEGDNFYVIDQGETDVYVNNEWATSVGEGGSFGELALIYGTPRAATVKAKTNVKLWGIDRDSYRRILMGSTLRKRKMYEEFLSKVSILESLDKWERLTVADALEPVQFEDGQKIVVQGEPGDEFFIILE

SEQ ID NO: 86630 - protein, 56 aa, Homo sapiens
MISFLDEERLGGGGGDCIFVGKTVSRLLNVCELDIIFNFEKAYFILDEFIIGGEIQ

SEQ ID NO: 86631 - protein, 346 aa, Homo sapiens
MGEFMAMEAGLSEVKSELQSRDDLLRIIEMERLQLHRELLKIGECQNAQGNKTRLESSYLPSIKEPERKIKELFSVMQDQPNHEKELNKIRSQLQQVEEYHNSEQERMRNEISDLTEELHQKEITIATVTKKAALLEKQLKMELEIKEKMLAKQKVSDMKYKAVRTENTHLKGMMGDLDPGEYMSMDFTNREQSRHTSINKLQYENERLRNDLAKLHVNGKSTWTNQNTYEETGRYAYQSQIKVEQNEERLSHDCEPNRSTMPPLPPSTFQAKEMTSPLVSDDDVFPLSPPDMSFPASLAAQHFLLEEEKRAKELEKLLNTHIDELQRHTEFTLNKYSKLKQNRHI

SEQ ID NO: 86632 - protein, 46 aa, Homo sapiens
MRRFLLLYATQQGQAKAIAEEICEQAVVHGFSADLHCISESDKCEK

SEQ ID NO: 86633 - protein, 1060 aa, Homo sapiens
  MOD_RES (1)..(1): Any amino acid
XYDQCTWEIDDIDIPYYDNLKQAYWGHRELMLGEDTRLPKRLLKKGKKLRDDKQEKPPDTPIVDPTVKFDKQPWYIDSTGGTLHPYQLEGLNWLRFSWAQGTDTILADEMGLGKTVQTIVFLYSLYKEGHSKGPYLVSAPLSTIINWEREFEMWAPDFYVVTYTGDKESRSVIRENEFSFEDNAIRSGKKVFRMKKEVQIKFHVLLTSYELITIDQAILGSIEWACLVVDEAHRLKNNQSKFFRVLNSYKIDYKLLLTGTPLQNNLEELFHLLNFLTPERFNNLEGFLEEFADISKEDQIKKLHDLLGPHMLRRLKADVFKNMPAKTELIVRVELSQMQKKYYKFILTRNFEALNSKGGGNQVSLLNIMMDLKKCCNHPYLFPVAAVEAPVLPNGSYDGSSLVKSSGKLMLLQKMLKKLRDEGHRVLIFSQMTKMLDLLEDFLEYEGYKYERIDGGITGGLRQEAIDRFNAPGAQQFCFLLSTRAGGLGINLATADTVIIYDSDWNPHNDIQAFSRAHRIGQNKKVMIYRFVTRASVEERITQVAKRKMMLTHLVVRPGLGSKSGSMTKQELDDILKFGTEELFKDDVEGMMSQGQRPVTPIPDVQSSKGGNLAASAKKKHGSTPPGDNKDVEDSSVIHYDDAAISKLLDRNQDATDDTELQNMNEYLSSFKVAQYVVREEDGVEEVEREIIKQEENVDPDYWEKLLRHHYEQQQEDLARNLGKGKRIRKQVNYNDASQEDQEWQDELSDNQSEYSIGSEDEDEDFEERPEGQSGRRQSRRQLKSDRDKPLPPLLARVGGNIEVLGFNARQRKAFLNAIMRWGMPPQDAFNSHWLVRDLRGKSEKEFRAYVSLFMRHLCEPGADGAETFADGVPREGLSRQHVLTRIGVMSLVRKKVQEFEHVNGKYSTPDLIPEGPEGKKSGEVISSDPNTPVPASPAHLLPAPLGLPDKMEAQLGYMDEKDPGAQKPRQPLEVQALPAALDRVESEDKHESPASKERAREERPEETEKAPPSPEQLPRASCSVTQAGVQWRHLGSWEPLSPRLKRPSHLSFLNRGGAS

SEQ ID NO: 86634 - protein, 107 aa, Homo sapiens
MSDAAVDTSSEITTKDLKEKKEVVEEAENGRDAPANGNANEENGEQEADNEVDEEEEEGGEEEEEEEEGDEDGDEDEEAESATGKRAAEDDEDDDVDTKKQKTDEDD

SEQ ID NO: 86635 - protein, 74 aa, Homo sapiens
EADKKAAEDKCKQVRCPPLGRSGLLGVLSVRKAGVWSPVGGRRHLREDRRLMLWRRKSEGTIAFLGWGPGLEEG

SEQ ID NO: 86636 - protein, 1628 aa, Homo sapiens
MAGVGAAALSLLLHLGALALAAGAEGGAVPREPPGQQTTAHSSVLAGNSQEQWHPLREWLGRLEAAVMELREQNKDLQTRVRQLESCECHPASPQCWGLGRAWPEGARWEPDACTACVCQDGAAHCGPQAHLPHCRGCSQNGQTYGNGETFSPDACTTCRCLEGTITCNQKPCPRGPCPEPGACCPHCKPGCDYEGQLYEEGVTFLSSSNPCLQCTCLRSRVRCMALKCPPSPCPEPVLRPGHCCPTCQGCTEGGSHWEHGQEWTTPGDPCRICRCLEGHIQCRQRECASLCPYPARPLPGTCCPVCDGCFLNGREHRSGEPVGSGDPCSHCRCANGSVQCEPLPCPPVPCRHPGKIPGQCCPVCDGCEYQGHQYQSQETFRLQERGLCVRCSCQAGEVSCEEQECPVTPCALPASGRQLCPACELDGEEFAEGVQWEPDGRPCTACVCQDGVPKCGAVLCPPAPCQHPTQPPGACCPSCDSCTYHSQVYANGQNFTDADSPCHACHCQDGTVTCSLVDCPPTTCARPQSGPGQCCPRCPDCILEEEVFVDGESFSHPRDPCQECRCQEGHAHCQPRPCPRAPCAHPLPGTCCPNDCSGCAFGGKEYPSGADFPHPSDPCRLCRCLSGNVQCLARRCVPLPCPEPVLLPGECCPQCPAAPAPAGCPRPGAAHARHQEYFSPPGDPCRRCLCLDGSVSCQRLPCPPAPCAHPRQGPCCPSCDGCLYQGKEFASGERFPSPTAACHLCLCWEGSVSCEPKACAPALCPFPARGDCCPDCDGCEYLGESYLSNQEFPDPREPCNLCTCLGGFVTCGRRPCEPPGCSHPLIPSGHCCPTCQGCRYHGVTTASGETLPDPLDPTCSLCTCQEGSMRCQKKPCPPALCPHPSPGPCFCPVCHSCLSQGREHQDGEEFEGPAGSCEWCRCQAGQVSCVRLQCPPLPCKLQVTERGSCCPRCRGCLAHGEEHPEGSRWVPPDSACSSCVCHEGVVTCARIQCISSCAQPRQGPHDCCPQCSDCEHEGRKYEPGESFQPGADPCEVCICEPQPEGPPSLRCHRRQCPSLVGCPPSQLLPPGPQHCCPTCAEALSNCSEGLLGSELAPPDPCYTCQCQDLTWLCIHQACPELSCPLSERHTPPGSCCPVCRECVVEAEGRRVADGESWRDPSNACIACTCHRGHVECHLEECQALSCPHGWAKVPQADSCCERCQAPTQSCVHQGREVASGERWTVDTCTSCSCMAGTVRCQSQRCSPLSCGPDKAPALSPGSCCPRCLPRPASCMAFGDPHYRTFDGRLLHFQGSCSYVLAKDCHSGDFSVHVTNDDRGRSGVAWTQEVAVLLGDMAVRLLQDGAVTVDGHPVALPFLQEPLLYVELRGHTVILHAQPGLQVLWDGQSQVEVSVPGSYQGRTCGLCGNFNGFAQDDLQGPEGLLLPSEAAFGNSWQVSEGLWPGRPCSAGREVDPCRAAGYRARREANARCGVLKSSPFSRCHAVVPPEPFFAACVYDLCACGPGSSADACLCDALEAYASHCRQAGVTPTWRGPTLCVVGCPLERGFVFDECGPPCPRTCFNQHIPLGELAAHCVRPCVPGCQCPAGLVEHEAHCIPPEACPQVLLTGDQPLGARPSPSREPQETP

SEQ ID NO: 86637 - protein, 353 aa, Homo sapiens
MATEHPEPPKAELQLPPPPPPGHYGAWAAQELQAKLAEIGAPIQGNREELVERLQSYTRQTGIVLNRPVLRGEDGDKAAPPPMSAQLPGIPMPPPPLGLPPLQPPPPPPPPPPGLGLGFPMAHPPNLGPPPPLRVGEPVALSEEERLKLAQQQAALLMQQEERAKQGDHSLKEHELLEQQKRAAVLLEQERQQEIAKMGTPVPRPPQDMGQIGVRTPLGPRAAPVGPVGPTPTVLPMGAPVPRPRGPPPPPGDENREMDDPSVGPKIPQALEKILQLKESRQEEMNSQQEEEEMETDARSSLGQSASETEEDTVSVSKKEKNRKRRNRKKKKKPQRVRGVSSESSGDREKDST

SEQ ID NO: 86638 - protein, 520 aa, Homo sapiens
MSASEGMKFKFHSGEKVLCFEPDPTKARVLYDAKIVDVIVGKDEKGRKIPEYLIHFNGWNRSWDRWAAEDHVLRDTDENRRLQRKLARKAVARLRSTGRKKKRCRLPGVDSVLKGLPTEEKDENDENSLSSSSDCSENKDEEISEESDIEEKTEVKEEPELQTRREMEERTITIEIPEVLKKQLEDDCYYINRRKRLVKLPCQTNIITILESYVKHFAINAAFSANERPRHHHVMPHANMNVHYIPAEKNVDLCKEMVDGLRITFDYTLPLVLLYPYEQAQYKKVTSSKFFLPIKESATSTNSQEELSPSPPLLNPSTPQSTESQPTTGEPATPKRRKAEPEALQSLRRSTRHSANCDRLSESSASPQPKRRQQDTSASMPKLFLHLEKKTPVHSRSSSPIPLTPSKEGSAVFAGFEGRRTNEINEVLSWKLVPDNYPPGDQPPPPSYIYGAQHLLRLFVKLPEILGKMSFSEKNLKALLKHFDLFLRFLAEYHDDFFPESAYVAACEAHYSTKNPRAIY

SEQ ID NO: 86639 - protein, 127 aa, Homo sapiens
MADAEARAEFPEEARPDRGTLQVLQDMASRLRIHSIRATCSTSSGHPTSCSSSSEIMSVLFFYIMRYKQSDPENPDNDRFVLAKRLSFVDVATGWLGQGLGVACGTLMWWTAGTWRHCARYSGRLLR

SEQ ID NO: 86640 - protein, 36 aa, Homo sapiens
MLFEGKVNPQTQSLLAECGEWTRRSLHLRVLGRQLI

SEQ ID NO: 86641 - protein, 229 aa, Homo sapiens
MRYKTSLVMRKRLRLYRNTLKESSSSSGHHGPQLTAASSPSVFPGLHEEPPQASPSRPLNGLLRLGLPGDMYARPEPFPPGPAARSDALAAAAALHGYGGMNLTVNLAAPHGPGAFFRYMRQPIKQELICKWLAADGTATPSLCSKTFSTMHELVTHVTVEHVGGPEQANHICFWEECPRQGKPFKAKYKLVNHIRVHTGEKPFPCPFPGCGKVFARSENLKIHKRTHT

SEQ ID NO: 86642 - protein, 593 aa, Homo sapiens
MIGYGAILVALAGLLMTLPHFISEPYRYDNTSPEDMPQDFKASLCLPTTSAPASAPSNGNCSSYTETQHLSVVGIMFVAQTLLGVGGVPIQPFGISYIDDFAHNSNSPLYLGILFAVTMMGPGLAFGLGSLMLRLYVDINQMPEGGISLTIKDPRWVGAWWLGFLIAAGAVALAAIPYFFFPKEMPKEKRELQFRRKVLAVTDSPARKGKDSPSKQSPGESTKKQDGLVQIAPNLTVIQFIKVFPRVLLQTLRHPIFLLVVLSQVCLSSMAAGMATFLPKFLERQFSITASYANLLIGCLSFPSVIVGIVVGGVLVKRLHLGPVGCGALCLLGMLLCLFFSLPLFFIGCSSHQIAGITHQTSAHPGLELSPSCMEACSCPLDGFNPVCDPSTRVEYITPCHAGCSSWVVQDALDNSQVFYTNCSCVVEGNPVLAGSCDSTCSHLVVPFLLLVSLGSALACLTHTPSFMLILRGVKKEDKTLAVGIQFMFLRILAWMPSPVIHGSAIDTTCVHWALSCGRRAVCRYYNNDLLRNRFIGLQFFFKTGSVICFALVLAVLRQQDKEARTKESRSSPAVEQQLLVSGPGKKPEDSRV

SEQ ID NO: 86643 - protein, 74 aa, Homo sapiens
  MOD_RES (1)..(1): Any amino acid
XGNHHPTPSHGPDGAVPTMADDLGEPAPLWPHDPDAKEKPLHMPGGDGHRGKSLKLLEKIPEDAEATVVLVAVS

SEQ ID NO: 86644 - protein, 323 aa, Homo sapiens
  MOD_RES (1)..(1): Any amino acid
XLLAVALLPWTCASRALQHLDPPAPLPLVIWHGMGDSCCNPLSMGAIKKMVEKKIPGIYVLSLEIGKTLMEDVENSFFLNVNSQVTTVCQALAKDPKLQQGYNAMGFSQGGQFLRAVAQRCPSPPMINLISVGGQHQGVFGLPRCPGESSHICDFIRKTLNAGAYSKVVQERLVQAEYWHDPIKEDVYRNHSIFLADINQERGINESYKKNLMALKKFVMVKFLNDSIVDPVDSEWFGFYRSGQAKETIPLQETSLYTQVTGRESILGGWCFFSSQFLKLLCSLVLEPFPLHLRALGPPGAKGNGQCRTASVSGYRRGPSSVV

SEQ ID NO: 86645 - protein, 144 aa, Homo sapiens
MEDEMPKTLYVGNLSRDVTEALILQLFSQIGPCKNCKMIMDTAGNDPYCFVEFHEHRHAAAALAAMNGRKIMGKEVKVNWATTPSSQKKDTSSSTVVSTQRSQDHFHVFVGDLSPEITTEDIKAAFAPFGRISVSLKNGQNCPG

SEQ ID NO: 86646 - protein, 987 aa, Homo sapiens
MGKVLESSLWRSSDFGTSYTKLTLQPGVTTVIDNFYICPTNKRKVILVSSSLSDRDQSLFLSADEGATFQKQPIPFFVETLIFHPKEEDKVLAYTKESKLYVSSDLGKKWTLLQERVTKDHVFWSVSGVDADPDLVHVEAQDLGGDFRYVTCAIHNCSEKMLTAPFAGPIDHGSLTVQDDYIFFKATSANQTKYYVSYRRNEFVLMKLPKYALPKDLQIISTDESQVFVAVQEWYQMDTYNLYQSDPRGVRYALVLQDVRSSRQAEESVLIDILEVRGVKGVFLANQKIDGKVMTLITYNKGRDWDYLRPPSMDMNGKPTNCKPPDCHLHLHLRWADNPYVSGTVHTKDTAPGLIMGAGNLGSQLVEYKEEMYITSDCGHTWRQVFEEEHHILYLDHGGVIVAIKDTSIPLKILKFSVDEGLTWSTHNFTSTSVFVDGLLSEPGDETLVMTVFGHISFRSDWELVKVDFRPSFSRQCGEEDYSSWELSNLQGDRCIMGQQRSFRKRKSTSWCIKGRSFTSALTSRVCECRDSDFLCDYGFERSSSSESSTNKCSANFWFNPLSPPDDCALGQTYTSSLGYRKVVSNVCEGGVDMQQSQVQLQCPLTPPRGLQVSIQGEAVAVRPGEDVLFVVRQEQGDVLTTKYQVDLGDGFKAMYVNLTLTGEPIRHRYESPGIYRVSVRAENTAGHDEAVLFVQVNSPLQALYLEVVPVIGLNQEVNLTAVLLPLNPNLTVFYWWIGHSLQPLLSLDNSVTTRFSDTGDVRVTVQAACGNSVLQDSRVLRVLDQFQVMPLQFSKELDAYNPNTPEWREDVGLVVTRLLSKETSVPQELLVTVVKPGLPTLADLYVLLPPPRPTRKRSLSSDKRLAAIQQVLNAQKISFLLRGGVRVLVALRDTGTGAEQLGGGGGYWAVVVLFVIGLFAAGAFILYNFIRKRPGRTVYAQMHNEKEQEMTSPVSHSEDVQGAVQGNHSGVVLSINSREMHSYLVS

SEQ ID NO: 86647 - protein, 140 aa, Homo sapiens
MFYCATLGVNLIACLAWWIGGGSGTNFGLAFVWLLLFTPCGYVCWFRPVYKAFRADSSFNFMAFFFIFGAQFVLTVIQAIGFSGWGACGWLSAIGFFQYSPGAAVVMLLPAIMFSVSAAMMAIAIMKVHRIYRGAGGSFQ

SEQ ID NO: 86648 - protein, 1849 aa, Homo sapiens [sequence omitted]

SEQ ID NO: 86649 - protein, 127 aa, Homo sapiens
HPHTSRQPPWCDPLGPFVVGGEDLDPFGPRRGGMIVDPLRSGFPRALIDPSSGLPNRLPPGAVPPGARFDPFGPIGTSPPGAGVKMSPAKCLEYQIHGDVSSLGNTRQPQRQLWSESCRFREDTVTS

SEQ ID NO: 86650 - protein, 95 aa, Homo sapiens
MEQSNDSLRVNHNDGEESKTSAQVFEHLICMDSRDSSFGQNDSPTVLPITTREANNSLISQNIPGPLTQTQTLSAEQFHLVDQNGQAIQYELQSL

SEQ ID NO: 86651 - protein, 59 aa, Homo sapiens
  MOD_RES (1)..(1): Any amino acid
XVTEFGDSACFTLSLLGHVYCKTDRLAKGSECYQKSLSLNPFLWSPFESLCEIVLGFCH

SEQ ID NO: 86652 - protein, 86 aa, Homo sapiens
MSGCFPVSGLRCLSRDGRMAAQGAPRFLLTFDFDETIVDENSDDSIVRAAPGQRLPESLRATYREGFYNEYMQRVFKYLGEQGVRP

SEQ ID NO: 86653 - protein, 1461 aa, Homo sapiens
MALTPGWGSSAGPVRPELWLLLWAAAWRLGASACPALCTCTGTTVDCHGTGLQAIPKNIPRNTERLELNGNNITRIHKNDFAGLKQLRVLQLMENQIGAVERGAFDDMKELERLRLNRNQLHMLPELLFQNNQALSRLDLSENAIQAIPRKAFRGATDLKNLQLDKNQISCIEEGAFRALRGLEVLTLNNNNITTIPVSSFNHMPKLRTFRLHSNHLFCDCHLAWLSQWLRQRPTIGLFTQCSGPASLRGLNVAEVQKSEFSCSGQGEAGRVPTCTLSSGSCPAMCTCSNGIVDCRGKGLTAIPANLPETMTEIRLELNGIKSIPPGAFSPYRKLRRIDLSNNQIAEIAPDAFQGLRSLNSLVLYGNKITDLPRGVFGGLYTLQLLLLNANKINCIRPDAFQDLQNLSLLSLYDNKIQSLAKGTFTSLRAIQTLHLAQNPFICDCNLKWLADFLRTNPIETSGARCASPRRLANKRIGQIKSKKFRCSAKEQYFIPGTEDYQLNSECNSDVVCPHKCRCEANVVECSSLKLTKIPERIPQSTAELRLNNNEISILEATGMFKKLTHLKKINLSNNKVSEIEDGAFEGAASVSELHLTANQLESIRSGMFRGLDGLRTLMLRNNRISCIHNDSFTGLRNVRLLSLYDNQITTVSPGAFDTLQSLSTLNLLANPFNCNCQLAWLGGWLRKRKIVTGNPRCQNPDFLRQIPLQDVAFPDFRCEEGQEEGGCLPRPQCPQECACLDTVVRCSNKHLRALPKGIPKNVTELYLDGNQFTLVPGQLSTFKYLQLVDLSNNKISSLSNSSFTNMSQLTTLILSYNALQCIPPLAFQGLRSLRLLSLHGNDISTLQEGIFADVTSLSHLAIGANPLYCDCHLRWLSSWVKTGYKEPGIARCAGPQDMEGKLLLTTPAKKFECQGPPTLAVQAKCDLCLSSPCQNQGTCHNDPLEVYRCACPSGYKGRDCEVSLDSCSSGPCENGGTCHAQEGEDAPFTCSCPTGFEGPTCGVNTDDCVDHACANGGVCVDGVGNYTCQCPLQYEGKACEQLVDLCSPDLNPCQHEAQCVGTPDGPRCECMPGYAGDNCSENQDDCRDHRCQNGAQCMDEVNSYSCLCAEGYSGQLCEIPPHLPAPKSPCEGTECQNGANCVDQGNRPVCQCLPGFGGPECEKLLSVNFVDRDTYLQFTDLQNWPRANITLQVSTAEDNGILLYNGDNDHIAVELYQGHVRVSYDPGSYPSSAIYSAETINDGQFHTVELVAFDQMVNLSIDGGSPMTMDNFGKHYTLNSEAPLYVGGMPVDVNSAAFRLWQILNGTGFHGCIRNLYINNELQDFTKTQMKPGVVPGCEPCRKLYCLHGICQPNATPGPMCHCEAGWVGLHCDQPADGPCHGHKCVHGQCVPLDALSYSCQCQDGYSGALCNQSPSAGGTLSGTFTRSRGAMPSARPRAPCHGWSAGARAQARAAARAFG

SEQ ID NO: 86654 - protein, 79 aa, Homo sapiens
MALWRAYQRALAAHPWKVQVLTADFWGGRQHCWPHASSYTCRPRPPGLKDTLPAPHSKKPLLAPLPSAHETQKPQKALW

SEQ ID NO: 86655 - protein, 104 aa, Homo sapiens
MQKYCIYQHFQFQLLIQHLWIAANCDIADERFDATFHTNVLVNSSGHCQYLPPGIFKSSCYIDVRWFPFDVQHCKLKFGSWSYGGWSLDLQMQEADISGYIPNG

SEQ ID NO: 86656 - protein, 364 aa, Homo sapiens
MDAEAEDKTLRTRSKGTEVPMDSLIQELSVAYDCSMAKKRTAEDQALGVPVNKRKSLLMKPRHYSPKADCQEDRSDRTEDDGPLETHGHSTAEEIMIKPMDESLLSTAQENSSRKEDRYSCYQELMVKSLMHLGKFEKNVSVQTVSENLNDSGIQSLKAESDEADECFLIHSDDGRDKIDDSQPPFCSSDDNESNSESAENGWDSGSNFSEETKPPRVPKYVLTDHKKDLLEVPEIKTEGDKFIPCENRCDSETERKDPQNALAEPLDGNAQPSFPDVEEEDSESLAVMTEEGSDLEKAKGNLSLLEQAIALQAERGCVFHNTYKELDRFLLEHLAGERRQTKVIDMGGRQIFNNKHYPPIKLC

SEQ ID NO: 86657 - protein, 120 aa, Homo sapiens
MSGQTLTDRIAAAQYSVTGSAVARAVCKATTHEVMGPKKKHLDYLIQATNETNVNIPQMADTLFERATNSSWVVVFKALVTTHHLMVHGNERFIQYLASRNTLFNLSNFLDKSGSHGPMV

SEQ ID NO: 86658 - protein, 121 aa, Homo sapiens
MLKNIELFDKLSLRFNGRVLFIKDVIGDEICCWSFYGQGRKIAEVCCTSIVYATEKKQTKVEFPEARIYEETLNILLYEAQDGRGPDNALLEATGGAAGRSHHLDEDEERERIERVRRIHI

SEQ ID NO: 86659 - protein, 522 aa, Homo sapiens
MEPEGRGSLFEDSDLLHAGNPKENDVTAVLLTPGSQELMIRDMAEALTQWRQLNSPQGDVPEKPRNLVLLGLPISTPDVISQLEHEEELEREVSKAASQKHWETIPESKELTPEKDISEEESAPGVLIVRFSKESSSECEDSLESQQENHEKHLIQEAVTEKSSRERSYQSDEFRRNCTQRSLLVQQQGERLHHCDSFKNNLKQNSDIIRHERICAGKKPWKCNECEKAFSYYSAFVLHQRIHTGEKPYECNECGKAFSQSIHLTLHQRIHTGEKPYECHECGKAFSHRSALIRHHIIHTGEKPYECNECGKAFNQSSYLTQHQRIHTGEKPYECNECGKAFSQSTFLTQHQVIHTGEKPYKCNECGKAFSDRSGLIQHQRTHTGERPYECNECGKAFGYCSALTQHQRTHTGEKPYKCNDCAKAFSDRSALIRHQRTHTGEKPYKCKDCGKAFSQSSSLTKHQKTHTGEKPYKCKECGKAFSQSSSLSQHQKTHAGVKTKKYVQALSEHLTFGQHKRIHTG

SEQ ID NO: 86660 - protein, 132 aa, Homo sapiens
MLEEPRPRPPPSGLAGLLFLALCSRALSNEILGLKLPGEPPLTANTVCLTLSGLSKRQLGLCLRNPDVTASALQGLHIAVHECQHQLRDQRWNCSALEGGGRLPHHSAILKRGPGVGEGLDTQMVSEKVLFP

SEQ ID NO: 86661 - protein, 1904 aa, Homo sapiens
MKRKERIARRLEGIENDTQPILLQSCTGLVTHRLLEEDTPRYMRASDPASPHIGRSNEEEETSDSSLEKQTRSKYCTETSGVHGDSPYGSGTMDTHSLESKAERIARYKAERRRQLAEKYGLTLDPEADSEYLSRYTKSRKEPDAVEKRGGKSDKQEESSRDASSLYPGTETMGLRTCAGESKDYALHVGDGSSDPEVLLNIENQRRGQELSATRQAHDLSPAAESSSTFSFSGRDSSFTEVPRSPKHAHSSSLQQAASRSPSFGDPQLSPEARPSTGKPKHEWFLQKDSEGDTPSLINWPSSKSRVERSAEGPGLPTGVERERGSRKPRRYFSPGESRKTSERFRTQPITSAERKESDRCTSHSETPTVDDEEKVDERAKLSVAAKRLLFREMEKSFDEQNVPKRRSRNTAVEQRLRRLQDRSLTQPITTEEVVIAATEPIPASCSGGTHPVMARLPSPTVARSAVQPARLQASAHQKALAKDQTNEGKELAEQGEPDSSTLSLAEKLALFNKLSQPVSKAISTRNRIDTRQRRMNARYQTQPVTLGEVEQVQSGKLIPFSPAVNTSVSTVASTVAPMYAGDLRTKPPLDHNASATDYKFSSSIENSDSPVRSILKSQAWQPLVEGSENKGMLREYGETESKRALTGRDSGMEKYGSFEEAEASYPILNRAREGDSHKESKYAVPRRGSLERANPPITHLGDEPKEFSMAKMNAQGNLDLRDRLPFEEKVEVENVMKRKFSLRAAEFGEPTSEQTGTAAGKTIAQTTAPVSWKPQDSSEQPQEKLCKNPCAMFAAGEIKTPTGEGLLDSPSKTMSIKERLALLKKSGEEDWRNRLSRRQEGGKAPASSLHTQEAGRSLIKKRVTESRESQMTIEERKQLITVREEAWKTRGRGAANDSTQFTVAGRMVKKGLASPTAITPVASPICGKTRGTTPVSKPLEDIEARPDMQLESDLKLDRLETFLRRLNNKVGGMHETVLTVTGKSVKEVMKPDDDETFAKFYRSVDYNMPRSPVEMDEDFDVIFDPYAPKLTSSVAEHKRAVRPKRRVQASKNPLKMLAAREDLLQEYTEQRLNVAFMESKRMKVEKMSSNSNFSEVTLAGLASKENFSNVSLRSVNLTEQNSNNSAVPYKRLMLLQIKGRRHVQTRLVEPRASALNSGDCFLLLSPHCCFLWVGEFANVIEKAKASELATLIQTKRELGCRATYIQTIEEGINTHTHAAKDFWKLLGGQTSYQSAGDPKEDELYEAAIIETNCIYRLMDDKLVPDDDYWGKIPKCSLLQPKEVLVFDFGSEVYVWHGKEVTLAQRKIAFQLAKHLWNGTFDYENCDINPLDPGECNPLIPRKGQGRPDWAIFGRLTEHNETILFKEKFLDWTELKRSNEKNPGELAQHKEDPRTDVKAYDVTRMVSMPQTTAGTILDGVNVGRGYGLVEGHDRRQFEITSVSVDVWHILEFDYSRLPKQSIGQFHEGDAYVVKWKFMVSTAVGSRQKGEHSVRAAGKEKCVYFFWQGRHSTVSEKGTSALMTVELDEERGAQVQVLQGKEPPCFLQCFQGGMVVHSGRREEEEENVQSEWRLYCVRGEVPVEGNLLEVACHCSSLRSRTSMVVLNVNKALIYLWHGCKAQAHTKEVGRTAANKIKEQCPLEAGLHSSSKVTIHECDEGSEPLGFWDALGRRDRKAYDCMLQDPGSFNFAPRLFILSSSSGDFAATEFVYPARAPSVVSSMPFLQEDLYSAPQPALFLVDNHHEVYLWQGWWPIENKITGSARIRWASDRKSAMETVLQYCKGKNLKKPAPKSYLIHAGLEPLTFTNMFPSWEHREDIAEITEMDTEVSNQITLVEDVLAKLCKTIYPLADLLARPLPEGVDPLKLEIYLTDEDFEFALDMTRDEYNALPAWKQVNLKKAKGLF

SEQ ID NO: 86662 - protein, 100 aa, Homo sapiens
MWRCGGRQGLCVLRRLSGGLALSPRLECSGVISAHCSLHFPGSSDSPASASQVSGTTGTCHHIRLIFGQAGLELLTSDMHTTERGDGTVTGLVRGLCSIN

SEQ ID NO: 86663 - protein, 160 aa, Homo sapiens
MPPNINWKEIMKVDPDDLPRQEELADNLLISLSKVEVNELKSEKQENVIHLFRITQSLMKMKAQEVELALEEVEKAGEEQAKFENQLKTKVMKLENELEMAQQSAGGRDTRFLRNEICQLEKQLEQKDRELEDMEKELEKEKKVNDWLFEMRRQKMKTAN

SEQ ID NO: 86664 - protein, 646 aa, Homo sapiens
MADKEAGGSDGPRETAPTSAYSSPARSLGDTGITPLSPSHIVNDTDSNVSEQQSFLVVVAVDFGTTSSGYAYSFTKEPECIHVMRRWEGGDPGVSNQKTPTTILLTPERKFHSFGYAARDFYHDLDPNEAKQWLYLEKFKMKLHTTGDLTMDTDLTAANGKKVKALEIFAYALQYFKEQALKELSDQAGSEFENSDVRWVITVPAIWKQPAKQFMRQAAYQAGLASPENSEQLIIALEPEAASIYCRKLRLHQMIELSSKAAVNGYSGSDTVGAGFTQGDKYVVVDSGGGTVDLTVHQIRLPEGHLKELYKATGGPYGSLGVDYEFEKLLYKIFGEDFIEQFKIKRPAAWVDLMIAFESRKRAAAPDRTNPLNITLPFSFIDYYKKFRGHSVEHALRKSNVDFVKWSSQGMLRMSPDAMNALFKPTIDSIIEHLRDLFQKPEVSTVKFLFLVGGFAEAPLLQQAVQAAFGDQCRIIIPQDVGLTILKGAVLFGLDPAVIKVRRSPLTYGVGVLNRYVEGKHPPEKLLVKDGTRWCTDVFDKFISADQSVALGELVKRSYTPAKPSQLVIVINIYSSEHDNVSFITDPGVKKCGTLRLDLTGTSGTAVPARREIQTLMQFGDTEIKATAIDIATSKSVKVGIDFLNY

SEQ ID NO: 86665 - protein, 87 aa, Homo sapiens
  MOD_RES (1)..(1): Any amino acid
XKALEKAGGKEFLETVKELRKSQGPLEVAEDGCLGGGAAAERRALGPDTQEEERPLWETEVLLKENPQCHGNQASAVAASQQDKGPT

SEQ ID NO: 86666 - protein, 20 aa, Homo sapiens
MKTNTEMVCLRNFKRCRPPD

SEQ ID NO: 86667 - protein, 355 aa, Homo sapiens
MEDDLSWRSWSLLCMEILSPMAKGLFHKAIMESGVAIIPYLEAHDYEKSEDLQVVAHFCGNNASDSEALLRCLRTKPSKELLTLSQKTKSFTRVVDGAFFPNEPLDLLSQKAFKAIPSIIGVNNHECGFLLPMEAPEILSGSNKSLALHLIQNILHIPPQYLHLVANEYFHDKHSLTEIRDSLLDLLGDVFFVVPALITARYHRDAGAPVYFYEFRHRPQCFEDTKPAFVKADHADEVRFVFGGAFLKGDIVMFEGATEEEKLLSRKMMKYWATFARTGNPNGNDLSLWPAYNLTEQYLQLDLNMSLGQRLKEPRVEFWTSTIPLILSASDMLHSPLSSLTFLSLLQPFFFFCAP

SEQ ID NO: 86668 - protein, 366 aa, Homo sapiens
MSTLYVSPHPDAFPSLRALIAARYGEAGEGPGWGGAHPRICLQPPPTSRTPFPPPRLPALEQGPGGLWVWGATAVAQLLWPAGLGGPGGSRAAVLVQQWVSYADTELIPAACGATLPALGLRSSAQDPQAVLGALGRALSPLEEWLRLHTYLAGEAPTLADLAAVTALLLPFRYVLDPPARRIWNNVTRWFVTCVRQPEFRAVLGEVVLYSGARPLSHQPGPEAPALPKTAAQLKKEAKKREKLEKFQQKQKIQQQQPPPGEKKPKPEKREKRDPGVITYDLPTPPGEKKDVSGPMPDSYSPRYVEAAWYPWWEQQGFFKPEYGRPNVSAANPRGVFMMCIPPPNVTGSLHLGHALTNAIQDSLTR

SEQ ID NO: 86669 - protein, 66 aa, Homo sapiens
MADQRMDISSTISDFMSPGPTDLLSSSLGTSGVDCNRKRKGSSTDYQSNLGSTMAGGQMPTRRCYD

SEQ ID NO: 86670 - protein, 218 aa, Homo sapiens; identical to SEQ ID NO: 66723
  MOD_RES (1)..(1): Any amino acid

SEQ ID NO: 86671 - protein, 316 aa, Homo sapiens
MKIANNTVVTEFILLGLTQSQDIQLLVFVLILIFYLIILPGNFLIIFTIRSDPGLTAPLYFFLGNLAFLDASYSFIVAPRMLVDFFSEKKVISYRGCITQLFFLHFLGGGEGLLLVVMAFDRYIAICRPLHCSTVMNPRACYAMMLALWLGGFVHSIIQVVLILRLPFCGPNQLDNFFCDVRQVIKLACTDMFVVELLMVFNSGLMTLLCFLGLLASYAVILCHVRRAASEGKNKAMSMCTTRVIIILLMFGPAIFIYMCPFRALPADKMVSLFHTVIFPLMNPMIYTLRNQEVKTSMKRLLSRHVVCQVDFIIRN

SEQ ID NO: 86672 - protein, 37 aa, Homo sapiens
MTPIVTVLICLGLSLGPRTHVQTGTIPKPTLWAEPDS

SEQ ID NO: 86673 - protein, 38 aa, Homo sapiens
AGSPPSASAPAPVSSFSRTSITPSSQDICRICHCEGDD

SEQ ID NO: 86674 - protein, 308 aa, Homo sapiens
MSRINKNVVLALLTLTSSAFLLFQLYYYKHYLSTKNGAGLSKSKGSRIGFDSTQWRAVKKFIMLTSNQNVPVFLIDPLILELINKNFEQVKNTSHGSTSQCKFFCVPRDFTAFALQYHLWKNEEGWFRIAENMGFQCLKIESKDPRLDGIDSLSGTEIPLHYICKLATHAIHLVVFHERSGNYLWHGHLRLKEHIDRKFVPFRKLQFGRYPGAFDRPELQQVTVDGLEVLIPKDPMHFVEEVPHSRFIECRYKEARAFFQVEDSLELSFQGKDDVKLDVFFFYEETDHMWNGGTQAKTGKKFNIQICQ

SEQ ID NO: 86675 - protein, 417 aa, Homo sapiens
  MOD_RES (1)..(1): Any amino acid
XPSCGQSLVKVQPWNYFNIFSRILGGSQVEKGSYPWQVSLKQRQKHICGGSIVSPQWVITAAHCIANRNIVSTLNVTAGEYDLSQTDPGEQTLTIETVIIHPHFSTKKPMDYDIALLKMAGAFQFGHFVGPICLPELREQFEAGFICTTAGWGRLTEGGVLSQVLQEVNLPILTWEECVAALLTLKRPISGKTFLCTGFPDGGRDACQGDSGGSLMCRNKKGAWTLAGVTSWGLGCGRGWRNNVRKSDQGSPGIFTDISKVLPWIHEHIQTGNRRKSSRDSGCSYLTVLFEEGLIQSLNYPENYSDKANCDWIFQASKHHLIKLSFQSLEIEESGDCTSDYVTVHSDVERKKEIARLCGYDVPTPVLSPSSIMLISFQSDENGTCRGFQATVSFIPKAVYPDLNISISEDESMFLET

SEQ ID NO: 86676 - protein, 125 aa, Homo sapiens
  MOD_RES (1)..(1): Any amino acid
XNMFPPNLVEACFKQVCPRGYSLPDCWEDCGDGRHGCDWGAACHVHRDCHCWLTHSRSHRLATPLLLGNTEKPLGFYWRVAASTHHRSGDLFKFCHPTHHLQVPGREQWRGQARHQIRAPRRSHH

SEQ ID NO: 86677 - protein, 124 aa, Homo sapiens
MKDSCITVMAMALLSGFFFFERPNGKLYPQALGRAFRALGGPGVAPSIFPEVNALEGKRRRRPRATTWTCGARGASPHRAPGGTLDTASCRSETGSSWELQGRGTAQEASISASRAQDTACQSP

SEQ ID NO: 86678 - protein, 28 aa, Homo sapiens
VEDFVDPNGKISLQREETPSNRNVTQKK

SEQ ID NO: 86679 - protein, 225 aa, Homo sapiens; identical to SEQ ID NO: 43850
  MOD_RES (1)..(1): Any amino acid

SEQ ID NO: 86680 - protein, 225 aa, Homo sapiens; identical to SEQ ID NO: 43850
  MOD_RES (1)..(1): Any amino acid

SEQ ID NO: 86681 - protein, 420 aa, Homo sapiens
MGITLHLLLHSDRDPIPDVPAVYFVMPTEENIDRMCQDLRNQLYESYYLNFISAISRSKLEDIANAALAASAVTQVAKVFDQYLNFITLEDDMFVLCNQNKELVSYRAINRPDITDTEMETVMDTIVDSLFCFFVTLGAVPIIRCSRGTAAEMVAVKLDKKLRENLRDARNSLFTGDTLGAGQFSFQRPLLVLVDRNIDLATPLHHTWTYQALVHDVLDFHLNRVNLEESSGVENSPAGARPKRKNKKSYDLTPVDKFWQKHKGSPFPEVAESVQQELESYRAQEDEVKRLKSIMGLEGEDEGAISMLSDNTAKLTSAVSSLPELLEKKRLIDLHTNVATAVLEHIKARKLDVYFEYEEKIMSKTTLDKSLLDIISDPDAGTPEDKMRLFLIYYISTQQAPSEGFYQDGLSSGQLWQHYH

SEQ ID NO: 86682 - protein, 137 aa, Homo sapiens
MAPPLRPLARLRPPGMLLRALLLLLLLSPLPGVWCFSELSFVKEPQDVTVTRKDPVVLDCQAHGEVPIKVTWLKNGAKMSENKRIEVLSNGSLYISEVEGRRGEQSDEGFYQCLAMNKYGAILSQKAHLALSRIGST

SEQ ID NO: 86683 - protein, 356 aa, Homo sapiens
MTSRKNGGGAHSWQETPWEQRRALGLQRAEMTMTANKNSSITHGAGGTKAPRGTLSRKSFEFEDASSLQSLYPSSPTENGTENQPKFGSKSTLEENAYEDIVGDLPKENPYEDVDLKSRRAGRKSQQLSENSLDSLHRMWSPQDRKYNSPPTQLSLKPNSQSLRSGNWSERKSHRLPRLPKRHSHDDMLLLAQLSLPSSPSSLNEDSLSTTSELLSSRRARRIPKLVQRINSIYNAKRGKKRLKKLSMSSIETASLRDENSESESDSDDRFKAHTQRLVHIQSMLKRAPSYRTLELELLEWQERELFEYFVVVSLKKKPSRNTYLPEVSYQFPKECAFSSSSRGCWLLLISQALLK

SEQ ID NO: 86684 - protein, 575 aa, Homo sapiens
MLDHQEDGGEALRAWRASWRLSWEQLQPCLDRAATLASRRDLFFRQALHKARHVLEARQDLSLRPLIWAAVREGCPGPLLATLDQAGAGDPGVAARALACVADVLGCMAEGRGGLRSGPAANPEWMRPFSYLECGDLAAGVEALAQERDKWLSRPALLVRAARHYEGAGQILIRQAVMSAQHFVSTEQVELPGPGQWVVAECPARVDFSGGWSDTPPLAYELGGAVLGLAVRVDGRRPIGARARRIPEPELWLAVGPRQDEMTVKIVCRCLADLRDYCQPHAPGALLKAAFICAGIVHVHSELQLSEQLLRTFGGGFELHTWSELPHGSGLGTSSILAGTALAALQRAAGRVVGTEALIHAVLHLEQVLTTGGGWQDQVGGLMPGIKVGRSRAQLPLKVEVEEVTVPEGFVQKLNDHLLLVYTGKTRLARNLLQDVLRSWYARLPAVVQNAHSLVRQTEECAEGFRQGSLPLLGQCLTSYWEQKKLMAPGCEPLTVRRMMDVLAPHVHGQSLAGAGGGGFLYLLTKEPQQKEALEAVLAKTEGLGNYSIHLVEVDTQGLSLKLLGTEASTCCPFP

SEQ ID NO: 86685 - protein, 243 aa, Homo sapiens
MCNTNMSVPTDGAVTTSQIPASEQETLVRPKPLLLKLLKSVGAQKDTYTMKEDYWKCTSCNEMNPPLPSHCNRCWALRENWLPEDKGKDKGEISEKAKLENSTQAEEGFDVPDCKKTIVNDSRESCVEENDDKITQASQSQESEDYSQPSTSSSIIYSSQEDVKEFEREETQDKEESVESSLPLNAIEPCVICQGRPKNGCIVHGKTGHLMACFTCAKKLKKRNKPCPVCRQPIQMIVLTYFP

SEQ ID NO: 86686 - protein, 169 aa, Homo sapiens
MADHSFSDGVPSDSVEAAKNASNTEKLTDQVMQNPRVLAALQERLDNVPHTPSSYIETHEDVVFLTPFFSLPKAVKRRINALKQLQVRCAHIEAKFYEEVHDLERKYAALYQPLFDKRREFITGDVEPTDAESEWHSENEEEEKLAGDMKSKVVVTEKAAATAEEPDPK

SEQ ID NO: 86687 - protein, 504 aa, Homo sapiens
MPCFTHRSCREDPGTSESREMDPVAFKDVAVNFTQEEWALLDISQKNLYREVMLETFWNLTSIGKKWKDQNIEYEYQNPRRNFRSVTEEKVNEIKEDSHCGETFTPVPDDRLNFQKKKASPEVKSCDSFVCEVGLGNSSSNMNIRGDTGHKACECQEYGPKPWKSQQPKKAFRYHPSLRTQERDHTGKKPYACKECGKNIIYHSSIQRHMVVHSGDGPYKCKFCGKAFHCLSLYLIHERTHTGEKPYECKQCGKSFSYSATHRIHERTHIGEKPYECQECGKAFHSPRSCHRHERSHMGEKAYQCKECGKAFMCPRYVRRHERTHSRKKLYECKQCGKALSSLTSFQTHIRMHSGERPYECKTCGKGFYSAKSFQRHEKTHSGEKPYKCKQCGKAFTRSGSFRYHERTHTGEKPYECKQCGKAFRSAPNLQLHGRTHTGEKPYQCKECGKAFRSASQLRIHRRIHTGEKPYECKKCGKAFRYVQNFRFHERTQTHKNALWRKTL

SEQ ID NO: 86688 - protein, 93 aa, Homo sapiens
MLGLWGQRLPAAWVLLLLPFLPLLLLAAPAPHRESYKPVIVVHGLFDSSYSFRHLLEYINEGALCAGLCFLSWMITTWILSSPSPLHRWDSME

SEQ ID NO: 86689 - protein, 417 aa, Homo sapiens
MARAMAAAWPLLLVALLVLSWPPPGTGDVVVQAPTQVPGFLGDSVTLPCYLQVPNMEVTHVSQLTWARHGESGSMAVFHQTQGPSYSESKRLEFVAARLGAELRNASLRMFGLRVEDEGNYTCLFVTFPQGSRSVDIWLRVLAKPQNTAEVQKVQLTGEPVPMARCVSTGGRPPAQITWHSDLGGMPNTSQVPGFLSGTVTVTSLWILVPSSQVDGKNVTCKVEHESFEKPQLLTVNLTVYYPPEVSISGYDNNWYLGQNEATLTCDARSNPEPTGYNWSTTMGPLPPFAVAQGAQLLIRPVDKPINTTLICNVTNALGARQAELTVQVKEGPPSEHSGMSRNAIIFLVLGILVFLILLGIGIYFYWSKCSREVLWHCHLCPSSTEHASASANGHVSYSAVSRENSSSQDPQTEGTR

SEQ ID NO: 86690 - protein, 977 aa, Homo sapiens
MASTRCKLARYLEDLEDVDLKKFKMHLEDYPPQKGCIPLPRGQTEKADHVDLATLMIDFNGEEKAWAMAVWIFAAINRRDLYEKAKRDEPKWGSDNARVSNPTVICQEDSIEEEWMGLLEYLSRISICKMKKDYRKKYRKYVRSRFQCIEDRNARLGESVSLNKRYTRLRLIKEHRSQQEREQELLAIGKTKTCESPVSPIKMELLFDPDDEHSEPVHTVVFQGAAGIGKTILARKMMLDWASGTLYQDRFDYLFYIHCREVSLVTQRSLGDLIMSCCPDPNPPIHKIVRKPSRILFLMDGFDELQGAFDEHIGPLCTDWQKAERGDILLSSLIRKKLLPEASLLITTRPVALEKLQHLLDHPRHVEILGFSEAKRKEYFFKYFSDEAQARAAFSLIQENEVLFTMCFIPLVCWIVCTGLKQQMESGKSLAQTSKTTTAVYVFFLSSLLQPRGGSQEHGLCAHLWGLCSLAADGIWNQKILFEESDLRNHGLQKADVSAFLRMNLFQKEVDCEKFYSFIHMTFQEFFAAMYYLLEEEKEGRTNVPGSRLKLPSRDVTVLLENYGKFEKGYLIFVVRFLFGLVNQERTSYLEKKLSCKISQQIRLELLKWIEVKAKAKKLQIQPSQLELFYCLYEMQEEDFVQRAMDYFPKIEINLSTRMDHMVSSFCIENCHRVESLSLGFLHNMPKEEEEEEKEGRHLDMVQCVLPSSSHAACSHGLGRCGLSHECCFDISLVLSSNQKLVELDLSDNALGDFGIRLLCVGLKHLLCNLKKLWLVSCCLTSACCQDLASVLSTSHSLTRLYVGENALGDSGVAILCEKAKNPQCNLQKLGLVNSGLTSVCCSALSSVLSTNQNLTHLYLRGNTLGDKGIKLLCEGLLHPDCKLQVLELDNCNLTSHCCWDLSTLLTSSQSLRKLSLGNNDLGDLGVMMFCEVLKQQSCLLQNLGLSEMYFNYETKSALETLQEEKPELTVVFEPSW

SEQ ID NO: 86691 - protein, 345 aa, Homo sapiens
MDSALSDPHNGSAEAGGPTNSTTRPPSTPEGIALAYGSLLLMALLPIFFGALRSVRCARGKNASDMPETITSRDAARFPIIASCTLLGLYLFFKIFSQEYINLLLSMYFFVLGILALSHTISPFMNKFFPASFPNRQYQLLFTQGSGENKEEIINYEFDTKDLVCLGLSSIVGVWYLLRKHWIANNLFGLAFSLNGVELLHLNNVSTGCILLGGLFIYDVFWVFGTNVMVTVAKSFEAPIKLVFPQDLLEKGLEANNFAMLGLGDVVIPGIFIALLLRFDISLKKNTHTYFYTSFAAYIFGLGLTIFIMHIFKHAQPALLYLVPACIGFPVLVALAKGEVTEMFS

SEQ ID NO: 86692 - protein, 35 aa, Homo sapiens
MMSYLKQPPYAVNGLSLTTSGMDLLHPSVGYPGMV

SEQ ID NO: 86693 - protein, 274 aa, Homo sapiens
MDVDSTISSGRSTPAMMNGQGSTTSSSKNIAYNCCWDQCQACFNSSPDLADHIRSIHVDGQRGGVFVCLWKGCKVYNTPSTSQSWLQRHMLTHSGDKPFKCVVGGCNASFASQGGLARHVPTHFSQQNSSKVSSQPKAKEESPSKAGMNKRRKLKNKRRRSLPRPHDFFDAQTLDAIRHRAICFNLSAHIESLGKGHSVVFHSTVIAKRKEDSGKIKLLLHWMPEDILPDVWVNESERHQLKTKVVHLSKLPKDTALLLDPNIYRTMPQKRLKR

SEQ ID NO: 86694 - protein, 129 aa, Homo sapiens
MAKYLAQIIVMGVQVVGRAFARALRQEFAASRAAADARGRAGHRSAAASNLSGLSLQEAQQILNVSKLSPEEVQKNYEHLFKVNDKSVGGSFYLQSKRSGLSMLPKLISNSWPQAILLPWPPKTLGLHA

SEQ ID NO: 86695 - protein, 106 aa, Homo sapiens
MGLSDGEWQLVLNVWGKVEADIPGHGQEVLIRLFKGHPETLEKFDKFKHLKSEDEMKASEDLKKHGATVLTALGGILKKKGHHEAEIKPLAQSHATKHKIPVKYLE

SEQ ID NO: 86696 - protein, 144 aa, Homo sapiens
MYLQGPRKLMTQGGYDMVQKLFLDFFRRRLSQRPTAEELEQRNILKPRNEQEEQEEKREIKRRLTRKLSQRPTVEELRERKILIRFSDYVEVADAQDYDRRADKPWTRLTAADKAAIRKELNEFKSTEMEVHELSRHLTRFHRP

SEQ ID NO: 86697 - protein, 67 aa, Homo sapiens
EFLDTKDRQAEEDRQMDTEAAASEAPQDVTYAQLHSLTLRREATEPPPSQEGPSPAVPSIYATLAIH

SEQ ID NO: 86698 - protein, 63 aa, Homo sapiens
MRPQDSTGVAELQEPGLPLTDDAPPGATEEPAAAEAAGAPDRGRCWLCLSSPCCSRTEPATLL

SEQ ID NO: 86699 - protein, 76 aa, Homo sapiens
MVHGSVTFRDVAIDFSQEEWECLQPDQRTLYRDVMLENYSHLISLGSSISKPDVITLLEQEKEPWIVVSKETSRWY

SEQ ID NO: 86700 - protein, 50 aa, Homo sapiens
MTKKTRDLRRQLRKAVMDHVSDSFLETNVPLLVLIEAAKNGNEKEVKEYA

SEQ ID NO: 86701 - protein, 182 aa, Homo sapiens
MMQESPDPEDDETPTQSDRLSMLSQEIQTLKRSSTGSYEERVKRLSVSELNEILEEIETAIKEYSEELVQQLALRDELEFEKEVKNSFISVLIEVQNKQKEHKETAKKKKKLKNGSSQNGKNERSHMPGTYLTTVIPYEKKNGPPSVEDLQILTKILRAMKEDSEKVPSLLTDYILKVLCPT

SEQ ID NO: 86702 - protein, 478 aa, Homo sapiens
MAAAREPELPQEAPATEPAPPPACRFFLEGRCRFGARCRQPHPGAPAPPGREAQPEAGAKKPPLRTAADVIQRIRWDPRLDPADFSVGYVDRFLGVREEPFSAFCWDQPLAALGPGVLAVPQHRVRFFRFRGRLVWDRASRTDLVFGSGSAAGRGPTILDAPNTEGAHGAEGAEWTLAGTGQEAQAAPKRGSTRPLCTGHQEPGVEEPGELEAAQERALGTAADLGTLAPRGRLAGVTEALKPTAATRTTLLGGKEAQALGVPGGSAETTEAEWGPAAWPEDKRARLSVAAPCQPRPTHFVALMVTEPGLQAEVTKAQEYLVHVAPHCANFLVPSQNLHLTLALLRLAGAGEEAAAIGALRRALLAPGLNAPPRLSFRKLVLLGPHVLCAPPSPTLESMAQVLSQRLEAEGLSTLQSPGQLHPHLTVAKVPHGSQVHLPKLEFTLSQEVGCQPLQTLWLCRIGRTGGPFQPLAEIPLE

SEQ ID NO: 86703 - protein, 703 aa, Homo sapiens
MCVFLHLLSYIKDTSFIPGPDCELHPRGMAATGPCSEAPVQGCDAGELQQLGLCGVSDVQRSWSKFCNFPLTGYHVSKPDVIFKLEQGEEPWIVEEFSNQNYPDIDDALEKNKEIQDKHLTQTVFFSNKTLITERENVFGKTLNLGMNSVPSRKMPYKCNPGGNSLKTNSEVIVAKKSKENRKIPDGYSGFGKHEKSHLGMKKYRYNPMRKASNQNENLILHQNIQILKQPFDYNKCGKTFFKRAILITQKGRQTERKPNECNECRKTFSKRSTLIVHQRIHTGEKPYVCSDCRKTFRVKTSLTRHRRIHTGERPYECSECRKTFIDKSALIVHQKIHGGEKSYECNECGKTFFRKSALAEHFRSHTGEKPYECKECGNAFSKKSYLVVHQRTHRGEKPNECKECGKTFFCQSALTAHQRIHTGEKPYECSECEKTFFCQSALNVHRRSHTGEKPYECSQCGKFLCTKSALIAHQITHRGKKSYECNECGKFFCHKSTLTIHQRTHTGEKHGVFNKCGRISIVKSNCSQCKRMNTKENLYECSEHGHAVSKNSHLIVHQRTIWERPYECNECGRTYCRKSALTHHQRTHTGQRPYECNECGKTFCQKFSFVEHQRTHTGEKPYECNECGKSFCHKSAFRVHRRIHTGEKPYECNQCGKTYRRLWTLTEHQKIHTGEKPYECNKCEKTFRHKSNFLLHQKSHKE

SEQ ID NO: 86704 - protein, 779 aa, Homo sapiens
MEEQGHSEMEIIPSESHPHIQLLKSNRELLVTHIRNTQCLVDNLLKNDYFSAEDAEIVCACPTQPDKVRKILDLVQSKGEEVSEFFLYLLQQLADAYVDLRPWLLEIGFSPSLLTQSKVVVNTDPVSRYTQQLRHHLGRDSKFVLCYAQKEELLLEEIYMDTIMELVGFSNESLGSLNSLACLLDHTTGILNEQGETIFILGDAGVGKSMLLQRLQSLWATGRLDAGVKFFFHFRCRMFSCFKESDRLCLQDLLFKHYCYPERDPEEVFAFLLRFPHVALFTFDGLDELHSDLDLSRVPDSSCPWEPAHPLVLLANLLSGKLLKGASKLLTARTGIEVPRQFLRKKVLLRGFSPSHLRAYARRMFPERALQDRLLSQLEANPNLCSLCSVPLFCWIIFRCFQHFRAAFEGSPQLPDCTMTLTDVFLLVTEVHLNRMQPSSLVQRNTRSPVETLHAGRDTLCSLGQVAHRGMEKSLFVFTQEEVQASGLQERDMQLGFLRALPELGPGGDQQSYEFFHLTLQAFFTAFFLVLDDRVGTQELLRFFQEWMPPAGAATTSCYPPFLPFQCLQGSGPAREDLFKNKDHFQFTNLFLCGLLSKAKQKLLRHLVPAAALRRKRKALWAHLFSSLRGYLKSLPRVQVESFNQVQAMPTFIWMLRCIYETQSQKVGQLAARGICANYLKLTYCNACSADCSALSFVLHHFPKRLALDLDNNNLNDYGVRELQPCFSRLTVLRLSVNQITDGGVKVLSEELTKYKIVTYLGLWKSVDTICFKKQGLLK

SEQ ID NO: 86705 - protein, 203 aa, Homo sapiens
MAQWEMLQNLDSPFQDQLHQLYSHSLLPVDIRQYLAVWIEDQNWQEAALGSDDSKATMLFFHFLDQLNYECGRCSQDPESLLLQHNLRKFCRDIQPFSQDPTQLAEMIFNLLLEEKRILIQAQRAQLEQGEPVLETPVESQQHEIESRILDLRAMMEKLVKSISQLKDQQDVFCFRYKIQAKGRKHIEGLEKDKCLLRSRSWK

SEQ ID NO: 86706 - protein, 16 aa, Homo sapiens
LISNVYGRSTSLKVVL

SEQ ID NO: 86707 - protein, 81 aa, Homo sapiens
  MOD_RES (1)..(1): Any amino acid
XEQKRQNPGSVGQKYSEQINNFGQSVLLSSSEPKQTTRGTSYIEEDIQESICKNPSIKNTLQIIPLLEKREDRTSSCRDKR

SEQ ID NO: 86708 - protein, 317 aa, Homo sapiens
MVKLSIVLTPRFLSHDQGQLTKELQQHVKSVTCPCEYLRKVINTLADHRHRGTDFGGSPWLLIITVFLRSYKFAISLCTSYLCVSFLKTIFPSQNGHDGSTDVQQRARRSNRRRQEGIKIVLEDIFTLWRQVETKVRAKICKMKVTTKVNRHDKINGKRKTAKEHLRKLSMKEREHGEKERQVSEAEENGKLDMKEIHTYMEMFQRAQALRRRAEDYYRCKITPSARKPLCNRVSLLVFLAFGHSLPGQDMDTFFSLRLCAQALQREMAERKAAYKHHSPIPVGNRVAQKHLHPHPVGPPSNILSVRGSVFVIANGP

SEQ ID NO: 86709 - protein, 94 aa, Homo sapiens
MGGAVSAGEDNDELIDNLKEAQYIRTELVEQAFRAIDRADYYLEEFKENAYKDLAWKHGNIHLSAPCIYSEVMEALDLQPGLSFLNLGSGTGYL

SEQ ID NO: 86710 - protein, 185 aa, Homo sapiens
MGTQEGWCLLLCLALSGAAETMDLVQIPQAEALLHADCSGKEVTCEISRYFLQMTETTVKTAAWFMANMQVSGGGPSISLVMKTPRVTKNEALWHPTLNLPLSPQGTVRTAVEFQVMTQTQSLSFLLGSSASLDCGFSMAPGLDLISVEWRLQHKGRGRGDLHLPDHHLSVPSSADHPAQHPSFP

SEQ ID NO: 86711 - protein, 1208 aa, Homo sapiens
MANGGGGGGGSSGGGGGGGGSSLRMSSNIHANHLSLDASSSSSSSSSSSSSSSSSSSSSSVHEPKMDALIIPVTMEVPCDSRGQRMWWAFLASSMVTFFGGLFIILLWRTLKYLWTVCCHCGGKTKEAQKINNGSSQADGTLKPVDEKEEAVAAEVGWMTSVKDWAGVMISAQTLTGRVLVVLVFALSIGALVIYFIDSSNPIESCQNFYKDFTLQIDMAFNVFFLLYFGLRFIAANDKLWFWLEVNSVVDFFTVPPVFVSVYLNRSWLGLRFLRALRLIQFSEILQFLNILKTSNSIKLVNLLSIFISTWLTAAGFIHLVENSGDPWENFQNNQALTYWECVYLLMVTMSTVGYGDVYAKTTLGRLFMVFFILGGLAMFASYVPEIIELIGNRKKYGGSYSAVSGRKHIVVCGHITLESVSNFLKDFLHKDRDDVNVEIVFLHNISPNLELEALFKRHFTQVEFYQGSVLNPHDLARVKIESADACLILANKYCADPDAEDASNIMRVISIKNYHPKIRIITQMLQYHNKAHLLNIPSWNWKEGDDAICLAELKLGFIAQSCLAQGLSTMLANLFSMRSFIKIEEDTWQKYYLEGVSNEMYTEYLSSAFVGLSFPTVCELCFVKLKLLMIAIEYKSANRESRILINPGNHLKIQEGTLGFFIASDAKEVKRAFFYCKACHDDITDPKRIKKCGCKRLIYFEDEQPSTLSPKKKQRNGGMRNSPNTSPKLMRHDPLLIPGNDQIDNMDSNVKKYDSTGMFHWCAPKEIEKVILTRSEAAMTVLSGHVVVCIFGDVSSALIGLRNLVMPLRASNFHYHELKHIVFVGSIEYLKREWETLHNFPKVSILPGTPLSRADLRAVNINLCDMCVILSANQNNIDDTSLQDKECILASLNIKSMQFDDSIGVLQANSQGFTPPGMDRSSPDNSPVHGMLRQPSITTGVNIPIITELAKPGKLPLVSVNQEKNSGTHILMITELVNDTNVQFLDQDDDDDPDTELYLTQPFACGTAFAVSVLDSLMSATYFNDNILTLIRTLVTGGATPELEALIAEENALRGGYSTPQTLANRDRCRVAQLALLDGPFADLGDGGCYGDLFCKALKTYNMLCFGIYRLRDAHLSTPSQCTKRYVITNPPYEFELVPTDLIFCLMQFDHNAGQSRASLSHSSHSSQSSSKKSSSVHSIPSTANRQNRPKSRESRDKQKYVQEERL

SEQ ID NO: 86712 - protein, 294 aa, Homo sapiens
GGQDKPFLSARPSTVVPRGGHVALQCHYRRGFNNFMLYKEDRSHVPIFHGRIFQESFIMGPVTPAHAGTYRCRGSRPHSLTGWSTPSNPLVIMVTGNHRKPSLLAHPGPLLKSGETVILQCWSDVMFEHFFLHREGISEDPSRLVGQIHDGVSKANFSIGPLMPVLAGTYRCYGSVPHSPYQLSAPSDPLDIVITGLYEKPSLSAQPGPTVQAGENVTLSCSSWSSYDIYHLSREGEAHERRLRAVPKVNRTFQADFPLGPATHGGTYRCFGSFRALPCVWSNSSDPLLVSVTG

SEQ ID NO: 86713 - protein, 253 aa, Homo sapiens
MFGMQGDVFGLRATFMEGLQYMELIPKEKQPVTGTEGAFYRRRQLMHQLPIYDQDPSRCRGLLENELKLMEEFVKQYKSEALGVGEVALPGQGGLPKEEGKQQEKPEGAETTAATTNGSLSDPSKEVEYVCELCKGAAPPDSPVVYSDRAGYNKQWHPTCFVCAKCSEPLVDLIYFWKDGAPWCGRHYCESLRPRCSGCDEIIFAEDYQRVEDLAWHRKHFVCEGCEQLLSGRAYIVTKGQLLCPTCSKSKRS

SEQ ID NO: 86714 - protein, 393 aa, Homo sapiens
MAELQMLLEEEIPSGKRALIESYQNLTRVADYCENNYIQATDKRKALEETKAYTTQSLASVAYQINALANNVLQLLDIQASQLRRMESSINHISQTVDIHKEKVARREIGILTTNKNTSRTHKIIAPANMERPVRYIRKPIDYTVLDDVGHGVKWLKAKHGNNQPARTGTLSRTNPPTQKPPSPPMSGRGTLGRNTPYKTLEPVKPPTVPNDYMTSPARLGSQHSPGRTASLNQRPRTHSGSSGGSGSRENSGSSSIGIPIAVPTPSPPTIGPVADSPTPPPPPPPDDIPMFDDSPPPPPPPPVDYEDEEAAVVQYNDPYADGDPAWAPKNYIEKVVAIYDYTKDKDDELSFMEGAIIYVIKKNDDGWYEGVCNRVTGLFPGNYVESIMHYTD

SEQ ID NO: 86715 - protein, 285 aa, Homo sapiens
MLSAAHDILSHKRTSGNQSHVDPGPTPIPHNSSSRFDCNSVSTAPPGSRQWDLCCWKLRPGCLFSFCGDQPVCYFLLLTSPEAQDPGGEEEAESAARQPLIRTEAPESKPGSSSSLSLRERWTVFKGLLWYIVPLVVVYFAEYFINQGLFELLFFWNTSLSHAQQYRWYQMLYQAGVFASRSSLRCCRIRFTWALALLQCLNLVFLLADVWFGFLPSIYLVFLIILYEGLLGGAAYVNTFHNIALETSDEHREFAMAATCISDTLGISLSGLLALPLHDFLCQLS

SEQ ID NO: 86716 - protein, 605 aa, Homo sapiens
MFSCFCFSLQDNSFSSTTVTECDEDPVSLHEDQTDCSSLRDENNKENYPDAGALVEEHAPPSWEPQQQNVEATVLVDSVLRPSMGNFKSRKPKSIFKAESGRSHGESQETEHVVSSQSECQVRAGTPAHESPQNNAFKCQETVRLQPRIDQRTAISPKDAFETRQDLNENSLLKLQALESDLCSAFLTNQEEAAQVHGVKDPAPASTQSVLADGTDSADPSPVHKDGQNEADSAPEDLHSVGTSRLLYHITDGDNPLLSPRCSIFSQSQRFNLDPESAPSPPSTQQFMMPRSSSRCSCGDGKEPQTITQLTKHIQSLKRKIRKFEEKFEQEKKYRPSHGDKTSNPEVLKWMNDLAKGRKQLKELKLKLSEEQGSAPKGPPRNLLCEQPTVPRENGKPEAAGPEPSSSGEETPDAALTCLKERREQLPPQEDSKVTKQDKNLIKPLYDRYRIIKQILSTPSLIPTIEEEDSDEDRPQGSQQPSLADPASHLPVGDHLTYSNETEPVRALLPDEKKEVKPPALSMSNLHEATMPVLLDHLRETRADKKRLRKALREFEEQFFKQTGRSPQKEDRIPMADEYYEYKHIKAKLRLLEVLISKQDVAKTI

SEQ ID NO: 86717 - protein, 394 aa, Homo sapiens
MSDHGDVSLPPEDRVRALSQLGSAVEVNEDIPPRRYFRSGVEIIRMASIYSEEGNIEHAFILYNKYITLFIEKLPKHRDYKSAVIPEKKDTVKKLKEIAFPKAEELKAELLKRYTKEYTEYNEEKKKEAEELARNMAIQQELEKEKQRVAQQKQQQLEQEQFHAFEEMIRNQELEKERLKIVQEFGKPSDCHTTVRPAKPPVVDRSLKPGALSNSESIPTIDGLRHVVVPGRLCPQFLQLASANTARGVETCGILCGKLMRNEFTITHVLIPKQSAGSDYCNTENEEELFLIQDQQGLITLGWIHTHPTQTAFLSSVDLHTHCSYQMMLPESVAIVCSPKFQETGFFKLTDHGLEEISSCRQKGFHPHSKDPPLFCSCSHVTVVDRAVTITDLR

SEQ ID NO: 86718 - protein, 65 aa, Homo sapiens
MAMAKARKPREALLWALSDLEENDFKKLKFYLRDMTLSEGQPPLARGELEGLIPVDLAELLISKY

SEQ ID NO: 86719 - protein, 761 aa, Homo sapiens
MRLTQDPIQVLLIFAKEDSQSDGFWWACDRAGYRCNIARTPESALECFLDKHHEIIVIDHRQTQNFDAEAVCRSIRATNPSEHTVILAVVSRVSDDHEEASVLPLLHAGFNRRFMENSSIIACYNELIQIEHGEVRSQFKLRACNSVFTALDHCHEAIEITSDDHVIQYVNPAFERMMGYHKGELLGKELADLPKSDKNRADLLDTINTCIKKGKEWQGVYYARRKSGDSIQQHVKITPVIGQGGKIRHFVSLKKLCCTTDNNKQIHKIHRDSGDNSQTEPHSFRYKNRRKESIDVKSISSRGSDAPSLQNRRYPSMARIHSMTIEAPITKVINIINAAQENSPVTVAEALDRVLEILRTTELYSPQLGTKDEDPHTSDLVGGLMTDGLRRLSGNEYVFTKNVHQSHSHLAMPITINDVPPCISQLLDNEESWDFNIFELEAITHKRPLVYLGLKVFSRFGVCEFLNCSETTLRAWFQVIEANYHSSNAYHNSTHAADVLHATAFFLGKERVKGSLDQLDEVAALIAATVHDVDHPGRTNSFLCNAGSELAVLYNDTAVLESHHTALAFQLTVKDTKCNIFKNIDRNHYRTLRQAIIDMVLATEMTKHFEHVNKFVNSINKPMAAEIEGSDCECNPAGKNFPENQILIKRMMIKCADVANPCRPLDLCIEWAGRISEEYFAQTDEEKRQGLPVVMPVFDRNTCSIPKSQISFIDYFITDMFDAWDAFAHLPALMQHLADNYKHWKTLDDLKCKSLRLPSDS

SEQ ID NO: 86720 - protein, 149 aa, Homo sapiens
MSLSFCGNNISSYNINDGVLQNSCFVDALNLVPHVFLLFITFPILFIGWGSQSSKVQIHHNTWLHFPGHNLRWILTFALLFVHVCEIAEGIVSDSRRESRHLHLFMPAVMGFVATTTSIVYYHNIETSNFPKLLLGFSHHESKSCYQHS

SEQ ID NO: 86721 - protein, 285 aa, Homo sapiens
MGLGVSAEQPAGGAEGFHLHGDVEPSSPAALAGLRPYTDYVVGSDQILQEPPSYHKKPPGTPPPSALPLGAPPPDALPPGPTPEDSPSLETGSRQSDYMEALLQAPGSSMEDPLPGPGSPSHSAPDPDGLPHFMETPLQPPPPVQRVMDPGFLDVSGISLLDNSNASVWPSLPSSTELTTTAVSTSGPEDICSSSSSHERGGEATWSGSEFEVSFLDSPGAQAQADHLPQLTLPDSLTSAASPEDGLSAELLEAQAEEEPASTEGLDTGTEAEGLDSQAQISTTE

SEQ ID NO: 86722 - protein, 89 aa, Homo sapiens
MQPPPGMPLPPADIGPPPYEPPGHPMPQPGFIPPHMSADGTYMPPGPYPGPGGHTATVLVPSGAATTVTVLQGEIFEGAPVQTVCPHCQ

SEQ ID NO: 86723 - protein, 108 aa, Homo sapiens
MGSRNSSSAGSGSGDPSEGLPRRGAGLRRSEEEEEEDEDVDLAQVLAYLLRRGQVRLVQGGGAANLQFIQALLDSEEENDRAWDGRLGDRYNPPVDATPDTRELEFNE

SEQ ID NO: 86724 - protein, 175 aa, Homo sapiens
MSRVLVPCHVKGSVALQVGDVRTSQGRPGVLVIDVTFPSVAPFELQEITFKNYYTAFLSIRVRQYTSAHTPAKWVTCLRDYCLMPDPHSEEGAQEYVSLFKHQSPSVTFPKWLSHPVPCEQPALLREGLPDPSRVSSEVQQMWALTEMIRASHTSARIGRFDVDGCYDLNLLSYT

SEQ ID NO: 86725 - protein, 4430 aa, Homo sapiens
MKGARWRRVPWVSLSCLCLCLLPHVVPGTTEDTLITGSKTAAPVTSTGSTTATLEGQSTAASSRTSNQDISASSQNHQTKSTETTSKAQTDTLTQMMTSTLFSSPSVHNVMETAPPDEMTTSFPSSVTNTLMMTSKTITMTTSTDSTLGNTEETSTAGTESSTPVTSAVSITAGQEGQSRTTSWRTSIQDTSASSQNHWTRSTQTTRESQTSTLTHRTTSTPSFSPSVHNVTGTVSQKTSPSGETATSSLCSVTNTSMMTSEKITVTTSTGSTLGNPGETSSVPVTGSLMPVTSAALVTFDPEGQSPATFSRTSTQDTTAFSKNHQTQSVETTRVSQINTLNTLTPVTTSTVLSSPSGFNPSGTVSQETFPSGETTTSSPSSVSNTFLVTSKVFRMPTSRDSTLGNTEETSLSVSGTISAITSKVSTIWWSDTLSTALSPSSLPPKISTAFHTQQSEGAETTGRPHERSSFSPGVSQEIFTLHETTTWPSSFSSKGHTTWSQTELPSTSTGAATRLVTGNPSTGTAGTIPRVPSKVSAIGEPGEPTTYSSHSTTLPKTTGAGAQTQWTQETGTTGEALLSSPSYSVTQMIKTATSPSSSPMLDRHTSQQITTAPSTNHSTIHSTSTSPQESPAVSQRGHTQAPQTTQESQTTRSVSPMTDTKTVTTPGSSFTASGHSPSEIVPQDAPTISAATTFAPAPTGDGHTTQAPTTALQAAPSSHDATLGPSGGTSLSKTGALTLANSVVSTPGGPEGQWTSASASTSPDTAAAMTHTHQAESTEASGQTQTSEPASSGSRTTSAGTATPSSSGASGTTPSGSEGISTSGETTRFSSNPSRDSHTTQSTTELLSASASHGAIPVSTGMASSIVPGTFHPTLSEASTAGRPTGQSSPTSPSASPQETAAISRMAQTQRTRTSRGSDTISLASQATDTFSTVPPTPPSITSTGLTSPQTETHTLSPSGSGKTFTTALISNATPLPVTYASSASTGHTTPLHVTDASSVSTGHATPLPVTSPSSVSTGHTTPLPVTDTSSESTGHVTPLPVTSFSSASTGDSTPLPVTDTSSASTGHVTPLPVTSLSSASTGDTTPLPVTDTSSASTGHATSLPVTDTSSVSTGHTTPLPVTDTSSASTGHATSLPVTDTSSVSTGHTTPLHVTDASSASTGQATPLPVTSLSSVSTGDTTPLPVTSPSSASTGHATPLLVTDTSSASTGHATPLPVTDASSVSTDHATSLPVTIPSAASTGHTTPLPVTDTSSASTGQATSLLVTDTSSVSTGDTTPLPVTSTSSASTGHVTPLHVTSPSSASTGHATPLPVTSLSSASTGDTMPLPVTSPSSASTGDTTPLPVTDASSVSTGHTTPLHVTDASSASTGQATPLPVTSLSSVSTGDTTPLPVTSPSSASTGHATPLLVTDTSSASTGHATPLPVTDASSVSTDHATSLPVTIPSAASTGHTTPLPVTDTSSASTGQATSLLVTDTSSVSTGDTTPLPVTSTSSASTGHVTPLHVTSPSSASTGHATPLPVTSLSSASTGDTMPLPVTSPSSASTGDTTPLPVTDASSVSTGHTTPLPVTSPSSASTGHTTPLPVTDTSSASKGDTTPLPVTSPSSASTGHTTPLPVTDTSSASTGDTTPLPVTNASSLSTGHATPLHVTSPSSASTGHATPLPVTSTSSASTGHATPLPVTGLSSATTDDTTRLPVTDVSSASTGQATPLPVTSLSSVSTGDTTPLPVTSPSSASTGHASPLLVTDASSASTGQATPLPVTDTSSVSTAHATPLPVTGLSSASTDDTTRLPVTDVSSASTGQAIPLPVTSPSSASTGDTTPLPVTDASSASTGDTTSLPVTIPSSASSGHTTSLPVTDASSVSTGHATSLLVTDASSVSTGDTTPLPVTDTNSASTGDTTPLHVTDASSVSTGHATSLPVTSLSSASTGDTTPLPVTSPSSASSGHTTPLPVTDASSVPTGHATSLPVTDASSVSTGHATPLPVTDASSVSTGHATPLPVTDTSSVSTGQATPLPVTSLSSASTGDTTPLPVTDTSSASTGQDTPLPVTSLSSVSTGDTTPLPVTNPSSASTGHATPLLVTDASSISTGHATSLLVTDASSVSTGHATALHDTDASSLSTGDTTPLPVTSPSSTSTGDTTPLPVTETSSVSTGHATSLPVTDTSSASTGHATSLPVTDTSSASTGHATPLPVTDTSSASTGQATPLPVTSPSSASTGHAIPLLVTDTSSASTGQATPLPVTSLSSASTGDTTPLPVTDASSVSTGHATSLPVTSLSSVSTGDTTPLPVTSPSSASTGHATPLHVTDASSASTGHATPLPVTSLSSASTGDTTPLPVTSPSSASTGHATPLHVTDASSVSTGDTTPLPVTSSSSASSGHTTPLPVTDASSASTGDTTPLPVTDTSSASTGHATHLPVTGLSSASTGDTTRLPVTNVSSASTGHATPLPVTSTSSASTGDTTPLPGTDTSSVSTGHTTPLLVTDASSVSTGDTTRLPVTSPSSASTGHTTPLPVTDTPSASTGDTTPLPVTNASSLSTRHATSLHVTSPSSASTGHATSLPVTDTSAASTGHATPLPVTSTSSASTGDTTPLPVTDTYSASTGQATPLPVTSLSSVSTGDTTPLPVTSPSSASTGHATPLLVTDASSASTGQATPLPVTSLSSVSTGDTTPLPVTSPSSASTGHATSLPVTDTSSASTGDTTSLPVTDTSSAYTGDTTSLPVTDTSSSSTGDTTPLLVTETSSVSTGDTTPLPVTDTSSASTGHATPLPVTNTSSVSTGHATPLHVTSPSSASTGHTTPLPVTDASSVSTGHATSLPVTDASSVFTGHATSLPVTIPSSASSGHTTPLPVTDASSVSTGHATSLPVTDASSVSTGHATPLPVTDASSVSTGHATPLPLTSLSSVSTGDTTPLPVTDTSSASTGQATPLPVTSLSSVSTGDTTPLPVTDTSSASTGHATSLPVTDTSSASTGHATPLPDTDTSSASTGHATLLPVTDTSSASIGHATSLPVTDTSSISTGHATPLHVTSPSSASTGHATPLPVTDTSSASTGHANPLHVTSPSSASTGHATPLPVTDTSSASTGHATPLPVTSLSSVSTGDTTPLPVTSPSSASTGHTTPLPVTDTSSASTGQATALPVTSTSSASTGDTTPLPVTDTSSASTGQATPLPVTSLSSVSTGDTTPLPVTSPSSASTGHATPLLVTDASSASTGQATPLPVTSLSSVSTGDTTPLPVTSPSSASTGHATSLPVTDTSSASTGDTTSLPVTDTSSAYTGDTTSLPVTDTSSSSTGDTTPLLVTETSSVSTGHATPLLVTDASSASTGHATPLHVTSPSSASTGDTTPVPVTDTSSVSTGHATPLPVTGLSSASTGDTTRLPVTDISSASTGQATPLPVTNTSSVSTGDTMPLPVTSPSSASTGHATPLPVTSTSSASTGHATPVPVTSTSSASTGHTTPLPVTDTSSASTGDTTPLPVTSPSSASTGHTTPLHVTIPSSASTGDTSTLPVTGASSASTGHATPLPVTDTSSVSTGHATPLPVTSLSSVSTGDTTPLPVTDASSASTGQATPLPVTSLSSVSTGDTTPLLVTDASSVSTGHATPLPVTDTSSASTGDTTRLPVTDTSSASTGQATPLPVTSLSSVSTGDTTPLLVTDASSVSTGHATPLPVTDTSSASTGDTTRLPVTDTSSASTGQATPLPVTIPSSSSSGHTTPLPVTSTSSVSTGHVTPLHVTSPSSASTGHVTPLPVTSTSSASTGHATPLLVTDASSVSTGHATPLPVTDASSASTGDTTPLPVTDTSSASTGQATPLPVTSLSSVSTGDTTPLPVTDASSASTGHATPLPVTIPSSVSTGDTMPLPVTSPSSASTGHATPLPVTGLSSASTGDTTPLPVTDTSSASTRHATPLPVTDTSSASTDDTTRLPVTDVSSASTGHATPLPVTSTSSASTGDTTPLPVTDTSSVSTGHATSLPVTSRSSASTGHATPLPVTDTSSVSTGHATPLPVTSTSSVSTGHATPLPVTSPSSASTGHATPVPVTSTSSASTGDTTPLPVTNASSLSTGHATPLHVTSPSSASRGDTSTLPVTDASSASTGHATPLPLTSLSSVSTGDTTPLPVTDTSSASTGQATPLPVTSLSSVSTGDTTPLPVTIPSSASSGHTTSLPVTDASSVSTGHGTPLPVTSTSSASTGDTTPLPVTDTSSASTGHATPLPVTDTSSASTGHATPLPVTSLSSVSTGHATPLAVSSATSASTVSSDSPLKMETPGMTTPSLKTDGGRRTATSPPPTTSQTIISTIPSTAMHTRSTAAPIPILPERGEAIQEFPSSPMGQAPGTWSSSGGPWTSPPHSSSRRLASPLAPLSVIPSTSQTMARSSSQSQTTRFSPTPTHSQQASQAGTLWPWWLRSGTMLTSPLVGGPHFIRNTRRSMVNTAC

SEQ ID NO: 86726 - protein, 267 aa, Homo sapiens
MADSEALPSLAGDPVAVEALLRAVFGVVVDEAIQKGTSVSQKVCEWKEPEELKQLLDLELRSQGESQKQILERCRAVIRYSVKTGHPRFFNQLFSGLDPHALAGRIITESLNTSQYTYEIAPVFVLMEEEVLRKLRALVGWSSGDGIFCPGGSISNMYAVNLARYQRYPDCKQRGLRTLPPLALFTSKEVGKRHRPNPGLLILISSHVTTPSRRELRFWDLAPTVSEWSRLMREGKWSPRIWRGRLVWPRLRVLCRSWSVPPLAPLC

SEQ ID NO: 86727 - protein, 146 aa, Homo sapiens
MNSIKSFSDHAQCGRLEVHLVGGFSDDRQLSQKLTHQLLSEFDRQEDDIHLVTLCVTELNDREENENHFPVIYGIAVNIKTAEIYRASFQDRGPEEQLRAARTLAGGPMISIYDAETEQLRIGPYSWTPFPHVDFWLHQDDKQILE

SEQ ID NO: 86728 - protein, 298 aa, Homo sapiens
MAGPFSRLLSARPGLRLLALAGAGSLAAGFLLRPEPVRAASERRRLYPPSAEYPDLRKHNNCMASHLTPAVYARLCDKTTPTGWTLDQCIQTGVDNPGHPFIKTVGMVAGDEETYEVFADLFDPVIQERHNGYDPRTMKHTTDLDASKIRSGYFDERYVLSSRVRTGRSIRGLSLPPACTRAERREVERVVVDALSGLKGDLAGRYYRLSEMTEAEQQQLIDDHFLFDKPVSPLLTAAGMARDWPDARGIWHNNEKSFLIWVNEEDHTRVISMEKGGNMKRVFERFCRGLKEVVVGIK

SEQ ID NO: 86729 - protein, 54 aa, Homo sapiens
MSPAFRAMDVEPRAKGVLLEPFVHQVGGHSCVLRFNETTLCKPLVPREHQFYET

SEQ ID NO: 86730 - protein, 226 aa, Homo sapiens
MEAERRRQAEKPKKGRVGSSLLPERHPATGTPTTTVDSSAPPCRRLPGAGGGRSRFSPQGGQRGRPHSRRRHRTTFSPVQLEQLESAFGRNQYPDIWARESLARDTGLSEARIQVWFQNRRAKQRKQERSLLQPLAHLSPAAFSSFLPESTACPYSYAAPPPPVTCFPHPYSHALPSQPSTGGAFALSHQSEDWYPTLHPAPAGHLPCPPPPPMLPLSLEPSKSWN

SEQ ID NO: 86731 - protein, 181 aa, Homo sapiens
MGNIFEKLFKSLLGKKKMRILILSLDTAGKTTILYKLKLGETVPAVPTVGFCVETVEYKNNTFAVWDVGSHFKIRPLWQHFFQNTKGARSPGSTHQGSLASGVLPIKCSHVEFGMWKGGRSHPFLPHSSRCAGSGGQLDSILPHQSPAWGPWGCKDLSSGFPSFLTSSILWKSAVLLTPKA

SEQ ID NO: 86732 - protein, 148 aa, Homo sapiens
MGRLWKRPDQLAMLMNKLILMGCVKRRCQPRGSACSCSHLKAENSDFILGYVCQPQRINYLHTQKQWSRIFWQDFQDLCHRCLISVSSQSVLGFEIDAVNSVQFSNHTETRSVSVAQAGVKWRNQLTAALTSWAEAIFLPPPPEWLGL

SEQ ID NO: 86733 - protein, 183 aa, Homo sapiens
MFSVFEEITRIVVKEMDAGGDMIAVRSLVDADRFRCFHLVGEKRTFFGCRHYTTGLTLMDILDTDGDKWLDELDSGLQGQKAEFQILDNVDSTGELIVRLPKEITISGSFQGFHHQKIKISENRISQQYLATLENREGWCFILFRKVFGFGGFQKHEGEVGGHGECPQGPDRGEEKRCAKLPR

SEQ ID NO: 86734 - protein, 536 aa, Homo sapiens
MSLSAQPSSSFYKPVSEVMCSHFAQDLWPEQNIKDSFQKVTLKRYGKCRHENLPLRKGCESMDECKMHKGGCNGLNQCLTATQSKIFQCDKYVKVAHKFSNSNRHEIRHTKKKPFKCTKCGKSFGMISCLTEHSRIHTRVNFYKCEECGKAFNWSSTLTKHKRIHTGEKPYKCEECGKAFNQSSNLIKHKKIHTGEKPYKCEECGKTFNRFSTLTTHKIIHTGEKPYKCKECGKAFNRSSTLTTHRKIHTGEKPYKCEECGKAFKQSSNLTTHKIIHTGEKPYKCKKCGKAFNQSAHLTTHEVIHTGEKPYKCEKCGKAFNHFSHLTTHKIIHTGEKPYKCKECGKAFKHSSTLTKHKIIHTGEKPYKCKECEKAFNQSSKLTEHKKIHTGEKPYECEKCGKAFNQSSNLTRHKKSHTEEKPYKCEECGKGFKWPSTLTIHKIIHTGEKPYKCEECGKAFNQSSKLTKHKKIHTGEKPYTCEECGKAFNQSSNLTKHKRIHTGEKPYKCEECDKAFKWSSVLTKHKIIHTGEKLQI

SEQ ID NO: 86735 - protein, 362 aa, Homo sapiens
MLVMAPRTVLLLLSAALALTETWAGSHSMRYFDTAMSRPGRGEPRFISVGYVDDTQFVRFDSDAASPREEPRAPWIEQEGPEYWDRNTQIFKTNTQTDRESLRNLRGYYNQSEAGSHTLQSMYGCDVGPDGRLLRGHNQYAYDGKDYIALNEDLRSWTAADTAAQITQRKWEAARVAEQDRAYLEGTCVEWLRRYLENGKDTLERADPPKTHVTHHPISDHEATLRCWALGFYPAEITLTWQRDGEDQTQDTELVETRPAGDRTFQKWAAVVVPSGEEQRYTCHVQHEGLPKPLTLRWEPSSQSTVPIVGIVAGLAVLAVVVIGAVVAAVMCRRKSSGGKGGSYSQAACSDSAQGSDVSLTA

SEQ ID NO: 86736 - protein, 188 aa, Homo sapiens
MEAMWLLCVALAVLAWGFLWVWDSSERMKSREQGGRLGAESRTLLVIAHPDDEAMFFAPTVLGLARLRHWVYLLCFSAGNYYNQGETRKKELLQSCDVLGIPLSSVMIIDNRDFPDDPGMQWDTEHVARVLLQHIEVNGINLVVTFDAGGVSGHSNHIALYAAVRALHSEGKLPKESCPQPSRGSGWG

SEQ ID NO: 86737 - protein, 235 aa, Homo sapiens
MFFTCGPNEAMVVSGFCRSPPVMVAGGRVFVLPCIQQIQRISLNTLTLNVKSEKVYTRHGVPISVTGIAQVKIQGQNKEMLAAACQMFLGKTEAEIAHIALETLEGHQRAIMAHMTVEEIYKDRQKFSEQVFKVASSDLVNMGISVVSYTLKDIHDDQDYLHSLGKARTAQVQKDARIGEAEAKRDAGIREAKAKQEKVSAQYLSEIEMAKAQRDYELKKAAYDIEVNTRRAQAD

SEQ ID NO: 86738 - protein, 84 aa, Homo sapiens
MATALDPDQPKKQKILVEEMAPLKGVQEQQVRHECEVTKPEKEKASDDPEDRHLPLCWFSIEMMYINLGRACTVRMGLGSGGGE

SEQ ID NO: 86739 - protein, 425 aa, Homo sapiens
MGSKKLKRVGLSQELCDRLSRHQILTCQDFLCLSPLELMKVTGLSYRGVHELLCMVSRACAPKMQTAYGIKAQRSADFSPAFLSTTLSALDEALHGGVACGSLTEITGPPGCGKTQFCIMMSILATLPTNMGGLEGAVVYIDTESAFSAERLVEIAESRFPRYFNTEEKLLLTSSKVHLYRELTCDEVLQRIESLEEEIISKGIKLVILDSVASVVRKEFDAQLQGNLKERNKFLAREASSLKYLAEEFSIPVILTNQITTHLSGALASQADLVSPADDLSLSEGTSGSSCVIAALGNTWSHSVNTRLILQYLDSERRQILIAKSPLAPFTSFVYTIKEEGLVLQVVRTVARVSPRSECWSAADSHPSPTFLIPDVVLRKTRNPRLLPSVSMCPPQMHSTVLSSALPPTNWATGIRTETLDEHPV

SEQ ID NO: 86740 - protein, 362 aa, Homo sapiens
MRVTAPRTVLLLLSGALALTETWAGSHSMRYFYTAMSRPGRGEPRFIAVGYVDDTQFVRFDSDAASPRMAPRAPWIEQEGPEYWDRETQISKTNTQTYRESLRNLRGYYNQSEAGSHTLQRMYGCDVGPDGRLLRGHDQSAYDGKDYIALNEDLSSWTAADTAAQITQRKWEAAREAEQWRAYLEGLCVEWLRRYLENGKETLQRADPPKTHVTHHPISDHEATLRCWALGFYPAEITLTWQRDGEDQTQDTELVETRPAGDRTFQKWAAVVVPSGEEQRYTCHVQHEGLPKPLTLRWEPSSQSTIPIVGIVAGLAVLAVVVIGAVVATVMCRRKSSGGKGGSYSQAASSDSAQGSDVSLTA

SEQ ID NO: 86741 - protein, 89 aa, Homo sapiens
MAMAPSPSLVQVYTSPAAVAVWEWQDGLGTWHPYSATVCSFIEQQFVQQKGQRFGLGSLAHSIPLGQADPSLAPYIIDLPSWTQFRQDT

SEQ ID NO: 86742 - protein, 222 aa, Homo sapiens
AAAAVPPAAAANHHHHHHHALHEAPKFTVETLEHTVNNDSEIWGLLQPYQHLICGKNASGDLVSRAMHHLQPLNAKHHGNGTPLHHKQGALYWEPEALYTLCYFMHCPQMEWENPNVEPSKVNLQVERPFLVLPPLMEWIRVAVAHAGHRRSFSMDSDDVRQAARLLLPGVDCEPRQLRADDCFCASRKLDAVAIEAKFKQDLGFRMLNCGRTDLVKQAVSL

SEQ ID NO: 86743 - protein, 827 aa, Homo sapiens
MAAEEVLQTVDHYKTEIERLTKELTETTHEKIQAAEYGLVVLEEKLTLKQQYDELEAEYDSLKQELEQLKEAFGQSFSIHRKVAEDGETREETLLQESASKEAYYLGKILEMQNELKQSRAVVTNVQAENERLTAVVQDLKENNEMVELQRIRMKDEIREYKFREARLLQDYTELEEENITLQKLVSTLKQNQVEYEGLKHEIKRFEEETVLLNSQLEDAIRLKEIAEHQLEEALETLKNEREQKNNLRKELSQYISLNDNHISISVDGLKFAEDGSEPNNDDKMNGHIHGPLVKLNGDYRTPTLRKGESLNPVSDLFSELNISEIQKLKQQLMQVEREKAILLANLQESQTQLEHTKGALTEQHERVHRLTEHVNAMRGLQSSKELKAELDGEKGRDSGEEAHDYEVDINGLEILECKYRVAVTEVIDLKAEIKALKEKYNKSVENYTDEKAKYESKIQMYDEQVTSLEKTTKESGEKMAHMEKELQKMTSIANENHSTLNTAQDELVTFSEELAQLYHHVCLCNNETPNRVMLDYYRQSRVTRSGSLKGPDDPRGLLSPRLARRGVSSPVETRTSSEPVAKESTEASKEPSPTKTPTISPVITAPPSSPVLDTSDIRKEPMNIYNLNAIIRDQIKHLQKAVDRSLQLSRQRAAARELAPMIDKDKEALMEEILKLKSLLSTKREQIATLRAVLKANKQTAEVALANLKNKYENEKAMVTETMTKLRNELKALKEDAATFSSLRAMFATRCDEYVTQLDEMQRQLAAAEDEKKTLNTLLRMAIQQKLALTQRLEDLEFDHEQSRRSKGKLGKSKIGSPKTIFTFPL

SEQ ID NO: 86744 - protein, 158 aa, Homo sapiens
MSREMQDVDLAEVKPLVEKGETITGLLQEFDVQEQDIETLHGSVHVTLCGTPKGNRPVILTYHDIGMNHKTCYNPLFNYEDMQEITQHFAVCHVDAPGQQDGAASFPAGYMYPSMDQLAEMLPGVLQQFGLKSIIGMGTGAGAYILTRFALNNPEMVE

SEQ ID NO: 86745 - protein, 87 aa, Homo sapiens
MGHQQLYWSHPRKFGQGSRSCRVCSNRHGLIRKYGLNMCRQCFRQYAKDIGFIKVGVCRRTPCCLGREGCGGYFFRERQTDRSSLEW

SEQ ID NO: 86746 - protein, 256 aa, Homo sapiens
MAVGNINELPENILLELFTHVPARQLLLNCRLVCSLWRDLIDLVTLWKRKCLREGFITEDWDQPVADWKIFYFLRSLHRNLLHNPCAEEGFEFWSLDVNGGDEWKVEDLSRDQRKEFPNDQHLPQVPGGGPQGRRVLGGADGYHTAGHRGQGLVRSQARLRVQVPAVRSAPVVRARASGDLPARPGDHPAEERCQVEGGLPHILQLPARRPLHLVSARRRGHSLLGRLVRPEGHQQQHHHRAPAALTPPEPPSAEP

SEQ ID NO: 86747 - protein, 191 aa, Homo sapiens
MTPALTALLCLGLSLGPRTRMQAGPFPKPTLWAEPGSVISWGSPVTIWCQGSLEAQEYQLDKEGSPEPWDRNNPLEPKNKARFSIPSMTQHHAGRYRCHYYSSAGWSEPSDPLELVMTGFYNKPTLSALPSPVVASGGNMTLRCGSQKGYHHFVLMKEGEHQLPRTLDSQQLHSGGFQALFPVGPVTPSHS

SEQ ID NO: 86748 - protein, 120 aa, Homo sapiens
YLLKAGESQMKQGPDFLQSLIKFFHAQHNFFQDGWKAAQSLFPFIEKLAASVHALHQAQEDELQKLTQLRDSLRGTLQLESREEHLSRKNSGCGYSIHQHQGNKQFGTEKVGFLYKKSDG

SEQ ID NO: 86749 - protein, 1151 aa, Homo sapiens
MGSAARWEGSFSREFSSLLSRGCLSTSRIDMDALEDYVWPRATSELILLPVTGLECVGDRLLAGEGPDVLVYSLDFGGHLRMIKRVQNLLGHYLIHGFRVRPEPNGDLDLEAMVAVFGSKGLRVVKISWGQGHFWELWRSGLWNMSDWIWDARWLEGNIALALGHNSVVLYDPVVGCILQEVPCTDRCTLSSACLIGDAWKELTIVAGAVSNQLLVWYPATALADNKPVAPDRRISGHVGIIFSMSYLESKGLLATASEDRSVRIWKVGDLRVPGGRVQNIGHCFGHSARVWQVKLLENYLISAGEDCVCLVWSHEGEILQAFRGHQGRGIRAIAAHERQAWVITGGDDSGIRLWHLVGRGYRGLGVSALCFKSRSRPGTLKAVTLAGSWRLLAVTDTGALYLYDVEVKCWEQLLEDKHFQSYCLLEAAPGPEGFGLCAMANGEGRVKVVPINTPTAAVDQTLFPGKVHSLSWALRGYEELLLLASGPGGVVACLEISAAPSGKAIFVKERCRYLLPPSKQRWHTCSAFLPPGDFLVCGDRRGSVLLFPSRPGLLKDPGVGGKARAGAGAPVVGSGSSGGGNAFTGLGPVSTLPSLHGKQGVTSVTCHGGYVYTTGRDGAYYQLFVRDGQLQPVLRQKSCRGMNWLAGLRIVPDGSMVILGFHANEFVVWNPRSHEKLHIVNCGGGHRSWAFSDTEAAMAFAYLKDGDVMLYRALGGCTRPHVILREGLHGREITCVKRVGTITLGPEYGVPSFMQPDDLEPGSEGPDLTDIVITCSEDTTVCVLALPTTTGSAHALTAVCNHISSVRAVAVWGIGTPGGPQDPQPGLTAHVVSAGGRAEMHCFSIMVTPDPSTPSRLACHVMHLSSHRLDEYWDRQRNRHRMVKVDPETRYMSLAVCELDQPGLGPLVAAACSDGAVRLFLLQDSGRILQLLAETFHHKRCVLKVHSFTHEAPNQRRRLLLCSAATDGSLAFWDLTTMLDHDSTVLEPPVDPGLPYRLGTPSLTLQAHSCGINSLHTLPTREGHHLVASGSEDGSLHVFVLAVEMLQLEEAVGEAGLVPQLRVLEEYSVPCAHAAHVTGLKILSPSIMVSASIDQRLTFWRLGHGEPTFMNSTVFHVPDVADMDCWPVSPEFGHRCALGGQGLEVYNWYD

SEQ ID NO: 86750 - protein, 182 aa, Homo sapiens
MPAIYWINLVYTTSAFSKFYEQSVVADVSSNNKGGLLVHFWIVFVMPRAKGHIFCEDCVAAILKDSIQTSIINRTSVGSLQGLAVDMDSVVLNAGLRSDYSSTIGSDKGCSQYFYAEHLSLHYPLEISAASGRLMCHFKLVAIVGYLIRLSIKSIQIEADNCVTDSLTIYDSLLPIRSSILY

SEQ ID NO: 86751 - protein, 91 aa, Homo sapiens
MPVPWFLLSLALGRSPVVLSLERLVGPQDATHCSPGLSCRLWGATKFWAWNSFSSHPLLHTQTVTYSACLGTSCLLRAPCWRLRTCRQSWC

SEQ ID NO: 86752 - protein, 174 aa, Homo sapiens
MRALAVLSVTLVMACTEAFFPFISRGKELLWGKPEESRVSSVLEESKRLVDTAMYATMQRNLKKRGILSPAQLLSFSKLPEPTSGVIARAAEIMETSIQAMKRKVNLKTQQSQHPTDALSEDLLSIIANMSGCLPYMLPPKCPNTCLANKYRPITGACNNRKMKYKPDHSETAN

SEQ ID NO: 86753 - protein, 67 aa, Homo sapiens
MVEEGNPHHYFVATQWISASLLMLTVHHLMQSERCHLFSSAAKVSQVTHSISQECTHSAPIMEDNSM

SEQ ID NO: 86754 - protein, 170 aa, Homo sapiens
METHKELKPLLSPSSETTVTVELPEADRAGAGTGAQAGQLMGFFKGIDQDIERAVQSEIFLHESYCMDTSHQPLLPAPPKTPMDGADCGIQWWNAVFIMLLIGIVLPVFYLVYFKIQASGETPNSLNTTVIPNGSMAMGTVPGQAPRLAVAVPAVTSADSQFSQTTQAGS

SEQ ID NO: 86755 - protein, 184 aa, Homo sapiens
MFYFRGCGRWVAVSFTKQQFPLARLSSDSAAPRTPHFDVIVIGGGHAGTEAATAAARCGSRTLLLTHRVDTIGQMSCNPSFGGIGKGHLMREVDALDGLCSRICDQSGVHYKVLNRRKGPAVWGLRAQIDRKLYKQNMQKEILNTPLLTVQEGAVEDLILTEPEPEHTGKCRVSGVVLGWSAVA

SEQ ID NO: 86756 - protein, 48 aa, Homo sapiens
MDAIHIGMSSTPLVKHTAGAGLKANRPRVMSKSGHSNVRIDKVDGIYL

SEQ ID NO: 86757 - protein, 347 aa, Homo sapiens
MARRPRHSIYSSDEDDEDFEMCDHDYDGLLPKSGKRHLGKTRWTREEDEKLKKLVEQNGTDDWKVIANYLPNRTDVQCQHRWQKVLNPELIKGPWTKEEDQRVIELVQKYGPKRWSVIAKHLKGRIGKQCRERWHNHLNPEVKKTSWTEEEDRIIYQAHKRLGNRWAEIAKLLPGRTDNAIKNHWNSTMRRKVEQEGYLQESSKASQPAVATSFQKNSHLMGFAQAPPTAQLPATGQPTVNNDYSYYHISEAQNVSSHVPYPVALHVNIVNVPQPAAAAIQRHYNDEDPEKEKRIKELELLLMSTENELKGQQLCGPLLNSDIFSDWAANWDGSLCFATYIVNQQRQ

SEQ ID NO: 86758 - protein, 144 aa, Homo sapiens
VGSGLRPDTWERFVRRFGPLQVLETYGLTEGNVATINYTGQRGAVGRASWLYKHIFPFSLIRYDVTTGEPIRDPQGHCMATSPGFLRFHDRTGDTFRWKGENVATTEVAEVFEALDFLQEVNVYGVTVPGHEGRAGMAALVLRP

SEQ ID NO: 86759 - protein, 72 aa, Homo sapiens
MADKQISLPAKLINGGIAGLIGVTCVFPIDLAKTRLQNQQNGQRVYTSMSDCLIKTVRSEGYFGMYRGEELL

SEQ ID NO: 86760 - protein, 218 aa, Homo sapiens
  MOD_RES (1)..(1): Any amino acid
XLALLLARAGLRKPESQEAAPLSGPCGRRVITSRIVGGEDAELGRWPWQGSLRLWDSHVCGVSLLSHRWALTAAHCFETDLSDPSGWMVQFGQLTSMPSFWSLQAYYTRYFVSNIYLSPRYLGNSPYDIALVKLSAPVTYTKHIQPICLQASTFEFENRTDCWVTGWGYIKEDEGSSGRHHKQLYVQPPLPQVQFPQGHLWRHGLCWQCPRREGCLLR

SEQ ID NO: 86761 - protein, 72 aa, Homo sapiens
MNTSPGTVGSDPVILATAGYDHTVRFWQAHSGICTRTVQHQDSQVNALEVTPDRSMIAAAACVPRLPAHPHV

SEQ ID NO: 86762 - protein, 58 aa, Homo sapiens
MPFSNSHNALKLRFPAEDEPPVHHDRGLRGGRRGVLRSVQGSLRPHHRGPARRLQAQR

SEQ ID NO: 86763 - protein, 210 aa, Homo sapiens
MFFTCGPNEAMVVSGFCRSPPVMVAGGRVFVLPCIQQIQRISLNTLTLNVKSEKVYTRHGVPISVTGIAQVKIQGQNKEMLAAACQMFLGKTEAEIAHIALETLEGHQRAIMAHMTVEEIYKDRQKFSEQVFKVASSDLVNMGISVVSYTLKDIHDDQDYLHSLGKARTAQVQKDARIGEAEAKRDAGIREAKAKQEKVSAQYLSEIEMA

SEQ ID NO: 86764 - protein, 753 aa, Homo sapiens
MSFLKSLSLCLGKPFCNNETFGQYPLQVNGYRNLDECLEGAMVEGDVELLPSDHSVKYGQERWFTKLPPVLTFELSRFEFNQSLGQPEKIHNKLEFPQIIYMDRYMYRSKELIRNKRECIRKLKEEIKILQQKLERYVKYGSGPARFPLPDMLKYVIEFASTKPASESCPPESDTHMTLPLSSVHCSVSDQTSKESTSTESSSQDVESTFSSPEDSLPKSKPLTSSRSSMEMPSQPAPRTVTDEEINFVKTCLQRWRSEIEQDIQDLKTCIASTTQTIEQMYCDPLLRQVPYRLHAVLVHEGQANAGHYWAYIYNQPRQSWLKYNDISVTESSWEEVERDSYGGLRNVSAYCLMYINDKLPYFNAEAAPTESDQMSEVEALSVELKHYIQEDNWRFEQEVEEWEEEQSCKIPQMESSTNSSSQDYSTSQEPSVASSHGVRCLSSEHAVIVKEQTAQAIANTARAYEKSGVEAALSEAFHEEYSRLYQLAKETPTSHSDPRLQHVLVYFFQNEAPKRVVERTLLEQFADKNLSYDERSISIMKVAQAKLKEIGPDDMNMEEYKKWHEDYSLFRKVSVYLLTGLELYQKGKYQEALSYLVYAYQSNAALLMKGPRRGVKESVIALYRRKCLLELNAKAASLFETNDDHSVTEGINVMNELIIPCIHLIINNDISKDDLDAIEVMRNHWCSYLGQDIAENLQLCLGEFLPRLLDPSAEIIVLKEPPTIRPNSPYDLCSRFAAVMESIQGVSTVTVK

SEQ ID NO: 86765 - protein, 408 aa, Homo sapiens
MLSDLQESVASSRPQEVSAYLTRFCDQCKQDKACRFLAAQKGAYPIIFTAWKLATAGDQGLLLQSLNALSVLTDGQPDLLDAQGLQLLVATLTQNADEADLTCSGIRCVRHACLKHEQNRQDLVKAGVLPLLTGAITHHGHHTDVVREACWALRVMTFDDDIRVPFGHAHNHAKMIVQENKGLKVLIEATKAFLDNPGILSELCGTLSRLAIRNEFCQEVVDLGGLSILVSLLADCNDHQMRDQSGVQELVKQVLSTLRAIAGNDDVKDAIVRAGGTESIVAAMTQHLTSPQVCEQSCAALCFLALRKPDNSRIIVEGGGAVAALQAMKAHPQKAGVQKQACMLIRNLVAHGQAFSKPILDLGAEALIMQARSAHRDCEDVAKAALRDLGCHVELRELWTGQRGNLAP

SEQ ID NO: 86766 - protein, 325 aa, Homo sapiens
MGAGPSLLLAALLLLLSGDGAVRCDTPANCTYLDLLGTWVFQVGSSGSQRDVNCSVMGPQEKKVVVYLQKLDTAYDDLGNSGHFTIIYNQGFEIVLNDYKWFAFFKYKEEGSKVTTYCNETMTGWVHDVLGRNWACFTGKKVGTASENVYVNIAHLKNSQEKYSNRLYKYDHNFVKAINAIQKSWTATTYMEYETLTLGDMIRRSGGHSRKIPRPKPAPLTAEIQQKILHLPTSWDWRNVHGINFVSPVRNQASCGSCYSFASMGMLEARIRILTNNSQTPILSPQEVVSCSQYAQGKCCISDTIYELFTCVQLAVVGKGKRMMQ

SEQ ID NO: 86767 - protein, 192 aa, Homo sapiens
MGKGCKVVVCGLLSVGKTAILEQLLYGNHTIGMEDCETMEDVYMASVETDRGVKEQLHLYDTRGLQEGVELPKHYFSFADGFVLVYSVNNLESFQRVELLKKEIDKFKDKKEATIVVLGNKIDLSEQRQVDAEVAQQWAKSEKVRLWEVTVTDRKTLIEPFTLLASKLSQPQSKSSFPLPGRKNKGNSNSEN

SEQ ID NO: 86768 - protein, 915 aa, Homo sapiens
MDDSEVESTASILASVKEQEAQFEKLTRALEEERRHVSAQLERVRVSPQDANPLMANGTLTRRHQDHSHLLYSTIPRMQEPGQIVETYTEEDPEGAMSVVSVETSDDGTTRRTETTVKKVVKTVTTRTVQPVAMGPDGLPVDASSVSNNYIQTLGRDFRKNGNGGPGPYVGQAGTATLPRNFHYPPDGYSRHYEDGYPGGSDNYGSLSRVTRIEERYRPSMEGYRAPSRQDVYGPQPQVRVGGSSVDLHRFHPEPYGLEDDQRSMGYDDLDYGMMSDYGTARRTGTPSDPRRRLRSYEDMIGEEVPSDQYYWAPLAQHERGSLASLDSLRKGGPPPPNWRQPELPEVIAMLGFRLDAVKSNAAAYLQHLCYRNDKVKTDVRKLKGIPVLVGLLDHPKKEVHLGACGALKNISFGRDQDNKIAIKNCDGVPALVRLLRKARDMDLTEVITGTLWNLSSHDSIKMEIVDHALHALTDEVIIPHSGWEREPNEDCKPRHIEWESVLTNTAGCLRNVSSERSEARRKLRECDGLVDALIFIVQAEIGQKDSDSKLVENCVCLLRNLSYQVHREIPQAERYQEAAPNVANNTGPHAASCFGAKKGKDEWFSRGKKPIEDPANDTVDFPKRTSPARGYELLFQPEVVRIYISLLKESKTPAILEASAGAIQNLCAGRWTYGRYIRSALRQEKALSAIADLLTNEHERVVKAASGALRNLAVDARNKELIGKHAIPNLVKNLPGGQQNSSWNFSEDTVISILNTINEVIAENLEAAKKLRETQGIEKLVLINKSGNRSEKEVRAAALVLQTIWGYKELRKPLEKEGWKKSDFQVNLNNASRSQSSHSYDDSTLPLIDRNQKSDKKPDREEIQMSNMGSNTKSLDNNYSTPNERGDHNRTLDRSGDLGDMEPLKGTTPLMQKI

SEQ ID NO: 86769 - protein, 1032 aa, Homo sapiens
MAERGGDGGESERFNPGELRMAQQQALRFRGPAPPPNAVMRGPPPLMRPPPPFGMMRGPPPPPRPPFGRPPFDPNMPPMPPPGGIPPPMGPPHLQRPPFMPPPMSSMPPPPGMMFPPGMPPVTAPGTPALPPTEEIWVENKTPDGKVYYYNARTRESAWTKPDGVKVIQQSELTPMLAAQAQVQAQAQAQAQAQAQAQAQAQAQAQAQAQAQAQAQAQAQAQAQAQAQAQAQAQAQAQAQAQVQAQVQAQVQAQAVGASTPTTSSPAPAVSTSTSSSTPSSTTSTTTTATSVAQTVSTPTTQDQTPSSAVSVATPTVSVSTPAPTATPVQTVPQPHPQTLPPAVPHSVPQPTTAIPAFPPVMVPPFRVPLPGMPIPLPGVAMMQIVSCPYVKTVATTKTGVLPGMAPPIVPMIHPQVAIAASPATLAGATAVSEWTEYKTADGKTYYYNNRTLESTWEKPQELKEKEKLEEKIKEPIKEPSEEPLPMETEEEDPKEEPIKEIKEEPKEEEMTEEEKAAQKAKPVATAPIPGTPWCVVWTGDERVFFYNPTTRLSMWDRPDDLIGRADVDKIIQEPPHKKGMEELKKLRHPTPTMLSIQKWQFSMSAIKEEQELMEEINEDEPVKAKKRKRDDNKDIDSEKEAAMEAEIKAARERAIVPLEARMKQFKDMLLERGVSAFSTWEKELHKIVFDPRYLLLNPKERKQVFDQYVKTRAEEERREKKNKIMQAKEDFKKMMEEAKFNPRATFSEFAAKHAKDSRFKAIEKMKDREALFNEFVAAARKKEKEDSKTRGEKIKSDFFELLSNHHLDSQSRWSKVKDKVESDPRYKAVDSSSMREDLFKQYIEKIAKNLDSEKEKELERQARIEASLREREREVQKARSEQTKEIDREREQHKREEAIQNFKALLSDMVRSSDVSWSDTRRTLRKDHRWESGSLLEREEKEKLFNEHIEALTKKKREHFRQLLDETSAITLTSTWKEVKKIIKEDPRCIKFSSSDRKKQREFEEYIRDKYITAKADFRTLLKETKFITYS

SEQ ID NO: 86770 - protein, 832 aa, Homo sapiens
MDLGSPSLPKKSLPVPGALEQVASRLSSKVAAEVPHGSKQELQDLKAQSLTTCEVCGACFETRKGLSSHARSHLRQLGVAESESSGAPIDLLYELVKQKGLPDAHLGLPPGLAKKSSSLKEVVAGAPRPGLLSLAKPLDAPAVNKAIKSPPGFSAKGLGHPPSSPLLKKTPLALAGSPTPKNPEDKSPQLSLSPRPASPKAQWPQSEDEGPLNLTSGPEPARDIRCEFCGEFFENRKGLSSHARSHLRQMGVTEWYVNGSPIDTLREILKRRTQSRPGGPPNPPGPSPKALAKMMGGAGPGSSLEARSPSDLHISPLAKKLPPPPGSPLGHSPTASPPPTARKMFPGLAAPSLPKKLKPEQIRVEIKREMLPGALHGELHPSEGPWGAPREDMTPLNLSSRAEPVRDIRCEFCGEFFENRKGLSSHARSHLRQMGVTEWSVNGSPIDTLREILKKKSKPCLIKKEPPAGDLAPALAEDGPPTVAPGPVQSPLPLSPLAGRPGKPGAGPAQVPRELSLTPITGAKPSATGYLGSVAAKRPLQEDRLLPAEVKAKTYIQTELPFKAKTLHEKTSHSSTEACCELCGLYFENRKALASHARAHLRQFGVTEWCVNGSPIETLSEWIKHRPQKVGAYRSYIQGGRPFTKKFRSAGHGRDSDKRPSLGLAPGGLAVVGRSAGGEPGPEAGRAADGGERPLAASPPGTVKAEEHQRQNINKFERRQARPPDASAARGGEDTNDLQQKLEEVRQPPPRVRPVPSLVPRPPQTSLVKFVGNIYTLKCRFCEVEFQGPLSIQEEWVRHLQRHILEMNFSKADPPPEESQAPQAQTAAAEAP

SEQ ID NO: 86771 - protein, 202 aa, Homo sapiens
MAGNFWQSSHYLQWILDKQDLLKERQKDLKFLSEEEYWKLQIFFTNVIQALGEHLKLRQQVIATATVYFKRFYARYSLKSIDPVLMAPTCVFLASKVEEFGVVSNTRLIAAATSVLKTRFSYAFPKEFPYRMNHILECEFYLLELMDCCLIVYHPYRPLLQYVQDMGQEDMLLPLAWRIVNDTYRTDLCLLYPPFMIALVID

SEQ ID NO: 86772 - protein, 495 aa, Homo sapiens
MTIEDLPDFPLEGNPLFGRYPFIFSASDTPVIFSISAAPMPSDCEFSFFDPNDASCQEILFDPKTSVSELFAILRQWVPQVQQNIDIIGNEILKRGCNVNDRDGLTDMTLLHYTCKSGAHGIGDVETAVKFATQLIDLGADISLRSRWTNMNALHYAAYFDVPELIRVILKTSKPKDVDATCSDFNFGTALHIAAYNLCAGAVKCLLEQGANPAFRNDKGQIPADVVPDPVDMPLEMADAAATAKEIKQMLLDAVPLSCNISKAMLPNYDHVTGKAMLTSLGLKLGDRVVIAGQKVGTLRFCGTTEFASGQWAGIELDEPEGKNNGSVGKVQYFKCAPKYGIFAPLSKISKAKGRRKNITHTPSTKAAVPLIRSQKIDVAHVTSKVNTGLMTSKKDSASESTLSLPPGEELKTVTEKDVALLGSVSSCSSTSSLEHRQSYPKKQNAISSNKKTMSKSPSLSSRASAGIYGFFNQAFLVFFILVCLFEFLSNIYSK

SEQ ID NO: 86773 - protein, 37 aa, Homo sapiens
MAQFVRNLVEKTPALVNGIGSSVWNYLLELCVCLKLL

SEQ ID NO: 86774 - protein, 199 aa, Homo sapiens
MSLDIQSLDIQCEELSDARWAELLPLLQQCQVVRLDDCGLTEARCKDISSALRVNPALAELNLRSNELGDVGVHCVLQGLQTPSCKIQKLSLQNCCLTGAGCGVLSSTLRTLPTLQELHLSDNLLGDAGLQLLCEGLLDPQCRLEKLQLEYCSLSAASCEPLASVLRAKPDFKELTVSNNDINEAGVRVLCQGLKDSPC

SEQ ID NO: 86775 - protein, 75 aa, Homo sapiens
MYWTDWGEVPKIERAGMDGSSRFIIINSEIYWPNGLTLDYEEQKLYWADAKLNFIHKSNLDGTNRQAVVKGSLPH

SEQ ID NO: 86776 - protein, 94 aa, Homo sapiens
MAAPRQIPSHIVRLKPSCSTDSSFTRTPVPTVSLASRELPVSSWQVTEPSSKNLWEQICKGCASRGNAFSWLQCRALFSGFPFHHDLTYTLSSR

SEQ ID NO: 86777 - protein, 119 aa, Homo sapiens
  MOD_RES (1)..(1): Any amino acid
XKHQDQAVTSSAHHRGGHGVPHGKLLKQKSEEPSVSIPFLQTALLRSSGSLGHRPSQEMDKMLKNQATSATSEKDNDDDQSDKGTYTIELENPNSEEVEARKMIDKVTASSFYKLLYQT

SEQ ID NO: 86778 - protein, 171 aa, Homo sapiens
MPDSPVDVKTQSRLTPPTMPPPPTTQGAPRTSSFTPTTLTNGTSHSPTALNGAPSPPNGFSNGPSSSSSSSLANQQLPPACGARQLSKLKRFLTTLQQFGNDISPEIGERVRTLVLGLVNSTLTIEEFHSKLQEATNFPLRPFVIPFLKANLPLLQRELLHCARLAKQNPA

SEQ ID NO: 86779 - protein, 285 aa, Homo sapiens
MPIVDKLKEALKPGRKDSADDGELGKLLASSAKKVLLQKIEFEPASKSFSYQLEALKSKYVLLNPKTEGASRHKSGDDPPARRQGSEHTYESCGDGVPAPQKVLFPTERLSLRWERVFRVGAGLHNLGNTCFLNATIQCLTYTPPLANYLLSKEHARSCHQGSFCMLCVMQNHIVQAFANSGNAIKPVSFIRDLKKIARHFRFGNQEDAHEFLRYTIDAMQKACLNGCAKCVLPHPPSQGFGHLFYMVAAEHSYGNSQPGTFLPRLPLGRRGRICLWVLKLLEPK

SEQ ID NO: 86780 - protein, 64 aa, Homo sapiens
MDFPCLWLGLLLPLVAALDFNYHRQEGMEAFLKTVAQNYSSVTHLHSIGKSVKDCWAGAAAPSD

SEQ ID NO: 86781 - protein, 259 aa, Homo sapiens
MALLNFFFPDEKPYSEEESRRVRRNKRSKSNEGADGPVKNKKKGKKAGPPGPNGPPGPPGPPGPQGPPGIPGIPGIPGTTVMGPPGPPGPPGPQGPPGLQGPSGAADKAGTRENQPAVVHLQGQGSAIQVKNDLSGGVLNDWSRITMNPKVFKLHPRSGELEVLVDGTYFIYSQVEVYYINFTDFASYEVVVDEKPFLQCTRSIETGKTNYNTCYTAGVCLLKARQKIAVKMVHADISINMSKHTTFFGAIRLGEAPAS

SEQ ID NO: 86782 - protein, 1185 aa, Homo sapiens
MEVDTEEKRHRTRSKGVRVPVEPAIQELFSCPTPGCDGSGHVSGKYARHRSVYGCPLAKKRKTQDKQPQEPAPKRKPFAVKADSSSVDECDDSDGTEDMDEKEEDEGEEYSEDNDEPGDEDEEDEEGDREEEEEIEEEDEDDDEDGEDVEDEEEEEEEEEEEEEEEENDHQMNCHNTRIMQDTEKDDNNNDEYDNYDELVAKSLLNLGKIAEDAAYRARTESEMNSNTSNSLEDDSDKNENLGRKSELSLDLDSDVVRETVDSLKLLAQGHGVVLSENMNDRNYADSMSQQDSRNMNYVMLGKPMNNGLMEKMVEESDEEVCLSSLECLRNQCFDLARKLSETNPQERNPQQNMNIRQHVRPEEDFPGRTPDRNYSDMLNLMRLEEQLSPRSRVFASCAKEDGCHERDDDTTSVNSDRSEEVFDMTKGNLTLLEKAIALETERAKAMREKMAMEAGRRDNMRSYEDQSPRQLPGEDRKPKSSDSHVKKPYYGKDPSRTEKKESKCPTPGCDGTGHVTGLYPHHRSLSGCPHKDRVPPEILAMHESVLKCPTPGCTGRGHVNSNRNSHRSLSGCPIAAAEKLAKAQEKHQSCDVSKSSQASDRVLRPMCFVKQLEIPQYGYRNNVPTTTPRSNLAKELEKYSKTSFEYNSYDNHTYGKRAIAPKVQTRDISPKGYDDAKRYCKDPSPSSSSTSSYAPSSSSNLSCGGGSSASSTCSKSSFDYTHDMEAAHMAATAILNLSTRCREMPQNLSTKPQDLCATRNPDMEVDENGTLDLSMNKQRPRDSCCPILTPLEPMSPQQQAVMNNRCFQLGEGDCWDLPVDYTKMKPRRIDEDESKDITPEDLDPFQEALEERRYPGEVTIPSPKPKYPQCKESKKDLITLSGCPLADKSIRSMLATSSQELKCPTPGCDGSGHITGNYASHRSLSGCPRAKKSGIRIAQSKEDKEDQEPIRCPVPGCDGQGHITGKYASHRSASGCPLAAKRQKDGYLNGSQFSWKSVKTEGMSCPTPGCDGSGHVSGSFLTHRSLSGCPRATSAMKKAKLSGEQMLTIKQRASNGIENDEEIKQLDEEIKELNESNSQMEADMIKLRTQITTMESNLKTIEEENKVIEQQNESLLHELANLSQSLIHSLANIQLPHMDPINEQNFDAYVTTLTEMYTNQDRYQSPENKALLENIKQAVRGIQV

SEQ ID NO: 86783 - protein, 136 aa, Homo sapiens
MGRVRTKTVKKAARVIIEKYYTRLGNDFHTNKRVCEEIAIIPSKKLRNKIAGYVTHLMKRIQRGPVRGISIKLQEEERERRDNYVPEVSALDQEIIEVDPDTKEMLKLLVSVCWIPKVVFSWSKTISRSYYPRSPS

SEQ ID NO: 86784 - protein, 187 aa, Homo sapiens
MGLPEERVRSGSGSRGQEEAGAGGRARSWSPPPEVSRSAHVPSLQRYRELHRRSVEEPREFWGDIAKEFYWKTPCPGPFLRYNFDVTKGKIFIEWMKGATTNICYNVLDRNVHEKKLGDKVAFYWCSSSPGQGSCAQSMGTTNALRQPTLRSFLDTMLQEMAASGTRMAITGSLAGLMTCSMYLDTC

SEQ ID NO: 86785 - protein, 236 aa, Homo sapiens
MALRLLKLAATSASARVVAAGAQRVRGIHSSVQCKLRYGMWHFLLGDKASKRLTERSRVITVDGNICTGKGKLAKEIAEKLGFKHFPEAGIHYPDSTTGDGKPLATDYNGNCSLEKFYDDPRSNDGNSYRLQSWLYSSRLLQYSDALEHLLTTGQGVVLERSIFSDFVFLEAMYNQGFIRKQCVDHYNEVKSVTICDYLPPHLVIYIDVPVPEVQRRIQKKGDVMQFSIKGQASLF

SEQ ID NO: 86786 - protein, 543 aa, Homo sapiens
MESSKKMDSPGALQTNPPLKLHTDRSAGTPVFVPEQGGYKEKFVKTVEDKYKCEKCHLVLCSPKQTECGHRFCESCMAALLSSSSPKCTACQESIVKDKVFKDNCCKREILALQIYCRNESRGCAEQLMLGHLLVHLKNDCHFEELPCVRPDCKEKVLRKDLRDHVEKACKYREATCSHCKSQVPMIALQKHEDTDCPCVVVSCPHKCSVQTLLRSEGTNQQIKAHEASSAVQHVNLLKEWSNSLEKKVSLLQNESVEKNKSIQSLHNQICSFEIEIERQKEMLRNNESKILHLQRVIDSQAEKLKELDKEIRPFRQNWEEADSMKSSVESLQNRVTELESVDKSAGQVARNTGLLESQLSRHDQMLSVHDIRLADMDLRFQVLETASYNGVLIWKIRDYKRRKQEAVMGKTLSLYSQPFYTGYFGYKMCARVYLNGDGMGKGTHLSLFFVIMRGEYDALLPWPFKQKVTLMLMDQGSSRRHLGDAFKPDPNSSSFKKPTGEMNIASGCPVFVAQTVLENGTYIKDDTIFIKVIVDTSDLPDP

SEQ ID NO: 86787 - protein, 409 aa, Homo sapiens
MSSLRARLPATRRRVAQPFARPASPSLVPRSGSAMESNKDEAERCISIALKAIQSNQPDRALRFLEKAQRLYPTPRVRALIESLNQKPQTAGDQPPPTDTTHATHRKAGGTDAPSANGEAGGESTKGYTAEQVAAVKRVKQCKDYYEILGVSRGASDEDLKKAYRRLALKFHPDKNHAPGATEAFKAIGTAYAVLSNPEKRKQYDQFGDDKSQAARHGHGHGDFHRGFEADISPEDLFNMFFGGGFPSSNVHVYSNGRMRYTYQQRQDRRDNQGDGGLGVFVQLMPILILILVSALSQLMVSSPPYSLSPRPSVGHIHRRVTDHLGVVYYVGDTFSEEYTGSSLKTVERNVEDDYIANLRNNCWKEKQQKEGLLYRARYFGDTDMYHRAQKMGTPSCSRLSEVQASLHG

SEQ ID NO: 86788 - protein, 806 aa, Homo sapiens
MGVFAVPPLSADTMWIQVRTMDGRQTHTVDSLSRLTKVEELRRKIQELFHVEPGLQRLFYRGKQMEDGHTLFDYEVRLNDTIQLLVRQSLVLPHSTKERDSELSDTDSGCCLGQSESDKSSTHGEAAAETDSRPADEDMWDETELGLYKVNEYVDARDTNMGAWFEAQVVRVTRKAPSRDEPCSSTSRPALEEDVIYHVKYDDYPENGVVQMNSRDVRARARTIIKWQDLEVGQVVMLNYNPDNPKERGFWYDAEISRKRETRTARELYANVVLGDDSLNDCRIIFVDEVFKIERPGEGSPMVDNPMRRKSGPSCKHCKDDVNRLCRVCACHLCGGRQDPDKQLMCDECDMAFHIYCLDPPLSSVPSEDEWYCPECRNDASEVVLAGERLRESKKKAKMASATSSSQRDWGKGMACVGRTKECTIVPSNHYGPIPGIPVGTMWRFRVQVSESGVHRPHVAGIHGRSNDGAYSLVLAGGYEDDVDHGNFFTYTGSGGRDLSGNKRTAEQSCDQKLTNTNRALALNCFAPINDQEGAEAKDWRSGKPVRVVRNVKGGKNSKYAPAEGNRYDGIYKVVKYWPEKGKSGFLVWRYLLRRDDDEPGPWTKEGKDRIKKLGLTMQYPEGYLEALANREREKENSKREEEEQQEGGFASPRTGKGKWKRKSAGGGPSRAGSPRRTSKKTKVEPYSLTAQQSSLIREDKSNAKLWNEVLASLKDRPASGSPFQLFLSKVEETFQCICCQELVFRPITTVCQHNVCKDCLDRSFRAQVFSCPACRYDLGRSYAMQVNQPLQTVLNQLFPGYGNGR

SEQ ID NO: 86789 - protein, 145 aa, Homo sapiens
MSASAATGVFVLSLSAIPVTYVFNHLAAQHDSWTIVGVAALILFLVALLARVLVKRKPPRDPLFYVYAVFGFTSVVNLIIGLEQDGIIDGFMTHYLREGEPYLNTAYGHMICYWDGSAHYLMYLVMVAAIAWECWHICSILFLTL

SEQ ID NO: 86790 - protein, 128 aa, Homo sapiens
  MOD_RES (1)..(1): Any amino acid
XLQPGQPSLHRAYEFLPDGPAASEVLSRQDGHSASSPLLCDAREGAGTVPPPHRPVAWPLALLLTVSQRTQRANQVVGRRGPPLCPKKKWHLLRLAPENLKTYQTFPSGKRVSPQERKKRDCYFEFRA

SEQ ID NO: 86791 - protein, 78 aa, Homo sapiens
MSLHFLYYCSEPTLDVKIAFCQGFDKQVDVSYIAKHYNMSKSKVDNQFYSVEVGDSTFTVLKRYQNLKPIGSGAQGIV

SEQ ID NO: 86792 - protein, 126 aa, Homo sapiens
MAATQKLVKDIIDSKTGETASKRWKGAKNSETAAKVALMKLKMHADGDKSLPQTERIYFQVFLPKGSKEKSKPMFFCHRWSIGKAIDFAASLARLKNDNNKFTAKAVSHYFRRSLTLGSYFGNLDC

SEQ ID NO: 86793 - protein, 95 aa, Homo sapiens
MFYFRGCGRWVAVSFTKQQFPLARLSSDSAAPRTPHFDVIVIGGGHAGTEAATAAARCGSRTLLLTHRVDTIGEERGCCGTWRRTQAASFPPPPV

SEQ ID NO: 86794 - protein, 71 aa, Homo sapiens
MRLFVSDGVPGCLPVLAAAGRARGRAEVLISTVGPEDCVVPFLTRPKVPVLQLDSGNYLFSTSAICRRQNL

SEQ ID NO: 86795 - protein, 105 aa, Homo sapiens
MAQLRRGHLTFRDVAIEFSQEEWKCLDPVQKALYRDVMLENYRNLVSLGICLPDLSIISMMKQRTEPWTVENEMKVAKNPDRWEGIKDINTDGVLFCRPGWSTVV

SEQ ID NO: 86796 - protein, 63 aa, Homo sapiens
MSAVVAQTLHVFGLRSHVANNIFYFDEQIIIFPSGNHCVKYNVDQKWQKFIPGSFWLLYRGQI

SEQ ID NO: 86797 - protein, 478 aa, Homo sapiens
MAEDGSEEIMFIWCEDCSQYHDSECPELGPVVMVKDSFVLSRARSSLPPNLEIRRLEDGAEGVFAITQLVKRTQFGPFESRRVAKWEKESAFPLKVFQKDGHPVCFDTSNEDDCNWMMLVRPAAEAEHQNLTAYQHGSDVYFTTSRDIPPGTELRVWYAAFYAKKMDKPMLKQAGSGVHAAGTPENSAPVESEPSQWACKVCSATFLELQLLNEHLLGHLEQAKSLPPGSQSEAAAPEKEQDTPRGEPPAVPESENVATKEQKKKPRRGRKPKVSKAEQPLVIVEDKEPTEQVAEIITEVPPDEPVSATPDERIMELVLGKLATTTTDTSSVPKHGIRRKLIKQLGEHKRVYQCNICSKIFQNSSNLSRHVRSHGDKLFKCEECAKLFSRKESLKQHVSYKHSRNEVDGEYRYRCGTCEKTFRIESALEFHNCRTATSPSTRRSTATRSLPVRSAARCSTARTSCWTTSAGTWKECGE

SEQ ID NO: 86798 - protein, 104 aa, Homo sapiens
MAVLWRLSAVCGALGGRALLLRTPVVRPAHISAFLQDRPIPEWCGVQHIHLSPSHHSGSKAASLHWTSERVVSVLLLGLLPAAYLNPCSAMDYSLAAALTLHGH

SEQ ID NO: 86799 - protein, 182 aa, Homo sapiens
SYDSTFSYVTHEDICNCFNGDTLLAIQAPSGTQLEVPIPEMGQNGQKKYQINLKSHSGPIHVLLINKESSSSKPVVFPVPPPDDLTQPSSQSLTPVTPQKSSMATQNLPEQHVSERSQALQQTSATDISSAGSISGDIIDELMSSDVFPLLRLSPTPADDYNFNLDDNEGVCDLFDVQILNY

SEQ ID NO: 86800 - protein, 473 aa, Homo sapiens
MDRNPSPPPPGRDKEEEEEVAGGDCIGSTVYSKHWLFGVLSGLIQIVSPENTKSSSDDEEQLTELDEEMENEICRVWDMSMDEDVALFLQEFNAPDIFMGVLAKSKCPRLREICVGILGNMACFQEICVSISSDKNLGQVLLHCLYDSDPPTLLETSRLLLTCLSQAEVASVWVERIQEHPAIYDSICFIMSSSTNVDLLVKVGEVVDKLFDLDEKLMLEWVRNGAAQPLDQPQEESEEQPVFRLVPCILEAAKQVRSENPEWLDVYMHILQLLTTVDDGIQAIVHCPDTGKDIWNLLFDLVCHEFCQSDDPPIILQEQKTVLASVFSVLSAIYASQTEQEYLKIEKDLPLIDSLIRVLQNMEQCQKKPENSAESNTEETKRTDLTQDDFHLKILKDILCEFLSNIFQALTKETVAQGVKEGQLSKQKCSSAFQNLLPFYSPVVEDFIKILREVDKALADDLEKNFPSLKVQT

SEQ ID NO: 86801 - protein, 520 aa, Homo sapiens
MTVSGKKQTMGFEVPGVSSEENGHSFHTPQKGPPIEDAIASSDVLETASKSANPPHTIQASEEQSSTPAPVKKSGKLRQQIDVKAELEKRQGGKQLLNLVVIGHVDAGKSTLMGHMLYLLGNINKRTMHKYEQESKKAGKASFAYAWVLDETGEERERGVTMDVGMTKFETTTKVITLMDAPGHKDFIPNMITGAAQADVAVLVVDASRGEFEAGFETGGQTREHGLLVRSLGVTQLAVAVNKMDQVNWQQERFQEITGKLGHFLKQAGFKESDVGFIPTSGLSGENLITRSQSSELTKWYKGLCLLEQIDSFKPPQRSIDKPFRLCVSDVFKDQGSGFCITGKIEAGYIQTGDRLLAMPPNETCTVKGITLHDEPVDWAAAGDHVSLTLVGMDIIKINVGCIFCGPKVPIKACTRFRARILIFNIEIPITKGFPVLLHYQTVSEPAVIKRLISVLNKSTGEVTKKKPKFLTKGQNALVELQTQRPIALELYKDFKELGRFMLRYGGSTIAAGVVTEIKE

SEQ ID NO: 86802 - protein, 73 aa, Homo sapiens
MAFTQLTFRDVAIEFSQDEWKCLNSTQRTLYRDVMLENYRNLVSLGWSAMVQSRLTATFASRIQMILLPQPPE

SEQ ID NO: 86803 - protein, 162 aa, Homo sapiens
  MOD_RES (1)..(1): Any amino acid
XGQGGTEMDGFRRTIENQHSRNDVMVSEWLNKLNLEEPPSSVPKKCPSLTKRSRAQEEQVPQAWTAGTSSDSMAQPPQTPETSTFRNQMPSPTSTGTPSPGPRGNQGAERQGMNWSCRTPEPNPVTGTHSLPLSFPCSILPPDSSSRPISRFRVLCGGEGRR

SEQ ID NO: 86804 - protein, 90 aa, Homo sapiens
MELVLVFLCSLLAPMVLASAAEKEKEMDPFHYDYQTLRIGGLVFAVVLFSVGILLILSRRCKCSFNQKPRNRAPESRELKCSHQVEASGT

SEQ ID NO: 86805 - protein, 1637 aa, Homo sapiens
MSWKRNYFSGGRGSVQGMFAPRSSTSIAPSKGLSNEPGQNSCFLNSALQVLWHLDIFRRSFRQLTTHKCMGDSCIFCALKGIFNQFQCSSEKVLPSDTLRSALAKTFQDEQRFQLGIMDDAAECFENLLMRIHFHIADETKEDICTAQHCISHQKFAMTLFEQCVCTSCGATSDPLPFIQMVHYISTTSLCNQAICMLERREKPSPSMFGELLQNASTMGDLRNCPSNCGERIRIRRVLMNAPQIITIGLVWDSDHSDLAEDVIHSLGTCLKLGDLFFRVTDDRAKQSELYLVGMICYYGKHYSTFFFQTKIRKWMYFDDAHVKEIGPKWKDVVTKCIKGHYQPLLLLYADPQGTPVSTQDLPPQAEFQSYSRTCYDSEDSGREPSISSDTRTDSSTESYPYKHSHHESVVSHFSSDSQGTVIYNVENDSMSQSSRDTGHLTDSECNQKHTSKKGSLIERKRSSGRVRRKGDEPQASGYHSEGETLKEKQAPRNASKPSSSTNRLRDFKETVSNMIHNRPSLASQTNVGSHCRGRGGDQPDKKPPRTLPLHSRDWEIESTSSESKSSSSSKYRPTWRPKRESLNIDSIFSKDKRKHCGYTQLSPFSEDSAKEFIPDEPSKPPSYDIKFGGPSPQYKRWGPARPGSHLLEQHPRLIQRMESGYESSERNSSSPVSLDAALPESSNVYRDPSAKRSAGLVPSWRHIPKSHSSSILEVDSTASMGGWTKSQPFSGEEISSKSELDELQEEVARRAQEQELRRKREKELEAAKGFNPHPSRFMDLDELQNQGRSDGFERSLQEAESVFEESLHLEQKGDCAAALALCNEAISKLRLALHGASCSTHSRALVDKKLQISIRKARSLQDRMQQQQSPQQPSQPSACLPTQAGTLSQPTSEQPIPLQVLLSQEAQLESGMDTEFGASSFFHSPASCHESHSSLSPESSAPQHSSPSRSALKLLTSVEVDNIEPSAFHRQGLPKAPGWTEKNSHHSWEPLDAPEGKLQGSRCDNSSCSKLPPQEGRGIAQEQLFQEKKDPANPSPVMPGIATSERGDEHSLGCSPSNSSAQPSLPLYRTCHPIMPVASSFVLHCPDPVQKTNQCLQGQSLKTSLTLKVDRGSEETYRPEFPSTKGLVRSLAEQFQRMQGVSMRDSTGFKDRSLSGSLRKNSSPSDSKPPFSQGQEKGHWPWAKQQSSLEGGDRPLSWEESTEHSSLALNSGLPNGETSSGGQPRLAEPDIYQEKLSQVRDVRSKDLGSSTDLGTSLPLDSWVNITRFCDSQLKHGAPRPGMKSSPHDSHTCVTYPERNHILLHPHWNQDTEQETSELESLYQASLQASQAGCSGWGQQDTAWHPLSQTGSADGMGRRLHSAHDPGLSKTSTAEMEHGLHEARTVRTSQDSSNVRKPLETGHRCSSSSSLPVIHDPSVFLLGPQLYLPQPQFLSPDVLMPTMAGEPNRLPGTSRSVQQFLAMCDRGETSQGAKYTGRTLNYQSLPHRSRTDNSWAPWSETNQHIGTRFLTTPGCNPQLTYTATLPERSKGLQVPHTQSWSDLFHSPSHPPIVHPVYPPSSSLHVPLRSAWNSDPVPGSRTPGPRRVDMPPDDDWRQSSYASHSGHRRTVGEGFLFVLSDAPRREQIRARVLQHSQW

SEQ ID NO: 86806 - protein, 183 aa, Homo sapiens
PFSSVTAGVSALEVYTPKEIFVANGTQGKLTCKFKSTSTTGGLTSVSWSFQPEGADTTVSFFHYSQGQVYLGNYPPFKDRISWAGDLDKKDASINIENMQFIHNGTYICDVKNPPDIVVQPGHIRLYVVEKENLPVFPVWVVVGIVTAVVLGLTLLISMILAVLYRRKNSKRDYTGAQSYMHS

SEQ ID NO: 86807 - protein, 50 aa, Homo sapiens
MLIKVKTLTGKEIEIDIEPTDKVERIKERVEEKEGIPPQQQRLIYSGKQM

SEQ ID NO: 86808 - protein, 464 aa, Homo sapiens
MLIITHREVQREYNLNFSGSSTIQEVKRNVYDLTSIPVRHQLWEGWPTSATDDSMCLAESGLSYPCHRLTVGRRSSPAQTREQSEEQITDVHMVSDSDGDDFEDATEFGVDDGEVFGMASSALRKSPMMPENAENEGDALLQFTAEFSSRYGDCHPVFFIGSLEAAFQEAFYVKARDRKLLAIYLHHDESVLTNVFCSQMLCAESIVSYLSQNFITWAWDLTKDSNRARFLTMCNRHFGSVVAQTIRTQKTDQFPLFLIIMGKRSSNEVLNVIQGNTTVDELMMRLMAAMEIFTAQQQEDIKDEDEREARENVKREQDEAYRLSLEADRAKREAHEREMAEQFRLEQIRKEQEEEREAIRLSLEQALPPEPKEENAEPVSKLRIRTPSGEFLERRFLASNKLQIVFDFVASKGFPWDEYKLLSTFPRRDIPGLSRMGKHACSRSLYIHFMFFILILKTWIISCF

SEQ ID NO: 86809 - protein, 1275 aa, Homo sapiens
MGFAPGKAVGSHIRGHYERILNPYNLFLSGDSLRCLQKPNLTTDTKDKEYKPHDIPQRQSVQPSETCPPARRAKRMRAEAMNIKIEPEETTEARTHNLRRRMGCPTPKCENEKEMKSSIKQEPIERKDYIVENEKEKPKSRSKKATNAVDLYVCLLCGSGNDEDRLLLCDGCDDSYHTFCLIPPLHDVPKGDWRCPKCLAQECSKPQEAFGFEQAARDYTLRTFGEMADAFKSDYFNMPVHMVPTELVEKEFWRLVSTIEEDVTVEYGADIASKEFGSGFPVRDGKIKLSPEEEEYLDSGWNLNNMPVMEQSVLAHITADICGMKLPWLYVGMCFSSFCWHIEDHWSYSINYLHWGEPKTWYGVPGYAAEQLENVMKKLAPELFVSQPDLLHQLVTIMNPNTLMTHEVPVYRTNQCAGEFVITFPRAYHSGFNQGFNFAEAVNFCTVDWLPLGRQCVEHYRLLHRYCVFSHDEMICKMASKADVLDVVVASTVQKDMAIMIEDEKALRETVRKLGVIDSERMDFELLPDDERQCVKCKTTCFMSAISCSCKPGLLVCLHHVKELCSCPPYKYKLRYRYTLDDLYPMMNALKLRAESYNEWALNVNEALEAKINKKKSLVSFKALIEESEMKKFPDNDLLRHLRLVTQDAEKCASVAQQLLNGKRQTRYRSGGGKSQNQLTVNELRQFVTQLYALPCVLSQTPLLKDLLNRVEDFQQHSQKLLSEETPSAAELQDLLDVSFEFDVELPQLAEMRIRLEQARWLEEVQQACLDPSSLTLDDMRRLIDLGVGLAPYSAVEKAMARLQELLTVSEHWDDKAKSLLKARPRHSLNSLATAVKEIEEIPAYLPNGAALKDSVQRARDWLQDVEGLQAGGRVPVLDTLIELVTRGRSIPVHLNSLPRLETLVAEVQAWKECAVNTFLTENSPYSLLEVLCPRCDIGLLGLKRKQRKLKEPLPNGKKKSTKLESLSDLERALTESKETASAMATLGEARLREMEALQSLRLANEGKLLSPLQDVDIKICLCQKAPAAPMIQCELCRDAFHTSCVAVPSISQGLRIWLCPHCRRSEKPPLEKILPLLASLQRIRVRLPEGDALRYMIERTVNWQHRAQQLLSSGNLKFVQDRVGSGLLYSRWQASAGQVSDTNKVSQPPGTTSFSLPDDWDNRTSYLHSPFSTGRSCIPLHGVSPEVNELLMEAQLLQVSLPEIQELYQTLLAKPSPAQQTDRSSPVRPSSEKNDCCRGKRDGINSLERKLKRRLEREGLSSERWERVKKMRTP

SEQ ID NO: 86810 - protein, 109 aa, Homo sapiens
MDWQPDEQGLQQVLQLLKDSQSPNTATQRIVQDKLKQLNQFPDFNNYLIFVLTRLKSEDEPTRSLSGLILKNNVKAHYQSFPPPVADFIKQECLNNIGDASSLIRATIG

SEQ ID NO: 86811 - protein, 147 aa, Homo sapiens
LGLLSLILLLGAKVTTANKTDSFLFSMGLTVLSSPGLKMSMLGRPPTPPQLTQVPTSGCVDLQKGPLLSPVRHPRGHTGPQILPQAWEPTGRRVRQCRGPQTFPKRPESKYFRLCGPQVLCCKTQFCYCSSKAAVDNSEGNECVVSQ

SEQ ID NO: 86812 - protein, 119 aa, Homo sapiens
MGPLTFRDVAIEFSLKEWQCLDTAQRNLYRNVMLENYRNLVFLDLITCLEQGKEAWSMKRHEIMVAKPTVMCSHFAQDLWPEQNIKDSFQKVTLKRYGKCRHENLPLRKGCESMDECKM

SEQ ID NO: 86813 - protein, 13 aa, Homo sapiens
MAAETQTLNFGPE

SEQ ID NO: 86814 - protein, 311 aa, Homo sapiens
MGIIQSILATSRDCYSFKKKPIPKKPTMLALAKILLISTLFYSLLSGSHGKENQDINTTQNIAEVFKTMENKPISLESEANLNSDKENITTSNLKASHSPPLNLPNNSHGITDFSSNSSAEHSLGSLKPTSTISTSPPLIHSFVSKVPWNAPIADEDLLPISAHPNATPALSSENFTWSLVNDTVKTPDNSSITVSILSSEPTSPSVTPLIVEPSGWLTTNSDSFTGFTPYQEKTTLQPTLKFTNNSKLFPNTSDPQKVLRLDNAPEPYDVSFGNSSYYNPTLNDSAMPESEENARDGIPMDDIPPLRTSV

SEQ ID NO: 86815 - protein, 54 aa, Homo sapiens
MGSRCALALAVLSALLCQVWSSGVFELKLQEFVNKKGLLGNRNCCRGGAGPPPC

SEQ ID NO: 86816 - protein, 125 aa, Homo sapiens
MKGDYYRYLAEVAAGDDKKGIVDQSQQAYQEAFEISKKEMQPTHPIRLGLALNFSVFYYEILNSPEKACSLAKTAFDEAIAELDTLSEESYKDSTLIMQLLRDNLTLWTSDTQGDEAEAGEGGEN

SEQ ID NO: 86817 - protein, 225 aa, Homo sapiens
MAEKDANSVTSSLRKANLDKRLLELFPVNRQSVDHFAKYFTDAGLKELSDFLRVQQSLGTRKELQKELQERLSQECPIKEVVLYVKEEMKRNDLPETAVIGLLWTCIMNAVEWNKKEELVAEQALKHLKQYAPLLAVFSSQGQSELILLQKVQEYCYDNIHFMKAFQKIVVLFYKADVLSEEAILKWYKEAHVAKGKSVFLDQMKKFVEWLQNAEEESESEGEEN

SEQ ID NO: 86818 - protein, 239 aa, Homo sapiens
MSLYPSLEDLKVDKVIQAQTAFSANPANPAILSEASAPIPHDGNLYPRLYPELSQYMGLSLNEEEIRANVAVVSGAPLQGLVQANSPASLVGLRFGDQVLQINGENCAGWSSDKAHKVLKQAFGEKITMTIRDRPFERTITMHKDSTGHVGFIFKNGKITSIVKDSSAARNGLLTEHNICEINGQNVIGLKDSQIADILSTSGTVVTITIMPAFIFEHIIKRMAPSIMKSLMDHTIPEV

SEQ ID NO: 86819 - protein, 354 aa, Homo sapiens
MFINIKSILWMCSTLIVTHALHKVKVGKSPPVRGSLSGKVSLPCHFSTMPTLPPSYNTSEFLRIKWSKIEVDKNGKDLKETTVLVAQNGNIKIGQDYKGRVSVPTHPEAVGDASLTVVKLLASDAGLYRCDVMYGIEDTQDTVSLTVDGVVFHYRAATSRYTLNFEAAQKACLDVGAVIATPEQLFAAYEDGFEQCDAGWLADQTVRYPIRAPRVGCYGDKMGKAGVRTYGFRSPQETYDVYCYVDHLDGDVFHLTVPSKFTFEEAAKECENQDARLATVGELQAAWRNGFDQCDYGWLSDASVRHPVTVARAQCGGGLLGVRTLYRFENQTGFPPPDSRFDAYCFKRKCLIPF

SEQ ID NO: 86820 - protein, 568 aa, Homo sapiens
MLERPPALAMPMPTEGTPPPLSGTPIPVPAYFRHAEPGFSLKRPRGLSRSLPPPPPAKGSIPISRLFPPRTPGWHQLQPRRVSFRGEASETLQSPGYDPSRPESFFQQSFQRLSRLGHGSYGEVFKVRSKEDGRLYAVKRSMSPFRGPKDRARKLAEVGSHEKVGQHPCCVRLEQAWEEGGILYLQTELCGPSLQQHCEAWGASLPEAQVWGYLRDTLLALAHLHSQGLVHLDVKPANIFLGPRGRCKLGDFGLLVELGTAGAGEVQEGDPRYMAPELLQGSYGTAADVFSLGLTILEVACNMELPHGGEGWQQLRQGYLPPEFTAGLSSELRSVLVMMLEPDPKLRATAEALLALPVLRQPRAWGVLWCMAAEALSRGWALWQALLALLCWLWHGLAHPASWLQPLGPPATPPGSPPCSLLLDSSLSSNWDDDSLGPSLSPEAVLARTVGSTSTPRSRCTPRVLTPLRLSPAAEPSAPGLGPAAEAPCCVEQRGFLSRHIPRSFSAFQAAPPKSACNALHLHGHTQPSAFVWSLTCSSHHGRTFEARTKVDPLFKICGGFLTVFADL

SEQ ID NO: 86821 - protein, 296 aa, Homo sapiens
MLFMKMDLLNYQYLDKMNNNIGILCYEGEAALRGEPRIQTLPVASALSSHRTGPPPISPSKRKFSMEPGDEDLDCDNDHVSKMSRIFNPHLNKTANGDCRRDPRERSRSPIERAVAPTMSLHGSHLYTSLPSLGLEQPLALTKNSLDASRPAGLSPTLTPGERQQNRPSVITCASAGARNCNLSHCPIAHSGCAAPGPASYRRPPSAATTCDPVVEEHFRRSLGKNYKEPEPAPNSVSITGSVDDHFAKALGDTWLQIKAAKDGASSSPESASRRGQPASPSAHMVSHSHSPSVVS

SEQ ID NO: 86822 - protein, 333 aa, Homo sapiens
MTSKQAMSSNEQERLLCYNGEVLVFQLSKGNFADKEPTKTPILHVRRMVFDRGTKVFVQKSTGFFTIKEENSHLKIMCCNCVSDFRTGINLPYIVIEKNKKNNVFEYFLLILHSTNKFEMRLSFKLGYEMKDGLRVLNGPLILWRHVKAFFFISSQTGKVVSVSGNFSSIQWAGEIENLGMVLLGLKECCLSEEECTQEPSKSDYAIWNTKFCVYSLESQEVLSDIYIIPPAYSSVVTYVHICATEIIKNQLRISLIALTRKNQLISFQNGTPKNVCQLPFGDPCAVQLMDSGGGNLFFVVSFISNNACAVWKESFQVLQEFCTSNLLSNALF

SEQ ID NO: 86823 - protein, 487 aa, Homo sapiens
MPVPERPAAGPDSPRPGTRRAAPRVLFGEWLLGEISSGCYEGLQWLDEARTCFRVPWKHFARKDLSEADARIFKAWAVARGRWPPSSRGGGPPPEAETAERAGWKTNFRCALRSTRRFVMLRDNSGDPADPHKVYALSRELCWREGPGTDQTEAEAPAAVPPPQGGPPGPFLAHTHAGLQAPGPLPAPAGDKGDLLLQAVQQSCLADHLLTASWGADPVPTKAPGEGQEGLPLTGACAGGEAAAPESPHQAEPYLSPSPSACTAVQEPSPGALDVTIMYKGRTVLQKVVGHPSCTFLYGPPDPAVRATDPQQVAFPSPAELPDQKQLRYTEELLRHVAPGLHLELRGPQLWARRMGKCKVYWEVGGPPGSASPSTPACLLPRNCDTPIFDFRVFFQELVEFRARQRRGSPRYTIYLGFGQDLSAGRPKEKSLVLVKLEPWLCRVHLEGTQREGVSSLDSSSLSLCLSSANSLYDDIECFLMELEQPA

SEQ ID NO: 86824 - protein, 57 aa, Homo sapiens
MVDKKLVVVFGGTEIWFHHVAQAGLKLLSSRDLRASASQSVWITGMSPWAQLQRAKS

SEQ ID NO: 86825 - protein, 186 aa, Homo sapiens
MRMTMEEMKNEAETTSMVSMPLYAVMYPVFNELERVNLSAAQTLRAAFIKAEKENPGLTQDIIMKILEKKSVEVNFTESLLRMAADDVEEYMIERPEPEFQDLNEKARALKQILSKIPDEINDRVRFLQTIKDIASAIKELLDTVNNVFKKYQYQNRRALEHQKKEFVKYSKSFSDTLKTYFKDGK

SEQ ID NO: 86826 - protein, 40 aa, Homo sapiens
MADGKAGDEKPEKSQRAGAAGVNSWEPLLLPHNLSSCCIL

SEQ ID NO: 86827 - protein, 130 aa, Homo sapiens
MKETIFELEDQVEQHRAVKLHNNQLISELESSVIKLEEQKSDLERQLKTLTKQMKEETEEWRRFQADLQTAVVVANDIKCEAQQELRTVKRKLLEEEEKNARLQKELGDVQGHGRVVTSRAAPPSLGSVS

SEQ ID NO: 86828 - protein, 261 aa, Homo sapiens
MATNFLAHEKIWFDKFKYDDAERRFYEQMNGPVAGASRQENGASVILRDIARARENIQKSLAGSSGPGASSGTSGDHGELVVRIASLEVENQSLRGVVQELQQAISKLEARLNVLEKSSPGHRATAPQTQHVSPMRQVEPPAKKPATPAEDDEDDDIDLFGSDNEEEDKEAAQLREERLRQYAEKKAKKPALVAKSSILLDVKPWDDETDMAQLEACVRSIQLDGLVWGASKLVPVGYGIRKLQIQCVVEDDKVGTDLLEE

SEQ ID NO: 86829 - protein, 563 aa, Homo sapiens
MTVLEITLAVILTLLGLAILAILLTRWARRKQSEMYISRYSSEQSARLLDYEDGRGSRHAYSTQSDTSYDNRERSKRDYTPSTNSLVSMASKFSLGQTELILLLMCFILALSRSSIGSIKCLQTTEEPPSRTAGAMMQFTAPIPGATGPIKLSQKTIVQTLGPIVQYPGSNAGPPSAPRGPPMAPIIISQRTARIPQVHTMDSSGKITLTPVVILTGYMDEELAKKSCSKIQILKCGGTARSQNSREENKEALKNDIIFTNSVESLKSAHIKEPEREGKGTDLEKDKIGMEVKVDSDAGIPKRQETQLKISEMSVPQGQGAQIKKSVSDVPRGQESQVKKSESGVPKGQEAQVTKSGLVVLKGQEAQVEKSEMGVPRRQESQVKKSQSGVSKGQEAQVKKRESVVLKGQEAQVEKSELKVPKGQEGQVEKTEADVPKEQEVQEKKSEAGVLKGPESQVKNTEVSVPETLESQVKKSESGVLKGQEAQEKKESFEDKGNNDKEKERDAEKDPNKKEKGDKNTKGDKGKDKVKGKRESEINGEKSKGSKRAKANTGRKYNKKVEE

SEQ ID NO: 86830 - protein, 2334 aa, Homo sapiens
MQPPPQTVPSGMAGPPPAGNPRSVFWASSPYRRRANNNAAVAPTTCPLQPVTDPFAFSRQALQSTPLGSSSKSSPPVLQGPAPAGFSQHPGLLVPHTHARDSSQGPCEPLPGPLTQPRAHASPFSGALTPSAPPGPEMNRSAEVGPSSEPEVQTLPYLPHYIPGVDPETSHGGHPHGNMPGLDRPLSRQNPHDGVVTPAASPSLPQPGLQMPGQWGPVQGGPQPSGQHRSPCPEGPVPSGVPCATSVPHFPTPSILHQGPGHEQHSPLVAPPAALPSDGRDEVSHLQSGSHLANNSDPESTFRQNPRIVNHWASPELRQNPGVKNEHRPASALVNPLARGDSPENRTHHPLGAGAGSGCAPLEADSGASGALAMFFQGGETENEENLSSEKAGLSGQADFDDFCSSPGLGRPPAPTHVGAGSLCQALLPGPSNEAAGDVWGDTASTGVPDASGSQYENVENLEFVQNQEVLPSEPLNLDPSSPSDQFRYGPLPGPAVPRHGAVCHTGAPDATLHTVHPDSVSSSYSSRSHGRLSGSARPQELVGTFIQQEVGKPEDEASGSFFKQIDSSPVGGETDETTVSQNYRGSVSQPSTPSPPKPTGIFQTSANSSFEPVKSHLVGVKPFEADRANVVGEVRETCVRQKQCRPAAALPDASPGNLEQPPDNMETLCAPQVCPLPLNSTTEAVHMLPHAGAPPLDTVYPAPEKRPSARTQGPVKCESPATTLWAQSELPDFGGNVLLAPAAPALYVCAKPQPPVVQPPEEAMSGQQSRNPSSAAPVQSRGGIGASENLENPPKMGEEEALQSQASSGYASLLSSPPTESLQNPPVLIAQPDHSYNLAQPINFSVSLSNSHEKNQSWREALVGDRPAVSSWALGGDSGENTSLSGIPTSSVLSLSLPSSVAQSNFPQGSGASEMVSNQPANLLVQPPSQPVPENLVPESQKDRKAGSALPGFANSPAGSTSVVLVPPAHGTLVPDGNKANHSSHQEDTYGALDFTLSRTLENPVNVYNPSHSDSLASQQSVASHPRQSGPGAPNLDRFYQQVTKDAQGQPGLERAQQELVPPQQQASPPQLPKAMFSELSNPESLPAQGQAQNSAQSPASLVLVDAGQQLPPRPPQSSSVSLVSSGSGQAAVPSEQPWPQPVPALAPGPPPQDLAAYYYYRPLYDAYQPQYSLPYPPEPGAASLYYQDVYSLYEPRYRPYDGAASAYAQNYRYPEPERPSSRASHSSERPPPRQGYPEGYYSSKSGWSSQSDYYASYYSSQYDYGDPGHWDRYHYSARVRDPRTYDRRYWCDAEYDAYRREHSAFGDRPEKRDNNWRYDPRFTGSFDDDPDPHRDPYGEEVDRRSVHSEHSARSLHSAHSLASRRSSLSSHSHQSQIYRSHNVAAGSYEAPLPPGSFHGDFAYGTYRSNFSSGPGFPEYGYPADTVWPAMEQVSSRPTSPEKFSVPHVCARFGPGGQLIKVIPNLPSEGQPALVEVHSMEALLQHTSEQEEMRAFPGPLAKDDTHKVDVINFAQNKAMKCLQNENLIDKESASLLWNFIVLLCRQNGTVVGTDIAELLLRDHRTVWLPGKSPNEANLIDFTNEAVEQVEEEESGEAQLSFLTGGPAAAASSLERETERFRELLLYGRKKDALESAMKNGLWGHALLLASKMDSRTHARVMTRFANSLPINDPLQTVYQLMSGRMPAASTCCGDEKWGDWRPHLAMVLSNLNNNMDVESRTMATMGDTLASRGLLDAAHFCYLMAQAGFGVYTKKTTKLVLIGSNHSLPFLKFATNEAIQRTEAYEYAQSLGAETCPLPSFQVFKFIYSCRLAEMGLATQAFHYCEAIAKSILTQPHLYSPVLISQLVQMASQLRLFDPQLKEKPEEESLAAPTWLVHLQQVERQIKEGAGVWHQDGALPQQCPGTPSSEMEQLDRPGLSQPGALGIANPLLAVPAPSPEHSSPSVRLLPSAPQTLPDGPLASPARVPMFPVPLPPGPLEPGPGCVTPGPALGFLEPSGPGLPPGVPPLQERRHLLQEARSPDPGIVPQEAPVGNSLSELSEENFDGKFANLTPSRTVPDSEAPPGWDRADSGPTQPPLSLSPAPETKRPGQAAKKETKEPKKGESWFFRWLPGKKKTEAYLPDDKNKSIVWDEKKNQWVNLNEPEEEKKAPPPPPTSMPKTVQAAPPALPGPPGAPVNMYSRRAAGTRARYVDVLNPSGTQRSEPALAPADFVAPLAPLPIPSNLFVPTPVSSVRPQGRSGRNDGLLALSSPDAEEPQLPDGTGREGPAAARGLANPEPAPEPKAPGDLPAAGGPPSGAMPFYNPAQLAQACATSGSSRLGRIGQRKHLVLN

SEQ ID NO: 86831 - protein, 329 aa, Homo sapiens
MWAVLRLALRPCARASPAGPRAYHGDSVASLGTQPDLGSALYQENYKQMKALVNQLHERVEHIKLGGGEKARALHISRGKLLPRERIDNLIDPGSPFLELSQFAGYQLYDNEEVPGGGIITGIGRVSGVECMIIANDATVKGGAYYPVTVKKQLRAQEIAMQNRLPCIYLVDSGGAYLPRQADVFPDRDHFGRTFYNQAIMSSKNIAQVKAATGEEVSAEDLGGADLHCRKSGVSDHWALDDHHALHLTRKVVRNLNYQKKLDVTIEPSEEPLFPADELYGIVGANLKRSFDVREVIARIVDGSRFTEFKAFYGDTLVTGIKPLEKHKT

SEQ ID NO: 86832 - protein, 85 aa, Homo sapiens
MSDEEARQSGGSSQAGVVTVSDVQELMRRKEEIEAQIKANYDVLESQKGIGMNEPLVDCEGYPRSDVDLYQVRTARHNIIWSASG

SEQ ID NO: 86833 - protein, 700 aa, Homo sapiens
MAGLTAAAPRPGVLLLLLSILHPSRPGGVPGAIPGGVPGGVFYPALGPGGKPLKPVPGGLAGAGLGAGLGAFPAVTFPGALVPGGVADAAAAYKAAKAGAGLGGVPGVGGLGVSAAPSVPGAVVPQPGAGVKPGKVPGVGLPGVYPGGVLPGARFPGVGVLPGVPTGAGVKPKAPGVGGAFAGIPGVGPFGGPQPGVPLGYPIKAPKLPGGYGLPYTTGKLPYGYGPGGVAGAAGKAGYPTGTGVGPQAAAAAAAKAAAKFGAGAAGVLPGVGGAGVPGVPGAIPGIGGIAGVGTPAAAAAAAAAAKAAKYGAAAGLVPGGPGFGPGVVGVPGAGVPGVGVPGAGIPVVPGAGIPGAAVPGVVSPEAAAKAAAKAAKYGARPGVGVGGIPTYGVGAGGFPGFGVGVGGIPGVAGVPGVGGVPGVGGVPGVGISPEAQAAAAAKAAKYGLVPGVGVAPGVGVAPGVGVAPGVGLAPGVGVAPGVGVAPGVGVAPGIGPGGVAAAAKSAAKVAAKAQLRAAAGLGAGIPGLGVGVGVPGLGVGAGVPGLGVGAGVPGFGAVPGALAAAKAAKYGAAVPGVLGGLGALGGVGIPGGVVGAGPAAAAAAAKAAAKAAQFGLVGAAGLGGLGVGGLGVPGVGGLGGIPPAAAAKAAKYGAAGLGGVLGGAGQFPLGGVAARPGFGLSPIFPGGACLGKACGRKRK

SEQ ID NO: 86834 - protein, 48 aa, Homo sapiens
LDKFMGEMQYGLFHGEGVRQCGLGARPFRFSYKGNVVQLNISSQMTWP

SEQ ID NO: 86835 - protein, 37 aa, Homo sapiens
MSALNWKPFVYGGLASITAECGLPPRCYARHPMAPSR

SEQ ID NO: 86836 - protein, 65 aa, Homo sapiens
MAIRAQHSNAAQTQTGEANRGWTGQESLSDSDPEMWELLQREKDRQCRGLELIASEILWGSRGGG

SEQ ID NO: 86837 - protein, 85 aa, Homo sapiens
MYGKIIFVLLLSGERVQLAHHFSEPEITLIIFGVMAGVIGTILLISYGIRRLIKKSPSDVKPLPSPDTDVPLSSVEIENPETSDQ

SEQ ID NO: 86838 - protein, 104 aa, Homo sapiens
MSSGADGGGGAAVAARSDKGSPGEDGFVPSALGTREHWDAVYERELQTFREYGDTGEIWFGEESMNRLIRWMQKHKIPLDASVLDIGTGNGVFLVELVGKIWFL

SEQ ID NO: 86839 - protein, 188 aa, Homo sapiens
MKKAVSLINAIDTGRFPRLLTRILQKLHLKAESSFSEEEEEKLQAAFSLEKQDLHLVLETISFILEQAVYHNVKPAALQQQLENIHLRQDKAEAFVNTWSSMGQETVEKFRQRILAPCKLETVGWQLNLQMAHSAQAKLKSPQAVLQLGVNNEDSKSLEKVLVEFSHKELFDFYNKLETIQAQLDSLT

SEQ ID NO: 86840 - protein, 166 aa, Homo sapiens
MGPEALSSLLLLLLVASGDADMKGHFDPAKCRYALGMQDRTIPDSDISASSSWSDSTAARHSRLESSDGDGAWCPAGSVFPKEEEYLQVDLQRLHLVALVGTQGRHAGGLGKEFSRSYRLRYSRDGRRWMGWKDRWGQEVISGNEDPEGVVLKDLGPPMVARLVRF

SEQ ID NO: 86841 - protein, 1810 aa, Homo sapiens
MTTMLQKSDSNASFLRAARAGNLDKVVEYLKGGIDINTCNQNGLNALHLAAKEGHVGLVQELLGRGSSVDSATKKGNTALHIASLAGQAEVVKVLVKEGANINAQSQNGFTPLYMAAQENHIDVVKYLLENGANQSTATEDGFTPLAVALQQGHNQAVAILLENDTKGKVRLPALHIAARKDDTKSAALLLQNDHNADVQSKSGFTPLHIAAHYGNVNVATLLLNRGAAVDFTARNGITPLHVASKRGNTNMVKLLLDRGGQIDAKTRDGLTPLHCAARSGHDQVVELLLERGAPLLARTKNGLSPLHMAAQGDHVECVKHLLQHKAPVDDVTLDYLTALHVAAHCGHYRVTKLLLDKRANPNARALNGFTPLHIACKKNRIKVMELLVKYGASIQAITESGLTPIHVAAFMGHLNIVLLLLQNGASPDVTNIRGETALHMAARAGQVEVVRCLLRNGALVDARAREEQTPLHIASRLGKTEIVQLLLQHMAHPDAATTNGYTPLHISAREGQVDVASVLLEAGAAHSLATKKGFTPLHVAAKYGSLDVAKLLLQRRAAADSAGKNGLTPLHVAAHYDNQKVALLLLEKGASPHATAKNGYTPLHIAAKKNQMQIASTLLNYGAETNIVTKQGVTPLHLASQEGHTDMVTLLLDKGANIHMSTKSGLTSLHLAAQEDKVNVADILTKHGADQDAHTKLGYTPLIVACHYGNVKMVNFLLKQGANVNAKTKNGYTPLHQAAQQGHTHIINVLLQHGAKPNATTANGNTALAIAKRLGYISVVDTLKVVTEEVTTTTTTITEKHKLNVPETMTEVLDVSDEEGDDTMTGDGGEYLRPEDLKELGDDSLPSSQFLDGMNYLRYSLEGGRSDSLRSFSSDRSHTLSHASYLRDSAVMDDSVVIPSHQVSTLAKEAERNSYRLSWGTENLDNVALSSSPIHSGFLVSFMVDARGGAMRGCRHNGLRIIIPPRKCTAPTRVTCRLVKRHRLATMPPMVEGEGLASRLIEVGPSGAQFLGPVIVEIPHFAALRGKERELVVLRSENGDSWKEHFCDYTEDELNEILNGMDEVLDSPEDLEKKRICRIITRDFPQYFAVVSRIKQDSNLIGPEGGVLSSTVVPQVQAVFPEGALTKRIRVGLQAQPMHSELVKKILGNKATFSPIVTLEPRRRKFHKPITMTIPVPKASSDVMLNGFGGDAPTLRLLCSITGGTTPAQWEDITGTTPLTFVNECVSFTTNVSARFWLIDCRQIQESVTFASQVYREIICVPYMAKFVVFAKSHDPIEARLRCFCMTDDKVDKTLEQQENFAEVARSRDVEVLEGKPIYVDCFGNLVPLTKSGQHHIFSFFAFKENRLPLFVKVRDTTQEPCGRLSFMKEPKSTRGLVHQAICNLNITLPIYTKESESDQEQEEEIDMTSEKNPQDEQERIEERLAYIADHLGFSWTELARELDFTEEQIHQIRIENPNSLQDQSHALLKYWLERDGKHATDTNLVECLTKINRMDIVHLMETNTEPLQERISHSYAEIEQTITLDHSEGFSVLQEELCTAQHKQKEEQAVSKESETCDHPPIVSEEDISVGYSTFQDGVPKTEGDSSATALFPQTHKEQVQQDFSGKMQDLPEESSLEYQQEYFVTTPGTETSETQKAMIVPSSPSKTPEEVSTPAEEEKLYLQTPTSSERGGSPIIQEPEEPSEHREESSPRKTSLVIVESADNQPETCERLDEDAAFEKGDDMPEIPPETVTEEEYIDEHGHTVVKKVTRKIIRRYVSSEGTEKEEIMVQGMPQEPVNIEEGDGYSKVIKRVVLKSDTEQSEDNNE

SEQ ID NO: 86842 - protein, 110 aa, Homo sapiens
MANEEDDPVVQEIDVYLAKSLAEKLYLFQYPVRPASMTYDDIPHLSAKIKPKQQKVELEMAIDTLNPNYCRSKGEQIALNVDGACADETSTYSSKLMDKQTFCSSQTTSN

SEQ ID NO: 86843 - protein, 133 aa, Homo sapiens
MKDGVPLPLPPSPVLILPEIGPQDQGTYSCVATHSSHGPQESRAVSISIIEPGEEGPTAGSVGGSGLGTLALALGILGGLGTAALLIGVILWQRRQRRGEERKAPENQEEEEERAELNQSEEPEAGESSTGGP

SEQ ID NO: 86844 - protein, 158 aa, Homo sapiens
MTPALTALLCLGLSLGPRTRMQAGPFPKPTLWAEPGSVISWGSPVTIWCQGSLEAQEYQLDKEGSPEPWDRNNPLEPKNKARFSIPSMTQHHAGRYRCHYYSSAGWSEPSDPLELVMTGFYNKPTLSALPSPVVASGGNMTLRCGSQKGYHHFVLMKE

SEQ ID NO: 86845 - protein, 194 aa, Homo sapiens
MFIFSEEKRRQLQEERPELSESELTRLLARMWNDLSEKKKAKYKAREAALKAQSERKPGGEREERGKLPESPKRAEEIWQQSVIGDYLARFKNDRVKALKAMEMTWNNMEKKEKLMWIKKAAEDQKRYERELSEMRAPPAATNSSKKMKFQGEPKKPPMNGYQKFSQELLSNGELNHLPLKERMVEIGSRWQRI

SEQ ID NO: 86846 - protein, 330 aa, Homo sapiens
MSLTVVSMACVGFFLLQGAWPHEGVHRKPSLLAHPGRLVKSEETVILQCWSDVMFEHFLLHREGMFNDTLRLIGEHHDGVSKANFSISRMKQDLAGTYRCYGSVTHSPYQLSAPSDPLDIVIIGLYEKPSLSAQPGPTVLAGENVTLSCSSRSSYDMYHLSREGEAHERRLPAGTKVNGTFQANFPLGPATHGGTYRCFGSFRDSPYEWSKSSDPLLVSVTGNPSNSWPSPTEPSSETERMFHHVGQACLKLPTSSDPTVSACQSNPRHLHVLIGTSVVKIPFTILLFFLLHRWCSDKKNAAVMDQEPAGNRTVNSEDSDEQDHQEVSYA

SEQ ID NO: 86847 - protein, 110 aa, Homo sapiens
MSAIQAAWPSGTECIAKYNFHGTAEQDLPFCKGDVLTIVAVTKDPNWYKAKNKVGREGIIPANYVQKREGVKAGTKLSLMPWFHGKITREQAERLLYPPETGLFLVREST

SEQ ID NO: 86848 - protein, 256 aa, Homo sapiens
  MOD_RES (1)..(1): Any amino acid
XRLDAELQLSARLIQQEVGRAREQGEAERQQLSKVAQQLEQELQQTQESLASLGLQLEVARQCQQESTEEAASLRQELTQQQELYGQALQEKVAEVETRLREQLSDTERRLNEARREHAKAVVSLRQIQRRAAQEKERSQELRRLQEEARKEEGQRLARRLQELERDKNLMLQRLLTVLPSLLDKKKSVVSSPRPPECSASAPVAAAVPTRESIKGSLSVLLDDLQDLSEAISKEEAVCQGDNLDRCSSCNPQMSS

SEQ ID NO: 86849 - protein, 1425 aa, Homo sapiens
MASWGGEKRGGAEGSPKPAVYATRKTPSVGSQGDQWYLGYPGDQWSSGFPYSWWKNSVGSESKHGEGALDQPQHDVRLEDLGELHRAARSGDVPGVEHILAPGDTGVDKRDRKKSIQQLVPEYKEKQTPESLPQNNNPDWHPTNLTLSDETCQRSKNLKVDDKCPSVSPSMPENQSATKELGQMNLTEREKMDTGVVLLSGNDTLHDLCQSQLPENKESKEAEQDSELTSEEEQERLKGCENKQPQKTSQEPEMAKDCDREDIPIYPVLPHVQKSEEMWIEQGKLEWKNQLKLVINELKQRFGEIYEKYKIPACPEEEPLLDNSTRGTDVKDIPFNLTNNIPGCEEEDASEISVSVVFETFPEQKEPSLKNIIHPYYHPYSGSQEHVCQSSSKFHLHENKLDCDNDNKPGIGHIFSTDKNFHNDASTKKARNPEVVMVEMKEDQEFDLQMTKNMNQNSDSGSTNNYKSLKPKLENLSSLPPDSDRTSEVYLHEELQQDMQKFKNEVNTLEEEFLALKKEDVQLHKDVEEEMEKHRSNSTELSGTLTDGTTVGNDDDGLNQQIPRKENGEHDRPADKTSNEKNEVKNQIYPEADFADSMEPSEIASEDCELSHSVYENFMLLIEQLRMEYKDSASLPRIQDTFCLCEHLLKLKNNHCDQLTVKLKQMENMVSVLQNELSETKKTKLQLELQKIEWEKELYDLRLALKQENEEKRNADMLYNKDSEQLRIKEEECGKVVETKQQLKWNLRRLVKELRTVRNNLDLVVQERNDAQKQLSEEQDARILQDQILTSKQKELEMARKKMNSEISHRHQKEKDLFHEDCMLQEEIALLRLEIDTIKNQNKQKEKKYFEDIEAVKEKNDNLQKIIKLNEETLTETILQYSGQLNNLTAENKILNSELENGKQNQERLEIEMESYRCRLAAAVRDCDQSQTARDLKLDFQRTRQEWVRLHDKMKVDMSGLQAKNEILSEKLSNAESKINSLQIQLHNTRDALGRESLILERVQRDLSQTQCQKKETEQMYQIEQSKLKKYIAKQESVEERLSQLQSENMLLRQQLDDAHKKANSQEKTSSTIQDQFHSAAKNLQAESEKQILSLQEKNKELMDEYNHLKERMDQCEKEKAGRKIDLTEAQETVPSRCLHLDAENEVLQLQQTLFSMKAIQKQCETLQKNKKQLKQEVVNLKSYMERNMLERGKAEWHKLLIEERARKEIEEKLNEAILTLQKQAAVSHEQLVQLREDNTTSIKTQMELTIKDLESEISRIKTSQADFNKTELERYKELYLEEVKVRESLSNELSRTNEMIAEVSTQLTVEKEQTRSRSLFTAYATRPVLESPCVGNLNDSEGLNRKHIPRKKRSALKDMESYLLKMQQKLQNDLTAEVAAATKYEPGSYIASPLGFTHKENLNQDPVLEVTKEYAQILRRKYIL

SEQ ID NO: 86850 - protein, 234 aa, Homo sapiens
MSSFLPEGGCYELLTVIGKGFEDLMTVNLARYKPTGEYVTVRRINLEACSNEMVTFLQGELHVSKLFNHPNIVPYRATFIADNELWVVTSFMAYGSAKDLICTHFMDGMNELAIAYILQGVLKALDYIHHMGYVHRSVKASHILISVDGKVYLSGLRSNLSMISHGQRQRVVHDFPKYSVKVLPWLSPEVLQQGYDAKSDIYSVGITACELANGHVPFKDMPATQGEDSTVKGI

SEQ ID NO: 86851 - protein, 105 aa, Homo sapiens
MAPRRLLLVGEGNFSFAAALSETLDQSTQLTATCLQRPAELARDPLAWENLQCLRERAVQTFLQRKEKSTWHYVEDKVELLRISPRENGTTVGKWLPWQPWGGSF

SEQ ID NO: 86852 - protein, 91 aa, Homo sapiens
MDSLAESRWPPGLAVMKTIDDLLRCGICFEYFNIAMIIPQCSHNYCSLCIRKFLSYKTQCPTCCVTVTEPDLKNNRILDELVKSLNFARNH

SEQ ID NO: 86853 - protein, 30 aa, Homo sapiens
  MOD_RES (1)..(1): Any amino acid
XQVAQVLRQCGNRVKLMLLLRKVKKVRHLM

SEQ ID NO: 86854 - protein, 650 aa, Homo sapiens
MLWFSGVGALAERYCRRSPGITCCVLLLLNCSGVPMSLASSFLTGSVAKCENEGEVLQIPFITDNPCIMCVCLNKEVTCKREKCPVLSRDCALAIKQRGACCEQCKGCTYEGNTYNSSFKWQSPAEPCVLRQCQEGVVTESGVRCVVHCKNPLEHLGMCCPTCPGCVFEGVQYQEGEEFQPEGSKCTKCSCTGGRTQCVREVCPILSCPQHLSHIPPGQCCPKCLGQRKVFDLPFGSCLFRSDVYDNGSSFLYDNCTACTCRDSTVVCKRKCSHPGGCDQGQEGCCEECLLRVPPEDIKVCKFGNKIFQGKILNRKGCCPICTEKPGVCTVFGDPHYNTFDGRTFNFQGTCQYVLTKDCSSPASPFQVLVKNDARRTRSFSWTKSVELVLGESRVSLQQHLTVRWNGSRIALPCRAPHFHIDLDGYLLKVTTKAGLEISWDGDSFVEVMAAPHLKGKLCGLCGNYNGHKRDDLIGGDGNFKFDVDDFAESWRVESNEFCNRPQRKPVPELCQGTVKVKLRAHRECQKLKSWEFQTCHSTVDYATFYRSCVTDMCECPVHKNCYCESFLAYTRACQREGIKVHWEPQQNCAATQCKHGAVYDTCGPGCIKTCDNWNEIGPCNKPCVAGCHCPANLVLHKGRCIKPVLCPQR

SEQ ID NO: 86855 - protein, 592 aa, Homo sapiens
MSVLGEYERHCDSINSDFGSESGGCGDSSPGPSASQGPRAGGGAAEQEELHYIPIRVLGRGAFGEATLYRRTEDDSLVVWKEVDLTRLSEKERRDALNEIVILALLQHDNIIAYYNHFMDNTTLLIELEYCNGGNLYDKILRQKDKLFEEEMVVWYLFQIVSAVSCIHKAGILHRDIKTLNIFLTKANLIKLGDYGLAKKLNSEYSMAETLVGTPYYMSPELCQGVKYNFKSDIWAVGCVIFELLTLKRTFDATNPLNLCVKIVQGIRAMEVDSSQYSLELIQMVHSCLDQDPEQRPTADELLDRPLLRKRRREMEEKVTLLNAPTKRPRSSTVTEAPIAVVTSRTSEVYVWGGGKSTPQKLDVIKSGCSARQVCAGNTHFAVVTVEKELYTWVNMQGGTKLHGQLGHGDKASYRQPKHVEKLQGKAIRQVSCGDDFTVCVTDEGQLYAFGSDYYGCMGVDKVAGPEVLEPMQLNFFLSNPVEQVSCGDNHVVVLTRNKEVYSWGCGEYGRLGLDSEEDYYTPQKVDVPKALIIVAVQCGCDGTFLLTQSGKVLACGLNEFNKLGLNQCMSGIINHEVSVLIGVLTTSSEFL

SEQ ID NO: 86856 - protein, 259 aa, Homo sapiens
MHAVPRGFGKKVRVGVQSCPPLLGPGVPPALLRVLVSAEEPALPGTPRADWVQLLLRHAPQRARHPQLAPTLQPRTECRGLGGGRHRPAGLPAAPDARTAAQRPYGLRAGQYRPAVPAVAVPVAGQPGHDGEGGVHARALRHVEALQAAEGPQAGAALLQRQRPVLPGAEPVPLAAAPVPGLSQRHPPARCRAGLHGSLPAGCHVPPVHRGVPRHLQEPAAVASPQLPGRAARVKRRHLPSAPRGPDRRHPGRPPGAPG

SEQ ID NO: 86857 - protein, 116 aa, Homo sapiens
MSAQSLPAATPPTQKPPRIIRPRPPSRSRAAQSPGPPHNGSSPQELPRNSNDAPTPMCTPIFWEPPAASLKPPALLPPSASRASLDSQTSPDSPSSTPTPSPVSRRSASPEPAPRS

SEQ ID NO: 86858 - protein, 237 aa, Homo sapiens
VNQLLASKTGIHSSQRDLDSASGPQVSNFTQTVDAPNSMGLEQNKALSSAVQASPTSPGGSPSSPSSGQRSASPSVPGPTKPKPKTKRFQLPLDKGNGKKHKVSHLRTSSSEAHIPDQETTSLTSGTGYKCLCSRTPGAEAEQQDTASVEQSSQKECGQPAGQVAVLPEVQVTQNPANEQESAEPKTVEEEESNFSSPLMLWLQQEQKRKESITEKKPKKGLVFEISSDDGFQICAE

SEQ ID NO: 86859 - protein, 444 aa, Homo sapiens
MNHPFGKEEAASQKQLFGFFCECLRRGEWELAQACVPQLQEGQGDIPKRVEDILQALVVCPNLLRCGQDINPQRVAWVWLLVLEKWLAREKKLLPVVFRRKLEFLLLSEDLQGDIPENILEELYETLTQGAVGHVPDGNPRRESWTPRLSSEAVSVLWDLLRQSPQPAQALLELLLEEDDGTGLCHWPLQNALVDLIRKALRALQGPDSVPPGVVDAIYGALRTLRCPAEPLGVELHLLCEELLEACRTEGSPLREERLLSCLLHKASRGLLSLYGHTYAEKVTEKPPRATASGKVSPDHLDPERAMLALFSNPNPAEAWKVAYFYCLSNNKHFLEQILVTALTLLKEEDFPNLGCLLDREFRPLSCLLVLLGWTHCQSLESAKRLLQTLHRTQGPGCDELLRDACDGLWAHLEVLEWCIQQSRCCKSLLNLPGQVSTVSVQYS

SEQ ID NO: 86860 - protein, 207 aa, Homo sapiens
MATAEKQKHDGRVKIGHYILGDTLGVGTFGKVKVGKHELTGHKVAVKILNRQKIRSLDVVGKIRREIQNLKLFRHPHIIKLYQVISTPSDIFMVMEYVSGGELFDYICKNGRLDEKESRRLFQQILSGVDYCHRHMVVHRDLKPENVLLDAHMNAKIADFGLSNMMSDGEFLRTSCGSPNYAAPEVISGRDCNIIRILTSQFTNYQH

SEQ ID NO: 86861 - protein, 144 aa, Homo sapiens
  MOD_RES (1)..(1): Any amino acid
XLKMETPGMTTPSLKTDGGRRTATSPPPTTSQTIISTIPSTAMHTRSTAAPIPILPERGVSLFPYGAGAGDLEFVRRTVDFTSPLFKPATGFPLGSSLRDSLYASQAGTLWPWWLRSGTMLTSPLVGGPHFIRNTRRSMVNTAC

SEQ ID NO: 86862 - protein, 412 aa, Homo sapiens
MPVLGMTPADDFCQGTKAALAGGTTMILDHVFPDTGVSLLAAYEQWRERADSAACCDYSLHVDITRWHESIKEELEALVKEKGVNSFLVFMAYKDRCQCSDSQMYEIFSIIRDLGALAQVHAENGDIVEEVEAEAVYRAVTIAKQANCPLYVTKVMSKGAADAIAQAKRRGVVVFGEPITASLGTDGSHYWSKNWAKAAAFVTSPPVNPDPTTADHLTCLLSSGDLQVTGSAHCTFTTAQKAVGKDNFALIPEGTNGIEERMSMVWEKCVASGKMDENEFVAVTSTNAAKIFNFYPRKGRVAVGSDADLVIWNPKATKIISAKTHNLLAEIHGVPRGLYDGPVHEVMVPAKPGSGAPARASCPGKISVPPVRNLHQSGFSLSGSQADDHIARRTAQKIMAPPGGRSNITSLS

SEQ ID NO: 86863 - protein, 446 aa, Homo sapiens [sequence omitted]

SEQ ID NO: 86864 - protein, 152 aa, Homo sapiens
MGSKRRRATSPSSSVSGDFDDGHHSVSTPGPSRKRRRLSNLPTVDPIAVCHELYNTIRDYKDEQGRLLCELFIRAPKRRNQPDYYEVVSQPIDLMKIQQKLKMEEYDDVNLLTADFQLLFNNAKSYYKPDSPEYKAACKLWDLYLRTRNEFV

SEQ ID NO: 86865 - protein, 193 aa, Homo sapiens
MESIRTTRQCSLSVHAGIRGEAMRFHFMDEQNPKGRDKAIVFPAHTTIAFSVFELFIYLDGAFDLCVTSVSKGGFEREETATFALLYRLRNILFERNRRVMDVISRSQLYLDDLFSDYYDKPLSMTDISLKEGTHIRVNLLNHNIPKGPCILCGMGNFKRETVYGCFQCSVDGQKYVRLHAVPCFDIWHKRMK

SEQ ID NO: 86866 - protein, 637 aa, Homo sapiens
MIAELVSSALGLALYLNTLSADFCYDDSRAIKTNQDLLPETPWTHIFYNDFWGTLLTHSGSHKSYRPLCTLSFRLNHAIGGLNPWSYHLVNVLLHAAVTGLFTSFSKILLGDGYWTFMAGLMFASHPIHTEAVAGIVGRADVGASLFFLLSLLCYIKHCSTRGYSARTWGWFLGSGLCAGCSMLWKEQGVTVLAVSAVYDVFVFHRLKIKQILPTIYKRKNLSLFLSISLLIFWGSSLLGARLYWMGNKPPSFSNSDNPAADSDSLLTRTLTFFYLPTKNLWLLLCPDTLSFDWSMDAVPLLKTVCDWRNLHTVAFYTGLLLLAYYGLKSPSVDRECNGKTVTNGKQNANGHSCLSDVEYQNSETKSSFASKVENGIKNDVSQRTQLPSTENIVVLSLSLLIIPFVPATNLFFYVGFVIAERVLYIPSMGFCLLITVGARALYVKVQKRFLKSLIFYATATLIVFYGLKTAIRNGDWQNEEMLYRSGIKVNPAKAWGNLGNVLKSQSKISEAESAYRNALYYRSNMADMLYNLGLLLQENSRFAEALHYYKLAIGSRPTLASAYLNTGIILMNQGRTEEARRTFLKCSEIPDENLKDPHAHKSSVTSCLYNLGKLYHEQGHYEVWPMPLCPFPSPLF

SEQ ID NO: 86867 - protein, 1979 aa, Homo sapiens
MAQALLVPPGPESFRLFTRESLAAIEKRAAEEKAKKPKKEQDNDDENKPKPNSDLEAGKNLPFIYGDIPPEMVSEPLEDLDPYYINKKTFIVMNKGKAIFRFSATSALYILTPLNPVRKIAIKILVHSLFSMLIMCTILTNCVFMTLSNPPDWTKNVEYTFTGIYTFESLIKILARGFCLEDFTFLRDPWNWLDFSVIVMAYVTEFVDLGNVSALRTFRVLRALKTISVIPGLKTIVGALIQSVKKLSDVMILTVFCLSVFALIGLQLFMGNLRNKCLQWPPSDSAFETNTTSYFNGTMDSNGTFVNVTMSTFNWKDYIGDDSHFYVLDGQKDPLLCGNGSDAGQCPEGYICVKAGRNPNYGYTSFDTFSWAFLSLFRLMTQDYWENLYQLTLRAAGKTYMIFFVLVIFLGSFYLVNLILAVVAMAYEEQNQATLEEAEQKEAEFQQMLEQLKKQQEEAQAVAAASAASRDFSGIGGLGELLESSSEASKLSSKSAKEWRNRRKKRRQREHLEGNNKGERDSFPKSESEDSVKRSSFLFSMDGNRLTSDKKFCSPHQSLLSIRGSLFSPRRNSKTSIFSFRGRAKDVGSENDFADDEHSTFEDSESRRDSLFVPHRHGERRNSNVSQASMSSRMVPGLPANGKMHSTVDCNGVVSLGTTTETEVRKRRLSSYQISMEMLEDSSGRQRAVSIASILTNTMEELEESRQKCPPCWYRFANVFLIWDCCDAWLKVKHLVNLIVMDPFVDLAITICIVLNTLFMAMEHYPMTEQFSSVLTVGNLVFTGIFTAEMVLKIIAMDPYYYFQEGWNIFDGIIVSLSLMELGLSNVEGLSVLRSFRLLRVFKLAKSWPTLNMLIKIIGNSVGALGNLTLVLAIIVFIFAVVGMQLFGKSYKECVCKINDDCTLPRWHMNDFFHSFLIVFRVLCGEWIETMWDCMEVAGQTMCLIVFMLVMVIGNLVVLNLFLALLLSSFSSDNLAATDDDNEMNNLQIAVGRMQKGIDYVKNKMRECFQKAFFRKPKVIEIHEGNKIDSCMSNNTGIEISKELNYLRDGNGTTSGVGTGSSVEKYVIDENDYMSFINNPSLTVTVPIAVGESDFENLNTEEFSSESELEESKEKLNATSSSEGSTVDVVLPREGEQAETEPEEDLKPEACFTEGCIKKFPFCQVSTEEGKGKIWWNLRKTCYSIVEHNWFETFIVFMILLSSGALAFEDIYIEQRKTIKTMLEYADKVFTYIFILEMLLKWVAYGFQTYFTNAWCWLDFLIVDVSLVSLVANALGYSELGAIKSLRTLRALRPLRALSRFEGMRVVVNALVGAIPSIMNVLLVCLIFWLIFSIMGVNLFAGKFYHCVNMTTGNMFDISDVNNLSDCQALGKQARWKNVKVNFDNVGAGYLALLQVATFKGWMDIMYAAVDSRDPVYEENLYMYLYFVIFIIFGSFFTLNLFIGVIIDNFNQQKKKFGGQDIFMTEEQKKYYNAMKKLGSKKPQKPIPRPANKFQGMVFDFVTRQVFDISIMILICLNMVTMMVETDDQGKYMTLVLSRINLVFIVLFTGEFVLKLVSLRHYYFTIGWNIFDFVVVILSIVGMFLAEMIEKYFVSPTLFRVIRLARIGRILRLIKGAKGIRTLLFALMMSLPALFNIGLLLFLVMFIYAIFGMSNFAYVKKEAGIDDMFNFETFGNSMICLFQITTSAGWDGLLAPILNSAPPDCDPDTIHPGSSVKGDCGNPSVGIFFFVSYIIISFLVVVNMYIAVILENFSVATEESAEPLSEDDFEMFYEVWEKFDPDATQFIEFSKLSDFAAALDPPLLIAKPNKVQLIAMDLPMVSGDRIHCLDILFAFTKRVLGESGEMDALRIQMEDRFMASNPSKVSYEPITTTLKRKQEEVSAAIIQRNFRCYLLKQRLKNISSNYNKEAIKGRIDLPIKQDMIIDKLNGNSTPEKTDGSSSTTSPPSYDSVTKPDKEKFEKDKPEKESKGKEVRENQK

SEQ ID NO: 86868 - protein, 42 aa, Homo sapiens
MAIPGRQYGLILPKKTQQLHPVLQKPSVFGNDSDDDDEVFGI

SEQ ID NO: 86869 - protein, 75 aa, Homo sapiens
ADLISQARKKGNVVFGEPITASLGIDGTHYWSKNWAKAAAFVTSPPLSPDPTTPDYINSLLARPQGKWTKTSSWL

SEQ ID NO: 86870 - protein, 324 aa, Homo sapiens
MEALGPGGDRASPASSTSSLDLWHLSMRADSAYSSFSAASGGPEPRTQSPGTDLLPYLDWDYVRVVWGGPGPAPPDAALCTSPRPRPAVAARSGPQPTEVPGTPGPLNRQATPLLYALAAEAEAAAQAAEPPSPPASRAAYRQRLQGAQRRVLRETSFQRKELRMSLPARLRPTVPARPPATHPRSASLSHPGGEGEPARSRAPAPGTAGRGPLANQQRKWCFSEPGKLDRVGRGGGPARECLGEACSSSGLPGPEPLEFQHPALAKFEDHEVGWLPETQPQGSMNLDSGSLKLGDAFRPASRSRSASGEVLGSWGGSGGTIPI

SEQ ID NO: 86871 - protein, 198 aa, Homo sapiens
PGPALCSPLRKSPLTLEDFKFLAVLGRGHFGKVLLSEFRPSGELFAIKALKKGDIVARDEVESLMCEKRILAAVTSAGHPFLVNLFGCFQTPEHVCFVMEYSAGGDLMLHIHSDVFSEPRAIFYSACVVLGLQFLHEHKIVYRDLKLDNLLLDTEGYVKIADFGLCKEGMGYGDRTSTFCGTPEFATPASCRPKPSAS

SEQ ID NO: 86872 - protein, 121 aa, Homo sapiens
MMCEVMPTINEDTPMSQRGSQSSGSDSDSHFEQLMVNMLDERDRLLDTLRETQESLSLAQQRLQDVIYDRDSLQRQLNSALPQDIESLTGGLAGSKGADPPEFAALTKELNACREQLLEKE

SEQ ID NO: 86873 - protein, 84 aa, Homo sapiens
  MOD_RES (1)..(1): Any amino acid
XQDDGGSPIRHYLVRYRALSSEWKPEIRLPSGSDHVMLKSLDWNAEYEVYVVAENQQGKSKAAHFVFRTSAQPTAIPVTLLLLC

SEQ ID NO: 86874 - protein, 18 aa, Homo sapiens
  MOD_RES (1)..(1): Any amino acid
XQYMNRKGGFNRPLDFIA

SEQ ID NO: 86875 - protein, 149 aa, Homo sapiens
MLRTESCRPRSPAGQVAAASPLLLLLLLLAWCAGACRGAPILPQGLQPEQQLQLWNEIDDTCSSFLSIDSQPQASNALEELCFMIMGMLPKPQEQDEKDNTKRFLFHYSKTQKLGKSNVVEEFQSPFASQSRGYFLFRPRNGRRSAGFI

SEQ ID NO: 86876 - protein, 268 aa, Homo sapiens
  MOD_RES (1)..(1): Any amino acid
XERPEDQQEEEAAAAAAYLDELPEPLLLRVLAALPAAELVQACRLVCLRWKELVDGAPLWLLKCQQEGLVPEGGVEEERDHWQQFYFLSKRRRNLLRNPCGEEDLEGWCDVEHGGDGWRVEELPGDSGVEFTHDESVKKYFASSFEWCRKAQVIDLQAEGYWEELLDTTQPAIVVKDWYSGRSDAGCLYELTVKLLSEHENVLAEFSSGQVAVPQDSDGGGWMEISHTFTDYGPGVRFVRFEHGGQDSVYWKGWFGARVTNSSVWVEP

SEQ ID NO: 86877 - protein, 101 aa, Homo sapiens
  MOD_RES (1)..(1): Any amino acid
XCRCKEGRDYNAPDSKWEIKRCQCCGSSGTHLACSSLRSWEQNWECLECRGIIYNSGEFQKAKKHVLPNSNNVGITDCLLEESSPKLPRQSPGSQSKDLLR

SEQ ID NO: 86878 - protein, 159 aa, Homo sapiens
MGFLGCWCVSFQEVVTFGDVAVHFSREEWQCLDPGQRALYREVMLENHSSVAGLAGFLVFKPELISRLEQGEEPWVLDLQGAEGTEAPRTSKTGFLGRPTMGQEPRHPHAPPATPVPGLPKHCSQRLTLPPPGLSSSPLGHFLVHDQDRRRGTSAIWMV

SEQ ID NO: 86879 - protein, 30 aa, Homo sapiens
MSEKKQPVDLGLLEEDDEFEEFPAEGQLYS

SEQ ID NO: 86880 - protein, 326 aa, Homo sapiens
MRSLGANMAAALRAAGVLLRDPLASSSWRVCQPWRWKSGAAAAAVTTETAQHAQGAKPQVQPQKRKPKTGILMLNMGGPETLGDVHDFLLRLFLDRDLMTLPIQNKLAPFIAKRRTPKIQEQYRRIGGGSPIKIWTSKQGEGMVKLLDELSPNTAPHKYYIGFRYVHPLTEEAIEEMERDGLERAIAFTQYPQYSCSTTGSSLNAIYRYYNQVGRKPTMKWSTIDRWPTHHLLIQVVNRGDPYPQEVSATVQKVMERLEYCNPYRLVWQSKVGPMPWLGPQTDESIKGLCERGRKNILLVPIAFTSDHIETLYELDIEYSQVLAKE

SEQ ID NO: 86881 - protein, 169 aa, Homo sapiens
MEVENEASCSPGSASGGSREYKVVMLGAGGVGKSAMTMQFISHQFPDYHDPTIEDAYKTQVRIDNEPAYLDILDTAGQLCDWLKHRWEVELWEIRRTEKQNSQPCGSSTCEVGKASSSATPSLTVNHFRRLPSLKSSFFRSATPMKFPWCWWVTKLIWNSSARFLQKKA

SEQ ID NO: 86882 - protein, 95 aa, Homo sapiens
MEALILEPSLYTVKAILILDNDGDRLFAKYYDDTYPSVKEQKAFEKNIFNKTHRTDTDAYGCSELSLRLIEPDAEEKCRKASTAGEHGGAVLGCG

SEQ ID NO: 86883 - protein, 401 aa, Homo sapiens
MSGCARPTTGAPVQAMVSVGKCKCDQGWYGDACQYPTNCDLTKKKSNQMCKNSQDIICSNAGTCHCGRCKCDNSDGSGLVYGKFCECDDRECIDDETEEICGGHGKCYCGNCYCKAGWHGDKCEFQCDITPWESKRRCTSPDGKICSNRGTCVCGECTCHDVDPTGDWGDIHGDTCECDERDCRAVYDRYSDDFCSGHGQCNCGRCDCKAGWYGKKCEHPQSCTLSAEESIRKCQGSSDLPCSGRGKCECGKCTCYPPGDRRVYGKTCECDDRRCEDLDGVVCGGHGTCSCGRCVCERGWFGKLCQHPRKCNMTEEQSKNLCESADGILCSGKGSCHCGKCICSAEEWYISGEFCDCDDRDCDKHDGLICTGNGICSCGNCECWDGWNGNACEIWLGSEYP

SEQ ID NO: 86884 - protein, 52 aa, Homo sapiens
PGGGGQTPRRPQGASFALAAAAALLFGSDMEDGPSNNASCFRRLTECFLSPK

SEQ ID NO: 86885 - protein, 366 aa, Homo sapiens
MSSSPWEPATLRRVFVVGVGMTKFVKPGAENSRDYPDLAEEAGKKALADAQIPYSAVDQACVGYVFGDSTCGQRAIYHSLGMTGIPIINVNNNCATGSTALFMARQLIQGGVAECVLALGFEKMSKGSLGIKFSDRTIPTDKHVDLLINKYGLSAHPVAPQMFGYAGKEHMEKYGTKIEHFAKIGWKNHKHSVNNPYSQFQDEYSLDEVMASKEVFDFLTILQCCPTSDGAAAAILASEAFVQKYGLQSKAVEILAQEMMTDLPSSFEEKSIIKMVGFDMSKEAARKCYEKSGLTPNDIDVIELHDCFSTNELLTYEALGLCPEGQGATLVDRGDNTYGGKWVINPSGGLISKGHPLGATGGHSCS

SEQ ID NO: 86886 - protein, 85 aa, Homo sapiens
MKDKRKKKDRTWAEAARLALEKHPNSPMTAKQILEVIQKEGLKETRPRHGLETALVCMKDLPPMKDLGQLSMMIILEPQLLSCWS

SEQ ID NO: 86887 - protein, 454 aa, Homo sapiens
MSLMVVSMACVGFFLLQGAWTHEGGQDKPFLSAWPSPVVSEGEHVALQCRSRLGFNEFSLSKEDGMPVPELYNRVFRNTVFIGPVTPAHAGTYRCRGSHPHFLTGWSAPSNPLVIMVTGVHRKPSLLAHPGPLVKSEETVILQCWSDVMFEHFLLHREGKFNDTLRLTGELHDGVSKANFSIGRMTQDLAGTYRCYGSVPHSPYQLSAPSDPLDIVITGLCGKPSLSAQPRPMVKAGESVTLSCSSRSSYDIYHLSREGEAHERRLPAVRSINGTFQADFPLGPATHGGTYRCFGSFRDAPYEWSNSSDPLLVSVTGNPSNSWPSPTEPSSKTGNPRHLHVLIGTSVVKIPFTILLFFLLHRWCSDKKNAAVMDQEPAGNRTVNSEDSDEQDHQEVSYALDHCVFTQRKITRPSERPKTPPTDTSMYIELPNAEPRSKVVFCPRAPQSGLEGIF

SEQ ID NO: 86888 - protein, 94 aa, Homo sapiens
SAGPKGDNIYEWRSTILGPPGSVYEGGVFFLDITFSPDYPFKPPKVTFRTRIYHCNINSQGVICLDILKDNWSPALTISKVLLSICSLLTDCNP

SEQ ID NO: 86889 - protein, 88 aa, Homo sapiens
MLAANPGKTPISLLQEYGTRIGKTPVYDLLKAEGQAHQPNFTFRVTVGDTSCTGQGPSKKAAKHKAAEVALKHLKGGSMLEPALEDSR

SEQ ID NO: 86890 - protein, 147 aa, Homo sapiens
RWVQGEDILSLPEGTARLPGDNALDMFQKHREKELKDRQQIYCWATWKEGLPLTIAADRKDDLPPNMRFHEEKRLDFEWTLKAGLVLPSGMEELQAQLEKELQNGSLFEADFILLDGIPANVIRGEKQYLAAPLVMLKMEPNGKLQP

SEQ ID NO: 86891 - protein, 218 aa, Homo sapiens
MYTAIPQSGSPFPGSVQDPGLHVWRVEKLKPVPVAQENQGVFFSGDSYLVLHNGPEEVSHLHLWIGQQSSRDEQGACAVLAVHLNTLLGERPVQHREVQGNESDLFMSYFPRGLKYQEGGVESAFHKTSTGAPAAIKKLYQVKGKKNIRATERALNWDSFNTGDCFILDLGQNIFAWCGGKSNILERNKARDLALAIRDSERQGKAQVEIVTDGEEPA

SEQ ID NO: 86892 - protein, 612 aa, Homo sapiens
MGKIENNERVILNVGGTRHETYRSTLKTLPGTRLALLASSEPPGDCLTTAGDKLQPSPPPLSPPPRAPPLSPGPGGCFEGGAGNCSSRGGRASDHPGGGREFFFDRHPGVFAYVLNYYRTGKLHCPADVCGPLFEEELAFWGIDETDVEPCCWMTYRQHRDAEEALDIFETPDLIGGDPGDDEDLAAKRLGIEDAAGLGGPDGKSGRWRRLQPRMWALFEDPYSSRAARFIAFASLFFILVSITTFCLETHEAFNIVKNKTEPVINGTSVVLQYEIETDPALTYVEGVCVVWFTFEFLVRIVFSPNKLEFIKNLLNIIDFVAILPFYLEVGLSGLSSKAAKDVLGFLRVVRFVRILRIFKLTRHFVGLRVLGHTLRASTNEFLLLIIFLALGVLIFATMIYYAERVGAQPNDPSASEHTQFKNIPIGFWWAVVTMTTLGYGDMYPQTWSGMLVGALCALAGVLTIAMPVPVIVNNFGMYYSLAMAKQKLPRKRKKHIPPAPQASSPTFCKTELNMACNSTQSDTCLGKDNRLLEHNRSVLPLPHGAMHLNLIHKKQLFKKNGCLHFKGLNSKQCYQVTTVQEVSRHYHPQKGSPSDALVPETKTEEGKHVSY

SEQ ID NO: 86893 - protein, 52 aa, Homo sapiens
MNYSLHLAFVCLSLFTERMCIQGSQFNVEVGRSDKLSLPGFENLTAGYNKFL

SEQ ID NO: 86894 - protein, 98 aa, Homo sapiens
MQSARTQARPREPLEDGDPEDDRTLDDDELAEYDLDKYDEEGDPDAETLGESLLGLTVYGSNDQDPYVTLKDTEQYEREDFLIKPSDNLIVCGRAEQD

SEQ ID NO: 86895 - protein, 285 aa, Homo sapiens
  MOD_RES (1)..(1): Any amino acid
XMSDRIQHLEREITRYKDESSKAQAEVDRLLEILKEVENEKNDKDKKIAELERQVKDQNKKVANLKHKEQVEKKKSAQMLEEARRREDNLNDSSQQLQDSLRKKDDRIEELEEALRESVQITAEREMVLAQEESARTNAEKQVEELLMAMEKVKQELESMKAKLSSTQQSLAEKETHLTNLRAERRKHLEEVLEMKQEALLAAISEKDANIALLELSSSKKKTQEEVAALKREKDRLVQQLKQQTQNRMKLMADNYEDDHFKSSHSNQTNHKPSPDQDEEEGIWA

SEQ ID NO: 86896 - protein, 53 aa, Homo sapiens
MVTALMKPFVLLSDNEYIFMDLEQKLSKYFSKDWKKERNELLRPEGLSAGGLW

SEQ ID NO: 86897 - protein, 176 aa, Homo sapiens
MTLEELVACDNAAQKMQTVTAAVEELLVAAQRQDRLTVGVYESAKLMNVDPDSVVLCLLAIDEEEEDDIALQIHFTLIQSFCCDNDINIVRVSGMQRLAQLLGEPAETQGTTEARDLHCLLVTVSRASALPRHARAPGPVFVNKVGLTGPAQLSAQPRLACPVGSRAGASSPRKLF

SEQ ID NO: 86898 - protein, 296 aa, Homo sapiens
MDLVLKRCLLHLAVIGALLAVGATKVPRNQDWLGVSRQLRTKAWNRQLYPEWTEAQRLDCWRGGQVSLKVSNDGPTLIGANASFSIALNFPGSQKVLPDGQVIWVNNTIINGSQVWGGQPVYPQETDDACIFPDGGPCPSGSWSQKRSFVYVWKTWVPGTTDGHRPTAEAPNTTAGQVPTTEVVGTTPGQAPTAEPSGTTSVQVPTTEVISTAPVQMPTAESTAAQVTTTEWVETTARELPIPEPEGPDASSIMSTESITGSLGPLLDGTATLRLVKRQVPLDCVLYRYGSFSVTL

SEQ ID NO: 86899 - protein, 403 aa, Homo sapiens
  MOD_RES (1)..(1): Any amino acid
XSGPTSVSRQRVESLRKKRPQLLLAFISFSLLFPLQLPMSKSFFPWFGLDIGGTLVKLVYFEPKDITAEEEEEEVESLKSIRKYLTSNVAYGSTGIRDVHLELKDLTLCGRKGNLHFIRFPTHDMPAFIQMGRDKNFSSLHTVFCATGGGAYKFEQDFLTIGDLQLCKLDELDCLIKGILYIDSVGFNGRSQCYYFENPADSEKCQKLPFDLKNPYPLLLVNIGSGVSILAVYSKDNYKRVTGTSLGGGTFFGLCCLLTGCTTFEEALEMASRGDSTKVDKLVRDIYGGDYERFGLPGWAVASSFGNMMSKEKREAVSKEDLARATLITITNNIGSIARMCALNENINQVVFVGNFLRINTIAMRLLAYALDYWSKGQLKALFSEHEGYFGAVGALLELLKIP

SEQ ID NO: 86900 - protein, 607 aa, Homo sapiens
MTTEKSLVTEAENSQHQQKEEGEEAINSGQQEPQQEESCQTAAEGDNWCEQKLKASNGDTPTHEDLTKNKERTSESRGLSRLFSSFLKRPKSQVSEEEGKEVESDKEKGEGGQKEIEFGTSLDEEIILKAPIAAPEPELKTDPSLDLHSLSSAETQTWLDSAKEIKKQVRGVPWNFTFNVKFYPPDPAQLTEDITRYYLCLQLRQDIVAGRLPCSFATLALLGSYTIQSELGDYDPELHGVDYVSDFKLAPNQTKELEEKVMELHKSYRSMTPAQADLEFLENAKKLSMYGVDLHKAKDLEGVDIILGVCSSGLLVYKDKLRINRFPWPKVLKISYKRSSFFIKIRPGEQEQYESTIGFKLPSYRAAKKLWKVCVEHHTFFRLTSTDTIPKSKFLALGSKFRYSGRTQAQTRQASALIDRPAPHFERTASKRASRSLDGAAAVDSADRSPRPTSAPAITQGQVAEGGVLDASAKKTVVPKAQKETVKAEVKKEDEPPEQAEPEPTEAWKVEKTHIEVTVPTSNGDQTQKLAEKTEDLIRMRKDLDKSQEEIKKHHASISELKKNFMESVPEPRPSEWDKRLSTHSPFRTLNINGQIPTGEGVSTLST

SEQ ID NO: 86901 - protein, 175 aa, Homo sapiens
MKPRPAGFVDNKLKQRVIQYLTSNKCGKYVDIGVLASDLQRVYSIDYGRRKRNAFRIQVEKVFSIISSEKELKNLTELEDEHLAKRARQGEEDNDVSLCHPGFSALAQSWLTAVLTSQAQAILPPQPHRYTESYSDDDSSMEDYPDPQSANHMNSSLLSLYRKGNPDSVSNTPEM

SEQ ID NO: 86902 - protein, 417 aa, Homo sapiens
MKWVTFISLLFLFSSAYSRGVFRRDAHKSEVAHRFKDLGEENFKALAVARLSQRFPKAEFAEVSKLVTDLTKVHTECCHGDLLECADDRADLAKYICENQDSISSKLKECCEKPLLEKSHCIAEVENDEMPADLPSLAADFVESKDVCKNYAEAKDVFLGMFLYEYARRHPDYSVVLLLRLAKTYETTLEKCCAAADPHECYAKVFDEFKPLVEEPQNLIKQNCELFEQLGEYKFQNALLVRYTKKVPQVSTPTLVEVSRNLGKVGSKCCKHPEAKRMPCAEDYLSVVLNQLCVLHEKTPVSDRVTKCCTESLVNRRPCFSALEVDETYVPKEFNAETFTFHADICTLSEKERQIKKQTALVELVKHKPKATKEQLKAVMDDFAAFVEKCCKADDKETCFAEEGKKLVAASQAALGL

SEQ ID NO: 86903 - protein, 62 aa, Homo sapiens
  MOD_RES (1)..(1): Any amino acid
XGRENRMPILISKIFPGLAADQSRALRLGDAILSVNGTDLRQATHDQAVQALKRAGKEVLLE

SEQ ID NO: 86904 - protein, 126 aa, Homo sapiens
  MOD_RES (1)..(1): Any amino acid
XNRNAEEFELTNIDMVQCDVCLLSNRMSKSFDTVIMNPPFGTKNNKGTDMAFLKTALEMARTAVYSLHKSSTREHVQKKAAEWKIKIDIIAGGFCFTELRYDLPASYKFHKKKSVDIEVDLIRFSF

SEQ ID NO: 86905 - protein, 1215 aa, Homo sapiens
VQAGADVDAADNRKITPLMSAFRKGHVKVVQYLVKEVNQFPSDIECMRYIATITDKELLKKCHQCVETIVKAKDQQAAEANKNASILLKELDLEKSREESRKQALAAKREKRKEKRKKKKEEQKRKQEEDEENKPKENSELPEDEDEEENDEDVEQEVPIEPPSATTTTTIGISATSATFTNVFGKKRANVVTTPSTNRKNKKNKTKETPPTAHLILPEQHMSLAQQKADKNKINGEPRGGGAGGNSDSDNLDSTDCNSESSSGGKSQELNFVMDVNSSKYPSLLLHSQEEKTSTATSKTQTRLEGEVTPNSLSTSYKTVSLPLSSPNIKLNLTSPKRGQKREEGWKEVVRRSKKLSVPASVVSRIMGRGGCNITAIQDVTGAHIDVDKQKDKNGERMITIRGGTESTRYAVQLINALIQDPAKELEDLIPKNHIRTPASTKSIHANFSSGVGTTAASSKNAFPLGAPTLVTSQATTLSTFQPANKLNKNVPTNVRSSFPVSLPLAYPHPHFALLAAQTMQQIRHPRLPMAQFGGTFSPSPNTWGPFPVRPVNPGNTNSSPKHNNTSRLPNQNGTVLPSESAGLATASCPITVSSVVAASQQLCVTNTRTPSSVRKQLFACVPKTSPPATVISSVTSTCSSLPSVSSAPITSGQAPTTFLPASTSQAQLSSQKMESFSAVPPTKEKVSTQDQPMANLCTPSSTANSCSSSASNTPGAPETHPSSSPTPTSSNTQEEAQPSSVSDLSPMSMPFASNSEPAPLTLTSPRMVAADNQDTSNLPQLAVPAPRVSHRMQPRGSFYSMVPNATIHQDPQSIFVTNPVTLTPPQGPPAAVQLSSAVNIMNGSQMHINPANKSLPPTFGPATLFNHFSSLFDSSQVPANQGWGDGPLSSRVATDASFTVQSAFLGNSVLGHLENMHPDNSKAPGFRPPSQRVSTSPVGLPSIDPSGSSPSSSSAPLASFSGIPGTRVFLQGPAPVGTPSFNRQHFSPHPWTSASNSCDSPIPSVSSGSSSPLSATSAPPTLGQPKGVSASQDRKIPPPIGTERLARIRQGGSVAQAPAGTSFVAPVGHSGIWSFGVNAVSEGLSGWSQSVMGNHPMHQQLSDPSTFSQHQPMERDDSGMVAPSNIFHQPMASGFVDFSKGLPISMYGGTIIPSHPQLADVPGGPLFNGLHNPDPAWNPMIKVIQNSTECTDAQQIWPGTWAPHIGNMHLKYVN

SEQ ID NO: 86906 - protein, 235 aa, Homo sapiens
MASTGSQASDIDEIFGFFNDGEPPTKKPRKLLPSLKTKKPRELVLVIGTGISAAVAPQVPALKSWKGLIQALLDAAIDFDLLEDEESKKFQKCLHEDKNLVHVAHDLIQKLSPVLEWAQEKRKLSVLHIHGVYTNPSGIVLHPAGYQNVLRNTEVMREIQKLYENKSFLFLGCGWTVDDTTFQALFLEAVKHKSDLEHFMLVRRGDVDEFKKLRENMLDKGIKVISYGDDYADLP

SEQ ID NO: 86907 - protein, 43 aa, Homo sapiens
MKMASSLAFLLLNFHVSLLLVQLLTPCSGLCSPLGSLYLAFPV

SEQ ID NO: 86908 - protein, 311 aa, Homo sapiens
  MOD_RES (1)..(1): Any amino acid
XGKEGPEARRRAAERGGGGGGGGVPAPRSPAREPRPRSCLLLPPPWGAAMTPDLLNFKKGWMSILDEPGEADELDGEIDLRSCTDVTEYAVQRNYGFQIHTKDAVYTLSAMTSGIRRNWIEALRKTVRPTSAPDVTKLSDSNKENALHSYSTQKGPLKAGEQRAGSEVISRGGPRKADGQRQALDYVELSPLTQASPQRARTPARTPDRLAKQEELERDLAQRSEERRKWFEATDSRTPEVPAGEGPRRGLGAPLTEDQQNRLSEEIEKKWQELEKLPLRENKRVPLTALLNQSRGERRGPPSDGHEALEK

SEQ ID NO: 86909 - protein, 106 aa, Homo sapiens
MVSSDRPVSLEDEVSHSMKEMIGGCCVCSDERGWAENPLVYCDGHGCSVAVHQACYGIVQVPTGPWFCRKCESQERAARVTLLHEAGTMTAGSSCFQPLLPEEGAL

SEQ ID NO: 86910 - protein, 67 aa, Homo sapiens
  MOD_RES (1)..(1): Any amino acid
XLHSAGIIHRDLKPSNIVVKSDCTLKILDFGLARTAGTSFMMTPYVVTRYYRAPEVILGMGYKENGE

SEQ ID NO: 86911 - protein, 83 aa, Homo sapiens
MQESQETHISNHLDEVVAAVSITHRKKFQNKLLQTALFQPPREKLHLCEEKAKSYSNSHEYKQAVHELVRCVALTRICYGDSH

SEQ ID NO: 86912 - protein, 218 aa, Homo sapiens
MEVAEPSSPTEEEEEEEEHSAEPRPRTRSNPEGAEDRAVGAQASVGSRSEGEGEAASADDGSLNTSGAGPKSWQVPPPAPEVQIRTPRVNCPEKVIICLDLSEEMSLPKLESFNGSKTNALNVSQKMIEMFVRTKHKIDKSHEFALVVVNDDTAWLSGLTSDPRELCSCLYDLETASCSTFTFSLAPPPDLEGLFSLIQQKTELPVTENVQTIPPPYV

SEQ ID NO: 86913 - protein, 1032 aa, Homo sapiens
MGRESRHYRKRSASRGRSGSRSRSRSPSDKRSKRGDDRRSRSRDRDRRRERSRSRDKRRSRSRDRKRLRRSRSRERDRSRERRRSRSRDRRRSRSRSRGRRSRSSSPGNKSKKTENRSRSKEKTDGGESSKEKKKDKDDKEDEKEKDAGNFDQNKLEEEMRKRKERVEKWREEQRKKAMENIGELKKEIEEMKQGKKWSLEDDDDDEDDPAEAEKEGNEMEGEELDPLDAYMEEVKEEVKKFNMRSVKGGGGNEKKSGPTVTKVVTVVTTKKAVVDSDKKKGELMENDQDAMEYSSEEEEVDLQTALTGYQTKQRKLLEPVDHGKIEYEPFRKNFYVEVPELAKMSQEEVNVFRLEMEGITVKGKGCPKPIKSWVQCGISMKILNSLKKHGYEKPTPIQTQAIPAIMSGRDLIGIAKTGSGKTIAFLLPMFRHIMDQRSLEEGEGPIAVIMTPTRELALQITKECKKFSKTLGLRVVCVYGGTGISEQIAELKRGAEIIVCTPGRMIDMLAANSGRVTNLRRVTYVVLDEADRMFDMGFEPQVMRIVDNVRPDRQTVMFSATFPRAMEALARRILSKPIEVQVGGRSVVCSDVEQQVIVIEEEKKFLKLLELLGHYQESGSVIIFVDKQEHADGLLKDLMRASYPCMSLHGGIDQYDRDSIINDFKNGTCKLLVATSVAARGLDVKHLILVVNYSCPNHYEDYVHRAGRTGRAGNKGYAYTFITEDQARYAGDIIKALELSGTAVPPDLEKLWSDFKDQQKAEGKIIKKSSGFSGKGFKFDETEQALANERKKLQKAALGLQDSDDEDAAVDIDEQIESMFNSKKRVKDMAAPGTSSVPAPTAGNAEKLEIAKRLALRINAQKNLGIESQVDVMQQATNAILRGGTILAPTVSAKTIAEQLAEKINAKLNYVPLEKQEEERQDGGQNESFKRYEEELEINDFPQTARWKVTSKEALQRISEYSEAAITIRGTYFPPGKEPKEGERKIYLAIESANELAVQKAKAEITRLIKEELIRLQNSYQPTNKGRYKVL

SEQ ID NO: 86914 - protein, 194 aa, Homo sapiens
MLSSTLRVAVVCVSNVNRSMEAHSILRRKGLSVRSFGTESHVRLPGPRPNRPVVYDFATTYKEMYNDLLRKDRERYTRNGILHILGRNERIKPGPERFQECTDFFDVIFTCEESVYDTVVEDLCSREQQTFQPVHVINMDIQDTLEDATLGAFLICEICQCLQQSDDMEDNLEELLLQMEEKAGKSFLHTVCFY

SEQ ID NO: 86915 - protein, 42 aa, Homo sapiens
MAPKPGAEWSTALSHLVLGVVSLHAAVSTAEASRGAAAGFLL

SEQ ID NO: 86916 - protein, 940 aa, Homo sapiens
MILVQILKQEWPKHWPTFISDIVGASRTSESLCQNNMVILKLLSEEVFDFSSGQITQVKSKHLKDSMCNEFSQIFQLCQFVMENSQNAPLVHATLETLLRFLNWIPLGYIFETKLISTLIYKFLNVPMFRNVSLKCLTEIAGVSVSQYEEQFVTLFTLTMMQLKQMLPLNTNIRLAYSNGKDDEQNFIQNLSLFLCTFLKEHDQLIEKRLNLRETLMEALHYMLLVSEVEETEIFKICLEYWNHLAAELYRESPFSTSASPLLSGSQHFDVPPRRQLYLPMLFKVRLLMVSRMAKPEEVLVVENDQGEVVREFMKDTDSINLYKNMRETLVYLTHLDYVDTERIMTEKLHNQVNGTEWSWKNLNTLCWAIGSISGAMHEEDEKRFLVTVIKDLLGLCEQKRGKDNKAIIASNIMYIVGQYPRFLRAHWKFLKTVVNKLFEFMHETHDGVQDMACDTFIKIAQKCRRHFVQVQVGEVMPFIDEILNNINTIICDLQPQQVHTFYEAVGYMIGAQTDQTVQEHLIEKYMLLPNQVWDSIIQQATKNVDILKDPETVKQLGSILKTNVRACKAVGHPFVIQLGRIYLDMLNVYKCLSENISAAIQANGEMVTKQPLIRSMRTVKRETLKLISGWVSRSNDPQMVAENFVPPLLDAVLIDYQRNVPAAREPEVLSTMAIIVNKLGGHITAEIPQIFDAVFECTLNMINKDFEEYPEHRTNFFLLLQAVNSHCFPAFLAIPPTQFKLVLDSIIWAFKHTMRNVADTGLQILFTLLQNVAQEEAAAQSFYQTYFCDILQHIFSVVTDTSHTAGLTMHASILAYMFNLVEEGKISTSLNPGNPVNNQIFLQEYVANLLKSAFPHLQDAQVKLFVTGLFSLNQDIPAFKEHLRDFLVQIKEFAGEDTSDLFLEEREIALRQADEEKHKRQMSVPGIFNPHEIPEEMCD

SEQ ID NO: 86917 - protein, 1281 aa, Homo sapiens
MRSQGSVRSSPGQGPEWVGRGGRKVLRIWLGKMSVKEGAQRKWAALKEKLGPQDSDPTEANLESADPELCIRLLQMPSVVNYSGLRKRLEGSDGGWMVQFLEQSGLDLLLEALARLSGRGVARISDALLQLTCVSCVRAVMNSRQGIEYILSNQGYVRQLSQALDTSNVMVKKQVFELLAALCIYSPEGHVLTLDALDHYKTVCSQQYRFSIVMNELSGSDNVPYVVTLLSVINAVILGPEDLRARTQLRNEFIGLQLLDVLARLRDLEDADLLIQLEAFEEAKAEDEEELLRVSGGVDMSSHQEVFASLFHKVSCSPVSAQLLSVLQGLLHLEPTLRSSQLLWEALESLVNRAVLLASDAQECTLEEVVERLLSVKGRPRPSPLVKAHKSVQANLDQSQRGSSPQNTTTPKPSVEGQQPAAAAACEPVDHAQSESILKVSQPRALEQQASTPPPPPPPPLLPGSSAEPPPPPPPPPLPSVGAKALPTAPPPPPLPGLGAMAPPAPPLPPPLPGSCEFLPPPPPPLPGLGCPPPPPPLLPGMGWGPPPPPPPLLPCTCSPPVAGGMEEVIVAQVDHGLGSAWVPSHRRVNPPTLRMKKLNWQKLPSNVAREHNSMWASLSSPDAEAVEPDFSSIERLFSFPAAKPKEPTMVAPRARKEPKEITFLDAKKSLNLNIFLKQFKCSNEEVAAMIRAGDTTKFDVEVLKQLLKLLPEKHEIENLRAFTEERAKLASADHFYLLLLAIPCYQLRIECMLLCEGAAAVLDMVRPKAQLVLAACESLLTSRQLPIFCQLILRIGNFLNYGSHTGDADGFKISTLLKLTETKSQQNRVTLLHHVLEEAEKSHPDLLQLPRDLEQPSQAAGINLEIIRSEASSNLKKLLETERKVSASVAEVQEQYTERLQASISAFRALDELFEAIEQKQRELADYLCEDAQQLSLEDTFSTMKAFRDLFLRALKENKDRKEQAAKAERRKQQLAEEEARRPRGEDGKPVRKGPGKQEEVCVIDALLADIRKGFQLRKTARGRGDTDGGSKAASMDPPRATEPVATSNPAGDPVGSTRCPASEPGLDATTASESRGWDLVDAVTPGPQPTLEQLEEGGPRPLERRSSWYVDASDVLTTEDPQCPQPLEGAWPVTLGDAQALKPLKFSSNQPPAAGSSRQDAKDPTSLLGVLQAEADSTSEGLEDAVHSRGARPPAAGPGGDEDEDEEDTAPESALDTSLDKSFSEDAVTDSSGSGTLPRARGRASKGTGKRRKKRPSRSQEEVPPDSDDNKTKKLCVIQ

SEQ ID NO: 86918 - protein, 282 aa, Homo sapiens
MKLEFLQRKFWAATRQCSTVDGPCTQSCEDSDLDCFVIDNNGFILISKRSRETGRFLGEVDGAVLTQLLSMGVFSQVTMYDYQAMCKPSSHHHSAAQPLVSPISAFLTATRWLLQELVLFLLEWSVWGSWYDRGAEAKSVFHHSHKHKKQDPLQPCDTEYPVFVYQPAIREANGIVECGPCQKVFVVQQIPNSNLLLLVTDPTCDCSIFPPVLQEATEVKYNASVKCDRMRSQKLRRRPDSCHAFHPEENAQDCGGASDTSASPPLLLLPVCAWGLLPQLLR

SEQ ID NO: 86919 - protein, 547 aa, Homo sapiens
MFTMTRAMEEALFQHFMHQKLGIAYAIHKPFPFFEGLLDNSIITKRMYMESLEACRNLIPVSRVVHNILTQLERTFNLSLLVTLFSQINLREYPNLVTIYRSFKRVGASYEWQSRDTPILLEAPTGLAEGSSLHTPLALPPPQPPQPSCSPCAPRVSEPGTSSQQSDEILSESPSPSDPVLPLPALIQEGRSTSVTNDKLTSKMNAEEDSEEMPSLLTSTVQVASDNLIPQIRDKEDPQEMPHSPLGSMPEIRDNSPEPNDPEEPQEVSSTPSDKKGKKRKRCIWSTPKRRHKKKSLPGASSRHGIQKKLKRVDQVPQKKDDSTCNSTVETRAQKARTECARKSRSEEIIDGTSEMNEGKRSQKTPSTPRRVTQGAASPGHGIQEKLQVVDKVTQRKDDSTWNSEVMMRVQKARTKCARKSRLKEKKKEKDICSSSKRRFQKNIHRRGKPKSDTVDFHCSKLPVTCGEAKGILYKKKMKHGSSVKCIRNEDGTWLTPNEFEVEGKGRNAKNWKRNIRCEGMTLGELLKSGLLLCPPRINLKRELNSK

SEQ ID NO: 86920 - protein, 92 aa, Homo sapiens
MAPYSLLVTRLQKALGVRQYHVASVLCQRAKVAMSHFEPNEYIHYDLLEKNINIVRKRLSLTLSPRLECSCAISAHCNLHLPGSSDCPASAS

SEQ ID NO: 86921 - protein, 174 aa, Homo sapiens
MRIEKCYFCSGPIYPGHGMMFVRNDCKVFRFCKSKCHKNFKKKRNPRKVRWTKAFRKAAGKELTVDNSFEFEKRRNEPIKYQRELWNKTIDAMKRVEEIKQKRQAKFIMNRLKKNKELQKVQDIKEVKQNIHLIRAPLAGEETVGRENGTAVTRGCGHGRCSLKISVTISFMYI

SEQ ID NO: 86922 - protein, 178 aa, Homo sapiens
MLATRRLLGWSLPARVSVRFSGDTDEDRIFTNLYGRHDWRLKGSLSRGDWYKTKEILLKGPDWILGEIKTSGLRGRGGAGFPTGLKWSFMNKPSDGRPKYLVVNADEGEPGTCKDREILRHDPHKLLEGCLVGGRAMGARAAYIYIRGEFYNEASNLQVAIREAYEAGLIGKNACGSG

SEQ ID NO: 86923 - protein, 117 aa, Homo sapiens [sequence omitted]

SEQ ID NO: 86924 - protein, 65 aa, Homo sapiens
MATHQKDCSLPYATESKECRMVQEQCCHSQLEELHCATGISLANEQDRCATPHGDNASLEATFVK

SEQ ID NO: 86925 - protein, 40 aa, Homo sapiens
MERDSHGSSSGRATQGSGTRSRGRAVPSTLFAVTGWWTAS

SEQ ID NO: 86926 - protein, 58 aa, Homo sapiens
MVLNSLDKMIQLQKNTANIRNICVLAHVDHGKTTLADCLISSNGIISSRLAGKVMRST

SEQ ID NO: 86927 - protein, 129 aa, Homo sapiens
  MOD_RES (1)..(1): Any amino acid
XHNRNEPEYNISQPGTEIFNMPAITGTGLMTYRSQAVQEHASTNMGLEAIIRKALMGGGGKAKVSGRPSSRKAKSPAPGLASGDRPPSVSSVHSEGDCNRRTPLTNRVWEDRPSSAGGHQVPRHSPTTP

SEQ ID NO: 86928 - protein, 1793 aa, Homo sapiens
  MOD_RES (1)..(1): Any amino acid
XDSQRKQYEEWLQETQQLLQMQQKYLEEQIGAHRKSKKALSAKQRTAKKAGREFPEEDAEQLKHVTEQQSMVQKQLEQIRKQQKEHAELIEDYRIKQQQQCAMAPPTMMPSVQPQPPLIPGATPPTMSQPTFPMVPQQLQHQQHTTVISGHTSPVRMPSLPGWQPNSAPAHLPLNPPRIQPPIAQLPIKTCTPAPGTVSNANPQSGPPPRVEFDDNNPFSESFQERERKERLREQQERQRIQLMQEVDRQRALQQRMEMEQHGMVGSEISSSRTSVSQIPFYSSDLPCDFMQPLGPLQQSPQHQQQMGQVLQQQNIQQGSINSPSTQTFMQTNERRQVGPPSFVPDSPSIPVGSPNFSSVKQGHGNLSGTSFQQSPVRPSFTPALPAAPPVANSSLPCGQDSTITHGHSYPGSTQSLIQLYSDIIPEEKGKKKRTRKKKRDDDAESTKAPSTPHSDITAPPTPGISETTSTPAVSTPSELPQQADQESVEPVGPSTPNMAAGQLCTELENKLPNSDFSQATPNQQTYANSEVDKLSMETPAKTEEIKLEKAETESCPGQEEPKLEEQNGSKVEGNAVACPVSSAQSPPHSAGAPAAKGDSGNELLKHLLKNKKSSSLLNQKPEGSICSEDDCTKDNKLVEKQNPAEGLQTLGAQMQGGFGCGNQLPKTDGGSETKKQRSKRTQRTGEKAAPRSKKRKKDEEEKQAMYSSTDTFTHLKQQLSLLPLMEPIIGVNFAHFLPYGSGQFNSGNRLLGTFGSATLEGVSDYYSQLIYKNNLSNPPTPPASLPPTPPPMACQKMANGFATTEELAGKAGVLVSHEVTKTLGPKPFQLPFRPQDDLLARALAQGPKTVDVPASLPTPPHNNQEELRIQDHCGDRDTPDSFVPSSSPESVVGVEVSRYPDLSLVKEEPPEPVPSPIIPILPSTAGKSSESRRNDIKTEPGTLYFASPFGPSPNGPRSGLISVAITLHPTAAENISSVVAAFSDLLHVRIPNSYEVSSAPDVPSMGLVSSHRINPGLEYRQHLLLRGPPPGSANPPRLVSSYRLKQPNVPFPPTSNGLSGYKDSSHGIAESAALRPQWCCHCKVVILGSGVRKSFKDLTLLNKDSRESTKRVEKDIVFCSNNCFILYSSTAQAKNSENKESIPSLPQSPMRETPSKAFHQYSNNISTLDVHCLPQLPEKASPPASPPIAFPPAFEAAQVEAKPDELKVTVKLKPRLRAVHGGFEDCRPLNKKWRGMKWKKWSIHIVIPKGTFKPPCEDEIDEFLKKLGTSLKPDPVPKDYRKCCFCHEEGDGLTDGPARLLNLDLDLWVHLNCALWSTEVYETQAGALINVELALRRGLQMKCVFCHKTGATSGCHRFRCTNIYHFTCAIKAQCMFFKDKTMLCPMHKPKGIHEQELSYFAVFRRVYVQRDEVRQIASIVQRGERDHTFRVGSLIFHTIGQLLPQQMQAFHSPKALFPVGYEASRLYWSTRYANRRCRYLCSIEEKDGRPVFVIRIVEQGHEDLVLSDISPKGVWDKILEPVACVRKKSEMLQLFPAYLKGEDLFGLTVSAVARIAESLPGVEACENYTFRYGRNPLMELPLAVNPTGCARSEPKMSAHVKRFVLRPHTLNSTSTSKSFQSTVTGELNAPYSKQFVHSKSSQYRKMKTEWKSNVYLARSRIQGLGLYAARDIEKHTMVIEYIGTIIRNEVANRKEKLYESQNRGVYMFRMDNDHVIDATLTGGPARYINHSCAPNCVAEVVTFERGHKIIISSSRRIQKGEELCYDYKFDFEDDQHKIPCHCGAVNCRKWMN

SEQ ID NO: 86929 - protein, 115 aa, Homo sapiens
MILNKALMLGALALTTVMSPCGGEDIVGSISDSLLLYRDGHEFVKQKLKSQIVKRGSKLEGTLNFHNLINRGSSHSDFVQQWKFHPLLQSAWLLCSKFPFFSLTPECPGQAQLIH

SEQ ID NO: 86930 - protein, 54 aa, Homo sapiens
  MOD_RES (1)..(1): Any amino acid
XGFGGSRGGGSYNDFGNYNNQSSNFGPMKGGNFGGRSSGPYGGGGQYFAKPRNQ

SEQ ID NO: 86931 - protein, 208 aa, Homo sapiens
  MOD_RES (1)..(1): Any amino acid
XGVGKDKHKHISDLENCLSSVKITSFRGYDFYGLKDKTWDEVLETHHKLPTDQLDLKKQQEAVWELFTSECTYFLDHLLVLKMIFMNTLRYLQTHEYLLDVDLWRLFANLEELTQTSLGFVNSLFGIIKDYVDASEISSSLDFISVLTKYFRGSLCQSHQTYCLNYSAAIFYLESLRQRDDFGIYLKKQNDAEEETGNFVPSLFVWHN

SEQ ID NO: 86932 - protein, 191 aa, Homo sapiens
MTWRHHVRLLFTVSLALQIINLGNSYQREKHNGGREEVTKVATQKHRQSPLNWTSSHFGEVTGSAEGWGPEEPLPYSRAFGEVNAAPWSTEPGPSAPATSAGASSGPCTASPSRRLTAVTRKTSWPPTLTGRAPGARPACYSCCPAHSCTASCARMRPRTLGPWSLPSSSGSGAPAEGRDLGIAFNFLCCK

SEQ ID NO: 86933 - protein, 139 aa, Homo sapiens
  MOD_RES (1)..(1): Any amino acid
XNPSQSSRLTAPFRKHVRPKKQHEIRRLGELVKKLSDFTGCTQVVDVGSGQGHLSRFMALGLGLMVKSIEGDQRLVERAQRLDQELLQALEKEEKRNPQVVQTSPRHSPHHVVRYVQRGLQRVGLDPQLPLNLAALQAH

SEQ ID NO: 86934 - protein, 1777 aa, Homo sapiens
MTTMLQKSDSNASFLRAARAGNLDKVVEYLKGGIDINTCNQNGLNALHLAAKEGHVGLVQELLGRGSSVDSATKKGNTALHIASLAGQAEVVKVLVKEGANINAQSQNGFTPLYMAAQENHIDVVKYLLENGANQSTATEDGFTPLAVALQQGHNQAVAILLENDTKGKVRLPALHIAARKDDTKSAALLLQNDHNADVQSKSGFTPLHIAAHYGNVNVATLLLNRGAAVDFTARNGITPLHVASKRGNTNMVKLLLDRGGQIDAKTRDGLTPLHCAARSGHDQVVELLLERGAPLLARTKNGLSPLHMAAQGDHVECVKHLLQHKAPVDDVTLDYLTALHVAAHCGHYRVTKLLLDKRANPNARALNGFTPLHIACKKNRIKVMELLVKYGASIQAITESGLTPIHVAAFMGHLNIVLLLLQNGASPDVTNIRGETALHMAARAGQVEVVRCLLRNGALVDARAREEQTPLHIASRLGKTEIVQLLLQHMAHPDAATTNGYTPLHISAREGQVDVASVLLEAGAAHSLATKKGFTPLHVAAKYGSLDVAKLLLQRRAAADSAGKNGYTPLHIAAKKNQMQIASTLLNYGAETNIVTKQGVTPLHLASQEGHTDMVTLLLDKGANIHMSTKSGLTSLHLAAQEDKVNVADILTKHGADQDAHTKLGYTPLIVACHYGNVKMVNFLLKQGANVNAKTKNGYTPLHQAAQQGHTHIINVLLQHGAKPNATTANGNTALAIAKRLGYISVVDTLKVVTEEVTTTTTTITEKHKLNVPETMTEVLDVSDEEGDDTMTGDGGEYLRPEDLKELGDDSLPSSQFLDGMNYLRYSLEGGRSDSLRSFSSDRSHTLSHASYLRDSAVMDDSVVIPSHQVSTLAKEAERNSYRLSWGTENLDNVALSSSPIHSGFLVSFMVDARGGAMRGCRHNGLRIIIPPRKCTAPTRVTCRLVKRHRLATMPPMVEGEGLASRLIEVGPSGAQFLGPVIVEIPHFAALRGKERELVVLRSENGDSWKEHFCDYTEDELNEILNGMDEVLDSPEDLEKKRICRIITRDFPQYFAVVSRIKQDSNLIGPEGGVLSSTVVPQVQAVFPEGALTKRIRVGLQAQPMHSELVKKILGNKATFSPIVTLEPRRRKFHKPITMTIPVPKASSDVMLNGFGGDAPTLRLLCSITGGTTPAQWEDITGTTPLTFVNECVSFTTNVSARFWLIDCRQIQESVTFASQVYREIICVPYMAKFVVFAKSHDPIEARLRCFCMTDDKVDKTLEQQENFAEVARSRDVEVLEGKPIYVDCFGNLVPLTKSGQHHIFSFFAFKENRLPLFVKVRDTTQEPCGRLSFMKEPKSTRGLVHQAICNLNITLPIYTKESESDQEQEEEIDMTSEKNPQDEQERIEERLAYIADHLGFSWTELARELDFTEEQIHQIRIENPNSLQDQSHALLKYWLERDGKHATDTNLVECLTKINRMDIVHLMETNTEPLQERISHSYAEIEQTITLDHSEGFSVLQEELCTAQHKQKEEQAVSKESETCDHPPIVSEEDISVGYSTFQDGVPKTEGDSSATALFPQTHKEQVQQDFSGKMQDLPEESSLEYQQEYFVTTPGTETSETQKAMIVPSSPSKTPEEVSTPAEEEKLYLQTPTSSERGGSPIIQEPEEPSEHREESSPRKTSLVIVESADNQPETCERLDEDAAFEKGDDMPEIPPETVTEEEYIDEHGHTVVKKVTRKIIRRYVSSEGTEKEEIMVQGMPQEPVNIEEGDGYSKVIKRVVLKSDTEQSEDNNE

SEQ ID NO: 86935 - protein, 354 aa, Homo sapiens
MALRLLKLAATSASARVVAAGAQRRGIHSSVQCKLRYGMWHFLLGDKASKRLTERSRVITVDGNICTGKGKLAKEIAEKLGFKHFPEAGIHYPDSTTGDGKPLATDYNGNCSLEKFYDDPRSNDGNSYRLQSWLYSSRLLQYSDALEHLLTTGQGVVLERSIFSDFVFLEAMYNQGFIRKQCVDHYNEVKSVTICDYLPPHLVIYIDVPVPEVQRRIQKKGDPHEMKITSAYLQDIENAYKKTFLPEMSEKCEVLQYSAREAQDSKKVVEDIEYLKFDKGPWLKQDNRTLYHLRLLVQDKFEVLNYTSIPIFLPEVTIGAHQTDRVLHQFRELPGRKYSPGYNTEVGDKWIWLK

SEQ ID NO: 86936 - protein, 336 aa, Homo sapiens
MEKQPQNSRRGLAPREVPPAVGLLLIMALMNTLLYLCLDHFFIAPRQSTVDPTHCPYGHFRIGQMKNCSPWLSCEELRTEVFLSEWKEHKVALSQLTSLEMKDDFLHGLQMLKSLQGTHVVTLLGYCEDDNTMLTEYHPLGSLSNLEETLNLSKYQNVNTWQHRLELAMDYVSIINYLHHSPVGTRVMCDSNDLPKTLSQYLLTSNFSILANDLDALPLVNHSSGMLVKCGHRELHGDFVAPEQLWPYGEDVPFHDDLMPSYDEKIDIWKIPDISSFLLGHIEGSDMVRFHLFDIHKACKSQTPSERPTAQDVLETYQKVLDTLRDAMMSQAREML

SEQ ID NO: 86937 - protein, 81 aa, Homo sapiens
MALTQGPLKFMDVAIEFSQEEWKCLDPAQRTLYRDVMLENYRNLVSLGICLPDLSVTSMLEQKRDPWTLQSEEKIANDPDG

SEQ ID NO: 86938 - protein, 416 aa, Homo sapiens
MLKLAPWCLSFVTTPMFLVAMRKELASRMEWSGKQPICIKACREPKISDLVRRRVLPMQVQSRETPLHQLYSAAFSKQKLQSAPTKKPALPFGDLPMGYQHLHTQLQYECISPFYRRLGSSRRTCLRTGKWSGRAPSCIPICGKIENITAPKTQGLRWPWQAAIYRRTSGVHDGSLHKGAWFLVCSGALVNERTVVVAAHCVTDLGKVTMIKTADLKVVLGKFYRDDDRDEKTIQSLQISAIILHPNYDPILLDADIAILKLLDKARISTRVQPICLAASRDLSTSFQESHITVAGWNVLADVRSPGFKNDTLRSGVVSVVDSLLCEEQHEDHGIPVSVTDNMFCASWEPTAPSDICTAETGGIAAVSFPGRASPEPRWHLMGLVSWSYDKTCSHRLSTAFTKVLPFKDWIERNMK

SEQ ID NO: 86939 - protein, 68 aa, Homo sapiens
  MOD_RES (1)..(1): Any amino acid
XKKRKSPGVAAAVAEDGGLKKCKISRYHLPPPFKLPSSLLCWTTGGKGVGPGLPGWGWRQLLQIPTPC

SEQ ID NO: 86940 - protein, 235 aa, Homo sapiens
MTFKILCISCKRRSETNAETFTEWTFRQKGTEEFVKILRYENEVLQLEEDERFEGRVVWNGSRGTKDLQDLSIFITNVTYNHSGDYECHVYRLLFFENYEHNTSVVKKIHIEVVDKGESGAACPFTVTHRRARWRDRWQAVDRTGWLCAWPANRPQQRAEGEGSSPSCPLQLWPLFLSSPRRGQSMPVPHRRSGYRTQLCHLCCMTSGRCLLSLSQRVVLGLPGIIIRCVSRGVV

SEQ ID NO: 86941 - protein, 643 aa, Homo sapiens
MVEGEEEWQQLNPAQKTLHRDVMLETYNHLVSVGCSGIKPDVIFKLEHGKDPWIIESELSRWIYPDRVKGLESSQQIISGELLFQREILERAPKDNSLYSVLKIWHIDNQMDRYQGNQDRVLRQVTVISRETLTDEMGSKYSAFGKMFNRCTDLAPLSQKFHKFDSCENSLKSNSDLLNYNRSYARKNPTKRFRCGRPPKYNASCSVPEKEGFIHTGMEPYGDSQCEKVLSHKQAHVQYKKFQAREKPNVCSMCGKAFIKKSQLIIHQRIHTGEKPYVCGDCRKAFSEKSHLIVHQRIHTGEKPYECTKYGRAFSRKSPFTVHQRVHTGEKPYECFECPKAFSQKSHLIIHQRVHTREKPFECSECRKAFCEMSHLFIHQITHTGKKPYECTECGKTFPRKTQLIIHQRTHTGEKPYKCGECGKTFCQQSHLIGHQRIHTGEKPYVCTDCGKAFSQKSHLTGHQRLHTGEKPYMCTECGKSFSQKSPLIIHQRIHTGEKPYQCGECGKTFSQKSLLIIHLRVHTGEKPYECTECGRAFSLKSHLILHQRGHTGEKPYECSECGKAFCGKSPLIIHQKTHPREKTPECAESGMTFFWKSQMITYQRRHTGEKPSRCSDCGKAFCQHVYFTGHQNPYRKDTLYIC

SEQ ID NO: 86942 - protein, 92 aa, Homo sapiens
MVFYFTSSSVNSSAYTIYMGKDKYENEDLIKHGWPEDIWFHVDKLSSAHVYLRLHKGENIEDIPKEVLMDCAHLVKANSIQGKNCDSGEESK

SEQ ID NO: 86943 - protein, 207 aa, Homo sapiens
MHSFVRTCKKLREEEAARLFYQIASAVAHCHDGGLVLRDLKLRKFIFKDEERTRVKLESLEDAYILRGDDDSLSDKHGCPAYVSPEILNTSGSYSGKAADVWSLGVMLYTMLVGRYPFHDIEPSSLFSKIRRGQFNIPETLSPKAKCLIRSILRREPSERLTSQEILDHPWFSTDFSVSNSAYGAKEVSDQLVPDVNMEENLDPFFN

SEQ ID NO: 86944 - protein, 78 aa, Homo sapiens
MAASGSGMAQKTWELANNMQEAQSIDEIYKYDKKQQQEILAAKPWTKDKGRSQDFDSCLDFQHEVYTFFSFWLKSGKA

SEQ ID NO: 86945 - protein, 125 aa, Homo sapiens
MVNENTRMYIPEENHQGSNYGSPRPAHANMNANAAAGLAPEHIPTPGAALSWQAAIDAARQAKLMGSAGNATISTVSSTQRKRQQYGKPKKQGSTTATRPPRALLCLTLKNPIRRACISIVEWNI

SEQ ID NO: 86946 - protein, 290 aa, Homo sapiens
MAELTALESLIEMGFPRGRAEKALALTGNQGIEAAMDWLMEHEDDPDVDEPLETPLGHILGREPTSSEQGGLEGSGSAAGEGKPALSEEERQEQTKRMLELVAQKQREREEREEREALERERQRRRQGQELSAARQRLQEDEMRRAAEERRREKAEELAARQRVREKIERDKAERAKKYGGSVGSQPPPVAPEPGPVPSSPSQEPPTKREYDQCRIQVRLPDGTSLTQTFRAREQLAAVRLYVELHRGEELGGGQDPVQLLSGFPRRAFSEADMERPLQELGLVPSAVLI

SEQ ID NO: 86947 - protein, 307 aa, Homo sapiens
MNSKRMLLLVLFAFSLMLVERYFRNHQVEELRLSDWFHPRKRPDVITKTDWLAPVLWEGTFDRRVLEKHYRRRNITVGLAVFATGRFAEEYLRPFLHSANKHFMTGYRVIFYIMVDAFFKLPDIEPSPLRTFKAFKVGTERWWLDGPLVHVKSLGEHIASHIQDEVDFLFSMAANQVFQNEFGVETLGPLVAQLHAWWYFRNTKNFPYERRPTSAACIPFGQGDFYYGNLMVGGTPHNILDFIKEYLNGVIHDIKNGLNSTYEKHLNKYFYLNKPTLLSPAYSWDLAFSPPPQIQYVKVAHDSQRKL

SEQ ID NO: 86948 - protein, 184 aa, Homo sapiens
  MOD_RES (1)..(1): Any amino acid
XSLGGSRHWLQVFPLSVPEGSYPVWEDFINKAGKLQSQLRTTVVAAAAFLDAFQKVADMATNTRGGTREIGSALTRMCMRHRSIEAKLRQFSSALIDCLINPLQEQMEEWKKVANQLDKDHAKEYKKARQEIKKKSSDTLKLQKKAKKGRGDIQPQLDSALQDVNDKYLLLEETEKQAVRKALI

SEQ ID NO: 86949 - protein, 160 aa, Homo sapiens
MSSAMLVTCLPDPSSSFREDAPRPPVPGEEGETPPCQPGVGKGQVTKPMPVSSNTRRNEDGLGEPEGRASPDSPLTRWTKSLHSLLGDQDGAYLFRTFLEREKCVDTLDFWFACNGFRQMNLKDTKTLRVAKDFCHDILFYLYCKLCIIKSSFKENYLVQ

SEQ ID NO: 86950 - protein, 413 aa, Homo sapiens
MAGLRNESEQEPLLGDTPGSREWDILETEEHYKSRWRSIRILYLTMFLSSVGFSVVMMSIWPYLQKIDPTADTSFLGWVIASYSLGQMVASPIFGLWSNYRPRKEPLIVSILISVAANCLYAYLHIPASHNKYYMLVARGLLGIGAASTDEAQVPQGNIDQVAVVAINVLFFVTLFIFALFETIITPLTMDMYAWTQEQAVLYNGIILAALGVEAVVIFLGVKLLSKKIGERAILLGGLIVVWVGFFILLPWGNQFPKIQWEDLHNNSIPNTTFGEIIIGLWKSPMEDDNERPTGCSIEQAWCLYTPVIHLAQFLTSAVLIGLGYPVCNLMSYTLYSKILGPKPQGVYMGWLTASGSGARILGPMFISQVYAHWGPRWAFSLVCGIIVLTITLLGVVYKRLIALSVRYGRIQE

SEQ ID NO: 86951 - protein, 104 aa, Homo sapiens
  MOD_RES (1)..(1): Any amino acid
XALNQCSVSTTHKCLIAEAWCSVRDLPALQEALRDSSMEEGVSAVAHRIPCRDMPPTLIRTNRFTASFQGIVDAYGVGRYQEVNPDGEMEAQRGEVAGPRSHSS

SEQ ID NO: 86952 - protein, 90 aa, Homo sapiens
MRLLSFVVLALFAVTQAEEGARLLASKSLLNRYAVEGRDLTLQYNIYNVGSSAALDVELSDDSFPPEDFGIVSGMLNVKWDRIAPYPLGT

SEQ ID NO: 86953 - protein, 163 aa, Homo sapiens
MPCAQRSWLANLSVVAQLLNFGALCYGRQPQPGPVRFPDRRQEHFIKGLPEYHVVGPVRVDASGHFLSYGLHYPITSSRRKRDLDGSEDWVYYRISHEEKDLFFNLTVNQGFLSNSYIMEKRYGNLSHVKMMASSAPLCHLSGTVLQQGTRVGTAALSACHGL

SEQ ID NO: 86954 - protein, 138 aa, Homo sapiens
MARLLQASCLLSLLLAGFVSQSRGQEKSKAPRQMGNPQMDCHGGISGTIYEYGALTIDGEEYIPFKQYAGKYVLFVNVASYCGLTGQYIELNALQEELAPFGLVILGFPCNQFGKQEPGENSEILPTLKYVRPGGGFV

SEQ ID NO: 86955 - protein, 167 aa, Homo sapiens
  MOD_RES (1)..(1): Any amino acid
XVKLYRFLARRTNSTFNQVVLKRLFMSRTNRPPLSLSRMIRKMKLPGRENKTAVVVGTITDDVRVQEVPKLKPCPLHQVCALRVTSRARSRILRAGGKILTFDQLALDSPKGCGTVLLSGPRKGREVYRHFGKAPGTPHSHTKPYVRSKGRKFERARGRRASRGYKN

SEQ ID NO: 86956 - protein, 28 aa, Homo sapiens
MVSGRFYLSCLLLGSLGSMCILFTIYWM

SEQ ID NO: 86957 - protein, 75 aa, Homo sapiens
MSRRSSRLQAKQQPQPSQTESPQEAQIIQAKKRKTTQDVKKRREEVTKKHQYEIRLGMFKRSLAKHVKKGEQICS

SEQ ID NO: 86958 - protein, 316 aa, Homo sapiens
MMDLRNTPAKSLDKFIEDYLLPDTCFRMQINHAIDIICGFLKERCFRGSSYPVCVSKVVKGGSSGKGTTLRGRSDADLVVFLSPLTTFQDQLNRRGEFIQEIRRQLEACQRERAFSVKFEVQAPRWGNPRALSFVLSSLQLGEGVEFDVLPAFDALGQLTGGYKPNPQIYVKLIEECTDLQKEGEFSTCFTELQRDFLKQRPTKLKSLIRLVKHWYQNCKKKLGKLPPQYALELLTVYAWERGSMKTHFNTAQGFRTVLELVINYQQLCIYWTKYYDFKNPIIEKYLRRQLTKPRPSTLQAASTPQAEEDWTCTIL

SEQ ID NO: 86959 - protein, 211 aa, Homo sapiens
  MOD_RES (1)..(1): Any amino acid
XGQVVRKFRGHAGKVNTVQFNEEATVILSGSIDSSIRCWDCRSRRPEPVQTLDEARDGVSSVKVSDHEILAGRAWWCMPVFPSTREAEEGESLEPGRQRFRSVDGRVRRYDLRMGQLFSDYVGSPITCTCFSRDGQCTLVSSLDSTLRLLDKDTGELLGEYKGHKNQEYKLDCCLSERDTHVVSCSEDGKVFFWDLVEGALALALPVGSGV

SEQ ID NO: 86960 - protein, 76 aa, Homo sapiens
MHKEEHEVAVLGPPPSTILPRSTVINIHSETSVPDHVVWSLFNTLFLNWCCLGFIAFAYSVKLGDPGPLTISSPPV

SEQ ID NO: 86961 - protein, 251 aa, Homo sapiens
MLLEKDVNPGGKEETPGQRPAVTETHQLAELNEKKNERLRAAFGISDSYVDGSSFDPQRRAREAKQPAPEPPKPYSLVRESSSSRSPTPKQKKKKKKKDRGRRSESSSPRRERKKSSKKKKHRSESESKKRKHRSPTPKSKRKSKDKKRKRSRSTTPAPKSRRAHRSTSADSASSSDTSRSRSRSAAAKTHTTALAGRSPSPASGRRGEGDAPFSEPGTTSTQRPSSPETATKQPSSPYEDKDKDKKEVCS

SEQ ID NO: 86962 - protein, 61 aa, Homo sapiens
MSWPRRLLLRYLFPALLLHEPRPCLHRLSDHLSVRRAPPSHPAPKGRPDHRPARGVGEPAL

SEQ ID NO: 86963 - protein, 490 aa, Homo sapiens
MYMCFLFCSRYCTSITNFLVMGGFQLLAKPAIDFLNKNQELLQDLSEVNDENTQLMEILNTLFFLPIRRLHNYAKVLLKLATCFEVASPEYQKLQDSSSCYECLALHLGRKRKEAEYTLGFWKTFPGKMTDSLRKPERRLLCESSNRALSLQHAGRFSVNWFILFNDALVHAQFSTHHVFPLATLWAEPLSEEAGGVNGLKITTPEEQFTLISSTPQEKTKWLRAISQAVDQALRGMSDLPPYGSGSSVQRQEPPISRSAKYTFYKDPRLKDATYDGRWLSGKPHGRGVLKWPDGKMYSGMFRNGLEDGYGEYRIPNKAMNKEDHYVGHWKEGKMCGQGVYSYASGEVFEGCFQDNMRHGHGLLRSGKLTSSSPSMFIGQWVMDKKAGYGVFDDITRGEKYMGMWQDDVCQGNGVVVTQFGLYYEGNFHLNKMMGNGVLLSEDDTIYEGEFSDDWTLSGKDNSGLIEQVGKCSLLPYFLKVCEALVLFLL

SEQ ID NO: 86964 - protein, 189 aa, Homo sapiens
MAADTPGKPSASPMAGAPASASRTPDKPRSAAEHRKSSRHSKLEKADILEMTVRHLRSLRRVQVTAALSADPAVLGKYRAGFHECLAEVNRFLAGCEGVPADVRSRLLGHLAACLRQLGPSRRPASLSPAAPAEAPAPEVYAGRPLLPSLGGPFPLLAPPLLPGLTRALPAAPRAGPQGPGGPWRPWLR

SEQ ID NO: 86965 - protein, 33 aa, Homo sapiens
  MOD_RES (1)..(1): Any amino acid
XLLLAINGVTECFTFAAMSKEEVDRLFPALSML

SEQ ID NO: 86966 - protein, 183 aa, Homo sapiens
DFRALLQSLYATFKEFKMHEQIENEYIIGLLQQRSQTIYNVHSDNKLSEMLSLFEKGLKNVKNEYEQLNYAKQLKERLEAFTRDFLPHMKEEEEVFQPMLMEYFTYEELKDIKKKVIAQHCSQKDTAELLRGLSLWNHAEERQKFFKYSVDEKSDKEVSEHSTGITHLPPEVMLSIFSYLNPQ

SEQ ID NO: 86967 - protein, 82 aa, Homo sapiens
MTPLLTLILVVLMGLPLAQALDCHVCAYNGDNCFNPMRCPAMVAYCMTTRTYYTPTRMKVSKSCVPRCFETVYDGYSKHAST

SEQ ID NO: 86968 - protein, 84 aa, Homo sapiens
MPLLTQQIQDEDDQYSLVASLDNVRNLSTILKAIHFREHATCFATKNGIKVTVENAKCVQANAFIQGHGMVAHTCISSCSGDRG

SEQ ID NO: 86969 - protein, 148 aa, Homo sapiens
MGPKKKHLDYLIQCTNEMNVNIPQLADSLFERTTNSSWVVVFKSLITTHHLMVYGNERFIQYLASRNTLFNLSNFLDKSGLQGYDMSTFIRRYSRYLNEKAVSYRQVAFDFTKVKRGADGVMRTMNTEKLLKTVPIIQNQMDALLDFN

SEQ ID NO: 86970 - protein, 257 aa, Homo sapiens
  MOD_RES (1)..(1): Any amino acid
XEICGAPGVGKTQLCMQLAVDVQIPECFGGVAGEAVFIDTEGSFMVDRVVDLATACIQHLQLIAEKHKGEEHRKALEDFTLDNILSHIYYFRCRDYTELLAQVYLLPDFLSEHSKVRLVIVDGIAFPFRHDLDDLSLRTRLLNGLAQQMISLANNHRLAVILTNQMTTKIDRNQALLVPALGESWGHAATIRLIFHWDRKQSRLATLYKSPSQKECTVLFQIKPQGFRDTVVTSACSLQTEGSLSTRKRSRDPEEEL

SEQ ID NO: 86971 - protein, 227 aa, Homo sapiens
MREQLKGHETQTTCWDHPKMTELYQSLADLNNVRFSAYRTAMKLRRLQKALCLDLLSLSAACDALDQHNLKQNDQPMDILQIINCLTTIYDRLEQEHNNLVNVPLCVDMCLNWLLNVYDTGRTGRIRVLSFKTGIISLCKAHLEDKYRYLFKQVASSTGFCDQRRLGLLLHDSIQIPRQLGEVASFGGSNIEPSVRSCFQFSQSLETTALFSVPVILPFPELDFKGL

SEQ ID NO: 86972 - protein, 61 aa, Homo sapiens
MGAALGTGTRLAPWPGRACGALPRWTPTAPAQGCHSKPGPARPVPLKKRGYDVTRNPHLNK

SEQ ID NO: 86973 - protein, 191 aa, Homo sapiens
MCIPPAPGDCWLLAAIASLTLNDTLLHRVVPHGQSFQNGYAGIFHFQLWQFGEWVDVVVDDLLPIKDGKLVFVHSAEGNEFWSALLEKAYAKVNGSYEALSGGSTSEGFEDFTGGVTEWYELRKAPSDLYQIILKALERGSLLGCSIDISSVLDMEAITFKKLVKGHAYSVTGAKQVNYRGQVVSLIRMRN

SEQ ID NO: 86974 - protein, 308 aa, Homo sapiens
CKNMEVLYDSLQLAHKCILNSFYGYVMRKGARWYSMEMAGIVCFTGANIITQARELIEQIGRPLELDTDGIWCVLPNSFPENFVFKTTNVKKPKVTISYPGAMLNIMVKEGFTNDQYQELAEPSSLTYVTRSENSIFFEVDGPYLAMILPASKEEGKKLKKRYAVFNEDGSLAELKGFEVKRRGELQLIKIFQSSVFEAFLKGSTLEEVYGSVAKVADYWLDVLYSKAANMPDSELFELISENRSMSRKLEDYGEQKSTSISTAKRLAEFLGDQMVKDAGLSCRYIISRKPEGSPVTERKSEWPSVEA

SEQ ID NO: 86975 - protein, 179 aa, Homo sapiens
MAKSLLKTASLSGRTKLLHQTGLSLYSTSHGFYEEEVKKTLQQFPGGSIDLQKEDNGIGILTLNNPSRMNAFSGVMMLQLLEKVIELENWTEGKGLIVRGAKNTFSSGSDLNAVKSLGTPEESCRWNTEFLYTLHPVSPFINILYSYGWNGRMHVHAKHLNKIYETSFNKCCAGSRLGI

SEQ ID NO: 86976 - protein, 71 aa, Homo sapiens
MANYSHAADNILQNLSPLTAFLKLTSLGFIIGVSVVGNLLISILLVKDKTLHRAPYYFLLDLCCSDILRSA

SEQ ID NO: 86977 - protein, 108 aa, Homo sapiens
MKPILLQGHERSITQIKYNREGDLLFTVAKDPIVNVWYSVNGERLGTYMGHTGAVWCVDADWDTKHVLTGSADNSCRLWDCETAQTLPDSRKAAGPSQDQFGCPDLRF

SEQ ID NO: 86978 - protein, 118 aa, Homo sapiens
MVNVPKTRRTFCKKCGKHQPHKVTQYKKGKDSLYAQGKRRYDRKQSGYGGQTKPIFRKKAKTTKKIVLRLECVEPNCRSKRMLAIKRCKHFELGGDKKRKLHQNCIEPNLPPRAQQSP

SEQ ID NO: 86979 - protein, 115 aa, Homo sapiens
MCDFTEDQTAEFKEAFQLFDRTEMNVKVLDFEHFLPMLQTVAKNKDQGTYEDYVEGLRVFDKEGNGTVMGAEIRHVLVTLGEKMTEEEVEMLVAGHEDSNGCINYEAFVRHILSG

SEQ ID NO: 86980 - protein, 47 aa, Homo sapiens
MAVCGLGSRLGLGSRLGLRGCFGAARLLYPRFQSRGPQGVEDGDRVF

SEQ ID NO: 86981 - protein, 178 aa, Homo sapiens
METGPSEEPSGRKESQEMCPPGLLVFAGSSEQDANLAKQFWISASMYPPSESQLVLRRDSSQRLPVARPRRSRGSENSHSSQSFHLASNKNRDIFAEALKIQESEEKVKYLQKTRSHSVTQNEVQWHDHGSLQPQLSRIQAKTREEILQLLRKQREERISKELISLPYKPKAKEHKAK

SEQ ID NO: 86982 - protein, 127 aa, Homo sapiens
MKPILLQGHERSITQIKYNREGDLLFTVAKDPIVNVWYSVNGERLGTYMGHTGAVWCVDADWDTKHVLTGSADNSCRLWDCETGKQLALLKTNSAVRTCGFDFGGNIIMFSTDKQMGYQCFTTMSPT

SEQ ID NO: 86983 - protein, 39 aa, Homo sapiens
MRWRTILLQYCFLLITCLLTALEAVPIDIDKTKVQNIHP

SEQ ID NO: 86984 - protein, 457 aa, Homo sapiens
MVSKLTSLQQELLSALLSSGVTKEVLVQALEELLPSPNFGVKLETLPLSPGSGAEPDTKPVFHTLTNGHAKGRLSGDEGSEDGDDYDTPPILKELQALNTEEAAEQRAEVDRMLSEDPWRAAKMIKGYMQQHNIPQREVVDVTGLNQSHLSQHLNKGTPMKTQKRAALYTWYVRKQREILRQFSQQSHGPGQSDDACSEPTNKKMRRNRFKWGPASQQILYQAYDRQKNPSKEEREALVEECNRAECLQRGVSPSKAHGLGSNLVTEVRVYNWFANRRKEEAFRQKLAMDAYSSNQTHSLNPLLSHGSPHHQPSSSPPNKLSGVRYSQQGNNEITSSSTISHHGNSAMVTSQSVLQQVSPASLDPGHNLLSPDGKMISVSGGGLPPVSTLTNIHSLSHHNPQQSQNLIMTPLSGVMAIAQMSSTSLVMPTHHLLRAQQQGPCFPHHHPLGSCHGKAQ

SEQ ID NO: 86985 - protein, 131 aa, Homo sapiens
MERLVARGTFPVLVRTSACRSLFGPVDHEELSRELQARLAELNAEDQNRWDYDFQQDMPLRGPGRLQWTEVDSDSVPAFYRETVQISSPSARDQRLRSRRAMSPRRVPLQAPPLAWARWSRPRARGCGEPI

SEQ ID NO: 86986 - protein, 41 aa, Homo sapiens
MAGVPHGRGVSAWHAAEAGGTGAGHAGRLHPDAPLLGLGAQ

SEQ ID NO: 86987 - protein, 54 aa, Homo sapiens
  MOD_RES (1)..(1): Any amino acid
XPPLKNVSSNAECPACYESNGTSCHGKPWKCYEEEQCVFLVAELKNGTPGDGAD

SEQ ID NO: 86988 - protein, 113 aa, Homo sapiens
GTGLIRAMIEVINHKCDLVNYSYGEATHWPNSGRICEVINEAVWKHNIIYVSSAGNNGPCLSTVGCPGGTTSSVIGVGAYVSPDMMVAEYSLREKLPANQYTWSSRGPRWFPL

SEQ ID NO: 86989 - protein, 95 aa, Homo sapiens
MAQEKMKLGFKSLPSSTTADGNILRRVNSAPLINGLGFNSQVLQADMLRIRTNRTTFRNRRSLLLPPPPFHGSISRLHQIKQEPPNLNNMDLNGV

SEQ ID NO: 86990 - protein, 410 aa, Homo sapiens
MSLMVVSMACVGFFLLEGPWPHVGGQDKPFLSAWPGTVVSEGQHVTLQCRSRLGFNEFSLSKEDGMPVPELYNRIFRNSFLMGPVTPAHAGTYRCCSSHPHSPTGWSAPSNPVVIMVTGVHRKPSLLAHPGPLVKSGETVILQCWSDVRFERFLLHREGITEDPLRLVGQLHDAGSQVNYSMGPMTPALAGTYRCFGSVTHLPYELSAPSDPLDIVVVGLYGKPSLSAQPGPTVQAGENVTLSCSSRSLFDIYHLSREAEAGELRLTAVLRVNGTFQANFPLGPVTHGGNYRCFGSFRALPHAWSDPSDPLPVSVTGNSRYLHALIGTSVVIIPFAILLFFLLHRWCANKKNAVVMDQEPAGNRTVNREDSDEQDPQEVTYAQLNHCVFTQRKITRPSQRPKTPPTDTSV

SEQ ID NO: 86991 - protein, 164 aa, Homo sapiens
MSRPLLITFTPATDPSDLWKDGQQQPQPEKPESTLDGAAARAFYEALIGDESSAPDSQRSQTEPARERKRKKRRIMKAPAAEAVAEGASGRHGQGRSLEAEDKMTHRILRAAQEGDLPELRRLLEPHEAGGAGGNINARDAFWWTPLMCAARAGQGAAVSYLLG

SEQ ID NO: 86992 - protein, 226 aa, Homo sapiens
MERARRIEGWNSNEAPPPRPTLAEGDVAALNRRIQLVEEELDRAQERLATALQKLEEAEKAADESERGMKVIENRAMKDEEKMEIQEMQLKEAKHIAEEADRKYEEVARKLVILEGELERAEERAEVSELKCGDLEEELKNVTNNLKSLEAASEKYSEKEDKYEEEIKLLSDKLKEAETRAEFAERTVAKLEKTIDDLEEKLAQAKEENVGLHQTLDQTLNELNCI

SEQ ID NO: 86993 - protein, 349 aa, Homo sapiens
MPSKTKYNLVDDGHDLRIPLHNEDAFQHGICFEAKYVGSLDVPRPNSRVEIVAAMRRIRYEFKAKNIKKKKVSIMVSVDGVKVILKKKKKKKEWTWDESKMLVMQDPIYRIFYVSHDSQDLKIFSYIARDGASNIFRCNVFKSKKKSQAMRIVRTVGQAFEVCHKLSLQHTQQNADGQEDGESERNSNSSGDPGRQLTGAERASTATAEETDIDAVEVPLPGNDVLEFSRGVTDLDAVGKEGGSHTGSKVSHPQEPMLTASPRMLLPSSSSKPPGLGTETPLSTHHQMQLLQQLLQQQQQQTQVAVAQCVVGQIALVLSTAISMCLLLPNFSLALPSLLMEELESRYTC

SEQ ID NO: 86994 - protein, 72 aa, Homo sapiens
VTIACDAVLSSKSPYRKQDPDTWENELPVSKYANNLTQLDNGVRIPPRCLFFSRRRTCFGSSFGQALSAFWN

SEQ ID NO: 86995 - protein, 181 aa, Homo sapiens
MQNNEIIKPAKYFSELEKSILLALVEKYKYVLECKKSDARTIALKQRTWQALAHEYNSQPSVSLRDFKQLKKCWENIKARTKKIMAHERREKVKRSVSPLLSTHVLGKEKIASMLPEQLYFLQSPPEEEPEYHPDASAQESFAVSNRELCDDEKEFIHFPVCEGTSQPEPSCSAVRITANK

SEQ ID NO: 86996 - protein, 72 aa, Homo sapiens
MDSPCQPQPLSQALPQLPGSSSEPLEPEPGRARMGVESYLPCPLLPSYHCPGVPSEASAGSGTPRATATSTT

SEQ ID NO: 86997 - protein, 70 aa, Homo sapiens
MAAQGAAAAVAAGTSGVAGEGEPGPGENAAAEGTAPSPGRVSPPTPARGEPEVTVEIGETYLCRRPDSTW

SEQ ID NO: 86998 - protein, 420 aa, Homo sapiens
  MOD_RES (1)..(1): Any amino acid
XTQAMALETPTPGPPREGQSPASQAGTQHPPAQATAHSQSSPEFKGSLASLSDSLGVSVMATDQDSYSTSSTEEELEQFSSPSVKKKPSMILGKARHRLSFASFSSMFHAFLSNNRKLYKKVVELAQDKGSYFGSLVQDYKVYSLEMMARQTSSTEMLQEIRTMMTQLKSYLLQSTELKALVDPALHSEEELEAIVESALYKCVLKPLKEAINSCLHQIHSKDGSLQQLKENQLVILATTTTDLGVTTSVPEVPMMEKILQKFTSMHKAYSPEKKISILLKTCKLIYDSMALGNPGKPYGADDFLPVLMYVLARSNLTEMLLNVEYMMELMDPALQLGEGSYYLTTTYGALEHIKSYDKITVTRQLSVEVQDSIHRWERRRTLNKARASRSSVQVRPESGRGPVGPCPRHHPCCLLAKEP

SEQ ID NO: 86999 - protein, 82 aa, Homo sapiens
MIPVLTSKKASELPVSEVASILQADLQNGLNKCEVSHRRAFHGWNEFDISEDEPLWKKYISQFKNPLIMLLLASAVISVLMH

SEQ ID NO: 87000 - protein, 90 aa, Homo sapiens
  MOD_RES (1)..(1): Any amino acid
XVAVNFSQEEWCLLSEAQRCLYRDVMLENLALISSLDCPLHLCQFPDLSPCWRVCLDKPYLFLRPAALRWVKEWNVCASAKAAETSASAL

SEQ ID NO: 87001 - protein, 80 aa, Homo sapiens
MAQKEGGRTVPCCSRPKVAALTAGTLLLLTAIGAASWAIVAVLLRSDQEPLYPVQVSSADARLMVFDKTEGTWRLLCSSR

SEQ ID NO: 87002 - protein, 515 aa, Homo sapiens
MSCNPSFGGIGKGHLMREVDALDGLCSRICDQSGVHYKVLNRRKGPAVWGLRAQIDRKLYKQNMQKEILNTPLLTVQEGAVEDLILTEPEPEHTGKCRVSGVVLVDGSTVYAESVILTTGTFLRGMIVIGLETHPAGRLGDQPSIGLAQTLEKLGFVVGRLKTGTPPRIAKESINFSILNKHIPDNPSIPFSFTNETVWIKPEDQLPCYLTHTNPRVDEIVLKNLHLNSHVKETTRGPRYCPSIESKVLRFPNRLHQVWLEPEGMDSDLIYPQGLSMTLPAELQEKMITCIRGLEKAKVIQPGYGVQYDYLDPRQITPSLETHLVQRLFFAGQINGTTGYEEAAAQGVIAGINASLRVSRKPPFVVSRTEGYIGVLIDDLTTLGTSEPYRMFTSRVEFRLSLRPDNADSRLTLRGYKDAGCVSQQRYERACWMKSSLEEGISVLKSIEFLSSKWKKLIPEASISTSRSLPVRALDVLKYEEVDMDSLAKAVPEPLKKYTKCRELAERLKIEDRGC

SEQ ID NO: 87003 - protein, 767 aa, Homo sapiens
MMASFQRSNSHDKVRRIVAEEGRTARNLIAWSVPLESKDDDGKPKCQTGGKSKRTIQGTHKTTKQSTAVDCKITSSTTGDKHFDKSPTKTRHPRKIDLRARYWAFLFDNLRRAVDEIYVTCESDQSVVECKEVLMMLDNYVRDFKALIDWIQLQEKLEKTDAQSRPTSLAWEVKKMSPGRHVIPSPSTDRINVTSNARRSLNFGGSTGTVPAPRLAPTGVSWADKVKAHHTGSTASSEITPAQSCPPMTVQKASRKNERKDAEGWETVQRGRPIRSRSTAVMPKVSLATEATRSKDDSDKENVCLLPDESIQKGQFVGDGTSNTIESHPKDSLHSCDHPLAEKTQFTVSTLDDVKNSGSIRDNYVRTSEISAVHIDTECVSVMLQAGTPPLQVNEEKFPAEKARIENEMDPSDISNVSAANLSMAEVLAKKEELADRLEKANEEAIASAIAEEEQLTREIEAEENNDINIETDNDSDFSASMGSGSVSFCGMSMDWNDVLADYEARESWRQNTSWGDIVEEEPARPPGHGIHMHEKLSSPSRKRTIAESKKKHEEKQMKAQQLREKLREEKTLKLQKLLEREKDVRKWKEELLDQRRRMMEEKLLHAEFKREVQLQAIVKKAQEEEAKVNEIAFINTLEAQNKRHDVLSKLKEYEQRLNELQEERQRRQEEKQARDEAVQERKRALEAERQARVEELLMKRKEQEARIEQQRQEKEKAREDAARERARDREERLAALTAAQQEAMEELQKKIQLKHDESIRRHMEQI

SEQ ID NO: 87004 - protein, 71 aa, Homo sapiens
MVQKYQSPVRVYKYPFELIMAAYERRFPTCPLIPMFVGSDTVNEFKSEDGAIHVIERRCKLDVDAPRLLKK

SEQ ID NO: 87005 - protein, 58 aa, Homo sapiens
MSRGTMPQPEAWPGASCAETPAREAAATARDGGKAAASGQPRPEMQCPAEQTEIKRSS

SEQ ID NO: 87006 - protein, 103 aa, Homo sapiens
MWTADEIAQLCYEHYGIRLPKKGKPEPNHEWTLLAAVVKIQSPADKACDTPDKPVQVTKEVVSMGTGTKCIGQSKMRKNGTRPSPASICLHLVSYLCRRRHPQ

SEQ ID NO: 87007 - protein, 154 aa, Homo sapiens
MGSRNSSSAGSGSGDPSEGLPRRGAGLRRSEEEEEEDEDVDLAQVLAYLLRRGQVRLVQGGGAANLQFIQALLDSEEENDRAWDGRLGDRYNPPVDATPDTRELEFNEIKTQVELATGQLGLRRAAQKHSFPRMLHQRERGLCHRGSFSLGEQS

SEQ ID NO: 87008 - protein, 47 aa, Homo sapiens
MPVEEFVAGWISGETFFFLLSHHTQWALQFCVASWQQGLLWIPATTL

SEQ ID NO: 87009 - protein, 189 aa, Homo sapiens
  MOD_RES (1)..(1): Any amino acid
XKNQIILKLSNGARCSMNTEDGAKLYDVCPHVSDSGLFFDDSYGFYPGQVLIGPAKIFSSVQWLSGVKPVLSTKSKFRVVVEEVQVVELKVTWITKSFCPGGTDSVSPPPSVITQENLGRVKRLGCFDHAQRQLGERCLYVFPAKVKRLLKKQVVRIMSCSPDTQCSRDHSMEDPDKKGESKTKSEAES

SEQ ID NO: 87010 - protein, 116 aa, Homo sapiens
MQKVTLGLLVFLAGFPVLDANDLEDKNSPFYYGAPYIFVKRMGGQMERTQAGTEVPSTFLLDWHSLQVGGLICAGVLCAMGIIIVMSAKCKCKFGQKSGHHPGETPPLITPGSAQS

SEQ ID NO: 87011 - protein, 173 aa, Homo sapiens
  MOD_RES (1)..(1): Any amino acid
XKSKEAEIKRINKELANIRSKFKGDKALDGYSKKKYVCKLLFIFLLGHDIDFGHMEAVNLLSSNRYTEKQIGYLFISVLVNSNSELIRLINNAIKNDLASRNPTFMGLALHCIASVGSREMAEAFAGEIPKVLVAGDTMDSVKQSAALCLLRLYRTSPDLVPMGDWTSRVVHL

SEQ ID NO: 87012 - protein, 86 aa, Homo sapiens
MATFSRQEFFQQLLQGCLLPTAQQGLDQIWLLLAICLACRLLWRLAAHGLGRAAQPPVLPRAVPLPTFLPSRRLPIRHHPHLPTHG

SEQ ID NO: 87013 - protein, 133 aa, Homo sapiens
MADHSFSDGVPSDSVEAAKNASNTEKLTDQVMQNPRVLAALQERLDNVPHTPSSYIETLPKAVKRRINALKQLQVRCAHIEAKFYEEVHDLERKYAALYQPLFDKRREFITGDVEPTDAESEWHSENEEEEKL

SEQ ID NO: 87014 - protein, 164 aa, Homo sapiens
SFSRVGADFRGQLAPVFQRVAISTFQKAIQETVEKFQEEMNSYMLISAPAILGTSNMPAAVPATQPGTLQPPMVLLDFPPLACFLNNILVAFNDLRLCCPVALAQDVTGALEDALAKGWTPMENRWCGRRAGGQPASSSTRWTTCRAACLLTKWTAGRSQTSIG

SEQ ID NO: 87015 - protein, 597 aa, Homo sapiens
MSLVSEEFPEEVPPRAEEITIPADVTPERVPTHIVDYSEAEQSDEQLHQEISQANVICIVYAVNNKHSIDKVTSRWIPLINERTDKDSRLPLILVGNKSDLVEYSSMETILPIMNQYTEIETCVECSAKNLKNISELFYYAQKAVLHPTGPLYCPEEKEMKPACIKALTRIFKISDQDNDGTLNDAELNFFQRICFNTPLAPQALEDVKNVVRKHISDGVADSGLTLKGFLFLHTLFIQRGRHETTWTVLRRFGYDDDLDLTPEYLFPLLKIPPDCTTELNHHAYLFLQSTFDKHDLDRDCALSPDELKDLFKVFPYIPWGPDVNNTVCTNERGWITYQGFLSQWTLTTYLDVQRCLEYLGYLGYSILTEQESQASAVTVTRDKKIDLQKKQTQRNVFRCNVIGVKNCGKSGVLQALLGRNLMRQKKIREDHKSYYAINTVYVYGQEKYLLLHDISESEFLTEAEIICDVVCLVYDVSNPKSFEYCARIFKQHFMDSRIPCLIVAAKSDLHEVKQEYSISPTDFCRKHKMPPPQAFTCNTADAPSKDIFVKLTTMAMYPHVTQADLKSSTFWLRASFGATVFAVLGFAMYKALLKQR

SEQ ID NO: 87016 - protein, 45 aa, Homo sapiens
  MOD_RES (1)..(1): Any amino acid
XSPRGEPQDGLYCIRNSSTKSGKPMVSRGWSRCFSGSRQPPASVL

SEQ ID NO: 87017 - protein, 40 aa, Homo sapiens
GLRGSPGRRLRDTGDLLLRGDGSVGAREPEAAVEEVRNPG

SEQ ID NO: 87018 - protein, 156 aa, Homo sapiens
MNSDQVTLVGQVFESYVSEYHKNDILLILKERDEDAHYPVVVNAMTLFETNMEIGEYFNMFPSEVLTIFDSALRRSALTILQSLSQPEAVSMKQNLHARISGLPVCPELVREHIPKTKDVGHFLSVTGTVIRTSLVKVLEFERDYMCNKCKHVFVI

SEQ ID NO: 87019 - protein, 675 aa, Homo sapiens
MAGPAPPAADELPGPAARRLYSRMEASCLELALEGERLCKAGDFKTGVAFFEAAVQVGTEDLKTLSAIYSQLGNAYFYLKEHGRALEYHKHDLLLARTIGDRMGEAKASGNLGNTLKVLGRFDEAAVCCQRHLSIAQEQGDKVGEARALYNIGNVYHAKGKQLSWNAANATQDPGHLPPDVRETLCKASEFYERNLSLVKELGDRAAQGRAYGNLGNTHYLLGNFTEATTFHKERLAIAKEFGDKAAERRAYSNLGNAHVFLGRFDVAAEYYKKTLQLSRQLRDQAVEAQACYSLGNTYTLLQDYERAAEYHLRHLLIAQELADRVGEGRACWSLGNAYVSMGRPAQALTFAKKHLQISQEIGDRHGELTARMNVAQLQLVLGRLTSPAASEKPDLAGYEAQGARPKRTQRLSAETWDLLRLPLEREQNGDSHHSGDWRGPSRDSLPLPVRSRKYQEGPDAERRPREGSHSPLDSADVRVHVPRTSIPRAPSSDEECFFDLLTKFQSSRMDDQRCPLDDGQAGAAEATAAPTLEDRIAQPSMTASPQTEEFFDLIASSQSRRLDDQRASVGSLPGLRITHSNAGHLRGHGEPQEPGDDFFNMLIKYQSSRIDDQRCPPPDVLPRGPTMPDEDFFSLIQRVQAKRMDEQRVDLAGGPEQGAGGPPEPQQQCQPGAS

SEQ ID NO: 87020 - protein, 161 aa, Homo sapiens
MSRESDVEAQQSHGSSACSQPHGSVTQSQGSSSQSQGISSSSTSTMPNSSQSSHSSSGTLSSLETVSTQELYSIPEDQEPEDQEPEEPTPAPWARLWALQDGFANLECVNDNYWFGRDKSCEYCFDEPLLKRTDKYRTYSKKHFRIFREENLSCPYRIWFK

SEQ ID NO: 87021 - protein, 139 aa, Homo sapiens
MANPGGGAVCNGKLHNHKKQSNGSQSRNCTKNGIVKEAQQNGKPHFYDKLIVESFEEAPLHVMVFTYMGYGIGTLFGYLRDFLRNWGIEKCNAAVERKEQKDFVPLYQDFENFYTRNLYMRIRDNWNRPICSAPGPLFD

SEQ ID NO: 87022 - protein, 239 aa, Homo sapiens
MSDSGSYGQSGGEQQSYSTYGNPGSQGYGQASQSYSGYGQTTDSSYGQNYSGYSSYGQSYSQSYGGYENQKQSSYSQQPYNNQGQQQNMESSGSQGGRAPSYDQPDYGQQDSYDQQSGYDQHQGSYDEQSNYDQQHDSYSQNQQSYHSQRENYSHHTQDDRRDVSRYGEDNRGYGGSQGGGRGRGGYDKDGRGPMTGSSGGDRGGFKNFGGHRDYGPRTDADSESDNSDNNTIFVQGLG

SEQ ID NO: 87023 - protein, 188 aa, Homo sapiens
MVDKKLVVVFGGTEIWFHHVAQAGLKLLSSRDLRASASQSVWITGAQGGSVARTLLEDGTFKVRVVTRNPRKKAAKELRLQGAEVVQGDQDDQVIMELALNGAYATFIVTNYWESCSQEQEVKQGKLLADLARRLGLHYVVYSGLENIKKLTAGRLAAAHFDGKGEVEEYFRDIGVPMTSVRLPCYFE

SEQ ID NO: 87024 - protein, 62 aa, Homo sapiens
MSRPRFNPRGDFPLQRPRAPNPSGMRPPGPFMRPGSMGLPRFYPAGRARGIPHRFAGHESYQ

SEQ ID NO: 87025 - protein, 677 aa, Homo sapiens; identical to SEQ ID NO: 52573

SEQ ID NO: 87026 - protein, 361 aa, Homo sapiens
MKSLSLLLAVALGLATAVSAGPAVIECWFVEDASGKGLAKRPGALLLRQGPGEPPPRPDLDPELYLSVHVVLTVLTHTPAPRVRLGQDALLDLSFAYMPPTSEAASSLAPGPPPFGLEWRRQHLGKGHLLLAATPGLNGQMPAAQEGAVAFAAWDDDEPWGPWTGNGTFWLPTVQPFQEGTYLATIHLPYLQGQVTLELAVYKPPKVSLMPATLARAAPGEAPPELLCLVSHFYPSGGLEVEWELRGGPGGRSQKAEGQRWLSALRHHSDGSVSLSGHLQPPPVTTEQHGARYACRIHHPSLPASGRSAEVTLEVAGLSGPSLEDSVGLFLSAFLLLGLFKALGWAAVYLSTCKDSKKKAE

SEQ ID NO: 87027 - protein, 113 aa, Homo sapiens
MALWRGSAYAGFLALAVGCVFLLEPELPGSALRSLWSSLCLGPAPAPPGPVSPEGRLAAAWDALIVRPVRRWRRVAVGFFFAVQLVQSYMSFLMTMSLFHQSHCRKWMSSTSF

SEQ ID NO: 87028 - protein, 56 aa, Homo sapiens
MPLAQLKEPWPLMELVPLDPEKQLLTSLEGSVAPVPKRAEGHLFLCLLTPGSRSSP

SEQ ID NO: 87029 - protein, 97 aa, Homo sapiens
MAFANLRKVLISDSLDPCCRKILQDGGLQVVEKQNLSKEELIAELQDCEGLIVRSATKVTADVINAAEKLQVVGRAGTGVDNVDLEAATRKGILVMK

SEQ ID NO: 87030 - protein, 31 aa, Homo sapiens
GRAVDRGLQKINLSSFRTNVQRCSSMVHHKS

SEQ ID NO: 87031 - protein, 44 aa, Homo sapiens
  MOD_RES (1)..(1): Any amino acid
XALGAPFLLEDPANQFLRLKRHVNLQDYWDPDHSSDVLVKHGLL

SEQ ID NO: 87032 - protein, 341 aa, Homo sapiens
MALRSAQGDGPTSGHWDGGAEKAGKNLRQMSKDYQQVLLDVRRSLRRFPPGMPEEQREGLQEELIDIILLILERNPQLHYYQGYHDIVVTFLLVVGERLATSLVEKLSTHHLRDFMDPTMDNTKHILNYLMPIIDQVNPELHDFMQSAEVGTIFALSWLITWFGHVLSDFRHVVRLYDFFLACHPLMPIYFAAVIVLYREQEVLDCDCDMASVHHLLSQIPQDLPYETLISRAGDLFVQFPPSELAREAAAQQQAERTAASTFKDFELASAQQRPDMVLRQRFRGLLRPEDRTKDVLTKPRTNRFVKLAVMGLTVALGAAALAVVKSALEWAPKFQLQLFP

SEQ ID NO: 87033 - protein, 61 aa, Homo sapiens
MAASKCRSRRLPQECLGQGASAGRVLRRRGPRCNSAPIEPLLQVLRHDQQGHALQLPSARP

SEQ ID NO: 87034 - protein, 131 aa, Homo sapiens
MSAKLGKSSSLLTQTSEECNGILTEKMEEEEQTCDPDSSLHWSSSYSPETFRQQFRQFGYQDSPGPHEALSRLWELCHLWLRPEVHTKEQILELLVLEQFLAILPKELQAWVQKHHPENGEETVTMLEDVE

SEQ ID NO: 87035 - protein, 428 aa, Homo sapiens
MGNCHTVGPNEALVVSGGCCGSDYKQYVFGGWAWAWWCISDTQRLSLEVMTILCRCENIETSEGVPLFVTGVAQVKIMTEKELLAVACEQFLGKNVQDIKNVVLQTLEGHLRSILGTLTVEQIYQDRDQFAKLVREVAAPDVGRMGIEILSFTIKDVYDKVDYLSSLGKTQTAVVQRDADIGVAEAERDAGIREAECKKEMLDVKFMADTKIADSKRAFELQKSAFSEEVNIKTAEAQLAYELQGAREQQKIRQEEIEIEVVQRKKQIAVEAQEILRTDKELIATVRRPAEAEAHRIQQIAEGEKVKQVLLAQAEAEKIRKIGEAEAAVIEAMGKAEAERMKLKAEAYQKYGDAAKMALVLEALPQIAAKIAAPLTKVDEIVVLSGDNSKVTSEVNRLLAELPASVHALTGVDLSKIPLIKKATGVQV

SEQ ID NO: 87036 - protein, 292 aa, Homo sapiens
MALVHKLLRGTYFLRKFSKPTSALYPFLGIRFAEYSSSLQKPVASPGKASSQRKTEGDLQGDHQKEVALDITSSEEKPDVSFDKAIRDEAIYHFRLLKDEIVDHWRGPEGHPLHEVLLEQAKVVWQFRGKEDLDKWTVTSDKTIGGRSEVFLKMGKNNQSALLYGTLSSEAPQDGESTRSGYCAMISRIPRGAFERKMSYDWSQFNTLYLRVRGDGRPWMVNIKEDTDFFQRTNQMYSYFMFTRGGPYWQEVKIPFSKFFFSNRGRIRDVQHELPLDKVTYSCIFHSELYHF

SEQ ID NO: 87037 - protein, 454 aa, Homo sapiens
MQLPRWWELGDPCAWTGQGRGTRRMSPATTGTFLLTAFLLSCADGINGTVNWKTRQANNFIISRKMAAGMKDVYSIFSKVHSDRNVYPSAGVLFVHVLEREYFKGEFPPYPKPGEISNDPITFNTNLMGYPDRPGWLRYIQRTPYSDGVLYGSPTAENVGKPTIIEITAYNRRTFETARHNLIINIMSAEDFPLPYQAEFFIKNMNVEEMLASEVLGDFLGAVKNVWQPERLNAINITSALDRGGRVPLPINDLKEGVYVMVGADVPFSSCLREVENPQNQLRCSQEMEPVITCDKKFRTQFYIDWCKISLVDKTKQVSTYQEVIRGEGILPDGGEYKPPSDSLKSRDYYTDFLITLAVPSAVALVLFLILAYIMCCRREGVEKRNMQTPDIQLVHHSAIQKSTKELRDMSKNREIAWPLSTLPVFHPVTGEIIPPLHTDNYDSTNMPLMQTQQ

SEQ ID NO: 87038 - protein, 122 aa, Homo sapiens
MYRDPEAASPGAPSRDVLLVSAIITVSLSVTVVLCGLCHWCQRKLGKRYKNSLETVGTPDSGRGRSEKKAINDLDRDFWNNNESTVQQKWSSYPPKEFILNISPYAPYGDPRLSLNPLFLRR

SEQ ID NO: 87039 - protein, 150 aa, Homo sapiens
MLNRVRSAVAHLVSSGGAPPPRPKSPDLPNAASAPPAAAPEAPRSPPAKAGSGSATPAKAVEARASFSRPTFLQLSPGGLRRADDHAGRAVQSPPDTGRRLPWSTGYAETLFCPRARRAESPAKDELASSPSRPGSLKAKGHQCWQESAQ

SEQ ID NO: 87040 - protein, 548 aa, Homo sapiens
MPIVDKLKEALKPGRKDSADDGELGKLLASSAKKVLLQKIEFEPASKSFSYQLEALKSKYVLLNPKTEGASRHKSGDDPPARRQGSEHTYESCGDGVPAPQKVLFPTERLSLRWERVFRVGAGLHNLGNTCFLNATIQCLTYTPPLANYLLSKEHARSCHQGSFCMLCVMQNHIVQAFANSGNAIKPVSFIRDLKKIARHFRFGNQEDAHEFLRYTIDAMQKACLNGCAKLDRQTQATTLVHQIFGGYLRSRVKCSVCKSVSDTYDPYLDVALEIRQAANIVRALELFVKADVLSGENAYMCAKCKKKVPASKRFTIHRTSNVLTLSLKRFANFSGGKITKDVGYPEFLNIRPYMSQNNGDPVMYGLYAVLVHSGYSCHAGHYYCYVKASNGQWYQMNDSLVHSSNVKVVLNQQAYVLFYLRIPGSKKSPEGLISRTGSSSLPGRPSVIPDHSKKNIGNGIISSPLTGKRQDSGTMKKPHTTEEIGVPISRNGSTLGLKSQNGCIPPKLPSGSPSPKLSQTPTHMPTILDDPGKKVKKPAPPLPTGMG

SEQ ID NO: 87041 - protein, 136 aa, Homo sapiens
MASEGTNIPSPVVRQIDKQFLICSICLERYKNPKVLPCLHTFCERCLQNYIPAHSLTLSCPVCRQTSILPEKGVAALQNNFFITNLMDVLQRTPGSNAEESSILETVTAVAAGKPLSCPNHDGNVSGWDGRYCPGA

SEQ ID NO: 87042 - protein, 109 aa, Homo sapiens
MDASLGNLFARSALDTAARSTKPPRYKCGISKACPEKHFAFKMASGAANVVGPKICLEDNVLMSGVKNNVGRGINVALANGKTGEVLDTKYFDMWGGDVAPFIEFLKAI

SEQ ID NO: 87043 - protein, 139 aa, Homo sapiens
MSRTSINGLLGRGSMFVFSPDQFQRLLKINPDWKTHRLLDLGAGDGEVTKIMSPHFEEIYATELSETMIWQLQKKKYRVLGINEWQNTGFQYDVISCLNLLDRCDQPLTLLKDIRSVLEPTRGRVILALVLPFHPYVEN

SEQ ID NO: 87044 - protein, 766 aa, Homo sapiens
MAAEALAAEAVASRLERQEEDIRWLWSEVERLRDEQLNAPYSCQAEGPCLTREVAQLRAENCDLRHRLCSLRLCLAEERSRQATLESAELEAAQEAGAQPPPSQSQDKDMKKKKMKESEADSEVKHQPIFIKERLKLFEILKKDHQLLLAIYGKKGDTSNIITVRVADGQTVQGEVWKTTPYQVAAEISQELAESTVIAKVNGELWDLDRPLEGDSSLELLTFDNEEAQAVYWHSSAHILGEAMELYYGGHLCYGPPIENGFYYDMFIEDRAVSSTELSALENICKAIIKEKQPFERLEVSKEILLEMFKYNKFKCRILNEKVNTATTTVYRCGPLIDLCKGPHVRHTGKIKTIKIFKNSSTYWEGNPEMETLQRIYGISFPDNKMMRDWEKFQEEAKNRDHRKIGKEQELFFFHDLSPGSCFFLPRGAFIYNTLTDFIREEYHKRDFTEVLSPNMYNSKLWEASGHWQHYSENMFTFEIEKDTFALKPMNCPGHCLMFAHRPRSWREMPIRFADFGVLHRNELSGTLSGLTRVRRFQQDDAHIFCTVEQIEEEIKGCLQFLQSVYSTFGFSFQLNLSTRPENFLGEIEMWNEAEKQLQNSLMDFGEPWKMNPGDGAFYGPKIDIKIKDAIGRYHQCATIQLDFQLPIRFNLTYVSKDGDDKKRPVIIHRAILGSVERMIAILSENYGGKWPFWLSPRQVMVIPVGPTCEKYALQVSSEFFEEGFMADVDLDHSCTLNKKIRNAQLAQYNFILDRFLPSVWQEAWL

SEQ ID NO: 87045 - protein, 454 aa, Homo sapiens
MYIKMATLANGQADNASLSTNGLGSSPGSAGHMNGLSHSPGNPSTIPMKDHDAIKLFIGQIPRNLDEKDLKPLFEEFGKIYELTVLKDRFTGMHKGCAFLTYCERESALKAQSALHEQKTLPGMNRPIQVKPADSESRGDRKLFVGMLNKQQSEDDVRRLFEAFGNIEECTILRGPDGNSKGCAFVKYSSHAEAQAAINALHGSQTMPGASSSLVVKFADTDKERTMRRMQQMAGQMGMFNPMAIPFGAYGAYAQALMQQQAALMASVAQGGYLNPMAAFAAAQMQQMAALNMNGLAAAPMTPTSGGSTPPGITAPAVPSIPSPIGVNGFTGLPPQANGQPAAEAVFANGIHPYPAQSPTAADPLQQAYAGVQQYAGPAYPAAYGQISQAFPQPPPMIPQQQREGPEGCNLFIYHLPQEFGDAELMQMFLPFGNVISSKVFVDRATNQSKCFGG

SEQ ID NO: 87046 - protein, 96 aa, Homo sapiens
MAKIKARDLRGKKKEELLKQLDDLKVELSQLRVAKVTGGAASKLSKIRVVRKSIARVLTVINQTQKENLRKFYKAAAGGPCIQMDRVLPQPPACSC

SEQ ID NO: 87047 - protein, 15 aa, Homo sapiens
LRGAAGRLGGGLLVL

SEQ ID NO: 87048 - protein, 340 aa, Homo sapiens
MEISSHQSHLLQQLNEQRRQDVFCDCSILVEGKVFKAHRNVLFASSGYFKMLLSQNSKETSQPTTATFQAFSPDTFTVILDFVYSGKLSLTGQNVIEVMSAASFLQMTDVISVCKTFIKSSLDISEKEKDRYFSLSDKDANSNGVERSSFYSGGWQEGSSSPRSHLSPEQGTGIISGKSWNKYNYHPASQKNTQQPLAKHEPRKESIKKTKHLRLSQPSEVTHYKSSKREVRTSDSSSHVSQSEEQAQIDAEMDSTPVGYQYGQGSDVTSKSFPDDLPRMRFKCPYCTHVVKRKADLKRHLRCHTGERPYPCQACGKRFSRLDHLSSHFRTMEIRIPDGT

SEQ ID NO: 87049 - protein, 446 aa, Homo sapiens
MGLEALVPLAMIVAIFLLLVDLMHRHQRWAARYPPGPLPLPGLGNLLHVDFQNTPYCFDQLRRRFGDVFSLQLAWTPVVVLNGLAAVREAMVTRGEDTADRPPAPIYQVLGFGPRSQGRPFRPNGLLDKAVSNVIASLTCGRRFEYDDPRFLRLLDLAQEGSKEESGFLREVLNAVPVLPHIPALAGKVLRFQKAFLTQLDELLTEHRMTWDPAQPPRDLTEAFLAKKEKAKGSPESSFNDENLRIVVGNLFLAGMVTTLTTLAWGLLLMILHLDVQLRVQQEIDDVIGQVRRPEMGDQAHMPYTTAVIHEVQHFGDIVPLGVTHMTSRDIEVQGFRIPKGTTLITNLSSVLKDEAVWEKPFRFHPEHFLDAQGHFVKPEAFLPFSAGRRACLGEPLARMELFLFFTSLLQHFSFSVAAGQPRPSHSRVVSFLVTPSPYELCAVPR

SEQ ID NO: 87050 - protein, 156 aa, Homo sapiens
MDDPRYGMCPLKGASGCPGAERSLLVQSYFEKGPLTFRDVAIEFSLEEWQCLDSAQQGLYRKVMLENYRNLVFLAGIALTKPDLITCLEQGKEPWNIKRHEMVAKPPDGVSLCHQVGVQWRDLGSLQPPPPGFKQSSCLSLLSSCDYRHMPPRQAN

SEQ ID NO: 87051 - protein, 688 aa, Homo sapiens
MREVEEENRALRRQLSLAQGRAPSHRRGNHSKTYSMEEGTGDSENLRAGIVAGNSSECGQQPVVEKCETIHVAIVCAGYNASRDVVTLVKSVLFHRRNPLHFHLIADSIAEQILATLFQTWMVPAVRVDFYNADELKSEVSWIPNKHYSGIYGLMKLVLTKTLPANLERVIVLDTDITFATDIAELWAVFHKFKGQQVLGLVENQSDWYLGNLWKNHRPWPALGRGYNTGVILLLLDKLRKMKWEQMWRLTAERELMGMLSTSLADQDIFNAVIKQNPFLVYQLPCFWNVQLSDHTRSEQCYRDVSDLKVIHWNSPKKLRVKNKHVEFFRNLYLTFLEYDGNLLRRELFGCPSEADVNSENLQKQLSELDEDDLCYEFRRERFTVHRTHLYFLHYEYEPAADSTDVTLVAQLSMDRLQMLEAICKHWEGPISLALYLSDAEAQQFLRYAQGSEVLMSRHNVGYHIVYKEGQFYPVNLLRNVAMKHISTPYMFLSDIDFLPMYGLYEYLRKSVIQLDLANTKKAMIVPAFETLRYRLSFPKSKAELLSMLDMGTLFTFRYHVWTKGHAPTNFAKWRTATTPYRVEWEADFEPYVVVRRDCPEYDRRFVGFGWNKVAHIMELDVQEYEFIVLPNAYMIHMPHAPSFDITKFRSNKQYRICLKTLKEEFQQDMSRRYGFAALKYLTAENNS

SEQ ID NO: 87052 - protein, 46 aa, Homo sapiens
MKNEIAAVVFFFTRLVRKHDKLKKEAVERFAEKLTLILQEKYKNHW

SEQ ID NO: 87053 - protein, 194 aa, Homo sapiens
MKRQGASSERKRARIPSGKAGAANGFLMEVCVDSVESAVNAERGGADRIELCSGLSEGGTTPSMGVLQVVKQSVQIPVFVMIRPRGGDFLYSDREIEVMKADIRLAKLYGADGLVFGALTEDGHIDKELCMSLMAICRPLPVTFHRAFDMVHDPMAALETLLTLGFERVLTSGCDSSALEGLPLIKRLIEQEVV

SEQ ID NO: 87054 - protein, 52 aa, Homo sapiens
MPPHPGPALVGVAWEQTPRMAAGPHSALELLIPVGASQSMGVPRTPSRTVLF

SEQ ID NO: 87055 - protein, 278 aa, Homo sapiens
MPGGPIPPGFFQGPPGSQPSPHAQPPPHNPSSMMGPHSQPFMSPRYAGGPRPPIRMGNQPPGGVPGTQPLLPNSMDPTRQQGHPNMGGSMQRMNPPRGMGPMGPGPQNYGSGMRPPPNSLGPAMPGINMGPGAGRPWPNPNSANSIPYSSSSPGTYVGPPGGGGPPGTPIMPSPADSTNSSDNIYTMINPVPPGGSRSNFPMGPGSDGPMGGMGGMEPHHMNGSLGSGDIDGLPKNSPNNISGISNPPGTPRDDGELGGNFLHSFQNDNYSPSMTMSV

SEQ ID NO: 87056 - protein, 264 aa, Homo sapiens
  MOD_RES (1)..(1): Any amino acid
XHYRSARTKELDALLGDLHCEIRDQETLLMYQLQCQVLARAAVLTRVLDLASRLDVLLALASAARDYGYSRPRYSPQVLGVRIQNGRHPLMELCARTFVPNSTECGGDKGRVKVITGPNSSGKSIYLKQVGLITFMALVGSFVPAEEAEIGAVDAIFTRIHSCESISLGLSTFMIDLNQVAKAVNNATAQSLVLIDEFGKGTNTVDGLALLAAVLRHWLARGPTCPHIFVATNFLSLVQLQLLPQGPLVQYLDWPRVSGQEGGD

SEQ ID NO: 87057 - protein, 72 aa, Homo sapiens
MGTRLLPALFLVLLVLGFEVQGTQQPQQDEMPSPTFLTQVKESLSSYWESAKTAAQNLYEKTYLPAVDEKLR

SEQ ID NO: 87058 - protein, 137 aa, Homo sapiens
MSEARRDSTSSLQRKKPPWLKLDIPSAVPLTAEEPSFLQPLRRQAFLRSVSMPAETAHISSPHHELRRPVLQRQTSITQTIRSRQVRFGRVHTLPLLGPRAARRAFPQRQSLSWSLLRGTADWFGVSKDSDSTQKWQ

SEQ ID NO: 87059 - protein, 325 aa, Homo sapiens
MKGEIQQSLGAWVLLTVDIQPACLGLYCGKTLLFKNGSTEIYGECGVCPRGQRTNAQKYCQPCTESPELYDWLYLGFMAMLPLVLHWFFIEWYSGKKSSSALFQHITALFECSMAAIITLLVSDPVGVLYIRSCRVLMLSDWYTMLYNPSPDYVTTVHCTHEAVYPLYTIVFIYYAFCLVLMMLLRPLLVKKIACGLGKSDRFKSIYAALYFFPILTVLQAVGGGLLYYAFPYIILVLSLVTLAVYMSASEIENCYDLLVRKKRLIVLFSHWLLHAYGIISISRVDKLEQDLPLLALVPTPALFYLFTAKFTEPSRILSEGANGH

SEQ ID NO: 87060 - protein, 36 aa, Homo sapiens
MPVEEFVAGWISGETFFFLLSHHTQWRSGLGPGTPV

SEQ ID NO: 87061 - protein, 107 aa, Homo sapiens
MWRSCLRLRDGGRRLLNRPAGGPSASMSPGPTIPSPARAYAPPTERKRFYQNVSITQGEDHIVQHIIGQPNPEKQGSADPGSREVSGHRHHLLQGGGARDISGTSKE

SEQ ID NO: 87062 - protein, 190 aa, Homo sapiens
SSSSHFADRIPGRCLLFRNVRPRGRGQPCPCDSLRDPSSTYIRQLESKVRLLEGDKLLAQQAGSGEFRTLRKGFSPYHSESQLASLPPSYQDSLQNGPACPAPELPSPPSAGYSPAGQKPEAVVHAMKVLEVHENLDRQLQDSCEEDLSEKEKAIVREMCNVVWRKLGDAASSKPSIRQHLSGNQFKGPL

SEQ ID NO: 87063 - protein, 644 aa, Homo sapiens
MKVLKKATLKVRDRVRSKMERDILAEVNHPFIVKLHYAFQTEGKLYLILDFLRGGDLFTRLSKEVMFTEEDVKFYLAELALALDHLHSLGIIYRDLKPENILLDEEGHIKITDFGLSKEAIDHDKRAYSFCGTIEYMAPEVVNRRGHTQSADWWSFGVLMFEMLTGSLPFQGKDRKETMALILKAKLGMPQFLSGEAQSLLRALFKRNPCNRLGAGIDGVEEIKRHPFFVTIDWNTLYRKEIKPPFKPAVGRPEDTFHFDPEFTARTPTDSPGVPPSANAHHLFRGFSFVASSLIQEPSQQDLHKVPVHPIVQQLHGNNIHFTDGYEIKEDIGVGSYSVCKRCVHKATDTEYAVKIIDKSKRDPSEEIEILLRYGQHPNIITLKDVYDDGKFVYLVMELMRGGELLDRILRQRYFSEREASDVLCTITKTMDYLHSQGVVHRDLKPSNILYRDESGSPESIRVCDFGFAKQLRAGNGLLMTPCYTANFVAPEVLKRQGYDAACDIWSLGILLYTMLAGFTPFANGPDDTPEEILARIGSGKYALSGGNWDSISDAAKDVVSKMLHVDPHQRLTAMQVLKHPWVVNREYLSPNQLSRQDVHLVKGAMAATYFALNRTPQAPRLEPVLSSNLAQRRGMKRLTSTRL

SEQ ID NO: 87064 - protein, 318 aa, Homo sapiens
MRRHSETDVEEQTQELKTITQLQEQCRALQIQGVKENMDQNKATLALLRSNIRRGAQDWALAKKYDQWTISKACGKNLPLRLAHCRSTMEVVREKLRKYVFDRVNMHNLLIHLVRRRGQKLESMQLELDSLRSQPDASKEELRLLQIIRQLENNIEKTMIKIITSQNIHLLYLDLLDYLKTVLAGYPIELDKLQNLVVNYCSELSDMKIMSQDAMMITDEVKEHEAKGGVLHRGAPGKGEPAQPAEEADRQDPHEGDQREVPPGPDGLGLPLEPDEHGDPEIEEKRDLHSRNGIPVGRDCCGGEGQECCTVLSRLGHH

SEQ ID NO: 87065 - protein, 117 aa, Homo sapiens
MSAFNLLHLVTKSQPVALRACGLPSGSCRDKKNCKVVFSQQELRKRLTPLQYHVTQEKGTESAFEGEYTHHKDPGIYKCVVCGTPLFKSETKFDSGSGWPSFHDVINSEAITFTDDF

SEQ ID NO: 87066 - protein, 207 aa, Homo sapiens
MEIIRSNFKSNLHKVYQAIEEADFFAIDGEFSGISDGPSVSALTNGFDTPEERYQKLKKHSMDFLLFQFGLCTFKYDYTDSKSSPDVKFVCQSSSIDFLASQGFDFNKVFRNGIPYLNQEEERQLREQYDEKRSQANGAGALSYVSPNTSKCPVTIPEDQKKFIDQVVEKIEDLLQSEENKNLDLEPCTGFQRKLIYQTLSWKRSDI

SEQ ID NO: 87067 - protein, 27 aa, Homo sapiens
  MOD_RES (1)..(1): Any amino acid
XAYRSYLIVFFVPILLLPLPILVPSKL

SEQ ID NO: 87068 - protein, 200 aa, Homo sapiens
MKLDMTGDCMPVLVLMAAVLTVTGAVPVARLRGALPDARGCHIAQFKSLSPQELQAFKRAKDALEESLLLKDCKCRSRLFPRTWDLRQLQVRERPVALEAELALTLKVLEATADTDPALGDVLDQPLHTLHHILSQLRACIQPQPTAGPRTRGRLHHWLHRLQEAPKKESPGCLEASVTFNLFRLLTRDLNCVASGDLCV

SEQ ID NO: 87069 - protein, 100 aa, Homo sapiens
MNLHVKTLSLMTWRSRFLEESFWSLEETAALAKQLPLKSPSEVAQFTWFVEIKPQQKMPGVRSSGRAVTRTFFCTLWTCLIPSKSGNLLKISSRNINSMF

SEQ ID NO: 87070 - protein, 523 aa, Homo sapiens
MLETFRNLASVDDGTQFKANGSVSLQDMYGQEKSKEQTIPNFTGNNSCAYTLEKNCEGYGTEDHHKNLRNHMVDRFCTHNEGNQYGEAIHQMPDLTLHKKVSAGEKPYECTKCRTVFTHLSSLKRHVKSHCGRKAPPGEECKQACICPSHLHSHGRTDTEEKPYKCQACGQTFQHPRYLSHHVKTHTAEKTYKCEQCRMAFNGFASFTRHVRTHTKDRPYKCQECGRAFIYPSTFQRHMTTHTGEKPYKCQHCGKAFTYPQAFQRHEKTHTGEKPYECKQCGKTFSWSETLRVHMRIHTGDKLYKCEHCGKAFTSSRSFQGHLRTHTGEKPYECKQCGKAFTWSSTFREHVRIHTQEQLYKCEQCGKAFTSSRSFRGHLRTHTGEKPYECKQCGKTFTWSSTFREHVRIHTQEQLHKCEHCGKAFTSSRAFQGHLRMHTGEKPYECKQCGKTFTWSSTLHNHVRMHTGEKPHKCKQCGMSFKWHSSFRNHLRMHTGQKSHECQSYSKAFSCQVILSKTSESTH

SEQ ID NO: 87071 - protein, 323 aa, Homo sapiens
MAFSGCQAPYLSPAVPFSGTIQGGLQDGFQITVNGAVLSCSGTRFAVDFQTGFSGNDIAFHFNPRFEDGGYVVCNTRQKGTWGPEERKMHMPFQKGMPFDLCFLVQSSDFKVMVNGSLFVQYFHRVPFHRVDTISVNGSVQLSYISFQPPSVRPANPAPITQTVIHTVQSASGQMFSTPAIPPMMYPHPAYPMPFITTIPGGLYPSKSIILSGTVLPSAQRFHINLCSGSHIAFHMNPRFDENAVVRNTQINNSWGSEERSLPRKMPFVRGQSFSVWILCEAHCLKVAVDGQHVFEYYHRLRNLPTINKLEVGGDIQLTHVQT

SEQ ID NO: 87072 - protein, 207 aa, Homo sapiens
MLKAVILIGGPQKGTRFRPLSFEVPKPLFPVAGVPMIQHHIEACAQVPGMQEILLIGFYQPDEPLTQFLEAAQQEFNLPVRYLQEFAPLGTGGGLYHFRDQILAGSPEAFFVLNADVCSDFPLSAMLEAHRRQRHPFLLLGTTANRTQSLNYGCIVENPQTHEVLHYVEKPSTFISDIINCGIYLFSPEALKPLRDVFQRNQQDGQL

SEQ ID NO: 87073 - protein, 135 aa, Homo sapiens
MEYPAPATVQAADGGAAGPYSSSELLEGQEPDGVRFDRERARRLWEAVSGAQPVGREEVEHMIQKNQCLFTNTQCKVCCALLISESQKLAHYQSKKHANKVKRYLAIHGMETLKGETKKLDSDQLERATPAKHVR

SEQ ID NO: 87074 - protein, 760 aa, Homo sapiens
MHPDLGPLCTLLYVTLTILCSSVSSDLAPYFTSEPLSAVQKLGGPVVLHCSAQPVTTRISWLHNGKTLDGNLEHVKIHQGTLTILSLNSSLLGYYQCLANNSIGAIVSGPATVSVAVLGDFGSSTKHVITAEEKSAGFIGCRVPESNPKAEVRYKIRGKWLEHSTENYLILPSGNLQILNVSLEDKGSYKCAAYNPVTHQLKVEPIGRKLLVSRPSSDDVHILHPTHSQALAVLSRSPVTLECVVSGVPAPQVYWLKDGQDIAPGSNWRRLYSHLATDSVDPADSGNYSCMAGNKSGDVKYVTYMVNVLEHASISKGLQDQIVSLGATVHFTCDVHGNPAPNCTWFHNAQPIHPSARHLTAGNGLKISGVTVEDVGMYQCVADNGIGFMHSTGRLEIENDGGFKPVIITAPVSAKVADGDFVTLSCNASGLPVPVIRWYDSHGLITSHPSQVLRSKSRKSQLSRPEGLNLEPVYFVLSQAGASSLHIQAVTQEHAGKYICEAANEHGTTQAEASLMVVPFETNTKAETVTLPDAAQNDDRSKRDGSETGLLSSFPVKVHPSAVESAPEKNASGISVPDAPIILSPPQTHTPDTYNLVWRAGKDGGLPINAYFVKYRKLDDGVGMLGSWHTVRVPGSENELHLAELEPSSLYEVLMVARSAAGEGQPAMLTFRTSKEKTASSKNTQASSPPVGIPKYPVVSEAANNNFGVVLTDSSRHSGGIHSRGTRSAYHLHCIRDISLCHLDSSGKRGFSNHCLQSRI

SEQ ID NO: 87075 - protein, 227 aa, Homo sapiens
MKNGLMFVKLVNPCSGEGAIYLFNMCLQQLFEVKVFKEKHHSWFINQSVQSGGLLHFATPVDPLFLLLHYLIKADKEGKFQPLDQVVVDNVFPNCILLLKLPGLEKLLHHVTEEKGNPEIDNKKYYKYSKEKTLKWLEKKVNQTVAALKTNNVNVSSRVQSTAFFSGDQASTDKEEDYIRYAHGLISDYIPKELSDDLSKYLKLPEPSASLPNPPSKMAAQRQKRGK

SEQ ID NO: 87076 - protein, 522 aa, Homo sapiens
MMVVSTYIGIYYNVVICIAFYYFFSSMTHVLPWAYCNNPWNTHDCAGVLDASNLTNGSRPAALPSNLSHLLNHSLQRTSPSEEYWRLYVLKLSDDIGNFGEVRLPLLGCLGVSWLVVFLCLIRGVKSSGKVVYFTATFPYVVLTILFVRGVTLEGAFDGIMYYLTPQWDKILEAKVWGDAASQIFYSLGCAWGGLITMASYNKFHNNCYRDSVIISITNCATSVYAGFVIFSILGFMANHLGVDVSRVADHGPGLAFVAYPEALTLLPISPLWSLLFFFMLILLGLGTQFCLLETLVTAIVDEVGNEWILQKKTYVTLGVAVAGFLLGIPLTSQAGIYWLLLMDNYAASFSLVVISCIMCVAIMYIYGHRNYFQDIQMMLGFPPPLFFQICWRFVSPAIIFFILVFTVIQYQPITYNHYQYPGWAVAIGFLMALSSVLCIPLYAMFRLCRTDGDTLLQRLKNATKPSRDWGPALLEHRTGRYAPTIAPSPEDGFEVQPLHPDKAQIPIVGSNGSSRLQDSRI

SEQ ID NO: 87077 - protein, 49 aa, Homo sapiens
MLKVVSRMHRVSVILKLLVQQFSILETMTALDFNDFREYLSPASGFQSL

SEQ ID NO: 87078 - protein, 98 aa, Homo sapiens
YWVERAAKLFPGSPAIYKLKEQLLDCEGEDGWNKLFDLIQSELYVRPDDVHVNIRLVELYRSTKRLKDAVAHCHEAERNIALRSSLEWNSCVVQTLKF

SEQ ID NO: 87079 - protein, 148 aa, Homo sapiens
MLPGVGVFGTSLTARVIIPLLKDEGFAVKALWGRTQEEAEELAKEMSVPFYTSRIDEVLLHQDVDLVCINLPPPLTRQIAVKTLEPGHQRKKISRQKNTGEKKMPRGSVQLSFCSLQHPHMGHLFTPHDAALGESQGTGFKPLGMQPV

SEQ ID NO: 87080 - protein, 212 aa, Homo sapiens
MPLLLLLPLLWADLTHRPKILIPGTLEPGHSKNLTCSVSWACEQGTPPIFSWLSAAPTSLGPRTTHSSVLIITPRPQDHGTNLTCQVKFAGAGVTTERTIQLNVTYVPQNPTTGIFPGDGSGKQETRAGVVHGAIGGAGVTALLALCLCLIFFIVKTHRRKAARTAVGRNDTHPTTGSASPVSDGASWHPVCPADTSSQCGPPSCPIQHFQN

SEQ ID NO: 87081 - protein, 99 aa, Homo sapiens
MSKQNGGEGGIIINMSSLAGLMPVAQQPVYCASKHGIVGFTRSAALAANLMNSGVRLNAICPGFVNTAILESIEKEENMGQYIEYKDHIKDMIKYYGIL

SEQ ID NO: 87082 - protein, 136 aa, Homo sapiens
MEYHPDLENLDEDGYTQLHFDSQSNTRIAVVSEKGSCAASPPWRLIAVILGILCLVILVIAVVLGTMGEYLVEEINNRQFSKQLLCARHSFKGLTCIIYFNLYIIWFYLYWVGAVNAHFTYKGCERLRGYFTFPGL

SEQ ID NO: 87083 - protein, 161 aa, Homo sapiens
MNRFRVSKFRHTEARPPRRESWISDIRAGTAPSCRNHIKSSCSLIAFNSDRPGVLGIVPLQGQGEDKRRVAHLGCHSDLVTDLDFSPFDDFLLATGSADRTVKLWRLPGPGQALPSAPGVVLGPEDLPVEVLQFHPTSDGILSWQPMGTWCRAPSGAEMEP

SEQ ID NO: 87084 - protein, 23 aa, Homo sapiens
MSGFNFGGTGAPTGGFTFGTAKT

SEQ ID NO: 87085 - protein, 414 aa, Homo sapiens
MPEFLEDPSVLTKDKLKSELVANNVTLPAGEQRKDVYVQLYLQHLTARNRPPLPAGTNSKGPPDFSSDEEREPTPVLGSGAAAAGRSRAAVGRKATKKTDKPRQEDKDDLDVTELTNEDLLDQLVKYGVNPGPIVGTTRKLYEKKLLKLREQGTESRSSTPLPTISSSAENTRQNGSNDSDRYSDNEEDSKIELKLEKREPLKGRAKTPVTLKQRRVEHNQVETSEHFRIDGPVISESTPIAETIMASSNESLVVNRVTGNFKHASPILPITEFSDIPRRAPKKPLTRAEVGEKTEERRVERDILKEMFPYEASTPTGISASCRRPIKGAAGRPLELSDFRMEESFSSKYVPKYVPLADVKSEKTKKGRSIPVWIKILLFVVVAVFLFLVYQAMETNQVNPFSNFLHVDPRKSN

SEQ ID NO: 87086 - protein, 271 aa, Homo sapiens
MVAEVDSMPAASSVKKPFVLRSKMGKWCRHCFPCCRGSGKSNVGTSGDQDDSTMKTLRSKMGKWCCHCFPCCRGSGKSNVGTSGDHDDSAMKTLRSKMGKWCCHCFPCCRGSGKSNVGAWGDYDDSAFVEPRYHVRREDLDKLHRAAWWGKVARKDLIVMLRDTDVNKQDKQKRTALHLASANGNSGVVKLLLDRRCQLNVLDNKKRTALTKAVQCQEDECALMLLEHGTDPNIPDEYGNTTLHYAIYNEDKLMAKALLLYGADIESKNKV

SEQ ID NO: 87087 - protein, 296 aa, Homo sapiens
MRTRRTLRGHLAKIYAMHWGTDSRLLVSASQDGKLIIWDSYTTNKVHAIPLRSSWVMTCAYAPSGNFVACGGLDNICSIYSLKTREGNVRVSRELPGHTGYLSCCRFLDDNQIITSSGDTTCALWDIETGQQTVGFAGHSGDVMSLSLAPDGRTFVSGACDASIKLWDVRDSMCRQTFIGHESDINAVAFFPNGYAFTTGSDDATCRLFDLRADQELLMYSHDNIICGITSVAFSRSGRLLLAGYDDFNCNIWDAMKGDRAGVLAGHDNRVSCLGVTDDGMAVATGSWDSFLKIWN

SEQ ID NO: 87088 - protein, 50 aa, Homo sapiens
MTVLEQDTQGLDGWWLCSLHGRQGIVPGNRLKILVGMYDKKPAGPGPGPP

SEQ ID NO: 87089 - protein, 43 aa, Homo sapiens
MVVFGYEAGTKPRDSGVVPVGTEEAPKLFCSELPLRCGFLRMG

SEQ ID NO: 87090 - protein, 340 aa, Homo sapiens
MATQVMGQSSGGGGLFTSSGNIGMALPNDMYDLHDLSKAELAAPQLIMLANVALTGEVNGSCCDYLVGEERQMAELMPVGDNNFSDSEEGEGLEESADIKGEPHGLENMELRSLELSVVEPQPVFEASGAPDIYSSNKDLPPETPGAEDKGKSSKTKPFRCKPCQYEAESEEQFVHHIRVHSAKKFFVEESAEKQAKARESGSSTAEEGDFSKGPIRCDRCGYNTNRYDHYTAHLKHHTRAGDNERVYKCIICTYTTVSEYHWRKHLRNHFPRKVYTCGKCNYFSDRKNNYVQHVRTHTGERPYKCELCPYSSSQKTHLTRHMRTHSVGYGYHLVIFTRV

SEQ ID NO: 87091 - protein, 126 aa, Homo sapiens
MEDTQAIDWDVEEEEETEQSSESLRCNVEPVGRLHIFSGAHGPEKDFPLHLGKNVVGRMPDCSVALPFPSISKQHAEIEILAWDKAPILRDCGSLNGTQILRPPKVLSPGVSHRLRDQELILFADL

SEQ ID NO: 87092 - protein, 300 aa, Homo sapiens
  MOD_RES (1)..(1): Any amino acid
XTITSTMKAKLLKILKDTALQKVKRGQSCLEPCLRQLVSCLESFVNQEDSASSNPFALPNSVTPPLPTFARVTTAYGSYQDANIPFPRTSGARFCGAGYLVYFTRPMTMHRAVSPTEPTPRSLSALSAYHTGLIAPMKIRTEAPGNLRLYSGSPTRSEKEQVSISSFYYKERMSPRSARRRWSIQAINDFPKSRRWKSKREGSDSGNRQIKAAGKVIIQDIACLLPVHKSLGELYILNVNDIQETCQKNAASALLVGRKDLVQVWSLATVATDLCLGPKSDPDLETPWARHPFGRQLLES

SEQ ID NO: 87093 - protein, 1207 aa, Homo sapiens
MASVAWAVLKVLLLLPTQTWSPVGAGNPPDCDSPLASALPRSSFSSSSELSSSHGPGFSRLNRRDGAGGWTPLVSNKYQWLQIDLGERMEVTAVATQGGYGSSDWVTSYLLMFSDGGRNWKQYRREESIWGFPGNTNADSVVHYRLQPPFEARFLRFLPLAWNPRGRIGMRIEVYGCAYKSEVVYFDGQSALLYTLDKKPLKPIRDVISLKFKAMQSNGILLHREGQHGNHITLELIKGKLVFFLNSGNAKLPSTIAPVTLTLGSLLDDQHWHSVLIELLDTQVNFTVDKHTHHFQAKGDSSNLDLNFEISFGGILSPGRSRAFTRKSFHGCLENLYYNGVDVTELAKKHKPQILMMGNVSFSCPQPQTVPVTFLSSRSYLALPGNSGEDKVSVTFQFRTWNRAGHLLFGELQRGSGSFVLFLKDGKLKLSLFQAGQSPRNVTAGAGLNDGQWHSVSFSAKWSHMNVVVDDDTAVQPLVAVLIDSGDTYYFGGCLGNSSGSGCKSPLGGFQGCLRLITIGDKAVDPILVQQGALGSFRDLQIDSCGITDRCLPSYCEHGGECSQSWDTFSCDCLGTGYTGETCHSSLYEQSCEAHKHRGNPSGLYYIDADGSGPLGPFLVYCNMTDSAWTVVRHGGPDAVTLRGAPSGHPLSAVSFAYAAGAGQLRAAVNLAERCEQRLALRCGTARRPDSRDGTPLSWWVGRTNETHTSWGGSLPDAQKCTCGLEGNCIDSQYYCNCDAGQNEWTSDTIVLSQKEHLPVTQIVMTDTGQPHSEADYTLGPLLCRGDKSFWNSASFNTETSYLHFPAFHGELTADVCFFFKTTVSSGVFMENLGITDFIRIELRAPTEVTFSFDVGNGPCEVTVQSPTPFNDNQWHHVRAERNVKGASLQVDQLPQKMQPAPADGHVRLQLNSQLFIEISAYFATGSSMTYHFQEHYTLSENSSSLVSSLHRDVTLTREMITLSFRTTRTPSLLLYVSSFYEEYLSVILANNGSLQIRYKLDRHQNPDAFTFDFKNMADGQLHQVKINREEAVVMVEVNQSAKKQVILSSGTEFNAVKSLILGKVLEAAGADPDTRRAATSGFTGCLSAVRFGCAAPLKAALRPSGPSRVTVRGHVAPMARCAAGAASGSPARELAPRLAGGAGRSGPVDEGEPLVNADRRDSAVIGGVIAVEIFILLCITAIAIRIYQQRKLRKENESKVSKKEEC

SEQ ID NO: 87094 - protein, 64 aa, Homo sapiens
MAAAVLTDRAQVSVTFDDVAVTFTKEEWGQLDLAQRTLYQEVMLENCGLLVSLGKAFLPPPPCR

SEQ ID NO: 87095 - protein, 54 aa, Homo sapiens
MVPAELHSCPQFNPLLPSVPPDLHPARERGGRAPEQFLHHKPDGRAAANSRQQR

SEQ ID NO: 87096 - protein, 57 aa, Homo sapiens
MGSKMNLIEHSHLPTTDEFSFSENLFDFLGWFQSLPSTTLWSWTNSLTLHKLLALFK

SEQ ID NO: 87097 - protein, 123 aa, Homo sapiens
MRQDKLTGSLRRGGRCLKRQGGGVGTILSNVLKKRSCISRTAPRLLCTLEPGVDTKLKFTLEPSLGQNGFQQWYDALKAVARLSTGIPKEWRRKDLHRTGCSSYCGQEAEQDRVVLKRVLLAY

SEQ ID NO: 87098 - protein, 125 aa, Homo sapiens
  MOD_RES (1)..(1): Any amino acid
XNNKFRRNFTMTYHLSPGNYVVVAQTRRKSAEFLLRIFLKMPDSDRHLSSHFNLRMKGSPSEHGSQQSIFNRYAQQRLDIDATQLQGLLNQELLTGPPGDMFSLDECRSLVALMEVSFAVIPPML

SEQ ID NO: 87099 - protein, 76 aa, Homo sapiens
MPDVKESVPPKYPGDSEGRSCKPETSGPPQEDKSGSEDPPPFWKARSRRQCTMPFGTILKSNYQQLPLTSAVLLNF

SEQ ID NO: 87100 - protein, 186 aa, Homo sapiens
MRLGSGTFATCCVAIEVLGIAVFLRGFFPAPVRSSARAEHGAEPPAPEPSAGASSNWTTLPPPLFSKVVIVLIDALRDDFVFGSKGVKFMPYTTYLVEKGASHSFVAEAKPPTVTMPRIKVSSLLTAALKYIVHFPRTVGKEKSIDDGEPSWLCRRHQEPQFSCTAGRQCDKTSKSSWKKNSLLWR

SEQ ID NO: 87101 - protein, 689 aa, Homo sapiens
  MOD_RES (1)..(1): Any amino acid
XRALHLLEEYRSKLSQTEDRQLRSSIERVINIFQSNLFQALIDIQEFYEVTLLDNPKCIDRSKPSEPIQPVNTWEISSLPSSTVTSETLPSSLSPSVEKYRYQDEDTPPQEHISPQITNEVIGPELVHVSEKNLSEIENVHGFVSHSHISPIKVNGTDADYEYEEITLERGNSGLGFSIAGGTDNPHIGDDSSIFITKIITGGAAAQDGRLRVNDCILRVNEVDVRDVTHSKAVEALKEAGSIVRLYVKRRKPVSEKIMEIKLIKGPKGLGFSIAGGVGNQHIPGDNSIYVTKIIEGGAAHKDGKLQIGDKLLAVNNVCLEEVTHEEAVTALKNTSDFVYLKVAKPTSMYMNDGYAPPDITNSSSQPVDNHVSPSSFLGQTPASPARYSPVSKAVLGDDEITREPRKVVLHRGSTGLGFNIVGGEDGEGIFISFILAGGPADLSGELRKGDRIISVNSVDLRAASHEQAAAALKNAGQAVTIVAQYRPEEYSRFEAKIHDLREQMMNSSISSGSGSLRTSQKRSLYVRALFDYDKTKDSGLPSQGLNFKFGDILHVINASDDEWWQARQVTPDGESDEVGVIPSKRRVEKKERARLKTVKFNSKTRDKGEIPDDMGSKGLKHVTSNASDSESSYRGQEEYVLSYEPVNQQEVNYTRPVIILGPMKDRINDDLISEFPDKFGSCVPLFFC

SEQ ID NO: 87102 - protein, 273 aa, Homo sapiens
MGKRRCVPPLEPKLAAGCCGVKKPKLSGSGTHSHGNQSTTVPGSSSGPLQNHQHVDSSSGRENVSDLTLGPGNSPITRMNPASGALSPLPRPNGTANTTKNLVVTAEMCCYCFDVLYCHLYGFPQPRLPRFTNDPYALKDSRFPPLTREELPKLFCSVSLLTNFEDASDYLDWEVGVHGIRIEFINEKGVKRTATYLPEVAKEQDWDQIQTIDSLLRKGGFKAPITSEFRKTIKLTRYRSEKVTISYAEYIASRQHCFQNGTLHAPPLYNHYS

SEQ ID NO: 87103 - protein, 89 aa, Homo sapiens
MAAQIPIVATTSTPGIVRNSKKRPASPSHNGSSGGGYGASKKKKASASSFAQTCLSPSTMIVRPPQPRGTAHWWKGLALSRMRLWTVDF

SEQ ID NO: 87104 - protein, 111 aa, Homo sapiens
MKAGAFPPAPTAVPLHPSWAYVDPSSSSSYDNGFPTGDHELFTTFSWDDQKVRRVFVRKVYTILLIQLLVTLAVVALFTFCDPVKDYVQANPGWYWASYAVFFATYLTLAC

SEQ ID NO: 87105 - protein, 55 aa, Homo sapiens
MDLLFGRRKTPEELLRQNQRALNRAMRELDRERQKLETQEKKIIADIKKMAKQGQ

SEQ ID NO: 87106 - protein, 20 aa, Homo sapiens
MATMIPPVKLKWLEHLNSSW

SEQ ID NO: 87107 - protein, 302 aa, Homo sapiens
  MOD_RES (1)..(1): Any amino acid
XPLYEGLGSGGEKTAVVIDLGEAFTKCGFAGETGPRCIIPSVIKRAGMPKPVRVVQYNINTEELYSYLKEFIHILYFRHLLVNPRDRRVVIIESVLCPSHFRETLTRVLFKYFEVPSVLLAPSHLMALLTLGINSAMVLDCGYRESLVLPIYEGIPVLNCWGALPLGGKALHKELETQLLEQCTVDTSVAKEQSLPSVMGSVPEGVLEDIKARTCFVSDLKRGLKIQAAKFNIDGNNERPSPPPNVDYPLDGEKILHILGSIRDSVVEILFEQDNEEQSVATLILDSLIQCCSCCPGWSAMA

SEQ ID NO: 87108 - protein, 142 aa, Homo sapiens
EGARVFGALGPIGPSSPGLTLGGLAVSEHRLSNKLLAWSGVLEWQEKRRPYSDSTAKLKRTLPCQAYVNQGENLETDQWPQKLIMQLIPQQLLAGCMLFPHISPCEVRVLMLLYSSKKKIFMGLIPYDQSGFVSAIRQVITT

SEQ ID NO: 87109 - protein, 54 aa, Homo sapiens
MISAAQLLDELMGRDRNLAPDEKRSNVRWDHESVRVKKFMMKIYENSMRRALVS

SEQ ID NO: 87110 - protein, 88 aa, Homo sapiens
MPEGPELHLASQFVNEACRALVFGGCVEKSSVSRNPEVPFESSAYRISASARGKELRLILSPLPGAQPQQEPLALVFRFGMSGSFQLV

SEQ ID NO: 87111 - protein, 1114 aa, Homo sapiens
MQLSFTQLTIDYYPYHKAGDSCNHWMYFSDATKTKNGWANELLHEFECNVEMLKQAVKDHNVGSPPKSPTHASPQHTQTEKDYPLKGTCRTPSVLSQQSKAKLMSSSVVVRLADFNIYQVSTAEQCRSSPKSMICCNKKSLYLPQEMSAVYIEFTEYYYPDGKDFPIPSPNLYSQLNALQFTVDERSILWLNQFLLDLKQSLNQFMAVYKLNDNSKSDEHVDVRVDGLMLKFVIPSEVKSECHQDQPRAISIQSSEMIATNTRHCPNCRHSDLEALFQDFKDCDFFSKTYTSFPKSCDNFNLLHPIFQRHAHEQDTKMHEIYKGNITPQLNKNTLKTSAATDVWAVYFSQFWIDYEGMKSGKGRPISFVDSFPLSIWICQPTRYAESQKEPQTCNQVSLNTSQSESSDLAGRLKRKKLLKEYYSTESEPLTNGGQKPSSSDTFFRFSPSSSEADIHLLVHVHKHVSMQINHYQYLLLLFLHESLILLSENLRKDVEAVTGSPASQTSICIGILLRSAELALLLHPVDQANTLKSPVSESVSPVVPDYLPTENGDFLSSKRKQISRDINRIRSVTVNHMSDNRSMSVDLSHIPLKDPLLFKSASDTNLQKGISFMDYLSDKHLGKISEDESSGLVYKSGSGEIGSETSDKKDSFYTDSSSILNYREDSNILSFDSDGNQNILSSTLTSKGNETIESIFKAEDLLPEAASLSENLDISKEETPPVRTLKSQSSLSGKPKERCPPNLAPLCVSYKNMKRSSSQMSLDTISLDSMILEEQLLESDGSDSHMFLEKGNKKNSTTNYRGTAESVNAGANLQNYGETSPDAISTNSEGAQENHDDLMSVVVFKITGVNGEIDIRGEDTEICLQVNQVTPDQLGNISLRHYLCNRPVGSDQKAVIHSKSSPEISLRFESGPGAVIHSLLAEKNGFLQCHIENFSTEFLTSSLMNIQHFLEDETVATVMPMKIQVSNTKINLKDDSPRSSTVSLEPAPVTVHIDHLVVERSDDGSFHIRDSHMLNTGNDLKENVKSDSVLLTSGKYDLKKQRSVTQATQTSPGVPWPSQSANFPEFSFDFTREQLMEENESLKQELAKAKMALAEAHLEKDALLHHIKKMTVE

SEQ ID NO: 87112 - protein, 350 aa, Homo sapiens
EDLPTIVIVAHYDAFGVAPWLSLGADSNGSGVSVLLELARLFSRLYTYKRTHAAYNLLFFASGGGKFNYQGTKRWLEDNLDHTDSSLLQDNVAFVLCLDTVGRGSSLHLHVSKPPREGTLQHAFLRELETVAAHQFPEVRFSMVHKRINLAEDVLAWEHERFAIRRLPAFTLSHLESHRDGQRSSIMDVRSRVDSKTLTRNTRIIAEALTRVIYNLTEKGTPPDMPVFTEQMQIQQEQLDSVMDWLTNQPRAAQLVDKDSTFLSTLEHHLSRYLKDVKQHHVKADKRDPEFVFYDQLKQVMNAYRVKPAVFDLLLAVGIAAYLGMAYVAVQHFSLLYKTVQRLLVKAKTQ

SEQ ID NO: 87113 - protein, 141 aa, Homo sapiens
MAASAAVFSRLRSGLRLGSRGLCTRLATPPRRAPDQAAEIGSRGSTKAQGPQQQPGSEGPSYAKKVALWLAGLLGAGGTVSVVYIFGNNPVDENGAKIPDEFDNDDHRAHQPLPSPRPSAGTVLPATLHARFGAHRRPLAS

SEQ ID NO: 87114 - protein, 374 aa, Homo sapiens
  MOD_RES (1)..(1): Any amino acid
XLTAPRRAQRPHGGAEASGGLRFGASAAQGWRARMEDAHCTWLSLPGLPPGWALFAVLDGHGGARAARFGARHLPGHVLQELGPEPSEPEGVREALRRAFLSADERLRSLWPRVETGGCTAVVLLVSPRFLYLAHCGDSRAVLSRAGAVAFSTEDHRPLRPRERERIHAAGGTIRRRRVEGSLAVSRALGDFTYKEAPGRPPELQLVSAEPEVAALARQAEDEFMLLASDGVWDTVSGAALAGLVASRLRLGLAPELLCAQLLDTCLCKVLGAWRGTFGAWCSRGREPRGFGEEGFDREARVKLAKEGIGLKRRAWPEVGRAKIQGRSLRDALRHGRVSGRDLRERAWSFGKGRFWVVGAGPEVLISAGRWKSR

SEQ ID NO: 87115 - protein, 419 aa, Homo sapiens
MWLKPEEVLLKNALKLWLMERSNDYFVLQRRRGYGEEGGGGLTGLLVGTLDSVLDSTAKVAPFRILHQTPDSQVYLSIACGANREEITKHWDWLEQNIMKTLSVFDSNEDITNFVQGKIRGLIAEEGKHCFAKEDDPEKFREALLKFEKCFGLPEKEKLVTYYSCSYWKGRVPCQGWLYLSTNFLSFYSFLLGSEIKLIISWDEVSKLEKTSNVILTESIHVCSQGENHYFSMFLHINQTYLLMEQLANYAIRRLFDKETFDNDPVLYNPLQITKRGLENRAHSEQFNAFFRLPKGESLKEVHECFLWVPFSHFNTHGKMCISENYICFASQDGNQCSVIIPLREVLAIDKTNDSSKSVIISIKGKTAFRFHEVKDFEQLVAKLRLRCGAASTQYHDISTEVINYTAIKSFGKKGVCLV

SEQ ID NO: 87116 - protein, 56 aa, Homo sapiens
PKGRDKAIVFPAHTTIAFSVFELFIYLDGAFDLCVTSVSKGGFEREETATFALLYR

SEQ ID NO: 87117 - protein, 704 aa, Homo sapiens
MPLFFRKRKPSEEARKRLEYQMCLIPFGAFATCKVLQKKVLIVHTNHLTSLLPKSCSLLSLATIKVLDLHDNQLTALPDDLGQLTALQVLNVERNQLMQLPRSIGNLTQLQTLNVKDNKLKELPDTVGELRSLRTLNISGNEIQRLPQMLAHVRTLEMLSLDASAMVYPPREVCGAGTAAILQFLCKESGLEYYPPSQYLLPILEQDGIENSRDSPDGPTDRFSREELEWQNRFSDYEKRKEQKMLEKLEFERRLELGQREHTQLLQQSSSQKDEILQTVKEEQSRLEQGLSEHQRHLNAERQRLQEQLKQTEQNISSRIQKLLQDNQRQKKSSEILKSLENERIRMEQLMSITQEETESLRRRDVASAMQQMLTESCKNRLIQMAYESQRQNLVQQACSSMAEMDERFQQILSWQQMDQNKAISQILQESAMQKAAFEALQVKKDLMHRQIRSQIKLIETELLQLTQLELKRKSLDTESLQEMISEQRWALSSLLQQLLKEKQQREEELREILTELEAKSETRQENYWLIQYQRLLNQKPLSLKLQEEGMERQLVALLEELSAEHYLPIFAHHRLSLDLLSQMSPGDLAKVGVSEAGLQHEILRRVQELLDAARIQPELKPPMGEVVTPTAPQEPPESVRPSAPPAELEVQASECVVCLEREAQMIFLNCGHVCCCQQCCQPLRTCPLCRQDIAQRLRIYHSS

SEQ ID NO: 87118 - protein, 135 aa, Homo sapiens
MPREIITLQLGQCGNQIGFEFWKQLCAEHGISPEGIVEEFATEGTDRKDVFFYQADDEHYIPRAVLLDLEPRVIHSILNSPYAKLYNPENIYLSEHGGGAGNNWASGFSQGEKIHEDIFDIIDREADGSDSLEVS

SEQ ID NO: 87119 - protein, 115 aa, Homo sapiens
  MOD_RES (1)..(1): Any amino acid
XAEKKLFECLTCGKSFRQGMHLTRHQRTHTGEKPYKCTLCGENFSHRSNLIRHQRIHTGEKPYTCHECGDSFSHSSNRIRHLRTHTGERPYKCSECGESFSRSSRLMSHQRTHTV

SEQ ID NO: 87120 - protein, 449 aa, Homo sapiens
MIPTLTALLCLGLSLGPRTHMQAGPLPKPTLWAEPGSVISWGNSVTIWCQGTLEAREYRLDKEESPAPWDRQNPLEPKNKARFSIPSMTEDYAGRYRCYYRSPVGWSQPSDPLELVMTGAYSKPTLSALPSPLVTSGKSVTLLCQSRSPMDTFLLIKERAAHPLLHLRSEHGAQQHQAEFPMSPVTSVHGGTYRCFSSHGFSHYLLSHPSDPLELIVSGSLEGPRPSPTRSVSTAAGPEDQPLMPTGSVPHSGLRRHWEVLIGVLVVSILLLSLLLFLLLQHWRQGKHRTLAQRQADFQRPPGAAEPEPKDGGLQRRSSPAADVQGENFSGAAVKNTQPEDGVEMDTRQSPHDEDPQAVTYAKVKHSRPRREMASPPSPLSGEFLDTKDRQAEEDRQMDTEAAASEAPQDVTYARLHSFTLRQKATEPPPSQEGASPAEPSVYATLAIH

SEQ ID NO: 87121 - protein, 1915 aa, Homo sapiens
MEQTVLVPPGPDSFNFFTRESLAAIERRIAEEKAKNPKPDKKDDDENGPKPNSDLEAGKNLPFIYGDIPPEMVSEPLEDLDPYYINKKTFIVLNKGKAIFRFSATSALYILTPFNPLRKIAIKILVHSLFSMLIMCTILTNCVFMTMSNPPDWTKNVEYTFTGIYTFESLIKIIARGFCLEDFTFLRDPWNWLDFTVITFAYVTEFVDLGNVSALRTFRVLRALKTISVIPGLKTIVGALIQSVKKLSDVMILTVFCLSVFALIGLQLFMGNLRNKCIQWPPTNASLEEHSIEKNITVNYNGTLINETVFEFDWKSYIQDSRYHYFLEGFLDALLCGNSSDAGQCPEGYMCVKAGRNPNYGYTSFDTFSWAFLSLFRLMTQDFWENLYQLTLRAAGKTYMIFFVLVIFLGSFYLINLILAVVAMAYEEQNQATLEEAEQKEAEFQQMIEQLKKQQEAAQQAATATASEHSREPSAAGRLSDSSSEASKLSSKSAKERRNRRKKRKQKEQSGGEEKDEDEFQKSESEDSIRRKGFRFSIEGNRLTYEKRYSSPHQSLLSIRGSLFSPRRNSRTSLFSFRGRAKDVGSENDFADDEHSTFEDNESRRDSLFVPRRHGERRNSNLSQTSRSSRMLAVFPANGKMHSTVDCNGVVSLVGGPSVPTSPVGQLLPEVIIDKPATDDNGTTTETEMRKRRSSSFHVSMDFLEDPSQRQRAMSIASILTNTVEELEESRQKCPPCWYKFSNIFLIWDCSPYWLKVKHVVNLVVMDPFVDLAITICIVLNTLFMAMEHYPMTDHFNNVLTVGNLVFTGIFTAEMFLKIIAMDPYYYFQEGWNIFDGFIVTLSLVELGLANVEGLSVLRSFRLLRVFKLAKSWPTLNMLIKIIGNSVGALGNLTLVLAIIVFIFAVVGMQLFGKSYKDCVCKIASDCQLPRWHMNDFFHSFLIVFRVLCGEWIETMWDCMEVAGQAMCLTVFMMVMVIGNLVVLNLFLALLLSSFSADNLAATDDDNEMNNLQIAVDRMHKGVAYVKRKIYEFIQQSFIRKQKILDEIKPLDDLNNKKDSCMSNHTAEIGKDLDYLKDVNGTTSGIGTGSSVEKYIIDESDYMSFINNPSLTVTVPIAVGESDFENLNTEDFSSESDLEESKEKLNESSSSSEGSTVDIGAPVEEQPVVEPEETLEPEACFTEGCVQRFKCCQINVEEGRGKQWWNLRRTCFRIVEHNWFETFIVFMILLSSGALAFEDIYIDQRKTIKTMLEYADKVFTYIFILEMLLKWVAYGYQTYFTNAWCWLDFLIVDVSLVSLTANALGYSELGAIKSLRTLRALRPLRALSRFEGMRATFKGWMDIMYAAVDSRNVELQPKYEESLYMYLYFVIFIIFGSFFTLNLFIGVIIDNFNQQKKKFGGQDIFMTEEQKKYYNAMKKLGSKKPQKPIPRPGNKFQGMVFDFVTRQVFDISIMILICLNMVTMMVETDDQSEYVTTILSRINLVFIVLFTGECVLKLISLRHYYFTIGWNIFDFVVVILSIVGMFLAELIEKYFVSPTLFRVIRLARIGRILRLIKGAKGIRTLLFALMMSLPALFNIGLLLFLVMFIYAIFGMSNFAYVKREVGIDDMFNFETFGNSMICLFQITTSAGWDGLLAPILNSKPPDCDPNKVNPGSSVKGDCGNPSVGIFFFVSYIIISFLVVVNMYIAVILENFSVATEESAEPLSEDDFEMFYEVWEKFDPDATQFMEFEKLSQFAAALEPPLNLPQPNKLQLIAMDLPMVSGDRIHCLDILFAFTKRVLGESGEMDALRIQMEERFMASNPSKVSYQPITTTLKRKQEEVSAVIIQRAYRRHLLKRTVKQASFTYNKNKIKGGANLLIKEDMIIDRINENSITEKTDLTMSTAACPPSYDRVTKPIVEKHEQEGKDEKAKGK

SEQ ID NO: 87122 - protein, 662 aa, Homo sapiens
MEGPHLPNKKKHKKQAVKTEPEKKSQSTKPKSLPKQASDTGSNDAHNKKAVSRSAEQQPSEKSTEPKTKPQDMISAGGESVAGITAISGKPGDKKKEKKSLTPAVPVESKPDKPSGKSGMDAALDDLIDTLGGPEETEEENTTYTGPEVSDPMSSTYIEELGKREVTIPPKYRELLAKPIGPDDAIDALSSDFTCGSPTAAGKKTEKEESTEVLKAQSAGTVRSAAPPQEKKRKVEKDTMSDQALEALSASLGTRQAEPELDLRSIKEVDEAKAKEEKLEKCGEDDETIPSEYRLKPATDKDGKPLLPEPEEKPKPRSESELIDELSEDFDRSECKEKPSKPTEKTEESKAAAPAPVSEAVCRTSMCSIQSAPPEPATLKGTVPDDAVEALADSLGKKEADPEDGKPVMDKVKEKAKEEDREKLGEKEETIPPDYRLEEVKDKDGKPLLPKESKEQLPPMSEDFLLDALSEDFSGPQNASSLKFEDAKLAAAISEVVSQTPASTTQAGAPPRDTSQSDKDLDDALDKLSDSLGQRQPDPDENKPMEDKVKEKAKAEHRDKLGERDDTIPPEYRHLLDDNGQDKPVKPPTKKSEDSKKPADDQDPIDALSGDLDSCPSTTETSQNTAKDKCKKAASSSKAPKNGGKAKDSAKTTEETSKPKDD

SEQ ID NO: 87123 - protein, 748 aa, Homo sapiens
MIPAASSTPPGDALFPSVAPQDFWRSQVTGYSGSVTRHLSHRANNFKRHPKRRKCIRPSPPPPPNTPCPLELVDFGDLHPQRSFRELLFNGCILFGIEFSYAMETAYVTPVLLQMGLPDQLYSLVWFISPILGFLLQPLLGAWSDRCTSRFGRRRPFILVLAIGALLGLSLLLNGRDIGIALADVTGNHKWGLLLTVCGVVLMDFSADSADNPSHAYMMDVCSPADQDRGLNIHALLAGLGGGFGYVVGGIHWDKTGFGRALGGQLRVIYLFTAVTLSVTTVLTLVSIPERPLRPPSEKRAAMKSPSLPLPPSPPVLPEEGPGDSLPSHTATNFSSPISPPSPLTPKYGSFISRDSSLTGISEFASSFGTANIDSVLIDCFTGGHDSYLAIPGSVPRPPISVSFPRAPDGFYRQDRGLLEGREGALTSGCDGDILRVGSLDTSKPRSSGILKRPQTLAIPDAAGGGGPETSRRRNVTFSQQVANILLNGVKYESELTGSSERAEQPLSVGRLCSTICNMPKALRTLCVNHFLGWLSFEGMLLFYTDFMGEVVFQGDPKAPHTSEAYQKYNSGVTMGCWGMCIYAFSAAFYSAILEKLEEFLSVRTLYFIAYLAFGLGTGLATLSRNLYVVLSLCITYGILFSTLCTLPYSLLCDYYQSKKFAGSSADGTRRGMGVDISLLSCQYFLAQILVSLVLGPLTSAVGSANGVMYFSSLVSFLGCLYSSLFVIYEIPPSDAADEEHRPLLLNV

SEQ ID NO: 87124 - protein, 1008 aa, Homo sapiens
MQPEEGTGWLLELLSEVQLQQYFLRLRDDLNVTRLSHFEYVKNEDLEKIGMGRPGQRRLWEAVKRRKALCKRKSWMSKVFSGKRLEAEFPPHHSQSTFRKTSPAPGGPAGEGPLQSLTCLIGEKDLRLLEKLGDGSFGVVRRGEWDAPSGKTVSVAVKCLKPDVLSQPEAMDDFIREVNAMHSLDHRNLIRLYGVVLTPPMKMVTELAPLGSLLDRLRKHQGHFLLGTLSRYAVQVAEGMGYLESKRFIHRDLAARNLLLATRDLVKIGDFGLMRALPQNDDHYVMQEHRKVPFAWCAPESLKTRTFSHASDTWMFGVTLWEMFTYGQEPWIGLNGSQILHKIDKEGERLPRPEDCPQDIYNVMVQCWAHKPEDRPTFVALRDFLLEAQPTDMRALQDFEEPDKLHIQMNDVITVIEGRAENYWWRGQNTRTLCVGPFPRNVVTSVAGLSAQDISQPLQNSFIHTGHGDSDPRHCWGFPDRIDELYLGNPMDPPDLLSVELSTSRPPQHLGGVKKPTYDPVSEDQDPLSSDFKRLGLRKPGLPRGLWLAKPSARVPGTKASRGSGAEVTLIDFGEEPVVPALRPCAPSLAQLAMDACSLLDETPPQSPTRALPRPLHPTPVVDWDARPLPPPPAYDDVAQDEDDFEICSINSTLVGAGVPAGPSQGQTNYAFVPEQARPPPPLEDNLFLPPQGGGKPPSSAQTAEIFQALQQECMRQLQAPAGSPAPSPSPGGDDKPQVPPRVPIPPRPTRPHVQLSPAPPGEEETSQWPGPASPPRVPPREPLSPQGSRTPSPLVPPGSSPLPPRLSSSPGKTMPTTQSFASDPKYATPQVIQAPGPRAGPCILPIVRDGKKVSSTHYYLLPERPSYLERYQRFLREAQSPEEPTPLPVPLLLPPPSTPAPAAPTATVRPMPQAALDPKANFSTNNSNPGARPPPPRATARLPQRGCPGDGPEAGRPADKIQMVEQLFGLGLRPRGECHKVLEMFDWNLEQAGCHLLGSWGPAHHKR

SEQ ID NO: 87125 - protein, 252 aa, Homo sapiens
MAEGCAVYGTWPWGGMFQLFRPSALAGLCSIGLVVIMCASSDTIRSIMLVAHRHGMTSGDYAFFNIELFNSSSYGDGSWKRGDKHDFEAKQAYSSLQTVTLLRTVKPEFEKFSMEVKSSVEKQGLNMEDYVNMFVEGFHDAILLYVLALHEVLRAGYSKKDGGKIIQQTWNRTFEGIAGQVSIDANGDRYGDFSVIAMTDVEAGTQEVIGDYFGKEGRFEMRPNVKYPWGPLKLRIDENRIVEHTNSSPCKS

SEQ ID NO: 87126 - protein, 141 aa, Homo sapiens
  MOD_RES (1)..(1): Any amino acid
XTTGASGPFTVLKAIGLQRTGKQEEAFTLAQEVAALEPTDDNSLQALTILYREMHRPELVTKLYEAAVKKVPNSEEYHSHLFMAYARVGEYKKMQQAGMALYKIVPKNPYYFWSVMSLIMQSISAQDENLSKTMFLPLAER

SEQ ID NO: 87127 - protein, 293 aa, Homo sapiens
TTDGEKKSKKIRDKTSKKKDELSDYAEKSTGKGDSCDSSEDKKSKNGAYGREKKRCKLLGKSSRKRQDCSSSDTEKYSMKEDGCNSSDKRLKRIELRERRNLSSKRNTKEIQSGSSSSDAEESSEDNKKKKQRTSSKKKAVIVKEKKRNSLRTSTKRKQADITSSSSSDIEDDDQNSIGEGSSDEQKIKPVTENLVLSSHTGFCQSSGDEALSKSVPVTVDDDDDDNDPENRYDSICKDFKKIITHPRHGHKQQQRNSKQVVKTRSACLRKTRSQSSCKFERKARKWAKTQKP

SEQ ID NO: 87128 - protein, 77 aa, Homo sapiens
MAPFLRIAFNSYELGSLQAEDEANQPFCAVKMKEALSTERGKTLVQKKPTMYPEWKSTFDAHIYEGRVIQIVLMRAA

SEQ ID NO: 87129 - protein, 840 aa, Homo sapiens
ASLASCEGNSSNKQVSSESQMGFFSLSSERNESVIHYPESTEPEIQQEMSTSQPDCNVDSCSVSSGYGTFCISELNLYKSKDPKEFMEHIDVPKGQYVAPAVPAESLVDGVKNENFYIQTPEECHVSLKEDVSISPGEFEHNFLGENKVSEVYSGKTNSNAITSWAQKLKQNQPKRAHVEDGGSRSKQGNEQSKKTPIEKSDFAAATHPRAFYLSKPDETPNAWMSDSGTGLTYWKLEEKDMHHSLPETLEKTFISLSSTDVSPNQVLTLDPTLHMKPKQQISGIQPHGLPNALDDRISFSPDSVLEPSMSSPSDIDSFSQASNVTSQLPGFPKYPSHTKASPVDSWKNQTFQNESRTSSTFPSVYTITSNDISVNTVDEENTVMVASASVSQSQLPGTANSVPECISLTSLEDPVILSKIRQNLKEKHARHIADLRAYYESEINSLKQKLEAKEISGVEDWKITNQILVDRCGQLDSALHEATSRVRTLENKNNLLEIEVNDLRERFSAASSASKILQERIEEMRTSSKEKDNTIIRLKSRLQDLEEAFENAYKLSDDKEAQLKQENKMFQDLLGEYESLGKEHRRVKDALNTTENKLLDAYTQISDLKRMISKLEAQVKQVEHENMLSLRHNSRIHVRPSRANTLATSDVSRRKWLIPGAEYSIFTGQPLDTQDSNVDNQLEETCSLGHRSPLEKDSSPGSSSTSLLIKKQRETSDTPIMRALKELDEGKIFKNWGTQTEKEDTSNINPRQTETSVNASRSPEKCAQQRQKRLNSASQRSSSLPPSNRKSSTPTKREIMLTPVTVAYSPKRSPKENLSPGFSHLLSKNESSPIRKNLF

SEQ ID NO: 87130 - protein, 263 aa, Homo sapiens
MACRPCRGAGRIWCCRSHKSEPRSWSLLEQLGLAGADLAAPGVQQQLELERERLRREIRKELKLKEGAENLRRATTDLGRSLGPVELLLRGSSRRLDLLHQQLQELHAHVVLPDPAATHDGPQSPGAGGPTCSATNLSRVAGLEKQLAIELKVKQGAENMIQTYSNGSTKDRKLLLTAQQMLQDSKTKIDIIRMQLRRALQAGQLENQAAPDDTQGSPDLGAVELRIEELRHHFRVEHAVAEGAKNVLRLLSAAKAPDRKAVS

SEQ ID NO: 87131 - protein, 100 aa, Homo sapiens
MGSPLRFDGRVVLVTGAGAGLGRAYALAFAERGALVVAFKIYAITLWRRSFHNADSLFQSFHSAAQAGVQWHDLSSLQPLPSGFKRFSCLSLPSSWDYSE

SEQ ID NO: 87132 - protein, 142 aa, Homo sapiens
  MOD_RES (1)..(1): Any amino acid
XSPRTPPQRFYSSEHEYSGLNIVRPSTGKIVNELFKEAREHGAVPLNEATRASGDDKSKSFTGGGYRLGSSFCKRSEYIYGENQLQDVQILLKLWSNGFSLDDGELRPYNEPTNAQFLESVKRGVTLIACMPEIQQLMLEIF

SEQ ID NO: 87133 - protein, 461 aa, Homo sapiens [sequence omitted]

SEQ ID NO: 87134 - protein, 65 aa, Homo sapiens
MEDRRAEKSCEQACESLKRQDYEMALKHCTEALLSLGQYSMADFTGPCPLEIERIKIESLLYRIA

SEQ ID NO: 87135 - protein, 321 aa, Homo sapiens
MALPALGLDPWSLLGLFLFQLLQLLLPTTTAGGGGQGPMPRVRYYAGDERRALSFFHQKGLQDFDTLLLSGDGNTLYVGAREAILALDIQDPGVPRLKNMIPWPASDRKKSECAFKKKSNETQCFNFIRVLVSYNVTHLYTCGTFAFSPACTFIELQDSYLLPISEDKVMEGKGQSPFDPAHKHTAVLVDGMLYSGTMNNFLGSEPILMRTLGSQPVLKTDNFLRWLHHDASFVAAIPSTQVVYFFFEETASEFDFFERLHTSRVARVCKNDVGGEKLLQKKWTTFLKAQLLCTQPGQLPFNVIRHAVLLPADSPTAPHIY

SEQ ID NO: 87136 - protein, 204 aa, Homo sapiens
  MOD_RES (1)..(1): Any amino acid
XSDEGYNYEFDEDEECSEEDSGAEEEEDEDDDEPDDDTLDLGEVELVEPGLGVGGERDGLLCGETGGGGGSALGPGGGGGGGGGGGGGGPGHEQEEDYRYEVLTAEQILQHMVECIREVNEVIQNPATITRILLSHFNWDKEKLMERRLITDSKVKLKYQHLITNSFVECNRLLKWCPAPDCHHVVKVQYPDAKPVRCKCGRQF

SEQ ID NO: 87137 - protein, 99 aa, Homo sapiens
MPKALRQLKPGQNSCRDSDSESASGESKGFHRSSSRERLSDSSAPSSLGTGYFRSGKMCLGEEACLKSGNDMKRDVSNTSSWASNRESFFSLVKLLKGF

SEQ ID NO: 87138 - protein, 45 aa, Homo sapiens
MNKDAVQHERGPRTSTIRKQVALYFRGHKEENGAAAHFPSAALPA

SEQ ID NO: 87139 - protein, 166 aa, Homo sapiens
MGLEKLHPFDAGKWGKVINFLKEEKLLSDSMLVEAREASEEDLLVVHTRRYLNELKWSFAVATITEIPPVIFLPNFLVQRKVLRPLRTQTGGTIMAGKLAVERGWAINVGGGFHHCSSDRGGGFCAYADITLAIKFLFERVEGISRATIIDLDAHQGNGHERDFMD

SEQ ID NO: 87140 - protein, 210 aa, Homo sapiens
MGVCVWRYLASCGILMSRTLPLHTSILPKEICARTFFKITAPLINKRKEYSERRILGYSMQEMYDVVSGVEDYKHFVPWCKKSDVISKRSGYCKTRLEIGFPPVLERYTSVVTLVKPHLVKASCTDGRLFNHLETIWRFSPGLPGYPRTCTLDFSISFEFRSLLHSQLATLFFDEVVKQMVAAFERRACKLYGPETNIPRELMLHEVHHT

SEQ ID NO: 87141 - protein, 483 aa, Homo sapiens
MPVPPPPPPPLPPPPPPLGAPPPPPPSAPPVSTDTSSLRRADPKGRSALLADIQQGTRLRKVTQINDRSAPQIESSKGTNKEGGGSANTRGASTPPTLGDLFAGGFPVLRPAGQRDVAGGKTGQGPGSRAPSPRLPNKTISGPLIPPASPRLGNTSEAHGAARTAPPRPNVPAPPPPTPPPPPPPLPPPLPSSSPIKTPLVSPPGPLTKGNLPVVAPPVPCAPPPPPPPPPPTPPPLPPASVLSDKAVKPQLAPLHLPPIPPPLPLLPPCGYPGLKAEPASPAQDAQEPPAPPPPLPPYASCSPRASLPAPPLPGVNSSSETPPPLPPKSPSFQAPPQKAGAQALPAPPAPPGSQPFLQKKRHGRPGAGGGKLNPPPAPPARSPTTELSSKSQQATAWTPTQQPGGQLRNGSLHIIDDFESKFTFHSVEDFPPPDEYKPCQKIYPSKIPRSRTPGPWLQAEAVGQSSDDIKGRNSQVTQASCL

SEQ ID NO: 87142 - protein, 153 aa, Homo sapiens
ALLFHKMMFETIPMFSGGTCNPQFVVCQLKVKIYSSNSGPTRREDKFMYFEFPQPLPVCGDIKVEFFHKQNKMLKKDKMFHFWVNTFFIPGPEETSEKVENGSLCDQEIDSICSIERADNDKEYLVLTLTKNDLDKANKDKANRYFSPNFKVS

SEQ ID NO: 87143 - protein, 72 aa, Homo sapiens
MTGDTDKYLGPQDLKELGDDSLPAEGYMGFSLGARSASLRSFSSDRSYTLNRSSYARDSMMIEELLVPSKEQ

SEQ ID NO: 87144 - protein, 220 aa, Homo sapiens
MAQVLRGTVTDFPGFDERADAETLRKAMKGLEYGSSLEDDVVGDTSGYYQRMLVVLLQANRDPDAGIDEAQVEQDAQALFQAGELKWGTDEEKFITIFGTRSVSHLRKVFDKYMTISGFQIEETIDRETSGNLEQLLLAVVKSIRSIPAYLAETLYYAMKGAGTDDHTLIRVMVSRSEIDLFNIRKEFRKNFATSLYSMIKGDTSGDYKKALLLLCGEDD

SEQ ID NO: 87145 - protein, 86 aa, Homo sapiens
MGSNLSPQLCLMPFILGLLSGVRVSFWLLPVPCADTYLQIYGVLEHPEDSRPKDCQEGRVQSNPLSKTTRLRERGILAPVSLLQCE

SEQ ID NO: 87146 - protein, 1447 aa, Homo sapiens
  MOD_RES (1)..(1): Any amino acid
XSRGSIYHSVEGPLTGHGESIQDSRTLPFKTHPSQASFVSALGGEDDVIEHLYIVEGEKTVESEQITPQQPVMNCYQTYLTQFQVINWSVKHPTNKRTSKSSLHRPLDLDTPTSEESSSSFEQLSVPTFKVIKQGLTANSLLDRGMQLSGSTSNTPYTPLEKKLADNTDDETLTEEWTLDQPVSQTRTTAIVEVKGTVDIVLTPLVAEALDRYIEAMVHCASTRHPAAIVDDLHAKVLREAVQNSKTTFSENLSSKQDIRGTKTEQSTIGTTNQGQAQTNLTMKQDNVTIKGLQTNVSIPKVNLCLLQASVEESPTTAPSRSVTHVSLVALCFDRIATQVRMNRGVVEETSNNAEPGRTSNFDRYVHATKMQPQSSGSLRSNAGAEKGKEIAAKLNIHRVHGQLRGLDTTDIGTCAITAIPFEKSKVLFTLEELDEFTFVDETDQQAVPDVTRIGPSQEKWGWIMFECGLENLTIKGGRQSGAVLYNSFGIMGKASDTERGGVLTSNNSSDSPTGSGYNTDVSDDNLPCDRTSPSSDLNGNSVSDEQDEGVESDDLKKDLPLMPPPPDSCSMKLTIKEIWFSFAAPTNVRSHTHAFSRQLNLLSTATPAVGAWLVPIDQLKSSLNKLETEGTLRICAVMGCIMTEALENKSVHFPLRSKYNRLTKVARFLQENPSCLLCNILHHYLHQANYSIIDDATMSDGLPALVTLKKGLVALARQWMKFIVVTPAFKGVSLHRPAQPLKPQIAMDHEHEDGLGLDNGGGLQSDTSADGAEFEFDAATVSEHTMLLEGTANRPPPGSSGPVTGAEIMRKLSKTHTHSDSALKIKGIHPYHSLSYTSGDTATDSPVHVGRAGMPVKDSPRKESLLSYLTGSFPSLHNLLEGTPQRSSAAVKSSSLTRTGNTVATDMLSEHPLLSEPSSVSFYNWMSNAVGNRGSVLQESPVTKSGHNSLPTGVAPNLPTIPSASDFNTVLSSDQNTLDGTHSQHSTSQDDVAGVEEANQGFPAVQLADAQVVFKPLLSHTGIQSQDTMPFCYRMYFGEHLSFSGTLDCLRADIVDSDTAKERKGKRARRQGHVNLPPLEFKPALMLGTFSISAVVMEKSVCTPQNSTSALSFHDLSKRYYNTFHCNFTISCQSISQHVDMALVRLIHQFSTMIDDIKATQTDIKLSRYTAGSASPTPTFKTRKHRDFRSSDFSRSSRGSLNGGNRVNNAKNKRTNNENNKKESRNKNSLGRSERRTSKVSRKGSKDVVDHMTIHMDDSDSITVSEQSEPSAECWQNMYKLLNFYSLISDPTGILEKSSETFGPAGVRSPTEPTCKVVFENEQDNSSLTKTQRKRSLVTSEPQHVTLIVFGIGMVNRTHLEADIGGLTMESELKRIHGSFTLKEKMKDVLHQKMTETCATAHIGGVNIVLLEGITPNIQLEDFPTSPTSTAKQEFLYVILFFFMAL

SEQ ID NO: 87147 - protein, 258 aa, Homo sapiens
MVSDEDELNLLVIVVDANPIWWGKQALKESQFTLSKCIDAVMVLGNSHLFMNRSNKLAVIASHIQESRFLYPGKNGRLGDFFGDPGNPPEFNPSGSKDGKYELLTSANEVIVEEIKDLMTKSDIKGQHTETLLAGSLAKALCYIHRMNKEVKDNQEMKSRILACDITGGLYLKVPQMPSLLQYLLWVFLPDQDQRSQLILPPPVHVDYRAACFCHRNLIEIGYVCSVCLSIFCNFSPICTTCETAFKISLPPVLKAKK

SEQ ID NO: 87148 - protein, 122 aa, Homo sapiens
MAAMAPALTDAAAEAHHIRFKLAPPSSTLSPGSAENNGNANILIAANGTKRKAIAAEDPSLDFRNNPTKEDLGKLQPLVASYLCSDVTSVPSKESLKLQGVFSKQTVLKSHPLLSQSYELRA

SEQ ID NO: 87149 - protein, 59 aa, Homo sapiens
ERLTRLLDLKNNRIKQLEERAPYPLTDRQLSFPSRTAQRCCLWHPTVVVMFGNTASPWR

SEQ ID NO: 87150 - protein, 118 aa, Homo sapiens
MQLKIMPKKKRLSAGRVPLILFLCQMISALEVPLDPKLLEDLVQPPTITQQSPKDYIIDPRENIVIQCEAKGKPPPSFSWTRNGTHFDIDKDPLVTMKPGTGTLIINIMSEGKAETYE

SEQ ID NO: 87151 - protein, 183 aa, Homo sapiens
MQKPPLLLRRPLPPKFTKLSLHEKKTHTETLVTENGNIESVPKQIPPRPPEGLTKTEKIESEIHVVRGEGFKTVAATRYETITAMTNLAIVNCQVYGRNALNLKGFFILNCPDLTPLAFQLIYLNLSFNDLHYFPTEILCLKNLQILKLRNNPIKEIPSEIQQLEFLRIFTIAFNLITVLPIG

SEQ ID NO: 87152 - protein, 145 aa, Homo sapiens
GRPPRLRASLGAAGHRPSRRLGPRCRSCSPTPSPTWPSSWPPPSSSSWQLWERPSCPTTRAAPLMASSSRKAWISSARLSSSCACWPLAGIRGGIFTLIFARLNIRLRNCLFRSLVSQETSFFDENRTASHGSSPWSPSWASPSS

SEQ ID NO: 87153 - protein, 69 aa, Homo sapiens
MILCSRLCLPQSASLRMEPAPGLVEQPKCLEAGSPEPEPAPWQALPVLSEKQSGDVELVLAYAAPVLDK

SEQ ID NO: 87154 - protein, 270 aa, Homo sapiens
MAMLVLVPGRVMRPLGGQLWRFLPRGLEFWGPAEGTARVLLRQFCARQAEAWRASGRPGYCLGTRPLSTARPPPPWSQKGPGDSTRPSKPGPVSWKSLAITFAIGGALLAGMKHVKKEKAEKLEKERQRHIGKPLLGGPFSLTTHTGERKTDKDYLDSITTLPDLTPLFISIDPERDTKEAIANYVKEFSPKLVGLTGTREEVDQVARAYRVYYSPGPKDEDEDYIVDHTIIMYLIGPDGEFLDYFGQNKRKGEIAASIATHMRPYRKKS

SEQ ID NO: 87155 - protein, 83 aa, Homo sapiens
MASHEVDNAELGSASAHGTPGSEAGPEELNTSVYQPIDGSPDYQKAKLQVLGSIQREEDEDEDLYDNLLPLNEYSVVQEPCLL

SEQ ID NO: 87156 - protein, 219 aa, Homo sapiens
MPSGFQQIGSEDGEPPQQRVTGTLVLAVFSAVLGSLQFGYNIGVINAPQKVIEQSYNETWLGRQGPEGPSSIPPGTLTTLWALSVAIFSVGGMISSFLIGIISQWLGRKRAMLVNNVLAVLGGSLMGLANAAASYEMLILGRFLIGAYSGAGLGVPPGHCQPVATAPGPHSATCPPAAGPAALLSREPPLPLHHPESRGACQKESEAPDRLGRCFWSAG

SEQ ID NO: 87157 - protein, 20 aa, Homo sapiens
  MOD_RES (1)..(1): Any amino acid
XEGQGFSFIFGKGTRLLVKP

SEQ ID NO: 87158 - protein, 185 aa, Homo sapiens
WGTVFLITTTLVALLKKENEVSVVKEETQGITDTYKLLFAIIKMPAVLTFCLLILTAKVTVYSMYVSIMAFNAKVSDPLIGGTYMTLLNTVSNLGGNWPSTVALWLVDPLTVKECVGASNQNCRTPDAVELCKKLGGSCVTALDGYYVESIICVFIGFGWWFFLGPKFKKLQDEGSSSWKCKRNN

SEQ ID NO: 87159 - protein, 116 aa, Homo sapiens
MAQSKLDCRSPVGLDCCNCCLDLAHRSGLQRGSSGENNNPGSPTVSNFRQLQEKLVFENLNTDKLNSIMRQDSLEPVLRDPCYLINEGICNRNIDQTMLSILLFFHSASGASVVAI

SEQ ID NO: 87160 - protein, 59 aa, Homo sapiens
MTSIKEQAAISRLLSFLQEWDNAGKVARSHILDKFIETNQGKTAPELEQEFSQGASLFL

SEQ ID NO: 87161 - protein, 454 aa, Homo sapiens
  MOD_RES (1)..(1): Any amino acid
XGEIASTTPPSRAWTPTQEGPGDMGRPWVAEVVSQGAGIGIQGTITSSTASGDDEETTTTTTIITTTITTVQTPGPCSWNFSGPEGSLDSPTDLSSPTDVGLDCFFYISVYPGYGVEIKVQNISLREGETVTVEGLGGPDPLPLANQSFLLRGQVIRSPTHQAALRFQSLPPPAGPGTFHFHYQAYLLSCHFPRRPAYGDVTVTSLHPGGSARFHCATGYQLKGARHLTCLNATQPFWDSKEPVCIAACGGVIRNATTGRIVSPGFPGNYSNNLTCHWLLEAPEGQRLHLHFEKVSLAEDDDRLIIRNGDNVEAPPVYDSYEVEYLPIEGLLSSGKHFFVELSTDSSGAAAGMALRYEAAHPPTLWVPLWSSAATLATPWSRAPSSSSVLTPTTPSGMRQSQPAEPCAAGRSQTRLAWYSLPTGQSPTVVGRIVSGVCMWKRTSASCWTSECCA

SEQ ID NO: 87162 - protein, 97 aa, Homo sapiens
MGNPENIEDAYVAVIRPKNTASLNSREYRAKSYEILLHEVPIEGQKKKRKKVLLETKLQGNSEITQGILDYVVETTKPISPANQGIRGKRVVLMKKF

SEQ ID NO: 87163 - protein, 497 aa, Homo sapiens
MVKLDIHTLAHHLKQERLYVNSEKQLIQRLNADVLKTAEKLYRTAWIAKQQRINLDRLIITSAEASPAECCQHAKILEDTQFVDGYKQLGFQETAYGEFLSRLRENPRLIASSLVAGEKLNQENTQSVIYTVFTSLYGNCIMQEDESYLLQVLRYLIEFELKESDNPRRLLRRGTCAFSILFKLFSEGLFSAKLFLTATLHEPIMQLLVEDEDHLETDPNKLIERFSPSQQEKLFGEKGSDRFRQKVQEMVESNEAKLVALVNKFIGYLKQNTYCFPHSLRWIVSQMYKTLSCVDRLEVGEVRAMCTDLLLACFICPAVVNPEQYGIISDAPINEVARFNLMQVGRLLQQLAMTGSEEGDPRTKSSLGKFDKSCVAAFLDVVIGGRAVETPPLSSVNLLEGLSRTVVYITYSQLITLVNFMKSVMSGDQLREDRMALDNLLANLPPAKPGKSSSLEMTPYNTPQLSPATTPANKKNRLPIGKENFSYWSFLLNLIFH

SEQ ID NO: 87164 - protein, 68 aa, Homo sapiens
MAASVVCRAATAGAQVLLRARRSVRWWRERGASGQGFGKRTAGPAADASLAEYGNLRSGAPVRAGDAG

SEQ ID NO: 87165 - protein, 226 aa, Homo sapiens
MTPLCPRPALCYHFLTSLLRSAMQNARGARQRAEAAVLSGPGPPLGRAAQHGIPRPLSSAGRLSQGCRGASTVGAAGWKGELPKAGGSPAPGPETPAISPSKRARPAEVGGMQLRFARLSEHATAPTRGSARAAGYDLYSAYDYTIPPMEKAVVKTDIQIALPSGCYGRVAPRSGLAAKHFIDVGAGVIDEDYRGNVGVVLFNFGKEKFEGYGECVSNVSNKLFFL

SEQ ID NO: 87166 - protein, 215 aa, Homo sapiens
MAAEIHSRPQSSRPVLLSKIEGHQDAVTAALLIPKEDGVITASEDRTIRVWLKRDSGQYWPSIYHTMASHQNRVSAIIFSLATEWVISTGHDKCVSWMCTRSGNMLGRHFFTSWASCLQYDFDTQYAFVGDYSGQITLLKLEQNTCSVITTLKGHEGSVACLWWDPIQRLLFSGASDNSIIMWDIGGRKGRTLLLQGHHDKVQSLCYLQLTRQLV

SEQ ID NO: 87167 - protein, 795 aa, Homo sapiens
MDQREILQKFLDEAQSKKITKEEFANEFLKLKRQSTKYKADKTYPTTVAEKPKNIKKNRYKDILPYDYSRVELSLITSDEDSSYINANFIKGVYGPKAYIATQGPLSTTLLDFWRMIWEYSVLIIVMACMEYEMGKKKCERYWAEPGEMQLEFGPFSVSCEAEKRKSDYIIRTLKVKFNSETRTIYQFHYKNWPDHDVPSSIDPILELIWDVRCYQEDDSVPICIHCSAGCGRTGVICAIDYTWMLLKDGIIPENFSVFSLIREMRTQRPSLVQTQEQYELVYNAVLELFKRQMDVIRDKHSGTESQAKHCIPEKNHTLQADSYSPNLPKSTTKAAKMMNQQRTKMEIKESSSFDFRTSEISAKEELVLHPAKSSTSFDFLELNYSFDKNADTTMKWQTKAFPIVGEPLQKHQSLDLGSLLFEGCSNSKPVNAAGRYFNSKVPITRTKSTPFELIQQRETKEVDSKENFSYLESQPHDSCFVEMQAQKVMHVSSAELNYSLPYDSKHQIRNASNVKHHDSSALGVYSYIPLVENPYFSSWPPSGTSSKMSLDLPEKQDGTVFPSSLLPTSSTSLFSYYNSHDSLSLNSPTNISSLLNQESAVLATAPRIDDEIPPPLPVWTPESFIVVEEAGEFSPNVPKSLSSAVKVKIGTSLEWGGTSEPKKFDDSVILRPSKSVKLRSPKSELHQDRSSPPPPLPERTLESFFLADEDCMQAQSIETYSTSYPDTMENSTSSKQTLKTPGKSFTRSKSLKILRNMKKSICNSCPPNKPAESVQSNNSSSFLNFGMCVILLKS

SEQ ID NO: 87168 - protein, 173 aa, Homo sapiens
MLCVIYHLDNPVGKMSSSPLSKKRRVSGPDPKPGSNCSPAQSVLSEVPSVPTNGMAKNGSEADIDEGLYSRQLYVLGHEAMKRLQTSSVLVSGLRGLGVEIAKNIILGGVKAVTLHDQGTAQWADLSSQFYLREEDIGKNRAEVSQPRLAELNSYVPVTAYTGPLVEDFLSGF

SEQ ID NO: 87169 - protein, 155 aa, Homo sapiens
MHNFEEELTCPICYSIFEDPRVLPCSHTFCRNCLENILQASGNFYIWRPLRIPLKCPNCRSITEIAPTGIESLPVNFALRAIIEKYQQEDHPDIVTCPEHYRQPLNVYCLLDKKLVCGHCLTIGQHHGHPIDDLQSAYLKEKDTPQKLLEQLTDT

SEQ ID NO: 87170 - protein, 103 aa, Homo sapiens
MAKGFYISKSLGILGILLGVAAVCTIIALSVVYSQEKNKNANSSPVASTTPSASATTNPASATTLDQSKAWNRYRLPNTLKPDSYRVTLRPYLTPNDRGLYVF

SEQ ID NO: 87171 - protein, 217 aa, Homo sapiens
  MOD_RES (1)..(1): Any amino acid
XYSVYASLFHSILNVDVFTLTFRQLERLVAEEAWVLTEELSPKMTLEVASGLFELYLTLADLQRFWDSIPGRDSRSLALAGIHAPFLPAVKLWFQVLRDQAKWRLQGAVDMDTLEPVDASSRHSSSAATAGLCLSHIQELWVRLAWPDPAQAQGLGTQLGQDVCEATLFYTELLRKKVDTQPGAAGEAVSEALCVVLNNVELVRKAAGQAHLCPSCL

SEQ ID NO: 87172 - protein, 308 aa, Homo sapiens
MKRLVCVLLVCSSAVAQLHKDPTLDHHWHLWKKTYGKQYKEKNEEAVRRLIWEKNLKFVMLHNLEHSMGMHSYDLGMNHLGDMTSEEVMSLMSSLRVPSQWQRNITYKSNPNRILPDSVDWREKGCVTEVKYQGSCGACWAFSAVGALEAQLKLKTGKLVSLSAQNLVDCSTEKYGNKGCNGGFMTTAFQYIIDNKGIDSDASYPYKAMDQKCQYDSKYRAATCSKYTELPYGREDVLKEAVANKGPVSVGVDARHPSFFLYRSDGVLLCCQAGVRWHDLSSLQPLPPGFKQFSCLSLLSSWDYRCLL

SEQ ID NO: 87173 - protein, 98 aa, Homo sapiens
MGLRTRRLGTRYRPAQKTDSLGDSGSHSGLHSTPEQTMAVQSQHHQQYIDVSHVFPEFPAPDLGSFLLQDGVTLHDVKALQLVYRRHCEATVDVVMNL

SEQ ID NO: 87174 - protein, 206 aa, Homo sapiens
MESNFNQEGVPRPSYVFSADPIARPSEINFDGIKLDLSHEFSLVAPNTEANSFESKDYLQVCLRIRPFTQSEKELESEGCVHILDSQTVVLKEPQCILGRLSEKSSGQMAQKFSFSKVFGPATTQKEFFQGCIMQPVKDLLKGQSRLIFTYGLTNSGKTYTFQGTEENIGILPRTLNVLFDSLQERLYTKMNLKPHRSREYLRLSS

SEQ ID NO: 87175 - protein, 86 aa, Homo sapiens
MWPPCGTLRTLALARSRGARACSGDGGVSYTQGQSPEPRTREYFYYVDHQGQLFLDDSKMKNFITCFKGNAVPPSPAPSFSLPGSP

SEQ ID NO: 87176 - protein, 141 aa, Homo sapiens
MHEHATPVTSAYGERHEELINLGSPDSHTISEGQKSSVTSKTTRKGKEKSSEKEKTAKEKQAPRFEPQASQARLHYLSGFIKKTSDAESPPISESQTKPKEEVETAARGVKEPNSKNSAGSESKEMTQTGSGSAVWKKWQL

SEQ ID NO: 87177 - protein, 112 aa, Homo sapiens
MLKEEQEVAMLGVPHNPAPPMSTVIHIRSETSVPDHVVWSLFNTLFMNTCCLGFIAFAYSVKSRDRKMVGDVTGAQAYASTAKCLNIWALILGIFMTILLIIIPVLVVQAQR

SEQ ID NO: 87178 - protein, 423 aa, Homo sapiens
MYDNLYLHGIEDSEAGSADSYTSRPSDSDVSLEEDREAIRQEREQQAAIQLERAKSKPVAFAVKTNVSYCGALDEDVPVPSTAISFDAKDFLHIKEKYNNDWWIGRLVKEGCEIGFIPSPLRLENIRIQQEQKRGRFHGGKSSGNSSSSLGEMVSGTFRATPTSTDGAHSSLRCCTVNASGGVSGAVTERLRAEVQSEIERIFELARSLQLVVLDADTINHPAQLIKTSLAPIIVHVKVSSPKVLQRLIKSRGKSQSKHLNVQLVAADKLAQCPPEMFDVILDENQLEDACEHLGEYLEAYWRATHTTSSTPMTPLLGRNLGSTALSPYPTAISGLQSQRMRHSNHSTENSPIERRSLMTSDENYHNERARKSRNRLSSSSQHSRDHYPLVEEDYPDSYQDTYKPHRNRGSPGGYSHDSRHRL

SEQ ID NO: 87179 - protein, 62 aa, Homo sapiens
MANEEDDPVVQEIDVYLAKSLAEKLYLFQMGKLKEHRRGRSVQQLKLGLWGQTGLRSNSITP

SEQ ID NO: 87180 - protein, 60 aa, Homo sapiens
MEQKENMIDKDVELSVVLPGDIIKSTTVHGRYAGVNEISGPPLLIPPLKVSVIYVLMFVL

SEQ ID NO: 87181 - protein, 185 aa, Homo sapiens
  MOD_RES (1)..(1): Any amino acid
XALSHDLDHRGVNNSYIQRSEHPLAQLYCHSIMEHHHFDQCLMILNSPGNQILSGLSIEEYKTTLKIIKQAILATDLALYIKRRGEFFELIRKNQFNLEDPHQKELFLAMLMTACDLSAITKPWPIQQRIAELVATEFFDQGDRERKELNIEPTDLMNREKKNKIPSMQVGFIDAICLQLYEVFI

SEQ ID NO: 87182 - protein, 102 aa, Homo sapiens
  MOD_RES (1)..(1): Any amino acid
XVLGRFWSGWRRGLGVRPVPEDAGFGTEARTSSDVEQATGSTSDRKTRRADVVLSAARAEPVPRAQGAGASGCPSIWEVSGRGDRKLGVQASICGGETAAWG

SEQ ID NO: 87183 - protein, 153 aa, Homo sapiens
  MOD_RES (1)..(1): Any amino acid
XQASLSISVSNSQIQENVDIATVYQIFPDEVLGSGQFGVVYGGKHRKTGRDVAVKVIDKLRFPTKQESQLRNEVAILQSLRHPGIVNLECMFETPEKVFVVMEKLHGDMLEMILSSEKGRLPERLTKFLITQISAFWALACPTPKPCAKPFTS

SEQ ID NO: 87184 - protein, 49 aa, Homo sapiens
TFSWASVTSKNLPPSGAVPVTGIPPHVVKVPASQSVRLVSKVTLNPEEW

SEQ ID NO: 87185 - protein, 122 aa, Homo sapiens
MREAVQEMKDHMVSPTAVAFLERNNREILAGKPAAQKSPSDLLDASAVSATSRYIEEQQATQQLIMDEQDQQLEMVSGSIQVLKHMSGRVGEELDEQGIMLDAFAQEMDHTQSRMDGVLRKL

SEQ ID NO: 87186 - protein, 406 aa, Homo sapiens
MCASVKYNIRGPALIPRMKTKHRIYYITLFSIVLLGLIATGMFQFWPHSIESSNDWNVEKRSIRDVPVVRLPADSPIPERGDLSCRMHTCFDVYRCGFNPKNKIKVYIYALKKYVDDFGVSVSNTISREYNELLMAISDSDYYTDDINRACLFVPSIDVLNQNTLRIKETAQAMAQLSRWDRGTNHLLFNMLPGGPPDYNTALDVPRDRALLAGGGFSTWTYRQGYDVSIPVYSPLSAEVDLPEKGPGPRQYFLLSSQVGLHPEYREDLEALQVKHGESVLVLDKCTNLSEGVLSVRKRCHKHQVFDYPQVLQEATFCVVLRGARLGQAVLSDVLQAGCVPVVIADSYILPFSEVLDWKRPGGSGKRTSSQLKPLPWPPCRLSMTGSIHMLPSPMKNGMTLLLCKL

SEQ ID NO: 87187 - protein, 242 aa, Homo sapiens
MGDTKEQRILNHVLQHAEPGNAQSVLEAIDTYCEQKEWAMNVGDKKGKIVDAVIQEHQPSVLLELGAYCGYSAVRMARLLSPGARLITIEINPDCAAITQRMVDFAGVKDKVTLVVGASQDIIPQLKKKYDVDTLDMVFLDHWKDRYLPDTLLLEVQWSGVFQSADVFCIPDDQIGLLSPLAQPEKSRSPGPSLMHSLAQTGRQPPCSRPRPLSSSRVALCSTSFQLTLLGHFFFFLNENTS

SEQ ID NO: 87188 - protein, 50 aa, Homo sapiens
LVDDDFQTIMSAIEEGKGIYNNIKNFVRFQLSTFCGSILLWMDPQLRALE

SEQ ID NO: 87189 - protein, 533 aa, Homo sapiens
MPWVEPKPRPGPEQKPKLTKPDSATGPQWYQESQESESEGKQPPPGPLAPPKSPEPSGPLASEQDAPLPEGDDAPPRPSMLDDAPRLPLELDDAPLPEEETPEPTAICRHRHRCHTDCLEGLLSRTFQWLGWQVGAHPWIFLLAPLMLTAALGTGFLYLPKDEEEDLEEHYTPVGSPAKAERRFVQGHFTTNDSYRFSASRRSTEANFVSLLVVSYSDSLLDPATFAEVSKLDGAVQDLRVAREKGSQIQYQQVCARYRALCVPPNPILYAWQVNKTLNLSSISFPAYNHGRHPLYLTGFFGGYILGGSLGMGQLLLRAKAMRLLYYLKTEDPEYDVQSKQWLTHLLDQFTNIKNILALKKIEVVHFTSLSRQLEFEATSVTVIPVFHLAYILIILFAVTSCFRFDCIRNKMCVAAFGVISAFLAVVSGFGLLLHIGVPFVIIVANSPFLILGVGVDDMFIMISAWHKTNLADDIRERMSNVYSKAAVSITITTITNILALYTGIMSSFRASFRQQMFLPQPKRKYCYSNYDA

SEQ ID NO: 87190 - protein, 353 aa, Homo sapiens
MVDYSVWDHIEVSDDEDETHPNIDTASLFRWRHQARVERMEQFQKEKEELDRGCRECKRKVAECQRKLKELEVAEGGKAELERLQAEAQQLRKEERSWEQKLEEMRKKEKSMPWNVDTLSKDGFSKAHAHAPATLMLMASSPPPPWMGWALRPRPARPRSRRSAALPQPTPPLTLPQSMVNTKPEKTEEDSEEVREQKHKTFVEKYEKQIKHFGMLRRWDDSQKYLSDNVHLVCEETANYLVIWCIDLEVEEKCALMEQVAHQTIVMQFILELAKSLKVDPRACFRQFFTKIKTADRQYMEGFNDELEAFKERVRGRAKLRIEKAMKEYEEEERKKRLGPGGLDPVEVYESLP

SEQ ID NO: 87191 - protein, 36 aa, Homo sapiens
MIREKNPDGFLSAAEMPLFKLYMVMSACFLAAGIFW

SEQ ID NO: 87192 - protein, 316 aa, Homo sapiens
VFLCDHRFAFADARAQLPSWVRPHVRVYDNFGHVIRDVAQFFRVAERTMPAPAPRATAPSVRGEDAVSEAKSPGPFFSTRKAKSLDLHVPSLKQRSSGSPAAGDPESSLCVEYEQEPVPARQRPRGLLAALEHSEQRAGSPGEEQAHSCSTLSLLSEKRPAEEPRGGRKKIRLVSHPEEPVAGAQTDRAKLFMVAVKQELSQANFATFTQALQDYKGSDDFAALAACLGPLFAEDPKKHNLLQGFYQFVRPHHKQQFEEVCIQLTGRGCGYRPEHSIPRRQRAQPVLDPTGNFPDALDQLCGSTSLHQEERRRIPS

SEQ ID NO: 87193 - protein, 140 aa, Homo sapiens
MPGGRRGPSRQQLSRSALPSLQTLVGGGCGNGTGLRNRNGSAIGLPVPPITALITPGPVRHCQIPDLPVDGSLLFEFLFFIYLLVALFIQYINIYKTVWWYPYNHPASCTSLNFHLIDYHLAAFITVMLARRLVWALISE

SEQ ID NO: 87194 - protein, 194 aa, Homo sapiens
  MOD_RES (1)..(1): Any amino acid
XNGVVHLIDKVISTITNNIQQIIEIEDTFETLRAAVAASGLNTMLEGNGQYTLLAPTNEAFEKIPSETLNRILGDPEALRDMLTINGKAIISNKDILATNGVIHYIDELLIPDSAKTLFELAAESDVSTAIDLFRQAGLGNHLSGSERLTLLAPLNSVFKDGTPPIDAHTRNLLRNHIIKDQLASKYLYHGQTL

SEQ ID NO: 87195 - protein, 71 aa, Homo sapiens
  MOD_RES (1)..(1): Any amino acid
XLEHLLEQRSQEGHSGQQVALLDQSRAEVMLGLRARGLTGCGGEAELQLQGYMDCWVKVTANHSIWRTSFW

SEQ ID NO: 87196 - protein, 635 aa, Homo sapiens
MESKPSRIPRRISVQPSSSLSARMMSGSRGSSLNDTYHSRDSSFRLDSEYQSTSASASASPFQSAWYSESEITQGARSRSQNQQRDHDSKRPKLSCTNCTTSAGRNVGNGLNTLSDVQDRVPSYSQGARPKENSMSTLQLNTSSTNHQLPSEHQTILSSRDSRNSLRSNFSSRESESSRSNTQPGFSYSSSRDEAPIISNSERVVSSQRPFQESSDNEGRRTTRRLLSRIASSMSSTFFSRRSSQDSLNTRSLNSENSYVSPRILTASQSRSNVPSASEVPDNRASEASQGFRFLRRRWGLSSLSHNHSSESDSENFNQESEGRNTGPWLSSSLRNRCTPLFSRRRREGRDESSRIPTSDTSSRSHIFRRESNEVVHLEAQNDPLGAAANRPQASAASSSATTGGSTSDSAQGGRNTGISGILPGSLFRFAVPPALGSNLTDNVMITVDIIPSGWNSADGKSDKTKSAPSRDPERLQKIKESLLLEDSEEEEGDLCRICQMAAASSSNLLIEPCKCTGSLQYVHQDCMKKWLQAKINSGSSLEAVTTCELCKEKLELNLEDFDIHELHRAHANEQAEYEFISSGLYLVVLLHLCEQSFSDMMGNTNEPSTRVRLQRMIPKKTETITGHLILPNFI

SEQ ID NO: 87197 - protein, 171 aa, Homo sapiens
MTSQSSVISNSCVTMERLSHMMERKAWCSQESALSEEEEDTTRPLETVTFKDVAVDLTQEEWEQMKPAQRNLYRDVMLENYSNLVTVGCQVTKPDVIFKLEQEEEPWVMEEEMFGRHCPEPRRGENCCASEVMAEMEFCPCCPGWSAMARSQLTATSASRVEVILLPQPPE

SEQ ID NO: 87198 - protein, 26 aa, Homo sapiens
MTTLPPLPMTRPKLTALARQKLPCSS

SEQ ID NO: 87199 - protein, 70 aa, Homo sapiens
MEDDQNWYKAELRGVEGFIPKNYIRVKPHPWYSGRISRQLAEEILMKRNHLGAFLIRESESSPGEFSVSV

SEQ ID NO: 87200 - protein, 103 aa, Homo sapiens
EDSDLGGDSGSGKAGAPSSERTASRVRELARLYSERIQQMQRAETRASANAPRRRPRVLAQPQPSPCLPQEQAEPGLLPAFGHVLESMGLHRAQGAPDAPFHM

SEQ ID NO: 87201 - protein, 49 aa, Homo sapiens
MASSTSLPAPGSRPKKPLGKMADWFRQTLLKKPKKRPGSLTYLTLHYLS

SEQ ID NO: 87202 - protein, 513 aa, Homo sapiens
MPGCPVQMLKPLWKAAVAPTWPCSMPPRRPWDREAGTLQVLGALAVLWLGSVALICLLWQVPRPPTWGQVQPKDVPRSWEHGSSPAWEPLEAEARQQRDSCQLVLVESIPQDLPSAAGSPSAQPLGQAWLQLLDTAQESVHVASYYWSLTGPDIGVNDSSSQLGEALLQKLQQLLGRNISLAVATSSPTLARTSTDLQVLAARGAHVRQVPMGRLTRGVLHSKFWVVDGRHIYMGSANMDWRSLTQVKELGAVIYNCSHLAQDLEKTFQTYWVLGVPKAVLPKTWPQNFSSHFNRFQPFHGLFDGVPTTAYFSASPPALCPQGRTRDLEALLAVMGSAQEFIYASVMEYFPTTRFSHPPRYWPVLDNALRAAAFGKGVRVRLLVGCGLNTDPTMFPYLRSLQALSNPAANVSVDVKVFIVPVGNHSNIPFSRVNHSKFMVTEKAAYIGTSNWSEDYFSSTAGVGLVVTQSPGAQPAGATVQEQLRQLFERDWSSRYAVGLDGQAPGQDCVWQG

SEQ ID NO: 87203 - protein, 159 aa, Homo sapiens
MEERTITIEIPEVLKKQLEDDCYYINRRKRLVKLPCQTNIITILESYVKHFAINAAFSANERPRHHHVMPHANMNVHYIPAEKNVDLCKEMVDGLRITFDYTLPLVLLYPYEQAQYKKVTSSKFFLPIKESATSTNSCSNQNCLQTLPSVPCQGNIAPT

SEQ ID NO: 87204 - protein, 1191 aa, Homo sapiens
MSAADEVDGLGVARPHYGSVLDNERLTAEEMDERRRQNVAYEYLCHLEEAKRWMEACLGEDLPPTTELEEGLRNGVYLAKLGNFFSPKVVSLKKIYDREQTRYKATGLHFRHTDNVIQWLNAMDEIGLPKIFYPETTDIYDRKNMPRCIYCIHALSLYLFKLGLAPQIQDLYGKVDFTEEEINNMKTELEKYGIQMPAFSKIGGILANELSVDEAALHAAVIAINEAIDRRIPADTFAALKNPNAMLVNLEEPLASTYQDILYQAKQDKMTNAKNRTENSERERDVYEELLTQAEIQGNINKVNTFSALANIDLALEQGDALALFRALQSPALGLRGLQQQNSDWYLKQLLSDKQQKRQSGQTDPLQKEELQSGVDAANSAAQQYQRRLAAVALINAAIQKGVAEKTVLELMNPEAQLPQVYPFAADLYQKELATLQRQSPEHNLTHPELSVAVEMLSSVALINRALESGDVNTVWKQLSSSVTGLTNIEEENCQRYLDELMKLKAQAHAENNEFITWNDIQACVDHVNLVVQEEHERILAIGLINEALDEGDAQKTLQALQIPAAKLEGVLAEVAQHYQDTLIRAKREKAQEIQDESAVLWLDEIQGGIWQSNKDTQEAQKFALGIFAINEAVESGDVGKTLSALRSPDVGLYGVIPECGETYHSDLAEAKKKKLAVGDNNSKWVKHWVKGGYYYYHNLETQEGGWDEPPNFVQNSMQLSREEIQSSISGVTAAYNREQLWLANEGLITRLQARCRGYLVRQEFRSRMNFLKKQIPAITCIQSQWRGYKQKKAYQDRLAYLRSHKDEVVKIQSLARMHQARKRYRDRLQYFRDHINDIIKIQAFIRANKARDDYKTLINAEDPPMVVVRKFVHLLDQSDQDFQEELDLMKMREEVITLIRSNQQLENDLNLMDIKIGLLVKNKITLQDVVSHSKKLTKKNKEQLSDMMMINKQKGGLKALSKEKREKLEAYQHLFYLLQTNPTYLAKLIFQMPQNKSTKFMDSVIFTLYNYASNQREEYLLLRLFKTALQEEIKSKVDQIQEIVTGNPTVIKMVVSFNRGARGQNALRQILAPVVKEIMDDKSLNIKTDPVDIYKSWVNQMESQTGEASKLPYDVTPEQALAHEEVKTRLDSSIRNMRAVTDKFLSAIVSSVDKIPYGMRFIAKVLKDSLHEKFPDAGEDELLKFCAFLQ

SEQ ID NO: 87205 - protein, 2735 aa, Homo sapiens
MSEPGGGGGEDGSAGLEVSAVQNVADVSVLQKHLRKLVPLLLEDGGEAPAALEAALEEKSALEQMRKFLSDPQVHTVLVERSTLKEDVGDEGEEEKEFISYNINIDIHYGVKSNSLAFIKRTPVIDADKPVSSQLRVLTLSEDSPYETLHSFISNAVAPFFKSYIRESGKADRDGDKMAPSVEKKIAELEMGLLHLQQNIEIPEISLPIHPMITNVAKQCYERGEKPKVTDFGDKVEDPTFLNQLQSGVNRWIREIQKVTKLDRDPASGTALQEISFWLNLERALYRIQEKRESPEVLLTLDILKHGKRFHATVSFDTDTGLKQALETVNDYNPLMKDFPLNDLLSATELDKIRQALVAIFTHLRKIRNTKYPIQRALRLVEAISRDLSSQLLKVLGTRKLMHVAYEEFEKVMVACFEVFQTWDDEYEKLQVLLRDIVKRKREENLKMVWRINPAHRKLQARLDQMRKFRRQHEQLRAVIVRVLRPQVTAVAQQNQGEVPEPQDMKVAEVLFDAADANAIEEVNLAYENVKEVDGLDVSKEGTEAWEAAMKRYDERIDRVETRITARLRDQLGTAKNANEMFRIFSRFNALFVRPHIRGAIREYQTQLIQRVKDDIESLHDKFKVQYPQSQACKMSHVRDLPPVSGSIIWAKQIDRQLTAYMKRVEDVLGKGWENHVEGQKLKQDGDSFRMKLNTQEIFDDWARKVQQRNLGVSGRIFTIESTRVRGRTGNVLKLKVNFLPEIITLSKEVRNLKWLGFRVPLAIVNKAHQANQLYPFAISLIESVRTYERTCEKVEERNTISLLVAGLKKEVQALIAEGIALVWESYKLDPYVQRLAETVFNFQEKVDDLLIIEEKIDLEVRSLETCMYDHKTFSEILNRVQKAVDDLNLHSYSNLPIWVNKLDMEIERILGVRLQAGLRAWTQVLLGQAEDKAEVDMDTDAPQVSHKPGGEPKIKNVVHELRITNQVIYLNPPIEECRYKLYQEMFAWKMVVLSLPRIQSQRYQVGVHYELTEEEKFYRNALTRMPDGPVALEESYSAVMGIVSEVEQYVKVWLQYQCLWDMQAENIYNRLGEDLNKWQALLVQIRKARGTFDNAETKKEFGPVVIDYGKVQSKVNLKYDSWHKEVLSKFGQMLGSNMTEFHSQISKSRQELEQHSVDTASTSDAVTFITYVQSLKRKIKQFEKQVELYRNGQRLLEKQRFQFPPSWLYIDNIEGEWGAFNDIMRRKDSAIQQQVANLQMKIVQEDRAVESRTTDLLTDWEKTKPVTGNLRPEEALQALTIYEGKFGRLKDDREKCAKAKEALELTDTGLLSGSEERVQVALEELQDLKGVWSELSKVWEQIDQMKEQPWVSVQPRKLRQNLDALLNQLKSFPARLRQYASYEFVQRLLKGYMKINMLVIELKSEALKDRHWKQLMKRLHVNWVVSELTLGQIWDVDLQKNEAIVKDVLLVAQGEMALEEFLKQIREVWNTYELDLVNYQNKCRLIRGWDDLFNKVKEHINSVSAMKLSPYYKVFEEDALSWEDKLNRIMALFDVWIDVQRRWVYLEGIFTGSADIKHLLPVETQRFQSISTEFLALMKKVSKSPLVMDVLNIQGVQRSLERLADLLGKIQKALGEYLERERSSFPRFYFVGDEDLLEIIGNSKNVAKLQKHFKKMFAGVSSIILNEDNSVVLGISSREGEEVMFKTPVSITEHPKINEWLTLVEKEMRVTLAKLLAESVTEVEIFGKATSIDPNTYITWIDKYQAQLVVLSAQIAWSENVETALSSMGGGGDAAPLHSVLSNVEVTLNVLADSVLMEQPPLRRRKLEHLITELVHQRDVTRSLIKSKIDNAKSFEWLSQMRFYFDPKQTDVLQQLSIQMANAKFNYGFEYLGVQDKLVQTPLTDRCYLTMTQALEARLGGSPFGPAGTGKTESVKALGHQLGRFVLVFNCDETFDFQAMGRIFVGLCQVGAWGCFDEFNRLEERMLSAVSQQVQCIQEALREHSNPNYDKTSAPITCELLNKQVKVSPDMAIFITMNPGYAGRSNLPDNLKKLFRSLAMTKPDRQLIAQVMLYSQGFRTAEVLANKIVPFFKLCDEQLSSQSHYDFGLRALKSVLVSAGNVKRERIQKIKREKEERGEAVDEGEIAENLPEQEILIQSVCETMVPKLVAEDIPLLFSLLSDVFPGVQYHRGEMTALREELKKVCQEMYLTYGDGEEVGGMWVEKVLQLYQITQINHGLMMVGPSGSGKSMAWRVLLKALERLEGVEGVAHIIDPKAISKDHLYGTLDPNTREWTDGLFTHVLRKIIDSVRGELQKRQWIVFDGDVDPEWVENLNSVLDDNKLLTLPNGERLSLPPNVRIMFEVQDLKYATLATVSRCGMVWFSEDVLSTDMIFNNFLARLRSIPLDEGEDEAQRRRKGKEDEGEEAASPMLQIQRDAATIMQPYFTSNGLVTKALEHAFQLEHIMDLTRLRCLGSLFSMLHQACRNVAQYNANHPDFPMQIEQLERYIQRYLVYAILWSLSGDSRLKMRAELGEYIRRITTVPLPTAPNIPIIDYEVSISGEWSPWQAKVPQIEVETHKVAAPDVVVPTLDTVRHEALLYTWLAEHKPLVLCGPPGSGKTMTLFSALRALPDMEVVGLNFSSATTPELLLKTFDHYCEYRRTPNGVVLAPVQLGKWLVLFCDEINLPDMDKYGTQRVISFIRQMVEHGGFYRTSDQTWVKLERIQFVGACNPPTDPGRKPLSHRSTAPSTAPC

SEQ ID NO: 87206 - protein, 109 aa, Homo sapiens
QKKLDETTRLLRELQEAQNERLSTRPPPNMICLLGPSYREMHLAEQVTNNLKELAQQVTPGDIVSTYGVRKAMGISIPSPVMENNFVDLTEDTEEPKKTDVAECGPGGS

SEQ ID NO: 87207 - protein, 145 aa, Homo sapiens
MANINLKEITLIVGVVTACYWNSLFCGFVFDDVSAILDNKDLHPSTPLKTLFQNDFWGTPMSEVTGVVGRAELLSSIFFLAAFLSYTRSKGPDNSIIWTPIALTVFLVAVATLCKEQGITVVGICCVYEVFIAQGYTLPLLCTTA

SEQ ID NO: 87208 - protein, 229 aa, Homo sapiens
MACSPDAVVSPSSAFLRSGSVYEPLKSINLPRPDNETLWDKLDHYYRIVKSTLLLYQSPTTGLFPTKTCGGDQKAKIQDSLYCAAGAWALALAYRRIDDDKGRTHELEHSAIKCMRGILYCYMRQADKVQQFKQDPRPTTCLHSVFNVHTGDELLSYEEYGHLQINAVSLYLLYLVEMISSGLQIIYNTDEVSFIQNLVFCVERVYRVPDFGVWERGSKYNNGSTELHS

SEQ ID NO: 87209 - protein, 121 aa, Homo sapiens
MSFIFEWIYNGFSSVLQFLGLYKKSGKLVFLGLDNAGKTTLLHMLKDDRLGQHVPTLHPTSEELTIAGMTFTTFDLGGHEQARRVWKNYLPAINGIVFLVDCADHSRLVESKVELNVCFVL

SEQ ID NO: 87210 - protein, 145 aa, Homo sapiens
MWAQQGTTPGTPKLRHTCEQGDGVGPYGWEFHDGLSFGRQHIQDGALRLTTEFVKRPGGQHGGDWSWRVTVEPQDSGTSALPLVSLFFYVVTDGKEVLLPEVGAKGQLKFISGHTSELGDFRFTLLPPTSPGDTAPKYGSYNVFW

SEQ ID NO: 87211 - protein, 567 aa, Homo sapiens
MGSQGRSGPPGNGGPGEGEGGEARKLQEGRVARGKRRKGKGKGKARAGQGGRGSGAEGKPGPQTAKEAAGPGADAGARACPREEAEGGRSVEEGARGIVKGVEGSAGAGKEAQGREYGKKEEWRVRARRREGARPGRAQGRGGQAWADIAGTGVAMAAAAGEEEEEEEAARESAARPAAGPALWRLPEELLLLICSYLDMRALGRLAQVCRWLRRFTSCDLLWRRIARASLNSGFTRLGTDLMTSVPVKERVKVSQNWRLGRCREGILLKWRCSQMPWMQLEDDSLYISQANFILAYQFRPDGASLNRRPLGVFAGHDEDVCHFVLANSHIVSAGGDGKIGIHKIHSTFTVKYSAHEQEVNCVDCKGGIIVSGSRDRTAKVWPLASGRLGQCLHTIQTEDRVWSIAISPLLSSFVTGTACCGHFSPLRIWDLNSGQLMTHLGSDFPPGAGVLDVMYESPFTLLSCGYDTYVRYWDLRTSVRKCVMEWEEPHDSTLYCLQTDGNHLLATGSSYYGVVRLWDRRQRACLHAFPLTSTPLSSPVYCLRLTTKHLYAALSYNLHVLDFQNP

SEQ ID NO: 87212 - protein, 66 aa, Homo sapiens
MLNKAEVGHGYMDRPCLNPADPDCPATAPNKNSTKPLDMALVLNGGCHGLSRKYMHWQEELIVGGT

SEQ ID NO: 87213 - protein, 128 aa, Homo sapiens
MVPPPPGEESQTVILPPGWQSYLSPQGRRYYVNTTTNETTWERPSSSPGIPASPGSHRSSLPPTVNGYHASGTPAHPPETAHMSVRKSTGDSQNLGSSSPSKKQSKENTITINCVTFPHPDTMPEQQL

SEQ ID NO: 87214 - protein, 107 aa, Homo sapiens
MELSQMSELMGLSVLLGLLALMATAAVARGWLRAGEERSGRPACQKANGFPPDKSSGSKKQKQYQRIRKEKPQQHNFTHRLLAAALKMIAPSASGAPRTSCSESTAA

SEQ ID NO: 87215 - protein, 147 aa, Homo sapiens
MHGNEAVGRELLIFLAQYLCNEYQKGNETIVNLIHSTRIHIMPSLNPDGFEKAASQPGELKDWFVGRSNAQGIDLNRNFPDLDRIVYVNEKEGGPNNHLLKNMKKIVDQNTKLAPETKAVIHWIMDIPFVLSANLHGGDLVANYPYD

SEQ ID NO: 87216 - protein, 224 aa, Homo sapiens
MAAAALGSSSGSASPAVAELCQNTPETFLEASKLLLTYADNILRNPNDEKYRSIRIGNTAFSTRLLPVRGAVECLFEMGFEEGETHLIFPKKASVEQLQKIRDLIAIERSSRLDGSNKSHKVKSSQQPAASTQLPTTPSSNPSGLNQHTRNRQGQSSDPPSASTVAADSAILEVLQSNIQHVLVYENPALQEKALACIPVQELKRKSQEKLSRARKLDKEIPWS

SEQ ID NO: 87217 - protein, 141 aa, Homo sapiens
MAGCTRKLTHLRKRIHRPRRRTTRRWKRWFKFRKRKGEKRPRPNHKAVARRAKLKFSTSGNGIVLPPKPKSKVKWCHFSTLPKPKPQLSRSFEKGDDFSGKKFCILTAIKPTNLEKEKLRFFKSDYTYNPQFEYANPALPS

SEQ ID NO: 87218 - protein, 80 aa, Homo sapiens
MLREEAAQKRKGKEPGMALPQGRLTFRDVAIEFSLAEWKCLNPSQRALYREVMLENYRNLEAVETGFHCVSQDGLNLLTS

SEQ ID NO: 87219 - protein, 175 aa, Homo sapiens
  MOD_RES (1)..(1): Any amino acid
XSDLPPKCMQEIPQEQIKEIKKEQLSGSPWILLRENEVSTLYKGEYHRAPVAIKVFKKLQAGSIAIVRQTFNKEIKTMKKFESPNILRIFGICIDETVTPPQFSIVMEYCELGTLRELLDREKDLTLGKRMVLVLGAARGLYRLHHSEAPELHGKIRSSNFLVTQGYQVKIWVPG

SEQ ID NO: 87220 - protein, 106 aa, Homo sapiens
MVDLTQVFANPEDCVAFGKGENAKKYLRTDDRVERVRRAHLNDLENIIPFLGIGLLYSLSGPDPSTAILHFRLFVGARIYHTIAYLTPLPQPNRALSFFVGYGVTL

SEQ ID NO: 87221 - protein, 224 aa, Homo sapiens
MSFVEDVTIGEGESIPPDTQFVKTWRIQNSGAEAWPPGVCLKYVGGDQFGHVNMVMVRSLEPQEIADVSVQMCSPSRAGMYQGQWRMCTATGLYYGDVIWVILSVEVGGLLGVTQQLSSFETEFNTQPHRKVEGNFNPFASPQKNRQSDENNLKDPGGSEFDSISKNTWAPAPDTWAPAPDQTEQDQNRLSQNSVNLSPSSHANNLSVVTYSKGLHGPYPFGQS

SEQ ID NO: 87222 - protein, 47 aa, Homo sapiens
MANVADTKLYDILGVPPGASENELKKAYRKLAKEYHPDKNPNAGDKN

SEQ ID NO: 87223 - protein, 76 aa, Homo sapiens
  MOD_RES (1)..(1): Any amino acid
XQVEQVLLAYSRCIQACGQERGQVTGALLLSVVGGKMSEGINFSDNLGRSAELQEKMAYLDQTLAGPSGTRRILPA

SEQ ID NO: 87224 - protein, 113 aa, Homo sapiens
MAVLPGPLQLLGVLLTISLSSIRLIQAGAYYGIKPLPPQIPPQMPPQIPQYQPLGQQVPHMPLAKDGLAMGKEMPHLQYGKEYPHLPQYMKEIQPAPRMGKEAVPKKGKEIPL

SEQ ID NO: 87225 - protein, 15 aa, Homo sapiens
  MOD_RES (1)..(1): Any amino acid
XLGRLTFCQLKGLAV

SEQ ID NO: 87226 - protein, 340 aa, Homo sapiens
MTQVNATSYKTIKLWKISERDKRPEGYNLKEEDGRYRDPTTVTTLRVPVFRPMDLMVEASPRRIFANAHTYHINSISINSDYETYLSADDLRINLWHLEITDRSFNIVDIKPANMEELTEVITAAEFHPNSCNTFVYSSSKGTIRLCDMRASALCDRHSKLFEEPEDPSNRSFFSEIISSISDVKFSHSGRYMMTRDYLSVKIWDLNMENRPVETYQVHEYLRSKLCSLYENDCIFDKFECCWNGSDSVVMTGSYNNFFRMFDRNTKRDITLEASRENNKPRTVLKPRKVCASGKRKKDEISVDSLDFNKKILHTAWHPKENIIAVATTNNLYIFQDKVN

SEQ ID NO: 87227 - protein, 191 aa, Homo sapiens
  MOD_RES (1)..(1): Any amino acid
XQTSAFSRIMKLCEEKCETDEIQKGGKCRNLSVRGITNLGNTCFFNAVMQNLAQTYTLTDLMNEIKESSTKLKIFPSSDSQLDPLVVELSRPGPLTSALFLFLHSMKETEKGPLSPKVLFNQLCQKAPRFKDFQQQDSQELLHYLLDAVRTEETKRIQASILKAFNNPTTKTADDETRKKVKDLHGERSIH

SEQ ID NO: 87228 - protein, 32 aa, Homo sapiens
MMAADIPRVTTPLSSLVQVPQEEDRQEEEVTT

SEQ ID NO: 87229 - protein, 1998 aa, Homo sapiens
MEQTVLVPPGPDSFNFFTRESLAAIERRIAEEKAKNPKPDKKDDDENGPKPNSDLEAGKNLPFIYGDIPPEMVSEPLEDLDPYYINKKTFIVLNKGKAIFRFSATSALYILTPFNPLRKIAIKILVHSLFSMLIMCTILTNCVFMTMSNPPDWTKNVEYTFTGIYTFESLIKIIARGFCLEDFTFLRDPWNWLDFTVITFAFVTEFVNLGNFSALRTFRVLRALKTISVIPGLKTIVGALIQSVKKLSDVMILTVFCLSVFALIGLQLFMGNLRNKCIQWPPTNASLEEHSIEKNITVNYNGTLINETVFEFDWKSYIQDSRYHYFLEGFLDALLCGNSSDAGQCPEGYMCVKAGRNPNYGYTSFDTFSWAFLSLFRLMTQDFWENLYQLTLRAAGKTYMIFFVLVIFLGSFYLINLILAVVAMAYEEQNQATLEEAEQKEAEFQQMIEQLKKQQEAAQQAATATASEHSREPSAAGRLSDSSSEASKLSSKSAKERRNRRKKRKQKEQSGGEEKDEDEFQKSESEDSIRRKGFRFSIEGNRLTYEKRYSSPHQSLLSIRGSLFSPRRNSRTSLFSFRGRAKDVGSENDFADDEHSTFEDNESRRDSLFVPRRHGERRNSNLSQTSRSSRMLAVFPANGKMHSTVDCNGVVSLVGGPSVPTSPVGQLLPEGTTTETEMRKRRSSSFHVSMDFLEDPSQRQRAMSIASILTNTVEELEESRQKCPPCWYKFSNIFLIWDCSPYWLKVKHVVNLVVMDPFVDLAITICIVLNTLFMAMEHYPMTDHFNNVLTVGNLVFTGIFTAEMFLKIIAMDPYYYFQEGWNIFDGFIVTLSLVELGLANVEGLSVLRSFRLLRVFKLAKSWPTLNMLIKIIGNSVGALGNLTLVLAIIVFIFAVVGMQLFGKSYKDCVCKIASDCQLPRWHMNDFFHSFLIVFRVLCGEWIETMWDCMEVAGQAMCLTVFMMVMVIGNLVVLNLFLALLLSSFSADNLAATDDDNEMNNLQIAVDRMHKGVAYVKRKIYEFIQQSFIRKQKILDEIKPLDDLNNKKDSCMSNHTAEIGKDLDYLKDVNGTTSGIGTGSSVEKYIIDESDYMSFINNPSLTVTVPIAVGESDFENLNTEDFSSESDLEESKEKLNESSSSSEGSTVDIGAPVEEQPVVEPEETLEPEACFTEGCVQRFKCCQINVEEGRGKQWWNLRRTCFRIVEHNWFETFIVFMILLSSGALAFEDIYIDQRKTIKTMLEYADKVFTYIFILEMLLKWVAYGYQTYFTNAWCWLDFLIVDVSLVSLTANALGYSELGAIKSLRTLRALRPLRALSRFEGMRVVVNALLGAIPSIMNVLLVCLIFWLIFSIMGVNLFAGKFYHCINTTTGDRFDIEDVNNHTDCLKLIERNETARWKNVKVNFDNVGFGYLSLLQVATFKGWMDIMYAAVDSRNVELQPKYEESLYMYLYFVIFIIFGSFFTLNLFIGVIIDNFNQQKKKFGGQDIFMTEEQKKYYNAMKKLGSKKPQKPIPRPGNKFQGMVFDFVTRQVFDISIMILICLNMVTMMVETDDQSEYVTTILSRINLVFIVLFTGECVLKLISLRHYYFTIGWNIFDFVVVILSIVGMFLAELIEKYFVSPTLFRVIRLARIGRILRLIKGAKGIRTLLFALMMSLPALFNIGLLLFLVMFIYAIFGMSNFAYVKREVGIDDMFNFETFGNSMICLFQITTSAGWDGLLAPILNSKPPDCDPNKVNPGSSVKGDCGNPSVGIFFFVSYIIISFLVVVNMYIAVILENFSVATEESAEPLSEDDFEMFYEVWEKFDPDATQFMEFEKLSQFAAALEPPLNLPQPNKLQLIAMDLPMVSGDRIHCLDILFAFTKRVLGESGEMDALRIQMEERFMASNPSKVSYQPITTTLKRKQEEVSAVIIQRAYRRHLLKRTVKQASFTYNKNKIKGGANLLIKEDMIIDRINENSITEKTDLTMSTAACPPSYDRVTKPIVEKHEQEGKDEKAKGK

SEQ ID NO: 87230 - protein, 177 aa, Homo sapiens
MKATIILLLLAQVSWAGPFQQRGLFDFMLEDEASGIGPEVPDDRDFEPSLGPVCPFRCQCHLRVVQCSDLGLPPSLTELHLDGNKISRVDAASLKGLNNLAKLGLSFNSISAVDNGSLANTPHLRELHLDNNKLTRVPGGLAEHKYIQVVYLHNNNISVVGSSDFCPPGHNTKKASY

SEQ ID NO: 87231 - protein, 48 aa, Homo sapiens
MNKDAQMRAAINQKLIETGERERLKELLRAKLIECGWKDQLKAHCKGN

SEQ ID NO: 87232 - protein, 71 aa, Homo sapiens
  MOD_RES (1)..(1): Any amino acid
XNVINKVATFKKPGVSGHGVYELKDESLKDFNMYFYHYSKTQHSKAEHMQKKRRKQENKDEGKNIAATTTS

SEQ ID NO: 87233 - protein, 141 aa, Homo sapiens
MADPEVVVSSCSSHEEENRCNFNQQTSPSEELLLEDQMRRKLKFFFMNPCEKFWARGRKPWKLAIQILKIAMVTIQLVLFGLSNQMVVAFKEENTIAFKHLFLKGYMDRMDDTYAVYTQSDVYDQLIFAVNQGNDKCYEEK

SEQ ID NO: 87234 - protein, 193 aa, Homo sapiens
MVAPKSHTDDWAPGPFSSKPQRSQLQIFSSVLQTSLLFLLMGLRASGKDSAPTVVSGILGGSVTLPLNISVDTEIENVIWIGPKNALAFARPKENVTIMVKSYLGRLDITKWSYSLCISNLTLNDAGSYKAQINQRNFEVTTEEEFTLFVYAPFIEKLSVHVIEGDHRTLLEGSGLESIISTLAEPRVSVREG

SEQ ID NO: 87235 - protein, 202 aa, Homo sapiens
MSGVRPPIMNGPLHPRPLVALLDGRDCTVEMPILKDVATVAFCDAQSTQEIHEKVLNEAVGALMYHTITLTREDLEKFKALRIIVRIGSGFDNIDIKSAGDLGIAVCNVPAASVEETADSTLCHILNLYRRATWLHQALREGTRVQSVEQIREVASGAARIRGETLGIIGLGSPLLLTAVLVPPAFGESDVSGGLGEAATPR

SEQ ID NO: 87236 - protein, 663 aa, Homo sapiens
MTDSKYFTTNKKGEIFELKAELNNEKKEKRKEAVKKVIAAMTVGKDVSSLFPDVVNCMQTDNLELKKLVYLYLMNYAKSQPDMAIMAVNSFVKDCEDPNPLIRALAVRTMGCIRVDKITEYLCEPLRKCLKDEDPYVRKTAAVCVAKLHDINAQMVEDQGFLDSLRDLIADSNPMVVANAVAALSEISESHPNSNLLDLNPQNINKLLTALNECTEWGQIFILDCLSNYNPKDDREAQSICERVTPRLSHANSAVVLSAVKVLMKFLELLPKDSDYYNMLLKKLAPPLVTLLSGEPEVQYVALRNINLIVQKRPEILKQEIKVFFVKYNDPIYVKLEKLDIMIRLASQANIAQVLAELKEYATEVDVDFVRKAVRAIGRCAIKVEQSAERCVSTLLDLIQTKVNYVVQEAIVVIRDIFRKYPNKYESIIATLCENLDSLDEPDARAAMIWIVGEYAERIDNADELLESFLEGFHDESTQVQLTLLTAIVKLFLKKPSETQELVQQVLSLATQDSDNPDLRDRGYIYWRLLSTDPVTAKEVVLSEKPLISEETDLIEPTLLDELICHIGSLASVYHKPPNAFVEGSHGIHRKHLPIHHGSTDAGDSPVGTTTATNLEQPQVIPSQGDLLGDLLNLDLGPPVNVPQVSSMQMGAVDLLGGGLDSL

SEQ ID NO: 87237 - protein, 28 aa, Homo sapiens
  MOD_RES (1)..(1): Any amino acid
XGFGGSRGGGGYGGSGDGYNGFGNDGNR

SEQ ID NO: 87238 - protein, 94 aa, Homo sapiens
MNPTNPFSGQQPSAFSASSSNVGTLPSKPPFRFGQPSLFGQNSTLSGKSSGFSQVSSFPASSGVSHSSSVQTLGFTQTSSVGPFSGLEHTSTFV

SEQ ID NO: 87239 - protein, 71 aa, Homo sapiens
MAQQANVGELLAMLDSPMLGVRDDVTAVFKENLNSDRGPMLVNTLVDYYLETSSQPALHILTTLQEPHDKH

SEQ ID NO: 87240 - protein, 134 aa, Homo sapiens
  MOD_RES (1)..(1): Any amino acid
XKEDSSFVSIYTHLWENVPRIFEALLIMESKLKEYSLILQNHTSEIFKWKSMISETSSYRKLERYGEFLKKYHKKKKIMLSDEMETEKNIEGCSFTGFKANELTQLPRHLDAEQIYLFILKAHNFDVCKYFILL

SEQ ID NO: 87241 - protein, 107 aa, Homo sapiens
MTMGDMKTPDFDDLLAAFDIPDMVDPKAAIESGHDDHESHMKQNAHGEDDSHAPSSSDVGVSVIVKNVRNIDSSEGGEKDGHNPTGNGLHNGFLTASSLDSYSKDGA

SEQ ID NO: 87242 - protein, 69 aa, Homo sapiens
  MOD_RES (1)..(1): Any amino acid
XKNLTRPGSSGRRGRPRASCGAQKRSRRPKMRPARRRGGRRQLLLRALDAVATCWEKLFALRAPASRDS

SEQ ID NO: 87243 - protein, 107 aa, Homo sapiens
MKMKKDLFPVGREIAGIVLDVGSKVSFFQPDDEVVGILPLDSEDPGLCEVVRVHEHYLVHKPEKVTWTEAAGSIRDGVRAYTALHYLSHLSPGKSVLIMDGASAFGT

SEQ ID NO: 87244 - protein, 527 aa, Homo sapiens
  MOD_RES (1)..(1): Any amino acid
XAQTVVDSASKEATVLVRGPPGPPGGVVVRDIGDTTIQLSWSRGFDNHSPIAKYTLQARTPPAGKWKQVRTNPANIEGNAETAQVLGLTPWMDYEFRVIASNILGTGEPSGPSSKIRTREAAPSVAPSGLSGGGGAPGELIVNWTPMSREYQNGDGFGYLLSFRRQGSTHWQTARVPGADAQYFVYSNESVRPYTPFEVKIRSYNRRGDGPESLTALVYSAEEEPRVAPTKVWAKGVSSSEMNVTWEPVQQDMNGILLGYEIRYWKAGDKEAAADRVRTAGLDTSARVSGLHPNTKYHVTVRAYNRAGTGPASPSANATTMKPPPRRPPGNISWTFSSSSLSIKWDPVVPFRNESAVTGYKMLYQNDLHLTPTLHLTGKNWIEIPVPEDIGHALVQIRTTGPGGDGIPAEVHIVRNGGAAPPLPLSPREIQDPPRYLRGSFPPRPTPISTRKGKWKAGRNQVQSSLRTASPPPFYPAPRTSPRAREGRRVQGEAEDQPAIANGLQSTVGVGLRRPPSRPLPGLQLAL

SEQ ID NO: 87245 - protein, 45 aa, Homo sapiens
MNDRSSRRRTMKDDETFEISIPFDEAPHLDPQIFYSLSPSRRNFE

SEQ ID NO: 87246 - protein, 603 aa, Homo sapiens
MISASRAAAARLVGAAASRGPTAARHQDSWNGLSHEAFRLVSRRDYASEAIKGAVVGIDLGTTNSCVAVMEGKQAKVLENAEGARTTPSVVAFTADGERLVGMPAKRQAVTNPNNTFYATKRLIGRRYDDPEVQKDIKNVPFKIVRASNGDAWVEAHGKLYSPSQIGAFVLMKMKETAENYLGHTAKNAVITVPAYFNDSQRQATKDAGQISGLNVLRVINEPTAAALAYGLDKSEDKVIAVYDLGGGTFDISILEIQKGVFEVKSTNGDTFLGGEDFDQALLRHIVKEFKRETGVDLTKDNMALQRVREAAEKAKCELSSSVQTDINLPYLTMDSSGPKHLNMKLTRAQFEGIVTDLIRRTIAPCQKAMQDAEVSKSDIGEVILVGGMTRMPKVFSTAADGQTQVEIKVCQGEREMAGDNKLLGQFTLIGIPPAPRGVPQIEVTFDIDANGIVHVSAKDKGTGREQQIVIQSSGGLSKDDIENMVKNAEKYAEEDRRKKERVEAVNMAEGIIHDTETKMEEFKDQLPADECNKLKEEISKMRELLARKDSETGENIRQAASSLQQASLKLFEMAYKKMASEREGSGSSGTGEQKEDQKEEKQ

SEQ ID NO: 87247 - protein, 622 aa, Homo sapiens
MAEAGWRPAASPVDPAGQAAAVPVPEPEAPAPPAAPALRWLPGDPSPRGRSQSDLSSSSSRGRPLRVHISGSVDGLDKASIANSDGPTAGSQTPPFKRKGKLSTIGKIFKPWKWRKKKTSDKFRETSAVLERKISTRQSREELIRRGVLKELPDQDGDVTVNFENSNGHMIPIGEESTREENVVKSEEGNGSVSEKTPPLEEQAEDKKAGSSHSKKTTGSKASASPSTSSTSSRPKASKETVSSKAGTVGTTKGKRKTDKQPITSHLSSDTTTSGTSDLKGEPAETRVESFKLEQTVPGAEEQNTGKFKSMVPPPPVAPAPSPLAPPLPLEDQCITASDTPVVLVSVGADLPVSALDPSQLLWAEEPTNRTTLYSGTGLSVNRENAKCFTTKEELGKTVPQLLTPGLMGESSESFSASEDEGHREYQANDSDSDGPILYTDDEDEDEDEDGSGESALASKIRRRDTLAIKLGNRPSKKELEDKNILQRTSEEERQEIRQQIGTKLVRRLSQRPTTEELEQRNILKQKNEEEEQEAKMELKRRLSRKLSLRPTVAELQARRILRFNEYVEVTDSPDYDRRADKPWARLTPADKAAIRKELNEFKSTEMEVHEESRQFTRFHRP

SEQ ID NO: 87248 - protein, 40 aa, Homo sapiens
MMQHASPAPALTMMATQNVPPPPYQDSPQMTATAQPPSKA

SEQ ID NO: 87249 - protein, 508 aa, Homo sapiens
MAAINPWASWGALTDQSWGMTAVDPWASWALCPQYPAWHVEGSLEEGRRATGLPAAQVQEPVTFKDVAVDFTQEEWGQLDLVQRTLYRDVMLETYGHLLSVGNQIAKPEVISLLEQGEEPWSVEQACPQRTCPEWVRNLESKALIPAQSIFEEEQSHGMKLERYIWDDPWFSRLEVLGCKDQLEMYHMNQSTAMRQMVFMQKQVLSQRSSEFCGLGAEFSQNLNFVPSQRVSQIEHFYKPDTHAQSWRCDSAIMYADKVTCENNDYDKTVYQSIQPIYPARIQTGDNLFKCTDAVKSFNHIIHFGDHKGIHTGEKLYEYKECHQIFNQSPSFNEHPRLHVGENQYNYKEYENIFYFSSFMEHQKIGTVEKAYKYNEWEKVFGYDSFLTQHTSTYTAEKPYDYNECGTSFIWSSYLIQHKKTHTGEKPYECDKCGKVFRNRSALTKHERTHTGIKPYECNKCGKAFSWNSHLIVHKRIHTGEKPYVCNECGKSFNWNSHLIGHQRTHTG

SEQ ID NO: 87250 - protein, 92 aa, Homo sapiens
MQRMAGVRTGVHLPHPLPRQLPDHAQSRACQAPEEQRQDKAAVSLGLLCPRPGLQTAGGSRAPSQQPSQARGIAGRGPRPWSPSGPQWSRGM

SEQ ID NO: 87251 - protein, 43 aa, Homo sapiens
MATFPPATSAPQQPPGPEDEDSSLDESDLYSLAHSYLGWSAVV

SEQ ID NO: 87252 - protein, 78 aa, Homo sapiens
MFEEPEWAEAAPVAAGLGPVISRPPPAASSQNKASSILFRPTVIPCFPPGLQAPPALGHITGPRGSISFPASPQPMYK

SEQ ID NO: 87253 - protein, 311 aa, Homo sapiens
MWATLPLLCAGAWLLGVPVCGAAELCVNSLEKFHFKSWMSKHRKTYSTEEYHHRLQTFASNWRKINAHNNGNHTFKMALNQFSDMSFAEIKHKYLWSEPQNCSATKSNYLRGTGPYPPSVDWRKKGNFVSPVKNQGACGSCWTFSTTGALESAIAIATGKMLSLAEQQLVDCAQDFNNHGCQGGLPSQAFEYILYNKGIMGEDTYPYQGKDGYCKFQPGKAIGFVKDVANITIYDEEAMVEAVALYNPVSFAFEVTQDFMMYRTGIYSSTSCHKTPDKVNHAVLAVGYGEKNGIPYWIVKNSWGPQWGMNG

SEQ ID NO: 87254 - protein, 56 aa, Homo sapiens
EESTVHVGRMLKENHCLVALHMCKHDIKNSGIQQLCDALYLNSSLRYLDVSWHIQT

SEQ ID NO: 87255 - protein, 415 aa, Homo sapiens
MAAGERSWCLCKLLRYPEAVYVVYTGDVNVNGQQILEGAFRRFNIRLIHPVQFVFLRKRYLVEDSLYPHFTLLGQSLGSIFLGWEALMQCVPDVYIDSMGYAFTLPLFKYIGGCQVGSYVHYPTISTDMLSVVKNQNIGFNNAAFITRNPFLSKVKLIYYYLFAFIYGLVGSCSDVVMVNSSWTLNHILSLWKVGNCTNIVYPPCDVQTFLDIPLHEKKMTPGHLLVSVGQFRPEKNHPLQIRAFAKLLNKKMVESPPSLKLVLIGGCRNKDDELRVNQLRRLSEDLGVQEYVEFKINIPFDELKNYLSEATIGLHTMWNEHFGIGVVECMAAGTIILAHNSGGPKLDIVVPHEGDITGFLAESEEDYAETIAHILSMSAEKRLQIRKSARASVSRFSDQEFEVTFLSSVEKLFK

SEQ ID NO: 87256 - protein, 38 aa, Homo sapiens
MMPQLQFKDAFWASQSAGITSVSHRARLAIEHFEDCSH

SEQ ID NO: 87257 - protein, 176 aa, Homo sapiens
  MOD_RES (1)..(1): Any amino acid
XGPPGGALYSWETGDDRFLFRNFHTGIWYSCEEELSGLGEKCRSFIDLAPASEKGVLWLSVVSEVLYILLLVVGFSLMCLELFHSSNVIDGLKLNAFAAVFTVLSVEDSTLVFPQPPWPLCLSFLCWSLLLCLISDVGFILGPFSLLFLQSLSRPPGNGRPHDVHAGVPGHREPRS

SEQ ID NO: 87258 - protein, 74 aa, Homo sapiens
MLNDQLMLLERTFLNPRAFPEERYYSHVLWAPRTGSVVTFPGLSNACSRARDTASGSEAWAEVQRQLSIVVTAL

SEQ ID NO: 87259 - protein, 119 aa, Homo sapiens
MVTSSFPISVAVFALITLQVGTQDSFIAAVYEHAVILPNKTETPVSQEDALNLMNENIDILETAIKQAAEQGARIIVTPEDALYGWKFTRETVFPYLEDIPDPQVNWIPCQDPHRSAHC

SEQ ID NO: 87260 - protein, 306 aa, Homo sapiens
  MOD_RES (1)..(1): Any amino acid
XVSRQIEDTVLYGYYTLYSVILFCVFFWIPFVYFYYEEKDDDDTSKCTQIKTALKYTLGFVVICALLLLVGSLVCKPELSGAGISKLFLKHRYAFVPLNVPNNKNSTEWEKVKSLFEELGSSHGLAALSFSISSLTLIGMLAAITYTAYGMSALPLNLIKGTRSAAYERLENTEDIEEVEQHIQTIKSKSKDGRPLPARDKRALKQFEERLRTLKKRERHLEFIENSWWTKFCGALRPLKMEFCSCCPGWSPMAQSRLTASSASQIVWGIFFILVALLFVISLFLSNLDKALHSAGIDSGFIIFGA

SEQ ID NO: 87261 - protein, 127 aa, Homo sapiens
MADTPRDAGLKQAPASRNEKAPVDFGYVGIDSILEQMRRKAMKQGFEFNIMVVGQSGLGKSTLINTLFKSKISRKSVQPTSEERIPKTIEIKSITHDIEEKGVRMKLTVIDTPGFGDHINNENCWQP

SEQ ID NO: 87262 - protein, 189 aa, Homo sapiens
MAEGEDVPPLPTSSGDGWEKDLEEALEAGGCDLETLRNIIQGRPLPADLRAKVWKSLFKSFFQIALNVAGKGDSLASWDGILDLPEQNTIHKDCLQFIDQLSVPEEKAAELLLDIESVITFYCKSRNIKYSTSLSWIHLLKPLVHLQLPRSDLYNCFYAIMNKYIPRDCSQKGRPFHLFRLLIQYHEPE

SEQ ID NO: 87263 - protein, 164 aa, Homo sapiens
MALRGVSVRLLSRGPGLHVLRTWVSSAAQTASRPEFDWQDPLVLEEQLTTDEILIRDTFRTYCQERLMPRILLANRNEVFHREIISEMGELGVLGPTIKGYGCAGVSSVAYGLLARELERVDSGYRSAMSVQSSLVMHPIYAYGSEEQRQKYLPQLAKGELLGC

SEQ ID NO: 87264 - protein, 175 aa, Homo sapiens
MRRSRSSAAAKLRGQKRSGASAAPAASAAAALAPSATRTRRSASQAGSKSQAVEKPPSEKPRLRRSSPRAQEEGPGEPPPPELALLPPPPPPPPTPATPTSSASNLDLGEQRERWETFQKRQKLTSEGAAKLLLDTFEYQGLVKHTGGCHCGAVRFEVWASADLHIFDCKYRNYI

SEQ ID NO: 87265 - protein, 203 aa, Homo sapiens
MAGPFSRLLSARPGLRLLALAGAGSLAAGFLLRPEPVRAASERRRLYPPSQTWPTGQLPGNCTRSRRLCPPSMVTGYPLPSAEYPDLRKHNNCMASHLTPAVYARLCDKTTPTGWTLDQCIQTGVDNPGHPFIKTVGMVAGDEETYEVFADLFDPVIQERHNGYDPRTMKHTTDLDASKIRSGYFDERYVLSSRVRTGRSIRG

SEQ ID NO: 87266 - protein, 60 aa, Homo sapiens
MEEKRRRARVQGAWAAPVKSQAIAQPATTAKSHLHQKPGQTWKNKEHHLSDREFVFKEPQ

SEQ ID NO: 87267 - protein, 771 aa, Homo sapiens
MDLYSTPAAALDRFVARRLQPRKEFVEKARRALGALAAALRERGGRLGAAAPRVLKTVKGGSSGRGTALKGGCDSELVIFLDCFKSYVDQRARRAEILSEMRASLESWWQNPVPGLRLTFPEQSVPGALQFRLTSVDLEDWMDVSLVPAFNVLGQAGSGVKPKPQVYSTLLNSGCQGGEHAACFTELRRNFVNIRPAKLKNLILLVKHWYHQVCLQGLWKETLPPVYALELLTIFAWEQGCKKDAFSLAEGLRTVLGLIQQHQHLCVFWTVNYGFEDPAVGQFLQRQLKRPRPVILDPADPTWDLGNGAAWHWDLLAQEAASCYDHPCFLRGMGDPVQSWKGPGLPRAGCSGLGHPIQLDPNQKTPENSKSLNAVYPRAGSKPPSCPAPGPTGAASIVPSVPGMALDLSQIPTKELDRFIQDHLKPSPQFQEQVKKAIDIILRCLHENCVHKASRVSKGGSFGRGTDLRDGCDVELIIFLNCFTDYKDQGPRRAEILDEMRAQLESWWQDQVPSLSLQFPEQNVPEALQFQLVSTALKSWTDVSLLPAFDAVGQLSSGTKPNPQVYSRLLTSGCQEGEHKACFAELRRNFMNIRPVKLKNLILLVKHWYRQVAAQNKGKGPAPASLPPAYALELLTIFAWEQGCRQDCFNMAQGFRTVLGLVQQHQQLCVYWTVNYSTEDPAMRMHLLGQLRKPRPLVLDPADPTWNVGHGSWELLAQEAAALGMQACFLSRDGTSVQPWDVMPSFTKPQLGTLTSSSVNFSSPTASSWPR

SEQ ID NO: 87268 - protein, 121 aa, Homo sapiens
RSLHGILASAGTIGAVAAWLMSYKPALFGFLFLLLLLSNWLVKYEHKLTLPEPQQDEILQRLLFSEMKMKVLENQMFIIWNKMNHHGRSSRHRNFPMKKHRMRRHESICPTLSDCTSSSPS

SEQ ID NO: 87269 - protein, 414 aa, Homo sapiens
  MOD_RES (1)..(1): Any amino acid
XAPVSGSRSPDREASGSGGRRRSSSKSPKPSKSARSPRGRRSRSHSCSRSGDRNGLTHQLGGLSQGSRNQSYRSRSRSRSRERPSAPRGIPFASASSSVYYGSYSRPYGSDKPWPSLLDKEREESLRQKRLSERERIGELGAPEVWGLSPKNPEPDSDEHTPVEDEEPKKSTTSASTSEEKKKKSSRSKERSKKRRKKKSSKRKHKKYSEDSDSDSDSETDSSDEDNKRRAKKAKKKEKKKKHRSKKYKKKRSKKSRKESSDSSSKESQEEFLENPWKDRTKAEEPSDLIGPEAPKTLTSQDDKPLNYGHALLPGEGAAMAEYVKAGKRIPRRGEIGLTSEEIASFECSGYVMSGSRHRRMEAVRLRKENQIYSADEKRALASFNQEERRKRENKILASFREMVYRKTKGKDDK

SEQ ID NO: 87270 - protein, 320 aa, Homo sapiens
MAAGVDCGDGVGARQHVFLVSEYLKDASKKMKNGLMFVKLVNPCSGEGAIYLFNMCLQQLFEVKVFKEKHHSWFINQSVQSGGLLHFATPVDPLFLLLHYLIKADKEGKFQPLDQVVVDNVFPNCILLLKLPGLEKLLHHVTEEKGNPEIDNKKYYKYSKEKTLKWLEKKVNQTVAALKTNNVNVSSRVQSTAFFSGDQASTDKEEDYIRYAHGLISDYIPKELSDDLSKYLKLPEPSASLPNPPSKKIKLSDEPVEAKEDYTKFNTKDLKTEKKNSKMTAAQKALAKVDKSGMKNGVSLLLPRLEYNGVISAHHNLRLQ

SEQ ID NO: 87271 - protein, 49 aa, Homo sapiens
  MOD_RES (1)..(1): Any amino acid
XELSLDDTTDQHTLDNLEKELQVLRSLAGCIHFFFLSSMKNNHVKELGE

SEQ ID NO: 87272 - protein, 71 aa, Homo sapiens
  MOD_RES (1)..(1): Any amino acid
XYAAYLLAACILNFQRALALFVITCLVIFVLVHSFLKKLLGKKLTRCLKPFENSRLRLWTKWCPGGQCFRA

SEQ ID NO: 87273 - protein, 153 aa, Homo sapiens
MESYHKPDQQKLQALKDTANRLRISSIQATTAAGSGHPTSCCSAAEIMAVLFFHTMRYKSQDPRNPHNDRFVLSKGHAAPILYAVWAEAGFLAEAELLNLRKISSDLDGHPVPKQAFTDVATGSLGQGLGAACGMAYTGKYFDKARHQSPGPE

SEQ ID NO: 87274 - protein, 63 aa, Homo sapiens
MGFVKVVKNKAYFKRYQVKFRRRREGKTDYYARKRLVIQDKNKYNTPKYRMIVRVTNRDIICQ

SEQ ID NO: 87275 - protein, 720 aa, Homo sapiens
MAAETQTLNFGPEWLRALSSGGSITSPPLSPALPKYKLADYRYGREEMLALFLKDNKIPSDLLDKEFLPILQEEPLPPLALVPFTEEEQRNFSMSVNSAAVLRLTGRGGGGTVVGAPRGRSSSRGRGRPNFEEGGPTSVGRKHEFIRSESENWRIFREEQNGEDEDGGWRLAGSRRDGERWRPHSPGWREHMERRRRFEFDFRDRDDERGYRRVRSGSGSIDDDRDSLPEWCLEDAEEEMGTFDSSGAFLSLKKVQKEPIPEEQEMDFRPVDEGEECSDSEGSHNEEAKEPDKTNKKEGEKTDRVGVEASEETPQTSSSSARPGTPSDHQSQEASQFERKDEPKTEQTEKAEEETRMENSLPAKVPSRGDEMVADVQQPLSQIPSDTASPLLILPPPVPNPSPTLRPVETPVVGAPGMGSVSTEPDDEEGLKHLEQQAEKMVAYLQDSALDDERLASKLQEHRAKGVSIPLMHEAMQKWYYKDPQGEIQGPFNNQEMAEWFQAGYFTMSLLVKRACDESFQPLGDIMKMWGRVPFSPGPAPPPHMGELDQERLTRQQELTALYQMQHLQYQQFLIQQQYAQVLAQQQKAALSSQQQQQLALLLQQFQTLKMRISDQNIIPSVTRSVSVPDTGSIWELQPTASQPTVWEGGSVWDLPLDTTTPGPALEQLQQLEKAKAAKLEQERREAEMRAKREEEERKRQEELRRQQEEILRRQQEEER

SEQ ID NO: 87276 - protein, 166 aa, Homo sapiens
  MOD_RES (1)..(1): Any amino acid
XVMGILKQAFDVLVLRYGVQKRIYCNALALRSHHFQKVGKKPELTLVWEPEDMEQEPAQQGILPGGGPHYRQASRGFQRPKEGPGVLLQGWRQSCASTSGPAILVPSRLGSAQVITIFSLVEVVLQAESTALKYSAILKRPGTQGHLGPEKEEEESDGEPEDSSTS

SEQ ID NO: 87277 - protein, 142 aa, Homo sapiens
MQKLELNHSELIQQSQVLWRMIAELKERSQRPVRWMLQDIQEVLNRSKSWSLQQPEPISLELKTDCRVLGLREILKTYAADVRLDPDTAYSRLIVSEDRKRVHYGDTNQKLPDNPERFYRYNIVLGSQCISSGRHYWEVEVG

SEQ ID NO: 87278 - protein, 66 aa, Homo sapiens
MADEEAEQERLSCGEGGCVAELQRLGERLQELELQLRESRVPAVEAATDYCQQLCQGLTVTQAGMQ

SEQ ID NO: 87279 - protein, 254 aa, Homo sapiens
MEEPEEPADSGQSLVPVYIYSPEYVSMCDSLAKIPKRASMVHSLIEAYALHKQMRIVKPKVASMEEMATFHTDAYLQHLQKVSQEGDDDHPDSIEYGLGYDCPATEGIFDYAAAIGGATITAAQCLIDGMCKVAINWSGGWHHAKKDEASGFCYLNDAVLGILRLRRKFERILYVDLDLHHGDEDAFSFTSKVMTVSLHKFSPGFFPGTGDVSDVGLGKGRYYSVNVPIQDGIQDEKYYQICERYEPPAPNPGL

SEQ ID NO: 87280 - protein, 41 aa, Homo sapiens
MGKSCKVVVCGQASVGKTSILEQLLYGNHVVGHHRGPWQQV

SEQ ID NO: 87281 - protein, 196 aa, Homo sapiens
  MOD_RES (1)..(1): Any amino acid
XLRGNSIGPQGAKALADALKINRTLTSLSLQGNTVRDDGARSMAEALASNRTLSMLHLQKNSIGPMGAQRMADALKQNRSLKELMFSSNSIGDGGAKALAEALKVNQGLESLDLQSNSISDAGVAALMGALCTNQTLLSLSLRENSISPEGAQAIAHALCANSTLKNLDLQWNFIQAGAAQALGQALQLNRSLTSL

SEQ ID NO: 87282 - protein, 136 aa, Homo sapiens
MLLSVMEGELEARDLVIEALRARRKEVFIQERYGRFNLNDPFLALQRDYEAGAGDKEKKPVCTNPLSILEAVMAHCKKMQERMSAQLAAAESRQKKLEMEKLQLQALEQEHKKLAARLEEERGKNKQVVLMLVKEC

SEQ ID NO: 87283 - protein, 1069 aa, Homo sapiens
SQPKLDRNHSFRHILPGFRSAAAAAADNERSHLMPRLKESRSHESLLSPSSAVEALDLSMEEEVVIKPVHSSILGQDYCFEVTTSSGSKCFSCRSAAERDKWMENLRRAVHPNKDNSRRVEHILKLWVIEAKDLPAKKKYLCELCLDDVLYARTTGKLKTDNVFWGEHFEFHNLPPLRTVTVHLYRETDKKKKKERNSYLGLVSLPAASVAGRQFVEKWYPVVTPNPKGGKGPGPMIRIKARYQTITILPMEMYKEFAEHITNHYLGLCAALEPILSAKTKEEMASALVHILQSTGKVKDFLTDLMMSEVDRCGDNEHLIFRENTLATKAIEEYLKLVGQKYLQDALGEFIKALYESDENCEVDPSKCSAADLPEHQGNLKMCCELAFCKIINSYCVFPRELKEVFASWRQECSSRGRPDISERLISASLFLRFLCPAIMSPSLFNLLQEYPDDRTARTLTLIAKVTQNLANFAKFGSKEEYMSFMNQFLEHEWTNMQRFLLEISNPETLSNTAGFEGYIDLGRELSSLHSLLWEAVSQLEQSIVSKLGPLPRILRDVHTALSTPGSGQLPGTNDLASTPGSGSSSISAGLQKMVIENDLSGLIDFTRLPSPTPENKDLFFVTRSSGVQPSPARSSSYSEANEPDLQMANGGKSLSMVDLQDARTLDGEAGSPAGPDVLPTDGQAAAAQLVAGWPARATPVNLAGLATVRRAGQTPTTPGTSEGAPGRPQLLAPLSFQNPVYQMAAGLPLSPRGLGDSGSEGHSSLSSHSNSEELAAAAKLGSFSTAAEELARRPGELARRQMSLTEKGGQPTVPRQNSAGPQRRIDQPPPPPPPPPPAPRGRTPPNLLSTLQYPRPSSGTLASASPDWVGPSTRLRQQSSSSKGDSPELKPRAVHKQGPSPVSPNALDRTAAWLLTMNAQLLEDEGLGPDPPHRDRLRSKDELSQAEKDLAVLQDKLRISTKKLEEYETLFKCQEETTQKLVLEYQARLEEGEERLRRQQEDKDIQMKGIISRLMSVEEELKKDHAEMQAAVDSKQKIIDAQEKRIASLDAANARLMSALTQLKESMH

SEQ ID NO: 87284 - protein, 92 aa, Homo sapiens
MRLRTRKASQQSNQIQTQRTARAKRKYSEVDDSLPSGGEKPSKNETGLLSSIKKFIKGSTPKEERENPSKRSRIERDIDNNLITSTPRAGEK

SEQ ID NO: 87285 - protein, 64 aa, Homo sapiens
MLNFTDVTEFILLGLTSRREWQVLFFIIFLVVYIITMVGNIGMMVLIKATQTWPILRQCLISRM

SEQ ID NO: 87286 - protein, 288 aa, Homo sapiens [sequence omitted]

SEQ ID NO: 87287 - protein, 1081 aa, Homo sapiens
MDRIWAEREKKFQLVKNKQDGPRSAGWREHMERRRRFEFDFRDRDDERGYRRVRSGSGSIDDDRDSLPEWCLEDAEEEMGTFDSSGAFLSLKKVQKEPIPEEQEMDFRPVDEGEECSDSEGSHNEEAKEPDKTNKKEGEKTDRVGVEASEETPQTSSSSARPGTPSDHQSQEASQFERKDEPKTEQTEKAEEETRMENSLPAKVPSRGDEMVADVQQPLSQIPSDTASPLLILPPPVPNPSPTLRPVETPVVGAPGMGSVSTEPDDEEGLKHLEQQAEKMVAYLQDSALDDERLASKLQEHRAKGVSIPLMHEAMQKWYYKDPQGEIQGPFNNQEMAEWFQAGYFTMSLLVKRACDESFQPLGDIMKMWGRVPFSPGPAPPPHMGELDQERLTRQQELTALYQMQHLQYQQFLIQQQYAQVLAQQQKAALSSQQQQQLALLLQQFQTLKMRISDQNIIPSVTRSVSVPDTGSIWELQPTASQPTVWEGGSVWDLPLDTTTPGPALEQLQQLEKAKAAKLEQERREAEMRAKREEEERKRQEELRRQQEEILRRQQEEERKRREEEELARRKQEEALRRQREQEIALRRQREEEERQQQEEALRRLEERRREEEERRKQEELLRKQEEEAAKWAREEEEAQRRLEENRLRMEEEAARLRHEEEERKRKELEVQRQKELMRQRQQQQEALRRLQQQQQQQQLAQMKLPSSSTWGQQSNTTACQSQATLSLAEIQKLEEERERQLREEQRRQQRELMKALQQQQQQQQQKLSGWGNVSKPSGTTKSLLEIQQEEARQMQKQQQQQQQHQQPNRARNNTHSNLHTSIGNSVWGSINTGPPNQWASDLVSSIWSNADTKNSNMGFWDDAVKEVGPRNSTNKNKNNASLSKSVGVSNRQNKKVEEEEKLLKLFQGVNKAQDGFTQWCEQMLHALNTANNLDVPTFVSFLKEVESPYEVHDYIRAYLGDTSEAKEFAKQFLERRAKQKANQQRQQQQLPQQQQQQPPQQPPQQPQQQDSVWGMNHSTLHSVFQTNQSNNQQSNFEAVQSGKKKKKQKMVRADPSLLGFSVNASSERLNMGEIETLDDY

SEQ ID NO: 87288 - protein, 1177 aa, Homo sapiens
MRSKARARKLAKSDGDVVNNMYEPNRDLLASHSAEDEAEDSAMSPIPVGPPSPFPTSEDFTPKEGSPYEAPVYIPEDIPIPADFELRESSIPGAGLGVWAKRKMEAGERLGPCVVVPRAAAKETDFGWEQILTDVEVSPQEGCITKQISEDLGSEKFCVDANQAGAGSWLKYIRVACSCDDQNLTMCQISEQIYYKVIKDIEPGEELLVHVKEGVYPLGTVPPGLDEEPTFRCDECDELFQSKLDLRRHKKYTCGSVGAALYEGLAEELKPEGLGGGSGQAHECKDCERMFPNKYSLEQHMVIHTEEREYKCDQCPKAFNWKSNLIRHQMSHDSGKRFECENCVKVFTDPSNLQRHIRSQHVGARAHACPDCGKTFATSSGLKQHKHIHSTVKPFICEVCHKSYTQFSNLCRHKRMHADCRTQIKCKDCGQMFSTTSSLNKHRRFCEGKNHYTPGGIFAPGLPLTPSPMMDKAKPSPSLNHASLGFNEYFPSRPHPGSLPFSTAPPTFPALTPGFPGIFPPSLYPRPPLLPPTSLLKSPLNHTQDAKLPSPLGNPALPLVSAVSNSSQGTTAAAGPEEKFESRLEDSCVEKLKTRSSDMSDGSDFEDVNTTTGTDLDTTTGTGSDLDSDVDSDPDKDKGKGKSAEGQPKFGGGLAPPGAPNSVAEVPVFYSQHSFFPPPDEQLLTATGAAGDSIKAIASIAEKYFGPGFMGMQEKKLGSLPYHSAFPFQFLPNFPHSLYPFTDRALAHNLLVKAEPKSPRDALKVGGPSAECPFDLTTKPKDVKPILPMPKGPSAPASGEEQPLDLSIGSRARASQNGGGREPRKNHVYGERKLGAGEGLPQVCPARMPQQPPLHYAKPSPFFMDPIYRVEKRKVTDPVGALKEKYLRPSPLLFHPQMSAIETMTEKLESFAAMKADSGSSLQPLPHHPFNFRSPPPTLSDPILRKGKERYTCRYCGKIFPRSANLTRHLRTHTGEQPYRCKYCDRSFSISSNLQRHVRNIHNKEKPFKCHLCNRCFGQQTNLDRHLKKHEHENAPVSQHPGVLTNHLGTSASSPTSESDNHALLDEKEDSYFSEIRNFIANSEMNQASTRTEKRADMQIVDGSAQCPGLASEKQEDVEEEDDDDLEEDDEDSLAGKSQDDTVSPAPEPQAAYEDEEDEEPAASLAVGFDHTRRHMQ

SEQ ID NO: 87289 - protein, 326 aa, Homo sapiens
MFKRHKSLASERKRALLSQRATRFILKDDMRNFHFLSKLVLSAGPLRPTPAVKHSKTTHFEIEIFDAQTRKQICILDKVTQSSTIHDVKQKFHKACPKWYPSRVGLQLECGGPFLKDYITIQSIAASSIVTLYATDLGQQVSWTTVFLAEYTGPLLIYLLFYLRIPCIYDGKESARRLRHPVVHLACFCHCIHYIRYLLETLFVHKVSAGHTPLKNLIMSCAFYWGFTSWIAYYINHPLYTPPSFGNRQITVSAINFLICEAGNHFINVMLSHPNHTGNNACFPSPNYNPFTWMFFLVSCPNYTYEIGSWISFTVMTQTLPGGLTA

SEQ ID NO: 87290 - protein, 65 aa, Homo sapiens
SKPKDSDKEGTSNSTSEDGPGDGFTILSSKSLVLGQKSDISHIGSMRVEGIVHPTTAEIDLKEDI

SEQ ID NO: 87291 - protein, 666 aa, Homo sapiens
MGGRPSSPLDKQQRQHLRGQVDTLLRNFLPCYRGQLAASVLRQISRELGPQEPTGSQLLRSKKLPRVREHRGPLTQLRGHPPRWQPIFCVLRGDGRLEWFSHKEEYENGGHCLGSTALTGYTLLTSQREYLRLLDALCPESLGDHTQEEPDSLLEVPVSFPLFLQHPFRRHLCFSAATREAQHAWRLALQGGIRLQGIVLQRSQAPAARAFLDAVRLYRQHQGHFGDDDVTLGSDAEVLTAVLMREQLPALRAQTLPGLRGAGRARAWAWTELLDAVHAAVLAGASAGLCAFQPEKDELLASLEKTIRPDVDQLLRQRARVAGRLRTDIRGPLESCLRREVDPQLPRVVQTLLRTVEASLEAVRTLLAQGMDRLSHRLRQSPSGTRLRREVYSFGEMPWDLALMQTCYREAERSRGRLGQLAAPFGFLGMQSLVFGAQDLAQQLMADAVATFLQLADQCLTTALNCDQAAQRLERVRGRVLKKFKSDSGLAQRRFIRGWGLCIFLPFVLSQLEPGCKKELPEFEGDVLAVGSQALTTEGIYEDVIRGCLLQRIDQELKKTLGANDVSCTLDGCLEVPWEQEGAAPNLNLVSSFLAGRQAFTDFLCLPAKSSANWILAASLLSCSCFRSGFHRDSRVFLVQLAEGLSHSLETVSSHSVWSFRPTPRQ

SEQ ID NO: 87292 - protein, 62 aa, Homo sapiens
MYGKIIFVLLLSEIVSISALSTTEVAMHTSTSSSVTKSYISSQTNGETGQLVHRFTVPVFAD

SEQ ID NO: 87293 - protein, 86 aa, Homo sapiens
MSAARESHPHGVKRSASPDDDLGSSNWEAADLGNEERKQKFLRLMGAGKGKKTRKLMKNWSLNISKVWTVNYQEDIGDIVDLASVR

SEQ ID NO: 87294 - protein, 228 aa, Homo sapiens
  MOD_RES (1)..(1): Any amino acid
XILKSRIVTWEPSEEFVRNNHVINTPLQTMHIMADLGPYKKLGYKKYEHVLCTLKVDSNGVITVKPDFTGLKGPYRIETEGEKQELWKYTIDNVSPHAQPEEEERERRVFKDLYGRHKEYLSSLVGTDFEMTVPGALRLFVNGEVVSAQGYEYDNLYVHFFVELPTAHWSSPAFQQLSGVTQTCTTKSLAMITLSLATRRTDSKGGLAHPMTLLFIGQGGSLLLPIHV

SEQ ID NO: 87295 - protein, 105 aa, Homo sapiens
MKENPYEDIELHGRCLGKKCVLNFPASPTSSIPDTLTKQSLSKPAFFRQNSERRNFKLLDTRKLSRDGTGSPSKISPPSTPSSPDDIFFNLGDPQNGRKKRKIPK

SEQ ID NO: 87296 - protein, 463 aa, Homo sapiens
MSQDGASQFQEVIRQELELSVKKELEKILTTASSHEFEHTKKDLDGFRKLFHRFLQEKGPSVDWGKIQRPPEDSIQPYEKIKARGLPDNISSVLNKLVVVKLNGGLGTSMGCKGPKSLIGVRNENTFLDLTVQQIEHLNKTYNTDVPLVLMNSFNTDEDTKKILQKYNHCRVKIYTFNQSRYPRINKESLLPVAKDVSYSGENTEAWYPPGHGDIYASFYNSGLLDTFIGEGKEYIFVSNIDNLGATVDLYILNHLMNPPNGKRCEFVMEVTNKTRADVKGGTLTQYEGKLRLVEIAQVPKAHVDEFKSVSKFKIFNTNNLWISLAAVKRLQEQNAIDMEIIVNAKTLDGGLNVIQLETAVGAAIKSFENSLGINVPRSRFLPVKTTSDLLLVMSNLYSLNAGSLTMSEKREFPTVPLVKLGSSFTKVQDYLRRFESIPDMLELDHLTVSGDVTFGKNVSLKN

SEQ ID NO: 87297 - protein, 81 aa, Homo sapiens
MNKLYIGNLSENAAPSDLESIFKDAKIPVSGPFLVKTGYAFVDCPDESWALKAIEALSGKIELHGKPIEVEHSVPKRQSEH

SEQ ID NO: 87298 - protein, 72 aa, Homo sapiens
MATLGHTFPFYAGPKPTFPMDTTLASIIMIFLTALATFIVILPGIRGKTRLFWLLRVVTSLFIGAAILAVNF

SEQ ID NO: 87299 - protein, 152 aa, Homo sapiens
  MOD_RES (1)..(1): Any amino acid
XEQPNFADFSQFEVFAASNVNDEQDDEAEKHPEVLPAEKASDPASSLRVAKTDSKTEEKTAASAPANVSKGTTPLAPPPKPVRRRLKSEDELRPEVDEHTQKTGVLAAVLASQPSIPRMFLRREFPWKFNWNNFDHSLTYKPIAVNCEHTCF

SEQ ID NO: 87300 - protein, 47 aa, Homo sapiens
MNLTEVGSVLREQGAETWGPDHWWLHRHHTLSRTVQTWHNRDSGLHL

SEQ ID NO: 87301 - protein, 694 aa, Homo sapiens
MELEVPDEAESAEAGAVPSEAAWAAESGAAAGLAQKKAAPTEVLSMTAQPGPGHGKKLGHRGVDASGETTYKKTTSSTLKGAIQLGIGYTVGHLSSKPERDVLMQDFYVVESIFFPSEGSNLTPAHHFQDFRFKTYAPVAFRYFRELFGIRPDDYLYSLCNEPLIELSNPGASGSLFYVTSDDEFIIKTVMHKEAEFLQKLLPGYYMNLNQNPRTLLPKFYGLYCVQSGGKNIRVVVMNNILPRVVKMHLKFDLKGSTYKRRASKKEKEKSFPTYKDLDFMQDMPEGLLLDADTFSALVKTLQRDCLVLESFKIMDYSLLLGVHNIDQHERERQAQGAQSTSDEKRPVGQKALYSTAMESIQGGAARGEAIESDDTMGGIPAVNGRGERLLLHIGIIDILQSYRFIKKLEHTWKALVHDGDTVSVHRPSFYAERFFKFMSNTVFRKNSSLKSSPSKKGRGGALLAVKPLGPTAAFSASQIPSEREEAQYDLRGARSYPTLEDEGRPDLLPCTPPSFEEATTASIATTLSSTSLSIPERSPSETSEQPRYRRRTQSSGQDGRPQEEPPAEEDLQQITVQVEPACSVEIVVPKEEDAGVEASPAGASAAVEVETASQASDEEGAPASQASDEEDAPATDIYFFTDGRYWIYSPRHRRLRAVTLSASGTPTDERSWVYSPLHYSAQAPPASDGESDT

SEQ ID NO: 87302 - protein, 251 aa, Homo sapiens
MEATRRRQHLGATGGPGAQLGASFLQARHGSVSADEAARTAPFHLDLWFYFTLQNWVLDFGRPIAMLIERSPRTLPRSITYVSIIIFIMGASIHLVGDSVNHRLLFSGYQHHLSVRENPIIKNLKPETLIDSFELLYYYDEYLGHCMWYIPFFLILFMYFSGCFTASKAESLIPGPALLLVAPSGLYYWYLVTEGQIFILFIFTFFAMLALVLHQKRKRLFLDSNGLFLFSSFALTLLLVALWVAWLWNDP

SEQ ID NO: 87303 - protein, 787 aa, Homo sapiens
MASEGTNIPSPVVRQIDKQFLICSICLERYKNPKVLPCLHTFCERCLQNYIPAHSLTLSCPVCRQTSILPEKGVAALQNNFFITNLMDVLQRTPGSNAEESSILETVTAVAAGKPLSCPNHDGNVLQSQLDTLLQGQESIKSCSNFTAQALNHGTETEVLLVKKQMSEKLNELADQDFPLHPRENDQLDFIVETEGLKKSIHNLGTILTTNAVASETVATGEGLRQTIIGQPMSVTITTKDKDGELCKTGNAYLTAELSTPDGSVADGEILDNKNGTYEFLYTVQKEGDFTLSLRLYDQHIRGSPFKLKVIRSADVSPTTEGVKRRVKSPGSGHVKQKAVKRPASMYSTGKRKENPIEDDLIFRVGTKGRNKGEFTNLQGVAASTNGKILIADSNNQCVQIFSNDGQFKSRFGIRGRSPGQLQRPTGVAVHPSGDIIIADYDNKWVSIFSSDGKFKTKIGSGKLMGPKGVSVDRNGHIIVVDNKACCVFIFQPNGKIVTRFGSRGNGDRQFAGPHFAAVNSNNEIIITDFHNHSVKVFNQEGEFMLKFGSNGEGNGQFNAPTGVAVDSNGNIIVADWGNSRIQSKKKGLSAEEKRTRMMEIFSETKDVFQLKDLEKIAPKEKGITAMSVKEVLQSLVDDGMVDCERIGTSNYYWAFPSKALHARKHKLEVLESQLSEGSQKHASLQKSIEKAKIGRCETEERTRLAKELSSLRDQREQLKAEVEKYKDCDPQVVEEIRQANKVAKEAANRWTDNIFAIKSWAKRKFGFEENKIDRTFGIPEDFDYID

SEQ ID NO: 87304 - protein, 378 aa, Homo sapiens
MRTKAAGCAERRPLQPRTEAAAAPAGRAMPSEYTYVKLRSDCSRPSLQWYTRAQSKMRRPSLLLKDILKCTLLVFGVWILYILKLNYTTEECDMKKMHYVDPDHVKKAPKDSEAESKYDPPFGFRKFSSKVQTLLELLPEHDLPEHLKAKTCRRCVVIGSGGILHGLELGHTLNQFDVVIRLNSAPVEGYSEHVGNKTTIRMTYPEGAPLSDLEYYSNDLFVAVLFKSVDFNWLQAMVKKETLPFWVRLFFWKQVAEKIPLQPKHFRILNPVIIKETAFDILQYSEPQSRFWGRDKNVPTIGVIAVVLATHLCDEVSLAGFGYDLNQPRTPLHYFDSQCMAAMNFQTMHNVTTETKFLLKLVKEGVVKDLSGGIDREF

SEQ ID NO: 87305 - protein, 57 aa, Homo sapiens
MGFWCRMSENQEQEEVITVRVQDPRVQNEGSWNSYVDYKIFLHMEFCSCCPGWSAVV

SEQ ID NO: 87306 - protein, 202 aa, Homo sapiens
  MOD_RES (1)..(1): Any amino acid
XARQLFKELYIDPSKVDNLLQLGFTAQEARLGLRACDGNVDHAATHITNRREILLSNPQMWWLNDSNPETDNRQESPSQENIDRLVYMGFDALVAEAALRVFRGNVQLAAQTLAHNGGSLPPELPLSPEDSLSPPATSPSDSAGTSSASTDEDMETEAVNEILEDIPEHEEDYLDSTLEDEEIIIAEYLSYVENRKSATKKN

SEQ ID NO: 87307 - protein, 118 aa, Homo sapiens
MIFHLVVLRKRSPEQKTHQQVLLWKALLRLLVEGPLRAMSHQLKNSKSTQRLLFKEDRKRQGYLLNWRLPPPKRSHLVHLYYEMKMVLMRSQLRRQLFKNLGGRQRKPSQQNYSMPMS

SEQ ID NO: 87308 - protein, 1026 aa, Homo sapiens
MARHGPPWSRLDAQQERDVRELVRGVAGLQDEADPNFQLALNFAWSNFRFHRFLDVNSHKIEKTIEGIYEKFVIHSDLSKAASWKRLTEEFLNAPLPSIKEIKTDAHYSILSLLLCLSDSPSNSSYVETPRNKEVEKKDDFDWGKYLMEDEEMDIGPYMDTPNWSEESEEENDQQPLSREDSGIQVDRTPLEEQDQNRKLDPCISWKDEPDDRSWLEHHVVHQYWTARPSQFPHSLHLHSNLAAVWDQHLYSSDPLYVPDDRVLVTETQVIRETLWLLSGVKKLFIFQLIDGKVTVRNNIIVTHLTHSCLRSVLEQIAAYGQVVFRLQEFIDEVMGHSSESMLPGSGSVPKKSTEAPFRTYQAFMWALYKYFISFKEELAEIEKCIINNDTTITLAIVVDKLAPRLSQLKVLHKVFSTGVAEVPPDTRNVVRASHLLNTLYKAILEYDNVGEASEQTVSLLFSLWVETVRPYLQTVDEWIVHGHLWDGAREFIIQRNKNVPVNHRDFWYATYTLYSVSEKTENEEKMSDNASASSGSDQGPSSRQHTMVSFLKPVLKQIIMAGKSMQLLKNLQCAESTTCQAGARDAERKSLYTLFLESVQSRLRHGEDSTPQVLTEQQATKENLMKMQSIAESHLELDDVHDPLLAINFARMYLEQSDFHEKFAGGDVCVDRSSESVTCQTFELTLRSCLYPHIDKQYLDCCGNLMQTLKKDYRLVEYLQAMRNFFLMEGGDTMYDFYTSIFDKIREKETWQNVSFLNVQLQEAVGQRYPEDSSRLSISFENVDTAKKKLPVHILDGLTLSYKVPWPVDIVISLECQKIYNQVFLLLLQIKWAKYSLDVLLFGELVSTAEKPRLKEGLIHEQDTVAQFGPQKEPVRQQIHRMFLLRVKLMHFVNSLHNYIMTRILHSTGLEFQHQVEEAKDLDQLIKIHYRYLSTIHDRCLLREKVSFVKEAIMKVLNLALMFADGWQAGLGTWRMESIEKMESDFKNCHMFLVTILNKAVCRGSFPHCLALLPMLERIGTVLAH

SEQ ID NO: 87309 - protein, 131 aa, Homo sapiens
MPWFHGKISGQEAVQQLQPPEDGLFLVRESARHPGDYVLCVSFGRDVIHYRVLHRDGHLTIDEAVFFCNLMDMVEHYSKDKGAICTKLVRPKRKHGTKSAEEELARAGWLLNLQHLTLGAQIGEGEFGAVL

SEQ ID NO: 87310 - protein, 53 aa, Homo sapiens
MAVFDLAIPAEQIIFHGGRVCSNRHGLIRKYGLNMCRQCFRQYAKDIGFIKLD

SEQ ID NO: 87311 - protein, 181 aa, Homo sapiens
MRGPSGALWLLLALRTVLGGMEVRWCATSDPEQHKCGNMSEAFREAGIQPSLLCVRGTSADHCVQLIAAQEADAITLDGGAIYEAGKEHGLKPVVGEVYDQEVGTSYYAVAVVRRSSHVTIDTLKGVKSCHTGINRTVGWNVPVGYLVESGRLSVMGCDVLKGPKRGADLHPESSQVAHQP

SEQ ID NO: 87312 - protein, 195 aa, Homo sapiens
  MOD_RES (1)..(1): Any amino acid
XFYAEFQNIRYKGESVQGALILAELLSAVKRSLARTLVIIVSLGYGIVKPRLGVTLHKVVVAGALYLLFSGMEGVLRVTGYFSYPLTLIVNLALSAIDACVILWIFISLTQTMKLLKLRRNIVKLSLYRHFTNTLILAVAASIVFIIWTTMKFRIVTCQSDWRELWVDDAIWRLLFSMILFVIMVLWRPSANNQR

SEQ ID NO: 87313 - protein, 717 aa, Homo sapiens
MFCSEKKLREVERIVKANDREYNEKFQYADNRIHTSKYNILTFLPINLFEQFQRVANAYFLCLLILQLIPEISSLTWFTTIVPLVLVITMTAVKDATDDYFRHKSDNQVNNRQSEVLINSKLQNEKWMNVKVGDIIKLENNQFVAADLLLLSSSEPHGLCYVETAELDGETNLKVRHALSVTSELGADISRLAGFDGIVVCEVPNNKLDKFMGILSWKDSKHSLNNEKIILRGCILRNTSWCFGMVIFAGPDTKLMQNSGKTKFKRTSIDRLMNTLVLWIFGFLICLGIILAIGNSIWESQTGDQFRTFLFWNEGEKSSVFSGFLTFWSYIIILNTVVPISLYVSVEVIRLGHSYFINWDRKMYYSRKAIPAVARTTTLNEELGQIEYIFSDKTGTLTQNIMTFKRCSINGRIYGEVHDDLDQKTEITQEKEPVDFSVKSQADREFQFFDHHLMESIKMGDPKVHEFLRLLALCHTVMSEENSAGELIYQVQSPDEGALVTAARNFGFIFKSRTPETITIEELGTLVTYQLLAFLDFNNTRKRMSVIVRNPEGQIKLYSKGADTILFEKLHPSNEVLLSLTSDHLSEFAGEGLRTLAIAYRDLDDKYFKEWHKMLEDANAATEERDERIAGLYEEIERDLMLLGATAVEDKLQEGVIETVTSLSLANIKIWVLTGDKQETAINIGYACNMLTDDMNDVFVIAGNNAVEVREELRLMP

SEQ ID NO: 87314 - protein, 475 aa, Homo sapiens
MWPQPRLPPHPAMSEKTQQGKLAAAKKKLKAYWQRKSPGIPAGANRKKKVNGSSPDTATSGGYHSPGDSATGIYGEGRASSTTLQDLESQYQELAVALDSSSAIISQLTENINSLVRTSKEEKKHEIHLVQKLGRSLFKLKNQTAEPLAPEPPAGPSKVEQLQDETNHLRKELESVGRQLQAEVENNQMLSLLNRRQEERLREQEERLHEQEERLHEQEERLCEQEEERLCEQEERLREQEERLREQEEERLREQEERLCEQEERLCEQEERLCEQEKLPGQERLLEEVEKLLEQERRQEEQERLLERERLLDEVEELLEQERLRQQDERLWQQETLRELERLRELERLRELERMLELGWEALYEQRAEPRSGFEELNNENKSTLQLEQQVKELEKSGGAEEPRGSESAAAARPVPGAPVPQGAWMCGQAGWTPQEHPGLSGEAVGTGEAAGGAEEAACHSFRAAENRELNITII

SEQ ID NO: 87315 - protein, 223 aa, Homo sapiens
MERPEEGKQSPPPQPWGRLLRLGAEEGEPHVLLRKREWTIGRRRGCDLSFPSNKLVSGDHCRIVVDEKSGQVTLEDTSTSGTVINKLKVVKKQTCPLQTGDVIYLVYRKNEPEHNVAYLYESLSEKQGMTQESFDTSGAGAGRGADPRVPPSSPATQVCFEEPQPSTSTSDLFPTASASSTEPSPAGRERSSSCGSGGGGISPKGSGPSVASDEVSSFASALP

SEQ ID NO: 87316 - protein, 65 aa, Homo sapiens
MFNIRNIGKTLVTRTQGTKIASDGLKGRVFEVSLADLQNDEVAFRKFKLITEDVQGKNCLTNFHG

SEQ ID NO: 87317 - protein, 61 aa, Homo sapiens
  MOD_RES (1)..(1): Any amino acid
XSTGDTVLLPLAQGGHRPLSRAQSSPAAPASLSAPEPASQARVLSSSETPARTLPFTTGSL

SEQ ID NO: 87318 - protein, 30 aa, Homo sapiens
MIHVRRHETRRNSKSHVPEQKSRVDWRRTK

SEQ ID NO: 87319 - protein, 412 aa, Homo sapiens
MALDILAMAPLYQAPAINRIGPKTDPSKRPADPLKPLVLSRTKLTTIEAKRIMSILDEAIYKVELVTLLSYVASNREDMEGMLGEDVMRAVREHEDLCQVLLENVRCLKEKERQLQEQKEAEEEGWLRDRLLSIELQKSSLSPLMQQIKDSTKNVLRLLLSNPQAARLLQMQTQGRSAEAQNFIDSLIELRGFLFEKLLTSPMEARDKAQFLQDISRQNSNNQQIIDTLEKELAERMKNRNAEVEKENFVIQELKNHLHQVLKFSENSLVRTKQEAEKQQKADFRASQARVAKIQQEILQLQSQFYNLVMENREAEQALRKVPREAARMGRGGPWWGGWVGLFHHSWRSSSVGQGRTAPATQEVAWWRGRAQEQGRPKSKPVSPGRQEGAAHRPGDRGQTGILSQHCCMPAL

SEQ ID NO: 87320 - protein, 123 aa, Homo sapiens
MERAPERRDVCWSQRGEDGMCAGPLAGPALTFDDCCCRQGRGWGAQCRPCPPRGAGSHCPTSQSESNSFWDTSPLLLGKPPRDEDSSEEDSDECRCVSGRCVPRPGGAVCECPGGFQLDASRA

SEQ ID NO: 87321 - protein, 93 aa, Homo sapiens
MSRRRAEPGCGGSGRRAGAPGEGRGRRRYAPGPAAKALPRRRLALQSQVPMGWTMRLVTAALLLGLMMVVTGDEDENSPCAHEALLDEDTLFC

SEQ ID NO: 87322 - protein, 48 aa, Homo sapiens
QDQIVKEDSVEAVGAQLKVYHQQYQDKSREYDQLYEEYTRTSQQALEE

SEQ ID NO: 87323 - protein, 137 aa, Homo sapiens
MSNNGADLTFGYISCFVAILLFGSNFVPLKKFDTGDGMFLQWVLCAAIWLVALVVNLILHCPKFWPFAMLGGCIWATGNIAVVPIIKTIGLGLGILIWGSFNALTGWASSRFGWFGLDAEEVSNPLLNYIGAGLSVV

SEQ ID NO: 87324 - protein, 226 aa, Homo sapiens
MAERQEEQRGSPPLRAEGKADAEVKLILYHWTHSFSSQKVRLVIAEKALKCEEHDVSLPLSEHNEPWFMRLNSTGEVPVLIHGENIICEATQIIDYLEQTFLDERTPRLMPDKESMYYPRVQHYRELLDSLPMDAYTHGCILHPELTVDSMIPAYATTRIRSQIGNTESELKKLAEENPDLQEAYIAKQKRLKVFHHWKSSLDLHPSMCRPDLLCPLRSVLYVKAA

SEQ ID NO: 87325 - protein, 194 aa, Homo sapiens
MLSESKEGEEKEEVTMDTSENRPENDVPEPPMPIADQVSNDDRPEGSVEDEEKKESSLPKSFKRKISVVSATKGVPAGNSDTEGGQPGRKRRWGASTATTQKKPSISITTESLKEAVVDLHADDSRISEDETERNGDDGTHDKGLKICRTVTQVVPAEGQENGQREEEEEEKEPEAEPPVPPQVSVEVALPPPA

SEQ ID NO: 87326 - protein, 336 aa, Homo sapiens
MDADEGQDMSQVSVGKPHKCGYCGRSYKQRSSLEEHKERCHNYLESMGLPGTLYPVIKEETNHSEMAEDLCKIGSERSLVLDRLASNVAKRKSSMPQKFLGDKGLSDTPYDSSASYEKENEMMKSHVMDQAINNAINYLGAESLRPLVQTPPGGSEVVPVISPMYQLHKPLAEGTPRSNHSAQDSAVENLLLLSKAKLVPSEREASPSNSCQDSTDTESNNEEQRSGLIYLTNHIAPHARNGLSLKEEHRAYDLLRAASENSQDALRVVSTSGEQMKVYKCEHCRVLFLDHVMYTIHMGCHGFRDPFECNMCGYHSQDRYEFSSHITRGEHRFHMS

SEQ ID NO: 87327 - protein, 205 aa, Homo sapiens
MAGAQPGVHALQLKPVCVSDSLKKGTKFVKWDDDSTIVTPIILRTDPQGFFFYWTDQNKETELLDLSLVKDARCGRHAKAPKDPKLRELLDVGNIGRLEQRMITVVYGPDLVNISHLNLVAFQEEVAKEWTNEVFSLATNLLAQNMSRDAFLEKAYTKLKLQVTPEGRIPLKNIYRLFSADRKRVETALEACSLPSSRVSMCVML

SEQ ID NO: 87328 - protein, 1200 aa, Homo sapiens
MKVAGGLELGAAALLSASPRALVTLSTGPTCSILPKNPLFPQNLSSQPCIKMEGDKSLTFSSYGLQWCLYELDKEEFQTFKELLKKKSSESTTCSIPQFEIENANVECLALLLHEYYGASLAWATSISIFENMNLRTLSEKARDDMKRHSPEDPEATMTDQGPSKEKVPDISDSNNKHKYVGIHSSFAEISQAMEQEGATAAETEEQEISQAMEQEGATAAETEEQGHGGDTWDYKSHVMTKFAEEEDVRRSFENTAADWPEMQTLAGAFDSDRWGFRPRTVVLHGKSGIGKSALARRIVLCWAQGGLYQGMFSYVFFLPVREMQRKKESSVTEFISREWPDSQAPVTEIMSRPERLLFIIDGFDDLGSVLNNDTKLCKDWAEKQPPFTLIRSLLRKVLLPESFLIVTVRDVGTEKLKSEVVSPRYLLVRGISGEQRIHLLLERGIGEHQKTQGLRAIMNNRELLDQCQVPAVGSLICVALQLQDVVGESVAPFNQTLTGLHAAFVFHQLTPRGVVRRCLNLEERVVLKRFCRMAVEGVWNRKSVFDGDDLMVQGLGESELRALFHMNILLPDSHCEEYYTFFHLSLQDFCAALYYVLEGLEIEPALCPLYVEKTKRSMELKQAGFHIHSLWMKRFLFGLVSEDVRRPLEVLLGCPVPLGVKQKLLHWVSLLGQQPNATTPGDTLDAFHCLFETQDKEFVRLALNSFQEVWLPINQNLDLIASSFCLQHCPYLRKIRVDVKGIFPRDESAEACPVVPLWMRDKTLIEEQWEDFCSMLGTHPHLRQLDLGSSILTERAMKTLCAKLRHPTCKIQTLMFRNAQITPGVQHLWRIVMANRNLRSLNLGGTHLKEEDVRMACEALKHPKCLLESLRLDCCGLTHACYLKISQILTTSPSLKSLSLAGNKVTDQGVMPLSDALRVSQCALQKLILEDCGITATGCQSLASALVSNRSLTHLCLSNNSLGNEGVNLLCRSMRLPHCSLQRLMLNQCHLDTAGCGFLALALMGNSWLTHLSLSMNPVEDNGVKLLCEVMREPSCHLQDLELVKCHLTAACCESLSCVISRSRHLKSLDLTDNALGDGGVAALCEGLKQKNSVLARLGLKACGLTSDCCEALSLALSCNRHLTSLNLVQNNFSPKGMMKLCSAFACPTSNLQIIGLWKWQYPVQIRKLLEEVQLLKPRVVIDGSWHSFDEDDRYWWKN

SEQ ID NO: 87329 - protein, 45 aa, Homo sapiens
DDSTSHSDHQDPISLAVEMAAVNHTILALARQGANEIKTEALDDD

SEQ ID NO: 87330 - protein, 839 aa, Homo sapiens
MTPGILGHWTVCPEHFSAMRGKARDCSEAAPKCNSSTVRFQGLAEGTKGTMKMDMEDADMTLWTEAEFEEKCTYIVNDHPWDSGADGGTSVQAEASLPRNLLFKYATNSEEVIGVMSKEYIPKGTRFGPLIGEIYTNDTVPKNANRKYFWRIYSRGELHHFIDGFNEEKSNWMRYVNPAHSPREQNLAACQNGMNIYFYTIKPIPANQELLVWYCRDFAERLHYPYPGELTMMNLTQTQSSLKQPSTEKNELCPKNVPKREYSVKEILKLDSNPSKGKDLYRSNISPLTSEKDLDDFRRRGSPEMPFYPRVVYPIRAPLPEDFLKASLAYGIERPTYITRSPIPSSTTPSPSARSSPDQSLKSSSPHSSPGNTVSPVGPGSQEHRDSYAYLNASYGTEGLGSYPGYAPLPHLPPAFIPSYNAHYPKFLLPPYGMNCNGLSAVSSMNGINNFGLFPRLCPVYSNLLGGGSLPHPMLNPTSLPSSLPSDGARRLLQPEHPREVLVPAPHSAFSFTGAAASMKDKACSPTSGSPTAGTAATAEHVVQPKATSAAMAAPSSDEAMNLIKNKRNMTGYKTLPYPLKKQNGKIKYECNVCAKTFGQLSNLKVHLRVHSGERPFKCQTCNKGFTQLAHLQKHYLVHTGEKPHECQVCHKRFSSTSNLKTHLRLHSGEKPYQCKVCPAKFTQFVHLKLHKRLHTRERPHKCSQCHKNYIHLCSLKVHLKGNCAAAPAPGLPLEDLTRINEEIEKFDISDNADRLEDVEDDISVISVVEKEILAVVRKEKEETGLKVSLQRNMGNGLLSSGCSLYESSDLPLMKLPPSNPLPLVPVKVKQETVEPMDP

SEQ ID NO: 87331 - protein, 941 aa, Homo sapiens
  MOD_RES (1)..(1): Any amino acid
XPEGSAVPDSWETLPGTQVTRKEPGALRPCSLRDCLMQDITVLIQQVEVDPSFPEDCLQSSEPLEAGAGKEGKKDDKPTLGAGAPDCSEVGEGHAQVGLGALQLVPDDNRGKEGNDDQDDWSTQEIEACLQDFDNMTWEIECTSEMLKKLSSKVMTKVIKKKIILAIQQLGNGEWTQGLQKRLKHLKGSIQLFEAKLDKGARMLWELAIDFSPRCSENPEKIIATEQNTCAMEKSGRIYTEIIRIWDIVLDHCKLADSIKAICNAYNRGLSCVLRKKLKGINKGQVSANMKIQKRIPRCYVEDTEAEKGREHVNPEYFPPASAVETEYNIMKFHSFSTNMAFNILNDTTATVEYPFRVGELEYAVIDLNPRPLEPIILIGRSGTGKTTCCLYRLWKKFHVYWEKAEQAGSPLLAKQVWLKRRLEVEPGKESPGGEEEEEEEDEEEEDSIEVETVESIDEQEYEACAGGAGVEPAGDGQAAEVCAPEHPHQLEHLHQIFVTKNHVLCQEVQRNFIELSKSTKATSHYKPLDPNIHKLQDLRDENFPLFVTSKQLLLLLDASLPKPFFLRNEDGSLKRTIIGWSAQEESTIPSWQEDEEEAEVDGDYSEEDKAVEMRTGDSDPRVYVTFEVFKNEIWPKMTKGRTAYNPALIWKEIKSFLKGSFEALSCPHGRLTEEVYKKLGRKRCPNFKEDRSEIYSLFSLYQQIRSQKGYFDEEDVLYNISRRLSKLRVLPWSIHELYGDEIQDFTQAELALLMKCINDPNSMFLTGDTAQSIMKGVAFRFSDLRSLFHYASRNTIDKQCAVRKPKKIHQLYQNYRSHSGILNLASGVVDLLQFYFPESFDRLPRDSGLFDGPKPTVLESCSVSDLAILLRGNKRKTQPIEFGAHQVILVANETAKEKIPEELGLALVLTIYEAKGLEFDDVLLYNFFTDSEGCPSWSKL

SEQ ID NO: 87332 - protein, 1806 aa, Homo sapiens
  MOD_RES (1)..(1): Any amino acid
XMPLKLLTNHYERCWKYYCLPGGWGNFGAASEEELHLSRKLFWGIFDALSQKKYEQELFKLALPCLSAVAGALPPDYMESNYVSMMEKQSSMDSEGNFNPQPVDTSNITIPEKLEYFINKYAEHSHDKWSMDKLANGWIYGEIYSDSSKVQPLMKPYKLLSEKEKEIYRWPIKESLKTMLAWGWRIERTREGDSMALYNRTRRISQTSQVSVDAAHGYSPRAIDMSNVTLSRDLHAMAEMMAENYHNIWAKKKKMELESKGGGNHPLLVPYDTLTAKEKAKDREKAQDILKFLQINGYAVSRGFKDLELDTPSIEKRFAYSFLQQLIRYVDEAHQYILEFDGGSRGKGEHFPYEQEIKFFAKVVLPLIDQYFKNHRLYFLSAASRPLCSGGHASNKEKEMVTSLFCKLGVLVRHRISLFGNDATSIVNCLHILGQTLDARTVMKTGLESVKSALRAFLDNAAEDLEKTMENLKQGQFTHTRNQPKGVTQIINYTTVALLPMLSSLFEHIGQHQFGEDLILEDVQVSCYRILTSLYALGTSKSIYVERQRSALGECLAAFAGAFPVAFLETHLDKHNIYSIYNTKSSRERAALSLPTNVEDVCPNIPSLEKLMEEIVELAESGIRYTQMPHVMEVILPMLCSYMSRWWEHGPENNPERAEMCCTALNSEHMNTLLGNILKIIYNNLGIDEGAWMKRLAVFSQPIINKVKPQLLKTHFLPLMEKLKKKAATVVSEEDHLKAEARGDMSEAELLILDEFTTLARDLYAFYPLLIRFVDYNRAKWLKEPNPEAEELFRMVAEVFIYWSKSHNFKREEQNFVVQNEINNMSFLITDTKSKMSKAAVSDQERKKMKRKGDRYSMQTSLIVAALKRLLPIGLNICAPGDQELIALAKNRFSLKDTEDEVRDIIRSNIHLQGKLEDPAIRWQMALYKDLPNRTDDTSDPEKTVERVLDIANVLFHLEQVEHPQRSKKAVWHKLLSKQRKRAVVACFRMAPLYNLPRHRAVNLFLQGYEKSWIETEEHYFEDKLIEDLAKPGAEPPEEDEGTKRVDPLHQLILLFSRTALTEKCKLEEDFLYMAYADIMAKSCHDEEDDDGEEEVKSFEVTGSQRSKEKEMEKQKLLYQQARLHDRGAAEMVLQTISASKGETGPMVAATLKLGIAILNGGNSTVQQKMLDYLKEKKDVGFFQSLAGLMQSCSVLDLNAFERQNKAEGLGMVTEEGSGEKVLQDDEFTCDLFRFLQLLCEGHNSDFQNYLRTQTGNNTTVNIIISTVDYLLRVQESISDFYWYYSGKDVIDEQGQRNFSKAIQVAKQVFNTLTEYIQGPCTGNQQSLAHSRLWDAVVGFLHVFAHMQMKLSQDSSQIELLKELMDLQKDMVVMLLSMLEGNVVNGTIGKQMVDMLVESSNNVEMILKFFDMFLKLKDLTSSDTFKEYDPDGKGVISKRDFHKAMESHKHYTQSETEFLLSCAETDENETLDYEEFVKRFHEPAKDIGFNVAVLLTNLSEHMPNDTRLQTFLELAESVLNYFQPFLGRIEIMGSAKRIERVYFEISESSRTQWEKPQVKESKRQFIFDVVNEGGEKEKMELFVNFCEDTIFEMQLAAQISESDLNERSANKEESEKERPEEQGPRMAFFSILTVRSALFALRYNILTLMRMLSLKSLKKQMKKVKKMTVKDMVTAFFSSYWSIFMTLLHFVASVFRGFFRIICSLLLGGSLVEGAKKIKVAELLANMPDPTQDEVRGDGEEGERKPLEAALPSEDLTDLKELTEESDLLSDIFGLDLKREGGQYKLIPHNPNAGLSDLMSNPVPMP

SEQ ID NO: 87333 - protein, 310 aa, Homo sapiens
MASVWKRLQRVGKHASKFQFVASYQELMVECTKKWQPDKLVVVWTRRSRRKSSKAHSWQPGIKNPYRGVVVWPVPENIEITVTLFKDPHAEEFEDKEWTFVIENESPSGRRKALATSSINMKQYASPMPTQTDVKLKFKPLSKKVVSAALQFSLSCIFLREGKATDEDMQSLASLMSMKQADIGNLDDFEEDNEDDDENRVNQEEKAAKITELINKLNFLDEAEKDLATVNSNPFDDPDAAELNPFGDPDSEEPITETASPRKTEDSFYNNSYNPFKEVQTPQYLNPFDEPEAFVTIKDSPPQSTKRKNI

SEQ ID NO: 87334 - protein, 98 aa, Homo sapiens
MSRKQNQKDSSGFIFDLQSNTVLAQGGAFENMKEKINAVRAIVPNKSNNEIILVLQHFDNCVDKTVQAFMEGSASEVLKEWTVTGKKKNKKKKNKPKP

SEQ ID NO: 87335 - protein, 1855 aa, Homo sapiens
MAASELYTKFARVWIPDPEEVWKSAELLKDYKPGDKVLLLHLEEGKDLEYHLDPKTKELPHLRNPDILVGENDLTALSYLHEPAVLHNLRVRFIDSKLIYTYCGIVLVAINPYEQLPIYGEDIINAYSGQNMGDMDPHIFAVAEEAYKQMARDERNQSIIVSGESGAGKTVSAKYAMRYFATVSGSASEANVEEKVLASNPIMESIGNAKTTRNDNSSRFGKYIEIGFDKRYRIIGANMRTYLLEKSRVVFQAEEERNYHIFYQLCASAKLPEFKMLRLGNADNFNYTKQGGSPVIEGVDDAKEMAHTRQACTLLGISESHQMGIFRILAGILHLGNVGFTSRDADSCTIPPKHEPLCIFCELMGVDYEEMCHWLCHRKLATATETYIKPISKLQATNARDALAKHIYAKLFNWIVDNVNQALHSAVKQHSFIGVLDIYGFETFEINSFEQFCINYANEKLQQQFNMHVFKLEQEEYMKEQIPWTLIDFYDNQPCINLIESKLGILDLLDEECKMPKGTDDTWAQKLYNTHLNKCALFEKPRLSNKAFIIQHFADKVEYQCEGFLEKNKDTVFEEQIKVLKSSKFKMLPELFQDDEKAISPTSATSSGRTPLTRTPAKPTKGRPGQMAKEHKKTVGHQFRNSLHLLMETLNATTPHYVRCIKPNDFKFPFTFDEKRAVQQLRACGVLETIRISAAGFPSRWTYQEFFSRYRVLMKQKDVLSDRKQTCKNVLEKLILDKDKYQFGKTKIFFRAGQVAYLEKLRADKLRAACIRIQKTIRGWLLRKKYLRMRKAAITMQRYVRGYQARCYAKFLRRTKAATIIQKYWRMYVVRRRYKIRRAATIVLQSYLRGFLARNRYRKILREHKAVIIQKRVRGWLARTHYKRSMHAIIYLQCCFRRMMAKRELKKLKIEARSVERYKKLHIGMENKIMQLQRKVDEQNKDYKCLVEKLTNLEGIYNSETEKLRSDLERLQLSEEEAKVATGRVLSLQEEIAKLRKDLEQTRSEKKCIEEHADRYKQETEQLVSNLKEENTLLKQEKEALNHRIVQQAKEMTETMEKKLVEETKQLELDLNDERLRYQNLLNEFSRLEERYDDLKEEMTLMVHVPKPGHKRTDSTHSSNESEYIFSSEIAEMEDIPSRTEEPSEKKVPLDMSLFLKLQKRVTELEQEKQVMQDELDRKEEQVLRSKAKEEERPQIRGAELEYESLKRQELESENKKLKNELNELRKALSEKSAPEVTAPGAPAYRVLMEQLTSVSEELDVRKEEVLILRSQLVSQKEAIQPKPSQNTMTDSTILLEDVQKMKDKGEIAQAYIGLKETNRSSALDYHELNEDGELWLVYEGLKQANRLLESQLQSQKRSHENEAEALRGEIQSLKEENNRQQQLLAQNLQLPPEARIEASLQHEITRLTNENLDLMEQLEKQDKTVRKLKKQLKVFAKKIGELEVGQMENISPGQIIDEPIRPVNIPRKEKDFQGMLEYKKEDEQKLVKNLILELKPRGVAVNLIPGLPAYILFMCVRHADYLNDDQKVRSLLTSTINSIKKVLKKRGDDFETVSFWLSNTCRFLHCLKQYSGEEGFMKHNTSRQNEHCLTNFDLAEYRQVLSDLAIQIYQQLVRVLENILQPMIVSGMLEHETIQGVSGVKPTGLRKRTSSIADEGTYTLDSILRQLNSFHSVMCQHGMDPELIKQVVKQMFYIIGAITLNNLLLRKDMCSWSKGMQIRYNVSQLEEWLRDKNLMNSGAKETLEPLIQAAQLLQVKKKTDDDAEAICSMCNALTTAQIVKVLNLYTPVNEFEERVSVSFIRTIQMRLRDRKDSPQLLMDAKHIFPVTFPFNPSSLALETIQIPASLGLGFISRV

SEQ ID NO: 87336 - protein, 92 aa, Homo sapiens
  MOD_RES (1)..(1): Any amino acid
XKELSDDLSKYLKLPEPSASLPNPPSKKIKLSDEPVEAKEDYTKFNTKDLKTEKKNSKMTAAQKALAKVDKSGMKSIDTFFGMAAQRQKRGK

SEQ ID NO: 87337 - protein, 289 aa, Homo sapiens [sequence omitted]

SEQ ID NO: 87338 - protein, 208 aa, Homo sapiens
MKVKKGGGGAGTATESAPGPSGQSVAPIPQPPAESESGSESEPDAGPGPRPGPLQRKQPIGPEDVLGLQRITGGARPLFPAWRFKIRDMDSGTVLFEIKKPPVSERLPINRRDLDPNAGRFVRYQFTPAFLRLRQVGATVEFTVGDKPVNNFRMIERHYFRNQLLKSFDFHFGFCIPSSKNTCEHIYDFPPLSEELSARAGSSGSGEV

SEQ ID NO: 87339 - protein, 168 aa, Homo sapiens
  MOD_RES (1)..(1): Any amino acid
XALSVYLTPKTSVSGNWIEIAYGTSSGAVRVIVQHPETVGSGPQLFQTFTVHRSPVTKIMLSEKHLVSVCADNNHVRTWTVTRFRGMISTQPGSTPLASFKILSLEETESHGSYSSGNDIGPFGERDDQQVFIQKVVPITNKLFVRLSSTGKSLCGVSLVSRSSQEPT

SEQ ID NO: 87340 - protein, 138 aa, Homo sapiens
  MOD_RES (1)..(1): Any amino acid
XDLTRENVNQCILEMLIAAPDTMSVSLFFMLFLIAKHPNVEEAIIKEIQTVIGERDIKIDDIQKLKVMENFIYESMRYQPVVDLVMRKALEDDVIDGYPVKKGTNIILNIGRMHRLEFFPKPNEFTLENFAKNVRALP

SEQ ID NO: 87341 - protein, 187 aa, Homo sapiens
MLLTFQRGPAGGENRPFPPGLWPTHPCEVFRSCRKQSYDSETAEDDISDVQGTQRLELRDDGAFSTPTGGSDTLVGTSLDTPPTSVTGTSEEQVSWWGSGQTVLEQEAGSGGGTRRLPGSPSSVPQSGLRREEPDLQPQLASEAPRRPAQPPPSKSALLPPPSPRVGKRSPPGPPAQPAATPTSPHR

SEQ ID NO: 87342 - protein, 437 aa, Homo sapiens
MKKGIRYETSRKTSYIFQQPQHGPWQTRMRKISNHGSLRVAKVAYPLGLCVGVFIYVAYIKWHRATATQAFFSITRAAPGARWGQQAHSPLGTAADGHEVFYGIMFDAGSTGTRVHVFQFTRPPRETPTLTHETFKALKPGLSAYADDVEKSAQGIRELLDVAKQDIPFDFWKATPLVLKATAGLRLLPGEKAQKLLQKVKKVFKASPFLVGDDCVSIMNGTDEGVSAWITINFLTGSLKTPGGSSVGMLDLGGGSTQIAFLPRVEGTLQASPPGYLTALRMFNRTYKLYSYSYLGLGLMSARLAILGGVEGQPAASLHELCAARVSEVLQNRVHRTEEVKHVDFYAFSYYYDLAAGVGLIDAEKGGSLVVGDFEIAAKYGGSHLEREGTCLIPSVSDPGDTAAEQPLLMHGPHLRQPATPGVRLSQEQSAEAHSEN

SEQ ID NO: 87343 - protein, 103 aa, Homo sapiens
MEVLRPQLIRIDGRNYRKNPVQEQTYQHEEDEEDFYQGSMECADEPCDAYEVEQTPQGFRSTLRAPSLLYKHIVGKRGDTRKKIEMETKTSISIPKPGQDGEI

SEQ ID NO: 87344 - protein, 89 aa, Homo sapiens
  MOD_RES (1)..(1): Any amino acid
XYKTWGPEQVCSFLRRGGFEEPVLLKNIRENEITGALLPCLDESRFENLGVSSLGERKKLLSYIQRLVQIHVDTMKGGVSSRMSSSRTG

SEQ ID NO: 87345 - protein, 185 aa, Homo sapiens
MFHGIPATPGIGAPGNKPELYEEVKLYKNAREREKYDNMAELFAVVKTMQALEKAYIKDCVSPSEQVQGSEISSIDEFCRKFRLDCPLAMERIKEDRPITIKDDKGNLNRCIADVVSLFITVMDKLRLEIRAMDEIQPDLRELMETMHRMSHLPPDFEGRQTVSQWLQTLSGMSASDELDDSQVR

SEQ ID NO: 87346 - protein, 74 aa, Homo sapiens
AVEAAELCLEQNNKTEVWERSLKEKWNAKSVYVVGNATASLVSKIGLDTEGETCGNAEKLAEYICSSEEVKGIF

SEQ ID NO: 87347 - protein, 211 aa, Homo sapiens
VSEKWAPFVQENLLMYTKLFVGFLNRALRTDLVSPKHALMVFRVAKVFAQPNLAEMIQKGEQLFLEPELVIPHRQHRLFTAPTFTGSFLSPWPPAVTDASFKVLRLAQLITQAKHTAKSISDQCAESPAGHSFLSWLGFSSMDTNGSYTANDLDEMGQDSVRKTDEYLEKALEYLRQIFRLSEAQLRQFTLALGTTQDENGKKQLPDCIVG

SEQ ID NO: 87348 - protein, 123 aa, Homo sapiens
MRSKKPKKHPKVAVKAKPSPRLTIFDEEVDPDEGLFGPGRKLSPQDPSEDVSSVDPLKLFDDPDLGGAIPLGDSLLLPAACESGGPTPSLSHRDASKELFRTLAHKGFQCAQSNCLLTSPRIP

SEQ ID NO: 87349 - protein, 75 aa, Homo sapiens
MNRRRKFLLASVLALQNSSFIYPSCQKCFSRIILVSKRSNCPKCGSTGESGNANYRYKLSLKVAESNKLFVITVF

SEQ ID NO: 87350 - protein, 230 aa, Homo sapiens
MLETLRERLLSVQQDFTSGYEDTWAALHRRAKDCASAGELVDSEVVMLSAHWEKKKTSLVELQEQLQQLPALIADLESMTANLTHLEASFEEVENNLLHLEDLCGQCELERCKHMQSQQLENYKKNKRKELETFKAELDAEHAQKVLEMEHTQQMKLKERQKFFEEAFQQDMEQYLSTGYLQIAERREPIGSMSSMEVNVDMLEQMDLMDISDQEALDVFLNSGGEENTV

SEQ ID NO: 87351 - protein, 163 aa, Homo sapiens
MMTGTIETTGNISAEKGGSIILQCHLSSTTAQVTQVNWEQQDQLLAICNADLGWHISPSFKDRVAPGPGLGLTLQSLTVNDTGEYFCIYHTYPDGTYTGRIFLEVLESSVAEHGARFQIPLLGAMAATLVVICTAVIVVVALTRKKKALRIHSVEGDLRRKSA

SEQ ID NO: 87352 - protein, 171 aa, Homo sapiens
MAPKHKSSDAGNLDRPKRSRKVLPLSEKVKVLDLIRKDKKSYAEVAKIYGKNESSIREIVKKEKEIRASFAVSPPTAKVTATVRDKCLVKMEQALHLWVEEMNRKRVPIDSNMLRQKALSLYQDFSKGCSETDTKPFTASKGWLHRFRHRFSHHYKKKKGGSPEVGSSRSA

SEQ ID NO: 87353 - protein, 238 aa, Homo sapiens
MPGPWLLLALALTLNLTGVPGGRAQPEAAQQEAVTAAEHPGLDDFLRQVERLLFLRENIQRLQGDQASQIFQSDWLSKRQHPGKREEEEEEGVEEEEEEEGGAVGPHKRQHPGRREDEASWSVDVTQHKRQHPGRRSPWLAYAVPKRQHPGRRLADPKAQRSWEEEEEEEEREEDLMPEKRQHPGKRALGGPCGPQGAYGQAGLLLGLLDDLSRSQGAEEKRQHPGRRAAWVREPLEE

SEQ ID NO: 87354 - protein, 60 aa, Homo sapiens
MTVPVRGFSLLRGRLGRAPALGRSTAPSVRAPGEPGSAFRGFRSSGVRTSREKRFHLPET

SEQ ID NO: 87355 - protein, 32 aa, Homo sapiens
MYHSLSETRHPLQPEEQEVGIDPLSSYSNKSG

SEQ ID NO: 87356 - protein, 83 aa, Homo sapiens
METEAIDGYITCDNELSPEREHSNMAIDLTSSTPNGQHASPSHMTSTNSVKLEMQSDEECDRKPLSREDEIRGHDEGSSLEEP

SEQ ID NO: 87357 - protein, 78 aa, Homo sapiens
MADEIAKAQVARPGGDTIFGKIIRKEIPAKIIFEDDRCLAFHDISPQAPTHFLVIPKKHISQISVAEDDDESVSTFLT

SEQ ID NO: 87358 - protein, 128 aa, Homo sapiens
MLSPTFVLWDVGYPLYTYGSICIIALIIWQVKKSCQKLSLVPNRSCCRCHRRVQQKSGDRTSRARRTSQEEAEKLWKLLFLMKSQGWLPQEGSVRRILCADPCCQICNVMALEIKQLLKLQKLAWITR

SEQ ID NO: 87359 - protein, 277 aa, Homo sapiens
MPYMRYSRKVWDQVKASNPDLKLWEIGKIIGGMWRDLTDEEKQEYLNEYEAEKIEYNESMKAYHNSPAYLAYINAKSRAEAALEEESRQRQSRMEKGEPYMSIQPAEDPDDYDDGFSMKHTATARFQRNHRLISEILSESVVPDVRSVVTTARMQVLKRQVQSLMVHQRKLEAELLQIEERHQEKKRKFLESTDSFNNELKRLCGLKVEVDMEKIAAEIAQAEEQARKRQEEREKEAAEQAERSQSSIVPEEEQAANKGEEKKDDENIPMETGNSPA

SEQ ID NO: 87360 - protein, 146 aa, Homo sapiens
MTEGVKTLGWTKQKGGCHWGRSEGPWLLRLSVGRRRAATLLDGVCRASSCQLCPGHHIGMHQLHRCWGVREEHHRQADEDHPRGWLLRGGMPAVPGGCLQQHHPVHHGHCQSHGQPADRLCRPLQSGRRQAAICTVLHRRGARRAP

SEQ ID NO: 87361 - protein, 208 aa, Homo sapiens
MSDEEVEQVEEQYEEEEEKPRPKLTAPKIPEGEKVDFDDIQKKRQNKDLMELQALIDSHFEARKKEEEELVALKERIEKRRAERAEQQRIRAEKERERQNRLAEEKARREEEDAKRRAEDDLKKKKALSSMGANYSSYLAKADQKRGKKQTAREMKKKILAERRKPLNIDHLGEDKLRDKAKELWETLHQLEIDKFEFGEKLKRQKYD

SEQ ID NO: 87362 - protein, 46 aa, Homo sapiens
  MOD_RES (1)..(1): Any amino acid
XGRPLSFLLQVYAPLPGRPDAFHRCIFLFCCREQPCCAGLRGFVAV

SEQ ID NO: 87363 - protein, 63 aa, Homo sapiens
MAPKDRKPKRSTWRFNLDLTHPVEDGIFDSGNFGTFPSEYLGFSSLVLHFFCFKIGAISTGEG

SEQ ID NO: 87364 - protein, 515 aa, Homo sapiens
DGLEEKQLKFVKKLVQCYQNGLPLRDLAQIFKILNLCSGKIKNQPRFIESAYDIIKLCGLPFLKKKVSDEITYAEDTANSIALLGDLMKIPSSELRIQICKCIVDFYHAEPPKKHIPGYQQASSSYKIQMAEVGGLAKTMVQSMTLLENQLVEKLWVLKVLQHLSTSEVNCTIMMKAQAASGICTHLNDPDPSGQLLFRSSEILWNLLEKSSKEEVIQQLSNLECLLALKEVFKNLFMRGFSHYDRQLRNDILVITTIIAQNPEAPMILLIDGKVILALFTYVKKPEKQKIIDWSAAQHEELQLHAIATLSSVAPLLIEEYMSCQGNARVLAFLEWCESEDPFFSHGNSFHGTGGRGNKFAQMRYSLRLLRAVVYLEDETVNKDLCEKGTIQQMIGIFKNIISKPNEKEEAIVLEIQSDILLILSGLCENHIQRKEIFGTEGVDIVLHVMKTDPRKLQSGLGYNVLLFSTLDSIWCCILGCYPSEDYFLEKEGIFLLLDLLAKDQTAASLLIKLW

SEQ ID NO: 87365 - protein, 482 aa, Homo sapiens
MNGPEDLPKSYDYDLIIIGGGSGGLAAAKEAAQYGKKVMVLDFVTPTPLGTRWGLGGTCVNVGCIPKKLMHQAALLGQALQDSRNYGWKVEETVKHDWDRMIEAVQNHIGSLNWGYRVALREKKVVYENAYGQFIGPHRIKATNNKGKEKIYSAERFLIATGERPRYLGIPGDKEYCISSDDLFSLPYCPGKTLVVGASYVALECAGFLAGIGLDVTVMVRSILLRGFDQDMANKIGEHMEEHGIKFIRQFVPIKVEQIEAGTPGRLRVVAQSTNSEEIIEGEYNTVMLAIGRDACTRKIGLETVGVKINEKTGKIPVTDEEQTNVPYIYAIGDILEDKVELTPVAIQAGRLLAQRLYAGSTVKCDYENVPTTVFTPLEYGACGLSEEKAVEKFGEENIEVYHSYFWPLEWTIPSRDNNKCYAKIICNTKDNERVVGFHVLGPNAGEVTQGFAAALKCGLTKKQLDSTIGIHPVCAEFFSFI

SEQ ID NO: 87366 - protein, 48 aa, Homo sapiens
KALYRRAQGWQGLKEYDQALADLKKAQGIAPEDKGKLAAFVVKVNFVI

SEQ ID NO: 87367 - protein, 90 aa, Homo sapiens
SQVQGANSEFPWRRITALQVDVAGRVTSASLFPQPPPTAPQRTNQKGDYLNKSCKSPRGQPERTTPTSGPGWEADATGTEGRKKGAAGAC

SEQ ID NO: 87368 - protein, 78 aa, Homo sapiens
MATFISVQLKKTSEVDLAKPLVKFIQQTYPSGGEEQAQYCRAAEELSKLRRAAVGRPLDKHEGALETLLRLVSNSGLK

SEQ ID NO: 87369 - protein, 122 aa, Homo sapiens
MTNTKGKRRGTRYMFSRPFRKHGVVPLATYMRIYKKGDIVDIKGMGTVQKGMPHKCYHGKTGRVYNVTQHAVGIVVNKQVKGKILAKRINVRIEHIKHSKSRDSFLKRVKENDQKKKEAKEK

SEQ ID NO: 87370 - protein, 537 aa, Homo sapiens
  MOD_RES (1)..(1): Any amino acid
XSVPGYSPGFRKPPEVVRLRRKRARSRGAAASPPRELTEPAARRAALVAGLPLRPFPAAGGRGGGSGGGPAAARRNPFARLDNRPRVAAEPPDGPAREQPEAPVPTSHVSFSEPDIPSSKSTELPVDWSIKTRLLFTSSQPFTWADHLKAQEEAQGLVQHCRATEVTLPKSIQDPKLSSELRCTFQQSLIYWLHPALSWLPLFPRIGADRKMAGKTSPWSNDATLQHVLMSDWSVSFTSLYNLLKTKLCPYFYVCTYQFTVLFRAAGLAGSDLITALISPTTRGLREAMRNEGIEFSLPLIKESGHKKETASGTSLGYGEEQAISDEDEEESFSWLEEMGVQDKIKKPDILSIKLRKEKHEVQMDHRPESVVLVKGINTFTLLNFLINSKSLVATSGPQAGLPPTLLSPVAFRGATMQMLKARSVNVKTQALSGYRDQFSLEITGPIMPHSLHSLTMLLKSSQSGSFSAVLYPHEPTAVFNICLQMDKVLDMEVVHKELTNCGLHPNTLEQLSQIPLLGKSSLRNVVLRDYIYNWRS

SEQ ID NO: 87371 - protein, 41 aa, Homo sapiens
MIIVAISPKYKQDVEGAESQLDEDEHGLHTKYIHRMMQIEF

SEQ ID NO: 87372 - protein, 651 aa, Homo sapiens
  MOD_RES (1)..(1): Any amino acid
XSDTNIFDSNVPSNKSNFSRGDERRHEAAVPPLAIPSARPEKRDSRVSTSSQESKTTNVRQTYDDGAATRLMSTVKPLREPAPSEDVIDIKPEPDDLIDEDLNFVQENPLSQKKPTVTLTYGSSRPSIEIYRPPASRNADSGVHLNRLQFQQQQNSIHAAKQLDMQSSWVYETGRLCEPEVLNSLEETYSPFFRNNSEKMSMEDENFRKRKLPVVSSVVKVKKFNHDGEEEEEDDDYGSRTGSISSSVSVPAKPERRPSLPPSKQANKNLILKAISEAQESVTKTTNYSTVPQKQTLPVAPRTRTSQEELLAEVVQGQSRTPRISPPIKEEETKGDSVEKNQGTQQRQLLSRLQIDPVMAETLQMSQDYYDMESMVHADTRSFILKKPKLSEEVVVAPNQESGMKTADSLRVLSGHLMQTRDLVQPDKPASPKFIVTLDGVPSPPGYMSDQEEDMCFEGMKPVNQTAASNKGLRGLLHPQQLHLLSRQLEDPNGSFSNAEMSELSVAQKPEKLLERCKYWPACKNGDECAYHHPISPCKAFPNCKFAEKCLFVHPNCKYDAKCTKPDCPFTHVSRRIPVLSPKPVAPPAPPSSSQLCRYFPACKKMECPFYHPKHCRFNTQCTRPDCTFYHPTINVPPRHALKWIRPQTSE

SEQ ID NO: 87373 - protein, 167 aa, Homo sapiens
MGLSNILFVMAFLLSGAAPLKIQAYFNETADLPCQFANSQNQSLSELVVFWQDQENLVLNEVYLGKEKFDSVHSKYMGRTSFDSDSWTLRLHNLQIKDKGLYQCIIHHKKPTGMIRIHQMNSELSVLANFSQPEIVPISNITENVYINLTCSSIHGYPEPKKMSVLL

SEQ ID NO: 87374 - protein, 123 aa, Homo sapiens
MDPEVTLLLQCPGGGLPQEQIQAELSPAHDRRPLPGGDEAITAIWETRLKAQPWLFDAPKFRLHSATLAPIGSRGPQLLLRLGLTSYRDFLGTNWSSSAAWLRQQGATDWGDTQAYLADPLGV

SEQ ID NO: 87375 - protein, 242 aa, Homo sapiens
  MOD_RES (1)..(1): Any amino acid
XRPPHRGNAHHPRPGLVLIFSAGGHPPAPAPGPSRQHAEDFLGEVYVNGEWVTNISEGGSFGELALIYGTPRAATVKAKTDLKLWGIDRDSYRRILMGSTLRKRKMYEEFLSKVSILESLEKWERLTVADALEPVQFEDGEKIVVQGEPGDDFYIITEGTASVLQRRSPNEEYVEVGRLGPSDYFGEIALLLNRPRAATVVARGPLKCVKLDRPRFERVLGPCSEILKRNIQRYNSFISLTV

SEQ ID NO: 87376 - protein, 25 aa, Homo sapiens
  MOD_RES (1)..(1): Any amino acid
XDFATLYQGWGVSGPGLEHRGERPF

SEQ ID NO: 87377 - protein, 175 aa, Homo sapiens
  MOD_RES (1)..(1): Any amino acid
XSPLAAYQKSLEETSKLIIEETKPCVPVSMKKMSRTSPADGKPRLSLHEEEGSSGSEQKVKSPGAAPTRMTACCYKDLKDSESDSSSEEERRVTTRVIRRRLIIKGEEAKNIPGESVTEEQFTDEEGNLITRKITRKVLRRIVIPQERKRDDVQGEGFKVKTKKEIRHVEKKSHS

SEQ ID NO: 87378 - protein, 141 aa, Homo sapiens
MNQSIPVAPTPPRRVRLKPWLVAQVNSCQYPGLQWVNGEKKLFCIPWRHATRHGPSQDGDNTIFKAWAKETGKYTEGVDEADPAKWKANLRCALNKSRDFRLIYDGPRDMPPQPYKIYEVCSNGPAPTDSQPPEDYSFGAG

SEQ ID NO: 87379 - protein, 77 aa, Homo sapiens
MASDSMSSKQARNHITKGKRQQQHQQIKNRSSISDGDGEDSFIFEANEAWKDFHGSLLRFYENGELCDVTLKVCCFV

SEQ ID NO: 87380 - protein, 109 aa, Homo sapiens
MPYMRYSRKVWDQVKASNPDLKLWEIGKIIGGMWRDLTDEEKQEYLNEYEAEKIEYNESMKAYHNSPAYLAYINAKSRAEAALEEESRQRQSRMEKGEPYMSIQPAEDP

SEQ ID NO: 87381 - protein, 191 aa, Homo sapiens
KDSPLLLQQISAMRLHISQLQHENSILKGAQMKASLASLPPLHVAKLSHEGPGSELPAGALYRKTSQLLETLNQLSTHTHVVDITRTSPAAKSPSAQLMEQVAQLKSLSDTVEKLKDEVLKETVSQRPGATVPTDFATFPSSAFLRAKEEQQDDTVYMGKVTFSCAAGFGQRHRLVLTQEQLHQLHSRLIS

SEQ ID NO: 87382 - protein, 99 aa, Homo sapiens
MAFRRAEGTSMIQALAMTVAEIPVFLYTTFGQSAFSQLRLTPGLRKVLFATALGTVALALAAHQLKRRRRRKKQVGPEMGGEQLGTVPLPILLARKVPS

SEQ ID NO: 87383 - protein, 181 aa, Homo sapiens
MRRRRAAVAAGFCASFLLGSVLNVLFAPGSEPPRPGQSPEPSPAPGPGRRGGRGELARQIRARYEEAGPRLPAQAPPARARAWAAPRFATCPARSTWAQATPRPCTGSACPAVPRWRSRRWTLAATIWAAACASSGYGGAAIGWRPTSCLRRWCCWSGCGTPTCCSSMATATRTARTSQTP

SEQ ID NO: 87384 - protein, 107 aa, Homo sapiens
  MOD_RES (1)..(1): Any amino acid
XASLLKVHLQLHGFSVFIDVEKLEAGKFEDKLIQSVMGARNFVLVLSPGALDKCMQDHDCKDWVHKEIVTALSCGKNIVPIIDGFEWPEPQVLPEDMQAVLTFNGIK

SEQ ID NO: 87385 - protein, 274 aa, Homo sapiens
MWCGWSFSWQPVHWVRSACGCSLTWVSWSLASSSSRSLLKVGELGMAPFVHARAGKTKAQLAGGVILGVALWLRHDPQTTNLLYLELGDKPAPNTFYVGIYILIAVGAVMMFVGFLGCYGAIQESQCLLGTFFTCLVILFACEVAAGIWGFVNKDQIAKDVKQFYDQALQQAVVDDDANNAKAVVKTFHETLDCCGSSTLTALTTSVLKNNLCPSGSNIISNLFKEDCHQKIDDLFSGKLYLIGIAAIVVAVIMIFEMILSMVLCCGIRNSSVY

SEQ ID NO: 87386 - protein, 60 aa, Homo sapiens
MHEVKGKDGVGAVMDSMELERQRGITIQSAATYTMWKDVNINIIDTPGHVDFTIEVERAL

SEQ ID NO: 87387 - protein, 143 aa, Homo sapiens
MVNEARGNSSLNPCLEGSASSGSESSKDSSRCSTPGLDPERHERLREKMRRRLESGDKWFSLEFFPPRTAEGAVNLISRFDRMAAGGPLYIDVTWHPAGDPGSDKETSSMMIASTAVNYCGLETILHMTCCRQRLEEITGHLH

SEQ ID NO: 87388 - protein, 49 aa, Homo sapiens
AAAALVAMLLEHYGLAGQPSPLPRPAPPRRPHPAPGPGDSNIFWGLQET

SEQ ID NO: 87389 - protein, 155 aa, Homo sapiens
MEDDAPVIYGLEFQARALTPQTAETDAIRFLVGTQSLKYDNQIHIIDFDDENNIINKNVLLHQAGEIWHISASPADRGVLTTCYNRRDIIESFGILPVAQSPTIVFVNTLHQVFFRGQVAASDSKVLTCAAVWRMPKELESGSHESPDDSSSTAQ

SEQ ID NO: 87390 - protein, 205 aa, Homo sapiens
MRKMLAAVSRVLSGASQKPRHGLATLPSLVSISRLKQSSHLGLPKCWDYSHSLKTRQASRVLVASRNFANDATFEIKKCDLHRLEEGPPVTTVLTREDGLKYYRMMQTVRRMELKADQLYKQKIIRGFCHLCDGQEACCVGLEAGINPTDHLITAYRAHGFTFTRGLSVREILAELTGRKGGCAKGKGGSMHMYAKNFYGGNGIV

SEQ ID NO: 87391 - protein, 837 aa, Homo sapiens
  MOD_RES (1)..(1): Any amino acid
XNCIMQEDESYLLQVLRYLIEFELKESDNPRRLLRRGTCAFSILFKLFSEGLFSAKLFLTATLHEPIMQLLVEDEDHLETDPNKLIERFSPSQQEKLFGEKGSDRFRQKVQEMVESNEAKLVALVNKFIGYLKQNTYCFPHSLRWIVSQMYKTLSCVDRLEVGEVRAMCTDLLLACFICPAVVNPEQYGIISDAPINEVARFNLMQVGRLLQQLAMTGSEEGDPRTKSSLGKFDKSCVAAFLDVVIGGRAVETPPLSSVNLLEGLSRTVVYITYSQLITLVNFMKSVMSGDQLREDRMALDNLLANLPPAKPGKSSSLEMTPYNTPQLSPATTPANKKNRLPIATRSRSRTNMLMDLHMDHEGSSQETIQEVQPEEVLVISLGTGPQLTPGMMSENEVLNMQLSDGGQGDVPVDENKLHGKPDKTLRFSLCSDNLEGISEGPSNRSNSVSSLDLEGESVSELGAGPSGSNGVEALQLLEHEQATTQDNLDDKLRKFEIRDMMGLTDDRDISETVSETWSTDVLGSDFDPNIDEDRLQEIAGAAAENMLGSLLCLPGSGSVLLDPCTGSTISETTSEAWSVEVLPSDSEAPDLKQEERLQELESCSGLGSTSDDTDVREVSSRPSTPGLSVVSGISATSEDIPNKIEDLRSECSSDFGGKDSVTSPDMDEITHGASAVVRPKVHYARPSHPPPDPPILEGAVGGNEARLPNFGSHVLTPAEMEAFKQRHSYPERLVRSRSSDIVSSVRRPMSDPSWNRRPGNEERELPPAAAIGATSLVAAPHSSSSSPSKDSSRGETEERKDSDDEKSDRNRPWWRKRFVSAMPKAPIPFRKKEKQE

SEQ ID NO: 87392 - protein, 179 aa, Homo sapiens
  MOD_RES (1)..(1): Any amino acid
XDLKNVFPPKVAVFEPSEAEISHTQKATLVCLATGFYPDHVELSWWVNGKEVHSGVSTDPQPLKEQPALNDSRYCLSSRLRVSATFWQNPRNHFRCQVQFYGLSENDEWTQDRAKPVTQIVSAEAWGRADCGFTSESYQQGVLSATILYEILLGKATLYAVLVSALVLMAMVKRKDSRG

SEQ ID NO: 87393 - protein, 822 aa, Homo sapiens
MDFSRLHMYSPPQCVPENTGYTYALSSSYSSDALDFETEHKLDPVFDSPRMSRRSLRLATTACTLGDGEAVGADSGTSSAVSLKNRAARTTKQRRSTNKSAFSINHVSRQVTSSGVSHGGTVSLQDAVTRRPPVLDESWIREQTTVDHFWGLDDDGDLKGGNKAAIQGNGDVGAAAATAHNGFSCSNCSMLSERKDVLTAHPAAPGPVSRVYSRDRNQKCDDCKGKRHLDAHTAAHSQSPRLPGRAGTLWHIWACAGYFLLQILRRIGAVGQAVSRTAWSALWLAVVAPGKAASGVFWWLGIGWYQFVTLISWLNVFLLTRCLRNICKFLVLLIPLFLLLAGLSLRGQGNFFSFLPVLNWASMHRTQRVDDPQDVFKPTTSRLKQPLQGDSEAFPWHWMSGVEQQVASLSGQCHHHGENLRELTTLLQKLQARVDQMEGGAAGPSASVRDAVGQPPRETDFMAFHQEHEVRMSHLEDILGKLREKSEAIQKELEQTKQKTISAVGEQLLPTVEHLQLELDQLKSELSSWRHVKTGCETVDAVQERVDVQVREMVKLLFSEDQQGGSLEQLLQRFSSQFVSKGDLQTMLRDLQLQILRNVTHHVSVTKQLPTSEAVVSAVSEAGASGITEAQARAIVNSALKLYSQDKTGMVDFALESGGGSILSTRCSETYETKTALMSLFGIPLWYFSQSPRVVIQPDIYPGNCWAFKGSQGYLVVRLSMMIHPAAFTLEHIPKTLSPTGNISSAPKDFAVYGLENEYQEEGQLLGQFTYDQDGESLQMFQALKRPDDTAFQIVELRIFSNWGHPEYTCLYRFRVHGEPVK

SEQ ID NO: 87394 - protein, 52 aa, Homo sapiens
MRRRRRRDGFYPAPDFRDREAEDMAGVFDIDLDQPEDAGSEDELEEGEALSC

SEQ ID NO: 87395 - protein, 142 aa, Homo sapiens
  MOD_RES (1)..(1): Any amino acid
XMIKQFLRDVDWGEVDYLIVDTPPGTSDEHLSVVRYLATAHIDGAVIITTPQEVSLQDVRKEINFCRKVKLPIIGVVENMSGFICPKCKKESQIFPPTTGGAELMCQDLEVPLLGRVPLDPLIGIQEFCNLHQSKEENLISS

SEQ ID NO: 87396 - protein, 411 aa, Homo sapiens
  MOD_RES (1)..(1): Any amino acid
XEEASLAETALTSGSSPSAPASDSIGPQILTSPSPSKSIPIPQPFRPADEDHRNQFGQRDRSSSAPNVHINTIEPVNIDDLIRDQGFRGDGGSTTGLSATPPASLPGSLTNVKALQKSPGPQRERKSSSSSEDRNRMKTLGRRDSSDDWEIPDGQITVGQRIGSGSFGTVYKGKWHGDVAVKMLNVTAPTPQQLQAFKNEVGVLRKTRHVNILLFMGYSTKPQLAIVTQWCEGSSLYHHLHIIETKFEMIKLIDIARQTAQGMDYLHAKSIIHRDLKSNNIFLHEDLTVKIGDFGLATVKSRWSGSHQFEQLSGSILWMAPEVIRMQDKNPYSFQSDVYAFGIVLYELMTGQLPYSNINNRDQKLQLQEWIFLDHRTIRRMSSATIASGHYTFHCITDCAVRTGALSSMGV

SEQ ID NO: 87397 - protein, 92 aa, Homo sapiens
  MOD_RES (1)..(1): Any amino acid
XPNVPADTKLSKIKTLRLATSYIAYLMDLLAKDDQNGEAEAFKAEIKKTDVKEEKRKKELNEILKSTVSSNDKKTKGRTGWPQHVWALELKQ

SEQ ID NO: 87398 - protein, 117 aa, Homo sapiens
MIDTLRPVPFASEMAISKTVAWLNEQLELGNERLLLMDCRPQELYESSHIESAINVAIPGIMLRRLQKGNLPVRALFTRGEDRDRFTRRCGTDTVVLYDESSSDWNENTGGESVLGL

SEQ ID NO: 87399 - protein, 96 aa, Homo sapiens
MALKRINKELSDLARDPPAQCSAGPVGDDMFHWQATIMGPNDSPYQGGVFFLTIHFPTDYPFKPPKVAFTTRIYHPNINSNGSICLDILRSQWSPA

SEQ ID NO: 87400 - protein, 90 aa, Homo sapiens
MAHPPADMGRRKSKRKPPPKKKMTGTLETQFTCPFCNHEKSCDVKMDRARNTGVISCTVCLEEFQTPITYLSEPVDVYSDWIDACEAANQ

SEQ ID NO: 87401 - protein, 107 aa, Homo sapiens
MTNCLSFRNGRGLALLCALLGTLCETGSGQIRYSVSEELDKGSFVGNIANDLGLEPRELAERGVRIVSRGRTQLFSLNPQSGSLVTAERIDREELCAQIPLCLRNWK

SEQ ID NO: 87402 - protein, 141 aa, Homo sapiens
MYTPNAQYCQMRCTFHPRCLLFSFLPASSINDMEKRFGCFLKDSVTGTLPKVHRTGAVSGHSLKQCGHQISACHRDIYKGVDMRGVNFNVSKVSSVEECQKRCTSNIRCQFFSYATQTFHKAEYRNNCLLKYSPGGTPTAI

SEQ ID NO: 87403 - protein, 81 aa, Homo sapiens
MPAHFSDSAQTEACYHMLSRPQPPPDPLLLQRLPRPSSLSDKTQLHSRWLDSSRCLMQQGIKAGDALWLRFKYYSFFDLDP

SEQ ID NO: 87404 - protein, 125 aa, Homo sapiens
MTAQGGLVANRGRRFKWAIELSGPGGGSSFLVWFFRGRSDRGSGQGDSLYPVGYLDKQVPDTSVQETDRILVEKRCWDIALGPLKQIPMNLFIMYMAGNTISIFPTMMVCMMAWRPIQALMAISA

SEQ ID NO: 87405 - protein, 105 aa, Homo sapiens
MVSWKGIYFILTLFWGSFFGSIFMLSPFLPLMFVNPSWYRWINNRLVATWLTLPVALLETMFGVKVIITGDAFVPGERSVIIMNHRTRMDWMFLWNCLMRYSYLR

SEQ ID NO: 87406 - protein, 125 aa, Homo sapiens
MMRTQCLLGLRTFVAFAAKLWSFFIYLLRRQIRTVIQYQTVRYDILPLSPVSRNRLAQVKRKILVLDLDETLIHSHHDGVLRPTVRPGTPPDFILKVVIDKHPVRFFVHKRPHVDFFLEVVSQWY

SEQ ID NO: 87407 - protein, 162 aa, Homo sapiens
GPQDASTCFPLGEAVLRPGLDAEPELSPEEQRVLERKLKKERKKEERQRLREAGLVAQHPPARRSGAELALDYLCRWAQKHKNWRFQKTRQTWLLLHMYDSDKVPDEHFSTLLAYLEGLQGRARELTVQKAEALMRELDEEGSDPPLPGRAQRIRQVLQLLS

SEQ ID NO: 87408 - protein, 157 aa, Homo sapiens
SSTVMKEGWMVHYTSKDTLRKRHYWRLDSKCITLFQNDTGSRYYKEIPLSEILSLEPVKTSALIPNGANPHCFEITTANVVYYVGENVVNPSSPSPNNSVLTSGVGADVARMWEIAIQHALMPVIPKGSSVGTGTNLHSESASFLTSPKLIMCLPLA

SEQ ID NO: 87409 - protein, 609 aa, Homo sapiens
MTSGATRYRLSCSLRGHELDVRGLVCCAYPPGAFVSVSRDRTTRLWAPDSPNRSFTEMHCMSGHSNFVSCVCIIPSSDIYPHGLIATGGNDHNICIFSLDSPMPLYILKGHKNTVCSLSSGKFGTLLSGSWDTTAKVWLNDKCMMTLQGHTAAVWAVKILPEQGLMLTGSADKTVKLWKAGRCERTFSGHEDCVRGLAILSETEFLSCANDASIRRWQITGECLEVYYGHTNYIYSISVFPNCRDFVTTAEDRSLRIWKHGECAQTIRLPAQSIWCCCVLDNGDIVVGASDGIIRVFTESEDRTASAEEIKAFEKELSHATIDSKTGDLGDINAEQLPGREHLNEPGTREGQTRLIRDGEKVEAYQWSVSEGRWIKIGDVVGSSGANQQTSGKVLYEGKEFDYVFSIDVNEGGPSYKLPYNTSDDPWLTAYNFLQKNDLNPMFLDQVAKFIIDNTKGQMLGLGNPSFSDPFTGGGRYVPGSSGSSNTLPTADPFTGAGRYVPGSASMGTTMAGVDPFTGNSAYRSAASKTMNIYFPKKEAVTFDQANPTQILGKLKELNGTAPEEKKLTEDDLILLEKILSLICNSSSEKPTVQQLQILWKAINCPEGK

SEQ ID NO: 87410 - protein, 45 aa, Homo sapiens
MRPWALAVTRWPPSAPVGQRRFSAGPGSTPGQLWGSRRPDLHTSP

SEQ ID NO: 87411 - protein, 49 aa, Homo sapiens
MASVLSYESLVHAVAGAVLDFDFRPGTISRVVSSDFQSLLLQFCLFLHF

SEQ ID NO: 87412 - protein, 272 aa, Homo sapiens
LSFDEEHRHAMNELGRKATRGISSQELGQGLSGGLQAIAELLQVDCEMYGLTNDHYSITLRRYAGMALTNLTFGDVANKATLCSMKGCMRALVAQLKSESEDLQQVIASVLRNLSWRADVNSKKTLREVGSVKALMECALEVKKESTLKSVLSALWNLSAHCTENKADICAVDGALAFLVGTLTYRSQTNTLAIIESGGGILRNVSSLIATNEDHRQILRENNCLQTLLQHLKSHSLTIVSNACGTLWNLSARNPKDQEALWDMGAVSMLKN

SEQ ID NO: 87413 - protein, 107 aa, Homo sapiens
MSKSFQQSSLSRDSQGHGRDLSAAGIGLLAAATQSLSMPASLGRMNQGTARLASLMNLGMSSSLNQQGAHSALSSASTSSHNLQSIFNIGSRGPLPLSSQHRGDADQ

SEQ ID NO: 87414 - protein, 213 aa, Homo sapiens
MKGKEEKEGGARLGAGGGSPEKSPSAQELKEQGNRLFVGRKYPEAAACYGRAIMQQHEQALADCRRALELDGQSVKAHFFLGQCQLEMESYDEAIANLQRAYSLAKEQRLNFGDDIPSALRIAKKKRWNSIEERRIHQESELHSYLSRLIAAERERELEECQRNHEGDEDDSHVRAQQACIEAKHDKYMADMDELFSQVDEKRKKRDIPDYLC

SEQ ID NO: 87415 - protein, 392 aa, Homo sapiens [sequence omitted]

SEQ ID NO: 87416 - protein, 65 aa, Homo sapiens
  MOD_RES (1)..(1): Any amino acid
XGFVKIADFGLCKEGMGYGDRTSTFCGTPEFLAPEVLTETSYTRAVDWWGLGVLIYEMLVGETSV

SEQ ID NO: 87417 - protein, 62 aa, Homo sapiens
  MOD_RES (1)..(1): Any amino acid
XEIFHFHTRSDVRLYGMIYKPHALQPGKKHPTVLFVYGGPQARPARHLVLDCWPSPPHRCSW

SEQ ID NO: 87418 - protein, 136 aa, Homo sapiens
MDLPDSASRVFCGRILSMVNTDDVNAIILAQKNMLDRFEKTNEMLLNFNNLSSARLQQMSERFLHHTRTLVEMKRDLDSIFRRIRTLKGKLARQHPEAFSHIPEASFLEEEDEDPIPPSTTTTIATSEQSTGSCDT

SEQ ID NO: 87419 - protein, 63 aa, Homo sapiens
MAATFFGEVVKAPCRAGTEDEEEEEEGRRETPEDREVRLQLARKSISVIICYEFRSLGGSWLC

SEQ ID NO: 87420 - protein, 82 aa, Homo sapiens
MLEVQPGLYFGGAAAVAEPDHLREAGITAVLTVDSEEPSFKAGPGVEDLWRLFVPALDKPETDLLSHLDRVLLCHPGYSVVA

SEQ ID NO: 87421 - protein, 3210 aa, Homo sapiens
  MOD_RES (1)..(1): Any amino acid
XRTVGMANREKYGRKIATASIGGTKVNVSMGSTFDMNGSLGCLQLMDLTQDNVKNQYVVSIGNSVGYENIISDIGYFESVFVRMEDAALTEALSFTFVERSKQECFLNLKMASLHYNHSAKFLKELTLSMDELEENFRGMLKSAATKVTTVLATKTAEYSEMVSLFETPRKTREPFILEENEIYGFDLASSHLDTVKLILNINIESPVVSIPRKPGSPELLVGHLGQIFIQNFVAGDDESRSDRLQVEIKDIKLYSLNCTQLAGREAVGSEGSRMFCPPSGSGSANSQEEAHFTRHDFFESLHRGQAFHILNNTTIQFKLEKIPIERESELTFSLSPDDLGTSSIMKIEGKFVNPVQVVLAKHVYEQVLQTLDNLVYSEDLNKYPASATSSPCPDSPLPPLSTCGESSVERKENGLFSHSSLSNTSQKSLSVKEVKSFTQIQATFCISELQVQLSGDLTLGAQGLVSLKFQDFEVEFSKDHPQTLSIQIALHSLLMEDLLEKNPDSKYKNLMVSRGAPKPSSLAQKEYLSQSCPSVSNVEYPDMPRSLPSHMEEAPNVFQLYQRPTSASRKKQKEVQDKDYPLTPPPSPTVDEPKILVGKSKFDDSLVHINIFLVDKKHPEFSSSYNRVNRSIDVDFNCLDVLITLQTWVVILDFFGIGSTADNHAMRLPPEGILHNVKLEPHASMESGLQDPVNTKLDLKVHSLSLVLNKTTSELAKANVSKLVAHLEMIEGDLALQGSIGSLSLSDLTCHGEFYRERFTTSGEEALIFQTFKYGRPDPLLRREHDIRVSLRMASVQYVHTQRFQAEVVAFIQHFTQLQDVLGRQRAAIEGQTVRDQAQRCSRVLLDIEAGAPVLLIPESSRSNNLIVANLGKLKVKNKFLFAGFPGTFSLQDKESVPSASPTGIPKHSLRKTTSTEEPRGTHSQGQFTMPLAGMSLGSLKSEFVPSTSTKQQGPQPTLSVGQESSSPEDHVCLLDCVVVDLQDMDIFAAERHPREYSKAPEDSSGDLIFPSYFVRQTGGSLLTEPCRLKLQVERNLDKEISHTVPDISIHGNLSSVHCSLDLYKYKLIRGLLENNLGEPIEEFMRPYDLQDPRIHTVLSGEVYTCMCFLIDMVNVSLELKDPKRKEGAGSLARFDFKKCKLLYESFSNQTKSINLVSHSMMAFDTRYAGQKTSPGMTNVFSCIFQPAKNSSTTQGSIQIELHFRSTKDSSCFTVVLNNLRVFLIFDWLLLVHDFLHTPSDIKKQNHVTPSRHRNSSSESAIVPKTVKSGVVTKRSSLPVSNERHLEVKVNVTGTEFVVIEDVSCFDTNAIILKGTTVLTYKPRFVDRPFSGSLFGIEVFSCRLGNEHDTALSIVDPVQIQMELVGNSSYQNSSGLMDAFNSEDFPPVLEIQLQALDIRLSYNDVQLFLAIAKSIPEQANAAVPDSVALESDSVGTYLPGASRVGEEIREGTRHTLDPVLELQLARLQELGFSMDDCRKALLACQGQLKKAASWLFKNAEPLKSLSLASTSRDSPGAVAAPLISGVEIKAESVCICFIDDCMDCDVPLAELTFSRLNFLQRVRTSPEGYAHFTLSGDYYNRALSGWEPFIEPWPCSVSWQQQAASRLHPPRLKLEAKAKPRLDINITSVLIDQYVSTKESWMADYCKDDKDIESAKSEDWMGSSVDPPCFGQSLPLVYLRTRSTASLTNLEHQIYAREVKTPKRRQPFVPFALRNHTGCTLWFATLTTTPTRAALSHSGSPGVVPEGNGTFLDDTHNVSEWREVLTGEEIPFEFEARGKLRHRHTHDLRIHQLQVRVNGWEQVSPVSVDKVGTFFRYAAPDKNSSSSTIGSPSSRTNIIHPQVYFSSLPPVRVVFAVTMEGSARKVITVRSALIVRNRLETPMELRLDSPSAPDKPVVLPAIMPGDSFAVPLHLTSWRLQARPKGLGVFFCKAPIHWTNVVKTAEISSSKRECHSMDTEKSRFFRFCVAIKKENYPDYMPSNIFSDSAKQIFRQPGHTIYLLPTVVICNLLPCELDFYVKGMPINGTLKPGKEAALHTADTSQNIELGVSLENFPLCKELLIPPGTQNYMVRMRLYDVNRRQLNLTIRIVCRAEGSLKIFISAPYWLINKTGLPLIFRQDNAKTDAAGQFEEHELARSLSPLLFCYADKEQPNLCTMRIGRGIHPEGMPGWCQGFSLDGGSGVRALKVIQQGNRPGLIYNIGIDVKKGRGRYIDTCMVIFAPRYLLDNKSSHKLAFAQREFARGQGTANPEGYISTLPGSSVVFHWPRNDYDQLLCVRLMDVPNCIWSGGFEVNKNNSFHINMRDTLGKCFFLRVEITLRGATYRISFSDTDQLPPPFRIDNFSKVPVVFTQHGVAEPRLRTEVKPMTSLDYAWDEPTLPPFITLTVKGAGSSEINCNMNDFQDNRQLYYENFIYIAATYTFSGLQEGTGRPVASNKAITCAELVLDVSPKTQRVILKKKEPGKRSQLWRMTGTGMLAHEGSSVPHNPNKPSAARSTEGSAILDIAGLAAVTDNRYEPLMLRKPDRRRSTTQTWSFREGKLTCGLHGLVVQAKGGLSGLFDGAEVVLGPDTSMELLGPVPPEQQFINQKMRPGSGMLSIRVIPDGPTRALQITDFCHRKSSRSYEVDELPVTEQELQKLKNPDTEQELEVLVRLEGGIGLSLINKVPEELVFASLTGINVHYTQLATSHMLELSIQDVQVDNQLIGTTQPFMLYVTPLSNENEVIETGPAVQVNAVKFPSKSALTNIYKHLMITAQRFTVQIEEKLLLKLLSFFGYDQAESEVEKYDENLHEKTAEQGGTPIRYYFENLKISIPQIKLSVFTSNKLPLDLKALKSTLGFPLIRFEDAVINLDPFTRVHPYETKEFIINDILKHFQEELLSQAARILGSVDFLGNPMGLLNDVSEGVTGLIKYGNVGGLIRNVTHGVSNSAAKFAGTLSDGLGKTMDNRHQSEREYIRYHAATSGEHLVAGIHGLAHGIIGGLTSVITSTVEGVKTEGGVSGFISGLGKGLVGTVTKPVAGALDFASETAQAVRDTATLSGPRTQAQRVRKPRCCTGPQGLLPRYSESQAEGQEQLFKLTDNIQDEFFIAVENIDSYCVLISSKAVYFLKSGDYVDREAIFLEVKYDDLYHCLVSKDHGKVYVQVTKKAVSTSSGVSIPGPSHQKPMVHVKSEVLAVKLSQEINYAKSLYYEQQLMLRLSENREQLELDS

SEQ ID NO: 87422 - protein, 21 aa, Homo sapiens
  MOD_RES (1)..(1): Any amino acid
XNAGNNRKLIWGLGTSLAVNP

SEQ ID NO: 87423 - protein, 133 aa, Homo sapiens
MVALCSLQHLGSSDPRALPTLPTATSGQRPAKRRRKSPAMAALTRDPQFQKLQQWYREHRSELNLRRLFDANKDRFNHFSLTLNTNHGHILVDYSKNLVTEDVMRMLVDLAKSRGVEAARERMFNGEKINYTE

SEQ ID NO: 87424 - protein, 60 aa, Homo sapiens
  MOD_RES (1)..(1): Any amino acid
XRWLIGGGREPQGLAEKSPLQTIGEEQTQNPYTELLVLKAHHDIVRFLVQLDDYRQGKNF

SEQ ID NO: 87425 - protein, 112 aa, Homo sapiens
EAQVPNGQGSPGGCVCSSQASPAPRAAAPPRAARGPTPRTEEAAWAAMALTFLLVLLTLATLCTRLHRNFRRGESIYWGPRPLPRGPRAGRSLVAMARHWPSTAGAFLLVGC

SEQ ID NO: 87426 - protein, 173 aa, Homo sapiens
MNLRGLFQDFNPSKFLIYACLLLFSVLLALRLDGIIQWSYWAVFAPIWLWKLMVIVGASVGTGVWARNPQYRAEGETCVEFKAMLIAVGIHLLLLMFEVLVCDRIERGSHFWLLVFMPLFFVSPVSVAACVWGFRHDRSLELEILCSVNILQFIFIALRLDKIIHWPWLVCNF

SEQ ID NO: 87427 - protein, 181 aa, Homo sapiens
MAATLGSGERWTEAYIDAVRRNKYPEDTPPESHDPCGCCNCMKAQKEKKSENEWTQTRQGEGNSTYSEEQLLGVQRIKKCRNYYEILGVSRDASDEELKKAYRKLALKFHPDKNCAPGATDAFKAIGNAFAVLSNPDKRLRYDEYGDEQVTFTAPRARPYNYYRDFEADITPEELFNVFFG

SEQ ID NO: 87428 - protein, 159 aa, Homo sapiens
  MOD_RES (1)..(1): Any amino acid
XSLKMALLAMHSWRWAAAAAAFEKRRHSAILIRPLVSVSGSGPQWRPHQLGALGTARAYQIPESLKSITWQRLGKGNSGQFLDAAKALQVWPLIEKRTCWHGHAGGGLHTDPKEGLKDVDTRKIIKAMLSYVWPKDRPDLRARVAISLGFLGGAKSVQI

SEQ ID NO: 87429 - protein, 256 aa, Homo sapiens
MTSGANSSGSYLPSEIRSSKIDDNYLKELNEDLKLRKQELLEMLKPLEDKNNLLFQKLMSNLEEKQRSLQIMRQIMAGKGCEESSVMELLKEAEEMKQNLERKNKMLRKEMEMLWNKTFEAEELSDQQKAPQTKNKADLQDGKAPKSPSSPRKTESELEKSFAEKVKEIRKEKQQRKMEWVKYQEQNNILQNDFHGKVIELRIEALKNYQKANDLKLSLYLQQNFEPMQAFLNLPGSQELDSIKLERILECNKKQY

SEQ ID NO: 87430 - protein, 548 aa, Homo sapiens
MGEKNGDAKTFWMELEDDGKVDFIFEQVQNVLQSLKQKIKDGSATNKEYIQAMILVNEATIINSSTSIKDPMPVTQKEQENKSNAFPSTSCENSFPEDCTFLTTENKEILSLEDKVVDFREKDSSSNLSYQSHDCSGACLMKMPLNLKGENPLQLPIKCHFQRRHAKTNSHSSALHVSYKTPCGRSLRNVEEVFRYLLETECNFLFTDNFSFNTYVQLARNYPKQKEVVSDVDISNGVESVPISFCNEIDSRKLPQFKYRKTVWPRAYNLTNFSSMFTDSCDCSEGCIDITKCACLQLTARNAKTSPLSSDKITTGYKYKRLQRQIPTGIYECSLLCKCNRQLCQNRVVQHGPQVRLQVFKTEQKGWGVRCLDDIDRGTFVCIYSGRLLSRANTEKSYGIDENGRDENTMKNIFSKKRKLEVACSDCEVEVLPLGLETHPRTAKTEKCPPKFSNNPKELTVETKYDNISRIQYHSVIRDPESKTAIFQHNGKKMEFVSSESVTPEDNDGFKPPREHLNSKTKGAQSRLCFFCECLPLLPVSLSLAQYL

SEQ ID NO: 87431 - protein, 76 aa, Homo sapiens
MEKLYSENEGMASNQGKMENEEQPQDERKPEVTCTLEDKKLENEGKTENKGKTGDEEMLKDKGKPESEGEAKEGKS

SEQ ID NO: 87432 - protein, 96 aa, Homo sapiens
MWLGRRALCALVLLLACASLGLLYASTRDAPGLRLPLAPWAPPQSPRRPELPDLAPEPRYAHIPVRIKEQVVGAEGCLCHKRAGVPGLSVEEPVPS

SEQ ID NO: 87433 - protein, 34 aa, Homo sapiens
MALTQGQVTFRDVAIEFSQEEWTCLDPAQRTLYR

SEQ ID NO: 87434 - protein, 79 aa, Homo sapiens
MYKRNVMILTNPVAAKKNVSINTVTYEWAPPVQNQALARQYMQMLPKEKQPVAGSEGAQYRKKQLAKQLPAHDQDPSKC

SEQ ID NO: 87435 - protein, 57 aa, Homo sapiens
MGRLHCTEDPVPEAVGGDMQQLNQLGAQAAGANQGSLGGILLLCWLGCLFIPPRLLK

SEQ ID NO: 87436 - protein, 124 aa, Homo sapiens
METNFSTPLNEYEEVSYESAGYTVLRILPLVVLGVTFVLGVLGNGLVIWVAGFRMTRTVTTICYLNLALADFSFTATLPFLIVSMAMGEKWPFGWFLCKLIHIVVDINLFGSVFLIGFIALDRC

SEQ ID NO: 87437 - protein, 131 aa, Homo sapiens
MLQTLASKDLAQTSYFMATNSLHLTTFCLQYKPTVIACVCIHLACKWSNWEIPVSTDGKHWWEYVDPTVTLELLDELTHEFLQILEKTPNRLKKIRNWRANQAARKPKVDGQVSETPLLGSSLVQNSILVD

SEQ ID NO: 87438 - protein, 393 aa, Homo sapiens
  MOD_RES (1)..(1): Any amino acid
XEWRLSSSADANGNAQPSSLAAKGYRSVHPNLPSDKSQVLSPPRPPLPQKDRFAWQSPTIHNTYKDSLYLSSPKPYVPLGTPRQQNPSQPQPISVLLAAGSAPKGVVCPGSLLPDSTFPSASSQPQQRYAATRTVYHKNVSSNPCHEAVGIKKVSSLYVPCLSNNICLAASENSSRVARDPAEGTPLEAAGTRAPAPGLVSRTAGTGKPPPAPPPDPPKLFFDIRKDAVNRGESPSLGTQASFPDVRPPVLGPRVTSDPENRKSKESYLLQPSYPAKDSSPLLNEVSSSLIGTDSQAFPSVSKPSSAYPSTTIVNPTIVLLQHNREQQKRLSSLSDPVSERRVGEQDSAPTQEKPTSPGKAIEKRAKDDSRRVVKSTQDLSDVSMDEVGIPLR

SEQ ID NO: 87439 - protein, 213 aa, Homo sapiens
MAEEQDLSEVELSPVGSEEPRCLSPGSAPSLGPDGGGGGSGLRASPGPGELGKVKKEQQDGEADDDKFPVCIREAVSQVLSGYDWTLVPMPVRVNGASKSKPHVKRPMNAFMVWAQAARRKLADQYPHLHNAELSKTLGKLWRLLNESDKRPFIEEAERLRMQHKKDHPDYKYQPRRRKNGKAAQGEAECPGGEAEQGGTAAIQAHYKSAHLD

SEQ ID NO: 87440 - protein, 20 aa, Homo sapiens
MVIMGQCYYNETIGFFYNNS

SEQ ID NO: 87441 - protein, 40 aa, Homo sapiens
NQLLTLKIKYPHQLDQKVLEKQLPGKKNQPVFSLNSESSA

SEQ ID NO: 87442 - protein, 51 aa, Homo sapiens
MLRCLYHWHRPVLNRRWSRLCLPKQYLFTMKLQSPEFQSLFTEGLKSLTAS

SEQ ID NO: 87443 - protein, 388 aa, Homo sapiens
MPIAFNEPLSFLQRITEYMEHVYLIHRASCQPQPLERMQSVAAFAVSAVASQWERTGKPFNPLLGETYELIREDLGFRFISEQVSHHPPISAFHSEGLNHDFLFHGSIYPKLKFWGKSVEAEPRGTITLELLKHNEAYTWTNPTCCVHNVIIGKLWIEQYGTVEILNHRTGHKCVLHFKPCGLFGKELHKVEGHIQDKNKKKLFMIYGKWTECLWGIDPVSYESFKKQERRGDHLRKAKLDEDSGKADSDVADDVPVAQETVQVIPGSKLLWRINTRPPNSAQMYNFTSFTVSLNELETGMEKTLPPTDCRLRPDIRGMENGNMDLASQEKERLEEKQREARRERAKEEAEWQTRWFYPGNNPYTGTPDWLYAGDYFERNFSDCPDIY

SEQ ID NO: 87444 - protein, 68 aa, Homo sapiens
MWQLWASLCCLLVLANARSRPSFHPLSDELVNYVNKRNTTWQAGHNFYNVDMSYLKRLCGTFLGGPKP

SEQ ID NO: 87445 - protein, 114 aa, Homo sapiens
MELCEFAFNMKKDEVCVNPYHYQRVETPVLPPVLVPRHTEIPAEFPPLDDYSHSIPENTNFPAGIEPQSNIPETPPPGYLSEDGETSDHQMNHSMDAGSPNLSPNPMSPAHNNL

SEQ ID NO: 87446 - protein, 84 aa, Homo sapiens
MKGKKGIVAASGSETEDEDSMDIPLDLSSSAGSGKRRRRGNLPKESVQILRDWLYEHRYNAYPSEQEKALLSQQTHLSTLQAPP

SEQ ID NO: 87447 - protein, 85 aa, Homo sapiens
MWQPRAMALAVRVVYCGACGYKSKYLQLKKKLEDEFPGRLDIVSLGMGRKTCAQPLCRSVRPGWHCRGVSAARELPRPPGSLKCW

SEQ ID NO: 87448 - protein, 502 aa, Homo sapiens
MNGALDHSDQPDPDAIKMFVGQIPRSWSEKELKELFEPYGAVYQINVLRDRSQNPPQSKGCCFVTFYTRKAALEAQNALHNIKTLPGMHHPIQMKPADSEKSNAVEDRKLFIGMVSKKCNENDIRVMFSPFGQIEECRILRGPDGLSRGCAFVTFSTRAMAQNAIKAMHQSQTMEGCSSPIVVKFADTQKDKEQRRLQQQLAQQMQQLNTATWGNLTGLGGLTPQYLALLQQATSSSNLGAFSGIQQMAGMNALQLQNLATLAAAAAAAQTSATSTNANPLSTTSSALGALTSPVAASTPNSTAGAAMNSLTSLGTLQGLAGATVGLNNINALAGTINTPRSKRLLLPKDNNGMAALNGGLGATGLTNGTAGTMDALTQAYSGIQQYAAAALPTLYSQSLLQQQSAAGSQKEGPEGANLFIYHLPQEFGDQDILQMFMPFGNVISAKVFIDKQTNLSKCFGFVSYDNPVSAQAAIQAMNGFQIGMKRLKVQLKRSKNDSKPY

SEQ ID NO: 87449 - protein, 94 aa, Homo sapiens
MVSESHHEALAAPPVTTVATVLPSNATEPASPGEGKEDAFSKLKEKFMNELHKIPLPPWALIAIAIVAVLLVLTCCFCICKKCLFKKKNKKKGK

SEQ ID NO: 87450 - protein, 203 aa, Homo sapiens
MNRLRNAKIYVERAVKQKKIFTIQGCYPVIRCLLRRRGWVEKKMVHRSGPTLLPPQKDLDSSAMGDSDTTEDEDEDEDEEFQPSQLFDFDDLLKFDDLDGTHALMSRMVQNEIPYFIWTTRRDVLDCRFLSKDQMINHYARAGSFTTKVGLCLNLRNLPWFDEVDANSFFPRCYCLGAEDDKKAFIETGFHCVSQDGLDLLTS

SEQ ID NO: 87451 - protein, 590 aa, Homo sapiens
MEIIRSNFKSNLHKVYQAIEEADFFAIDGEFSGISDGPSVSALTNGFDTPEERYQKLKKHSMDFLLFQFGLCTFKYDYTDSKYITKSFNFYVFPKPFNRSSPDVKFVCQSSSIDFLASQGFDFNKVFRNGIPYLNQEEERQLREQYDEKRSQANGAGALSYVSPNTSKCPVTIPEDQKKFIDQVVEKIEDLLQSEENKNLDLEPCTGFQRKLIYQTLSWKYPKGIHVETLETEKKERYIVISKVDEEERKRREQQKHAKEQEELNDAVGFSRVIHAIANSGKLVIGHNMLLDVMHTVHQFYCPLPADLSEFKEMTTCVFPRLLDTKLMASTQPFKDIINNTSLAELEKRLKETPFNPPKVESAEGFPSYDTASEQLHEAGYDAYITGLCFISMANYLGSFLSPPKIHVSARSKLIEPFFNKLFLMRVMDIPYLNLEGPDLQPKRDHVLHVTFPKEWKTSDLYQLFSAFGNIQISWIDDTSAFVSLSQPEQVKIAVNTSKYAESYRIQTYAEYMGRKQEEKQIKRKWTEDSWKEADSKRLNPQCIPYTLQNHYYRNNRQGLILLPRLECSGTITACCSFDLLGSSDPPTST

SEQ ID NO: 87452 - protein, 265 aa, Homo sapiens
TSKTSNIRANFENLAKEKEQEDRRKAEAERAQRMAKERQEQEEARRKLEEQARAKTQTPPVSPAPQPTEERLPSSPVYEDAASFKAELSYRGPVSGTEPEPVYSMEAADYREASSQQGLAYATEAVYESAEAPGHYPAEDSTYDEYENDLGITAVALYDYQAAGDDEISFDPDDIITNIEMIDDGWWRGVCKGRFRELAFSCVRVALVPIKCSRDLPGQARGLRKLISFLRSREAGPVPSCSQVGGVSFQKVTWKCLGTWVPECP

SEQ ID NO: 87453 - protein, 127 aa, Homo sapiens
CKLPNSKQSQDEPLRSRKVFVGRCTEDMTEDELREFFSQYGDVMDVFIPKPFRAFAFVTFADDQIAQSLCGEDLIIKGISVHISNAEPKHNSNRQLERSGRFGGNPGILSTCFLIQEFVITHHRPRL

SEQ ID NO: 87454 - protein, 136 aa, Homo sapiens
MSDGDYDYLIKFLALGDSGVGKTSVLYQYTDGKFNSKFITTVGIDFREKRVVYRASGPDGATGRGQRIHLQLWDTAGQERFRSLTTAFFRDAMGFLLLFDLTNEQSFLNVRNWISQLQMHAYCENPDIVLCGNKSD

SEQ ID NO: 87455 - protein, 86 aa, Homo sapiens
MEADIITNLRCRLKEAEEERLKAAQYGLQLVESQNELQNQLDKCRNEMMTMTESYEQEKYTLQREVELKSRMLESLSCECEAIKQQ

SEQ ID NO: 87456 - protein, 282 aa, Homo sapiens
MLLLAPQMLNLLLLALPVLASRAYAAPAPGQALQRVGIVGGQEAPRSKWPWQVSLRVRDRYWMHFCGGSLIHPQWVLTAAHCVGPDVKDLAALRVQLREQHLYYQDQLLPVSRIIVHPQFYTAQIGADIALLELEEPVNVSSHVHTVTLPPASETFPPGMPCWVTGWGDVDNDERLPPPFPLKQVKVPIMENHICDAKYHLGAYTGDDVRIVRDDMLCAGNTRRDSCQGDSGGPLVCKVNGTWLQAGVVSWGEGCAQPNRPGIYTRVTYYLDWIHHYVPKKP

SEQ ID NO: 87457 - protein, 157 aa, Homo sapiens
  MOD_RES (1)..(1): Any amino acid
XAPPKGEKEGQRPTQPVYQIQNRGMGTAAPAAMDPVVGQAKLLPPERMKHSIKLVDDQMNWCDSAIEYLLDQTDVLVVGVLGLQGTGKSMVMSLLSANTPEEDQRTYVFRAQSAEMKERGGNQTSGIDFFITQERIVFLDTQVPAPPAFAPPCHILH

SEQ ID NO: 87458 - protein, 162 aa, Homo sapiens
MCGIWALFGSDDCLSVQCLSAMKIAHRGPDAFRFENVNGYTNCCFGFHRLAVVDPLFGMQPIRVKKYPYLWLCYNGEIYNHKKMQQHFEFEYQTKVDGEIILHLYDKGGIEQTICMLDGVFAFVLLDTANKKVFLGRDTYGVRPLFKAMTEDGFLAVCSEAK

SEQ ID NO: 87459 - protein, 146 aa, Homo sapiens
MDTQNVSKALAVGTYLTGNEPCLNLEKTAIKIQSWWRGNMVRRTLLQAALRAWVIQCWWRSMQAKMLEQRRRLALRLYTCQEWAVVKVQAQVRMWQARRRFLQARQAACIIQSHWRWHASQTRGLIRGHYEVRASRLELDIEILMT

SEQ ID NO: 87460 - protein, 98 aa, Homo sapiens
MDPPDLLSVELSTSRPPQHLGGVKKPTYDPVSEDQDPLSSDFKRLGLRKPGLPRGLWLAKPSARVPGTKASRGSGAEVTLIDFGEEPVVPALRPCAPS

SEQ ID NO: 87461 - protein, 150 aa, Homo sapiens
MSGTKPDILWAPHHVDRFVVCDSELSLYHVESTVNSELKAGSLRLSEDSAATLLSINSDTPYMKCVAWYLNYDPECLLAVGQANGRVVLTSLGQDHNSKFKDLIGKEFVPKHARQCNTLAWNPLDSNWLAAGLDKHRADFSVLIWDICSK

SEQ ID NO: 87462 - protein, 46 aa, Homo sapiens
MRREFCWDAYSKAAGSRASSPLPRQKTMINSGQNTENPQLSEGTGE

SEQ ID NO: 87463 - protein, 78 aa, Homo sapiens
MSQATKRKHVVKEVLGEHIVPSDQQQIVRVLRTPGNNLHEVETAQGQRFLVSMPSKYRKNIWIKRGDFLIVDPIEEGE

SEQ ID NO: 87464 - protein, 111 aa, Homo sapiens
MWSGWWLWPLVAVCTADFFRDEAERIMRDSPVIDGHNDLPWQLLDMFNNRLQDERANLTTLAGTHTNIPKLRAGFVGGQFWSVYTPCDTQNKDAVRRTLEQMDVVHRMCRM

SEQ ID NO: 87465 - protein, 956 aa, Homo sapiens
MADPAECSIKVMCRFRPLNEAEILRGDKFIPKFKGDETVVIGQGKPYVFDRVLPPNTTQEQVYNACAKQIVKDVLEGYNGTIFAYGQTSSGKTHTMEGKLHDPQLMGIIPRIAHDIFDHIYSMDENLEFHIKVSYFEIYLDKIRDLLDVSKTNLAVHEDKNRVPYVKGCTERFVSSPEEVMDVIDEGKANRHVAVTNMNEHSSRSHSIFLINIKQENVETEKKLSGKLYLVDLAGSEKVSKTGAEGAVLDEAKNINKSLSALGNVISALAEGTKTHVPYRDSKMTRILQDSLGGNCRTTIVICCSPSVFNEAETKSTLMFGQRAKTIKNTVSVNLELTAEEWKKKYEKEKEKNKTLKNVIQHLEMELNRWRNGEAVPEDEQISAKDQKNLEPCDNTPIIDNIAPVVAGISTEEKEKYDEEISSLYRQLDDKDDEINQQSQLAEKLKQQMLDQDELLASTRRDYEKIQEELTRLQIENEAAKDEVKEVLQALEELAVNYDQKSQEVEDKTRANEQLTDELAQKTTTLTTTQRELSQLQELSNHQKKRATEILNLLLKDLGEIGGIIGTNDVKTLADVNGVIEEEFTMARLYISKMKSEVKSLVNRSKQLESAQMDSNRKMNASERELAACQLLISQHEAKIKSLTDYMQNMEQKRRQLEESQDSLSEELAKLRAQEKMHEVSFQDKEKEHLTRLQDAEEMKALEQQMESHREAHQKQLSRLRDEIEEKQKIIDEIRDLNQKLQLEQEKLSSDYNKLKIEDQEREMKLEKLLLLNDKREQAREDLKGLEETVSRELQTLHNLRKLFVQDLTTRVKKSVELDNDDGGGSAAQKQKISFLENNLEQLTKVHKQLVRDNADLRCELPKLEKRLRATAERVKALESALKEAKENAMRDRKRYQQEVDRIKEAVRAKNMARRAHSAQIAKPIRPGHYPASSPTAVHAIRGGGGSSSNSTHYQK

SEQ ID NO: 87466 - protein, 13 aa, Homo sapiens
MSTQDERQINTEY

SEQ ID NO: 87467 - protein, 65 aa, Homo sapiens
MEGPLSVFGDRSTGETIRSQNVMAAASIANIVKSSLGPVGLDKMLVDDIGWFIFFPANFLGCNHY

SEQ ID NO: 87468 - protein, 83 aa, Homo sapiens
MANSGLQLLGFSMALLGWVGLVACTAIPQWQMSSYAGDNIITAQAMYKGLWMDCVTQSTGMMSCKMYDSVLALSGNSVPNCSI

SEQ ID NO: 87469 - protein, 1005 aa, Homo sapiens
MAPQEAKPQGSREAGPATRGRGGRPVARGLGRAAWGAARCTGVRGPGAGASHDAPPRPPTLLLGLLLLAALLEHGQADPGTDNLQMNVTRTPESFPPGKLLPISPTWPFTEVRSSSAADRIKTVLGQSSDNTSLPQSARTPASKTHHRTRAHADFSSSLYQGSGHSASLEPSKDSTESLVQPGPKGGQEAADVSADTVSSKVQPTAAAAVTLFLRKSSPPALSAALVAKGTSSSPLAVASGPAKSSSMTTLAKNVTNKAASGPKRTPGAVHTAFPFTPTYMYARTGHTTSTHTAMQGNMDTASGLLSTTYLPRKPQAMHTGLPNPTNLEMPRASTPRPLTVTAALTSITASVKATRLPPLRAENTDAVLPAASAAVVTTGKMASNLECQMSSKLLVKTVLFLTQRRVQISESLKFSIAKGLTQALRKAFHQNDVSAHVDILEYSHNVTVGYYATKGKLVYLPAVVIEMLGVYGVSNVTADLKQHTPHLQSVAVLASPWNPQPAGYFQLKTVLQFVSQADNIQSCKFAQTMEQRLQKAFQDAERKVLNTKSNLTIQIVSTSNASQAVTLVYVVGNQSTFLNGTVASSLLSQLSAELVGFYLTYPPLTIAEPLEYPNLDISETTRDYWVITVLQGVDNSLVGLHNQSFARVMEQRLAQLFMMSQQQGRRFKRATTLGSYTVQMVKMQRVPGPKDPAELTYYTLYNGKPLLGTAAAKILSTIDSQRMALTLHHVVLLQADPVVKNPPNNLWIIAAVLAPIAVVTVIIIIITAVLCRKNKNDFKPDTMINLPQRAKPVQGFDYAKQHLGQQGADEEVIPVTQETVVLPLPIRDAPQERDVAQDGSTIKTAKSTETRKSRSPSENGSVISNESGKPSSGRRSPQNVMAQQKVTKEEARKRNVPASDEEEGAVLFDNSSKVAAEPFDTSSGSVQLIAIKPTALPMVPPTSDRSQESSAVLNGEVNKALKQKSDIEHYRNKLRLKAKRKGYYDFPAVETSKGLTERKKMYEK

SEQ ID NO: 87470 - protein, 193 aa, Homo sapiens
  MOD_RES (1)..(1): Any amino acid
XELSVLDSLNARMARPQGSSVHDGVPVPFQLPPGVSNEAQYVFTIQSIVMAQKLKGTLSFIAKNDEGATHEKLDFRLHFSCSSYLITTPCYSDAFAKLLESGDLSMSSIKVDGIRMSFQNLLAKICFHHHFSGLLKLWPRAAQEGGPCSGGGAAAMQCPGSLTLPALLQLWSEWTPAPPCTAAPSRATMSASW

SEQ ID NO: 87471 - protein, 47 aa, Homo sapiens
MRSCLWRCRHLSQGVQWSLLLAVLVFFLFALPSFIKEPQTKPSRLTL

SEQ ID NO: 87472 - protein, 71 aa, Homo sapiens
  MOD_RES (1)..(1): Any amino acid
XYYLEEFKENAYKDLAWKHGNIHLSAPCIYSEVMEALDLQPGLSFLNLGSGTGYLSSMVGLILDAAAFIQA

SEQ ID NO: 87473 - protein, 37 aa, Homo sapiens
MSAEELENQYCPSRWVVRLGAEEALRTYSQIGIEVHL

SEQ ID NO: 87474 - protein, 126 aa, Homo sapiens
MAQLEGYCFSAALSCTFLVSCLLFSAFSRALREPYMDEIFHLPQAQRYCEGHFSLSQWDPMITTLPGLYLVSVGVVKPAIWIFAWSEHVVCSIGMLRFVNLLFSVGNFYLLYLLFHKVQPRNKEYF

SEQ ID NO: 87475 - protein, 286 aa, Homo sapiens
PEYVSMCDSLAKIPKRASMVHSLIEAYALHKQMRIVKPKVASMEEMATFHTDAYLQHLQKVSQEGDDDHPDSIEYGLGYDCPATEGIFDYAAAIGGATITAAQCLIDGMCKVAINWSGGWHHAKKDEASGFCYLNDAVLGILRLRRKFERILYVDLDLHHGDGVEDAFSFTSKVMTVSLHKFSPGFFPGTGDVSDVGLGKGRYYSVNVPIQDGIQDEKYYQICESVLKEVYQAFNPKAVVLQLGADTIAGDPMCSFNMTPVGIGKCLKYILQWQLATLILGGDRRL

SEQ ID NO: 87476 - protein, 235 aa, Homo sapiens
GEPGPPGRGVQGPQGEPGAPGLPGIQGLPGPRGPPGPTGEKGAQGSPGVKGATGPVGPPGASVSGPPGRDGQQGQTGLRGTPGEKGPRGEKGEPGECSCPSQGDLIFSGMPGPPGIPGPPGPPGVPGLQGVPGNNGLPGQPGLTAELGSLPIEQHLLKSICGDCVQGQRAHPGYLVEKGEKGDQGIPGVPGLDNCAQCFLSLERPRAEEARGDNSEGDPGCVGSPGLPGPPGLPG

SEQ ID NO: 87477 - protein, 529 aa, Homo sapiens
MEYMAESTDRSPGHILCCECGVPISPNPANICVACLRSKVDISQGIPKQVSISFCKQCQRYFQPPGTWIQCALESRELLALCLKKIKAPLSKVRLVDAGFVWTEPHSKRLKVKLTIQKEVMNGAILQQVFVVDYVVQSQMCGDCHRVEAKDFWKAVIQVRQKTLHKKTFYYLEQLILKYGMHQNTLRIKEIHDGLDFYYSSKQHAQKMVEFLQCTVPCRYKASQRLISQDIHSNTYNYKSTFSVEIVPICKDNVVCLSPKLAQSLGNMNQICVCIRVTSAIHLIDPNTLQVADIDGSTFWSHPFNSLCHPKQLEEFIVMECSIVQDIKRAAGAGMISKKHTLGEVWVQKTSEMNTDKQYFCRTHLGHLLNPGDLVLGFDLANCNLNDEHVNKMNSDRVPDVVLIKKSYDRTKRQRRRNWKLKELARERENMDTDDERQYQDFLEDLEEDEAIRKNVNIYRDSAIPVESDTDDEGAPRISLAEMLEDLHISQDATGEEAKSAPEAADLESEVTEGPSVVVDACNPSTLGG

SEQ ID NO: 87478 - protein, 142 aa, Homo sapiens
  MOD_RES (1)..(1): Any amino acid
XVQLTMCLRAIIKHDFPGHWPGVVDKIDYYLQSQSSASWLGSLLCLYQLVKTYEYKKAEEREPLIIAMQIFLPRIQQQIVQLLPDSSYYSVLLQKQILKIFYALVQVGFYCRKQTWSPVFLPDTWKVLNKCHLLLKIILYYP

SEQ ID NO: 87479 - protein, 508 aa, Homo sapiens
MVVEVDSMPAASSVKKPFGLRSKMGKWCCRCFPCYRESGKSNVGTSGDHDDSAMKTLRSKMGKWCHHCFPCCRGSGKSNVGASGDHDDSAMKTLRNKMGKWCCHCFPCCRGSGKSKVGAWGDYDDSAFMEPRYHVRGEDLDKLHRAAWWGKVPRKDLIVMLRDTDVNKKDKQKRTALHLASANGNSEVVKLLLDRRCQLNVLDNKKRTALIKAVQCQEDECALMLLEHGTDPNIPDEYGNTTLHYAIYNEDKLMAKALLLYGADIESKNKHGLTPLLLGVHEQKQQVVKFLIKKKANLNALDRYGRTALILAVCCGSASIVSLLLEQNIDVSSQDLSGQTAREYAVSSHHHVICQLLSDYKEKQMLKISSENSNPEQELKLTSEEESQRFKGSENSQPEKMSQELEINKDGDRKVEEEMKKHGSTHVGFPENLTNGATAGNGDDGLIPPRKSRTPESQQFPDTENEEYHSDEQNDTQKQFCEEQNTGILHDEILIHEEKQIEVVENEF

SEQ ID NO: 87480 - protein, 203 aa, Homo sapiens
  MOD_RES (1)..(1): Any amino acid
XKKFSDSVKSTFRHFKDTTKNIFDEKGNKRFGATKEAAEKPRTVFSDYLHPQYKAPTENHHNRGPTMQNDGRKEKPVHFKEFRKNTNSKKCSPGHDCRENSHSFRKACSGVFDCAQQESMSLFNTVVNPIRMDEFRQIIQSRPDKKQRMVNIENSRHRKQEQKHLQPQPYKREGKWHKYGRTNGRQMANLEIELGQLPFDPQY

SEQ ID NO: 87481 - protein, 133 aa, Homo sapiens
MSYGRPPPDVEGMTSLKVDNLTYRTSPDTLRRVFEKYGRVGDVYIPRDRYTKESRGFAFVRFHDKRDAEDAMDAMDGAVLDGRELRVQMARYGRPPDSHHSRRGPPPRRYGGGGYGRRSRSRSRSRSRSRSRS

SEQ ID NO: 87482 - protein, 101 aa, Homo sapiens
MVLLKLLEVYRKGSAGTFHKSTIFGNTIMTSQPVPNETIIVLPSNVINFSQAEKPEPTNQGQDSLKKHLHAEIKVIGTIQILCGMMVLSLGIILASASFSP

SEQ ID NO: 87483 - protein, 79 aa, Homo sapiens
  MOD_RES (1)..(1): Any amino acid
XGKVIKTQNLAALLHAIARRPKGQQLAWDFVRENWTHLLKKFDLGSYDIRMIISGTTAHFSSKDKLQEVCDFLFLTISK

SEQ ID NO: 87484 - protein, 221 aa, Homo sapiens
  MOD_RES (1)..(1): Any amino acid
XNVALTFLEKTREKVKSSDEAVILCKTAIGALKLNIGDLQVTKETIEDVEEMLNNLPGVTSVHSRFYDLSSKYYQTIGNHASYYKDALRFLGCVDIKDLPVSEQQERAFTLGLAGLLGEGVFNFGELLMHPVLESLRNTDRQWLIDTLYAFNSGNVERFQTLKTAWGQQPDLAANEAQLLRKIQLLCLMEIKGMKDRLEFWCTDVKSMEMLVEHQAHDILT

SEQ ID NO: 87485 - protein, 254 aa, Homo sapiens
MESGLLRPAPVSEVIVLHYNYTGKLRGARYQPGAGLRADAVVCLAVCAFIVLENLAVLLVLGRHPRFHAPMFLLLGSLTLSDLARPGTAGTTSTRARRKPRSLALLRTLSVVLLAFVACWGPLFLLLLLDVACPARTCPVLLQADPFLGLAMANSLLNPIIYTLTNRDLRHALLRLVCCGRHSCGRDPSGSQQSASAAEASGGLRRCLPPGLDGSFSGSERSSPQRDGLDTSGSTGSPGAPTAARTLVSEPAAD

SEQ ID NO: 87486 - protein, 91 aa, Homo sapiens
  MOD_RES (1)..(1): Any amino acid
XPVKPPGSSLQAPADLPLAINTAPPSTQADSSSATLPPPYQLINVPPHLETLGIQEDPQDYLLLINCQSKKPEPTRNASEECEMKILPCHF

SEQ ID NO: 87487 - protein, 180 aa, Homo sapiens
MNIEVGNISYTGAIISWSSSEPCLEDYYHIMYRPNWNSIFSGYLRYSFHHEEKVPRTISSVVLEHLAPSTLYFLCISCKKAAFPYRHYCTMFHTLDKSPLAPGSSLVDPQISLWVLMAILLACFTAVLAFICLQFWCVRCHEPRWSYRAGHMEEANGLVRWPEEAPDLGQREEDLQGLPL

SEQ ID NO: 87488 - protein, 900 aa, Homo sapiens
MFSRSSRKRLSSRSLTGLGRIERGQPCNACGDQCPGFALHKWRKICLHCKCPQEEHMVTVMPLEMEKTISKLMFDFQRNSTSDDDSGCALEEYAWVPPGLKPEQVHQYYSCLPEEKVPYVNSPGEKLRIKQLLHQLPPHDNEVRYCNSLDEEEKRELKLFSSQRKRENLGRGNVRPFPVTMTGAICEQCGGQINGGDIAVFASRAGHGVCWHPPCFVCTVCNELLVDLIYFYQDGKIYCGRHHAECLKPRCAACDEIIFADECTEAEGRHWHMKHFCCFECETVLGGQRYIMKEGRPYCCHCFESLYAEYCDTCAQHIGIDQGQMTYDGQHWHATETCFCCAHCKKSLLGRPFLPKQGQIFCSRACSAGEDPNGSDSSDSAFQNARAKESRRSAKIGKNKGKTEEPMLNQHSQLQVSSNRLSADVDPLSLQMDMLSLSSQTPSLNRDPIWRSREEPYHYGNKMEQNQTQSPLQLLSQCNIRTSYSPGGQGAGAQPEMWGKHFSNPKRSSSLAMTGHAGSFIKECREDYYPGRLRSQESYSDMSSQSFSETRGSIQVPKYEEEEEEEGGLSTQQCRTRHPISSLKYTEDMTPTEQTPRGSMESLALSNATGLSADGGAKRQEHLSRFSMPDLSKDSGMNVSEKLSNMGTLNSSMQFRSAESVRSLLSAQQYQEMEGNLHQLSNPIGYRDLQSHGRMHQSFDFDGGMAGSKLPGQEGVRIQPMSERTRRRATSRDDNRRFRPHRSRRSRRSRSDNALHLASEREAISRLKDRPPLRAREDYDQFMRQRSFQESMGHGSRRDLYGQCPRTVSDLALQNAFGDRWGPYFAEYDWCSTCSSSSESDNEGYFLGEPIPQPARLRYVTSDELLHKYSSYGLPKSSTLGGRGQLHSRKRQKSKNCIIS

SEQ ID NO: 87489 - protein, 104 aa, Homo sapiens
MRTEDLPKAVVFLEPQWYSVLEKDSVTLKCQGAYSPEDNSTQWFHNENLISSQASSYFIDAATVNDSGEYRCQTNLSTLSDPVQLEVHIGWLLLQAPRWVFKEE

SEQ ID NO: 87490 - protein, 149 aa, Homo sapiens
MTGQGQSASGSSAWSTVFRHVRYENLIAGVSGGVLSNLALHPLDLVKIRFAVSDGLELRPKYNGILHCLTTIWKLDGLRGLYQGVTPNIWGAGLSWGLYFFFYNAIKSYKTEGRAERLEATEYLVSAAEAGICSWAVWNIAWCPSVYGI

SEQ ID NO: 87491 - protein, 513 aa, Homo sapiens
MKQIDIMVAHKKSEWEGRTHALETCLKIREQELKSLRSQLDVTHKEVGMLHQQVEEHEKIKQEMTMEYKQELKKLHEELCILKRSYEKLQKKQMREFRGNTKNHREDRSEIERLTAKIEEFRQKSLDWEKQRLIYQQQVSSLEAQRKALAEQSEIIQAQLVNRKQKLESVELSSQSEIQHLSSKLERANDTICANELEIERLTMRVNDLVGTSMTVLQEQQQKEEKLRESEKLLEALQEEKRELKAALQSQENLIHEARIQKEKLQEKVKATNTQHAVEAIRPREESLAEKKYTSQGQGDLDSVLSQLNFTHTSEDLLQAEVTCLEGSLESVSATCKQLSQELMEKYEELKRMEAHNNEYKAEIKKLKEQILQGEQSYSSALEGMKMEISHLTQELHQRDITIASTKGSSSDMEKRLRAEMQKAEDKAVEHKEILDQLESLKLENRHLSEMVMKLELGLHECSLPVSPLGSIATRFLEEEELRSHHILERLDAHIEELKRESEKTVRQFTALK

SEQ ID NO: 87492 - protein, 195 aa, Homo sapiens
IKTGRSVVLTSHSMEECEALCTRLAIMVNGRLRCLGSIQHLKNRFGDGYMITVRTKSSQSVKDVVRFFNRNFPEAMLKERHHTKVQYQLKSEHISLAQVFSKMEQVSGVLGIEDYSVSQTTLDNSDNLEQQETEPPSALQSPLGCLLSLLRPRSAPTELRALVADEPEDLDTEDEGLISFEEERAQLSFNTDTLC

SEQ ID NO: 87493 - protein, 300 aa, Homo sapiens
  MOD_RES (1)..(1): Any amino acid
XEKFFDIDSGRNAPLHAPPSEHYTIVFNTFVLMQLFNEINARKIHGERNVFEGIFNNAIFCTIVLGTFVVQIIIVQFGGKPFSCSELSIEQWLWSIFLGMGTLLWGQLISTIPTSRLKFLKEAGHGTQKEEIPEEELAEDVEEIDHAERELRRGQILWFRGLNRIQTQMDVVNAFQSGSSIQGALRRQPSIASQHHDIRVVNAFRSSLYEGLEKPESRSSIHNFMTHPEFRIEDSEPHIPLIDDTDAEDDAPTKRNSSPPPSPNKNNNAVDSGIHLTIEMNKSATSSSPGSPLHSLETSL

SEQ ID NO: 87494 - protein, 1698 aa, Homo sapiens
MRLLWGLIWASSFFTLSLQKPRLLLFSPSVVHLGVPLSVGVQLQDVPRGQVVKGSVFLRNPSRNNVPCSPKVDFTLSSERDFALLSLQVPLKDAKSCGLHQLLRGPEVQLVAHSPWLKDSLSRTTNIQGINLLFSSRRGHLFLQTDQPIYNPGQRVRYRVFALDQKMRPSTDTITVMVENSHGLRVRKKEVYMPSSIFQDDFVIPDISEPGTWKISARFSDGLESNSSTQFEVKKYVLPNFEVKITPGKPYILTVPGHLDEMQLDIQARYIYGKPVQGVAYVRFGLLDEDGKKTFFRGLESQTKLVNGQSHISLSKAEFQDALEKLNMGITDLQGLRLYVAAAIIEYPGGEMEEAELTSWYFVSSPFSLDLSKTKRHLVPGAPFLLQALVREMSGSPASGIPVKVSATVSSPGSVPEVQDIQQNTDGSGQVSIPIIIPQTISELQLSVSAGSPHPAIARLTVAAPPSGGPGFLSIEWPDSRPPRVGDTLNLNLRAVGSGATFSHYYYMILSRGQIVFMNREPKRTLTSVSVFVDHHLAPSFYFVAFYYHGDHPVANSLRVDVQAGACEGKLELSVDGAKQYRNGESVKLHLETDSLALVALGALDTALYAAGSKSHKPLNMGKVFEAMNSYDLGCGPGGGDSALQVFQAAGLAFSDGDQWTLSRKRLSCPKEKTTRKKRNVNFQKAINEKLGQYASPTAKRCCQDGVTRLPMMRSCEQRAARVQQPDCREPFLSCCQFAESLRKKSRDKGQAGLQRALEILQEEDLIDEDDIPVRSFFPENWLWRVETVDRFQILTLWLPDSLTTWEIHGLSLSKTKGLCVATPVQLRVFREFHLHLRLPMSVRRFEQLELRPVLYNYLDKNLTVSVHVSPVEGLCLAGGGGLAQQVLVPAGSARPVAFSVVPTAAAAVSLKVVARGSFEFPVGDAVSKVLQIEKEGAIHREELVYELNPLDHRGRTLEIPGNSDPNMIPDGDFNSYVRVTASDPLDTLGSEGALSPGGVASLLRLPRGCGEQTMIYLAPTLAASRYLDKTEQWSTLPPETKDHAVDLIQKGYMRIQQFRKADGSYAAWLSRDSSTWLTAFVLKVLSLAQEQVGGSPEKLQETSNWLLSQQQADGSFQDPCPVLDRSMQGGLVGNDETVALTAFVTIALHHGLAVFQDEGAEPLKQRVEASISKANSFLGEKASAGLLGAHAAAITAYALTLTKAPVDLLGVAHNNLMAMAQETGDNLYWGSVTGSQSNAVSPTPAPRNPSDPMPQAPALWIETTAYALLHLLLHEGKAEMADQAAAWLTRQGSFQGGFRSTQDTVIALDALSAYWIASHTTEERGLNVTLSSTGRNGFKSHALQLNNRQIRGLEEELQFSLGSKINVKVGGNSKGTLKVLRTYNVLDMKNTTCQDLQIEVTVKGHVEYTMEANEDYEDYEYDELPAKDDPDAPLQPVTPLQLFEGRRNRRRREAPKLTSLSDRYVSHFETEGPHVLLYFDSVPTSRECVGFEAVQEVPVGLVQPASATLYDYYNPERRCSVFYGAPSKSRLLATLCSAEVCQCAEGKCPRQRRALERGLQDEDGYRMKFACYYPRVEYGFQVKVLREDSRAAFRLFETKITQVLHFTKDVKAAANQMRNFLVRASCRLRLEPGKEYLIMGLDGATYDLEGHPQYLLDSNSWIEEMPSERLCRSTRQRAACAQLNDFLQEYGTQGCQV

SEQ ID NO: 87495 - protein, 109 aa, Homo sapiens
MNNQKVVAVLLQECKQVLDQLLLEAPDVSEEDKSEDQRCRGVPEGLHPRSGLCGCGGYCVLGGPVPVWARRLWKTSAGRQRSPQVAASHANCPAGGYSPSPNLRELRTT

SEQ ID NO: 87496 - protein, 615 aa, Homo sapiens
MPQLQYPEGYLAPNRCLVSNCGVNKMSNDELVGQNHGMEGEACIGGDVTFNDVAIDFTHEEWGWLSSAQRDLYKDVMVQNYENLVSVAGLSVTKPYVITLLEDGKEPWMMEKKLSKGMIPDWESRWENKELSTKKDNYDEDSPQTVIIEKVVKQSYEFSNSKKNLEYIEKLEGKHGSQVDHFRPAILTSRESPTADSVYKYNIFRSTFHSKSTLSEPQKISAEGNSHKYDILKKNLPKKSVIKNEKVNGGKKLLNSNKSGAAFSQGKSLTLPQTCNREKIYTCSECGKAFGKQSILNRHWRIHTGEKPYECRECGKTFSHGSSLTRHLISHSGEKPYKCIECGKAFSHVSSLTNHQSTHTGEKPYECMNCGKSFSRVSHLIEHLRIHTQEKLYECRICGKAFIHRSSLIHHQKIHTGEKPYECRECGKAFCCSSHLTRHQRIHTMEKQYECNKCLKVFSSLSFLVQHQSIHTEEKPFECQKCRKSFNQLESLNMHLRNHIRLKPYECSICGKAFSHRSSLLQHHRIHTGEKPYECIKCGKTFSCSSNLTVHQRIHTGEKPYKCNECGKAFSKGSNLTAHQRVHNGEKPNSVVSVEKPLDYMNHYTCEKSYRRETV

SEQ ID NO: 87497 - protein, 754 aa, Homo sapiens
MAVRERAAAAMAALERRVPSLDDFAGQSWSSWVERADLPAADGAELEESSKNTKKLDAMTLIKEDMSIFGHCPAHDDFYLVVCNHCSQVVKPQAFQKHCERRHGPLSKLYGRAPPPPPAPASSQKCHVVNGQGPACRAPGSTKTSSREKGQGSRSRGHQPPEKTQKDNLCLFVPVVNLEKMSSLPKPDGHGIRVAPPSAFLSQPGGLTKDSPGKPPMAPPSKEPPGRENIEIIPSEGSSHWAEGSPPEKEPSGTRLPPKTHRKMARKECDLNRQCGVINPETKKICTRLLTCKIHSVHQRREVQGRAKDFDVLVAELKANSRKGESPKEKSPGRKEQVLERPSQELPSSVQVVAAVAAPSSTFSVRAKQTYPYCALPRSRASSESELDDEGPCGGDGDPGLFPFPMPRGGTQASSEESEEEGTSDDLHPPPDCHYATRPPRPQAFCTFGSRLVSPGCYVFSRRLDRFCSALSSMLERHLSTHMWKKIPPAAEPPAHLVNSPLSAPLSPSSTGTCPRLPGPTLRPACPASMPPTKDNLVPSYPAGSPSVAAACSQAECMGGSQAITSPLPANTPSPSFSKLPPSKASKSSKGKDGVEVEAPSRKRKLSPGPTTLKRTCILEPTGKGKPSGCRGLSAKTKTALSMGLNGTMGPRVKRAGPLDCRGSPHQLPTPVKASQLENRGAAGHPAKALPTNCLSEEEVAKKRKNLATYCRPVKAKHCQAGAPADVACSVRRKKPGPALAFEEKCSTLKSKAH

SEQ ID NO: 87498 - protein, 334 aa, Homo sapiens
MAALRALCGFRGVAAQVLRPGAGVRLPIQPSRGVRQWQPDVEWAQQFGGAVMYPSKETAHWKPPPWNDVDPPKDTIVKNITLNFGPQHPAAHGVLRLVMELSGEMVRKCDPHIGLLHRGTEKLIEYKTYLQALPYFDRLDYVSMMCNEQAYSLAVEKLLNIRPPPRAQWIRVLFGEITRLLNHIMAVTTHALDLGAMTPFFWLFEEREKMFEFYERVSGARMHAAYIRPGGVHQDLPLGLMDDIYQFSKNFSLRLDELEELLTNNRIWRNRTIDIGVVTAEEALNYGFSGVMLRGSGIQWDLRKTQPYDVYDQVEFDVPVGSRGDCYDRLPWSH

SEQ ID NO: 87499 - protein, 938 aa, Homo sapiens
MDDSEVESTASILASVKEQEAQFEKLTRALEEERRHVSAQLERVRVSPQDANPLMANGTLTRRHQNGRFVGDADLERQKFSDLKLNGPQDHSHLLYSTIPRMQEPGQIVETYTEEDPEGAMSVVSVETSDDGTTRRTETTVKKVVKTVTTRTVQPVAMGPDGLPVDASSVSNNYIQTLGRDFRKNGNGGPGPYVGQAGTATLPRNFHYPPDGYSRHYEDGYPGGSDNYGSLSRVTRIEERYRPSMEGYRAPSRQDVYGPQPQVRVGGSSVDLHRFHPEPYGLEDDQRSMGYDDLDYGMMSDYGTARRTGTPSDPRRRLRSYEDMIGEEVPSDQYYWAPLAQHERGSLASLDSLRKGGPPPPNWRQPELPEVIAMLGFRLDAVKSNAAAYLQHLCYRNDKVKTDVRKLKGIPVLVGLLDHPKKEVHLGACGALKNISFGRDQDNKIAIKNCDGVPALVRLLRKARDMDLTEVITGTLWNLSSHDSIKMEIVDHALHALTDEVIIPHSGWEREPNEDCKPRHIEWESVLTNTAGCLRNVSSERSEARRKLRECDGLVDALIFIVQAEIGQKDSDSKLVENCVCLLRNLSYQVHREIPQAERYQEAAPNVANNTGPHAASCFGAKKGKDEWFSRGKKPIEDPANDTVDFPKRTSPARGYELLFQPEVVRIYISLLKESKTPAILEASAGAIQNLCAGRWTYGRYIRSALRQEKALSAIADLLTNEHERVVKAASGALRNLAVDARNKELIGKHAIPNLVKNLPGGQQNSSWNFSEDTVISILNTINEVIAENLEAAKKLRETQGIEKLVLINKSGNRSEKEVRAAALVLQTIWGYKELRKPLEKEGWKKSDFQVNLNNASRSQSSHSYDDSTLPLIDRNQKSDKKPDREEIQMSNMGSNTKSLDNNYSTPNERGDHNRTLDRSGDLGDMEPLKGTTPLMKI

SEQ ID NO: 87500 - protein, 72 aa, Homo sapiens
  MOD_RES (1)..(1): Any amino acid
XDAGGRIGCKELVLMEEQDARVPALEPFRVEQAPPVIYYVPDFISKEEEEYLLRQVTSVPYWWASSSPRDGS

SEQ ID NO: 87501 - protein, 94 aa, Homo sapiens
  MOD_RES (1)..(1): Any amino acid
XEERETQVAAWLKKIFGDHPIPQYEVNPRTTEILHHLSERNRVRDRDVYLVIEDLKQKASEYESEESCSVAQAGVLWCDLSSLQPPPLGFKQFS

SEQ ID NO: 87502 - protein, 153 aa, Homo sapiens
MVQWKRLCQLHYLWALGCYMLLATVALKLSFRLKCDSDHLGLESRESQSQYCRNILYNFLKLPAKRSINCSGVTRGDQEAVLQAILNNLEVKKKREPFTDTHYLSLTRDCEHFKAERKFIQFPLSKEEVEFPIAYSMVIHEKIENFERLLRAV

SEQ ID NO: 87503 - protein, 101 aa, Homo sapiens
MEGPEGLGRKQACLAMLLHFLDTYQGLLQEEEGAGHIIKDLYLLIMKDESLYQGLREDTLRLHQLVETVELKIPEENQPPSKQVKPLFRHFRRIDSCLQTR

SEQ ID NO: 87504 - protein, 239 aa, Homo sapiens
GKARPAGNTGAWAPAEQFFPASNRTREGGGLWPPLPLQSSPAAPTMLDSSAAEQVTRLTLKLLGQKLEQERQNVEGGPEGLHLEPGNEDRPDDALQTALKRRRDLLQRLREQHLLDELSRAQAWSGPSRGALGSALPPELPPTGILPTASPSPLAPDPPRIILPTVPQPPATIIQQLPQQPLIAQIPPPQAFPTQRSGSIKEDMVELLLLQNAQVHQLVLQNWMLKALPPALQDRFFHS

SEQ ID NO: 87505 - protein, 139 aa, Homo sapiens
MYKLASCCLLFIGFLNPLLSLPLLDSREISFQLSAPHEDARLTPEELERASLLQILPEMLGAERGDILRKADSSTNIFNPRGNLRKFQDFSGQDPNILLSHLLARIWKPYKKQRRKLRQDLRLWKKEPGLRIFKNYVWV

SEQ ID NO: 87506 - protein, 166 aa, Homo sapiens
MGSPLRFDGRVVLVTGAGAGLGRAYALAFAERGALVVVNDLGGDFKGVGKGSLAADKVVEEIRRRGGKAVANYDSVEEGEKVVKTALDAFGRIDVVVNNAGILRDRSFARISDEDWDIIHRVHLRGSFQVTRAAWEHMKKQKIIMTSSASGIYGNFGQANYSAAKL

SEQ ID NO: 87507 - protein, 584 aa, Homo sapiens
MASTDYSTYSQAAAQQGYSAYTAQPTQGYAQTTQQAYGQQSYGTYGQPTDVSYTQAQTTATYGQTAYATSYGQPPTGYTTPTAPQAYSQPVQGYGTGAYDTTTATVTTTQASYAAQSAYGTQPAYPAYGQQPAATAPTRPQDGNKPTETSQPQSSTGGYNQPSLGYGQSNYSYPQVPGSYPMQPVTAPPSYPPTSYSSTQPTSYDQSSYSQQNTYGQPSSYGQQSSYGQQSSYGQQPPTSYPPQTGSYSQAPSQYSQQSSSYGQQRPMDEGPDLDLGPPVDPDEDSDNSAIYVQGLNDSVTLDDLADFFKQCGVVKMNKRTGQPMIHIYLDKETGKPKGDATVSYEDPPTAKAAVEWFDGKDFQGSKLKVSLARKKPPMNSMRGGLPPREGRGMPPPLRGGPGGPGGPGGPMGRMGGRGGDRGGFPPRGPRGSRGNPSGGGNVQHRAGDWQCPNPGCGNQNFAWRTECNQCKAPKPEGFLPPPFPPPGGDRGRGGPGGMRGGRGGLMDRGGPGGMFRGGRGGDRGGFRGGRGMDRGGFGGGRRGGPGGPPGPLMEQMGGRRGGRGGPGKMDKGEHRQERRDRPY

SEQ ID NO: 87508 - protein, 174 aa, Homo sapiens
MKPQFVGILLSSLLGAALGNRMRCYNCGGSPSSTCKEAVTTCGEGRPQPGLEQIKLPGNRRCFLRGLKIPLGSLKSHLLCPRRQVLKPGVQHPSFILSLSPSDLDSPTSSLRRSPSLQSSGDRVGGRRDLSSPQGLLPGRPVQQRRGKPCGPCRHFGCSSYRPDLSLARTVERI

SEQ ID NO: 87509 - protein, 1730 aa, Homo sapiens
MMNEDAAQKSDSGEKFNGSSQRRKRPKKVTCPQMKPEAANIEKSDSNASFLRAARAGNLDKVVEYLKGGIDINTCNQNGLNALHLAAKEGHVGLVQELLGRGSSVDSATKKGNTALHIASLAGQAEVVKVLVKEGANINAQSQNGFTPLYMAAQENHIDVVKYLLENGANQSTATEDGFTPLAVALQQGHNQAVAILLENDTKGKVRLPALHIAARKDDTKSAALLLQNDHNADVQSKMMVNRTTESGFTPLHIAAHYGNVNVATLLLNRGAAVDFTARNGITPLHVASKRGNTNMVKLLLDRGGQIDAKTRDGLTPLHCAARSGHDQVVELLLERGAPLLARTKNGLSPLHMAAQGDHVECVKHLLQHKAPVDDVTLDYLTALHVAAHCGHYRVTKLLLDKRANPNARALNGFTPLHIACKKNRIKVMELLVKYGASIQAITESGLTPIHVAAFMGHLNIVLLLLQNGASPDVTNIRGETALHMAARAGQVEVVRCLLRNGALVDARAREEQTPLHIASRLGKTEIVQLLLQHMAHPDAATTNGYTPLHISAREGQVDVASVLLEAGAAHSLATKKGFTPLHVAAKYGSLDVAKLLLQRRAAADSAGKNGLTPLHVAAHYDNQKVALLLLEKGASPHATAKNGYTPLHIAAKKNQMQIASTLLNYGAETNIVTKQGVTPLHLASQEGHTDMVTLLLDKGANIHMSTKSGLTSLHLAAQEDKVNVADILTKHGADQDAHTKLGYTPLIVACHYGNVKMVNFLLKQGANVNAKTKNGYTPLHQAAQQGHTHIINVLLQHGAKPNATTANGNTALAIAKRLGYISVVDTLKVVTEEVTTTTTTITEKHKLNVPETMTEVLDVSDEEGDDTMTGDGGEYLRPEDLKELGDDSLPSSQFLDGMNYLRYSLEGGRSDSLRSFSSDRSHTLSHASYLRDSAVMDDSVVIPSHQVSTLAKEAERNSYRLSWGTENLDNVALSSSPIHSGFLVSFMVDARGGAMRGCRHNGLRIIIPPRKCTAPTRVTCRLVKRHRLATMPPMVEGEGLASRLIEVGPSGAQFLGKLHLPTAPPPLNEGESLVSRILQLGPPGTKFLGPVIVEIPHFAALRGKERELVVLRSENGDSWKEHFCDYTEDELNEILNGMDEVLDSPEDLEKKRICRIITRDFPQYFAVVSRIKQDSNLIGPEGGVLSSTVVPQVQAVFPEGALTKRIRVGLQAQPMHSELVKKILGNKATFSPIVTLEPRRRKFHKPITMTIPVPKASSDVMLNGFGGDAPTLRLLCSITGGTTPAQWEDITGTTPLTFVNECVSFTTNVSARFWLIDCRQIQESVTFASQVYREIICVPYMAKFVVFAKSHDPIEARLRCFCMTDDKVDKTLEQQENFAEVARSRDVEVLEGKPIYVDCFGNLVPLTKSGQHHIFSFFAFKENRLPLFVKVRDTTQEPCGRLSFMKEPKSTRGLVHQAICNLNITLPIYTKESESDQEQEEEIDMTSEKNDETESTETSVLKSHLVNEVPVLASPDLLSEVSEMKQDLIKMTAILTTDVSDKAGSIKVKELVKAAEEEPGEPFEIVERVKEDLEKVNEILRSGTCTRDESSVQSSRSERGLVEEEWVIVSDEEIEEARQKAPLEITEYPCVEVRIDKEIKGKVEKDSTGLVNYLTDDLNTCVPLPKEQLQTVQDKAGKKCEALAVGRSSEKEGKDIPPDETQSTQKQHKPSLGIKKPVRRKLKEKQKQK

SEQ ID NO: 87510 - protein, 113 aa, Homo sapiens
VSPLQKSEVVEMVKKQVKVVTLAIGDGANDVSMIQTAHVGVGISGNEGLQAANSSDYSIAQFKYLKNLLMIHGAWNYNRVSKCILYCFYKNIVLYIIENTDIQANNNLYSLFT

SEQ ID NO: 87511 - protein, 213 aa, Homo sapiens
YNQDNETLEVHPPPTTTYQDVILGTRKTYAIYDLLDTAMINNSRNLNIQLKWKRPPENEAPPVPFLHAQRYVSGYGLQKGELSTLLYNTHPYRAFPVLLLDTVPWYLRLYVHTLTITSKGKENKPSYIHYQPAQDRLQPHLLEMLIQLPANSVTKVSIQFERALLKWTEYTPDPNHGFYVSPSVLSALVPSMVAAKPVDWEESPLFNSLLPWT

SEQ ID NO: 87512 - protein, 171 aa, Homo sapiens
MWRSLGLALALCLLPSGGTESQDQSSLCKQPPAWSIRDQDPMLNSNGSVTVVALLQASCYLCILQASKLSKMKTFVNVYLWLLWIKQLKLHRLITIMSIITIMDISTLAAVSFQRISNQEHQMLLLILLLQAFITTISTRVSIGRVTQRTEICQQVKIYKIYKRSSVERDV

SEQ ID NO: 87513 - protein, 204 aa, Homo sapiens
MPILSSSGSKMAACGGTCKNKVTVSKPVWDFLSKETPARLARLREEHRVSILIDGETSDIYVLQLSPQGPPPAPPNGLYLARKALKGLLKEAEKELKKAQRQGELMGCLALGGGGEHPEMHRAGPPPLRAAPLLPPGARGLPPPPPPLPPPLPPRLREEAEEQESTCPICLGEIQNAKTLEKCRHSFCEGCITRALQVKKACPM

SEQ ID NO: 87514 - protein, 70 aa, Homo sapiens
MFSAGAESLLHQAREIQDEELKKFCSRICKLLQAEDLGPDTLDSLQRLFLIISATKYSRSRAPSPRWTGR

SEQ ID NO: 87515 - protein, 148 aa, Homo sapiens
METLKDKTLQELEELQNDSEAIDQLALESPEVQDLQLEREMALATNRSLAERNLEFQGPLEISRSNLSDRYQELRKLVERCQEQKAKLEKFSSALQPGTLLDLLQVEGMKIEEESEAMAEKFLEGEVPLETFLENFSSMRMLSHLRRV

SEQ ID NO: 87516 - protein, 124 aa, Homo sapiens
MERRLIKKEMKKLLGDYIGIRLRENEFDPKGRRQLTFLDDMAHYDLAISVALQWLDPSEDLTWLEWEELKIPLHGRPIYPNRREREAMILSSYAGILMNSIPIEEVFKIYGADSSADSGTIKVT

SEQ ID NO: 87517 - protein, 30 aa, Homo sapiens
MESVVKNCGQTVHDEVANKQTMEELKDLLK

SEQ ID NO: 87518 - protein, 455 aa, Homo sapiens
MQKPPLLLRRPLPPKFTKLSLHEKKTHTAKTGKIESLHVAFTEDETTSIKMDRTRFPDVLRNQSLTPINIQNIFLDHCVQERVTAISSPQKSTKHVREQIPDTATGSIFFPHCNSASTRIFGKQTNKMESSRKFKTMKDVYTEKRLENILILSSKFSKPKSTPGSVIAQKLEKMHPKHQPLPESPGYTYQHISRDLSATVPSPPPMTVSMKPEGQWPEHFKSTATLTLRVTEFPGFVSLPTPVLPRKPHRQSVIETLVTENGNIESVPKQIPPRPPEGLTKTEKIESEIHVVRGEGFKTVAATRYETITAMTNLAIVNCQVYGRNALNLKGFFILNCPDLTPLAFQLIYLNLSFNDLHYFPTEILCLKNLQILKLRNNPIKEIPSEIQQLEFLRIFTIAFNLITVLPIGWRKGAMSQGMRQLENLGMAFSIQPTRKQGPQFYSRKELNSANSLHE

SEQ ID NO: 87519 - protein, 82 aa, Homo sapiens
MTGHLQPAEAMGLHGAWLPHEHCFPGPRKHRVRSSGWRRGGIQTSLGAALGHRVGLALPATGCTSGRGDRQGLGRGLPSLLP

SEQ ID NO: 87520 - protein, 487 aa, Homo sapiens
MLTAVPSHLFSAKNGRVDSEDRRSRHCPYLDTINRSVLDFDFEKLCSISLSHINAYACLVCGKYFQGRGLKSHAYIHSVQFSHHVFLNLHTLKFYCLPDNYEIIDSSLEDITYVLKPTFTKQQIANLDKQAKLSRAYDGTTYLPGIVGLNNIKANDYANAVLQALSNVPPLRNYFLEEDNYKNIKRPPGDIMFLLVQRFGELMRKLWNPRNFKAHVSPHEMLQAVVLCSKKTFQITKQGDGVDFLSWFLNALHSALGGTKKKKKTIVTDVFQGSMRIFTKKLPHPDLPAEEKEQLLHNDEYQETMVESTFMYLTLDLPTAPLYKDEKEQLIIPQVPLFNILAKFNGITEKEYKTYKENFLKRFQLTKLPPYLIFCIKRFTKNNFFVEKNPTIVNFPITNVDLREYLSEEVQAVHKNTTYDLIANIVHDGKPSEGSYRIHVLHHGTGKWYELQDLQVTDILPQMITLSEAYIQIWKRRDNDETNQQGA

SEQ ID NO: 87521 - protein, 87 aa, Homo sapiens
PRTKTRLVPEGRNVTFRCGQKILHKKGKVYWYKDQEPLEFSYPGYLALGEAHLSIIANAVNEGTYTCVVRRQQRVLTTYSWRVRVRG

SEQ ID NO: 87522 - protein, 27 aa, Homo sapiens
  MOD_RES (1)..(1): Any amino acid
XLTFLAEWGDRSQLTTIVLAAREVSDI

SEQ ID NO: 87523 - protein, 245 aa, Homo sapiens
MGDVLEQFFILTGLLVCLACLAKCVRFSRCVLLNYWKVLPKSFLRSMGQWAVITGAGDGIGKAYSFELAKRGLNVVLISRTLEKLEAIATEIVNNVGMLPNLLPSHFLNAPDEIQSLIHCNITSVVKMTQLILKHMESRQKGLILNISSGIALFPWPLYSMYSASKAFVCAFSKALQEEYKAKEVIIQVLTPYAVSTAMTKYLNTNVITKTADEFVKESLNYVTIGGETCGCLAHEILAGFLSLI

SEQ ID NO: 87524 - protein, 52 aa, Homo sapiens
MAQAHRTPQPRAAPSQPRVFKLVLLGSGSVGKSSLALRYVKNDFKSILPTVG

SEQ ID NO: 87525 - protein, 271 aa, Homo sapiens
  MOD_RES (1)..(1): Any amino acid
XATSVRNLPELKTAVGRGRAWLYLALMQKKLADYLKVLIDNKHLLSEFYEPEALMMEEEGMVIVGLLVGLNVLDANLCLKGEDLDSQVGVIDFSLYLKDVQDLDGGKDCTVGDLQTKIDGLEKTNSKLQEELSAATDRICSLQEEQQQLREQNELIRERSEKSVEITKQDTKVELETYKQTRQGLDEMYSDVWKQLKEEKKVRLELEKELELQIGMKTEMEIAMKLLEKDTHEKQDTLVALRQQLEEVKAINLQMFHKAQNAESSLQQKNE

SEQ ID NO: 87526 - protein, 41 aa, Homo sapiens
MNTNSKEVLSLGVQVPEAWEELLTMKVEAKSHLQWQESRLK

SEQ ID NO: 87527 - protein, 176 aa, Homo sapiens
MSRESDVEAQQSHGSSACSQPHGSVTQSQGSSSQSQGISSSSTSTMPNSSQSSHSSSGTLSSLETVSTQELYSIPEDQEPEDQEPEEPTPAPWARLWALQDGFANLECVNDNYWFGRDKSCEYCFDEPLLKRTDKYRTYSKKHFRIFREVGPKNSYIAYIEDHSGNGTFVNTELVG

SEQ ID NO: 87528 - protein, 126 aa, Homo sapiens
MVCGGFACSKNALCALNVVYMLVSLLLIGVAAWGKGLGLVSSIHIIGGVIAVGVFLLLIAVAGLICKSQSPTCQMCGEKFLKHSDEALKILGGVGLFFSFTEILGVWLAMRFRNQKDPRANPSAFL

SEQ ID NO: 87529 - protein, 65 aa, Homo sapiens
MCSHFAKDLRPEQYIKNSFQQVILRRYGKCGYQKGCKSVDEHKLHKGGHKGLNRCVTTTQSKIVQ

SEQ ID NO: 87530 - protein, 36 aa, Homo sapiens
SGNHGGSGGGNGHKPGISRLWLTKWVLLSSHISLVP

SEQ ID NO: 87531 - protein, 75 aa, Homo sapiens
MEAFALGPARRGRRRTRAAGSLLSRAAILLFISAFLVRVPSSGEGPRRPAGSAGTTAASPTLRIAFSCVTCIRFI

SEQ ID NO: 87532 - protein, 388 aa, Homo sapiens
MEERAGPAAGHGGVNQLGGVFVNGRPLPDVVRQRIVELAHQGVRPCDISRQLRVSHGCVSKILGRYYETGSIKPGVIGGSKPKVATPKVVDKIAEYKRQNPTMFAWEIRDRLLAEGICDNDTVPSVSSINRIIRTKVQQPFHPTPDGAGTGVTAPGHTIVPSTASPPVSSASNDPVGSYSINGILGIPRSNGEKRKRDEDVSEGSVPNGDSQSGVDSLRKHLRADTFTQQQLEALDRVFERPSYPDVFQASEHIKSEQGNEYSLPALTPGLDEVKSSLSASTNPELGSNVSGTQTYPVVTGRDMASTTLPGYPPHVPPTGQGSYPTSTLAGMVPGSEFSGNPYSHPQYTAYNEAWRFSNPALLSSPYYYSAAPRGSAPAAAAAAYDRH

SEQ ID NO: 87533 - protein, 1493 aa, Homo sapiens
MENEIFTPLLEQFMTSPLVTWVKTFGPLAAGNGTNLDEYVALVDGVFLNQVMLQINPKLESQRVNKKVNNDASLRMHNLSILVRQIKFYYQETLQQLIMMSLPNVLIIGKNPFSEQGTEEVKKLLLLLLGCAVQCQKKEEFIERIQGLDFDTKAAVAAHIQEVTHNQENVFDLQWMEVTDMSQEDIEPLLKNMALHLKRLIDERDEHSETIIELSEERDGLHFLPHASSSAQSPCGSPGMKRTESRQHLSVELADAKAKIRRLRQELEEKTEQLLDCKQELEQMEIELKRLQQENMNLLSDARSARMYRDELDALREKAVRVDKLESEVSRYKERLHDIEFYKARVEELKEDNQVLLETKTMLEDQLEGTRARSDKLHELEKENLQLKAKLHDMEMERDMDRKKIEELMEENMTLEMAQKQSMDESLHLGWELEQISRTSELSEAPQKSLGHEVNELTSSRLLKLEMENQSLTKTVEELRTTVDSVEGNASKILKMEKENQRLSKKVEILENEIVQEKQSLQNCQNLSKDLMKEKAQLEKTIETLRENSERQIKILEQENEHLNQTVSSLRQRSQISAEARVKDIEKENKILHESIKETSSKLSKIEFEKRQIKKELEHYKEKGERAEELENELHHLEKENELLQKKITNLKITCEKIEALEQENSELERENRKLKKTLDSFKNLTFQLESLEKENSQLDEENLELRRNVESLKCASMKMAQLQLENKELESEKEQLKKGLELLKASFKKTERLEVSYQGLDIENQRLQKTLENSNKKIQQLESELQDLEMENQTLQKNLEELKISSKRLEQLEKENKSLEQETSQLEKDKKQLEKENKRLRQQAEIKDTTLEENNVKIGNLEKENKTLSKEIGIYKESCVRLKELEKENKELVKRATIDIKTLVTLREDLVSEKLKTQQMNNDLEKLTHELEKIGLNKERLLHDEQSTDDRYKLLESKLESTLKKSLEIKEEKIAALEARLEESTNYNQQLRQELKTVKKNYEALKQRQDEERMVQSSPPISGEDNKWERESQETTRELLKVKDRLIEVERNNATLQAEKQALKTQLKQLETQNNNLQAQILALQRQTVSLQEQNTTLQTQNAKLQVENSTLNSQSTSLMNQNAQLLIQQSSLENENESVIKEREDLKSLYDSLIKDHEKLELLHERQASEYESLISKHGTLKSAHKNLEVEHRDLEDRYNQLLKQKGQLEDLEKMLKVEQEKMLLENKNHETVAAEYKKLCGENDRLNHTYSQLLKETEVLQTDHKNLKSLLNNSKLEQTRLEAEFSKLKEQYQQLDITSTKLNNQCELLSQLKGNLEEENRHLLDQIQTLMLQNRTLLEQNMESKDLFHVEQRQYIDKLNELRRQKEKLEEKIMDQYKFYDPSPPRRRGNWITLKMRKLIKSKKDINRERQKSLTLTPTRSDSSEGFLQLPHQDSQDSSSVGSNSLEDGQTLGTKKSSMVALKRLPFLRNRPKDKDKMKACYRRSMCKTL

SEQ ID NO: 87534 - protein, 139 aa, Homo sapiens
MSRVLQKDAEQESQMRAEIQDMKQELSTVNMMDEFARYARLERKINKMTDKLKTHVKARTAQLAKIKWVISVAFYVLQAALMISLIWKYYSVPVAVVPSKWITPLDRLVAFPTRVAGDDGLIEFTTVTLESPKAWLVEA

SEQ ID NO: 87535 - protein, 28 aa, Homo sapiens
MLPHVVLTFRRLGCALASCRLAPARHRG

SEQ ID NO: 87536 - protein, 129 aa, Homo sapiens
MATDSWALAVDEQEAAVKSMTNLQIKEEKVKADTNGIIKTSTTAEKTDEEEKEDRAAQSLLNKLIRSNLVDNTNQVEVLQRDPNSPLYSVKSFEELRLKPQLLQGVYAMGFNRPSKIQENALPMMLAEP

SEQ ID NO: 87537 - protein, 270 aa, Homo sapiens
  MOD_RES (1)..(1): Any amino acid
XGIPSIKWCGAEGDYNVMVMELLGPSLEDLFNFCSRKFSLKTVLLLADQMISRIEYIHSKNFIHRDVKPDNFLMGLGKKGNLVYIIDFGLAKKYRDARTHQHIPYRENKNLTGTARYASINTHLGIEQSRRDDLESLGYVLMYFNLGSLPWQGLKAATKRQKYERISEKKMSTPIEVLCKGYPSEFSTYLNFCRSLRFDDKPDYSYLRQLFRNLFHRQGFSYDYVFDWNMLKFGASSSQAQPRDSPMTAKGPFCPRPCPCAGPTYSPTYW

SEQ ID NO: 87538 - protein, 268 aa, Homo sapiens [sequence omitted]

SEQ ID NO: 87539 - protein, 901 aa, Homo sapiens
MLPGLTTELFSPVDLNQVIVNGNQSLSSQKHWLFKHLFSAQQANLWCLSRCVQEHSFCQLAEITESASLYFTCTLYPEAQVCDDIMESNAQGCRLILPQMPKALFRKKVILEDKVKNFYTRLPFQKLMGISIRNKVPMSEKSISNGFFECERRCDADPCCTGFGFLNVSQLKGGEVTCLTLNSLGIQMCSEENGGAWRILDCGSPDIEVHTYPFGWYQKPMSLDSWQSLALSSVVVDPSIRHFDVAHVSTAATSNFSAVRDLCLSECSQHEACLITTLQTQPGAVRCMFYADTQSCTHSLQGQNCRLLLREEATHIYRKPGISLLSYEASVPSVPISTHGRLLGRSQAIQVGTSWKQVDQFLGVPYAAPPLAERRFQAPEPLNWTGSWDASKPRASCWQPGTRTSTSPGVSEDCLYLNVFIPQNVAPNASVLVFFHNTMDREESEGWPAIDGSFLAAVGNLIVVTASYRVGVFGFLSSGSGEVSGNWGLLDQVAALTWVQTHIRGFGGDPRRVSLAADRGGADVASIHLLTARATNSQLFRRAVLMGGSALSPAAVISHERAQQQAIALAKEVSCPMSSSQEVVSCLRQKPANVLNDAQTKLLAVSGPFHYWGPVIDGHFLREPPARALKRSLWVEVDLLIGSSQDDGLINRAKAVKQFEESRGRTSSKTAFYQALQNSLGGEDSDARVEAAATWYYSLEHSTDDYASFSRALENATRDYFIICPIIDMASAWAKRARGNVFMYHAPENYGHGSLELLADVQFALGLPFYPAYEGQFSLEEKSLSLKIMQYFSHFIRSGNPNYPYEFSRKVPTFATPWPDFVPRAGGENYKEFSELLPNRQGLKKADCSFWSKYISSLKTSADGAKGGQSAESEEEELTAGSGLREDLLSLQEPGSKTYSK

SEQ ID NO: 87540 - protein, 302 aa, Homo sapiens
  MOD_RES (1)..(1): Any amino acid
XLQERLRYPDSTGLESLLLLRGADRVLQAHIEYIESYTSCMVVQAFQKAAKRRSEYWRGQRKALRQLLSGVSSEGSVGASLGQALHQPLAHHVQQYVLLLLSLGDTIGEHHPTRELVVNAVTLFGNLQSFMKQELDQAVATQALWHTLRGRLRDVLCTPAHRLLQDSQDVPVTVAPLRAERVLLFDDALVLLQGHNVHTFDLKLVWVDPGQDGCTFHLLTPEEEFSFCAKDSQGQAVWQWKVTWAVHQALHGKKDFPVLGAGLEPSQPPDCRCAEYTFQAEGRLCQATYEGEWCRGRPHGEP

SEQ ID NO: 87541 - protein, 16 aa, Homo sapiens
MENPSPAAALGKALCA

SEQ ID NO: 87542 - protein, 21 aa, Homo sapiens
MTESQEKYGELMSIRKTRTDF

SEQ ID NO: 87543 - protein, 372 aa, Homo sapiens
MQVSIACTEHNLKSRNGEDRLLSKQSSTAPNVVNAARAKFRTVAIIARSLGTFTPQHHISLKESTAKQTGMKYRNLGKSGLRVSCLGLGTWVTFGGQISDEVAERLMTIAYESGVNLFDTAEVYAAGKAEVILGSIIKKKGWRRSSLVITTKLYWGGKAETERGLSRKHIIEEIVRAMTHVINQGMAMYWGTSRWSAMEIMEAYSVARQFNMIPPVCEQAEYHLFQREKVEVQLPELYHKIGVGAMTWSPLACGIISGKYGNGVPESSRASLKCYQWLKERIVSEEGRKQQNKLKDLSPIAERLGCTLPQLAVAWCLRNEGVSSVLLGSSTPEQLIENLGAIQVLPKMTSHVVNEIDNILRNKPYSKKDYRS

SEQ ID NO: 87544 - protein, 169 aa, Homo sapiens
MAASVSTTWHSNDDDVYRAPPIDRSILPTAPRAAREPNIDRSRLPKSPPYTAFLGNLPYDVTEESIKEFFRGLNISAVRLPREPSNPERLKGFGYAEFEDLDSLLSALSLNEESLGNRRIRVDVADQAQDKDRDDRSFGRDRNRDSDKTDTDWRARPATDSFDDYPPRR

SEQ ID NO: 87545 - protein, 445 aa, Homo sapiens
  MOD_RES (1)..(1): Any amino acid
XREALLFRENTLATKAIDEYMKLVAQDYLQETLGQVVRRLCASTEDCEVDPSKCPASELPEHQARLRNSCEEVFETIIHSYDWFPAELGIVFSSWREACKERGSEVLGPRLVCASLFLRLLCPAILAPSLFGLAPDHPAPGPARTLTLIAKVIQNLANRAPFGEKEAYMGFMNSFLEEHGPAMQCFLDQVAMVDVDAAPSGYQGSGDLALQLAVLHAQLCTIFAELDQTTRDTLEPLPTILRAIEEGQPVLVSVPMRLPLPPAQVHSSLSAGEKPGFLAPRDLPKHTPLISKSQSLRSVRRSESWARPRPDEERPLRRPRPVQRTQSVPVRRPARRRQSAGPWPRPKGSLSMGPAPRARPWTRDSASLPRKPSVPWQRQMDQPQDRNQALGTHRPVNKEHRLNEMERTQAQLRDAVQSLQLSPRTRGSWSQPQPLKAPCLNGDTT

SEQ ID NO: 87546 - protein, 158 aa, Homo sapiens
MEATRRRQHLGATGGPGAQLGASFLQARYIPFFLILFMYFSGCFTASKAESLIPGPALLLVAPSGLYYWYLVTEGQIFILFIFTFFAMLALVLHQKRKRLFLDSNGLFLFSSFALTLLLVALWVAWLWNDPVLRKKYPGVIYVPEPWAFYTLHVSSRH

SEQ ID NO: 87547 - protein, 119 aa, Homo sapiens
MVLAPLPDPGPPSLAVAPEPCPQPLRSPSLDNPTPFPNLGPSENPLKRLLVPGEEWEFEVTAFYRGRQVFQQTISCPEGLRLVGSEVGDRTLPGWPVTLPDPGMSLTDRGVMSYVRHVL

SEQ ID NO: 87548 - protein, 606 aa, Homo sapiens
  MOD_RES (1)..(1): Any amino acid
XNITCSPDEFTCSSGRCISRNFVCNGQDDCSDGSDELDCAPPTCGAHEFQCSTSSCIPISWVCDDDADCSDQSDESLEQCGRQPVIHTKCPASEIQCGSGECIHKKWRCDGDPDCKDGSDEVNCPSRTCRPDQFECEDGSCIHGSRQCNGIRDCVDGSDEVNCKNVNQCLGPGKFKCRSGECIDISKVCNQEQDCRDWSDEPLKECHINECLVNNGGCSHICKDLVIGYECDCAAGFELIDRKTCGDIDECQNPGICSQICINLKGGYKCECSRGYQMDLATGVCKAVDFHLAGKEPSLIFTNRRDIRKIGLERKEYIQLVEQLRNTVALDADIAAQKLFWADLSQKAIFSASIDDKVGRHVKMIDNVYNPAAIAVDWVYKTIYWTDAASKTISVATLDGTKRKFLFNSDLREPASIAVDPLSGFVYWSDWGEPAKIEKAGMNGFDRRPLVTADIQWPNGITLDLIKSRLYWLDSKLHMLSSVDLNGQDRRIVLKSLEFLAHPLALTIFEDRVYWIDGENEAVYGANKFTGSELATLVNNLNDAQDIIVYHELVQPSGKNWCEEDMENGGCEYLCLPAPQINDHSPKYTCSCPSGYNVEENGRDCQ

SEQ ID NO: 87549 - protein, 25 aa, Homo sapiens
MGKSLSHLPLHSSKEDAYDGVTSEN

SEQ ID NO: 87550 - protein, 91 aa, Homo sapiens
PLPPHVRIWDSVSLSTLHVLGLGVFDRAVCCVGFSKSNGGNLLCAVDESNDHMLSVWDWAKETKVVDVKAGVQWHNLGSLQPPPPRFQRFS

SEQ ID NO: 87551 - protein, 1159 aa, Homo sapiens
MAPKHKSSDAGNLDRPKRSRKVLPLSEKVKVLDLIRKDKKSYAEVAKIYGKNESSIREIVKKEKEIRASFAVSPPTAKVTATVRDKCLVKMEQALHLWVEEMNRKRVPIDSNMLRQKALSLYQDFSKGCSETDTKPFTASKGWLHRFRHRFSHHYKKKKGIMAQVAMSTLPVEDEESSESRMVVTFLMSALESMCKELAKSKAEVACIAVYETDVFVVGTERGRAFVNTRKDFQKDFVKYCVEEEEKAAEMHKMKSTTQANRMSVDAVEIETLRKTVEDYFCFCYGKALGKSTVVPVPYEKMLRDQSAVVVQGLPEGVAFKHPENYDLATLKWILENKAGISFIIKRPFLEPKKHVGGRVMVTDADRSILSPGGSCGPIKVKTEPTEDSGISLEMAAVTVKEESEDPDYYQYNIQAGPSETDDVDEKQPLSKPLQGSHHSSEGNEGTEMEVPAEDSTQHVPSETSEDPEVEVTIEDDDYSPPSKRPKANELPQPPVPEPANAGKRKVREFNFEKWNARITDLRKQVEELFERKYAQAIKAKGPVTIPYPLFQSHVEDLYVEGLPEGIPFRRPSTYGIPRLERILLAKERIRFVIKKHELLNSTREDLQLDKPASGVKEEWYARITKLRKMVDQLFCKKFAEALGSTEAKAVPYQKFEAHPNDLYVEGLPENIPFRSPSWYGIPRLEKIIQVGNRIKFVIKRPELLTHSTTEVTQPRTNTPVKEDWNVRITKLRKQVEEIFNLKFAQALGLTEAVKVPYPVFESNPEFLYVEGLPEGIPFRSPTWFGIPRLERIVRGSNKIKFVVKKPELVISYLPPGMASKINTKALQSPKRPRSPGSNSKVPEIEVTVEGPNNNNPQTSAVRTPTQTNGSNVPFKPRGREFSFEAWNAKITDLKQKVENLFNEKCGEALGLKQAVKVPFALFESFPEDFYVEGLPEGVPFRRPSTFGIPRLEKILRNKAKIKFIIKKPEMFETAIKESTSSKSPPRKINSSPNVNTTASGVEDLNIIQVTIPDDDNERLSKVEKARQLREQVNDLFSRKFGEAIGMGFPVKVPYRKITINPGCVVVDGMPPGVSFKAPSYLEISSMRRILDSAEFIKFTVIRPFPGLVINNQLVDQSESEGPVIQESAEPSQLEVPATEEIKETDGSSQIKQEPDPTW

SEQ ID NO: 87552 - protein, 84 aa, Homo sapiens
  MOD_RES (1)..(1): Any amino acid
XHQHFTCTIWRPQGKSYLYFTQFKAEVRGAEIEYAMAYSKAAFERESDVPLKTEEFEVTKTAVISAPQEKGDDQPHWTDGETEA

SEQ ID NO: 87553 - protein, 217 aa, Homo sapiens
  MOD_RES (1)..(1): Any amino acid
XQFLLLLSLPPAEFFDAEGSEVDLNFGGLQGRGVKKQDPQVERDLYLSLEDLFFGCTKKIKISRRVLNEDGYSSTIKDKILTIDVKPGWRQGTRITFEKEGDQGPNIIPADIIFIVKEKLHPRFRRENDNLFFVNPIPLGKALTCCTVEVRTLDDRLLNIPINDIIHPKYFKKVPGEGMPLPEDPTKKGDLFIFFDIQFPTRLTPQKKQMLRQALLT

SEQ ID NO: 87554 - protein, 514 aa, Homo sapiens
MRDAGDPSPPNKMLRRSDSPENKYSDSTGHSKAKNVHTHRVRERDGGTSYSPQENSHNHSALHSSNSHSSNPSNNPSKTSDAPYDSADDWSEHISSSGKKYYYNCRTEVSQWEKPKEWLEREQRQKEANKMAVNSFPKDRDYRREVMQATATSGFASGMEDKHSSDASSLLPQNILSQTSRHNDRDYRLPRAETHSSSTPVQHPIKPVVHPTATPSTVPSSPFTLQSDHQPKKSFDANGASTLSKLPTPTSSVPAQKTERKESTSGDKPVSHSCTTPSTSSASGLNPTSAPPTSASAVPVSPVPQSPIPPLLQDPNLLRQLLPALQATLQLNNSNVDISKINEVLTAAVTQASLQSIIHKFLTAGPSAFNITSLISQAAQLSTQAQPSNQSPMSLTSDASSPRSYVSPRISTPQTNTVPIKPLISTPPVSSQPKVSTPVVKQGPVSQSATQQPVTADKQQGHEPVSPRSLQRSSISELTPPNESCSLQNNDLGKLSTYSSNVAIALNIFGKFFF

SEQ ID NO: 87555 - protein, 74 aa, Homo sapiens
  MOD_RES (1)..(1): Any amino acid
XAIHLEFQASGNHYVWRKSTSTVHNIIVGKLWIDQSGDIEIVNHKTNDRCQLKFLPYSYFSKEAARKVSRTSHL

SEQ ID NO: 87556 - protein, 93 aa, Homo sapiens
MASRSSDKDGDSVHTASEVPLTPRTNSPDGRRSSSDTSKSTYSLTRRISSLESRRPSSPLIDIKPIEFGVLSAKKEPIQPSVLRRTYNPDDYF

SEQ ID NO: 87557 - protein, 1653 aa, Homo sapiens
VRVAVRIRPQLAKEKIEGCHICTSVTPGEPQVFLGKDKAFTFDYVFDIDSQQEQIYIQCIEKLIEGCFEGYNATVFAYGQTGAGKTYTMGTGFDVNIVEEELGIISRAVKHLFKSIEEKKHIAIKNGLPAPDFKVNAQFLELYNEEVLDLFDTTRDIDAKSKKSNIRIHEDSTGGIYTVGVTTRTVNTESEMMQCLKLGALSRTTASTQMNVQSSRSHAIFTIHVCQTRVCPQIDADNATDNKIISESAQMNEFETLTAKFHFVDLAGSERLKRTGATGERAKEGISINCGLLALGNVISALGDKSKRATHVPYRDSKLTRLLQDSLGGNSQTIMIACVSPSDRDFMETLNTLKYANRARNIKNKVMVNQDRASQQINALRSEITRLQMELMEYKTGKRIIDEEGVESINDMFHENAMLQTENNNLRVRIKAMQETVDALRSRITQLVSDQANHVLARAGEGNEEISNMIHSYIKEIEDLRAKLLESEAVNENLRKNLTRATARAPYFSGSSTFSPTILSSDKETIEIIDLAKKDLEKLKRKEKRKKKSVAGKEDNTDTDQEKKEEKGVSERENNELEVEESQEVSDHEDEEEEEEEEEDDIDGGESSDESDSESDEKANYQADLANITCEIAIKQKLIDELENSQKRLQTLKKQYEEKLMMLQHKIRDTQLERDQVLQNLGSVESYSEEKAKKVRSEYEKKLQAMNKELQRLQAAQKEHARLLKNQSQYEKQLKKLQQDVMEMKKTKVRLMKQMKEEQEKARLTESRRNREIAQLKKDQRKRDHQLRLLEAQKRNQEVVLRRKTEEVTALRRQVRPMSDKVAGKVTRKLSSSDAPAQDTGSSAAAVETDASRTGAQQKMRIPVARVQALPTPATNGNRKKYQRKGLTGRVFISKTARMKWQLLERRVTDIIMQKMTISNMEADMNRLLKQREELTKRREKLSKRREKIVKENGEGDKNVANINEEMESLTANIDYINDSISDCQANIMQMEEAKEEGETLDVTAVINACTLTEARYLLDHFLSMGINKGLQAAQKEAQIKVLEGRLKQTEITSATQNQLLFHMLKEKAELNPELDALLGHALQDLDSVPLENVEDSTDEDAPLNSPGSEGSTLSSDLMKLCGEVKPKNKARRRTTTQMELLYADSSELASDTSTGDASLPGPLTPVAEGQEIGMNTETSGTSAREKELSPPPGLPSKIGSISRQSSLSEKKIPEPSPVTRRKAYEKAEKSKAKEQKHSDSGTSEASLSPPSSPPSRPRNELNVFNRLTVSQGNTSVQQDKSDESDSSLSEVHSRSSRRGIINPFPASKGIRAFPLQCIHIAEGHTKAVLCVDSTDDLLFTGSKDRTCKVWNLVTGQEIMSLGGHPNNVVSVKYCNYTSLVFTVSTSYIKVWDIRDSAKCIRTLTSSGQVTLGDACSASTSRTVAIPSGENQINQIALNPTGTFLYAASGNAVRMWDLKRFQSTGKLTGHLGPVMCLTVDQISSGQDLIITGSKDHYIKMFDVTEGALGTVSPTHNFEPPHYDGIEALTIQGDNLFSGSRDNGIKKWDLTQKDLLQQVPNAHKDWVCALGVVPDHPVLLSGCRGGILKVWNMDTFMPVGEMKGHDSPINAICVNSTHIFTAADDRTVRIWKARNLQDGQISDTGDLGEDIASN

SEQ ID NO: 87558 - protein, 125 aa, Homo sapiens
MSGASSSEQNNNSYETKTPNLRMSEKKCSWASYMTNSPTLIVMIGLPARGKTYVSKKLTRYLNWIGVPTKVFNLGVYRREAVKSYKSYDFFRHDNEEAMKIRKQCALVALEDVKAYLTEENGQIA

SEQ ID NO: 87559 - protein, 310 aa, Homo sapiens
MAPLLLQLAVLGAALAAAALVLISIVAFTTATKMPALHRHEEEKFFLNAKGQKETLPSIWDSPTKQLSVVVPSYNEEKRLPVMMDEALSYLEKRQKRDPAFTYEVIVVDDGSKDQTSKVAFKYCQKYGSDKVRVITLVKNRGKGGAIRMGIFSSRGEKILMADADGATKFPDVEKLEKGLNDLQPWPNQMAIACGSRAHLEKESIAQRSYFRTLLMYGFHFLVWFLCVKGIRDTQCGFKLFTREAASRTFSSLHVERWAFDVELLYIAQFFKIPIAEIAVNWTEIEGEYIVYCMIVLSQIIQLFSKVSWL

SEQ ID NO: 87560 - protein, 122 aa, Homo sapiens
MVSRSGLSAGPTKEKGCLGFLRPSQGPAPTEDFSQKSHLPSIVVESSEVNEESGDLHLPHEELLLLTDGEEEDAEAFFQDQSEEPGWAWSPQDPRSPLRTFNAGLSWGQDQDEEDACWILED

SEQ ID NO: 87561 - protein, 164 aa, Homo sapiens
MSTEAQRVDDSPSTSGGSSDGDQRESVQQEPEREQVQPKKKEGKISSKTAAKLSTSAKRIQKELAEITLDPPPNCSTNITLKGNAHSILNWIFGFWMPTSAGPKGDNIYEWRSTILGPPGSVYEGGVFFLDITFSPDYPFKPPKVTFRTRIYHCNINSQGVICL

SEQ ID NO: 87562 - protein, 48 aa, Homo sapiens
MAWIKRKFGERPPPKRLTREAMRNYLKERGDQTVLILHAKVAQKSYGN

SEQ ID NO: 87563 - protein, 139 aa, Homo sapiens
MKPSRVWETPFVDAFAVHIMAETKISLREKPAIAPPVFVFQKDKGQKSPAEQKNLSDSGEEPRGEAEAPHHGTGHPESAGEHALEPPAPAGASASTPPPPAPEAQLPPFPRELAGRSAGGSSPEGGEDSDREDGNYCPP

SEQ ID NO: 87564 - protein, 103 aa, Homo sapiens
QEKLRDEIYCQVIKQVTGHPRPEHCTRGWSFLSLLTGFFPPSTRLMPYLTKFLQDSGPSQELARSSQEHLQRTVKYGGRRRMPPPERTSDSPASYSPAGGCGL

SEQ ID NO: 87565 - protein, 240 aa, Homo sapiens
  MOD_RES (1)..(1): Any amino acid
XKELLKTNKKLAKMIGHIFEMNDDDPHKEEEIRKYSAIYGRFDSKRKDGKHLTLHELTVNEAAAQLCVKDNALLTRRDELFALARQISREVTYKYTYRTTKSKCGERDELSPKRIKVEQPEKVMAKQMEFLCNQAGYERLQHAERRLSAGLYRQSSEEHSPNGLTSDNSDGQGERPLNLRMPNLQNRQPHHFVVDGELSRLYPSEAKSHSSESLGILKDYPHSAFTLEKKVIKTEPEDSR

SEQ ID NO: 87566 - protein, 78 aa, Homo sapiens
  MOD_RES (1)..(1): Any amino acid
XQIVVELLMVVSIVLERNPELEFQDKVDLDRLVKEAFNEFQKDQSRLKEIEKQLTQILPVNSLQTEDRMPCLLFSFVG

SEQ ID NO: 87567 - protein, 106 aa, Homo sapiens
MGKEKTHINIVVIGHVDSGKSTTTGHLIYKCGGIDKRTIEKFEKEAAEMGKGSFKYAWVLDKLKAERERGITIDISLWKFETSKYYVTIIDAPGHRDFIKNMITGT

SEQ ID NO: 87568 - protein, 215 aa, Homo sapiens
MDALVEDDICILNHEKAHKRDTVTPVSIYSGDESVASHFALVTAYEDIKKRLKDSEKENSLLKKRIRFLEEKLIARFEEETSSVGREQVNKAYHAYREVCIDRDNLKSKLDKMNKDNSESLKVLNEQLQSKEVELLQLRTEVETQQVMRNLNPPSSNWEVEKLSCDLKIHGLEQELELMRKECSDLKIELQKAKQTDPYQEDNLKSRDLQKLSIS

SEQ ID NO: 87569 - protein, 597 aa, Homo sapiens
MSWAPPPQVGQNLRSQTVLRILNGMEDLMWVAMEERRFRALASFTMPVAATNSETAMQQVLDNLGSLPSATGAAELDLIFLRGIMESPIVRSLAKAHERLEETKLEAVRDNNLELVQEILRDLAQLAEQSSTAAELAHILQEPHFQSLLETHDSVASKTYETPPPSPGLDPTFSNQPVPPDAVRMVGIRKTAGEHLGVTFRVEGGELVIARILHGGMVAQQGLLHVGDIIKEVNGQPVGSDPRALQELLRNASGSVILKILPSYQEPHLPRQVFVKCHFDYDPARDSLIPCKEAGLRFNAGDLLQIVNQDDANWWQACHVEGGSAGLIPSQLLEEKRKAFVKRDLELTPNSGTLCGSLSGKKKKRMMYLTTKNAEFDRHELLIYEEVARMPPFRRKTLVLIGAQGVGRRSLKNKLIMWDPDRYGTTVPYTSRRPKDSEREGQGYSFVSRGEMEADVRAGRYLEHGEYEGNLYGTRIDSIRGVVAAGKVCVLDVNPQAVKVLRTAEFVPYVVFIEAPDFETLRAMNRAALESGISTKQLTEADLRRTVEESSRIQRGYGHYFDLCLVNSNLERTFRELQTAMEKLRTEPQWVPVSWVY

SEQ ID NO: 87570 - protein, 68 aa, Homo sapiens
  MOD_RES (1)..(1): Any amino acid
XYGLILPKKTQQLHPVLQKPSVFGNDSDDDDEMGFHSCCPGWSAMVQSRLTATSTSWVQAIFLPQPPK

SEQ ID NO: 87571 - protein, 237 aa, Homo sapiens
MPKAKGKTRRQKFGYSVNRKRLNRNARRKAAPRIECSHIRHAWDHAKSVRQNLAEMGLAVDPNRAVPLRKRKVKAMEVDIEERPKELVRKPYVLNDLEAEASLPEKKGNTLSRDLIDYVRYMVENHGEDYKQSGKTSSILCRRGRWRWSDWFTSQLPQAEASPGPVKLEPGCKARRCCVAPEELARSHGIRRLHTRAHSPLWGRNCSQRLQFIFIWGFTEKPEPAVFRVGDVNIVCT

SEQ ID NO: 87572 - protein, 222 aa, Homo sapiens
MKSLKKDSRLRITPTRLLEASENVKEPRLVLNSWAQAICLPWPPKILQLLIHSLACHCPWEKKRAKGPEQPTPTIQEEPEPVSNVLQGDDILALAIKKEDLKEQHIPRLTEKEDKRVITQKFIIRKLKPMDPRRKVCHLVARPANPDEATKPLDYSGPGDSFDGSDQILPHHILGSLQDFKRIALARGNTQLAERIPTSPCLMTLISAEGESKQKAPKEEKR

SEQ ID NO: 87573 - protein, 137 aa, Homo sapiens
MMFSGFNADYEASSSRCSSASPAGDSLSYYHSPADSFSSMGSPVNAQCQLHSHGHCHLDQSGPAVAGAARPRLLRGPIADQSPSPFRSPRPLRWGLLQGWRCEDHDRRPSAEHWQEGQGGTVISRRRREKENPKGKE

SEQ ID NO: 87574 - protein, 107 aa, Homo sapiens
MNTDSGGCARKRAAMSVTLTSVKRVQSSPNLLAAGRDSQSPDSAWRSYNDGNQETLNGDATYSSLAAKGFRSVRPNLQDKRSPTQSQITVNGNSGGAVSPMSYYQRP

SEQ ID NO: 87575 - protein, 152 aa, Homo sapiens
MSLNPPIFLKRSEENSSKFVETKQSQTTSIASEDPLQNLCLASQEVLQKAQQSGRSKCLKCGGSRMFYCYTCYVPVENVPIEQIPLVKIDIIKHPNETDGKSTAIHAKLLAPEFVNIYTYPCIPEYEEKDHEVALIFPGPQSISIKDISFHL

SEQ ID NO: 87576 - protein, 110 aa, Homo sapiens
MTKKTRDLRRQLRKAVMDHVSDSFLETNVPLLVLIEAAKNGNEKEVKEYAQVFREHANKLIEVANLACSISNNEEGVKLVRMSASQLEALCPQVINAALALAAKPQSKLA

SEQ ID NO: 87577 - protein, 75 aa, Homo sapiens
  MOD_RES (1)..(1): Any amino acid
XGNDIRGRLQRNIKNLDPIHLRHPKKRPSIFPVHCISNCEAYSDQNRMSWERGFSQNRRTSSIWVKTSESLHIGM

SEQ ID NO: 87578 - protein, 87 aa, Homo sapiens
  MOD_RES (1)..(1): Any amino acid
XVDERSRLNEALQAERQLYSSLVKFHAHPERFSCVPSSPGCWYEFPSSGLPQLCFLYSWLRNAHNQQSKWLGFGYFSSNEDPSQARG

SEQ ID NO: 87579 - protein, 1608 aa, Homo sapiens
MFPKSNLTVTCWVWRSMRKLFLLLSLLLSHAAHLEGKKDNQFIWKPGPWGRCTGDCGPGGVQSRAVWCFHVDGWTSHLSNCGESNRPPKERSCFRVCDWHSDLFQWEVSDWHHCVLVPYARGEVKPRTAECVTAQHGLQHRMVRCIQKLNRTVVANEICEHFALQPPTEQACLIPCPRDCVVSEFLPWSNCSKGCGKKLQHRTRAVIAPPLFGGLQCPNLTESRACDAPISCPLGEEEYTFSLKVGPWSKCRLPHLKEINPSGRTVLDFNSDSNERVTFKHQSYKAHHHSKSWAIEIGYQTRQVSCTRSDGQNAMLSLCLQDSFPLTVQSCIMPKDCETSQWSSWSPCSKTCRSGSLLPGFRSRSRNVKHMAIGGGKECPELLEKEACIVEGELLQQCPRYSWRTSEWKECQVSLLLEQQDPHWHVTGPVCGGGIQTREVYCAQSVPAAAALRAKEVSRPVEKALCVGPAPLPSQLCNIPCSTDCIVSSWSAWGLCIHENCHDPQGKKGFRTRQRHVLMESTGPAGHCPHLVESVPCEDPMCYRWLASEGICFPDHGKCGLGHRILKAVCQNDRGEDVSGSLCPVPPPPERKSCEIPCRMDCVLSEWTEWSSCSQSCSNKNSDGKQTRSRTILALAGEGGKPCPPSQALQEHRLCNDHSCMQLHWETSPWGPCSEDTLVTALNATIGWNGEATCGVGIQTRRVFCVKSHVGQVMTKRCPDSTRPETVRPCFLPCKKDCIVTAFSEWTPCPRMCQAGNATVKQSRYRIIIQEAANGGQECPDTLYEERECEDVSLCPVYRWKPQKWSPCILVPESVWQGITGSSEACGKGLQTRAVSCISDDNRSAEMMECLKQTNGMPLLVQECTVPCREDCTFTAWSKFTPCSTNCEATKSRRRQLTGKSRKKEKCQDSDLYPLVETELCPCDEFISQPYGNWSDCILPEGRREPHRGLRVQADSKECGEGLRFRAVACSDKNGRPVDPSFCSSSGYIQEKCVIPCPFDCKLSDWSSWGSCSSSCGIGVRIRSKWLKEKPYNGGRPCPKLDLKNQGQVHEAVPCYSECNQYSWVVEHWSSCKINNELRSLRCGGGTQSRKIRCVNTADGEGGAVDSNLCNQDEIPPETQSCSLMCPNECVMSEWGLWSKCPQSCDPHTMQRRTRHLLRPSLNSRTCAEDSQVQPCLLNENCFQFQYNLTEWSTCQLSENAPCGQGVRTRLLSCVCSDGKPVSMDQCEQHNLEKPQRMSIPCLVECVVNCQLSGWTAWTECSQTCGHGGRMSRTRFIIMPTQGEGRPCPTELTQEKTCPVTPCYSWVLGNWSACKLEGGDCGEGVQIRSLSCMVHSGSISHAAGRVEDALCGEMPFQDSILKQLCSVPCPGDCHLTEWSEWSTCELTCIDGRSFETVGRQSRSRTFIIQSFENQDSCPQQVLETRPCTGGKCYHYTWKASLWNNNERTVWCQRSDGVNVTGGCSPQARPAAIRQCIPACRKPFSYCTQGGVCGCEKGYTEIMKSNGFLDYCMKVPGSEDKKADVKNLSGKNRPVNSKIHDIFKGWSLQPLDPDGRVKIWVYGVSGGAFLIMIFLIFTSYLVCKKPKPHQSTPPQQKPLTLAYDGDLDM

SEQ ID NO: 87580 - protein, 93 aa, Homo sapiens
CFPNRLPQLMLQSLSTSEELQRQFHLFQLQRLDKLFLEQEDEEEKRLEEEEVRTIQSWTWDHIGDCSGRGWAGLSCSLGSRYCMCPPCRCGCC

SEQ ID NO: 87581 - protein, 140 aa, Homo sapiens
MNRLRNAKIYVERAVKQKKIFTIQGCYPVIRCLLRRRGWVEKKMVHRSGPTLLPPQKDLDSSAMGDSDTTEDEDEDEDEEFQPSQLFDFDDLLKFDDLDGTHALMSRMVQNEIPYFIWTTRRDVLDCRFLSKDQMINHYA

SEQ ID NO: 87582 - protein, 147 aa, Homo sapiens
MERVGCTLTTTYAHPRPTPTNFLPAISTMASSYRDRFPHSNLTHSLSLPWRPSTYYKVASNSPSVAPYCTRSQRVSENTMLPFVSNRTTFFTRYTPDDWYRSNLTNYQESNTSRHNSEKLRVDTSRLIQDKYQQTRKTQADTTQNLG

SEQ ID NO: 87583 - protein, 164 aa, Homo sapiens
MACLNPVLWETKVLQSKATEDFFRNSIQSPLFTLQLPHSLHQTLQSSTASLVIPAGRTLPSFTTAELGTSNSSANFTFPGYPIHVPAGVTLQTVSGHLYKVNVPIMVTETSGRAGILQHPIQQVFQQLGQPSVIQTSVPQLNPWSLQATTEKSQRIETVLQQPA

SEQ ID NO: 87584 - protein, 115 aa, Homo sapiens
MSGGKYVDSEGCSERGRPPLPKLPPSLPTPSTRWSSARVWKPRLPTRSCPSATRPQPGSALRVGRGSCAGTSLHRSHPGTGQHLQAQQQGHGRRAEREASVRRAHQGDRPGQPRP

SEQ ID NO: 87585 - protein, 93 aa, Homo sapiens
MNDHLHVGSHAHGQIQVQQLFEDNSNKRTVLTTQPNGLTTVGKTGLPVVPERQLDSIHRRQGSSTSLKSMEGMGKVKATPMTPEQAMKQYMQK

SEQ ID NO: 87586 - protein, 83 aa, Homo sapiens
MTTPILQPTEALSPEDGASTALIAVVITVVFLTLLSVVILIFFYLYKNKGSYVTYEPTEGEPSAIVQMESDLAKGSEKEEYFI

SEQ ID NO: 87587 - protein, 100 aa, Homo sapiens
MNFNTILEEILIKRSQQKKKTSPLNYKERLFVLTKSMLTYYEGRAEKKYRKGFIDVSKIKCVEIVKNDDGVIPCQNKYPFQSTKQGPVGEEVKRRNKEQQ

SEQ ID NO: 87588 - protein, 1356 aa, Homo sapiens
MAALLRSARWLLRAGAAPRLPLSLRLLPGGPGRLHAASYLPAARAGPVAGGLLSPARLYAIAAKEKDIQEESTFSSRKISNQFDWALMRLDLSVRRTGRIPKKLLQKVFNDTCRSGGLGGSHALLLLRSCGSLLPELKLEERTEFAHRIWDTLQKLGAVYDVSHYNALLKVYLQNEYKFSPTDFLAKMEEANIQPNRVTYQRLIASYCNVGDIEGASKILGFMKTKDLPVTEAVFSALVTGHARAGDMENAENILTVMRDAGIEPGPDTYLALLNAYAEKGDIDHVKQTLEKVEKSELHLMDRDLLQIIFSFSKAGYPQYVSEILEKVTCERRYIPDAMNLILLLVTEKLEDVALQILLACPVSKEDGPSVFGSFFLQHCVTMNTPVEKLTDYCKKLKEVQMHSFPLQFTLHCALLANKTDLAKALMKAVKEEGFPIRPHYFWPLLVGRRKEKNVQGIIEILKGMQELGVHPDQETYTDYVIPCFDSVNSARAILQENGCLSDSDMFSQAGLRSEAANGNLDFVLSFLKSNTLPISLQSIRSSLLLGFRRSMNINLWSEITELLYKDGRYCQEPRGPTEAVGYFLYNLIDSMSDSEVQAKEEHLRQYFHQLEKMNVKIPENIYRGIRNLLESYHVPELIKDAHLLVESKNLDFQKTVQLTSSELESTLETLKAENQPIRDVLKQLILVLCSEENMQKALELKAKYESDMVTGGYAALINLCCRHDKVEDALNLKEEFDRLDSSAVLDTGKYVGLVRVLAKHGKLQDAINILKEMKEKDVLIKDTTALSFFHMLNGAALRGEIETVKQLHEAIVTLGLAEPSTNISFPLVTVHLEKGDLSTALEVAIDCYEKYKVLPRIHDVLCKLVEKGETDLIQKAMDFVSQEQGEMVMLYDLFFAFLQTGNYKEAKKIIETPGIRARSARLQWFCDRCVANNQVETLEKLVELTQKLFECDRDQMYYNLLKLYKINGDWQRADAVWNKIQEENVIPREKTLRLLAEILREGNQEVPFDVPELWYEDEKHSLNSSSASTTEPDFQKDILIACRLNQKKGAYDIFLNAKEQNIVFNAETYSNLIKLLMSEDYFTQAMEVKAFAETHIKGFTLNDAANSRLIITQVRRDYLKEAVTTLKTVLDQQQTPSRLAVTRVIQALAMKGDVENIEVVQKMLNGLEDSIGLSKMVFINNIALAQIKNNNIDAAIENIENMLTSENKVIEPQYFGLAYLFRKVIEEQLEPAVEKISIMAERLANQFAIYKPVTDFFLQLVDAGKVDDARALLQRCGAIAEQTPILLLFLLRNSRKQGKRGCVFIRVIKKYKESEKHLSVHLWDCAKSLLPCPGDGTGNARQYVCLEHPTQDSLK

SEQ ID NO: 87589 - protein, 138 aa, Homo sapiens
MGVDIRHNKDRKVRRKEPKSQDIYLRLLVKLYRFLARRTNSTFNQVVLKRLFMSRTNRPPLSLSRMIRKMKLPGRENKTAVVVGTITDDVRVQEVPKLKTLRPLQGPEVRACQRPTGQPRLQKLTLDPTLLLKRFLLT

SEQ ID NO: 87590 - protein, 161 aa, Homo sapiens
MVVTRSARAKASIQAASAESSGQKCVFSGLQSFAANGIQAHPESSTGSDARTTAESQTTGKQSLIPRTPKARKRKSRTTGSLPKGTEPSTDGETSEAESNYSVSEHHDTILRVTRRRQILIACSPVSSVRKKPKVTPTKESYTEEIVSEAESHVSGISRIV

SEQ ID NO: 87591 - protein, 182 aa, Homo sapiens
  MOD_RES (1)..(1): Any amino acid
XRTFNIQSVNRLVFQQDTLPNVPGMYTLEASGQGCVYVQTVLRYNILPPTNMKTFSLSVEIGKARCEQPTSPRSLTLTIHTSYVGSRSSSNMAIVEVKMLSGFSPMEGTNQLLLQQPLVKKVEFGTDTLNIYLDELIKNTQTYTFTISQSVLVTNLKPATIKVYDYYLPDEQATIQYSDPCE

SEQ ID NO: 87592 - protein, 49 aa, Homo sapiens
  MOD_RES (1)..(1): Any amino acid
XNKLQTDSIVQTDQPETVISSSFVNVNFEMEGDSEVIMESKQNPVSVPP

SEQ ID NO: 87593 - protein, 140 aa, Homo sapiens
MMYGGMRGMKGLVYETSVLDPDEGIRFRGFSIPECQKLLPKAKGGEEPLPEGLFWLLVTGHIPTEEQVSWLSKEWAKRAALPSHVVTMLDNFPTNLHPMSQLSAAVTALNSESNFARAYAQGISRTKYWELIYEDSMDLI

SEQ ID NO: 87594 - protein, 198 aa, Homo sapiens
METDLNSQDRKDLDKFIKFFALKTVQVIVQARLGEKICTRSSSSPTGSDWFNLAIKDIPEVTHEAKKALAGQLPAVGRSMCVEISLKTSEGDSMELEIWCLEMNEKCDKEIKVSYTVYNRLSLLLKSLLAITRVTPAYRLSRKQGHEYVILYRIYFGEVQLSGLGEGFQTVRVGTVGTPVGTITLSCAYRINLAFMST

SEQ ID NO: 87595 - protein, 230 aa, Homo sapiens
MWLFFPLCYHPPTPLSWQELEGERASSCAHKRSASWGSTDHRKEISKLKQQLQRTKLSRSGKEKERGSPLLGDHAVRGALRASPPSFPSGSPVLRLSPCLHRSLEGLNQELEEVFVKEQGEEELLRILDIPDGHRAPAPPQSGSCDHPLLLLEPGNLASSPSMSLASPQPCGLASHEEHRGAAEELASTPNDKASSPGHPAFLEDGSPSPVLAFAASPRPNHSYIFKREP

SEQ ID NO: 87596 - protein, 89 aa, Homo sapiens
MFPLRALWLVWALLGVAGSCPEPCACVDKYAHQFADCAYKELREVPEGLPANVTTLSLSANKITVLRRGAFADVTQVTSLWLAHNEVRT

SEQ ID NO: 87597 - protein, 97 aa, Homo sapiens
EKYCRVNGGFSGVKDVYSSTPTHDDVQQSFFLAETLKYLYLLFSGDDLLPLDHWVFNTEAHPLPVLHLANTTLSGTSQGMRRQNPYFQVLYLYYPDD

SEQ ID NO: 87598 - protein, 48 aa, Homo sapiens
MEVWGQELGVLGTGRGPLTCVSGLPPEAAQPSPSLWPRSGPAGWWLGR

SEQ ID NO: 87599 - protein, 132 aa, Homo sapiens
MDDFERRRELRRQKREEMRLEAESVYTNNSCNMLYLLKIAYQRNDDDEEEAARERRRRARQERLRQKQEEESLGQVTDQVEVNAQNSVPDEEAKTTTTNTQVEGDDEAAFLERLARREERRQKRLQEALERQ

SEQ ID NO: 87600 - protein, 260 aa, Homo sapiens
MVVEHPEFLKAGKEPGLQIWRVEKFDLVPVPTNLYGDFFTGDAYVILKTVQLRNGNLQYDLHYWLGNECSQDESGAAAIFTVQLDDYLNGRAVQHREVQGFESATFLGYFKSGLKYKKGGVASGFKHVVPNEVVVQRLFQVKGRRVVRATEVPVSWESFNNGDCFILDLGNNIHQWCGSNSNRYERLKATQVSKGIRDNERSGRARVHVSEEGTEPEAMLQVLGPKPALPAGTEDTAKEDAANRKLAKLYKVSNGAGTMS

SEQ ID NO: 87601 - protein, 133 aa, Homo sapiens
MDQGYGGYGAWSAGPANTQGAYGTGVASWQAPSASSRSSPMTPGPACRSTTPTAPATATTMSSTWGPTAMAALGGSTVNAETQPGSGAPLMASCGAGARAASRTGATLAPSCAATPSCPPLRPLSPCPRPGTS

SEQ ID NO: 87602 - protein, 98 aa, Homo sapiens
  MOD_RES (1)..(1): Any amino acid
XSLMTSRIAPRSFWMTLLTDALPLLEQKQVKVIFSAEQTYELMRCLEDLTSRRPVHGESDTEQLQDDDIETTKVEMLRLSLARNLARAIIREGSLEGS

SEQ ID NO: 87603 - protein, 157 aa, Homo sapiens
MAEAKYYLIQGLVNMCQSALQDKKDSYQPVCNIPIITSLKEEERLIESSTKPVVKLLYNRSNNKYSYTSNSDDHLLKNIELFDKLSLRFNGRVLFIKDVIGDEICCWSFYGQGRKLAEVCCTSIVYATEKKQTKVWGIAPAWVGEDTHPLCGGRGRA

SEQ ID NO: 87604 - protein, 626 aa, Homo sapiens
MGIQAGEPDPPEEPLTSQASVPPHQLRLGSLHPHTPYHIRVACTSSQGPSSWTHWLPVETPEGVPLGPPENISATRNGSQAFVHWQEPRAPLQGTLLGYRLAYQGQDTPEVLMDIGLRQEVTLELQGDGSVSNLTVCVAAYTAAGDGPWSLPVPLEAWRPGQAQPVHQLVKEPSTPAFSWPWWYVLLGAVVAAACVLILALFLVHRRKKETRYGEVFEPTVERGELVVRYRVRKSYSRRTTEATLNSLGISEELKEKLRDVMVDRHKVALGKTLGEGEFGAVMEGQLNQDDSILKVAVKTMKIAICTRSELEDFLSEAVCMKEFDHPNVMRLIGVCFQGSERESFPAPVVILPFMKHGDLHSFLLYSRLGDQPVYLPTQMLVKFMADIASGMEYLSTKRFIHRDLAARNCMLNENMSVCVADFGLSKKIYNGDYYRQGRIAKMPVKWIAIESLADRVYTSKSDVWSFGVTMWEIATRGQTPYPGVENSEIYDYLRQGNRLKQPADCLDGLYALMSRCWELNPQDRPSFTELREDLENTLKALPPAQEPDEILYVNMDEGGGYPEPPGAAGGADPPTQPDPKDSCSCLTAAEVHPAGRYVLCPSTTPSPAQPADRGSPAAPGQEDGA

SEQ ID NO: 87605 - protein, 269 aa, Homo sapiens
MTEQMTLRGTLKGHNGWVTQIATTPQFPDMILSASRDKTIIMWKLTRDETNYGIPQRALRGHSHFVSDVVISSDGQFALSGSWDGTLRLWDLTTQDESHSEWVSCVRFSPNSSNPIIVSCGWDKLVKVWNLANCKLKTNHIGHTGYLNTVTVSPDGSLCASGGKDGQAMLWDLNEGKHLYTLDGGDIINALCFSPNRYWLCAATGPSIKIWDLEGKIIVDELKQEVISTSSKAEPPQCTSLAWSADGQTLFAGYTDNLVRVWQVTIGTR

SEQ ID NO: 87606 - protein, 100 aa, Homo sapiens
MAAALPRTLGELQLYRILQKANLLSYFDAFIQQGGDDVQQLCEAGEEEFLEIMALVGMASKPLHVRRLQKALRDWVTNPGLFNQPLTSLPVSSIPIYKLP

SEQ ID NO: 87607 - protein, 250 aa, Homo sapiens
MSAGGRDEERRKLADIIHHWNANRLDLFEISQPTEDLEFHGVMRFYFQDKAAGNFATKCIRVSSTATTQDVIETLAEKFRPDMRMLSSPKYSLYEVHVSGEERRLDIDEKPLVVQLNWNKDDREGRFVLKNENDAIPPKAQSNGPEKQEKEGVIQNFKRTLSKKEKKEKKKREKEALRQASDKDDRPFQGEDVENSRLAAEVYKDMPETSFTRTISNPEVVMKRRRQQKLEKRMQEFRSSDGRPDSGGTL

SEQ ID NO: 87608 - protein, 184 aa, Homo sapiens
  MOD_RES (1)..(1): Any amino acid
XDGHSAQGDFPPREGYVRYGSLVQLVCTVTGITLPPMIIRKVAKQCALLDVDEPISQLHKCAFQFPGSPPGGGGTYLCLATEKVVQFQHQPGVYPGAGHSGASHQHPRAERRGRRGHAGAPRRELPRGAQGVVWGRGGRNHVQEPAVPGVRGAGRGGLLQRLALAARSHHNPHEPGARRRALLP

SEQ ID NO: 87609 - protein, 189 aa, Homo sapiens
  MOD_RES (1)..(1): Any amino acid
XEQKRRKIDTHPSPSHSSTVKDSLIELKESSAKLYINHTPPPLSKSKEREMDKKDLDKSRERSREREKKDEKDRKERKRDHSNNDREVPPDLTKRRKEENGTMGVSKHKSESPCESPYPNEKDKEKNKSKSSGKEKGSDSFKSEKMDKISSGGKKESRHDKEKIEKKEKRDSSGGKEEKKHHKSSDKHR

SEQ ID NO: 87610 - protein, 176 aa, Homo sapiens
MGEFNEKKTTCGTVCLKYLLFTYNCCFWLAGLAVMAVGIWTLALKSDYISLLASGTYLATAYILVVAGTVVMVTGVLGCCATFKERRNLLRLYFILLLIIFLLEIIAGILAYAYYQQLNTELKENLKDTMTKRYHQPGHEAVTSAVDQLQQEFHCCGSNNSQDWRDSEWIRSQEAG

SEQ ID NO: 87611 - protein, 214 aa, Homo sapiens
MTTPGKENFRLKSYKNKSLNPDEMRRRREEEGLQLRKQKREEQLFKRRNVATAEEETEEEVMSDGGFHEAQISNMEMAPGGVITSDMIEMIFSKSPEQQLSATQKFRKLLSKEPNPPIDEVISTPGVVARFVEFLKRKENCTLQFESAWVLTNIASGNSLQTRIVIQAGAVPIFIELLSSEFEDVQEQAVWALGNIAGDSTMCRDYVLDCNILP

SEQ ID NO: 87612 - protein, 240 aa, Homo sapiens
  MOD_RES (1)..(1): Any amino acid
XSAEIQQRQEELDAMTQALQEQDSAFGAVHAQMHAAVGQLGRARAETEELIRERVRQVVAHVRAQERELLEAVDARYQRDYEEMASRLGRLDAVLQRIRTGSALVQRMKCYASDQEVLDMHGFLRQALCRLRQEEPQSLQAAVRTDGFDEFKVRLQDLSSCITQGKDAAVSKKASPEAASTPRDPIDVDLPEEAERVKAQVQALGLAEAQPMAVVQSVPGAHPVPVYAFSIKGPAQSSTH

SEQ ID NO: 87613 - protein, 167 aa, Homo sapiens
MGSELIGRLAPRLGLAEPDMLRKAEEYLRLSRVKCVGLSARTTETSSAVMCLDLAASWMKCPLDRAYLIKLSGLNKETYQSCLKSFECLLGLNSNIGIRDLAVQFSCIEAVNMASKILKSYESSLPQTQQVDLDLSRPLFTSAALLSACKRTWRCSYSTTEEKEDSG

SEQ ID NO: 87614 - protein, 112 aa, Homo sapiens
  MOD_RES (1)..(1): Any amino acid
XKLREDAKIPACEESLSQTPPRVTGTSPAQDQDHPSEEQGGQGSCREPGVNPCLSRLGRLQQKMLLACRAPSLRTRVQKEGLSPRRAQKTRSLKLYLETLKVPSLAELHSRL

SEQ ID NO: 87615 - protein, 155 aa, Homo sapiens
MPIRALCTICSDFFDHSRDVAAIHCGHTFHLQCLIQWFETAPSRTCPQCRIQVRVGKRTIINKLFFDLAQEEENVLDAEFLKNELDNVRAQLSQKDKEKRDSQVIIDTLRDTLEERNATVVSLQQALGKAEMLCSTLKKQMKYLEQQQDETKQAQ

SEQ ID NO: 87616 - protein, 162 aa, Homo sapiens
MDYLQYSRAFFLISVFTILTGLGWLFSSWILNRGSMTTNLDLKVSMLSFISATCLLLCLNLFVAQVHWHTRDAMESDLLWTYYLNWCSDIFYMFAGIISLLNYLTSRSPACDENVTVIPTERSRLGVGPVTTVSPAKDEGPRSEMESLSVREKNLPKSGLWW

SEQ ID NO: 87617 - protein, 536 aa, Homo sapiens
MYCAYPVPGMGSNSLMYYYNGKTVYAPSPNSDDFNRESPSYPSPKPPTSMFASTFFMQDGTHNSSDLWSSSNGMSQPGFGGILGTSTSHMSQSSSYGNLHSHDRLSYPPHSVSPTDINTSLPPMSSFHRGSTSSSPYVAASHTPPINGSDSILGTRGNAAGSSQTGDALGKALASIYSPDHTSSSFPSNPSTPVGSPSPLTGTSQWPRPGGQAPSSPSYENSLHSLKNRVEQQLHEHLQDAMSFLKDVCEQSRMEDRLDRLDDAIHVLRNHAVGPSTSLPAGHSDIHSLLGPSHNAPIGSLNSNYGGSSLVASSRSASMVGTHREDSVSLNGNHSVLSSTVTTSSTDLNHKTQENYRGGLQSQSGTVVTTEIKTENKEKDENLHEPPSSDDMKSDDESSQKDIKVSSRGRTSSTNEDEDLNPEQKIEREKERRMANNARERLRVRDINEAFKELGRMCQLHLKSEKPQTKLLILHQAVAVILSLEQQVRERNLNPKAACLKRREEEKVSAVSAEPPTTLPGTHPGLSETTNPMGHM

SEQ ID NO: 87618 - protein, 209 aa, Homo sapiens
MQMDNRLPPKKVPGFCSFRYGLSFLVHCCNVIITAQRACLNLTMVVMVNSTDPHGLPNTSTKKLLDNIKNPMYNWSPDIQGIILSSTSYGVIIIQVPVGYFSGIYSTKKMIGFALCLSSVLSLLIPPAAGIGVAWVVVCRAVQGAAQGIVATAQFEIYVKWAPPLERGRLTSMSTSGFLLGPFIVLLVTGVICESLGWPMVFYIFGQFK

SEQ ID NO: 87619 - protein, 499 aa, Homo sapiens
MVSEPVAHGVAEEEMASSTSDSGEESDSSSSSSSTSDSSSSSSTSGSSSGSGSSSSSSGSTSSRSRLYRKKRVPEPSRRARRAPLGTNFVDRLPQAVRNRVQALRNIQDECDKVDTLFLKAIHDLERKYAELNKPLYDRRFQIINAEYEPTEEECEWNSEDEEFSSDEEVQDNTPSEMPPLEGEEEENPKENPEVKAEEKEVPKEIPEVKDEEKEVPKEIPEVKAEEKADSKDCMEATPEVKEDPKEVPQVKADDKEQPKATEAKARAAVRETHKRVPEERLQDSVDLKRARKGKPKREDPKGIPDYWLIVLKNVDKLGPMIQKYDEPILKFLSDVSLKFSKPGQPVSYTFEFHFLPNPYFRNEVLVKTYIIKAKPDHNDPFFSWGWEIEDCKGCKIDWRRGKDVTVTTTQSRTTATGEIEIQPRVVPNASFFNFFSPPEIPMIGKLEPREDAILDEDFEIGQILHDNVILKSIYYYTGEVNGTYYQFGKHYGNKKYRK

SEQ ID NO: 87620 - protein, 77 aa, Homo sapiens
MGRKKIQITRIMDERNRQVTFTKRKFGLMKKAYELSVLCDCEIALIIFNSSNKLFQYASTDMDKVLLKYTEYNEPHE

SEQ ID NO: 87621 - protein, 143 aa, Homo sapiens
MAIGDHILQQNVNGQTISLYRFLPNIVMQANSTVTVWAAASEAKHQPPSDFLWKEQDKFRASPDCITILCKPNGQAIAWYTPIHWKQAWEKLDADVEFNRCSVVSPTFRKRVFQWTASTATITKEKQDQPKKDISNYQVEQAQ

SEQ ID NO: 87622 - protein, 954 aa, Homo sapiens
MTAEPMSESKLNTLVQKLHDFLAHSSEESEETSSPPRLAMNQNTDKISGSGSNSDMMENSKEEGTSSSEKSKSSGSSRSKRKPSIVTKYVESDDEKPLDDETVNEDASNENSENDITMQSLPKGTVIVQPEPVLNEDKDDFKGPEFRSRSKMKTENLKKRGEDGLHGIVSCTACGQQVNHFQKDSIYRHPSLQVLICKNCFKYYMSDDISRDSDGMDEQCRWCAEGGNLICCDFCHNAFCKKCILRNLGRKELSTIMDENNQWYCYICHPEPLLDLVTACNSVFENLEQLLQQNKKKIKVDSEKSNKVYEHTSRFSPKKTSSNCNGEEKKLDDSCSGSVTYSYSALIVPKEMIKKAKKLIETTANMNSSYVKFLKQATDNSEISSATKLRQLKAFKSVLADIKKAHLALEEDLNSEFRAMDAVNKEKNTKEHKVIDAKFETKARKGEKPCALEKKDISKSEAKLSRKQVDSEHMHQNVPTEEQRTNKSTGGEHKKSDRKEEPQYEPANTSEDLDMDIVSVPSSVPEDIFENLETAMEVQSSVDHQGDGSSGTEQEVESSSVKLNISSKDNRGGADCQEVPQDKDGYKSCGLNPKLEKCGLGQENSDNEHLVENEVSLLLEESDLRRSPRVKTTPLRRPTETNPVTSNSDEECNETVKEKQKLSVPVRKKDKRNSSDSAIDNPKPNKLPKSKQSETVDQNSDSDEMLAILKEVSRMSHSSSSDTDINEIHTNHKTLYDLKTQAGKDDKGKRKRKSSTSGSDFDTKKGKSAKSSIISKKKRQTQSESSNYDSELEKEIKSMSKIGAARTTKKRIPNTKDFDSSEDEKHSKKGMDNQGHKNLKTSQEGSSDDAERKQERETFSSAEGTVDKDTTIMELRDRLPKKQQASASTDGVDKLSGKEESFTSLEVRKVAETKEKSKHLKTKTCKKVQDGLSDIAEKFLKKDQSDETSEDDKK

SEQ ID NO: 87623 - protein, 113 aa, Homo sapiens
PPEENERENGQEILLRLDGSIKGEIRKQALDHFNADGSEDFCFLLSTRAGGLGINLASADTVVIFDSDWNPQNDLQAQARAHRIGQKKQVNIYRLVTKGTVEEEIIERAKKKM

SEQ ID NO: 87624 - protein, 102 aa, Homo sapiens
MASGGGGGNTGAGGGPGMGLSLGLGLGLSLGMSEATSEAEEEAATAEAVGRLATTLWLRLRGWEAVLAAAQRLLVWEKPLHSLVTAAALNGLFCIIPRGATL

SEQ ID NO: 87625 - protein, 135 aa, Homo sapiens
  MOD_RES (1)..(1): Any amino acid
XLGALFFAYYWDDNFDPGGLDYLVLNHIGGAPAGTRARSPQATRWLMQVNFVSYVQLTSRALPSLTDSKGSLVVVSSLLGRVPTSFSTPYSAAKFALDGFFGSLRRELDVQDVNVAITMCVLGLRDRASAAEAVR

SEQ ID NO: 87626 - protein, 495 aa, Homo sapiens
MSFQCHICAYHTHSLTRQEFWQLLQQNYGTELGLNAEEMENLSLSIEDVQPRSPGRSSLDDSGERDEKLSKSISFTSESISRVSETESFDGNSSKGGLGKEESQNEKQTKKSLLPTLEKKLTRVPSKSLDLNKNEYLSLDKSSTSDSVDEENVPEKDLHGRLFINRIFHISADRMFELLFTSSRFMQKFASSRNIIDVVSTPWTAELGGDQLRTMTYTIVLNSPLTGKCTAATEKQTLYKESREARFYLVDSEVLTHDVPYHDYFYTVNRYCIIRSSKQKCRLRVSTDLKYRKQPWGLVKSLIEKNSWSSLEDYFKQLESDLLIEESVLNQAIEDPGKLTGLRRRRRTFNRTAETVPKLSSQHSSGDVGLGAKGDITGKKKEMENYNVTLIVVMSIFVLLLVLLNVTLFLKLSKIEHAAQSFYRLRLQEEKSLNLASDMVSRAETIQKNKDQAHRLKGVLRDSIVMLEQLKSSLIMLQKTFDLLNKNKTGMAVES

SEQ ID NO: 87627 - protein, 241 aa, Homo sapiens
MAARVLIIGSGGREHTLAWKLAQSHHVKQVLVAPGNAGTACSEKISNTAISISDHTALAQFCKEKKIEFVVVGPEAPLAAGIVGNLRSAGVQCFGPTAEAAQLESSKRFAKEFMDRHGIPTAQWKAFTKPEEACSFILSADFPALVVKASGLAAGKGVIVAKSKEEACKAVQEIMQEKAFGAAGETIVIEELLDGEEVSCLCFTDGKTVAPMPPAQDHKRLLEGDGGPNTGGMGAYCPAPQ

SEQ ID NO: 87628 - protein, 107 aa, Homo sapiens
SSSVTPSTSPQLSQMAVAVLCQWKEFLLRGGAGECTPSTYEKKLTIKWPQAGPSGGFQKKASLSQEVAAPCVLLGHDVEVEEGDMDDPAPVTNLLLCNCQSCAFQLR

SEQ ID NO: 87629 - protein, 300 aa, Homo sapiens
MAALSGGGGGGAEPGQALFNGDMEPEAGAGAGAAASSAADPAIPEEVWNIKQMIKLTQEHIEALLDKFGGEHNPPSIYLEAYEEYTSKLDALQQREQQLLESLGNGTDFSVSSSASMDTVTSSSSSSLSVLPSSLSVFQNPTDVARSNPKSPQKPIVRVFLPNKQRTVVPARCGVTVRDSLKKALMMRGLIPECCAVYRIQDGEKKPIGWDTDISWLTGEELHVEVLENVPLTTHNFVRKTFFTLAFCDFCRKLLFQGFRCQTCGYKFHQRCSTEVPLMCVNYDQLDSLNTTQYHRKRRP

SEQ ID NO: 87630 - protein, 830 aa, Homo sapiens
  MOD_RES (1)..(1): Any amino acid
XLRRGTCAFSILFKLFSEGLFSAKLFLTATLHEPIMQLLVEDEDHLETDPNKLIERFSPSQQEKLFGEKGSDRFRQKVQEMVESNEAKLVALVNKFIGYLKQNTYCFPHSLRWIVSQMYKTLSCVDRLEVGEVRAMCTDLLLACFICPAVVNPEQYGIISDAPINEVARFNLMQVGRLLQQLAMTGSEEGDPRTKSSLGKFDKSCVAAFLDVVIGGRAVETPPLSSVNLLEGLSRTVVYITYSQLITLVNFMKSVMSGDQLREDRMALDNLLANLPPAKPGKSSSLEMTPYNTPQLSPATTPANKKNRLPIGQQLAAITAWDSSATNITSHITVVTPFATRSRSRTNMLMDLHMDHEGSSQETIQEVQPEEVLVISLGTGPQLTPGMMSENEVLNMQLSDGGQGDVPVDENKLHGPSNRSNSVSSLDLEGESVSELGAGPSGSNGVEALQLLEHEQATTQDNLDDKLRKFEIRDMMGLTDDRDISETVSETWSTDVLGSDFDPNIDEDRLQEIAGAAAENMLGSLLCLPGSGSVLLDPCTGSTISETTSEAWSVEVLPSDSEAPDLKQEERLQELESCSGLGSTSDDTDVREVSSRPSTPGLSVVSGISATSEDIPNKIEDLRSECSSDFGGKDSVTSPDMDEITHGAHQLTSPPSQSESLLAMFDPLSSHEGASAVVRPKVHYARPSHPPPDPPILEGAVGGNEARLPNFGSHVLTPAEMEAFKQRHSYPERLVRSRSSDIVSSVRRPMSDPSWNRRPGNEERELPPAAAIGATSLVAAPHSSSSSPSKDSSRGETEERKDSDDEKSDRNRPWWRKRFVSAMPKAPIPF

SEQ ID NO: 87631 - protein, 175 aa, Homo sapiens
MLLAQINRDSQGMTEFPGGGMEAQHVTLCLTEAVTVADGDNLENMEGVSLQAVTLADGSTAYIQHNSKDAKLIDGQVIQLEDGSAAYVQHVPIPKSTGDSLRLEDGQAVQLEDGTTAFIHHTSKDSYDQSALQAVQLEDGTTAYIHHAVQVPQSDTILAIQADGTVAGLHTGDAT

SEQ ID NO: 87632 - protein, 54 aa, Homo sapiens
MDHEAAQLEKQHVHNVYESTAPYFSDLQSKAWPRVRQFLQEQKPGSLIADIGCG

SEQ ID NO: 87633 - protein, 222 aa, Homo sapiens
MASRIGLRMQLMREQAQQEEQRERMQQQAVMHYMQQQQQQQQQQLGGPPTPAINTPVHFQSPPPVPGEVLKVQSYLENPTSYHLQQSQHQKVREYLSETYGNKFAAHISPAQGSPKPPPAASPGVRAGHVLSSSAGNSAPNSPMAMLHIGSNPERELDDVIDNIMRLDDVLGYINPEMQMPNTLPLSSSHLNVYSSDPQVTASLVGVTSSSCPADLTQKREL

SEQ ID NO: 87634 - protein, 301 aa, Homo sapiens
  MOD_RES (1)..(1): Any amino acid
XPEEGTGWLLELLSEVQLQQYFLRLRDDLNVTRLSHFEYVKNEDLEKIGMGRPGQRRLWEAVKRRKALCKRKSWMSKVSVAVKCLKPDVLSQPEAMDDFIREVNAMHSLDHRNLIRLYGVVLTPPMKMVTELAPLGSLLDRLRKHQGHFLLGTLSRYAVQVAEGMGYLESKRFIHRDLAARNLLLATRDLVKIGDFGLMRALPQNDDHYVMQEHRKVPFAWCAPESLKTRTFSHASDTWMFGVTLWEMFTYGQEPWIGLNGSQILHKIDKEGERLPRPEDCPQDIYNVMVQCWAHKPEDRP

SEQ ID NO: 87635 - protein, 106 aa, Homo sapiens; identical to SEQ ID NO: 43169

SEQ ID NO: 87636 - protein, 129 aa, Homo sapiens
MVDYYEVLGVQRHASPEDIKKAYRKLALKWHPDKNPENKEEAERKFKQVAEAYEVLSDAKKRDIYDKYGKEGLNGGGGGGSHFDSPFEFGFTFRNPDDVFREFFGGRDPFSFDFFGQGSVWVEVLCSDR

SEQ ID NO: 87637 - protein, 60 aa, Homo sapiens
MPGGLEKTCHQCISKIASNACFVVVLCAFLALPLSMTFIGVSPVVRLHQDEAAAVQGRGD

SEQ ID NO: 87638 - protein, 321 aa, Homo sapiens
MEANGLGPQGFPELKNDTFLRAAWGEETDYTPVWCMRQAGRYLPEFRETRAAQDFFSTCRSPEACCELTLQPLRRFPLDAAIIFSDILVVPQALGMEVTMVPGKGPSFPEPLREEQDLERLRDPEVVASELGYVFQAITLTRQRLAGRVPLIGFAGAPWTLMTYMVEGGGSSTMAQAKRWLYQRPQASHQLLRILTDALVPYLVGQVVAGAQIIFAKDGHFALEELAQAGYEVVGLDWTVAPKKARECVGKTVTLQGNLDPCALYASEEEIGQLVKQMLDDFGPHRYIANLGHGLYPDMDPEHVGAFVDAVHKHSRLLRQN

SEQ ID NO: 87639 - protein, 43 aa, Homo sapiens
  MOD_RES (1)..(1): Any amino acid
XKNEKKSLNQSLAEWKLFIYNPTTGEFLGRTAKSWGSQYVVGK

SEQ ID NO: 87640 - protein, 1130 aa, Homo sapiens
MRCLAPRPAGSYLSEPQGSSQCATMELGPLEGGYLELLNSDADPLCLYHFYDQMDLAGEEEIELYSEPDTDTINCDQFSRLLCDMEGDEETREAYANIAELDQYVFQDSQLEGLSKDIFKHIGPDEVIGESMEMPAEVGQKSQKRPFPEELPADLKHWKPAEPPTVVTGSLLVGPVSDCSTLPCLPLPALFNQEPASGQMRLEKTDQIPMPFSSSSLSCLNLPEGPIQFVPTISTLPHGLWQISEAGTGVSSIFIYHGEVPQASQVPPPSGFTVHGLPTSPDRPGSTSPFAPSATDLPSMPEPALTSRANMTEHKTSPTQCPAAGEVSNKLPKWPEPVEQFYRSLQDTYGAEPAGPDGILVEVDLVQARLERSSSKSLERELATPDWAERQLAQGGLAEVLLAAKEHRRPRETRVIAVLGKAGQGKSYWAGAVSRAWACGRLPQYDFVFSVPCHCLNRPGDAYGLQDLLFSLGPQPLVAADEVFSHILKRPDRVLLILDGFEELEAQDGFLHSTCGPAPAEPCSLRGLLAGLFQKKLLRGCTLLLTARPRGRLVQSLSKADALFELSGFSMEQAQAYVMRYFESSGMTEHQDRALTLLRDRPLLLSHSHSPTLCRAVCQLSEALLELGEDAKLPSTLTGLYVGLLGRAALDSPPGALAELAKLAWELGRRHQSTLQEDQFPSADVRTWAMAKGLVQHPPRAAESELAFPSFLLQCFLGALWLALSGEIKDKELPQYLALTPRKKRPYDNWLEGVPRFLAGLIFQPPARCLGALLGPSAAASVDRKQKVLARYLKRLQPGTLRARQLLELLHCAHEAEEAGIWQHVVQELPGRLSFLGTRLTPPDAHVLGKALEAAGQDFSLDLRSTGICPSGLGSLVGLSCVTRFRAALSDTVALWESLQQHGETKLLQAAEEKFTIEPFKAKSLKDVEDLGKLVQTQRTRSSSEDTAGELPAVRDLKKLEFALGPVSGPQAFPKLVRILTAFSSLQHLDLDALSENKIGDEGVSQLSATFPQLKSLETLNLSQNNITDLGAYKLAEALPSLAASLLRLSLYNNCICDVGAESLARVLPDMVSLRVMDVQYNKFTAAGAQQLAASLRRCPHVETLAMWTPTIPFSVQEHLQQQDSRISLR

SEQ ID NO: 87641 - protein, 67 aa, Homo sapiens
MNVDHEVNLLVEEIHRLGSKSKYLTEIEYFSWLYLGTGETGMLEKPMKGSPRASGHRSGSSAHSPRL

SEQ ID NO: 87642 - protein, 719 aa, Homo sapiens
AGQPAGLHCSSRLEPDILLRAKQDFLKTDSDSDLQLYKEQGEGQGDRSLRERDVLEREFQRVTISGEEKCGVPFTDLLDAAKSVVRALFIREKYMALSLQSFCPTTRRYLQQLAEKPLETRTYEQGPDTPVSADAPVHPPALEQHPYEHCEPSTMPGDLGLGLRMVRGVVHVYTRREPDEHCSEVELPYPDLQEFVADVNVLMALIINGPIKSFCYRRLQYLSSKFQMHVLLNEMKELAAQKKVPHRDFYNIRKVDTHIHASSCMNQKHLLRFIKRAMKRHLEEIVHVEQGREQTLREVFESMNLTAYDLSVDTLDVHADRNTFHRFDKFNAKYNPIGESVLREIFIKTDNRVSGKYFAHIIKEVMSDLEESKYQNAELRLSIYGRSRDEWDKLARWAVMHRVHSPNVRWLVQVPRLFDVYRTKGQLANFQEMLENIFLPLFEATVHPASHPELHLFLEHVDGFDSVDDESKPENHVFNLESPLPEAWVEEDNPPYAYYLYYTFANMAMLNHLRRQRGFHTFVLRPHCGEAGPIHHLVSAFMLAENISHGLLLRKAPVLQYLYYLAQIGIAMSPLSNNSLFLSYHRNPLPEYLSRGLMVSLSTDDPLQFHFTKEPLMEEYSIATQVWKLSSCDMCELARNSVLMSGFSHKVKSHWLGPNYTKEGPEGNDIRRTNVPDIRVGYRYETLCQELALITQAVQSEMLETIPEEAGITMSPGPQ

SEQ ID NO: 87643 - protein, 148 aa, Homo sapiens
MGRVIRGQRKGAGSVFRAHVKHRKGAARLRAVDFAERHGYIKGIVKKVISSANRAVVGVVAGGGRIDKPILKAGRAYHKYKAKRNCWPRVRGVAMNPVEHPFGGGNHQHIGKPSTIRRDAPAGRKVGLIAARRTGRLRGTKTVQEKEN

SEQ ID NO: 87644 - protein, 190 aa, Homo sapiens
  MOD_RES (1)..(1): Any amino acid
XKGLWTLRAFGRQPYFETLFHKALNLHTANWFLYLSTLRWFQMRIEMIFVIFFIAVTFISILTTGEGEGRVGIILTLAMNIMSTLQWAVNSSIDVDSLMRSVSRVFKFIDMPTEGKPTKSTKPYKNGQLSKVMIIENSHVKKDDIWPSGGQMTVKDLTAKYTEGGNAILENISFSISPGQRVRFEHCLLC

SEQ ID NO: 87645 - protein, 29 aa, Homo sapiens
MRPWTGSWRWIMLILFAWGTLLFYIGGHL

SEQ ID NO: 87646 - protein, 40 aa, Homo sapiens
MGRCSKPICDLISDMGNLVHATNSEEDIKKLLPDDFKSNA

SEQ ID NO: 87647 - protein, 151 aa, Homo sapiens
PQTDQKSHSQRALGTQTPALQGPQLLNTDPSSKETRPPHVNPDRLCHMEPANHFWHAGDLQAMISKEFHLAATQDDCRKGRTQEDILVPSSHPELFASVLPMAPEEAARLQQPQPLPPPSGIHLSASRTLAPTLLYSSPPSHSPFGLSSLI

SEQ ID NO: 87648 - protein, 113 aa, Homo sapiens
MEDLCVANTLFALNLFKHLAKASPTQNLFLSPWSISSTMAMVYMGSRGSTEDQMAKVLQFNEVGANAVTPMTPENFTSCGFMQQIQKGSYPDAILQAQAADKIHSSFRSLSSA

SEQ ID NO: 87649 - protein, 91 aa, Homo sapiens
MDTCVIPLRHGGLSLVQTTDYIYPIVDDPYMMGRIACANVLSDLYAMGVTECDNMLMLLGVSNKMTDRERDKVMPLIIQGFKDAAEEAGTS

SEQ ID NO: 87650 - protein, 170 aa, Homo sapiens
MGERWADSQLDSRSTHGTGESGKSTFIKQMRIIHGSGYSDEDKRGFTKLVYQNIFTAMQAMIRAMDTLKIPYKYEHNKAHAQLVREVDVEKVSAFENPYVDAIKSLWNDPGIQECYDRRREYQLSDSTKYYLNDLDRVADPAYLPTQQDVLRVRVPTTGIIEYPFDLQSV

SEQ ID NO: 87651 - protein, 58 aa, Homo sapiens
MPESEEIAQLLSGSYIHYFHCLRILDLLKGTEASTKNIFGRYSSQRMKARLAGDYSSV

SEQ ID NO: 87652 - protein, 833 aa, Homo sapiens
MEPAALRCAYFRYSDSTFTFTYVGGPRSVSYSVHVSEDYPDNTYVSSSENDEDVLVTTEPIPVIFHRIATELRKTNDINCCLSIKSKLQKENGEESRQNSTVEEDSEGDNDSEEFYYGGQVNYDGELHKHPQLEADLSAVREIYGPHAVSLREYGAIDDVDIDLHIDVSFLDEEIAVAWEVIRTEPIIVRLHCSLTQYLNGPVPTVDVFQISTKERFGLGHQLKKIMQTFVTQQWKQSKEKSNCLHNKKLSEKKVKSPLHLFSTLRRSPSYPPPGCGKSKSKLKSEQDGISKTHKLLRRTCSSTVKTDDVCVTKSHRTFGRSLSSDPRAEQAMTAIKSHKLLNRPCPAAVKSEECLTLKSHRLLTRSCSGDPRCEHNTNLKPHKLLSRSYSSNLRMEELYGLKNHKLLSKSYSSAPKSSKTELFKEPNAEGRRLSLTSGLIGILTPSSSSSSQLAPNGAKCIPVRDRGFLVQTIEFAEQRIPVLNEYCVVCDEPHVFQNGPMLRPTVCERELCVFAFQTLGVMNEAADEIATGAQVVDLLVSMCRSALESPRKVVIFEPYPSVVDPNDPQMLAFNPRKKNYDRVMKALDSITSIREMTQAPYLEIKKQMDKQDPLAHPLLQWVISSNRSHIVKLPVNRQLKFMHTPHQFLLLSSPPAKESNFRAAKKLFGSTFAFHGSHIENWHSILRNGLVVASNTRLQLHGAMYGSGIYLSPMSSISFGYSGMNKKQKVSAKDEPASSSKSSNTSQSQKKGQQSQFLQSRNLKCIALCEVITSSDLHKHGEIWVVPNTDHVCTRFFFVYEDGQVGDANINTQEGGIHKEILRVIGNQTATG

SEQ ID NO: 87653 - protein, 260 aa, Homo sapiens
MKSNIDKKFSAHYDAVEAELKSSTVGLVTLNDMKAKQEALVKEREKQLAKKEQSKELQMKLEKLREKERKKEAKRKISSLSFTLEEEEEGGEEEEEAAMYEEEMEREEITTKKRKLGKNPDVDTSFLPDRDREEEENRLREELRQEWEAKQEKIKSEEIEITFSYWDGSGHRRTVKMRKGNTMQQFLQKALEILRKDFSELRSAGVEQLMYIKEDLIIPHHHSFYDFIVTKARGKSGPLFNFDVHDDVRLLSDATVEKDE

SEQ ID NO: 87654 - protein, 12 aa, Homo sapiens
MSLPNSSCLLED

SEQ ID NO: 87655 - protein, 374 aa, Homo sapiens
MAAGFGRCCRVLRSISRFHWRSQHTKANRQREPGLGFSFEFTEQQKEFQATARKFAREEIIPVAAEYDKTGEYPVPLIRRAWELGLMNTHIPENCGGLGLGTFDACLISEELAYGCTGVQTAIEGNSLGQMPIIIAGNDQQKKKYLGRMTEEPLMCAYCVTEPGAGSDVAGIKTKAEKKGDEYIINGQKMWITNGGKANWYFLLARSDPDPKAPANKAFTGFIVEADTPGIQIGRKVAAGAVGLAQRALDEATKYALERKTFGKLLVEHQAISFMLAEMAMKVELARMSYQRAAWEVDSGRRNTYYASIAKAFAGDIANQLATDAVQILGGNGFNTEYPVEKLMRDAKIYQIYEGTSQIQRLIVAREHIDKYKN

SEQ ID NO: 87656 - protein, 749 aa, Homo sapiens
MVPAWLWLLCVSVPQVTLEMQDGHVLWGPQPVLVHVKDENDQVPHFSQAIYRARLSRGTRPGIPFLFLEASDRDEPGTANSDLRFHILSQAPAQPSPDMFQLEPRLGALALSPKGSTSLDHALERTYQLLVQVKDMGDQASGHQATATVEVSIIESTWVSLEPIHLAENLKVLYPHHMAQVHWSGGDVHYHLESHPPGPFEVNAEGNLYVTRELDREAQAEYLLQVRAQNSHGEDYAAPLELHVLVMDENDNVPICPPRDPTVSIPELSPPGTEVTRLSAEDADAPGSPNSHVVYQLLSPEPEDGVEGRAFQVDPTSGSVTLGVLPLRAGQNILLLVLAMDLAGAEGGFSSTCEVEVAVTDINDHAPEFITSQIGPISLPEDVEPGTLVAMLTAIDADLEPAFRLMDFAIERGDTEGTFGLDWEPDSGHVRLRLCKNLSYEAAPSHEVVVVVQSVAKLVGPGPGPGATATVTVLVERVMPPPKLDQESYEASVPISAPAGSFLLTIQPSDPISRTLRFSLVNDSEGWLCIEKFSGEVHTAQSLQGAQPGDTYTVLVEAQDTDEPRLSASAPLVIHFLKAPPAPALTLAPVPSQYLCTPRQDHGLIVSGPSKDPDLASGHGPYSFTLGPNPTVQRDWRLQTLNGSHAYLTLALHWVEPREHIIPVVVSHNAQMWQLLVRVIVCRCNVEGQCMRKVGRMKGMPTKLSAVGILVGTLVAIGIFLILIFTHWTMSRKKDPDQPADSVPLKATV

SEQ ID NO: 87657 - protein, 150 aa, Homo sapiens
MRSGEPACTMDQARGLDDAAARGGQCPGLGPAPTPTPPGRLGAPYSEAWGYFHLAPGRPGHPSGHWATCRLCGEQVGRGPGFHAGTSALWRHLRSAHRRELESSGAGSSPPAAPCPPPPGPAAAPEGDWARLLEQMGALAVRGSRREREL

SEQ ID NO: 87658 - protein, 43 aa, Homo sapiens
MANSFAARIFTTLSDLQTNMANLILDQKGTLSASPFGIHQHIL

SEQ ID NO: 87659 - protein, 1174 aa, Homo sapiens
MPPSWSPLMCGRAAEAAASSRTPGREMGQAVTRRLGAGARAAPRRAMDGRTPRPQDAPARRKPKAKAPLPPAETKYTDVSSAADSVESTAFIMEQKENMIDKDVELSVVLPGDIIKSTTVHGSKPMMDLLIFLCAQYHLNPSSYTIDLLSAEQNHIKFKPNTPIGMLEVEKVILKPKMLDKKKPTPIIPEKTVRVVINFKKTQKTIVRVSPHASLQELAPIICSKCEFDPLHTLLLKDYQSQEPLDLTKSLNDLGLRELYAMDVNRESCQISQNLDIMKEKENKGFFSFFQRSKKKRDQTASAPATPLVNKHRPTFTRSNTISKPYISNTLPSDAPKKRRAPLPPMPASQSVPQDLAHIQERPASCIVKSMSVDETDKSPCEAGRVRAGSLQLSSMSAGNSSLRRTKRKAPSPPSKIPPHQSDENSRVTALQPVDGVPPDSASEANSPEELSSPAGISSDYSLEEIDEKEELSEVPKVEAENISPKSQDIPFVSTDIINTLKNDPDSALGNGSGEFSQNSMEEKQETKSTDGQEPHSVVYDTSNGKKVVDSIRNLKSLGPNQENVVQNEIIVYPENTEDNMKNGVKKTEINVEGVAKNNNIDMEVERPSNSEAHETDTAISYKENHLAASSVPDQKLNQPSAEKTKDAAIQTTPSCNSFDGKHQDHNLSDSKVEECVQTSNNNISTQHSCLSSQDSVNTSREFRSQGTLIIHSEDPLTVKDPICAHGNDDLLPPVDRIDKNSTASYLKNYPLYRQDYNPKPKPSNEITREYIPKIGMTTYKIVPPKSLEISKDWQSETIEYKDDQDMHALGKKHTHENVKETAIQTEDSAISESPEEPLPNLKPKPNLRTEHQVPSSVSSPDDAMVSPLKPAPKMTRDTGTAPFAPNLEEINNILESKFKSRASNAQAKPSSFFLQMQKRVSGHYVTSAAAKSVHAAPNPAPKELTNKEAERDMLPSPEQTLSPLSKMPHSVPQPLVEKTDDDVIGQAPAEASPPPIAPKPVTIPASQVSTQNLKTLKTFGAPRPYSSSGPSPFALAVVKRSQSFSKERTESPSASALVQPPANTEEGKTHSVNKFVDIPQLGVSDKENNSAHNEQNSQIPTPTDGPSFTVMRQSSLTFQSSDPEQMRQSLLTAIRSGEAAAKLKRVTIPSNTISVNGRSRLSHSMSPDAQDGH

SEQ ID NO: 87660 - protein, 289 aa, Homo sapiens
MNYSLHLAFVCLSLFTERMCIQGSQFNVEVGRSDKLSLPGFENLTAGYNKFLRPNFGGEPVQIALTLDIASISSISESNMDYTATIYLRQRWMDQRLVFEGNKSFTLDARLVEFLWVPDTYIVESKKSFLHEVTVGNRLIRLFSNGTVLYALRITTTVACNMDLSKYPMDTQTCKLQLESWGYDGNDVEFTWLRGNDSVRGLEHLRLAQYTIERYFTLVTRSQQETGNYTRLVLQFELRRNVLYFILETYVPSTFLVVLSWVSFWISLDSVPARTCIGDNKGSRRSQYY

SEQ ID NO: 87661 - protein, 56 aa, Homo sapiens
MAEEPQSVLQLPTSIAAGGEGLTDVSPETTTPEPPSSAAVSPGTEEPAGDTKKKSN

SEQ ID NO: 87662 - protein, 1470 aa, Homo sapiens
MVSSGCRMRSLWFIIVISFLPNTEGFSRAALPFGLVRRELSCEGYSIDLRCPGSDVIMIESANYGRTDDKICDADPFQMENTDCYLPDAFKIMTQRCNNRTQCIVVTGSDVFPDPCPGTYKYLEVQYECVPYIFVCPGTLKAIVDSPCIYEAEQKAGAWCKDPLQAADKIYFMPWTPYRTDTLIEYASLEDFQNSRQTTTYKLPNRVDGTGFVVYDGAVFFNKERTRNIVKFDLRTRIKSGEAIINYANYHDTSPYRWGGKTDIDLAVDENGLWVIYATEQNNGMIVISQLNPYTLRFEATWETVYDKRAASNAFMICGVLYVVRSVYQDNESETGKNSIDYIYNTRLNRGEYVDVPFPNQYQYIAAVDYNPRDNQLYVWNNNFILRYSLEFGPPDPAQVPTTAVTITSSAELFKTIISTTSTTSQKGPMSTTVAGSQEGSKGTKPPPAVSTTKIPPITNIFPLPERFCEALDSKGIKWPQTQRGMMVERPCPKGTRGTASYLCMISTGTWNPKGPDLSNCTSHWVNQLAQKIRSGENAASLANELAKHTKGPVFAGDVSSSVRLMEQLVDILDAQLQELKPSEKDSAGRSYNKAIVDTVDNLLRPEALESWKHMNSSEQAHTATMLLDTLEEGAFVLADNLLEPTRVSMPTENIVLEVAVLSTEGQIQDFKFPLGIKGAGSSIQLSANTVKQNSRNGLAKLVFIIYRSLGQFLSTENATIKLGADFIGRNSTIAVNSHVISVSINKESSRVYLTDPVLFTLPHIDPDNYFNANCSFWNYSERTMMGYWSTQGCKLVDTNKTRTTCACSHLTNFAILMAHREIAYKDGVHELLLTVITWVGIVISLVCLAICIFTFCFFRGLQSDRNTIHKNLCINLFIAEFIFLIGIDKTKYAIACPIFAGLLHFFFLAAFAWMCLEGVQLYLMLVEVFESEYSRKKYYYVAGYLFPATVVGVSAAIDYKSYGTEKACWLHVDNYFIWSFIGPVTFIILLNIIFLVITLCKMVKHSNTLKPDSSRLENINNYRVCDGYYNTDLPGYEDNKPFIKSWVLGAFALLCLLGLTWSFGLLFINEETIVMAYLFTIFNAFQGVFIFIFHCALQKKVRKEYGKCFRHSYCCGGLPTESPHSSVKASTTRTSARYSSGTQSRIRRMWNDTVRKQSESSFISGDINSTSTLNQGMTGNYLLTNPLLRPHGTNNPYNTLLAETVVCNAPSAPVFNSPGHSLNNARDTSAMDTLPLNGNFNNSYSLHKGDYNDSVQVVDCGLSLNDTAFEKMIISELVHNNLRGSSKTHNLELTLPVKPVIGGSSSEDDAIVADASSLMHSDNPGLELHHKELEAPLIPQRTHSLLYQPQKKVKSEGTDSYVSQLTAEAEDHLQSPNRDSLYTSMPNLRDSPYPESSPDMEEDLSPSRRSENEDIYYKSMPNLGAGHQLQMCYQISRGNSDGYIIPINKEGCIPEGDVREGQMQLVTSL

SEQ ID NO: 87663 - protein, 191 aa, Homo sapiens
  MOD_RES (1)..(1): Any amino acid
XRWVEKGSEDVRLMKPPSPEHQSLDTQQEGGEEEVGPVAQQAIAVAEPSTSECLRIEPDTTALSTNHETIDLLVQILRNCLRYFLPPSFPISKKQLSAMNSDELISFPLKEYFKQYEVGLQNLCNSYQSRADSRAKASEESLRTSERKLRETEEKLQKLRTNIVALLQKDIDINTDDELDAYIEDLITKGD

SEQ ID NO: 87664 - protein, 18 aa, Homo sapiens
MPSIKLQSSDGEIFEVDV

SEQ ID NO: 87665 - protein, 264 aa, Homo sapiens
MALLWGLLVLSWSCLQGPCSVFSPVSAMEPLGRQLTSGPNQEQVSPLTLLKLGNQEPGGQTALKSPPGVCSRDPTPEQTHRLARAMMAFTADLFSLVAQTSTCPNLILSPLSVALALSHLALGFWRNKFDPSLTQRDSFHLDEQFTVPVEMMQARTYPLRWFLLEQPEIQVAHFPFKNNMSFVVLVPTHFEWNVSQVLANLSWDTLHPPLVWERPTKVRLPKLYLKHQMDLVATLSQLGLQELFQAPDLRGISEQSLVVSGVQH

SEQ ID NO: 87666 - protein, 466 aa, Homo sapiens
MEKILFYLFLIGIAVKAQICPKRCVCQILSPNLATLCAKKGLLFVPPNIDRRTVELRLADNFVTNIKRKDFANMTSLVDLTLSRNTISFITPHAFADLRNLRALHLNSNRLTKITNDMFSGLSNLHHLILNNNQLTLISSTAFDDVFALEELDLSYNNLETIPWDAVEKMVSLHTLSLDHNMIDNIPKGTFSHLHKMTRLDVTSNKLQKLPPDPLFQRAQVLATSGIISPSTFALSFGGNPLHCNCELLWLRRLSREDDLETCASPPLLTGRYFWSIPEEEFLCEPPLITRHTHEMRVLEGQRATLRCKARGDPEPAIHWISPEGKLISNATRSLVYDNGTLDILITTVKDTGAFTCIASNPAGEATQIVDLHIIKLPHLLNSTNHIHEPDPGSSDISTSTKSGSNTSSSNGDTKLSQDKIVVAEATSSTALLKFNFQRNIPGIRMFQIQYNGTYDDTLVYRCFAD

SEQ ID NO: 87667 - protein, 208 aa, Homo sapiens
MARDAPGEAAHVDGTQGFSAGAAGELGVAHSDSPAAPWEDPRRFPGRRVPLPGARVPAAVVGEPAGSRSSFPDCVPRVPGSPSTAVVTRVRGLGGAPDAPHPPLKIPGGRGNSQRDHNLSANLFYSDDRLNVTEELTSNDKTRILNVQSRLTDAKRINWRTVLSGGSLYIEIPGGALPEGSKDSFAVLLEFAEEQLRADHVFICFHKN

SEQ ID NO: 87668 - protein, 783 aa, Homo sapiens
MATQADLMELDMAMEPDRKAAVSHWQQQSYLDSGIHSGATTTAPSLSGKGNPEEEDVDTSQVLYEWEQGFSQSFTQEQVAGKNIDGQYAMTRAQRVRAAMFPETLDEGMQIPSTQFDAAHPTNVQRLAEPSQMLKHAVVNLINYQDDAELATRAIPELTKLLNDEDQVVVNKAAVMVHQLSKKEASRHAIMRSPQMVSAIVRTMQNTNDVETARCTAGTLHNLSHHREGLLAIFKSGGIPALVKMLGSPVDSVLFYAITTLHNLLLHQEGAKMAVRLAGGLQKMVALLNKTNVKFLAITTDCLQILAYGNQESKLIILASGGPQALVNIMRTYTYEKLLWTTSRVLKVLSVCSSNKPAIVEAGGMQALGLHLTDPSQRLVQNCLWTLRNLSDAATKQEGMEGLLGTLVQLLGSDDINVVTCAAGILSNLTCNNYKNKMMVCQVGGIEALVRTVLRAGDREDITEPAICALRHLTSRHQEAEMAQNAVRLHYGLPVVVKLLHPPSHWPLIKATVGLIRNLALCPANHAPLREQGAIPRLVQLLVRAHQDTQRRTSMGGTQQQFVEGVRMEEIVEGCTGALHILARDVHNRIVIRGLNTIPLFVQLLYSPIENIQRVAAGVLCELAQDKEAAEAIEAEGATAPLTELLHSRNEGVATYAAAVLFRMSEDKPQDYKKRLSVELTSSLFRTEPMAWNETADLGLDIGAQGEPLGYRQDDPSYRSFHSGGYGQDALGMDPMMEHEMGGHHPGADYPVDGLPDLGHAQDLMDGLPPGDSNQLAWFDTDL

SEQ ID NO: 87669 - protein, 519 aa, Homo sapiens
MEEHSYIQKELDLQNGSLEEDSVVHSVENDSQNMMESLSPKKYSSSLRFKANGDYSGSYLTLSQPVPAKRSPSPLGTSVRSSPSLAKIQGSKQFSYDGTDKNIPMKPPTPLLNTTSSLSGYPLGRADFDHYTGRDSERALRLSEKPPYSKYSSRHKSHDNVYSLGGLEGRKASGSLLAMWNGSSLSDAGPPPISRSGAASMPSSPKQARKMSIQDSLALQPKLTRHKELASENINLRTRKYSSSSLSHMGAYSRSLPRLYRATENQLTPLSLPPRNSLGNSKRTKLGEKDLPHSVIDNDNYLNFSSLSSGALPYKTSASEGNPYVSSTLSVPASPRVARKMLLASTSSCASDDFDQASYVGTNPSHSLLAGESDRVFATRRNFSCGSVEFDEADLESLRQASGTPQPALRERKSSISSISGRDDLMDYHRRQREERLREQEMERLVIFISTVIDLTVSLTSIYRAALEMDSRICGNIGYSCSLATAAIFLFSPAILLLPISLLIGLFGYLEGLQELMLI

SEQ ID NO: 87670 - protein, 29 aa, Homo sapiens
MGGLSTVGACPGILGAQQGEDLVPEPADE

SEQ ID NO: 87671 - protein, 42 aa, Homo sapiens
MSNLKMKEAALIYLDRSGGLQKFIDDCKYYNGTFSKGLFYCC

SEQ ID NO: 87672 - protein, 72 aa, Homo sapiens
  MOD_RES (1)..(1): Any amino acid
XLMDVVYTWATGATFAHICKMTDVFEGSIIRCMRRLEELLRQMCQAAKAIGNTELENKFAEGQYQMDKLFLI

SEQ ID NO: 87673 - protein, 81 aa, Homo sapiens
MLRRGYKASERRRHLSERLSWHQDQALSSSIYLLREMGPTGFLLREEEPEYMDFRVTTAPTAPSWPSSPPTRFPHWHTQCA

SEQ ID NO: 87674 - protein, 124 aa, Homo sapiens
EDKILLENYVRSIENERDTLEFEMRHLQREYLSLSDKICNQHNDPSKTTYISRREKFHFDNYTHEDTSSPQSRPLASDLKGGNNTHACPGSRGNTISSFQGCKHTCSVLQRHSVFQDCYSNIPC

SEQ ID NO: 87675 - protein, 239 aa, Homo sapiens
QQLQAQHLSHGHGLPVPLTPHPSGLQPPAIPPIGSSAGLLALSSALGGQSHLPIKDEKKHHDNDHQRDRDSIKSSSVSPSASFRGAEKHRNSADYSSESKKQKTEEKEIAARYDSDGEKSDDNLVVDVSNENEKSTTPVSKSNTPTPRTDAPTPGSNSTPGLRPVPGKPPGVDPLASSLRTPMAVPCPYPTPFGIVPHAGMNGELTSPGAAYAGLHNISPQMSAAAAAAAAAAAYGRSP

SEQ ID NO: 87676 - protein, 89 aa, Homo sapiens
MAAEPNKTEIQTLFKRLRAVPTNKACFDCGAKNPSWASITYGVFLCIDCSGVHRSLGVHLSFIRSTELDSNWNWFQLRCMQVGGNANAN

SEQ ID NO: 87677 - protein, 63 aa, Homo sapiens
DVIDVMKRSESWTLKKPKSVSKKLKSVFRVPDLSGMLQVLKELTDVQYYWVYHQRILQTPLWK

SEQ ID NO: 87678 - protein, 220 aa, Homo sapiens
MKTSSPKENCLFLCFTSMKNGQEGFLLGEVKGEAKNSITDSQMDDVEVVYTIDIQKYIPCYQLFSFYNSSGEVNEQALKKILSNVKKNVVGWYKFRRHSDQIMTFRERLLHKNLQEHFSNQDLVFLLLTPSIITESCSTHRLEHSLYKPQKGLFHRVPLVVANLGMSEQLGYKTVSGSCMSTGFSRAVQTHSSKFFEEDGSLKEVHKINEMYASLQEELK

SEQ ID NO: 87679 - protein, 29 aa, Homo sapiens
MEAMSENKMVPSEFSTGPVEKAAKPLPFK

SEQ ID NO: 87680 - protein, 669 aa, Homo sapiens
KDVIMQDFPAEIFLQRPKIVQSLLSLLKLAFGDGKHRLALQSVSCLQQLCMYLRNRLNFHRDPGFFSNKHDTVSQNSSLSYCHEARGTHHSQNPSPGSSSPRPSVVGRTGQRPRGDGQDWDAASSSGSSSHAHVNSRISVHSPLDMGHIDLPELETEDTLELQFQQLSLPQFCVSILESAVPLLRTGSRQVIIRVLELLTEDMTLIGEAISTDIWDDSSLFGIDMKEKLLLVLGALGETMCYHKSSISLEQPEVMLVHHRMAFISISLFAVRLLQTLLPVEKASEFLSEPMSTALFLLSLDMPISLEYPNIHEAVVAYLEQLNSENYSIYKRTAEAVYSIECTCNFLSDIGKEGEKNLLELVELADQALRSFSYHQHFPLIKEIISICSKIWKSAQASPLLQGESQKVLLHMLSHPLPRVKAETYHCCLEITKECLGVHNVTKPVSSLCNGIHFLLHPKVLYEISVFGIQEPESEVNTAAKAILLYLLQGRLMMTALTWNKFIESLCPVIPILQGYADTEDPLGNCILLLSKASSDTEEMLPCTTRLKSMLRLLLVKKPSVRSLALKLLAFHLTSEEGADTKRPLIDARVLSRVTDLFIGKKPIELRLDDRRELVIKLETVEKVYEIFTSDDVDLVLRKSAAEQLAVIMQGCRMFGTTMPHTLEEGFMW

SEQ ID NO: 87681 - protein, 228 aa, Homo sapiens
  MOD_RES (1)..(1): Any amino acid
XESPKSLYSRESVYDLLPKELQLPPSRETSVASMSQTSGGEAGSPPPAVVAADASSAPSSSSMGGACSSFTTSSSPTIYSTSVTDSKAMQVESCSSAVGNNMPGIQGATSSPQPQATLFHNTAGGTMNQLQNSPGSSQQTSGMFLFGIQNNCSQLLTSGPATLPDQLMAISQPGQPQNEGQPPVTTLLSQQMPENSPLASSINTNQNIEKIDLLVSLQNQGNNLTGSF

SEQ ID NO: 87682 - protein, 70 aa, Homo sapiens
  MOD_RES (1)..(1): Any amino acid
XHGACLSGDQAHRLGCGGSPCSPMPRSPEECRRLRTCSECLARHPRTLQPGDGEVVGTTSEEEGGDEINK

SEQ ID NO: 87683 - protein, 252 aa, Homo sapiens [sequence omitted]

SEQ ID NO: 87684 - protein, 601 aa, Homo sapiens
MHCKVSLLDDTVYECVVEKHAKGQDLLKRVCEHLNLLEEDYFGLAIWDNATSKTWLDSAKEIKKQVRGVPWNFTFNVKFYPPDPAQLTEDITRYYLCLQLRQDIVAGRLPCSFATLALLGSYTIQSELGDYDPELHGVDYVSDFKLAPNQTKELEEKVMELHKSYRSMTPAQADLEFLENAKKLSMYGVDLHKAKDLEGVDIILGVCSSGLLVYKDKLRINRFPWPKVLKISYKRSSFFIKIRPGEQEQYESTIGFKLPSYRAAKKLWKVCVEHHTFFRLTSTDTIPKSKFLALGSKFRYSGRTQAQTRQASALIDRPAPHFERTASKRASRSLDGAAAVDSADRSPRPTSAPAITQGQVAEGGVLDASAKKTVVPKAQKETVKAEVKKEDEPPEQAEPEPTEAWKDLDKSQEEIKKHHASISELKKNFMESVPEPRPSEWDKRLSTHSPFRTLNINGQIPTGEGPPLVKTQTVTISDNANAVKSEIPTKDVPIVHTETKTITYEAAQTDDNSGDLDPGVLLTAQTITSETPSSTTTTQITKTVKGGISETRIEKRIVITGDADIDHDQVLVQAIKEAKEQHPDMSVTKVVVHQETEIADE

SEQ ID NO: 87685 - protein, 1056 aa, Homo sapiens
MAVLKLTDQPPLVQAIFSGDPEEIRMLIHKTEDVNTLDSEKRTPLHVAAFLGDAEIIELLILSGARVNAKDNMWLTPLHRAVASRSEEAVQVLIKHSADVNARDKNWQTPLHVAAANKAVKCAEVIIPLLSSVNVSDRGGRTALHHAALNGHVEMVNLLLAKGANINAFDKKDRRALHWAAYMGHLDVVALLINHGAEVTCKDKKGYTPLHAAASNGQINVVKHLLNLGVEIDEINVYGNTALHIACYNGQDAVVNELIDYGANVNQPNNNGFTPLHFAAASTHGALCLELLVNNGADVNIQSKDGKSPLHMTAVHGRFTRSQTLIQNGGEIDCVDKDGNTPLHVAARYGHELLINTLITSGADTAKCGIHSMFPLHLAALNAHSDCCRKLLSSGFEIDTPDKFGRTCLHAAAAGGNVECIKLLQSSGADFHKKDKCGRTPLHYAAANCHFHCIETLVTTGANVNETDDWGRTALHYAAASDMDRNKTILGNAHDNSEELERARELKEKEATLCLEFLLQNDANPSIRDKEGYNSIHYAAAYGHRQCLELLLERTNSGFEESDSGATKSPLHLAAYNGHHQALEVLLQSLVDLDIRDEKGRTALDLAAFKGHTECVEALINQGASIFVKDNVTKRTPLHASVINGHTLCLRLLLEIADNPEAVDVKDAKGQTPLMLAVAYGHIDAVSLLLEKEANVDTVDILGCTALHRGIMTGHEECVQMLLEQEVSILCKDSRGRTPLHYAAARGHATWLSELLQMALSEEDCCFKDNQGYTPLHWACYNGNENCIEVLLEQKCFRKFIGNPFTPLHCAIINDHGNCASLLLGAIDSSIVSCRDDKGRTPLHAAAFADHVECLQLLLRHSAPVNAVDNSGKTALMMAAENGQAGAVDILVNSAQADLTVKDKDLNTPLHLACSKGHEKCALLILDKIQDESLINEKNNALQTPLHVAARNGLKVVVEELLAKGACVLAVDENGHTPALACAPNKDVADCLALILATMMPFSPSSTMMAVNFVCLKKDNLSRTTLSNLGSMVSLCSNNVGSEDGYNENDSDSETF

SEQ ID NO: 87686 - protein, 150 aa, Homo sapiens
MESEDLSGRELTIDSIMNKVRDIKNKFKNEDLTDELSLNKISADTTDNSGTVNQIMMMANNPEDWLSLLLKLEKNSVPLSDALLNKLIGRYSQAIEALPPDKYGQNESFARIQVRFAELKAIQEPDDARDYFQMARANCKKFAFVHISFA

SEQ ID NO: 87687 - protein, 67 aa, Homo sapiens
  MOD_RES (1)..(1): Any amino acid
XEPVAEPEEERPKPSPPQLGPSTFRSLPGLAATSLDGTSRRWEVAQGGRATHGLCVSVHSAAPWCLL

SEQ ID NO: 87688 - protein, 398 aa, Homo sapiens
MRRRQRREWEARRRDILFDYEQYEYHGTSSAMVMFELAWMLSKDLNDMLWWAIVGLTDQWVQDKITQMKYVTDVGVLQRHVSRHNHRNEDEENTLSVDCTRISFEYDLRLVLYQHWSLHDSLCNTSYTAARFKLWSVHGQKRLQEFLADMGLPLKQVKQKFQAMDISLKENLREMIEESANKFGMKDMRVQTFSIHFGFKHKFLASDVVFATMSLMESPEKDGSGTDHFIQALDSLSRSNLDKLYHGLELAKKQLRATQQTIASCLCTNLVISQGPFLYCSLMEGTPDVMLFSRPASLSLLSKHLLKSFVCSTKNRRCKLLPLVMAAPLSMEHGTVTVVGIPPETDSSDRKNFFGRAFEKAAESTSSRMLHNHFDLSVIELKAEDRSKFLDALISLLS

SEQ ID NO: 87689 - protein, 245 aa, Homo sapiens
MPSPRPVLLRGARAALLLLLPPRLLARPSLLLRRSLSAASCPPISLPAAASRSSMDGAGAEEVLAPLRLAVRQQGDLVRKLKEDKAPQVDVDKAVAELKARKRVLEAKELALQPKDDIVDRAKMEDTLKRRFFYDQAFAIYGGVSGLYDFGPVGCALKNNIIQTWRQHFIQEEQILEIDCTMLTPEPVLKTSGHVDKFADFMVKDVKNGECFRADHLLKAHLQKLMSDKKCSVEKKSEMESVLAQ

SEQ ID NO: 87690 - protein, 36 aa, Homo sapiens
MEDMEQAFETCQAAERQRLLFFKDMLLTLHQHLDLS

SEQ ID NO: 87691 - protein, 197 aa, Homo sapiens
MPQTVILPGPAPWGFRLSGGIDFNQPLVITRDGNYFEHKHNIRPKPFVIPGRSSEPTASVPPESDVYRMLHDNRNEPTQPRQSGSFRVLQGMVDDGSDDRPAGTRSVRAPVTKVHGGSGGAQRMPLCDKCGSGIVGAVVKARDKYRHPECFVCADCNLNLKQKGYFFIEGELYCETHARARTKPPEGYDTVTLYPKA

SEQ ID NO: 87692 - protein, 53 aa, Homo sapiens
MSSFGYRTLTVALFTLICCPGVNEFQRQRVPASKAGHPDTATHFGGCGQVLHH

SEQ ID NO: 87693 - protein, 217 aa, Homo sapiens
  MOD_RES (1)..(1): Any amino acid
XEFSQDQHGSRFIQLKLERATPAERQLVFNEILQAAYQLMVDVFGNYVIQKFFEFGSLEQKLALAERIRGHVLSLALQMYGCRVIQKALEFIPSDQQVFALSTHPYGCRVIQRILEHCLPDQTLPILEELHQHTEQLVQDQYGNYVIQHVLEHGRPEDKSKIVAEIRGNVLVLSQHKFASNVVEKCVTHASRTERAVLIDEVCTMNDGPHSALYTMM

SEQ ID NO: 87694 - protein, 109 aa, Homo sapiens
MDSVMPSQEPPVDDKNEDADLPSEETDGIAYISSSRKHDSIKDDSEDLKPVIDGMDGIKISQGLGLQDFDLIRVIGRGSYAKVLLVRLKKNDQIYAMKVVKKELVHDDE

SEQ ID NO: 87695 - protein, 281 aa, Homo sapiens
MGADGMYDKLRMLNGQTGSWGTRPGWYPGTSVPGQPTQDGCQQQEGGGENTNSISSNGEDSDEAQMRLQLKRKLQRNRTSFTQEQIEALEKEFERTHYPDVFARERLAAKIDLPEARIQVWFSNRRAKWRREEKLRNQRRQASNTPSHIPISSSFSTSVYQPIPQPTTPVSSFTSGSMLGRTDTALTNTYSALPPMPSFTMANNLPMQPPVPSQTSSYSCMLPTSPSVNGRSYDTYTPPHMQTHMNSQPMGTSGTTSTGLISPGVSVPVQVPGSEPDMSQY

SEQ ID NO: 87696 - protein, 69 aa, Homo sapiens
APSGGGHGVFPAHHQEVDTRFVLSPIRRWTLGLPCAPSGGGHSVYPEPHQEVDTRFALCPIRRWTLGFS

SEQ ID NO: 87697 - protein, 662 aa, Homo sapiens
MLKLSGEGLRDSYHSRRDQIALKNLQSDVTEAKSDFTKETLASQNTKMISSIVISQMIDENKSRENRASLPLPCAIAQSRAHHAKQSLANRSGVNIHRAFALLPGRLGIPAPSDERGPEAELPPKEERPCGGPRRGFASITITARRVGPPARALVWGTAGDSLCPKCRAEDTLFQAPPALANGAHPGRHQRSFACTEFSRNSSVVRLKVPEAHTGLCERRKYWVTHADDKETSFSPDTPLSGKSPLVFSSCVHLRVSQQCPDSIYYVDKSLSVPIEPPQIASPKMHRSVLSLNLNCSSHRLTADGVDGLVNREPISEALKQELLEGDQDLVGQRWNPGLQESHLKETPSLRRVHLGTGACPWSGSFPLENTELANVGANQVTVRKGEKDHTTHCHASDHANQLSIHIPGWSYRAVHTKVFSGSSKRQQGEVCMTVSAPPVEQKPTRHFLPIGDSSPSDDCLSRDLSEPTERRHQSFLKPRILFPGFLCPLQDVCASLQEDNGVQIESKFPKGDYTCCDLVVKIKECKKSEDPTTPEPSPAAPSPAPRDGAGSPGLSEDCSESQQTPARSLTLQEALEVRKPQFISRSQERLKKLEHMVQQRKAQRKEDLRQKQSLLPIRTSKKQFTIPHPLSDNLFKPKERCISEKEMHMRSKRIYDNLPEV

SEQ ID NO: 87698 - protein, 30 aa, Homo sapiens
LLPLVMQGVSRAEMGTADLGPSSVLSTDVF

SEQ ID NO: 87699 - protein, 155 aa, Homo sapiens
MSDILRELLCVSEKAANIARACRQQEALFQLLIEEKKEGEKNKKFAVDFKTLADVLVQEVIKQNMENKFPGLEKNIFGEESNEFTNDWGEKITLRLCSTEEETAELLSKVLNGNKVASEALARVVHQDVAFTDPTLDSTEINVPQDILGIWVDPI

SEQ ID NO: 87700 - protein, 435 aa, Homo sapiens
MSKSKVDNQFYSVEVGDSTFTVLKRYQNLKPIGSGAQGIVCAAYDAVLDRNVAIKKLSRPFQNQTHAKRAYRELVLMKCVNHKNIISLLNVFTPQKTLEEFQDVYLVMELMDANLCQVIQMELDHERMSYLLYQMLCGIKHLHSAGIIHRDLKPSNIVVKSDCTLKILDFGLARTAGTSFMMTPYVVTRYYRAPEVILGMGYKENVDIWSVGCIMGEMVRHKILFPGRDYIDQWNKVIEQLGTPCPEFMKKLQPTVRNYVENRPKYAGLTFPKLFPDSLFPADSEHNKLKASQARDLLSKMLVIDPAKRISVDDALQHPYINVWYDPAEVEAPPPQIYDKQLDEREHTIEEWKELIYKEVMNSEEKTKNGVVKGQPSPSGAAVNSSESLPPSSSVNDISSMSTDQTLASDTDSSLEASAGPLGCCRMPMRNMKPR

SEQ ID NO: 87701 - protein, 137 aa, Homo sapiens
  MOD_RES (1)..(1): Any amino acid
XADFDEIYEEEEDEERALEEQLLKYSPDPVVVRGSGHVTVFGLSNKFESEFPSSLTGKVAPEEFKASINRVNSCLKKNLPVNTRRSIEKLLEWENNRLYHKLCLHWRLSKRKCETNNMMEYVILIEFLPKTPIFRPD

SEQ ID NO: 87702 - protein, 127 aa, Homo sapiens
MREYKLVVLGSGGVGKSALTVQFVQGIFVEKYDPTIEDSYRKQVEVDAQQCMLEILDTAGTEQFTAMRDLYMKNGQGFALVYSITAQSTFNDLQDLREQILRVKDTDDVPMILVGNKCDLEDERVVG

SEQ ID NO: 87703 - protein, 66 aa, Homo sapiens
NTFMKISVLARQHVSQKFLTNNNLKMYYEFCLFLLKPIIWHNIRKPGDPVTSSQIAASRPSLIQHV

SEQ ID NO: 87704 - protein, 44 aa, Homo sapiens
MATTAELFEEPFVADEYIERLVWRTPGGGSRGGPEAFDPKRNSR

SEQ ID NO: 87705 - protein, 25 aa, Homo sapiens
MWMHVAKVHPKGGEMVGAIRNAAFL

SEQ ID NO: 87706 - protein, 145 aa, Homo sapiens
MSSFGAGKTKEVIFSVAWPSTQIWSPSPRDRWREPLRKGSRCRPTCASGTQFPSPPYTCWAWGCLTEPCAVWASPNLMEATCCVQWMNPMITCSRCGTGPRRPRWWMSSAPMRLYWWPPSTPRTPLCLSPAGNLTSTSGPWRGAA

SEQ ID NO: 87707 - protein, 201 aa, Homo sapiens
MATSRYEPVAEIGVGAYGTVYKARDPHSGHFVALKSVRVPNGGGGGGGLPISTVREVALLRRLEAFEHPNVVRLMDVCATSRTDREIKVTLVFEHVDQDLRTYLDKAPPPGLPAETIKDLMRQFLRGLDFLHANCIVHRDLKPENILVTSGGTVKLADFGLARIYSYQMALTPVTRACCVAQAGLQWHDHSSLQLQPPGLK

SEQ ID NO: 87708 - protein, 50 aa, Homo sapiens
SRDRKMVGDVTGAQAYASTAKCLNIWALILGIFMTILLIIIPVLVVQAQR

SEQ ID NO: 87709 - protein, 106 aa, Homo sapiens
MMLSLNNLQNIIYNPVIPFVGTIPDQLDPGTLIVIRGHVPSDADRFQVDLQNGSSMKPRADVAFHFNPRFKRAGCIVCNTLINEKWGREEITYDTPFKREKSFEIV

SEQ ID NO: 87710 - protein, 734 aa, Homo sapiens
MLHHIEEPCSLGAHAAVIVPPTWIIKVKKPQNSLKASNRKKKRTSFKRKASKRGMEQENKGRPFVIKPISSPLMKPLLVFVNPKSGGNQGTKVLQMFMWYLNPRQVFDLSQEGPKDALELYRKVPNLRILACGGDGTVGWILSILDELQLSPQPPVGVLPLGTGNDLARTLNWGGGYTDEPVSKILCQVEDGTVVQLDRWNLHVERNPDLPPEELEDGVCKLPLNVFNNYFSLGFDAHVTLEFHESREANPEKFNSRFRNKMFYAGAAFSDFLQRSSRDLSKHVKVVCDGTDLTPKIQELKFQCIVFLNIPRYCAGTMPWGNPGDHHDFEPQRHDDGYIEVIGFTMASLAALQVGGHGERLHQCREVMLLTYKSIPMQVDGEPCRLAPAMIRISLRNQANMVQKSKRRTSMPLLNDPQSVPDRLRIRVNKISLQDYEGFHYDKEKLREASISDWLRTIAGELVQSFGAIPLGILVVRGDCDLETCRMYIDRLQEDLQSVSSGSQRVHYQDHETSFPRALSAQRLSPRWCFLDATSADRFYRIDRSQEHLHFVMEISQDEIFILDPDMVVSQPAGTPPGMPDLVVEQASGSPVSSEDHAILQAVIAGDLMKLIESYKNGGSLLIQGPDHCSLLHYAAKTGNGEIVKYILDHGPSELLDMADSETGETALHKAACQRNRAVCQLLVDAGASLRKTDSKGKTPQERAQQAGDPDLAAYLESRQNYKVIGHEDLETAV

SEQ ID NO: 87711 - protein, 413 aa, Homo sapiens
MMPQLQFKDAFWCRDFTAHTGYEVLLQRLLDGRKMCKDMEELLRQRAQAEERYGKELVQIARKAGGQTEINSLRASFDSLKQQMENVGSSHIQLALTLREELRSLEEFRERQKEQRKKYEAVMDRVQKSKLSLYKKAMESKKTYEQKCRDADDAEQAFERISANGHQKQVEKSQNKARQCKDSATEAERVYRQSIAQLEKVRAEWEQEHRTTCEAFQLQEFDRLTILRNALWVHSNQLSMQCVKDDELYEEVRLTLEGCSIDADIDSFIQAKSTGTEPPAPVPYQNYYDREVTPLTSSPGIQPSCGMIKRFSGLLHGSPKTTSLAASAETLTPTPERNEGVYTAIAVQEIQGNPASPAQEYRALYDYTAQNPDELDLSAGDILEVILEGEDGWWTVERNGQRGFVPGSYLEKL

SEQ ID NO: 87712 - protein, 1941 aa, Homo sapiens
MMDVSELGESARYLRQGYQEMTKVHTIPWDGKKRVWVPDEQDAYVEAEVKSEATGGRVTVETKDQKVLMVREAELQPMNPPRFDLLEDMAMMTHLNEASVLHNLRQRYARWMIYTYSGLFCVTINPYKWLPVYTASVVAAYKGKRRSDSPPHIYAVADNAYNDMLRNRDNQSMLITGESGAGKTVNTKRVIQYFAIVAALGDGPGKKAQFLATKTGGTLEDQIIEANPAMEAFGNAKTLRNDNSSRFGKFIRIHFGPSGKLASADIDSYLLEKSRVIFQLPGERSYHVYYQILSGRKPELQDMLLLSMNPYDYHFCSQGVITVDNMNDGEELIATDHAMDILGFSVDEKCACYKIVGALLHFGNMKFKQKQREEQAEADGTESADKAAYLMGVSSGDLLKGLLHPRVRVGNEYVTKGQSVEQVVFAVGALAKATYDRLFRWLVSRINQTLDTKLPRQFFIGVLDIAGFEIFEFNSFEQLCINFTNEKLQQFFNQHMFVLEQEEYKREGIDWVFIDFGLDLQPCIDLIEKPLGILSILEEECMFPKASDASFRAKLYDNHAGKSPNFQQPRPDKKRKYQAHFEVVHYAGVVPYSIVGWLEKNKDPLNETVVPIFQKSQNRLLATLYENYAGSCSTEPPKSGVKEKRKKAASFQTVSQLHKENLNKLMTNLRATQPHFVRCIVPNENKTPGVMDAFLVLHQLRCNGVLEGIRICRQGFPNRLLYTDFRQRYRILNPSAIPDDTFMDSRKATEKLLGSLDLDHTQYQFGHTKVFFKAGLLGVLEELRDQRLAKVLTLLQARSRGRLMRLEYQRLLGGRDALFTIQWNIRAFNAVKNWSWMKLFFKMKPLLRSAQAEEELAALRAELRGLRGALAAAEAKRQELEETHVSITQEKNDLALQLQAEQDNLADAEERCHLLIKSKVQLEGKVKELSERLEDEEEVNADLAARRRKLEDECTELKKDIDDLELTLAKAEKEKQATENKVKNLTEEMAALDESVARLTKEKKALQEAHQQALGDLQAEEDRVSALTKAKLRLEQQVEDLECSLEQEKKLRMDTERAKRKLEGDLKLTQESVADAAQDKQQLEEKLKKKDSELSQLSLRVEDEQLLGAQMQKKIKELQARAEELEEELEAERAARARVEKQRAEAARELEELSERLEEAGGASAGQREGCRKREAELGRLRRELEEAALRHEATVAALRRKQAEGAAELGEQVDSLQRVRQKLEKEKSELRMEVDDLAANVETLTRAKASAEKLCRTYEDQLSEAKIKVEELQRQLADASTQRGRLQTESGELSRLLEEKECLISQLSRGKALAAQSLEELRRQLEEESKAKSALAHAVQALRHDCDLLREQHEEEAEAQAELQRLLSKANAEVAQWRSKYEADAIQRTEELEEAKKKLALRLQEAEEGVEAANAKCSSLEKAKLRLQTESEDVTLELERATSAAAALDKKQRHLERALEERRRQEEEMQRELEAAQRESRGLGTELFRLRHGHEEALEALETLKRENKNLQEEISDLTDQVSLSGKSIQELEKTKKALEGEKSEIQAALEEAEGALELEETKTLRIQLELSQVKAEVDRKLAEKDEECANLRRNHQRAVESLQASLDAETRARNEALRLKKKMEGDLNDLELQLGHATRQATEAQAATRLMQAQLKEEQAGRDEEQRLAAELHEQAQALERRASLLAAELEELRAALEQGERSRRLAEQELLEATERLNLLHSQNTGLLNQKKKLEADLAQLSGEVEEAAQERREAEEKAKKAITDAAMMAEELKKEQDTSAHLERMKKTLEQTVRELQARLEEAEQAALRGGKKQVQKLEAKVRELEAELDAEQKKHAEALKGVRKHERRVKELAYQAEEDRKNLARMQDLVDKLQSKVKSYKRQFEEAEQQANTNLAKYRKAQHELDDAEERADMAETQANKLRARTRDALGPKHKE

SEQ ID NO: 87713 - protein, 271 aa, Homo sapiens
MAEAQSGTGQLQEQKKGLLIAVSVSVDKIISHFGAARNLVQKAQLGDSRLSPDVGHLVLTTLCPALHALVADGLKPFRKDLITGQRRSSPWSVVEASVKPGSSTRSLGTLYSQVSRLAPLSSSRSRFHAFILGLLNTKQLELWFSSLQEDAGSWWEQLTQASRVYASGGTEGFPLSRWAPGRHGTAAEEGAQERPLPTDEMAPGRGLWLGRLFGVPGGPAENENGALKSRRPSSWLPPTVSVLALVKRGAPPEMPSPQELEASAPRMVQTH

SEQ ID NO: 87714 - protein, 111 aa, Homo sapiens
MLGAALRRCAVAATTRADPRGLLHSARTPGPAVGINTLVTYDMVPEPKIIDAALRACRRLNDFASTVRILEVVKDKAGPHKEIYPYVIQELRPTLNELGISTPEELGLDKV

SEQ ID NO: 87715 - protein, 28 aa, Homo sapiens
EKYRPVKLNEIVGNEDTVSRLESSRSKF

SEQ ID NO: 87716 - protein, 67 aa, Homo sapiens
  MOD_RES (1)..(1): Any amino acid
XINDIAFKPDGTQLILAAGSRLLVYDTSDGTLLQPLKGHKDTVYCVAYAKDGNESSSVACLGHAAGQ

SEQ ID NO: 87717 - protein, 78 aa, Homo sapiens
  MOD_RES (1)..(1): Any amino acid
XRSGSGNFGGGRGGGFGGNDNFGRGGNFSGRGGGSYNDFGNYNNQSSNFGPMKGGNFGGRSSGPYGGGGQYFAKPRNQ

SEQ ID NO: 87718 - protein, 116 aa, Homo sapiens
MDGLKDGIILCEFINKLQPGSVKKINESTQNWHQLENIGNFIKAITKYGVKPHDIFEANDLFENTNHTQVQSTLLALASMAKTKGNKVNVGVKYAEKQERKFEPGKLREGRNIIGL

SEQ ID NO: 87719 - protein, 42 aa, Homo sapiens
  MOD_RES (1)..(1): Any amino acid
XAFGVTEPGCYGVIDVDTGKSTLFVPRLPASHATWMGKLPAS

SEQ ID NO: 87720 - protein, 389 aa, Homo sapiens
MAPSHRASQVGFCPTPERPLWRLPPTCRPRRMSVCYRPPGNETLLSWKTSRATGTAFLLLAALLGLPGNGFVVWSLAGWRPARGRPLAATLVLHLALADGAVLLLTPLFVAFLTRQAWPLGQAGCKAVYYVCALSMYASVLLTGLLSLQRCLAVTRPFLAPRLRSPALARRLLLAVWLAALLLAVPAAVYRHLWRDRVCQLCHPSPVHAAAHLSLETLTAFVLPFGLMLGCYSVTLARLRGARWGSGRHGARVGRLVSAIVLAFGLLWAPYHAVNLLQAVAALAPPEGALAKLGGAGQAARAGTTALAFFSSSVNPVLYVFTAGDLLPRAGPRFLTRLFEGSGEARGGGRSREGTMELRTTPQLKVVGQGRGNGDPGGGMEKDGPEWDL

SEQ ID NO: 87721 - protein, 277 aa, Homo sapiens
MATMGLLMLLTLAASPHFLSICFHHVCVHTFRGPHWCEYCANFMWGLIAQGVKCADCGLNVHKQCSKMVPNDCKPDLKHVKKVYSCDLTTLVKAHTTKRPMVVDMCIREIESRGLNSEGLYRVSGFSDLIEDVKMAFDRDGEKADISVNMYEDINIITGALKLYFRDLPIPLITYDAYPKFIESAKIMDPDEQLETLHEALKLLPPAHCETLRYLMAHLKRVTLHEKENLMNAENLGIVFGPTLMRSPELDAMAALNDIRYQRLVVELLIKNEDILF

SEQ ID NO: 87722 - protein, 337 aa, Homo sapiens
MYAMKYMNKQKCIERDEVRNVFRELQIMQGLEHPFLVNLWYSFQDEEDMFMVVDLLLGGDLRYHLQQNVHFTEGTVKLYICELALALEYLQRYHIIHRDIKPDNILLDEHAPEVFQVYMDRGPGYSYPVDWWSLGITAYELLRGWRPYEIHSVTPIDEILNMFKVERVHYSSTWCKGMVALLRKLLTKDPESRVSSLHDIQSVPYLADMNWDAVFKKALMPGFVPNKGRLNCDPTFELEEMILESKPLHKKKKRLAKNRSRDGTKDSCPLNGHLQHCLETVREEFIIFNREKLRRQQGQGSQLLDTDSRGGGQAQSKLQDGCNNNLLTHTCTRGCSS

SEQ ID NO: 87723 - protein, 179 aa, Homo sapiens
  MOD_RES (1)..(1): Any amino acid
XASKPSLVQQKPTAYVRPMDGQDQAPDESPKLKSSSETSVHCTSYRGVPASKPEPARAKAKLSKFSIPKQGEESRSGETNSCVEEIIREMTWLPPLSAIQAPGKVEPTKFPFPNKDSQLVSSGHNNPKKGDAEPESPDNGTSNTSMLEDDLKLSSDEEENEQQAAQRTALRALSDSLSW

SEQ ID NO: 87724 - protein, 181 aa, Homo sapiens
MRRVVRQSKFRHVFGQAVKNDQCYDDIRVSRVTWDSSFCAVNPRFVAIIIEASGGGAFLVLPLHKTGRIDKSYPTVCGHTGPVLDIDWCPHNDQVIASGSEDCTVMVWQIPENGLTLSLTEPVVILEGHSKRVGIVAWHPTARNVLLSAGCDNAIIIWNVGTGEALINLDDMHSDMIYNVS

SEQ ID NO: 87725 - protein, 1891 aa, Homo sapiens
MTTMLQKSDSNASFLRAARAGNLDKVVEYLKGGIDINTCNQNGLNALHLAAKEGHVGLVQELLGRGSSVDSATKKGNTALHIASLAGQAEVVKVLVKEGANINAQSQNGFTPLYMAAQENHIDVVKYLLENGANQSTATEDGFTPLAVALQQGHNQAVAILLENDTKGKVRLPALHIAARKDDTKSAALLLQNDHNADVQSKMMVNRTTESGFTPLHIAAHYGNVNVATLLLNRGAAVDFTARNGITPLHVASKRGNTNMVKLLLDRGGQIDAKTRDGLTPLHCAARSGHDQVVELLLERGAPLLARTKNGLSPLHMAAQGDHVECVKHLLQHKAPVDDVTLDYLTALHVAAHCGHYRVTKLLLDKRANPNARALNGFTPLHIACKKNRIKVMELLVKYGASIQAITESGLTPIHVAAFMGHLNIVLLLLQNGASPDVTNIRGETALHMAARAGQVEVVRCLLRNGALVDARAREEQTPLHIASRLGKTEIVQLLLQHMAHPDAATTNGYTPLHISAREGQVDVASVLLEAGAAHSLATKKGFTPLHVAAKYGSLDVAKLLLQRRAAADSAGKNGLTPLHVAAHYDNQKVALLLLEKGASPHATAKNGYTPLHIAAKKNQMQIASTLLNYGAETNIVTKQGVTPLHLASQEGHTDMVTLLLDKGANIHMSTKSGLTSLHLAAQEDKVNVADILTKHGADQDAHTKLGYTPLIVACHYGNVKMVNFLLKQGANVNAKTKNGYTPLHQAAQQGHTHIINVLLQHGAKPNATTANGNTALAIAKRLGYISVVDTLKVVTEEVTTTTTTITEKHKLNVPETMTEVLDVSDEEGDDTMTGDGGEYLRPEDLKELGDDSLPSSQFLDGMNYLRYSLEGGRSDSLRSFSSDRSHTLSHASYLRDSAVMDDSVVIPSHQVSTLAKEAERNSYRLSWGTENLDNVALSSSPIHSGRASPCLERDNSSFLVSFMVDARGGAMRGCRHNGLRIIIPPRKCTAPTRVTCRLVKRHRLATMPPMVEGEGLASRLIEVGPSGAQFLGPVIVEIPHFAALRGKERELVVLRSENGDSWKEHFCDYTEDELNEILNGMDEVLDSPEDLEKKRICRIITRDFPQYFAVVSRIKQDSNLIGPEGGVLSSTVVPQVQAVFPEGALTKRIRVGLQAQPMHSELVKKILGNKATFSPIVTLEPRRRKFHKPITMTIPVPKASSDVMLNGFGGDAPTLRLLCSITGGTTPAQWEDITGTTPLTFVNECVSFTTNVSARFWLIDCRQIQESVTFASQVYREIICVPYMAKFVVFAKSHDPIEARLRCFCMTDDKVDKTLEQQENFAEVARSRDVEVLEGKPIYVDCFGNLVPLTKSGQHHIFSFFAFKENRLPLFVKVRDTTQEPCGRLSFMKEPKSTRGLVHQAICNLNITLPIYTKESESDQEQEEEIDMTSEKNPQDEQERIEERLAYIADHLGFSWTELARELDFTEEQIHQIRIENPNSLQDQSHALLKYWLERDGKHATDTNLVECLTKINRMDIVHLMETNTEPLQERISHSYAEIEQTITLDHSEGFSVLQEELCTAQHKQKEEQAVSKESETCDHPPIVSEEDISVGYSTFQDGVPKTEGDSSATALFPQTHKEQVQQDFSGKMQDLPEESSLEYQQEYFVTTPGTETSETQKAMIVPSSPSKTPEEVSTPAEEEKLYLQTPTSSERGGSPIIQEPEEPSEHREESSPRKTSLVIVESADNQPETCERLDEDAAFEKGDDMPEIPPETVTEEEYIDEHGHTVVKKVTRKIIRRYVSSEGTEKEEIMVQGMPQEPVNIEEGDGYSKVIKRVVLKSDTEQSEVTLCEPSILSSTSQFQAEPVEGRRVSKVVKTTVVLGERMEKHLGDSSLATDLPSAKDDFEEDNNE

SEQ ID NO: 87726 - protein, 103 aa, Homo sapiens
MSIEKIWAREILDSRGNPTVEVDLYTAKGLFRAAVPSGASTGIYEALELRDGDKQRYLGKGVLKAVDHINSTIAPALISSGLSVVEQEKLDNLMLELDGTENK

SEQ ID NO: 87727 - protein, 102 aa, Homo sapiens
MRAIEIYTDMGRFTIAAKHHISIAEIYETELVDIEKAIAHYEQSADYYKGEESNSSANKCLLKVAGYAALLEQYQKAIDIYEQVGTNAMDSPLLKYSAKDYF

SEQ ID NO: 87728 - protein, 216 aa, Homo sapiens
MEPQPGGARSCRRGAPGGACELGPAAEAAPMSLAIHSTTGTRYDLAVPPDETVEGLRKRLSQRLKVPKERLALLHKDTRLSSGKLQEFGVGDGSKLTLVPTVEAGLMSQASRPEQSVMQALESLTETQVSDFLSGRSPLTLALRVGDHMMFVQLQLAAQHAPLQHRHVLAAAAAAAAARGDPSIASPVSSPCRPVSSAARVPPVPTSPSPASPSPI

SEQ ID NO: 87729 - protein, 232 aa, Homo sapiens
PEDIYPSNPTDDDVSSGSSSERSSTSGGYIFYTFSTVHPIPDEDSPWITDSTDRIPATNMDSSHSITLQPTANPNTGLVEDLDRTGPLSMTTQQSNSQSFSTSHEGLEEDKDHPTTSTLTSSRDQDTFHPSGGSHTTHGSESDGHSHGSQEGGANTTSGPIRTPQIPEWLIILASLLALALILAVCIAVNSRRRCGQKKKLVINSGNGAVEDRKPSGLNGEASKSQEMVHLV

SEQ ID NO: 87730 - protein, 79 aa, Homo sapiens
  MOD_RES (1)..(1): Any amino acid
XENQSLHYDFSNLSSVGSLMNGPSFTSKGTKYFHFFNISLCGHEKKKTFKRKLVQNKKETCRAKYQLIRGRRWLSVPTI

SEQ ID NO: 87731 - protein, 411 aa, Homo sapiens
MSLMVVSMACVGFFLLQGAWPHEGGQDKPFLSAWPSPVVSEGEHVALQCRSRLGFNEFSLSKEDGMPVPELYNRVFRNTVFIGPVTPAHAGTYRCRGSHPHFLTGWSAPSNPLVIMVTGVHRKPSLLAHPGPLVKSEETVILQCWSDVMFEHFLLHREGISKDPSRLVGQIHDGVSKANFSIGPMMLALAGTYRCYGSVTHTSYQLSAPSDPLDIVVTGPYEKPSLSAQPGPKVQAGESVTLSCSSRSSYDMYHLSREGGAHERRLPAVRKVNRTFQADFPLGPATHGGTYRCFGSFRHSPYELSDPSDPLLVSVTGNPRHLHVLIGTSVVIILFILLLFFLLHLWYSNKKNAAVMDQEPAGNRTANSEDSDEQDPQEVTYAQLDHCVFTQRKITRPSQRPKTPPTDTSMY

SEQ ID NO: 87732 - protein, 194 aa, Homo sapiens
MEHAFTPLEPLLSTGNLKYCLVILNQPLDNYFRHLWNKALLRACADGGANRLYDITEGERESFLPEFINGDFDSIRPEVREYYATKGCELISTPDQDHTDFTKCLKMLQKKIEEKDLKGKHRLHVDTGMEGDWCGLIPVGQPCMQVTTTGLKWNLTNDVLAFGTLVSTSNTYDGSGVVTVETDHPLLWTMAIKS

SEQ ID NO: 87733 - protein, 266 aa, Homo sapiens
ELLKIICAFQLDTGLEYANSYNFAKKENNSPEHLKDEVSIIQSMGYRNRAKRLLQSEPENPSLQETSLSVQLSNLGTVRTLRTKQRIQPQKTSVYIELAACEFSETDVTNTEHHQPSNNDLNTTEKRAAERHPEKYQGEAASGCESETSVSEDCSGLSSQSDILTTQQRDTMQHNLIKLQQEMAELEAVLEQHGSQPSNSYPSIISDSSALEDLRNPEQSTSEKAVLTSQKSSEYPISQNPEGLSADKFEVSADSSTSKNKEPGVE

SEQ ID NO: 87734 - protein, 247 aa, Homo sapiens
MRQAGRYLPEFRETRAAQDFFSTCRSPEACCELTLQPLRRFPLDAAIIFSDILVVPQALGMEVTMVPGKGPSFPEPLREEQDLERLRDPEVVASELGYVFQAITLTRQRLAGRVPLIGFAGAPWTLMTYMVEGGGSSTMAQAKRWLYQRPQASHQLLRILTDALVPYLVGQVVAGAQALQLFESHAGHLGPQLFNKFALPYIRDVAKQVKARLREAGLAPVPMIIFAKDGHFALEELAQAGYEVVGL

SEQ ID NO: 87735 - protein, 491 aa, Homo sapiens
MLWWEEVEDCYEREDVQKKTFTKWVNAQFSKFGKQHIENLFSDLQDGRRLLDLLEGLTGQKLPKEKGSTRVHALNNVNKALRVLQNNNVDLVNIGSTDIVDGNHKLTLGLIWNIILHWQVKNVMKNIMAGLQQTNSEKILLSWVRQSTRNYPQVNVINFTTSWSDGLALNALIHSHRPDLFDWNSVVCQQSATQRLEHAFNIARYQLGIEKLLDPEDVDTTYPDKKSILMYITSLFQVLPQQVSIEAIQEVEMLPRPPKVTKEEHFQLHHQMHYSQQHLEAPEDKSFGSSLMESEVNLDRYQTALEEVLSWLLSAEDTLQAQGEISNDVEVVKDQFHTHEGYMMDLTAHQGRVGNILQLGSKLIGTGKLSEDEETEVQEQMNLLNSRWECLRVASMEKQSNLHRVLMDLQNQKLKELNDWLTKTEERTRKMEEEPLGPDLEDLKRQVQQHKVLQEDLEQEQVRVNSLTHMVVVVDESSGDHATAALEEQLK

SEQ ID NO: 87736 - protein, 376 aa, Homo sapiens
MEVLELRTYRDLQYVRGMETLMRSLDARLRAADGSLSAKSFQELKDRMTELLPLSSVLEQYKADTRTIVRLREEVRNLSGSLAAIQEEMGAYGYEDLQQRVMALEARLHACAQKLGCGKLTGVSNPITVRAMGSRFGSWMTDTMAPSADSRVWYMDGYYKGRRVLEFRTLGDFIKGQNFIQHLLPQPWAGTGHVVYNGSLFYNKYQSNVVVKYHFRSRSVLVQRSLPGAGYNNTFPYSWGGFSDMDFMVDESGLWAVYTTNQNAGNIVVSRLDPHTLEVMRSWDTGYPKRSAGEAFMICGVLYVTNSHLAGAKVYFAYFTNTSSYEYTDVPFHNQYSHISMLDYNPRERALYTWNNGHQVLYNVTLFHVISTSGDP

SEQ ID NO: 87737 - protein, 258 aa, Homo sapiens
MVITEVAEGPVDGSEKELGSNSPPQRNWKGIAIALLVILVVCSLITMSVILLTPDELTNSSETRLSLEDLFRKDFVLHDPEARWINDTDVVYKSENGHVIKLNIETNATTLLLENTTFVTFKASRHSVSPDLKYVLLAYDVKQIFHYSYTASYVIYNIHTREVWELNPPEVEDSVLQYAAWGVQGQQLIYIFENNIYYQPDIKSSSLRLTSSGKEEIIFNGIADWLYEEELLHSHIAHWWSPDGERLAFLMINDSLVP

SEQ ID NO: 87738 - protein, 191 aa, Homo sapiens
MGRVRTKTVKKAARVIIEKYYTRLGNDFHTNKRVCEEIAIIPSKKLRNKIAGYVTHLMKRIQRGPVRGISIKLQEEERERRDNYVPEVSALDQEIIEVDPDTKEMLKLLLAYVAPFVSALAESACFSSVKAFLWCLHANHSEMSFGPFPGLRQSVQPSGHSAYSWDEFQNASGTCLNFFCSAVLFSINLGQ

SEQ ID NO: 87739 - protein, 84 aa, Homo sapiens
  MOD_RES (1)..(1): Any amino acid
XTDVNFQGKNLDTVKVWMSGGGGRGKPTEDVQRLLQTQGSSLHVGSDLLKFMEPVTMQESGTFAFRTPKLSHDANETLPLHLYV

SEQ ID NO: 87740 - protein, 214 aa, Homo sapiens
VNGVALQGAEHHEAVEALRGAGTAVQMRVWRERMVEPENAVTITPLRPEDDYSPRERRGGGLRLPLLPPESPGPLRQRHVACLARSERGLGFSIAGGKGSTPYRAGDAGIFVSRIAEGGAAHRAGTLQINGVDVTEARHDHAVSLLTAASPTIALLLEREAGGPLPPSPLPHSSPPTAAVATTSITTATPGVPGLPSLAPSLLAAALEGPYPVE

SEQ ID NO: 87741 - protein, 1886 aa, Homo sapiens
MSTIPRHFGLKYKEESYMFKELEKVRQETKKDFLRFKQKLASKPAVDESPVHSLHAPGPARPARVSCAAARTSRRYPSLKGPAMSAAALLQEVLGGAPRPSGLGEAAAPGKTRSFRPRDFYLRSSAFLRHQALKKPPVIASGFGTARPVVLLPPPEPPVKRRARGVLESSRHAAPRRVFHLGREREQSQEVAPLAGPCMAKERKASSVSAEDGYMEASSGRRKVRIRSNFVSESGAREAREAAGLGAQGEQESWPPSDAREAAWQALLPSRVIPTSIEEIIASLQSEAQLASDQTIKELIRSVLGQNYDITMEDISLMGKMYLKTSPMQAETPEIQAEYKFQMGAEESQMSVHKELSETMSSILQIEQEDIEWGPSEAESIVFKPQEISQVQPAEELSKPLEDGQPTSDSKEAKWVSLTAKSPEFLQIEGKEIKRMRKRKSLRPRKSSKPLCDKKLHKKIPQDYSMPHLHDLCTTIPAQELPVDLRLASRVYHTANRKGHDTLLGKFGTSFLDDRFTDEEQTDRILYGIPVMDDNQEYVHIPPTPQGIPPELAQGTRERAHKPHLEVLGEEMYAYPEFTKLFWNTAAPKFSVPESVMKETLYPKYESVQASRLLTDKLSYKSSVITLHQHSRTNFWCFLPRKSASFESIQKWFSAQPTQLRRVKSSVDLRKEKIIAPLEIKNDMQSSIKEVMFQKAKELKRQLQLTKQNKTEEPNYVKESIDDIFDNMCEKHSLRNLSLTLIEASKKAGISYIVYPKKKKMRWKKRLKQQKLIFVHEELSKPPKSLERSASHGILPGQKKYLFKVPLYERQIRCPSLPLYLNFEKFVQAKGGIPENIDPRTWALDRLIEYKDASIPVKEKDDKISVPEDPPERVKEPPKLKLNDYVESDLPQEVIKYYESEVKILTEEINDKTKYPAFAYCRRGAIYRKLGKLQSAMNDLQRVILLEPLFLNAYWHRHLIYLFQDKINEALDDLNYIHKYNKNNTEAYLSKAEIYRGKKDITLAILNYTQAIKSTPTDADIYFRRGEMYEITNKVLAIDDFSKCIFYDPKRTDALLKRGLFYCENENWFAAIEDFTALLNIDHQNSQARTYRGIAYVKWKFYKEATQDFSAAIHLDPNNWLALYYRGCLFRKSNPFRALQDYSVSALINDGYENLGCFLHRGIVYAHLKLWLLAICDFETVISLERTITLAYVNIGLIHLLHLDNYTEAIWQFSEAIRIDPLCIQSYLCRAETYFKLHKLKKAVNELSRAIHLQPDGIQLYIRRGQYLLMMKYYDLAKFTIYQIAEMDKGLSELSPMQQALIYSFCENHDKAIEVLDGISWNRAEMTMCALLAKVQMKAKRTKEAVEVLKKALDAISHSDKGPDATAISADCLYNLGLCYMEEGNLQMAFDSFTKAVKANPDFAESFYQRGLCKVKLHKDSSILDFNRAITLNPKHYQAYLSRVAFYGLKGRYSKAILNCNKAIKIYPESVRAYLYRGVLKYYNKTYKLAITDLTTAISMDKNSYTAFYNRALCYTKIRELQMALTDYGIVLLLDATETVKLNTFLNRGLIYVELGQYGFALEDFKQAALISRTNGSLCHATAMCHHRINEFEEAVNFFTWALKINPCFLDAYVGRGNSYMEYGHDEATKQAQKDFLKALHINPAYIKARISFGYNLQAQGKFQKAWNHFTIAIDTDPKNYLAYEGRAVVCLQMGNNFAAMQDINAAMKISTTAEFLTNRGVIHEFMGHKQNAMKDYQDAITLNPKYSLAYFNAGNIYFHHRQFSQASDYFSKALKFDPENEYVLMNRAITNTILKKYEEAKEDFANVIESCPFWAAVYFNRAHFYYCLKQYELAEEDLNKALSLKPNDALVYNFRAKVRGKIGLIEEAMADYNQALDLEDYASVI

SEQ ID NO: 87742 - protein, 219 aa, Homo sapiens
MVTSSFPISVAVFALITLQVGTQDSFIAAVYEHAVILPNKTETPVSQEDALNLMNENIDILETAIKQAAEQGARIIVTPEDALYGWKFTRETVFPYLEDIPDPQVNWIPCQDPHRFGHTPVQARLSCLAKDNSIYVLANLGDKKPCNSRDSTCPPNGYFQYNTNVVYNTEGKLVARYHKYHLYSEPQFNVPEKPELVTFNTAFGRKWYLCTKWSQSVSL

SEQ ID NO: 87743 - protein, 366 aa, Homo sapiens
MVLNSLDKMIQLQKNTANIRNICVLAHVDHGKTTLADCLISSNGIISSRLAGKLRYMDSREDEQIRGITMKSSAISLHYATGNEEYLINLIDSPGHVDFSSEVSTAVRICDGCIIVVDAVEGVCPQTQAVLRQAWLENIRPVLVINKIDRLIVELKFTPQEAYSHLKNILEQINALTGTLFTSKVLEERAERETESQVNPNSEQGEQVYDWSTGLEDTDDSHLYFSPEQGNVVFTSAIDGWGFGIEHFARIYSQKIGIKKEVLMKTLWGDYYINMKAKKIMKGDQAKGKKPLFVQLILENIWSLYDAVLKKDKDKIDKIVTSLGLKIGAREARHSDPKVQINAICSQWLPISHAVLDFSYGVSETS

SEQ ID NO: 87744 - protein, 189 aa, Homo sapiens
LIALTSLTAASSFSKAREEEITPVVSIAYKVLEVFPKGRWVLITCCAPQPPPPITYSLCGTKNIKVAKKVVKTHEPASFNLNVTLKSSPDLLTYFCWASSTSGAHVDSARLQMHWELWSKPVSELRANFTLQDRGAGPRVEMICQASSGSPPITNSLIGKDGQVHLQQRPCHRQPANFSFLPSQTSDWF

SEQ ID NO: 87745 - protein, 208 aa, Homo sapiens
  MOD_RES (1)..(1): Any amino acid
XGPGPAWSPGFPARPGRGRPYMASRPPGDLAEAGGRALQSLQLRLLTPTFEGINGLLLKQHLVQNPVRLWQLLGGTFYFNTSRLKQKNKEKDKSKGKAPEEDEEERRRRERDDQMYRERLRTLLVIAVVMSLLNALSTSGGSISWNDFVHEMLAKGEVQRVQVVPESDVVEVYLHPGAVVFGRPADLACLIEADRLHLKTKYTENRKT

SEQ ID NO: 87746 - protein, 140 aa, Homo sapiens
  MOD_RES (1)..(1): Any amino acid
XREVMYTAFKALGDSVDYVQVCDSDTRLDPMALLELVRVLDEDPRVGAVGGDVRILNPLDSWVSFLSSLRYWVAFNVERACQSYFHCVSCISGPLGLYRNNLLQQFLEAWYNQKFLGTHCTFGDDRHLTNRMLSMGYATK

SEQ ID NO: 87747 - protein, 44 aa, Homo sapiens
MNQRKLDHEVKTLQVQAAQFAKQTGQWIGMVENFNQALKGFLVW

SEQ ID NO: 87748 - protein, 104 aa, Homo sapiens
MSRVRDAGCVAAGIVIGAGAWYCVYKYTRGRDQTKKRMAKPKNRAVAGTGARARAGLRAGFTIDLGSGFSPPTPVRAEAEDRAQDEASALDTVGAEAVAPAASS

SEQ ID NO: 87749 - protein, 76 aa, Homo sapiens
MFPLISSHHLWWGGLRRTVCLNLPVLTLQHFQHMHIKVGDRAELRRAFTQTDVATFSELTGDVNPLHLNEDFAKHT

SEQ ID NO: 87750 - protein, 87 aa, Homo sapiens
MSCINLPTVLPGSPSKTRGQIQVILGPMFSGKSTELMRRVRRFQIAQYKCLVIKYAKDTRYSSSFCTHDRSLTSWSSARPWPTPGRP

SEQ ID NO: 87751 - protein, 63 aa, Homo sapiens
MFLKSKWGIGYRLSMYIDKYCATESLSSLVKQHIPGATLLQQNDQQLVYSLPFKDMDKFSGIA

SEQ ID NO: 87752 - protein, 155 aa, Homo sapiens
MAASFFSDFGLMWYLEELKKEEFRKFKEHLKQMTLQLELKQIPWTEVKKASREELANLLIKHYEEQQAWNITLRIFQKMDRKDLCMKVMRERTGYTKTYQAHAKQKFSRLWSSKSVTEIHLYFEEEVKQEECDHLDRLFAPKEAGKQPRTVIIQG

SEQ ID NO: 87753 - protein, 368 aa, Homo sapiens
MKSLVLLLCLAQLWGCHSAPHGPGLIYRQPNCDDPETEEAALVAIDYINQNLPWGYKHTLNQIDEVKVWPQQPSGELFEIEIDTLETTCHVLDPTPVARCSVRQLKEHAVEGDCDFQLLKLDGKFSVVYAKCDSSPADSAEDVRKVCQDCPLLAPLNDTRVVHAAKAALAAFNAQNNGSNFQLEEISRAQLVPLPPSTYVEFTVSGTDCVAKEATEAAKCNLLAEKQYGFCKATLSEKLGGAEVAVTCMVFQTQPVSSQPQPEGANEAVPTPVVDPDAPPSPPLGAPGLPPAGSPPDSHVLLAAPPGHQLHRAHYDLRHTFMGVVSLGSPSGEVSHPRKTRTVVQPSVGAAAGPVVPPCPGRIRHFKV

SEQ ID NO: 87754 - protein, 240 aa, Homo sapiens
MVKLFIGNLPREATEQEIRSLFEQYGKVLECDIIKNYGFVHIEDKTAAEDAIRNLHHYKLHGVNINVEASKNKSKTSTKLHVGNISPTCTNKELRAKFEEYGPVIECDIVKDYAFVHMERAEDAVEAIRGLDNTEFQGKRMHVQLSTSRLRTAPGMGDQSGCYRHLLPTSGAAATAAAAAAAAAAVTAASTSYYGRDRSPLRRATAPVPTVGEGYGYGHESELSQASAAARNSLYDMARY

SEQ ID NO: 87755 - protein, 114 aa, Homo sapiens
MEQTWTRDYFAEDDGEMVPRTSHTAAFLSDTKDRGPPVQSQIWRSGEKVPFVQTYSLRAFEKPPQVQTQALRDFEKHLNDLKKENFSLKLRIYFLEERMQQKYEASREDIYKRG

SEQ ID NO: 87756 - protein, 96 aa, Homo sapiens [sequence omitted]

SEQ ID NO: 87757 - protein, 247 aa, Homo sapiens
MEQNTLPVLWSLHIGVIIVNIIHNTSDYHPKVLRFLNVAFDGTGDCLIAGDHQGNIYVFDLHGNRFNLVQRTAQACTALAFNLRRKSEFLVALADYSIKCFDTVTKELVSWMRGHESSVFSISVHASGKYAITTSSDTAQLWDLDTFQRKRKLNIRQSVGIQKVFFLPLSNTILSCFKDNSIFAWECDTLFCKYQLPAPPESSSILYKVFAVTRDGRILAAGGKSNHLHLWCLEARQLFRIIQMPTK

SEQ ID NO: 87758 - protein, 365 aa, Homo sapiens
MATPASAPDTRALVADFVGYKLRQKGYVCGAGPGEGPAADPLHQAMRAAGDEFETRFRRTFSDLAAQLHVTPGSAQQRFTQVSDELFQGGPNWGRLVAFFVFGAALCAESVNKEMEPLVGQVQEWMVAYLETQLADWIHSSGGWLSQITEAEMADEVICSEILSDCDSAASSPDLEELEAIKARVREMEEEAEKLKELQNEVEKQMNMSPPPGNAGPVIMSIEEKMEADARSIYVGNVDYGATAEELEAHFHGCGSVNRVTILCDKFSGHPKGFAYIEFSDKESVRTSLALDESLFRGRQIKVIPKRTNRPGISTTDRGFPRARYRARTTNYNSSRSRFYSGFNSRPRGRVYRGRARATSWYSPY

SEQ ID NO: 87759 - protein, 977 aa, Homo sapiens
MTTLDHVIATHQSEWVSFNEEPPFPAHSQGGTEEHLPGLSSSPDQSESSSGENHVVDGGSQDHSHSEQDDSSEKMGLISEAASPPGSPEQPPPDLASAISNWVQFEDDTPWASTSPPHQETAETALPLTMPCWTCPSFDSLGRCPLTSESSWTTHSEDTSSPSFGCSYTDLQLINAEEQTSGQASGADSTDKRTEWQTGRQTAVSPVQACSEHTSTRTHRLDPSPPSPQPKRSQNPGEGPEGASAPNDNSSSLQEDEEVEMEAISWQASSPAMNGHPAPPVTSARFPSWVTFDDNEVSCPLPPVTSPLKPNTPPSASVIPDVPYNSMGSFKKRDRPKSTLMNFSKVQKLDISSLNRTPSVTEASPWRATNPFLNETLQDVQPSPINPFSAFFEEQERRSQNSSISSTTGKSQRDSLIVIYQDAISFDDSSKTQSHSDAVEKLKQLQIDDPDHFGSATLPDDDPVAWIELDAHPPGSARSQPRDGWPMMLRIPEKKNIMSSRHWGPIFVKLTDTGYLQLYYEQGLEKPFREFKLEICHEISEPRLQNYDENGRIHSLRIDRVTYKEKKKYQPKPAVAHTAEREQVIKLGTTNYDDFLSFIHAVQDRLMDLPVLSMDLSTVGLNYLEEEITVDVRDEFSGIVSKGDNQILQHHVLTRIHILSFLSGLAECRLGLNDILVKGNEIVLRQDIMPTTTTKWIKLHECRFHGCVDEDVFHNSRVILFNPLDACRFELMRFRTVFAEKTLPFTLRTATSVNGAEVEVQSWLRMSTGFSANRDPLTQVPCENVMIRYPVPSEWVKNFRRESVLGEKSLKAKVNRGASFGSTSVSGSEPVMRVTLGTAKYEHAFNSIVWRINRLPDKNSASGHPHCFFCHLELGSDREVPSRFANHVNVEFSMPTTSASKASVRSISVEDKTDVRKWVNYSAHYSYQTTETDNLPNPLYCSCLPHTDLKRGSKRVVKIRWNASLEVPLASSIRTMV

SEQ ID NO: 87760 - protein, 2150 aa, Homo sapiens
MNYSSFLRIWVSFIFALVQHQAQPRELMYPFWQNDTKTPKVDDGSSSEIKLAIPVFFFGVPYRTVYVNNNGVVSFNVLVSQFTPESFPLTDGRAFVAPFWADVHNGIRGEIYYRETMEPAILKRATKDIRKYFKDMATFSATWVFIVTWEEVTFYGGSSTTPVNTFQAVLVSDGSYTFTLFNYYEINWTTGTASGGDPLTGLGGVMAQAGFNGGNLTNFFSLPGSRTPEIVNIQETTNVNVPGRWAFKVDGKEIDPANGCTSRGQFLRRGEVFWDDLNCTVKCRCLDFNNEIYCQEASCSPYEVCEPKGKFFYCSAVETSTCVVFGEPHYHTFDGFLFHFQGSCAYLLARQCLQTSSLPFFSVEAKNEHRRGSAVSWVKELSVEVNGYKILIPKGSYGRVKVNDLVTSLPVTLDLGTVKIYQSGISTAVETDFGLLVTFDGQHYASISVPGSYINSTCGLCGNYNKNPLDDFLRPDGRPAMSVLDLGESWRVYHADWKCDSGCVDNCTQCDAATEALYFGSDYCGFLNKTDGPLWECGTVVDPTAFVHSCVYDLCSVRDNGTLLCQAIQAYALVCQALGIPIGDWRTQTGCVSTVQCPSFSHYSVCTSSCPDTCSDLTASRNCATPCTEGCECNQGFVLSTSQCVPLHKCGCDFDGHYYTMGEFFWATANCTVQCLCEEGGDVYCFNKTCGSGEVCAVEDGYQGCFPKRETVCLLSQNQVLHTFDGASYAFPSEFSYTLLKTCPERPEYLEIDINKKKPDAGPAWLRGLRILVADQEVKIGGIGASEVKLNGQEVELPFFHPSGKLEIYRNKNSTTVESKGVVTVQYSDIGLLYIRLSTTYFNCTGGLCGFYNANASDEFCLPNGKCTDNLAVFLESWTTFEEICNGECGDLLKACNNDSELLKFYRSRSRCGIINDPSNSSFLECHGVVNVTAYYRTCLFRLCQSGGNESELCDSVARYASACKNADVEVGPWRTYDFCPLECPENSHFEECITCTETCETLTLGPICVDSCSEGCQCDEGYALLGSQCVTRSECGCNFEGHQLATNETFWVDLDCQIFCYCSGTDNRVHCETIPCKDDEYCMEEGGLYYCQARTDASCIVSGYGHYLTFDGFPFDFQTSCPLILCTTGSRPSSDSFPKFVVTAKNEDRDPSLALWVKQVDVTVFGYSIVIHRAYKHTVLVNSERLYLPLKLGQGKINIFSFGFHVVVETDFGLKVVYDWKTFLSITVPRSMQNSTYGLCGRYNGNPDDDLEMPMGLLASSVNEFGQSWVKRDTFCQVGCGDRCPSCAKVEGFSKVQQLCSLIPNQNAAFSKCHSKVNPTFFYKNCLFDSCIDGGAVQTACSWLQNYASTCQTQGITVTGWRNYTSCTVTCPPNSHYESCVSVCQPRCAAIRLKSDCSHYCVEGCHCDAGYVLNGKSCILPHSCGCYSDGKYYEPKQLFWNSDCTRRCRCFRRNVIQCDPRQCKSDEECALRNGVRGCFSTKTSYCLAAGGGVFRTFDGAFLRFPANCAFVLSTICQKLPDISFQLIINFDKWSAPNLTIISPVYFYINEEQILINDRNTVKVNGTQVNVPFITGLATKIYSSEGFLVIDTSPDIQIYYNGFNVIKISISERLQNKVCGLCGNFNGDLTDDYVTLRGKPVVSSVVLAQSWKTNGMQKSCNELQFSQYAAMCDNVHIQKMQGDGYCLKLTDMKGFFQPCYGLLDPLPFYESCYLDGCYSHKKFQLCGSLAAYGEACRSFGILSTEWIEKENCSGVVEDPCVGADCPNRTCELGNGRELCGCIEPPPYGNNSHDIIDAEVTCKAAQMEVSISKCKLFQLGFEREGVRINDRQCTGIEGEDFISFQINNTKGNCGNIVQSNGTHIMYKNTLWIESANNTGNIITRDRTINVEFSCAYELDIKISLDSVVKPMLSVINLTVPTQEGSFITKMALYKNASYKHPYRQGEVVLTTRDVLYVGVFVVGADATHLILTLNKCYATPTRDSNDKLRYFIIEGGCQNLKDNTIGIEENAVSLTCRFHVTVFKFIGDYDEVHLHCAVSLCDSEKYSCKITCPHNSRIATDYTKEPKEQIISVGPIRRKRLDWCEDNGGCEQICTSRVDGPLCSCVTGTLQEDGKSCRASNSSMELQVWTLLLIMIQISLWHFVYKSGTTS

SEQ ID NO: 87761 - protein, 846 aa, Homo sapiens
  MOD_RES (1)..(1): Any amino acid
XFEVLWSDSSITSVTKSSSEVTEFISKLCQLYPEENLEKLIPCLAGPDAFYVERNHVDLDSGLRYLASLPSHVLKNDHVRRFLSTSSPPQQLQSPSPGNPSLSKVGTVMGVSGRPVCGVAGIPSSQSGAQHHGQHPAGSAAPLPHCSHAGSAGSALAYRTQMDTSPAILMPSSLQTPQTQEQNGILDWLRKLRLHKYYPVFKQLSMEKFLSLTEEDLNKFESLTMGAKKKLKTQLELEKEKSERRCLNPSAPPLVTSSGVARVPPTSHVGPVQSGRGSHAAELRVEVEQPHHQLPREGSSSEYSSSSSSPMGVQAREESSDSAEENDRRVEIHLESSDKEKPVMLLNHFTSSSARPTAQVLPVQNEASSNPSGHHPLPPQMLSAASHITPIRMLNSVHKPERGSADMKLLSSSVHSLLSLEERNKGSGPRSSMKVDKSFGSAMMDVLPASAPHQPVQVLSGLSESSSMSPTVSFGPRTKVVHASTLDRVLKTAQQPALVVETSTAATGTPSTVLHAARPPIKLLLSSSVPADSAISGQTSCPNNVQISVPPAIINPRTALYTANTKVAFSAMSSMPVGPLQGGFCANSNTASPSSHPSTSFANMATLPSCPAPSSSPALSSVPESSFYSSSGGGGSTGNIPASNPNHHHHHHHQQPPAPPQPAPPPPGCIVCTSCGCSGSCGSSGLTVSYANYFQHPFSGPSVFTFPFLPFSPMCSSGYVSAQQYGGGSTFPVVHAPYSSSGTPDPVLSGQSTFAVPPMQNFMAGTAGVYQTQGLVGSSNGSSHKKSGNLSCYNCGATGHRAQDCKQPSMDFNRPGKRAPWPRPPGSRRTSAHKCLVFMKSKLLSL

SEQ ID NO: 87762 - protein, 1332 aa, Homo sapiens
  MOD_RES (1)..(1): Any amino acid
XSLLPGITYSLRVLAFTAVGDGPPSPTIQVKTQQGVPAQPADFQAEVESDTRIQLSWLLPPQERIIMYELVYWAAEDEDQQHKVTFDPTSSYTLEDLKPDTLYRFQLAARSDMGVGVFTPTIEARTAQSMPSGPPRKVEVEPLNSTAVHVYWKLPVPSKQHGQIRGYQVTYVRLENGEPRGLPIIQDVMLAEAQETTISGLTPETTYSVTVAAYTTKGDGARSKPKIVTTTGAVPGRPTMMISTTAMNTALLQWHPPKELPGELLGYRLQYCRADEARPNTIDFGKDDQHFTVTGLHKGTTYIFRLAAKNRAGLGEEFEKEIRTPEDLPSGFPQNLHVTGLTTSTTELAWDPPVLAERNGRIISYTVVFRDINSQQELQNITTDTRFTLTGLKPDTTYDIKVRAWTSKGSGPLSPSIQSRTMPVEQVFAKNFRVAAAMKTSVLLSWEVPDSYKSAVPFKILYNGQSVEVDGHSMRKLIADLQPNTEYSFVLMNRGSSAGGLQHLVSIRTAPDLLPHKPLPASAYIEDGRFDLSMPHVQDPSLVRWFYIVVVPIDRVGGSMLTPRWSTPEELELDELLEAIEQGGEEQRRRRRQAERLKPYVAAQLDVLPETFTLGDKKNYRGFYNRPLSPDLSYQCFVLASLKEPMDQKRYASSPYSDEIVVQVTPAQQQEEPEMLWVTGPVLAVILIILIVIAILLFKRKRTHSPSSKDEQSIGLKDSLLAHSSDPVEMRRLNYQTPGSSVPSCPNTSSMRDHPPIPITDLADNIERLKANDGLKFSQEYESIDPGQQFTWENSNLEVNKPKNRYANVIAYDHSRVILTSIDGVPGSDYINANYIDGYRKQNAYIATQGPLPETMGDFWRMVWEQRTATVVMMTRLEEKSRVKCDQYWPARGTETCGLIQVTLLDTVELATYTVRTFALHKSGSSEKRELRQFQFMAWPDHGVPEYPTPILAFLRRVKACNPLDAGPMVVHCSAGVGRTGCFIVIDAMLERMKHEKTVDIYGHVTCMRSQRNYMVQTEDQYVFIHEALLEAATCGHTEVPARNLYAHIQKLGQVPPGESVTAMELEFKLLASSKAHTSRFISANLPCNKFKNRLVNIMPYELTRVCLQPIRGVEGSDYINASFLDGYRQQKAYIATQGPLAESTEDFWRMLWEHNSTIIVMLTKLREMGREKCHQYWPAERSARYQYFVVDPMAEYNMPQYILREFKVTDARDGQSRTIRQFQFTDWPEQGVPKTGEGFIDFIGQVHKTKEQFGQDGPITVHCSAGVGRTGVFITLSIVLERMRYEGVVDMFQTVKTLRTQRPAMVQTEDQYQLCYRAALEYLGSFDHYAT

SEQ ID NO: 87763 - protein, 74 aa, Homo sapiens
MRLLAGWLCLSLASVWLARRMWTLRSPLTRSLYVNMTSGPGGPAAAAGGRKENHQVARKRLNVCVFTRSVSETA

SEQ ID NO: 87764 - protein, 97 aa, Homo sapiens
MEARSMLVPPQASVCFEDVAMAFTQEEWEQLDLAQRTLYREVTLETWEHIVSLGLFLSKSDVISQLEQEEDLCRAEQEAPRDGVSLLLPRLECNGTI

SEQ ID NO: 87765 - protein, 64 aa, Homo sapiens
EDVISSIRNFLIYVALLRVSECLPGCDCETSGELTDGHPLTLRGHRGLRTELNAPFILKKLDSI

SEQ ID NO: 87766 - protein, 122 aa, Homo sapiens
MKQPNRKRKLNMDSKERLDQDGRLEQAEEEKKPKDSTTPLSHVPSAAAQGAWSWEWYLKEQKAVAAPVELFSKDQSFPEHENGFQIGMRLEGIDPRHPSVFCVLSVAEVCGYRLRLHFDGYL

SEQ ID NO: 87767 - protein, 453 aa, Homo sapiens
MQPTYKMAEKQKALFTRSGGGTEGEQEMEEEVGETPVPNIMETAFYFEQAGVGLSSDESFRIFLAMKQLVEQQPIHTCRFWGKILGIKRSYLVAEVEFREGEEEAEEEEVEEMTEGGEVMEAHGEEEGEEDEEKAVDIVPKSVWKPPPVIPKEESRSGANKYLYFVCNEPGLPWTRLPHVTPAQIVNARKIKKFFTGYLDTPVVSYPPFPGNEANYLRAQIARISAATQVSPLGFYQFSEEEGDEEEEGGAGRDSYEENPDFEGIPVLELVDSMANWVHHTQHILPQGRCTWVNPLQKTEEEEDLGEEEEKADEGPEEVEQEVGPPLLTPLSEDAEIMHLAPWTTRLSCSLCPQYSVAVVRSNLWPGAYAYASGKKFENIYIGWGHKYSPESFNPALPAPIQQEYPSGPEIMEMSDPTVEEEQALKAAQEQALGATEEEEEGEEEEEGEETDD

SEQ ID NO: 87768 - protein, 53 aa, Homo sapiens
MLTRVGFMLTEDLDGIAMAYLWNMKLIRHWESEDQRMWPKWGLQSITISAEQL

SEQ ID NO: 87769 - protein, 742 aa, Homo sapiens
MATRGGAGVAMAVWSLLSARAVTAFLLLFLPRFLQAQTFSFPFQQPEKCDNNQYFDISALSCVPCGANQRQDARGTSCVCLPGFQMISNNGGPAIICKKCPENMKGVTEDGWNCISCPSDLTAEGKCHCPIGHILDSNSGKWLLTRRIFLVDAVSGRENDLGTQPRVIRVATQISLSVHLVPNTINGNIYPPLITIAYSDIDIKDANSQSVKVSFSVTYEMDHGEAHVQTDTEFCTCCPGWSAMARSWLTATSASRVQAILLSQPPEYLGLQIALGVLGGLAVLASLLKTAGWKRRIGSPMIDLQTVVKFLVYYAGDLANVFFIITVGTGLYWLIFFKAQKSVSVLLPMPIQEERFVTYVGCAFALKALQFLHKLISQITIDVFFIDWERPKGKVLKAVEGEGGVRSATVPVSIWRTYFVANEWNEIQTVRKINSLFQVLTVLFFLEVVGFKNLALMDSSSSLSRNPPSYIAPYSCILRYAVSAALWLAIGIIQVVFFAVFYERFIEDKIRQFVDLCSMSNISVFLLSHKCFGYYIHGRSVHGHADTNMEEMNMNLKREAENLCSQRGLVPNTDGQTFEIAISNQMRQHYDRIHETLIRKNGPARLLSSSASTFEQSIKAYHMMNKFLGSFIDHVHKEMDYFIKDKLLLERILGMEFMEPMEKSIFYNDEGYSFSSVLYYGNEATLLIFDLLFFCVVDLACQNFILASFLTYLQQEIFRYIRNTVGQKNLASKTLVDQRFLI

SEQ ID NO: 87770 - protein, 269 aa, Homo sapiens
MKEESAAQLGCCHRPMALGGTGGSLSPSLDFQLFRGDQVFSACRPLPDMVDAHGPSCASWLCPLPLAPGRSALLACLQDLDLNLCTPQPAPLGTDLQGLQEDALSMKHEPPGLQASSTDDKKFTVKYPQNKDKLGKQPERAGEGAPCPAFSSHNSSSPPPLQNRKSPSPLAFCPCPPVNSISKELPFLLHAFYPGYPLLLPPPHLFTYGALPSDQCPHLLMLPQDPSYPTMAMPSLLMMVNELGHPSARWETLLPYPGAFQASGQALPS

SEQ ID NO: 87771 - protein, 1203 aa, Homo sapiens
MSDLDSEVLPLPPRYRFRDLLLGDPSFQNDDRVQVEFYVNENTFKERLKLFFIKNQRSSLRIRLFNFSLKLLTCLLYIVRVLLDDPALGIGCWGCPKQNYSFNDSSSEINWAPILWVERKMTLWAIQVIVAIISFLETMLLIYLSYKGNIWEQIFRVSFVLEMINTLPFIITIFWPPLRNLFIPVFLNCWLAKHALENMINDFHRAILRTQSAMFNQVLILFCTLLCLVFTGTCGIQHLERAGENLSLLTSFYFCIVTFSTVGYGDVTPKIWPSQLLVVIMICVALVVLPLQFEELVYLWMERQKSGGNYSRHRAQTEKHVVLCVSSLKIDLLMDFLNEFYAHPRLQDYYVVILCPTEMDVQVRRVLQIPLWSQRVIYLQGSALKDQDLMRAKMDNGEACFILSSRNEVDRTAADHQTILRAWAVKDFAPNCPLYVQILKPENKFHVKFADHVVCEEECKYAMLALNCICPATSTLITLLVHTSRGQEGQESPEQWQRMYGRCSGNEVYHIRMGDSKFFREYEGKSFTYAAFHAHKKYGVCLIGLKREDNKSILLNPGPRHILAASDTCFYINITKEENSAFIFKQEEKRKKRAFSGQGLHEGPARLPVHSIIASMGTVAMDLQGTEHRPTQSGGGGGGSKLALPTENGSGSRRPSIAPVLELADSSALLPCDLLSDQSEDEVTPSDDEGLSVVEYVKGYPPNSPYIGSSPTLCHLLPVKAPFCCLRLDKGCKHNSYEDAKAYGFKNKLIIVSAETAGNGLYNFIVPLRAYYRSRKELNPIVLLLDNKPDHHFLEAICCFPMVYYMEGSVDNLDSLLQCGIIYADNLVVVDKESTMSAEEDYMADAKTIVNVQTMFRLFPSLSITTELTHPSNMRFMQFRAKDSYSLALSKLEKRERENGSNLAFMFRLPFAAGRVFSISMLDTLLYQSFVKDYMITITRLLLGLDTTPGSGYLCAMKITEGDLWIRTYGRLFQKLCSSSAEIPIGIYRTESHVFSTSEPHDLRAQSQISVNVEDCEDTREVKGPWGSRAGTGGSSQGRHTGGGDPAEHPLLRRKSLQWARRLSRKAPKQAGRAAAAEWISQQRLSLYRRSERQELSELVKNRMKHLGLPTTGYEDVANLTASDVMNRVNLGYLQDEMNDHQNTLSYVLINPPPDTRLEPSDIVYLIRSDPLAHVASSSQSRKSSCSHKLSSCNPETRDETQL

SEQ ID NO: 87772 - protein, 147 aa, Homo sapiens
  MOD_RES (1)..(1): Any amino acid
XMALETHFWTWINHLVTWGSIIFYFVFSLFYGGILWPFLGSQNMYFVFIQLLSSGSAWFAIILMVVTCLFLDIIKKVFDRHLHPTSTEKAQLTETNAGIKCLDSMCCFPEGEAACASVGRMLERVIGRCSPTHISRCEISLSSLCCR

SEQ ID NO: 87773 - protein, 726 aa, Homo sapiens
  MOD_RES (1)..(1): Any amino acid
XNITCSPDEFTCSSGRCISRNFVCNGQDDCSDGSDELDCAPPTCGAHEFQCSTSSCIPISWVCDDDADCSDQSDESLEQCGRQPVIHTKCPASEIQCGSGECIHKKWRCDGDPDCKDGSDEVNCPSRTCRPDQFECEDGSCIHGSRQCNGIRDCVDGSDEVNCKNVNQCLGPGKFKCRSGECIDISKVCNQEQDCRDWSDEPLKECRKYINECLVNNGGCSHICKDLVIGYECDCAAGFELIDRKTCGDIDECQNPGICSQICINLKGGYKCECSRGYQMDLATGVCKAVGKEPSLIFTNRRDIRKIGLERKEYIQLVEQLRNTVALDADIAAQKLFWADLSQKAIFSASIDDKVGRHVKMIDNVYNPAAIAVDWVYKTIYWTDAASKTISVATLDGTKRKFLFNSDLREPASIAVDPLSGFVYWSDWGEPAKIEKAGMNGFDRRPLVTADIQWPNGITLDLIKSRLYWLDSKLHMLSSVDLNGQDRRIVLKSLEFLAHPLALTIFEDRVYWIDGENEAVYGANKFTGSELATLVNNLNDAQDIIVYHELVQPSGKNWCEEDMENGGCEYLCLPAPQINDHSPKYTCSCPSGYNVEENGRDCQSTATTVTYSETKDTNTTEISATSGLVPGGINVTTAVSEVSVPPKGTSAAWAILPLLLLVMAAVGGYLMWRNWQHKNMKSMNFDNPVYLKTTEEDLSIDIGRHSASVGHTYPAISVVSTDDDLA

SEQ ID NO: 87774 - protein, 151 aa, Homo sapiens
MSHGAGLVRTTCSSGSALGPGAGAAQPSASPLEGLLDLSYPRTHAALLKVAQMVTLLIAFICVRSSLWTNYSAYSYFEVVTICDLIMILAFYLVHLFRFYRVLTCISWPLSELLHYLIGTLLLLIASIVAASKSYNQSGLVAGADNQSPLA

SEQ ID NO: 87775 - protein, 674 aa, Homo sapiens
MNWNEKPKSATLPPLYPKSQPPFLHQSLINQITTTSQSSFSYPGSNQEACMYPGNSNPISQPLLNIQNYPQQISVSDMHNGTVVASHTSVERITYANVNGPKQLTHNLQMSSGVTQNVWLNSPMRNPVHSHIGATVSHQTDFGANVPNMPALQSQLITSDTYSMQMQMIPSNSTRLPVAYQGNQGLNQSFSEQQVDWTQQCISKGLTYPDYRPPPKLYRYSPQSFLPDSTIQKQNFIPHTSLQVKNSQLLNSVLTLPSRQTSAVPSQQYATQTDKRPPPPPYNCRYGSQPLQSTQHITKHLSMEVPQSREMLSSEIRTSFQQQWQNPNENVSTIGNFTNLKVNTNSKQPFNSPIRSSVDGVQTLAQTNEEKIMDSCNPTSNQVLDTSVAKEKLVRDIKTLVEIKQKFSELARKIKINKDLLMAAGCIKMTNTSYSEPAQNSKLSLKQTAKIQSGPQITPVMPENAERQTPTVVESAETNKTQCMLNSDIQEVNCRRFNQVDSVLPNPVYSEKRPMPDSSHDVKVLTSKTSAVEMTQAVLNTQLSSENVTKVEQNSPAVCETISVPKSMSTEEYKSKIQNENMLLLALLSQARKTQKTVLKDANQTIQDSKPDSCEMNPNTQMTGNQLNLKNMETPSTSNVSGRVLDNSFCSGQESSTKGMPAKSDSSCSMEVLA

SEQ ID NO: 87776 - protein, 2309 aa, Homo sapiens
MKAMDVLPILKEKVAYLSGGRDKRGGPILTFPARSNHDRIRQEDLRRLISYLACIPSEEVCKRGFTVIVDMRGSKWDSIKPLLKILQESFPCCIHVALIIKPDNFWQKQRTNFGSSKFEFETNMVSLEGLTKVVDPSQLTPEFDGCLEYNHEEWIEIRVAFEDYISNATHMLSRLEELQDILAKKELPQDLEGARNMIEEHSQLKKKVIKAPIEDLDLEGQKLLQRIQSSESFPKKNSGSGNADLQNLLPKVSTMLDRLHSTRQHLHQMWHVRKLKLDQCFQLRLFEQDAEKMFDWITHNKGLFLNSYTEIGTSHPHAMELQTQHNHFAMNCMNVYVNINRIMSVANRLVESGHYASQQIRQIASQLEQEWKAFAAALDERSTLLDMSSIFHQKAEKYMSNVDSWCKACGEVDLPSELQDLEDAIHHHQGIYEHITLAYSEVSQDGKSLLDKLQRPLTPGSSDSLTASANYSKAVHHVLDVIHEVLHHQRQLENIWQHRKVRLHQRLQLCVFQQDVQQVLDWIENHGEAFLSKHTGVGKSLHRARALQKRHEDFEEVAQNTYTNADKLLEAAEQLAQTGECDPEEIYQAAHQLEDRIQDFVRRVEQRKILLDMSVSFHTHVKELWTWLEELQKELLDDVYAESVEAVQDLIKRFGQQQQTTLQVTVNVIKEGEDLIQQLRDSAISSNKTPHNSSINHIETVLQQLDEAQSQMEELFQERKIKLELFLQLRIFERDAIDIISDLESWNDELSQQMNDFDTEDLTIAEQRLQHHADKALTMNNLTFDVIHQGQDLLQYVNEVQASGVELLCDRDVDMATRVQDLLEFLHEKQQELDLAAEQHRKHLEQCVQLRHLQAEVKQVLGWIRNGESMLNAGLITASSLQEAEQLQREHEQFQHAIEKTHQSALQVQQKAEAMLQANHYDMDMIRDCAEKVASHWQQLMLKMEDRLKLVNASVAFYKTSEQVCSVLESLEQEYKREEDWCGGADKLGPNSETDHVTPMISKHLEQKEAFLKACTLARRNADVFLKYLHRNSVNMPGMVTHIKAPEQQVKNILNELFQRENRVLHYWTMRKRRLDQCQQYVVFERSAKQALEWIHDNGEFYLSTHTSTGSSIQHTQELLKEHEEFQITAKQTKERVKLLIQLADGFCEKGHAHAAEIKKCVTAVDKRYRDFSLRMEKYRTSLEKALGISSDSNKSSKSLQLDIIPASIPGSEVKLRDAAHELNEEKRKSARRKEFIMAELIQTEKAYVRDLRECMDTYLWEMTSGVEEIPPGIVNKELIIFGNMQEIYEFHNNIFLKELEKYEQLPEDVGHCFVTWADKFQMYVTYCKNKPDSTQLILEHAGSYFDEIQQRHGLANSISSYLIKPVQRITKYQLLLKELLTCCEEGKGEIKDGLEVMLSVPKRANDAMHLSMLEGFDENIESQGELILQESFQVWDPKTLIRKGRERHLFLFEMSLVFSKEVKDSSGRSKYLYKSKLFTSELGVTEHVEGDPCKFALWVGRTPTSDNKIVLKASSIENKQDWIKHIREVIQERTIHLKGALKEPIHIPKTAPATRQKGRRDGEDLDSQGDGSSQPDTISIASRTSQNTLDSDKLSGGCELTVVIHDFTACNSNELTIRRGQTVEVLERPHDKPDWCLVRTTDRSPAAEGLVPCGSLCIAHSRSSMEMEGIFNHKDSLSVSSNDASPPASVASLQPHMIGAQSSPGPKRPGNTLRKWLTSPVRRLSSGKADGHVKKLAHKHKKSREVRKSADAGSQKDSDDSAATPQDETVEERGRNEGLSSGTLSKSSSSGMQSCGEEEGEEGADAVPLPPPMAIQQHSLLQPDSQDDKASSRLLVRPTSSETPSAAELVSAIEELVKSKMALEDRPSSLLVDQGDSSSPSFNPSDNSLLSSSSPIDEMEERKSSSLKRRHYVLQELVETERDYVRDLGYVVEGYMALMKEDGVPDDMKGKDKIVFGNIHQIYDWHRDFFLGELEKCLEDPEKLGSLFVKHERRLHMYIAYCQNKPKSEHIVSEYIDTFFEDLKQRLGHRLQLTDLLIKPVQRIMKYQLLLKDFLKYSKKASLDTSELERAVEVMCIVPRRCNDMMNVGRLQGFDGKIVAQGKLLLQDTFLVTDQDAGLLPRCRERRIFLFEQIVIFSEPLDKKKGFSMPGFLFKNSIKVSCLCLEENVENDPCKFALTSRTGDVVETFILHSSSPSVRQTWIHEINQILENQRNFLNALTSPIEYQRNHSGGGGGGGSGGSGGGGGSGGGGAPSGGSGHSGGPSSCGGAPSTSRSRPSRIPQPVRHHPPVLVSSAASSQAEADKMSE

SEQ ID NO: 87777 - protein, 139 aa, Homo sapiens
MGSGTSTQHHFAFQNAERAFKAAALIQRWYRRYVARLEMRRRCTWSIFQSIEYAGQQDQVKLHDFFSYLMDHFIPSSHNDRDFLTRIFTEDRFAQDSEMKKCSDYESIEVPDSYTGPRLSFPLLPDHATALVEAFRLKQ

SEQ ID NO: 87778 - protein, 294 aa, Homo sapiens
AIKFLSTKLKTLPDEVLTKEVEELILTESKKVLEDVTGEEFVLFMKILSGLKSLQTVSGRQQLVELVAEQADLEQTFNPSDPDCVDRLLQCTRQAVPLFSVLKLLAEMSSFCGDMEKLETNLRKLFDKLLEYMPLPPEEAENGENAGNEEPKLQFSYVECLLYSFHQLGRKLPDFLTAKLNAEKLKDFKIRLQYFARGLQVYIRQLRLALQGKTGEALKTEENKIKVVALKITNNINVLIKDLFHIPPSYKSTVTLSWKPVQKVEIGQKRASEDTTSGSPPKKSSAGPKRDARQ

SEQ ID NO: 87779 - protein, 103 aa, Homo sapiens
MQTACQAVQHQRGRRQYNKLRNLLKDARHDCILFANEFQQCCYLPRERGESMEKWQTRSIYNAAVWYYHHCQDRMPIVMVTEDEEAIQQYGSETEGVFVITFK

SEQ ID NO: 87780 - protein, 121 aa, Homo sapiens
  MOD_RES (1)..(1): Any amino acid
XLCFESPEISRPVFPCLQMIQAIQVLRFHLLELEKVHELCDNFCHRYISCLKGKMPIDLVIDDREGGSKSDSEDITRSANLTDQPSWNRDHDDTASTRSGGTPGPSSGGHTSHSGDNSSEQ

SEQ ID NO: 87781 - protein, 140 aa, Homo sapiens
MSQQKCIVIFALVCCFAILVALIFSAVDIMGEDEDGLSEKNCQNKCRIALVENIPEGLNYSENAPFHLSLFQGWMNLLNMAKKSVDIVSSHWDLNHTHPSACQGQRLFEKLLQLTSQNIEIKLVSDVTADSKVLEALKLK

SEQ ID NO: 87782 - protein, 65 aa, Homo sapiens
MAYHGLTVPLIVMSVFWGFVGFLVPWFIPKGPNRGWLIAILAQLNPLFGPQLKNETIWYLKYHWP

SEQ ID NO: 87783 - protein, 962 aa, Homo sapiens
MATRGGAGVAMAVWSLLSARAVTAFLLLFLPRFLQAQTFSFPFQQPEKCDNNQYFDISALSCVPCGANQRQDARGTSCVCLPGFQMISNNGGPAIICKKCPENMKGVTEDGWNCISCPSDLTAEGKCHCPIGHILVERDINGTLLSQATCELCDGNENSFMVVNALGDRCVRCEPTFVNTSRSCACSEPNILTGGLCFSSTGNFPLRRISAARYGEVGMSLTSEWFAKYLQSSAAACWVYANLTSCQALGNMCVMNMNSYDFATFDACGLFQFIFENTAGLSTVHSISFWRQNLPWLFYGDQLGLAPQVLSSTSLPTNFSFKGENQNTKLKFVAASYDIRGNFLKWQTLEGGVLQLCPDTETRLNAAYSFGTTYQQNCEIPISKILIDFPTPIFYDVYLEYTDENQHQYILAVPVLNLNLQHNKIFVNQDSNSGKWLLTRRIFLVDAVSGRENDLGTQPRVIRVATQISLSVHLVPNTINGNIYPPLITIAYSDIDIKDANSQSVKVSFSVTYEMDHGEAHVQTDIALGVLGGLAVLASLLKTAGWKRRIGSPMIDLQAQKSVSVLLPMPIQEERFVTYVGCAFALKALQFLHKLISQITIDVFFIDWERPKGKVLKAVEGEGGVRSATVPVSIWRTYFVANEWNEIQTVRKINSLFQVLTVLFFLEVVGFKNLALMDSSSSLSRNPPSYIAPYSCILRYAVSAALWLAIGIIQVVFFAVFYERFIEDKIRQFVDLCSMSNISVFLLSHKCFGYYIHGRSVHGHADTNMEEMNMNLKREAENLCSQRGLVPNTDGQTFEIAISNQMRQHYDRIHETLIRKNGPARLLSSSASTFEQSIKAYHMMNKFLGSFIDHVHKEMDYFIKDKLLLERILGMEFMEPMEKSIFYNDEGYSFSSVLYYGNEATLLIFDLLFFCVVDLACQNFILASFLTYLQQEIFRYIRNTVGQKNLASKTLVDQRFLI

SEQ ID NO: 87784 - protein, 639 aa, Homo sapiens
MTDSKYFTTNKKGEIFELKAELNNEKKEKRKEAVKKVIAAMTVGKDVSSLFPDVVNCMQTDNLELKKLVYLYLMNYAKSQPDMAIMAVNSFVKDEDPYVRKTAAVCVAKLHDINAQMVEDQGFLDSLRDLIADSNPMVVANAVAALSEISESHPNSNLLDLNPQNINKLLTALNECTEWGQIFILDCLSNYNPKDDREAQSICERVTPRLSHANSAVVLSAVKVLMKFLELLPKDSDYYNMLLKKLAPPLVTLLSGEPEVQYVALRNINLIVQKRPEILKQEIKVFFVKYNDPIYVKLEKLDIMIRLASQANIAQVLAELKEYATEVDVDFVRKAVRAIGRCAIKVEQSAERCVSTLLDLIQTKVNYVVQEAIVVIRDIFRKYPNKYESIIATLCENLDSLDEPDARAAMIWIVGEYAERIDNADELLESFLEGFHDESTQVQLTLLTAIVKLFLKKPSETQELVQQVLSLATQDSDNPDLRDRGYIYWRLLSTDPVTAKEVVLSEKPLISEETDLIEPTLLDELICHIGSLASVYHKPPNAFVEGSHGIHRKHLPIHHGSTDAGDSPVGTTTATNLEQPQVIPSQGDLLGDLLNLDLGPPVNVPQVSSMQMGAVDLLGGGLDSLLGSDLGGGIGGSPA

SEQ ID NO: 87785 - protein, 243 aa, Homo sapiens
AAAMVPGRSESWERGEPGRPALYFCGSIRGGREDRTLYERIVSRLRRFGTVLTEHVAAAELGARGEALGPRDAGTRARTWLGWQGPGLSAPPTPGSCAPGARSPPSYPGAPSSAPAREGNGPGLGLRGSQQACGWEEAAGGDRLIHEQDLEWLQQADVVVAEVTQPSLGVGYELGRAVAFNKRILCLFRPQSGRVLSAMIRGAADGSRFQVWDYEEGEVEALLDRYFEADPPGQVAASPDPTT

SEQ ID NO: 87786 - protein, 104 aa, Homo sapiens
MDVYGTTKAIELLDPTASRLPTPMPWDLSNKAVPEPKATPGEECAICFYHAANTRLVPCGHTYFCRYCAWRVFSDTAKCPVCRWQIEAVAPAQGPPALRVEEGS

SEQ ID NO: 87787 - protein, 65 aa, Homo sapiens
MNKLRENKEFLEFRKARSDMLLSRKNQLLLEFSFWNEPVPRSGPNIYELRSYQLRPGTMIEWGNY

SEQ ID NO: 87788 - protein, 257 aa, Homo sapiens
  MOD_RES (1)..(1): Any amino acid
XDEEVAPENFFSLPEKAEPPGVEPYPYPIPTVPEELPPGTEPEPAFQDDAANAPLEFKMAAGSSGAPWMPKPGDDYSYNQFSTYGDANAAGAYYQGLQQHLGHSPLRGIMRFLNSKSGKRTCFVPSFDYYSGGYYPAQDPALVPPQEIAPDASFIDDEAFKRLQGKRNRGREEINFVEIKGDDQLSGAQQWMTKSLTEEKTMKSFSKKKGEQPTGQQRRKHQITYLIHQAKERELELKNTWSENKLSRRQTQAKYGF

SEQ ID NO: 87789 - protein, 40 aa, Homo sapiens
  MOD_RES (1)..(1): Any amino acid
XVSEILFNDEMDDFSSPNITNEFGVPPSPANFIQPAPKPC

SEQ ID NO: 87790 - protein, 110 aa, Homo sapiens
MSTLFPSLFPRVTETLWFNLDRPCVEETELQQQEQQHQAWLQSIAEKDNNLVPIGKPASEHYDDEEEEDDEDDEDSEEDSEDDEDMQDMDEMNDYNESPDDGEVNENGMG

SEQ ID NO: 87791 - protein, 161 aa, Homo sapiens
MDHFFIKRKRNSEVKYTEACSSSSVESGIVNSDNIEKNTDSNLQTSTSFEPHFKKKKVSARRYNEDYLKYGFIKCEKPFENDRPQCVICNNILANESLKPSKLKRHLETQHAELIDKPLEYFQRKKKDIKLSTQFLSCSTAVSEKALLSSYLVAYRVAKEK

SEQ ID NO: 87792 - protein, 121 aa, Homo sapiens
MAAHVGASRTPQEVMEHYVSMYIHGNLGKACIPDTIPNRVTDHTCPSGGPLSPSLTTPLPPLDISVAEQQQLGYMPLRDDYEIEYDQDAETLISGLSVNYDDDDVEIELKRAHVDMYVRKL

SEQ ID NO: 87793 - protein, 136 aa, Homo sapiens
MDQKAEVASQVEVVIFLKKKNQFRLLYSGLSSCSSHRLAYILGREMLITCAICISLSRWVARVFEISPFEPWITRDKVERMHITDMKLPHLPGLEDLGIQATPLELKAIEVLRRHRTYRWLSAEIEDVKPAKTVNI

SEQ ID NO: 87794 - protein, 426 aa, Homo sapiens
MYGTRCHGCGEFVEGEVVTALGKTYHPNCFACTICKRPFPPGDRVTFNGRDCLCQLCAQPMSSSPKETTFSSNCAGCGRDIKNGQALLALDKQWHLGCFKCKSCGKVLTGEYISKDGAPYCEKDYQGLFGVKCEACHQFITGKVLEAGDKHYHPSCARCSRCNQMFTEGEEMYLQGSTVWHPDCKQSTKTEEKLRPTRTSSESIYSRPGSSIPGSPGHTIYAKVDNEILDYKDLAAIPKVKAIYDIERPDLITYEPFYTSGYDDKQERQSLGESPRTLSPTPSAEGYQDVRDRMIHRSTSQGSINSPVYSRHSYTPTTSRSPQHFHRPGNEPSSGRNSPLPYRPDSRPLTPTYAQAPKHFHVPDQGINIYRKPPIYKQHGPDMKRRSSGREEDDEELLRRRQLQEEQLMKLNSGLGQLILKEEMEK

SEQ ID NO: 87795 - protein, 1501 aa, Homo sapiens
MAPTWGPGMVSVVGPMGLLVVLLVGGCAAEEPPRFIKEPKDQIGVSGGVASFVCQATGDPKPRVTWNKKGKKVNSQRFETIEFDESAGAVLRIQPLRTPRDENVYECVAQNSVGEITVHAKLTVLREDQLPSGFPNIDMGPQLKVVERTRTATMLCAASGNPDPEITWFKDFLPVDPSASNGRIKQLRSGALQIESSEETDQGKYECVATNSAGVRYSSPANLYVRVRRVAPRFSILPMSHEIMPGGNVNITCVAVGSPMPYVKWMQGAEDLTPEDDMPVGRNVLELTDVKDSANYTCVAMSSLGVIEAVAQITVKSLPKAPGTPMVTENTATSITITWDSGNPDPVSYYVIEYKSKSQDGPYQIKEDITTTRYSIGGLSPNSEYEIWVSAVNSIGQGPPSESVVTRTGEQAPASAPRNVQARMLSATTMIVQWEEPVEPNGLIRGYRVYYTMEPEHPVGNWQKHNVDDSLLTTVGSLLEDETYTVRVLAFTSVGDGPLSDPIQVKTQQGVPGQPMNLRAEARSETSITLSWSPPRQESIIKYELLFREGDHGREVGRTFDPTTSYVVEDLKPNTEYAFRLAARSPQGLGAFTPVVRQRTLQSISPKNFKVKMIMKTSVLLSWEFPDNYNSPTPYKIQYNGLTLDVDGRTTKKLITHLKPHTFYNFVLTNRGSSLGGLQQTVTAWTAFNLLNGKPSVAPKPDADGFIMVYLPDGQSPVPVQSYFIVMVPLRKSRGGQFLTPLGSPEDMDLEELIQDISRLQRRSLRHSRQLEVPRPYIAARFSVLPPTFHPGDQKQYGGFDNRGLEPGHRYVLFVLAVLQKSEPTFAASPFSDPFQLDNPDPQPIVDGEEGLIWVIGPVLAVVFIICIVIAILLYKKKPHSKRKDSEPRTKCLLNNADLAPHHPKDPVEMRRINFQTPGMLSHPPIPIADMAEHTERLKANDSLKLSQEYESIDPGQQFTWEHSNLEVNKPKNRYANVIAYDHSRVILQPIEGIMGSDYINANYVDGYRCQNAYIATQGPLPETFGDFWRMVWEQRSATIVMMTRLEEKSRIKCDQYWPNRGTETYGFIQVTLLDTIELATFCVRTFSLHKNGSSEKREVRQFQFTAWPDHGVPEYPTPFLAFLRRVKTCNPPDAGPIVVHCSAGVGRTGCFIVIDAMLERIKPEKTVDVYGHVTLMRSQRNYMVQTEDQYSFIHEALLEAVGCGNTEVPARSLYAYIQKLAQVEPGEHVTGMELEFKRLANSKAHTSRFISANLPCNKFKNRLVNIMPYESTRVCLQPIRGVEGSDYINASFIDGYRQQKAYIATQGPLAETTEDFWRMLWENNSTIVVMLTKLREMGREKCHQYWPAERSARYQYFVVDPMAEYNMPQYILREFKVTDARDGQSRTVRQFQFTDWPEQGVPKSGEGFIDFIGQVHKTKEQFGQDGPISVHCSAGVGRTGVFITLSIVLERMRYEGVVDIFQTVKMLRTQRPAMVQTEDEYQFCYQAALEYLGSFDHYAT

SEQ ID NO: 87796 - protein, 264 aa, Homo sapiens
MEAEETMECLQEFPEHHKMILDRLNEQREQDRFTDITLIVDGHHFKAHKAVLAACSKFFYKFFQEFTQEPLVEIEGVSKMAFRHLIEFTYTAKLMIQGEEEANDVWKAAEFLQMLEAIKALEVRNKENSAPLEENTTGKNEAKKRKIAETSNVITESLPSAESEPVEIEVEIAEGTIEVEDEGIETLEEVASAKQSVKYIQSTGSSDDSALALLADITSKYRQGDRKGQIKEDGCPSDPTSKQEHMKSHSTESFKCEICNKRYL

SEQ ID NO: 87797 - protein, 242 aa, Homo sapiens
MDHHQPGTGRYQVLLNEEDNSESSAIEQPPTSNPAPQIVQAASSAPALETDSSPPPYSSITVEVPTTSDTEVYGEFYPVPPPYSVATSLPTYDEAEKAKAAAMAAAAAETSQRIQEEECPPRDDFSDADQLRVGNDGIFMLAFFMAFIFNWLGFCLSFCITNTIAGRYGAICGFGLSLIKWILIVRFSDYFTGYFNGQYWLWWIFLVLGLLLFFRGFVNYLKVRNMSESMAAAHRTRYFFLL

SEQ ID NO: 87798 - protein, 119 aa, Homo sapiens
METFPAVAEKVLKEFQVLLQHSPSPIGSTRMLQLMTINMFAVHNSQLKDCFSEECRSVIQEQAAALGLAMFSLLVRRCTCLLKESAKAQLSSPEDQDDQDDIKVSSFVPDLKELLPSVK

SEQ ID NO: 87799 - protein, 64 aa, Homo sapiens
MSAEVIHQVEEALDTDEKEMLLFLCRDVAIDVVPPNVRDLLDILRERGKLSVGDLAELLYRVRR

SEQ ID NO: 87800 - protein, 981 aa, Homo sapiens
QEQGDKMMEEYSLEKNERACIDFAISAKPLTRHMPQNKQSFQYRMWQFVVSPPFEYTIMAMIALNTIVLMMKFYGASVAYENALRVFNIVFTSLFSLECVLKVMAFGILNYFRDAWNIFDFVTVLGSITDILVTEFGNNFINLSFLRLFRAARLIKLLRQGYTIRILLWTFVQSFKALPYVCLLIAMLFFIYAIIGMQVFGNIGIDVEDEDSDEDEFQITEHNNFRTFFQALMLLFRSATGEAWHNIMLSCLSGKPCDKNSGILTRECGNEFAYFYFVSFIFLCSFLMLNLFVAVIMDNFEYLTRDSSILGPHHLDEYVRVWAEYDPAACGRIHYKDMYSLLRVISPPLGLGKKCPHRVACKRLLRMDLPVADDNTVHFNSTLMALIRTALDIKIAKGGADKQQMDAELRKEMMAIWPNLSQKTLDLLVTPHKSTDLTVGKIYAAMMIMEYYRQSKAKKLQAMREEQDRTPLMFQRMEPPSPTQEGGPGQNALPSTQLDPGGALMAHESGLKESPSWVTQRAQEMFQKTGTWSPEQGPPTDMPNSQPNSQSVEMREMGRDGYSDSEHYLPMEGQGRAASMPRLPAENQTISDTSPMKRSASVLGPKARRLDDYSLERVPPEENQRHHQRRRDRSHRASERSLGRYTDVDTGLGTDLSMTTQSGDLPSKERDQERGRPKDRKHRQHHHHHHHHHHPPPPDKDRYAQERPDHGRARARDQRWSRSPSEGREHMAHRQGSSSVSGSPAPSTSGTSTPRRGRRQLPQTPSTPRPHVSYSPVIRKAGGSGPPQQQQQQQQQQQQQAVARPGRAATSGPRRYPGPTAEPLAGDRPPTGGHSSGRSPRMERRVPGPARSESPRACRHGGARWPASGPHVSEGPPGPRHHGYYRGSDYDEADGPGSGGGEEAMAGAYDAPPPVRHASSGATGRSPRTPRASGPACASPSRHGRRLPNGYYPAHGLARPRGPGSRKGLHEPYSESDDDWC

SEQ ID NO: 87801 - protein, 325 aa, Homo sapiens
MAVLGVQLVVTLLTATLMHRLAPHCSFARWLLCNGSLFRYKHPSEEELRALAGKPRPRGRKERWANGLSEEKPLSVPRDAPFQLETCPLTTVDALVLRFFLEYQWFVDFAVYSGGVYLFTEAYYYMLGPAKETNIAVFWCLLTVTFSIKMFLTVTRLYFSAEEGGERSVCLTFAFLFLLLAMLVQVVREETLELGLEPGLASMTQNLEPLLKKQGWDWALPVAKLAIRVGLAVVGSVLGAFLTFPGLRLAQTHRDALTMSEDRPMLQFLLHTSFLSPLFILWLWTKPIARDFLHQPPFGETRCPILPSTLGASGCWWCCACCGWR

SEQ ID NO: 87802 - protein, 160 aa, Homo sapiens
MTMGDMKTPDFDDLLAAFDIPDMVDPKAAIESGHDDHESHMKQNAHGEDDSHAPSSSDVGVSVIVKNVRNIDSSEGGEKDGHNPTGNGLHNGFLTASSLDSYSKDGAKSLKGDVPASEVTLKDSTFSQFSPISSAEEFDDDEKIEVDDPPDKEDMRSSFR

SEQ ID NO: 87803 - protein, 161 aa, Homo sapiens
MFLPHMNHLTLEQTFFSQVLPKTVKLFDDMMYELTSQARGLSSQNLEIQTTLRNILQTMVQLLGALTGCVQHICATQESIILENIQSLPSSVLHIIKSTFVHCKNSESVYSGCLHLVSDLLQALFKEAYSLQKQLMELLDMVCMDPLVDDNDDILNMVIGE

SEQ ID NO: 87804 - protein, 103 aa, Homo sapiens
LTADKANAQAAALYKMNLTKVADSSPFALELLISDDCFVLDNGLCGKIYIWKGRKANEKERQAALQVAEGFISRMQYAPNTQVEILPQGHESPIFKQFFKDWK

SEQ ID NO: 87805 - protein, 57 aa, Homo sapiens
MLELLQYEHFRKELVNAQCAKFIDEQQILHWQHYSRKRMRLQQALAEQQQQNNTSGK

SEQ ID NO: 87806 - protein, 76 aa, Homo sapiens
MDGEDIPDFSSLKEETAYWKELSLKYKQSRRGHLWPVLHALILPHHFGHLEILISCLGLHRTDFTFSSASRKLGMS

SEQ ID NO: 87807 - protein, 718 aa, Homo sapiens
MSSARTPLPTLNERDTEQPTLGHLDSKPSSKSNMIRGRNSATSADEQPHIGNYRLLKTIGKGNFAKVKLARHILTGKEVAVKIIDKTQLNSSSLQKLFREVRIMKVLNHPNIVKLFEVIETEKTLYLVMEYASGGEVFDYLVAHGRMKEKEARAKFRQIVSAVQYCHQKFIVHRDLKAENLLLDADMNIKIADFGFSNEFTFGNKLDTFCGSPPYAAPELFQGKKYDGPEVDVWSLGVILYTLVSGSLPFDGQNLKELRERVLRGKYRIPFYMSTDCENLLKKFLILNPSKRGTLEQIMKDRWMNVGHEDDELKPYVEPLPDYKDPRRTELMVSMGYTREEIQDSLVGQRYNEVMATYLLLGYKSSELEGDTITLKPRPSADLTNSSAPSPSHKVQRSVSANPKQRRFSDQAGPAIPTSNSYSKKTQSNNAENKRPEEDRESGRKASSTAKVPASPLPGLERKKTTPTPSTNSVLSTSTNRSRNSPLLERASLGQASIQNGKDSTAPQRVPVASPSAHNISSSGGAPDRTNFPRGVSSRSTFHAGQLRQVRDQQNLPYGVTPASPSGHSQGRRGASGSIFSKFTSKFVRRNLSFRFARRPHVVGSGGNDKEKEEFREAKPRSLRFTWSMKTTSSMEPNEMMREIRKVLDANSCQSELHEKYMLLCMHGTPGHEDFVQWEMEVCKLPRLSLNGVRFKRISGTSMAFKNIASKIANELKL

SEQ ID NO: 87808 - protein, 328 aa, Homo sapiens
MEVLSLPNSFQTQALWDSLHSPGVPGSVFHFKPTTVVTSCQPKNPRELHRRRKLDPGKMHAKIWLMKTSLRSGRAALRELRSRENFLSKLNRELIETIQEMENSTTLHVRALLQQQDTLATIIDILEYSNKKRLQQLKSELQEWEEKKKCKMSYLEQQAEQLNAKIEKTQEEVNFLSTYMDHEYSIKSVQISTLMRQLQQVKDSQQDELDDLGEMRRKVLESLSDKIQKKKKKILSSVVAETQRPYEEALLQKMWESQDFLKCMQRFREIIDQFEENMPVLRAEVEELQAQTREPREVIFEDVLLRRPKCTPDMDVILNIPVEEPLPF

SEQ ID NO: 87809 - protein, 401 aa, Homo sapiens
MFPTGFSSPSPSAAAAAQEVRSATDGNTSTTPPTSAKKRKLNSSSSSSSNSSNEREDFDSTSSSSSTPPLQPRDSASPSTSSFCLGVSVAASSHVPIQKKLRFEDTLEFVGFDAKMAEESSSSSSSSSPTAATSQQQQLKNKSILISSVASVHHANGLAKSSTTVSSFANSKPGSAKKLVIKNFKDKPKLPENYTDETWQKLKEAVEAIQNSTSIKYNLEELYQAVENLCSYKISANLYKQLRQICEDHIKAQIHQFREDSLDSVLFLKKIDRCWQNHCRQMIMIRSIFLFLDRTYVLQNSMLPSIWDMGLELFRAHIISDQKVQNKTIDGILLLIERERNGEAIDRSLLRSLLSMLSDLQIYQDSFEQRFLEETNRLYAAEGQKLMQEREARILDHKLYL

SEQ ID NO: 87810 - protein, 82 aa, Homo sapiens
MDHLNEATQGKEHSEMSNNVSDPKGPPAKIARLEQNGSPLGRGRLGSTGAKMQGVPLKHSGHLMKTNLRKDIEIVYYEHQFG

SEQ ID NO: 87811 - protein, 193 aa, Homo sapiens
  MOD_RES (1)..(1): Any amino acid
XEIYEAVTSPQGPAMTWSMFAVGWMELKDAVRARGLLDRSFANMAEPFKVWTENADGSGAVNFLTGMGGFLQAVVFGCTGFRVSVSGIFYQGNKLNFSFSEDSVTVEVTARAGPWAPHLEAELWPSQSRLSLLPGHKVSFPRSAGRIQMSPPKLPGSSSSEFPGRTFSDVRDPLQSPLWVTLGSSSPTESLTV

SEQ ID NO: 87812 - protein, 744 aa, Homo sapiens
MDCLCIVTTKKYRYQDEDTPPQEHISPQITNEVIGPELVHVSEKNLSEIENVHGFVSHSHISPIKANPPPVLVNTDSLETPTYVNGTDADYEYEEITLERGNSGLGFSIAGGTDNPHIGDDSSIFITKIITGGAAAQDGRLRVNDCILRVNEVDVRDVTHSKAVEALKEAGSIVRLYVKRRKPVSEKIMEIKLIKGPKGLGFSIAGGVGNQHIPGDNSIYVTKIIEGGAAHKDGKLQIGDKLLAVNNVCLEEVTHEEAVTALKNTSDFVYLKVAKPTSMYMNDGYAPPDITNSSSQPVDNHVSPSSFLGQTPASPARYSPVSKAVLGDDEITREPRKVVLHRGSTGLGFNIVGGEDGEGIFISFILAGGPADLSGELRKGDRIISVNSVDLRAASHEQAAAALKNAGQAVTIVAQYRPEEYSRFEAKIHDLREQMMNSSISSGSGSLRTSQKRSLYVRALFDYDKTKDSGLPSQGLNFKFGDILHVINASDDEWWQARQVTPDGESDEVGVIPSKRRVEKKERARLKTVKFNSKTRDKGEIPDDMGSKGLSGQEEYVLSYEPVNQQEVNYTRPVIILGPMKDRINDDLISEFPDKFGSCVPHTTRPKRDYEVDGRDYHFVTSREQMEKDIQEHKFIEAGQYNNHLYGTSVQSVREVAEKGKHCILDVSGNAIKRLQIAQLYPISIFIKPKSMENIMEMNKRLTEEQARKTFERAMKLEQEFTEHFTGSSGGSRAVLDYHILNVL

SEQ ID NO: 87813 - protein, 83 aa, Homo sapiens
  MOD_RES (1)..(1): Any amino acid
XAQGLQRELDGERERREKPGGLKDGIPTRLPRLVPPWLKVMWPPSTDASSSLRRSWTGLRNDWPRPCRSWRRQKKLQMRVREE

SEQ ID NO: 87814 - protein, 165 aa, Homo sapiens
MNLAISIALLLTVLQVSRGQKVTSLTACLVDQSLRLDCRHENTSSSPIQYEFSLTRETKKHVLFGTVGVPEHTYRSRTNFTSKYNMKVLYLSAFTSKDEGTYTCALHHSGHSPPISSQNVTVLRGHGFHVPVTGGAHGGDRKPQVPVQRSYFSESADPLPPIPQT

SEQ ID NO: 87815 - protein, 136 aa, Homo sapiens
MDKHGVKTPLWKKETEELRAEDAEQEEGKEGSEDEDEDNQRPLEDSATEGEEPPRVAEEGEGRERRSVSYCPLRQESSTQQEAEPPGGAVRAGDPATTAAPRGLCLLRAPLLQEMQESAQPPSLCGALRSGSPGSG

SEQ ID NO: 87816 - protein, 207 aa, Homo sapiens
MTEDSQRNFRSVYYEKVGFRGVEEKKSLEILLKDDRLGILPPHHESHAKVMMYRKEQYLDVLHALKVVRFVSDATPQAEVYLRMYQLESGKLPRSPSFPLEPDDEVFLAIAKAMEEMVEDSVDCYWITRRFVNQLNTKYRDSLPQLPKAFEQYLNLEDGRLLTHLRMCSAAPKLPYDLWFKRCFAGCLPESSLQRVWDKVVSGSCKI

SEQ ID NO: 87817 - protein, 75 aa, Homo sapiens
MPAEEREKKLASCSRHRFRYIPPNTPENFWEVGFPSTQTCMERGYIKEDLDPCPRPKRRQPYNAIFSPKGKEQKT

SEQ ID NO: 87818 - protein, 116 aa, Homo sapiens
DYFRKFRRRKEKGLLGNDAAPSTSSALQAGLRSLQDLGPEMRQALTCDTEEEEEEGQEGVEEEDEKDLETNKVGTSFHSPRNLIVKYFVNPLSDFDTASGKKLPQRSPLCNRKIFI

SEQ ID NO: 87819 - protein, 203 aa, Homo sapiens
MRDGGKYSLEQRGVLQKLIHHRKETLSRRGPSASSVAVMTSSTSDHHLDAAAARQPNGVCRAGFERQHSLPSSEHLGADGGLYQIPLPSSQIPPQPRRAAPTTPPPPVKRRDREALMASGSGGHNTMPSGGNSVSSGSSVSSTSLDTLYTSSSPSEPGSSCSPTPPPVPRRGTHTTVSQVQPPPSKASAPEPPAEEEVATGTT

SEQ ID NO: 87820 - protein, 101 aa, Homo sapiens
MAAAAGRSLLLLLSSRGGGGGGAGGCGALTAGCFPGLGVSRHRQQQHHRTGVEEEVKMWKAQRVGELREGRKQLRSFTTIPTVIGKIPFLPHSPCTMPVTS

SEQ ID NO: 87821 - protein, 1324 aa, Homo sapiens
MALVRGAEPAAGPSRWLPTHVQVTVLRARGLRGKSSGAGSTSDAYTVIQVGREKYSTSVVEKTHGCPEWREECSFELPPGALDGLLRAQEADAGPAPWAASSAAACELVLTTMHRSLIGVDKFLGQATVALDEVFGAGRAQHTQWYKLHSKPGKKEKERGEIEVTIQFTRNNLSASMFDLSMKDKPRSPFSKIRDKMKGKKKYDLESASAILPSSAIEDPDLGSLGKMGKAKGFFLRNKLRKSSLTQSNTSLGSDSTLSSASGSLAYQGPGAELLTRSPSRSSWLSTEGGRDSAQSPKLFTHKRTYSDEANQMRVAPPRALLDLQGHLDAASRSSLCVNGSHIYNEEPQGPVRHRSSISGSLPSSGSLQAVSSRFSEEGPRSTDDTWPRGSRSNSSSEAVLGQEELSAQAKVLAPGASHPGEEEGARLPEGKPVQVATPIVASSEAVAEKEGARKEERKPRMGLFHHHHQGLSRSELGRRSSLGEKGGPILGASPHHSSSGEEKAKSSWFGLREAKDPTQKPSLDVSPQVESDPAALPHHLPCSPWAPAPPTPAPTAAPMLSTNLFAAASPAAATAAAAATTAAPEATPPGLLGLTNPFLTSLQSNPFFEELIADIALNSPSPAPSLPSASRASPTPLASPGKALPEWDNTFNVFAASRLRPEARSEILAPAGVGLEAAGLQDPGPGAMTAKAAEPQGEPGGGGGGGGGGGGRGGSSVWLEPRVPLDLGPNHQSASAADPGLLGSVGAGLPSSSAQLQLRASGSEPDRELPAPEVEAGQSPADSGTSLFSSPEVISVWERLPGPESAAEGQDDESSRGENQLCPDVETADDAWPWDVVTISPAAETASLVFRGESDEPAPQVQPESPETVSPKGSEGLPPPEPEPKPEWVSDKGLQPSTPPPKPPRLFTPSRSQEEEEEKAAVGLSNRGPETEGEDASPSALVVGPPETKEEGEKRESEESDSCSSATLLGQPGLEELVEDASPPVSGPCLSAPASCPEGPAPIPCHSKSLALQSQHIWGTPEVGEGPEAPEAQGQDPVGEGLGSLSATSQQADVWVSKEDALNPFLFQGSRDPPSLSSASPPGSRESSIHSGPEELPTPPEPDFPPPPLPPWASHHRGGPSPPCSPLSEAWPLTTSSAPPGEPALLPGPHEPSPPGGSPALLREDLAAATPASPLVLLPLETRPAEEPQPSASPHPVKPLSAAPVEGSPDRKQSRSSLSIALSSGLEKLKTVTSGSIQPVTQAPQAGQMVDTKRLKDSAVLDQSAKYYHLTHDELISLLLQRERELSQRDEHVQELESYIDRLLVRIMETSPTLLQIPPGPPK

SEQ ID NO: 87822 - protein, 48 aa, Homo sapiens
  MOD_RES (1)..(1): Any amino acid
XKLGMTPIRKCNDSLRHSPKVETTDCPVPPKRMRREATRQNRDGVLLC

SEQ ID NO: 87823 - protein, 97 aa, Homo sapiens
  MOD_RES (1)..(1): Any amino acid
XNVKELLCCSMEEYQQSQMLLLETLKVKQTILEPIPTSLKLPIAVSCYWLQHTETKAKLHHLQSLLLTMLVGPLIAIINSPGKEELQEDGAKMLYAE

SEQ ID NO: 87824 - protein, 103 aa, Homo sapiens
MLHTEGHALLRAVGQGKLRLARLLLEGGAYVNEGDAQGETALMAACRARYDDPQNKARMVRYLLEQGADPNIADRLGRTALMHACAGGGGAAVASLLLAHGAD

SEQ ID NO: 87825 - protein, 79 aa, Homo sapiens
MTTESGSDSESKPDQEAEPQEAAGAQGRAGAPVPEPPKEEQQQALEQFAAAAAHSTPVRREVTDKEQEFAARAAKQLEY

SEQ ID NO: 87826 - protein, 73 aa, Homo sapiens
MATAAQGPLSLLWGWLWSERFWLPENVSWADLEGPADGYGYPRGRHILSVFPLAAGIFFVRLLFERRDGVSLC

SEQ ID NO: 87827 - protein, 109 aa, Homo sapiens
MEGNRDEAEKCVEIAREALNAGNREKAQRFLQKAEKLYPLPSARALLEIIMKNGSTAGNSPHCRKPSGSGDQSKPNCTKDSTSGSGEGGKGYTKDQVDGVLRALWILEH

SEQ ID NO: 87828 - protein, 223 aa, Homo sapiens
MTTTQKHDLFTPEPHYVPGYAGFFPQLRYQVGNTYGRTTGQLLTDPSVQKSPCSVLSPMSKPKFIEDFSQSKPPRVPCQDLTEPYIPHYTSELPVPSPAPSCARLPVPALTGCPVGTGLKPSKNFEILGQLPPLEVDAQEPPGVENIPRQILLPAGFTPDTPHPPCPPGRKGDSRDLGHPVYGEEAWKSATPVCEAPRQHQLYHCQRDEYPPPARRQQETLDV

SEQ ID NO: 87829 - protein, 968 aa, Homo sapiens
MATLSLTVNSGDPPLGALLAVEHVKDDVSISVEEGKENILHVSENVIFTDVNSILRYLARVATTAGLYGSNLMEHTEIDHWLEFSATKLSSCDSFTSTINELNHCLSLRTYLVGNSLSLADLCVWATLKGNAAWQEQLKQKKAPVHVKRWFGFLEAQQAFQSVGTKWDVSTTKARVAPEKKQDVGKFVELPGAEMGKVTVRFPPEASGYLHIGHAKAALLNQHYQVNFKGKLIMRFDDTNPEKEKEDFEKVILEDVAMLHIKPDQFTYTSDHFETIMKYAEKLIQEGKAYVDDTPAEQMKAEREQRIDSKHRKNPIEKNLQMWEEMKKGSQFGQSCCLRAKIDMSSNNGCMRDPTLYRCKIQPHPRTGNKYNVYPTYDFACPIVDSIEGVTHALRTTEYHDRDEQFYWIIEALGIRKPYIWEYSRLNLNNTVLSKRKLTWFVNEGLVDGWDDPRFPTVRGVLRRGMTVEGLKQFIAAQGSSRSVVNMEWDKIWAFNKKLRALCKKVIDPVAPRYVALLKKEVIPVNVPEAQEEMKEVAKHPKNPEVGLKPVWYSPKVFIEGADAETFSEGEMVTFINWGNLNITKIHKNADGKIISLDAKLNLENKDYKKTTKVTWLAETTHALPIPVICVTYEHLITKPVLGKDEDFKQYVNKNSKHEELMLGDPCLKDLKKGDIIQLQRRGFFICDQPYEPVSPYSCKEAPCVLIYIPDGHTKEMPTSGSKEKTKVEATKNETSAPFKERPTPSLNNNCTTSEDSLVLYNRVAVQGDVVRELKAKKAPKEDVDAAVKQLLSLKAEYKEKTGQEYKPGNPPAEIGQNISSNSSASILESKSLYDEVAAQGEVVRKLKAEKSPKAKINEAVECLLSLKAQYKEKTGKEYIPGQPPLSQSSDSSPTRNSEPAGLETPEAKVLFDKVASQGEVVRKLKTEKAPKDQVDIAVQELLQLKAQYKSLIGVEYKPVSATGAEDK

SEQ ID NO: 87830 - protein, 238 aa, Homo sapiens
MAAEPNKTEIQTLFKRLRAVPTNKACFDCGAKNPSWASITYGVFLCIDCSGVHRSLGVHLSFIRSTELDSNWNWFQLRCMQVGGNANATAFFRQHGCTANDANTKYNSRAAQMYREKIRQLGSAALARHGTDLWIDNMSSAVPNHSPEKKDSDFFTEHTQVLVGLGASCQQEWLTEASVIWPPFQPPAWDAPATEPSGTQQPAPSTESSGLAQPEHGPNTDLLGTSPKASLELKSSII

SEQ ID NO: 87831 - protein, 720 aa, Homo sapiens
MSLWGLVSKMPPEKVQRLYVDFPQHLRHLLGDWLESQPWEFLVGSDAFCCNLASALLSDTVQHLQASVGEQGEGSTILQHISTLESIYQRDPLKLVATFRQILQGEKKAVMEQFRHLPMPFHWKQEELKFKTGLRRLQHRVGEIHLLREALQKGAEAGQVSLHSLIETPANGTGPSEALAMLLQETTGELEAAKALVLKRIQIWKRQQQLAGNGAPFEESLAPLQERCESLVDIYSQLQQEVGAAGGELEPKTRASLTGRLDEVLRTLVTSCFLVEKQPPQVLKTQTKFQAGVRFLLGLRFLGAPAKPPLVRADMVTEKQARELSVPQGPGAGAESTGEIINNTVPLENSIPGNCCSALFKNLLLKKIKRCERKGTESVTEEKCAVLFSASFTLGPGKLPIQLQALSLPLVVIVHGNQDNNAKATILWDNAFSEMDRVPFVVAERVPWEKMCETLNLKFMAEVGTNRGLLPEHFLFLAQKIFNDNSLSMEAFQHRSVSWSQFNKEILLGRGFTFWQWFDGVLDLTKRCLRSYWSDRLIIGFISKQYVTSLLLNEPDGTFLLRFSDSEIGGITIAHVIRGQDGSPQIENIQPFSAKDLSIRSLGDRIRDLAQLKNLYPKKPKDEAFRSHYKPEQMGKDGRGYVPATIKMTVERDQPLPTPELQMPTMVPSYDLGMAPDSSMSMQLGPDMVPLPRRISQRVVSLPGASPADAPQPGPDEPAL

SEQ ID NO: 87832 - protein, 116 aa, Homo sapiens
MSGEPGQTSVAPPPEEVEPGSGVRIVVEYCEPCGFEATYLELASAVKEQYPGIEIESRLGGTGAFEIEINGQLVFSKLENGGFPYEKDVSIYSVGRTSWSPYPNSASSCHSTPLAH

SEQ ID NO: 87833 - protein, 53 aa, Homo sapiens
MAGSVADSDAVVLCNQLDLWGLRRPSCRCGNRTQSCVHRSAATQKFLYIWGEG

SEQ ID NO: 87834 - protein, 266 aa, Homo sapiens
MHNILKKYHQYIVECHGITLLPQFLGMYRLNVDGVEIYVIVTRNVFSHRLSVYRKYDLKMANLKATFTFPKPTGSTVAREASDKEKAKELPTLKDNDFINEGQKIYIDDNNKKVFLEKLKKDVEFLAQLKLMDYSLLVGIHDVERAEQEEVECEENDGEEEGESDGTHPVGTPPDSPGNTLNSSPPLAPGEFDPNIDVYGIKCHENSPRKEVYFMAIIDILTHYDAKKKAAHAAKTVKHGAGAEISTVNPEQYSKRFLDFIGHILT

SEQ ID NO: 87835 - protein, 254 aa, Homo sapiens
  MOD_RES (1)..(1): Any amino acid
XCKARIRRENIVVYDVCATIDQCPTRIEETSPIVLRYKTPYFKASARVVMPPIPRHETWVVGWIQACNQMEFFNTYSDLGMSSWELPDLREGRVKAISDSDGVSYPWYGNTTETVTLVGPTNKISRFSVSMNDNFYPSVTWAVPVSDSNVPLLTRIKRDQSFTTWLVAMNTTTKEKIILQTIKWRMRVDIEVDPLQLLGQRARLVGRTQQEQPRILSRMEPIPPNALVKPNANDAQVLMWRPKRGPPLVVIPPK

SEQ ID NO: 87836 - protein, 179 aa, Homo sapiens
MTTEVGSVSEVKKDSSQLGTDATKEKPKEVAENQQNQSSDPEEEKGSQPPPAAESQSSLRRQKREKETSESRGISRFIPPWLKKQKSYTLVVAKDGGDKKEPTQAVVEEQVLDKEEPLPEEQRQAKGDAEEMAQKKQEIKVEVKEEKPSVSKEEKPSVSKVEMQPTELVSKEREEKVKE

SEQ ID NO: 87837 - protein, 97 aa, Homo sapiens
  MOD_RES (1)..(1): Any amino acid
XKQLEETQHDKDQLVLNIEALRAELDHMRLRADPTWAVSQISGSPWQTATQTPTAPVQCCGAHRKAGWQPCEMSLPRYKLLMSRIGNVPSKLVSWQM

SEQ ID NO: 87838 - protein, 139 aa, Homo sapiens
FVSHLETELEQSRLRETETLGALREMQDKVLDMEKRNSSLPDENNVAQLQEELKALKVREGQAVASTRELKLQLQELSDTWQDQIEELKAEVRLLKGPPPFEDPLAFDGLSLARHLDEDSLPSSDEELLGVGVGAALQD

SEQ ID NO: 87839 - protein, 142 aa, Homo sapiens
GSGPDTRTPGTVEDGSAPCPAFRSPAVSPCGEEPCCFQISPAEETLELGRLVSPGNCDTLSPRAAGFYACHVRSLIPCRSTKGRWPLTASAAGLSRLSQILCTPGAPLGPPGSLRGPYLGRASHGDFPTSVIKRRKRHSGRA

SEQ ID NO: 87840 - protein, 101 aa, Homo sapiens
  MOD_RES (1)..(1): Any amino acid
XLPFIVSHRLSNTLSLDIHENHSFALLGKKKSSNLTLPPKYNQPFFVTSLPDDKIPKGAGPGCYLAGSLTLSKTELGKKANVVLTPRGSLQQNDKENLKRM

SEQ ID NO: 87841 - protein, 714 aa, Homo sapiens
MAGLTAAAPRPGVLLLLLSILHPSRPGGVPGAIPGGVPGGVFYPALGPGGKPLKPVPGGLAGAGLGAGLGAFPAVTFPGALVPGGVADAAAAYKAAKAGAGLGGVPGVGGLGVSAGAVVPQPGAGVKPGKVPGVGLPGVYPGGVLPGARFPGVGVLPGVPTGAGVKPKAPGVGGAFAGIPGVGPFGGPQPGVPLGYPIKAPKLPGGYGLPYTTGKLPYGYGPGGVAGAAGKAGYPTGTGVGPQAAAAAAAKAAAKFGAGAAGVLPGVGGAGVPGVPGAIPGIGGIAGVGTPAAAAAAAAAAKAAKYGAAAGLVPGGPGFGPGVVGVPGAGVPGVGVPGAGIPVVPGAGIPGAAVPGVVSPEAAAKAAAKAAKYGARPGVGVGGIPTYGVGAGGFPGFGVGVGGIPGVAGVPGVGGVPGVGGVPGVGISPEAQAAAAAKAAKYGVGTPAAAAAKAAAKAAQFGLVPGVGVAPGVGVAPGVGVAPGVGLAPGVGVAPGVGVAPGVGVAPGIGPGGVAAAAKSAAKVAAKAQLRAAAGLGAGIPGLGVGVGVPGLGVGAGVPGLGVGAGVPGFGAVPGALAAAKAAKYGAAVPGVLGGLGALGGVGIPGGVVGAGPAAAAAAAKAAAKAAQFGLVGAAGLGGLGVGGLGVPGVGGLGGIPPAAAAKAAKYGAAGLGGVLGGAGQFPLGGVAARPGFGLSPIFPGGACLGKACGRKRK

SEQ ID NO: 87842 - protein, 228 aa, Homo sapiens
MEQPPAPKSKLKKLSEDSLTKQPEEVFDVLEKLGEGSYGSVFKAIHKESGQVVAIKQVPVESDLQEIIKEISIMQQCDSPYVVKYYGSYFKNTDLWIVMEYCGAGSVSDIIRLRNKTAIFMIPTNPPPTFRKPELWSDDFTDFVKKCLVKNPEQRATATQLLQHPFIKNAKPVSILRDLITEAMEIKAKRHEEQQRELEEEEENSDEDELDSHTMVKTSVESVGTMRA

SEQ ID NO: 87843 - protein, 50 aa, Homo sapiens
MSLFGLLLLTSALAGQRQGTQAESNLSSKFQFSSNKEQNGRNYIQASGLA

SEQ ID NO: 87844 - protein, 80 aa, Homo sapiens
MPIVDKLKEALKPGRKDSADDGELGKLLASSAKKVLLQKIEFEPASKSFSYQLEALKSKYVLLNPKTEGASRHKSGDDPP

SEQ ID NO: 87845 - protein, 186 aa, Homo sapiens
MLMGLLRPYILGERGTVMTPSGSRMSAEASARPLRVGSRVEVIGKGHRGTVAYVGATLFATGKWVGVILDEAKGKNDGTVQGRKYFTCDEGHGIFVRQSQIQVFEDGADTTSPETPDSSASKVLKREGTDTTAKTSKLRGLKPKKAPTARKTTTRRPKPTRPASTGVAGASSSLGPSGSASAGELS

SEQ ID NO: 87846 - protein, 171 aa, Homo sapiens
MLDTSCLQTSDSKFFSFGTRTGSPCSSACRHPIVGPCDCKIESLGYNRLILQIGRGTVVPEPFSTESFTLDVYRYKDSLKEDIQKADLVISHAGAGSCLETLEKGKPLVVVINEKLMNNHQLELAKQLHKEGHLFYCTCRLILKKCLLVVEGGDKEILWVAGGSQLGLKFC

SEQ ID NO: 87847 - protein, 122 aa, Homo sapiens
MPNTVSDFWEMVWQEEVSLIVMLTQLREGKEKCVHYWPTEEETYGPFQIRIQDMKECPEYTVRQLTIQYQEERRSVKHILFSAWPDHQTPESAGPLLRLVAEVEESPETAAHPGPIVVHCRC

SEQ ID NO: 87848 - protein, 53 aa, Homo sapiens
MTCWDNESILLAQSWMPRETVIFASDVRINFDKFRNCMTATVISKTIITTNPD

SEQ ID NO: 87849 - protein, 35 aa, Homo sapiens
MEIHLQTNAEKGTITIQDTGIGMTQEELVSNLGTI

SEQ ID NO: 87850 - protein, 133 aa, Homo sapiens
MEEETHTDAKIRAENGTGSSPRGPGCSLRHFACEQNLLSRPDGSASFLQGDTSVLAGVYGPAEVKVSKEIFNKATLEVILRPKIGLPAGVSGWQSGLAFFPLESSIIPAGVAEKSRERLIRNTCEAVVLGTLH

SEQ ID NO: 87851 - protein, 77 aa, Homo sapiens
MDPTVDPCHDFFSYACGGWIKANPVPDGHSRWGTFSNLWEHNQAIIKHLLENSTASVSEAERKAQVYYRACMNETRI

SEQ ID NO: 87852 - protein, 33 aa, Homo sapiens
MSVTYDDSVGVEVSSDSFWEVGNYKRTVKRIDD

SEQ ID NO: 87853 - protein, 71 aa, Homo sapiens
RIYAAFKEVLGSGMHHHLQNNELLRDIFGLGPVLLLDATALKACKHLYNAAAFKARTKARSRVRDKRADIL

SEQ ID NO: 87854 - protein, 1849 aa, Homo sapiens
MTTMLQKSDSNASFLRAARAGNLDKVVEYLKGGIDINTCNQNGLNALHLAAKEGHVGLVQELLGRGSSVDSATKKGNTALHIASLAGQAEVVKVLVKEGANINAQSQNGFTPLYMAAQENHIDVVKYLLENGANQSTATEDGFTPLAVALQQGHNQAVAILLENDTKGKVRLPALHIAARKDDTKSAALLLQNDHNADVQSKMMVNRTTESGFTPLHIAAHYGNVNVATLLLNRGAAVDFTARNGITPLHVASKRGNTNMVKLLLDRGGQIDAKTRDGLTPLHCAARSGHDQVVELLLERGAPLLARTKNGLSPLHMAAQGDHVECVKHLLQHKAPVDDVTLDYLTALHVAAHCGHYRVTKLLLDKRANPNARALNGFTPLHIACKKNRIKVMELLVKYGASIQAITESGLTPIHVAAFMGHLNIVLLLLQNGASPDVTNIRGETALHMAARAGQVEVVRCLLRNGALVDARAREEQTPLHIASRLGKTEIVQLLLQHMAHPDAATTNGYTPLHISAREGQVDVASVLLEAGAAHSLATKKGFTPLHVAAKYGSLDVAKLLLQRRAAADSAGKNGLTPLHVAAHYDNQKVALLLLEKGASPHATAKNGYTPLHIAAKKNQMQIASTLLNYGAETNIVTKQGVTPLHLASQEGHTDMVTLLLDKGANIHMSTKSGLTSLHLAAQEDKVNVADILTKHGADQDAHTKLGYTPLIVACHYGNVKMVNFLLKQGANVNAKTKNGYTPLHQAAQQGHTHIINVLLQHGAKPNATTANGNTALAIAKRLGYISVVDTLKVVTEEVTTTTTTITEKHKLNVPETMTEVLDVSDEEGDDTMTGDGGEYLRPEDLKELGDDSLPSSQFLDGMNYLRYSLEGGRSDSLRSFSSDRSHTLSHASYLRDSAVMDDSVVIPSHQVSTLAKEAERNSYRLSWGTENLDNVALSSSPIHSGFLVSFMVDARGGAMRGCRHNGLRIIIPPRKCTAPTRVTCRLVKRHRLATMPPMVEGEGLASRLIEVGPSGAQFLGPVIVEIPHFAALRGKERELVVLRSENGDSWKEHFCDYTEDELNEILNGMDEVLDSPEDLEKKRICRIITRDFPQYFAVVSRIKQDSNLIGPEGGVLSSTVVPQVQAVFPEGALTKRIRVGLQAQPMHSELVKKILGNKATFSPIVTLEPRRRKFHKPITMTIPVPKASSDVMLNGFGGDAPTLRLLCSITGGTTPAQWEDITGTTPLTFVNECVSFTTNVSARFWLIDCRQIQESVTFASQVYREIICVPYMAKFVVFAKSHDPIEARLRCFCMTDDKVDKTLEQQENFAEVARSRDVEVLEGKPIYVDCFGNLVPLTKSGQHHIFSFFAFKENRLPLFVKVRDTTQEPCGRLSFMKEPKSTRGLVHQAICNLNITLPIYTKESESDQEQEEEIDMTSEKNPQDEQERIEERLAYIADHLGFSWTELARELDFTEEQIHQIRIENPNSLQDQSHALLKYWLERDGKHATDTNLVECLTKINRMDIVHLMETNTEPLQERISHSYAEIEQTITLDHSEGFSVLQEELCTAQHKQKEEQAVSKESETCDHPPIVSEEDISVGYSTFQDGVPKTEGDSSATALFPQTHKEQVQQDFSGKMQDLPEESSLEYQQEYFVTTPGTETSETQKAMIVPSSPSKTPEEVSTPAEEEKLYLQTPTSSERGGSPIIQEPEEPSEHREESSPRKTSLVIVESADNQPETCERLDEDAAFEKELTEELGELEASSDEEAMVTTRVVRRRVIIQGDDMPEIPPETVTEEEYIDEHGHTVVKKVTRKIIRRYVSSEGTEKEEIMVQGMPQEPVNIEEGDGYSKVIKRVVLKSDTEQSEDNNE

SEQ ID NO: 87855 - protein, 37 aa, Homo sapiens
MEKKCTLYFLVLLPFFMILVTAELEESPEDSIQLGVT

SEQ ID NO: 87856 - protein, 721 aa, Homo sapiens
MASKGAGMSFSRKSYRLTSDAEKSRVTGIVQEKLLNDYLNRIFSSSEHAPPAATSRKPLNFQNLPEHLDQLLQVDNEEEESQGQVEGRLGPSTVVLDHTGGFEGLLLVDDDLLGVIGHSNFGTIRSTTCVYKGKWLYEVLISSQGLMQIGWCTISCRFNQEEGVGDTHNSYAYDGNRVRKWNVTTTNYGKAWAAGDIVSCLIDLDDGTLSFCLNGVSLGTAFENLSRGLGMAYFPAISLSFKESVAFNFGSRPLRYPVAGYRPLQDPPSADLVRAQRLLGCFRAVLSVELDPVEGRLLDKESSKWRLRGQPTVLLTLAHIFHHFAPLLRKVYLVEAVLMSFLLGIVEKGTPTQAQSVVHQVLDLLWLFMEDYEVQDCLKQLMMSLLRLYRFSPIVPDLGLQIHYLRLTIAILRHEKSRKFLLSNVLFDVLRSVVFFYIKSPLRVEEAGLQELIPTTWWPHCSSREGKESTEMKEETAEERLRRRAYERGCQRLRKRIEVVEELQVQILKLLLDNKDDNGGEASRYIFLTKFRKFLQENASGRGNMPMLCPPEYMVCFLHRLISALRYYWDEYKASNPHASFSEEAYIPPQVFYNGKVDYFDLQRLGGLLSHLRKTLKDDLASKANIVIDPLELQSTAMDDLDEDEEPAPAMAQRPMQALAVGGPLPLPRPGWLSSPTLGRANRFLSTAAVSLMTPRRPLSTSEKVKVRTLSVEQRTREDSS

SEQ ID NO: 87857 - protein, 176 aa, Homo sapiens
MLGVAAGMTHSNMANALASATCERCKGGFAPAEKIVNSNGELYHEQCFVCAQCFQQFPEGLFYEFEGRKYCEHDFQMLFAPCCHQCGEFIIGRVIKAMNNSWHPECFRCDLCQEVLADIGFVKNAGRHLCRPCHNREKARGLGKYICQKCHAIIDEQPLIFKNDPYHPDHFNCANC

SEQ ID NO: 87858 - protein, 189 aa, Homo sapiens
  MOD_RES (1)..(1): Any amino acid
XKQLDADVSPKPTIFLPSIAETKLQKAGTYLCLLEKFFPDIIKIHWQEKKSNTILGSQEGNTMKTNDTYMKFSWLTVPEESLDKEHRCIVRHENNKNGIDQEIIFPPIKTDVTTVDPKYNYSKDANDVITMDPKDNWSKDANDTLLLQLTNTSAYYTYLLLLLKSVVYFAIITCCLLRRTAFCCNGEKS

SEQ ID NO: 87859 - protein, 128 aa, Homo sapiens
ATTGLKMKHLLTGQERTVWHLQYTDWPEHGCPEDLKGFLSYLEEIQSVRRHTNSTSDPQSPNPPLLVHCSAGHPESAGHAEATENDAGADSLPVHICVQSPHPVPEKLQAHLSSHNFLRGQSCEAFTA

SEQ ID NO: 87860 - protein, 748 aa, Homo sapiens [sequence omitted]

SEQ ID NO: 87861 - protein, 173 aa, Homo sapiens
MESPASSQPASMPQSKGKSKRKKDLRISCMSKPPAPNPTPPRNLDSRTFITIGDRNFEVEADDLVTISELGRGAYGVVEKVRHAQSGTIMAVKRIRATVNSQEQKRLLMDLDINMRTVDCFYTVTFYGALFREGDVWICMELMDTSLDKFYRKVLDKNMTIPEDILGEIAVSM

SEQ ID NO: 87862 - protein, 15 aa, Homo sapiens
  MOD_RES (1)..(1): Any amino acid
XEQETKDAAEECKEP

SEQ ID NO: 87863 - protein, 163 aa, Homo sapiens
MKNKDDECFGDDIEEIPDTDFDFEGNLALFDKAAVFEEIDTYERRSGTRSRGIPNERPTRYRHDENILESEPIVYRRIIVPHNVSKEFCTDSGLVVPSISYELHKKLLSVAEKHGLTLERRLEMTGVCASQMALTLLGGPNRLNPKNVHQRPTVALLCGPHVK

SEQ ID NO: 87864 - protein, 144 aa, Homo sapiens
MKVWLKSLMKLCSKCFPRFRMTHHLMKQEQQSDPLQRETHKKASYSQQKSLNNAAFASGSNEREEHLAKIFGTSIAWNSPKPEYFLGSVDKIPDKDHLSEEKNFKESCLFDRDLREQLTTIDKETLQGAAKPDLLWQTRHIIFL

SEQ ID NO: 87865 - protein, 69 aa, Homo sapiens
  MOD_RES (1)..(1): Any amino acid
XWTNAKMEIATKEPMNPIKQYVKDGKLRYVANIFPYKGYIWNYGTLPQVSSSPNKESNEEEQVWHFLGK

SEQ ID NO: 87866 - protein, 98 aa, Homo sapiens
MEEDGQQREKVKPLGFLKPFSLMKASSRFKAHQDALPRLPVPPLQQSLDHYLKALQPIVSEEEWAHTKQLVDEFQASGGVGERLQKGLERRARKTENW

SEQ ID NO: 87867 - protein, 106 aa, Homo sapiens; identical to SEQ ID NO: 55080

SEQ ID NO: 87868 - protein, 318 aa, Homo sapiens
MRESQPEAEIPLQDTTAEAFTMLLKYIYTGRATLTDEKEEVLLDFLSLAHKYGFPELEDSTSEYLCTILNIQNVCMTFDVASLYSLPKLTCMCCMFMDRNAQEVLSSEGFLSLSKTALLNIVLRDSFAAPEKDIFLALLNWCKHNSKENHAEIMQAVRLPLMSLTELLNVVRPSGLLSPDAILDAIKVRSESRDMDLNYRGMLIPEENIATMKYGAQVVKGELKSALLDGDTQNYDLDHGFSRHPIDDDCRSGIEIKLGQPSIINHIRILLWDRDSRSYSYFIEVSMDELDWVRVIDHSQYLCRSWQKLYFPARVCSL

SEQ ID NO: 87869 - protein, 623 aa, Homo sapiens
MEKLRLRSPWVPLCLGQPRVLQGRLARSSPSIWDSALQEQKGELRKRLSYTTHKLEKLETEFDSTRHYLEIELRRAQEELEKVTEKLRRIQSNYMALQRINQELEDKLYRMGQHYEEEKRALSHEIVALNSHLLEAKVTIDKLSEDNELYRKDCNLAAQLLQCSQTYGRVHKVSELPSDFQERVSLHMEKHGCSLPSPLCHPAYADSVPTCVIAKVLEKPDPASLSSRLSDASARDLAFCDGVEKPGPRPPYKGDIYCSDTALYCPEERRRDRRPSVDAPVTDVGFLRAQNSTDSAAEEEEEAEAAAFPAGFQHEAFPSYAGSLPTSSSYSSFSATSEEKEHAQASTLTASQQAIYLNSRDELFDRKPPATTYEGSPRFAKATAAVAAPLEAEVAPGFGRTMSPYPAETFRFPASPGPQQALMPPNLWSLRAKPGTARLPGEDMRGQWRPLSVEDIGAYSYPVSAAGRASPCSFSERYYGGAGGSPGKKADGRASPLYASYKADSFSEGDDLSQGHLAEPCFLRAGGDLSLSPGRSADPLPGYAPSEGGDGDRLGVQLCGTASSPEPEQGSRDSLEPSSMEASPEMHPAARLSPQQAFPRTGGSGLSRKDSLTKAQLYGTLLN

SEQ ID NO: 87870 - protein, 161 aa, Homo sapiens
MADKTPGGSQKASSKTRSSDVHSSGSSDAHMDASGPSDSDMPSRTRPKSPRKHNYRNESARESLCDSPHQNLSRPLLENKLKAFSIGKMSTAKRTLSKKEQEELKKKEDEKAAAEIYEEFLAAFEGSDGNKVKTFVRGGVVNAAKEEHETDEKRGKIYKPS

SEQ ID NO: 87871 - protein, 356 aa, Homo sapiens
MSGVRGLSRLLSARRLALAKAWPTVLQTGTRGFHFTVDGNKRASAKVSDSISAQYPVVDHEFDAVVVGAGGAGLRAAFGLSEAGFNTACVTKLFPTRSHTVAAQGGINAALGNMEEDNWRWHFYDTVKGSDWLGDQDAIHYMTEQAPAAVVELENYGMPFSRTEDGKIYQRAFGGQSLKFGKGGQAHRCCCVADRTGHSLLHTLYGRSLRYDTSYFVEYFALDLLMENGECRGVIALCIEDGSIHRIRAKNTVVATGGYGRTYFSCTSAHTSTGDGTAMITRAGLPCQDLEFVQFHPTGIYGAGCLITEGCRGEGGILINSQGERFMERYAPVAKDLASRDVVSRSMTLEIREGRS

SEQ ID NO: 87872 - protein, 132 aa, Homo sapiens
MATSIGVSFSVGDGVPEAEKNAGEPENTYILRPVFQQRFRPSVVKDCIHAVLKEELANAEYSPEEMPQLTKHLSENIKDKLKEMGFDRYKMVVQVVIGEQRGEGVLLECSGMISAHCNLCLPGSSDSPASAS

SEQ ID NO: 87873 - protein, 128 aa, Homo sapiens
MAAAMPLALLVLLLLGPGGWCLAEPPRDSLREELVITPLPSGDVAATFQFRTRWDSELQREGVSHYRLFPKALGQLISKYSLRELHLSFTQGFWRTRYWGPPFLQAPSGAELWVWFQDTVTEQASLCC

SEQ ID NO: 87874 - protein, 97 aa, Homo sapiens
PMKPLKATATTSQPVLTIQQIETIFYKIQDIYEIHKEFYDNLCPKVQQWDSQVTMGHLFQKLASQLGVYKAFVDNYKVALETAEKCSQSNNQFQKIS

SEQ ID NO: 87875 - protein, 118 aa, Homo sapiens
MKCLVTGGNVKVLGKAVHSLSRIGDELYLEPLEDGLSLRTVNSSRSAYACFLFAPLFFQQYQAATPGQDLLRCKILMKSFLSVFRSLAMLEKTVEKCCISLNGRSSRLVVQLHCKFGL

SEQ ID NO: 87876 - protein, 97 aa, Homo sapiens
  MOD_RES (1)..(1): Any amino acid
XPGPTPPAPPGPGTDAQAAGAERAEEAAGPGAAALQREAAYNWQASKPTVQERFAFLFNNEVLCDVHFLVGKGLSSQRIPAHRDPATPTRTPVRQDP

SEQ ID NO: 87877 - protein, 71 aa, Homo sapiens
  MOD_RES (1)..(1): Any amino acid
XLLPPPARCPRRALHKQKDGTEFKSIYSLDKLYPESQGSDTAWRVPNGAKQADSDIPLERYLYLKGTPWIQ

SEQ ID NO: 87878 - protein, 216 aa, Homo sapiens
MAAAAGDADDEPRSGHSSSEGECAVAPEPLTDAEGLFSFADFGSALGGGGAGLSGRASGGAQSPLRYLHVLWQQDAEPRDELRCKIPAGRLRRAARPHRRLGPTGKEVHALKRLRDSANANDVETVQQLLEDGADPCAADDKGRTALHFASCNGNDQIVQLLLDHGADPNQRDGLGNTPLHLAACTNHVPVITTLLRGAGTCRGPCRCPGPSWSHT

SEQ ID NO: 87879 - protein, 54 aa, Homo sapiens
MKAADEPAYLTVGTDVSAKYRGAFCEAKIKTVKRLVKVKVLLKQDNTTQLVQDD

SEQ ID NO: 87880 - protein, 369 aa, Homo sapiens [sequence omitted]

SEQ ID NO: 87881 - protein, 141 aa, Homo sapiens
MEREGSGGSGGSAGLLQQILSLKVVPRVGNGTLCPNSTSLCSFPEMWYGVFLWALVSSLFFHVPAGLLALFTLRHHKYGGEYSEDDVNELVKEDEVDGEEQTQKTQGKKRKAQSIPARKRRQGGLSLEEEEEEDANSESEG

SEQ ID NO: 87882 - protein, 156 aa, Homo sapiens
MKLEASCGTATSEVPKPEKKTARDAEPSSETRPQEVEAEPRSGSGPEAEAEPLDFVVATEREFEEVLAISGGIYGGLDYLPSRYHSWLRDPDRTVVLAKRNGGVIALESVNVIDAGETVLVEGLRVAPWERGKGVAGLLQRFCSQLVKRQHPGVKV

SEQ ID NO: 87883 - protein, 163 aa, Homo sapiens
MAAAKDTHEDHDTSTENTDESNHDPQFEPIVSLPEQEIKTLEEDEEELFKMRAKLFRFASENDLPEWKERGTGDVKLLKHKEKGAIRLLMRRDKTLKICANHYITPMMELKPNAGSDRAWVWNTHADFADECPKPELLAIRFLNAESEPRALGTCLTWGSPAW

SEQ ID NO: 87884 - protein, 138 aa, Homo sapiens
MCEIWGKGLFATQLIRKGETIFVERPLVAAQFLWNALYRYRACDHCLRALEKAEENAQRLTGKPGQVLPHPELCTVRKDLHQNCPHCQVMYCSAECRLAATEQYHQVLCPGPSQDDPLHPLNKLQEAWRSIHYPPETA

SEQ ID NO: 87885 - protein, 188 aa, Homo sapiens
MAEVQVLVLDGRGHLLGRLAAIVAKQVLLGRKVVVVRCEGINISGNFYRNKLKYLAFLRKRMNTNPSRGPYHFRAPSRIFWRTVRGMLPHKTKRGQAALDRLKVFDGIPPPYDKKKRMVVPAALKVVRLKPTRKFAYLGRLAHEVGWKYQAVTATLEEKRKEKAKIHYRKKKQLMATETGREERGEEN

SEQ ID NO: 87886 - protein, 126 aa, Homo sapiens
MDPLQKRNPASPSKSSPMTAAETSQEGPAPSQPSYSEQPMMGLSNLSPGPGPSQAVPLPEGLLRQRYREEKTLEERRWERLEFLQRKKAFLRHVRRRHRDHMAPYAVGREARISPLGDRSQNRFRC

SEQ ID NO: 87887 - protein, 475 aa, Homo sapiens
MTIVDKASESSDPSAYQNQPGSSEAVSPGDMDAGSASWGAVSSLNDVSNHTLSLGPVPGAVVYSSSSVPDKSKPSPQKDQGHAEGFCMMCTMQAHITQALSNPGDVIKPMFVINEMRRIARHFRFGNQEDAHEFLQYTVDAMQKACLNGSNKLDRHTQATTLVCQIFGGYLRSRVKCLNCKGVSDTFDPYLDITLEIKAAQSVNKALEQFVKPEQLDGENSYKCSKCKKMVPASKRFTIHRSSNVLTLSLKRFANFTGGKIAKDVKYPEYLDIRPYMSQPNGEPIVYVLYAVLVHTGFNCHAGHYFCYIKASNGLWYQMNDSIVSTSDIRSVLSQQAYVLFYIRSHDVKNGGELTHPTHSPGQSSPRPVISQRVVTNKQAAPGFIGPQLPSHMIKNPPHLNGTGPLKDTPSSSMSSPNGNSSVNRASPVNASASVQNWSVNRSSVIPEHPKKQKITISIHNKLPVRQCQSQPNLH

SEQ ID NO: 87888 - protein, 183 aa, Homo sapiens
MGEKSENCGVPEDLLNGLKVTDTQEAECAGPPVPDPKNQHSQSKLLRDDEAHLQEDQGEEECFHDCSASFEEEPGADKVENKSNEDVNSSELDEEYLIELEKNMSDEEKQKRREESTRLKEEGNEQFKKGDYIEAESSYSRALEMCPSCFQKERSILFSNRAAARMKQDKKEMAINDCSKEIT

SEQ ID NO: 87889 - protein, 7 aa, Homo sapiens
MVDSGTE

SEQ ID NO: 87890 - protein, 78 aa, Homo sapiens
MNSDQVTLVGQVFESYVSEYHKNDILLILKERDEDAHYPVVVNAMTLFETNMEIGEYFNMFPSEVLTIFDSALRRSAL

SEQ ID NO: 87891 - protein, 446 aa, Homo sapiens
MWRVCARRAPGSSYPPHMQVLLPALSPTMTMGTVQRWEKKVGEKLSEGDLLAEIETDKATIGFEVQEEGYLAKILVPEGTRDVPLGTPLCIIVEKEADISAFADYRPTEVTDLKPQVPPPTPPPVAAVPPTPQPLAPTPSAPCPATPAGPKGRVFVSPLAKKLAVEKGIDLTQVKGTGPDGRITKKDIDSFVPSKVAPAPAAVVPPTGPGMAPVPTGVFTDIPISNIRRVIAQRLMQSKQTIPHYYLSIDVNMGEVLLVRKELNKILEGRSKISVNDFIIKASALACLKVPEANSSWMDTVIRQNHVVDVSVAVSTPAGLITPIVFNAHIKGVETIANDVVSLATKAREGKLQPHEFQGGTFTISNLGMFGIKNFSAIINPPQACILAIGASEDKLVPADNEKGFDVASMMSVTLSCDHRVVDGAVGAQWLAEFRKYLEKPITMLL

SEQ ID NO: 87892 - protein, 2693 aa, Homo sapiens
MAAAAGGGSCPGPGSARGRFPGRPRGAGGGGGRGGRGNGAERVRVALRRGGGATGPGGAEPGEDTALLRLLGLRRGLRRLRRLWAGPRVQRGRGRGRGRGWGPSRGCVPEEESSDGESDEEEFQGFHSDEDVAPSSLRSALRSQRDVAPTPPKTPARKRGEEGTERMVQALTELLRRAQAPQAPRSRACEPSTPRRSRGRPPGRPAGPCRRKQQAVVVAEAAVTIPKPEPPPPVVPVKHQTGSWKCKEGPGPGPGTPRRGGQSSRGGRGGRGRGRGGGLPFVIKFVSRAKKVKMGQLSLGLESGQGQGQHEESWQDVPQRRVGSGQGGSPCWKKQEQKLDDEEEEKKEEEEKDKEGEEKEERAVAEEMMPAAEKEEAKLPPPPLTPPAPSPPPPLPPPSTSPPPPLCPPPPPPVSPPPLPSPPPPPAQEEQEESPPPVVPATCSRKRGRPPLTPSQRAEREAARAGPEGTSPPTPTPSTATGGPPEDSPTVAPKSTTFLKNIRQFIMPVVSARSSRVIKTPRRFMDEDPPKPPKVEVSPVLRPPITTSPPVPQEPAPVPSPPRAPTPPSTPVPLPEKRRSILREPTFRWTSLTRELPPPPPAPPPPPAPSPPPAPATSSRRPLLLRAPQFTPSEAHLKIYESVLTPPPLGAPEAPEPEPPPADDSPAEPEPRAVGRTNHLSLPRFAPVVTTPVKAEVSPHGAPALSNGPQTQAQLLQPLQALQTQLLPQALPPPQPQLQPPPSPQQMPPLEKARIAGVGSLPLSGVEEKMFSLLKRAKVQLFKIDQQQQQKVAASMPLSPGGQMEEVAGAVKQISDRGPVRSEDESVEAKRERPSGPESPVQGPRIKHVCRHAAVALGQARAMVPEDVPRLSALPLRDRQDLATEDTSSASETESVPSRSRRGKVEAAGPGGESEPTGSGGTLAHTPRRSLPSHHGKKMRMARCGHCRGCLRVQDCGSCVNCLDKPKFGGPNTKKQCCVYRKCDKIEARKMERLAKKGRTIVKTLLPWDSDESPEASPGPPGPRRGAGAGGPREEVVAHPGPEEQDSLLQRKSARRCVKQRPSYDIFEDSDDSEPGGPPAPRRRTPRENELPLPEPEEQSRPRKPTLQPVLQLKARRRLDKDALAPGPFASFPNGWTGKQKSPDGVHRVRVDFKEDCDLENVWLMGGLSVLTSVPGGPPMVCLLCASKGLHELVFCQVCCDPFHPFCLEEAERPLPQHHDTWCCRRCKFCHVCGRKGRGSKHLLECERCRHAYHPACLGPSYPTRATRKRRHWICSACVRCKSCGATPGKNWDVEWSGDYSLCPRCTQLYEKGNYCPICTRCYEDNDYESKMMQCAQCDHWVHAKCEGLSDEDYEILSGLPDSVLYTCGPCAGAAQPRWREALSGALQGGLRQVLQGLLSSKVVGPLLLCTQCGPDGKQLHPGPCGLQAVSQRFEDGHYKSVHSFMEDMVGILMRHSEEGETPDRRAGGQMKGLLLKLLESAFGWFDAHDPKYWRRSTRLPNGVLPNAVLPPSLDHVYAQWRQQEPETPESGQPPGDPSAAFQGKDPAAFSHLEDPRQCALCLKYGDADSKEAGRLLYIGQNEWTHVNCAIWSAEVFEENDGSLKNVHAAVARGRQMRCELCLKPGATVGCCLSSCLSNFHFMCARASYCIFQDDKKVFCQKHTDLLDGKEIVNPDGFDVLRRVYVDFEGINFKRKFLTGLEPDAINVLIGSIRIDSLGTLSDLSDCEGRLFPIGYQCSRLYWSTVDARRRCWYRCRILEYRPWGPREEPAHLEAAEENQTIVHSPAPSSEPPGGEDPPLDTDVLVPGAPERHSPIQNLDPPLRPDSGSAPPPAPRSFSGARIKVPNYSPSRRPLGGVSFGPLPSPGSPSSLTHHIPTVGDPDFPAPPRRSRRPSPLAPRPPPSRWASPPLKTSPQLRVPPPTSVVTALTPTSGELAPPGPAPSPPPPEDLGPDFEDMEVVSGLSAADLDFAASLLGTEPFQEEIVAAGAMGSSHGGPGDSSEEESSPTSRYIHFPVTVVSAPGLAPSATPGAPRIEQLDGVDDGTDSEAEAVQQPRGQGTPPSGPGVVRAGVLGAAGDRARPPEDLPSEIVDFVLKNLGGPGDGGAGPREESLPPAPPLANGSQPSQGLTASPADPTRTFAWLPGAPGVRVLSLGPAPEPPKPATSKIILVNKLGQVFVKMAGEGEPVPPPVKQPPLPPTISPTAPTSWTLPPGPLLGVLPVVGVVRPAPPPPPPPLTLVLSSGPASPPRQAIRVKRVSTFSGRSPPAPPPYKAPRLDEDGEASEDTPQVPGLGSGGFSRVRMKTPTVRGVLDLDRPGEPAGEESPGPLQERSPLLPLPEDGPPQVPDGPPDLLLESQWHHYSGEASSSEEEPPSPDDKENQAPKRTGPHLRFEISSEDGFSVEAESLEGAWRTLIEKVQEARGHARLRHLSFSGMSGARLLGIHHDAVIFLAEQLPGAQRCQHYKFRYHQQGEGQEEPPLNPHGAARAEVYLRKCTFDMFNFLASQHRVLPEGATCDEEEDEVQLRSTRRATSLELPMAMRFRHLKKTSKEAVGVYRSAIHGRGLFCKRNIDAGEMVIEYSGIVIRSVLTDKREKFYDGKGIGCYMFRMDDFDVVDATMHGNAARFINHSCEPNCFSRVIHVEGQKHIVIFALRRILRGEELTYDYKFPIEDASNKLPCNCGAKRCRRFLN

SEQ ID NO: 87893 - protein, 42 aa, Homo sapiens
MGSRDHLFKVLVVGDAAVGKTSLVQRYSQDSFSKHYKSTVGV

SEQ ID NO: 87894 - protein, 186 aa, Homo sapiens
MSPKPRASGPPAKATEAGKRKSSSQPSPSDPKKKTTKVAKKGKAVRRGRRGKKGAATKMAAVTAPEAESAPAAPGPSDQPSQELPQHELPPEEPVSEGTQHDPLSQEAELEEPLSQESEVEEPLSQESQVEEPLSQESEVEEPLSQESQVEEPLSQESEMEEPLSQESQVEEPPSQESEMEELPSV

SEQ ID NO: 87895 - protein, 1038 aa, Homo sapiens
MESKKEDVRRKHIRLHMEGALTARDKVGVQDFVLLDAYTSESAFVDNLRKRFSENLIYTYIGTLLVSVNPYQELGIYTVSQMELYQGVNFFELPPHVYAIADNAYRMMCAELNNHFILISGESGAGKTEASKKILEYFAVTCPMTQSLQIARDRLLFSNPVLEAFGNARTLRNDNSSRFGKYMDIQFDFQGIPVGGHIISYLIEKSRVVYQNEGERNFHIFYQLLAGGEEERLSYLGLERDPQLYKYLSQGHCAKESSISDKNDWKTVSNAFSVIDFTEADLENLFGIIASVLHLGNIGFEEDDQGCATIPDTHEIKWIAKLLGVHPSVLLEALTHRKIEAKTEEVICPLTLELSVYARDAMAKAVYGRTFTWLVNKINSSLVNKDFTRKTVIGLLDIYGFEVFDKNGFEQFCINYCNEKLQQLLIERTLKAEQAEYEMEGIEWEPIKYFNNKIICDLVEERHKGIISILDEECIRPGPATDLSFLEKLEEKVGKHAHFETRKLAGPKGRKRIGWMEFRLLHYAGEVTYCTKGFLEKNNDLLYRHLKEVLCKSKNIILRECFLLAELENRRRPPTVGTQFKNSLSSLLETLISKEPSYIRCIKPNDRKEPSKFDDFLIRHQIKYLGLMEHLRVRRAGFAYRRKYEHFLQRYKSLCPDTWPHWHGPPAEGVERLIKYIGYKPEEYKLGKTKIFIRFPRTLFATEDAFEFSKHQLVARIQATYKRCLGRREYVKKRQAAIKLEAHWRGALARKAIQRRKWAVRIIRKFIKGFISRNKPLCPDNEEFIVFVRKNYILNLRYHLPKTVLDKSWLRPPGILENASDLLRKMCVRNLVQKYCRGITAERKAMMQQKVVTSEIFRGRKDGYTESLNQPFVNSRIDEGDINPKVLQLISHEKIQYGVPVIKYDRKGFKARQRQLILTQKAAYVVELAKIKQKIEYSALKGVSTSNLSDGILVIHVSPEDSKQKGDAVLQCGHVFEAVTKLVMLVKKENIVNVVQGSLQFFISPGKEGTIVFDTGLEEQVYKNKNGQLTVVSVRRKS

SEQ ID NO: 87896 - protein, 153 aa, Homo sapiens
MEVVDPQQLGMFTEGELMSVGMDTFIHRIDSTEVIYQPRRKRAKLIGKYLMGDLLGEGSYGKVKEVLDSETLCRRAVKILKKKKLRRIPNGEANVKKYFCQLIDGLEYLHSQGIVHKDIKPGNLLLTTGGTLKISDLGVAEALHPFAADDTCR

SEQ ID NO: 87897 - protein, 78 aa, Homo sapiens
  MOD_RES (1)..(1): Any amino acid
XQGDKLEVSLKNNVVSVNKEPVAEPDIMATNGVVHVITNVLQPPANRPQERGDELADSALEIFKQASAFSRPLSIKSY

SEQ ID NO: 87898 - protein, 79 aa, Homo sapiens
METPTPLPPVPASPTCNPAPRTIQIEFPQHSSSLLESLNRHRLEGKFCDVSLLVQGRELRAHKAVLAAASPYFHDKLLL

SEQ ID NO: 87899 - protein, 58 aa, Homo sapiens
MNTIVFNKLSGAVLFEDGGASERERGGRPYSGVLDSPHARPEVGIPDGPPLKDNLGLR

SEQ ID NO: 87900 - protein, 1117 aa, Homo sapiens
MTTHVTLEDALSNVDLLEELPLPDQQPCIEPPPSSIMYQANFDTNFEDRNAFVTGIARYIEQATVHSSMNEMLEEGHEYAVMLYTWRSCSRAIPQVKCNEQPNRVEIYEKTVEVLEPEVTKLMKFMYFQVMGFGLYLMDGNVSNIYKLDAKKRINLSKIDKFFKQLQVVPLFGDMQIELARYIKTSAHYEENKSKWTCTQSSISPQYNICEQMVQIRDDHIRFISELARYSNSEVVTGSGLDSQKSDEEYRELFDLALRGLQLLSKWSAHVMEVYSWKLVHPTDKFCNKDCPGTAEEYERATRYNYTSEEKFAFVEVIAMIKGLQVLMGRMESVFNQAIRNTIYAALQDFAQVTLREPLRQAVRKKKNVLISVLQAIRKTICDWEGGREPPNDPCLRGEKDPKGGFDIKVPRRAVGPSSTQLYMVRTMLESLIADKSGSKKTLRSSLDGPIVLAIEDFHKQSFFFTHLLNISEALQQCCDLSQLWFREFFLELTMGRRIQFPIEMSMPWILTDHILETKEPSMMEYVLYPLDLYNDSAYYALTKFKKQFLYDEIEAEVNLCFDQFVYKLADQIFAYYKAMAGSVLLDKRFRAECKNYGVIIPYPPSNRYETLLKQRHVQLLGRSIDLNRLITQRISAAMYKSLDQAISRFESEDLTSIVELEWLLEINRLTHRLLCKHMTLDSFDAMFREANHNVSAPYGRITLHVFWELNFDFLPNYCYNGSTNRFVRTAIPFTQEPQRDKPANVQPYYLYGSKPLNIAYSHIYSSYRNFVGPPHFKTICRLLGYQGIAVVMEELLKIVKSLLQGTILQYVKTLIEVMPKICRLPRHEYGSPGILEFFHHQLKDIIEYAELKTDVFQSLREVGNAILFCLLIEQALSQEEVCDLLHAAPFQNILPRVYIKEGERLEVRMKRLEAKYAPLHLVPLIERLGTPQQIAIAREGDLLTKERLCCGLSMFEVILTRIRSYLQDPIWRGPPPTNGVMHVDECVEFHRLWSAMQFVYCIPVGTNEFTAEQCFGDGLNWAGCSIIVLLGQQRRFDLFDFCYHLLKVQRQDGKDEIIKNVPLKKMADRIRKYQILNNEVFAILNKYMKSVETDSSTVEHVRCFQPPIHQSLATTC

SEQ ID NO: 87901 - protein, 119 aa, Homo sapiens
QSKIDRDKSFILEEHMDKINSCFSANTVEEIIENLQQDGSSFALEQLKVINKMSPTSLKITLRQLMEGSSKTLQEVLTMEYRLSQACMRGHDFHEGVRAGKWQMGTYHFGEMGFVSICC

SEQ ID NO: 87902 - protein, 134 aa, Homo sapiens
MRRSKADVERYVASVLGLTPSPRQSMKGFYFAKLYYEAKEYDLAKKYICTYINVQERDPKAHRFLGLLYELEENTEKAVECYRRSVELNPTQKDLVLKIAELLCKNDVTDGRAKYWVERAAKLFPGSPAIYKLK

SEQ ID NO: 87903 - protein, 59 aa, Homo sapiens
MAARRALHFVFKVGNRFQTARFYRDVLGMKVLRHEEFEEGCKAACNGYDTLFLKISFRL

SEQ ID NO: 87904 - protein, 63 aa, Homo sapiens
  MOD_RES (1)..(1): Any amino acid
XITTPQEVSLQDVRKEINFCRKVKLPIIGVVENMSGFICPKCKVRIVTKASLFSLTPQIPQPR

SEQ ID NO: 87905 - protein, 89 aa, Homo sapiens
MSNNGLDIQDKPPAPPMRNTSTMIGAGSKDAGTLNHGSKPLPPNPEEKKKKDRFYRSILPGDKTNKKKEKERPEISLPSDFEHTIHVGF

SEQ ID NO: 87906 - protein, 102 aa, Homo sapiens
MTLRCLEPSGNGGEGTRSQWGTAGSAEEPSPQAARLAKALRELGQTGREPIGRDACGRERLPKEAARKRGRGGKQRIRWKYVPCFQGTAESTLAGSWVLGNA

SEQ ID NO: 87907 - protein, 552 aa, Homo sapiens
  MOD_RES (1)..(1): Any amino acid
XEHLNHVVSSAPSLRDPSQPQQWVSSQVLLCKRCNHHQTTKIKQLAAFAPREEGRYDEEVEVYRHHLEQMYKLCRPCQAAVEYYIKHQNRQLRALLLSHQFKRREADQTHAQNFSSAVKSPVQVILLRALAFLACAFLLTTALYGASGHFAPGTTVPLALPPGGNGSATPDNGTTPGAEGWRQLLGLLPEHMAEKLCEAWAFGQSHQTGVVALGLLTCLLAMLLAGRIRLRRIDAFCTCLWALLLGLHLAEQHLQAASPSWLDTLKFSTTSLCCLVGFTAAVATRKATGPRRFRPRRFFPGDSAGLFPTSPSLAIPHPSVGGSPASLFIPSPPSFLPLANQQLFRSPRRTSPSSLPGRLSRALSLGTIPSLTRADYFSLLSGSCPSSPLPSPAPSVAGSVASSSGSLRHRRPLISPARLNLKGQKLLLFPSPPGEAPTTPSSSDEHSPHNGSLFTMEPPHVPRKPPLQDVKHALDLRSKLERGSACSNRSIKKEDDSSQSSTCVVDTTTRGCSEEAATWRGRFGPSLVRGLLAVSLAANALFTSVFLYQSLR

SEQ ID NO: 87908 - protein, 99 aa, Homo sapiens
  MOD_RES (1)..(1): Any amino acid
XIRQPQILLLDEATSALDTESEKVVQEALDKAREGRTCIVIAHRLSTIQNADLIVVFQNGRVKEHGTHQQLLAQKGIYFSMINLEDPIWGLLRHLKFES

SEQ ID NO: 87909 - protein, 915 aa, Homo sapiens
MQGPDAPLLLSARELGPGRRGSASWYRQEGGAVCNWLRKPQPLEPRTSFPSARRSEFRPPRRLPWAGPASAQSEEGHAGGRCQAGSPAPARRLSGAFKTLVPGTHAQGASDTHPLGPPHTPVLDPSPQDGFPVLWRGSSKASHMNRLRNAKIYVERAVKQKKIFTIQGCYPVIRCLLRRRGWVEKKMVHRSGPTLLPPQKDLDSSAMGDSDTTEDEDEDEDEEFQPSQLFDFDDLLKFDDLDGTHALMVGLCLNLRNLPWFDEVDANSFFPRCYCLGAEDDKKAFIEDFWLTAARNVLKLVVKSEWKSYPIQAVEEEASGDKQPKKQEKNPVLVSPEFVDEALCACEEYLSNLAHMDIDKDLEAPLYLTPEGWSLFLQRYYQVVHEGAELRHLDTQVQRCEDILQQLQAVVPQIDMEGDRNIWIVKPGAKSRGRGIMCMDHLEEMLKLVNGNPVVMKDGKWVVQKYIERPLLIFGTKFDLRQWFLVTDWNPLTVWFYRDSYIRFSTQPFSLKNLDNSVHLCNNSIQKHLENSCHRHPLLPPDNMWSSQRFQAHLQEMGAPNAWSTIIVPGMKDAVIHALQTSQDTVQCRKASFELYGADFVFGEDFQPWLIEINASPTMAPSTAVTARLCAGVQADTLRVVIDRMLDRNCDTGAFELIYKQPAVEVPQYVGIRLLVEGFTIKKPMAMCHRRMGVRPAVPLLTQRGSGEARHHFPSLHTKAQLPSPHVLRHQGQVLRRQHSKLVGTKALSTTGKALRTLPTAKVFISLPPNLDFKVAPSILKPRKAPALLCLRGPQLEVPCCLCPLKSEQFLAPVGRSRPKANSRPDCDKPRAEACPMKRLSPLKPLPLVGTFQRRRGLGDMKLGKPLLRFPTALVLDPTPNKKKQVKYLGLDSIAVGGSRVDGARPCTPGSTARA

SEQ ID NO: 87910 - protein, 841 aa, Homo sapiens
MEWGSESAAVRRHRVGVERREGAAAAPPPEREARAQEPLVDGCSGGGRTRKRSPGGSGGASRGAGTGLSEVRAALGLALYLIALRTLVQLSLQQLVLRGAAGHRGEFDALQARDYLEHITSIGPRTTGSPENEILTVHYLLEQIKLIEVQSNSLHKISVDVQRPTGSFSIDFLGGFTSYYDNITNVVVKLEPRDGAQHAVLANCHFDSVANSPGASDDAVSCSVMLEVLRVLSTSSEALHHAVIFLFNGAEENVLQASHGFITQHPWASLIRAFINLEAAGVGGKELVFQTGPENPWLVQAYVSAAKHPFASVVAQEVFQSGIIPSDTDFRIYRDFGNIPGIDLAFIENGYIYHTKYDTADRILTDSIQRAGDNILAVLKHLATSDMLAAASKYRHGNMVFFDVLGLFVIAYPSRIGSIINYMVVMGVVLYLGKKFLQPKHKTGNYKKDFLCGLGITLISWFTSLVTVLIIAVFISLIGQSLSWYNHFYVSVCLYGTATVAKIILIHTLAKRFYYMNASAQYLGEVFFDISLFVHCCFLVTLTYQGLCSAFISAVWVAFPLLTKLCVHKDFKQHGAQGKFIAFYLLGMFIPYLYALYLIWAVFEMFTPILGRSGSEIPPDVVLASILAGCTMILSSYFINFIYLAKSTKKTMLTLTLVCAITFLLVCSGTFFPYSSNPANPKPKRVFLQHMTRTFHDLEGNAVKRDSGIWINGFDYTGISHITPHIPEINDSIRAHCEENAPLCGFPWYLPVHFLIRKNWYLPAPEVSPRNPPHFRLISKEQTPWDSIKLTFEATACLPILQILDLPASTIMTKPYVLLCSSPQRVNTFSVVSWQWHPSHK

SEQ ID NO: 87911 - protein, 54 aa, Homo sapiens
MIFTFMTRKSCCSKQVQRKYWRNCQKLTATGSAPFPLALQRFSVVLVPGTISAT

SEQ ID NO: 87912 - protein, 36 aa, Homo sapiens
MSGHSPTRGAMQVSGSRRPHLNFDPRPGPAPSGAQA

SEQ ID NO: 87913 - protein, 55 aa, Homo sapiens
DKNASEDEIKKAYRKRALMHHPDFDPNNIFKAFFGGPGGFSFEASGPGNFFFQFG

SEQ ID NO: 87914 - protein, 97 aa, Homo sapiens
  MOD_RES (1)..(1): Any amino acid
XLLFQEKLTFLLHAALSYTPVEVKESDEKTKRDINRFLSVASLQGLIHEGTMTSLCMAMTEEQHKSVVIDCSSSQPQFCNAEILDPPPLLFTLSHPS

SEQ ID NO: 87915 - protein, 69 aa, Homo sapiens
KFAVVRQCISKSTGQEYAAKFLKKRRRGQDCRAEILHEIAVLELAKSCPRVINLHEVYENTSEIILILE

SEQ ID NO: 87916 - protein, 946 aa, Homo sapiens
MSRRKPASGGLAASSSAPARQAVLSRFFQSTGSLKSTSSSTGAADQVDPGAAAAAAAAAAAAPPAPPAPAFPPQLPPHIATEIDRRKKRPLENDGPVKKKVKKVQQKEGGSDLGMSGNSEPKKCLRTRNVSKSLEKLKEFCCDSALPQSRVQTESLQERFAVLPKCTDFDDISLLHAKNAVSSEDSKRQINQKDTTLFDLSQFGSSNTSHENLQKTASKSANKRSKSIYTPLELQYIEMKQQHKDAVLCVECGYKYRFFGEDAEIAARELNIYCHLDHNFMTASIPTHRLFVHVRRLVAKGYKVGVVKQTETAALKAIGDNRSSLFSRKLTALYTKSTLIGEDVNPLIKLDDAVNVDEIMTDTSTSYLLCISENKENVRDKKKGNIFIGIVGVQPATGEVVFDSFQDSASRSELETRMSSLQPVELLLPSALSEQTEALIHRATSVSVQDDRIRVERMDNIYFEYSHAFQAVTEFYAKDTVDIKGSQIISGIVNLEKPVICSLAAIIKYLKEFNLEKMLSKPENFKQLSSKMEFMTINGTTLRNLEILQNQTDMKTKGSLLWVLDHTKTSFGRRKLKKWVTQPLLKLREINARLDAVSEVLHSESSVFGQIENHLRKLPDIERGLCSIYHKKCSTQEFFLIVKTLYHLKSEFQAIIPAVNSHIQSDLLRTVILEIPELLSPVEHYLKILNEQAAKVGDKTELFKDLSDFPLIKKRKDEIQGVIDEIRMHLQEIRKILKNPSAQYVTVSGQEFMIEIKNSAVSCIPTDWVKVGSTKAVSRFHSPFIVENYRHLNQLREQLVLDCSAEWLDFLEKFSEHYHSLCKAVHHLATVDCIFSLAKVAKQGDYCRPTVQEERKIVIKNGRHPVIDVLLGEQDQYVPNNTDLSEDSERVMIITGPNMGGKSSYIKQVALITIMAQIGSYVPAEEATIGIVDGIFTSSISPFSHC

SEQ ID NO: 87917 - protein, 619 aa, Homo sapiens
MVPHAILARGRDVCRRNGLLILSVLSVIVGCLLGFFLRTRRLSPQEISYFQFPGELLMRMLKMMILPLVVSSLMSGLASLDAKTSSRLGVLTVAYYLWTTFMAVIVGIFMVSIIHPGSAAQKETTEQSGKPIMSSADALLDLIRNMFPANLVEATFKQYRTKTTPVVKSPKVAPEEAPPRRILIYGVQEENGSHVQNFALDLTPPPEVVYKSEPGTSDGMNVLGIVFFSATMGIMLGRMGDSGAPLVSFCQCLNESVMKIVAVAVWYFPFGIVFLIAGKILEMDDPRAVGKKLGFYSVTVVCGLVLHGLFILPLLYFFITKKNPIVFIRGILQALLIALATSSRKNQVRALQCPRSLPPAGAALQRHKHSWRGGCLGRGELPDRGPSHPGGGCWADTGPSNRSSATLPITFKCLLENNHIDRRIARFVLPVGATINMDGTALYEAVAAIFIAQVNNYELDFGQIITISITATAASIGAAGIPQAGLVTMVIVLTSVGLPTDDITLIIAVDWALDRFRTMINVLGDALAAGIMAHICRKDFARDTGTEKLLPCETKPVSLQEIVAAQQNGCVKSVAEASELTLGPTCPHHVPVQVEQDEELPAASLNHCTIQISELETNV

SEQ ID NO: 87918 - protein, 101 aa, Homo sapiens
  MOD_RES (1)..(1): Any amino acid
XWRSVLGSENGVTSLTVELMGTESKVSVGILNIKLEMYPPLNQTLSQEVVNTQLALERQKTAEKERLFLVYAKQWWREYLQIRPSHNSRLVKIFAQVCKLY

SEQ ID NO: 87919 - protein, 27 aa, Homo sapiens
  MOD_RES (1)..(1): Any amino acid
XPDEAVSWGKIRVDAQPVKVPPYPGLC

SEQ ID NO: 87920 - protein, 115 aa, Homo sapiens
MSPHGDGRGQAQGRAVRVGLRRSGGIRGGVAVFAAVAAVFTFTLPPSVPGGDSGELITAAHELGVAHPPGYPLFTLVAKLAITLFPFGSIAYRVNLLCGLFGAVAASLLFFTVFR

SEQ ID NO: 87921 - protein, 194 aa, Homo sapiens
  MOD_RES (1)..(1): Any amino acid
XREIYCPAPPQIDNGIIQGERDHYGYRQSVTYACNKGFTMIGEHSIYCTVNNDEGEWSGPPPECRGKSLTSKVPPTVQKPTTVNVPTTEVSPTSQKTTTKTTTPNAQATRSTPVSRTTKHFHETTPNKGSGTTSGTTRLLSESYSVTQAGVWWCDLRSLQPLPPEFKQFSCLSLRSSWDYRIEAADLHSECYSS

SEQ ID NO: 87922 - protein, 423 aa, Homo sapiens
LRAWRALGGIRWGRRPRLTPDLRALLTSGTSDPRARVTYGTPSLWARLSVGVTEPRACLTSGTPGPRAQLTAVTPDTRTREASENSGTRSRAWLAVALGAGGAVLLLLWGGGRGPPAVLAAVPSPPPASPRSQYNFIADVVEKTAPAVVYIEILDRHPFLGREVPISNGSGFVVAADGLIVTNAHVVADRRRVRVRLLSGDTYEAVVTAVDPVADIATLRIQTKEPLPTLPLGRSADVRQGEFVVAMGSPFALQNTITSGIVSSAQRPARDLGLPQTNVEYIQTDAAIDFGNSGGPLVNLARELGAVSLQDGEVIGVNTMKVTAGISFAIPSDRLREFLHRGEKKNSSSGISGSQRRYIGVMMLTLSPRAGLRPGDVILAIGEQMVQNAEDVYEAVRTQSQLAVQIRRGRETLTLYVTPEVTE

SEQ ID NO: 87923 - protein, 188 aa, Homo sapiens
MPGSFVPTVTAITTSQDLQWLVQPTLISSMAQSQGQPLASQPPVVDPYDMPGTSYSTPGMSGYSSGGASGSGGPSTSGTTSGPGPARPARARPRRPREETLTPEEEEKRRVRRERNKLAAAKCRNRRRELTDRLQAETDQLEEEKAELESEIAELQKEKERLEFVLVAHKPGCKIPYEEGPGPGPLAE

SEQ ID NO: 87924 - protein, 171 aa, Homo sapiens
MEEKRRRARVQGAWAAPVKSQAIAQPATTAKSHLHQKPGQTWKNKEHHLSDREFVFKEPQQVVRRAPEPRVIDREGVYEISLSPTGVSRVCLYPGFVDVKEADWILEQLCQDVPWKQRTGIREDSILQLTFKKSAPVSGTATAPQSCWYERPSPPHIPGPAILTRTRLWAP

SEQ ID NO: 87925 - protein, 61 aa, Homo sapiens
MASASSSRAGVALPFEKSQLTLKVVSAKPKVHNRQPRINSYVEVAVDGLPSETKKTGKRIG

SEQ ID NO: 87926 - protein, 577 aa, Homo sapiens
MPAKRQAVTNPNNTFYATKRLIGRRYDDPEVQKDIKNVPFKIVRASNGDAWVEAHGKLYSPSQIGAFVLMKMKETAENYLGHTAKNAVITVPAYFNDSQRQATKDAGQISGLNVLRVINEPTAAALAYGLDKSEDKVIAVYDLGGGTFDISILEIQKGVFEVKSTNGDTFLGGEDFDQALLRHIVKEFKRETGVDLTKDNMALQRVREAAEKAKCELSSSVQTDINLPYLTMDSSGPKHLNMKLTRAQFEGIVTDLIRRTIAPCQKAMQDAEVSKSDIGEVILVGGMTRMPKVQQTVQDLFGRAPSKAVNPDEAVAIGAAIQGGVLAGDVTDVLLLDVTPLSLGIETLGGVFTKLINRNTTIPTKKSQVFSTAADGQTQVEIKVCQGEREMAGDNKLLGQFTLIGIPPAPRGVPQIEVTFDIDANGIVHVSAKDKGTGREQQIVIQSSGGLSKDDIENMVKNAEKYAEEDRRKKERVEAVNMAEGIIHDTETKMEEFKDQLPADECNKLKEEISKMRELLARKDSETGENIRQAASSLQQASLKLFEMAYKKMASEREGSGSSGTGEQKEDQKEEKQ

SEQ ID NO: 87927 - protein, 342 aa, Homo sapiens
ALELGPRNVLLFLQDKLSIEDFTAYGGVFGNKQDSAFSNLENALDLAPSSLVLPAVDCSGLMAPREVLTGNDEVIGQVLSTLKSEDVPYTAALTAVRPSRVARDVAVVAGGLGRQLLQKQPVSPVIHPPVSYNDTAPRILFWAQNFSVAYKDQWEDLTPLTFGVQELNLTGSFWNDSFARLSLTYERLFGTTVTFKFILANRLYPVSARHWFTMERLEVHSNGSVAYFNASQVTGPSIYSFHCEYVSSLSKKGSLLVARTQPSPWQMMLQDFQIQAFNVMGEQFSYASDCASFFSPGIWMGLLTSLFMLFIFTYGLHMILSLKTMDRFDDHKGPTISLTQIV

SEQ ID NO: 87928 - protein, 185 aa, Homo sapiens
MAEGDEAARGQQPHQGLWRRRRTSDPSAAVNHVSSTTSLESCSVARLECSGTIFAYCNLPGSSDSSASASQVAGITGENYEDDDLVNSDEVMKKPCPVQIVLAHEDDHNFELDEEALEQILLQEHIRDLNIVVVSVAGAFRKGKSFLLDFMLRYMYNKDSQSWIGGNNEPLTGFTWRGGCERETT

SEQ ID NO: 87929 - protein, 119 aa, Homo sapiens
  MOD_RES (1)..(1): Any amino acid
XCIQVEGQGFEYVIFFQPTQKKSVCLFQPGSYLEGPPGFAHGGSLAAMMDETFSKTAFLAGEGLFTLSLNIRFKKCFPSAAVGRRVSPVTVTVPAGEPLPPLPASCLLPPLPASCLLPP

SEQ ID NO: 87930 - protein, 144 aa, Homo sapiens
MATLKDQLIYNLLKEEQTPQNKITVVGVGAVGMACAISILMKDLADELALVDVIEDKLKGEMMDLQHGSLFLRTPKIVSGKDYNVTANSKLVIITAGARQQEGESRLNLVQRNVNIFKFIIPNVVKYSPNCKLLIVSNPGEAFD

SEQ ID NO: 87931 - protein, 250 aa, Homo sapiens
  MOD_RES (1)..(1): Any amino acid
XQPSPVEPRGPFYFCRLLLDDLGMNSWDRRKNFHLLKKNSKLLRELKNLDSRQCRETHKIAVFYIAEGQEDKCSILSNERGSQAYEDFVAGLGWEVDLSTHCGFMGGLQRNGSTGQTAPYYATSTVEVIFHVSTRMPSDSDDSLTKKLRHLGNDEVHIVWSEHSRDYRRGIIPTAFGDVSIIIYPMKNHMFFIAITKKPEVPFFGPLFDGAIVSGKLLPSLVCATCINASRAVKCLIPLYQSLYLFALNV

SEQ ID NO: 87932 - protein, 99 aa, Homo sapiens
MPNSVLWAVDLFGRVYTLSTAGQYWEMCKDSQLEFKRVSATTQCCWGIACDNQVYVYVCASDVPIRRREEAYENQAWVQGRLCVPGPQRWNPMGGFCEK

SEQ ID NO: 87933 - protein, 134 aa, Homo sapiens
CIAKELIPEATEKYLGGTDDTVKKKDLFLDLIADVMFGVPSVIVARNHREGASEEEIRLSKMVMKFWANFARNGNPNGEGLPHWPEYNQKEGYLQIGANTQAAQKLKDKEVAFWTNLFAKKAVEKPPQTEHIEL

SEQ ID NO: 87934 - protein, 40 aa, Homo sapiens
MGEIKVSPDYNWFRGTVPLKKIIVDDDDSKIWSLYDAGPR

SEQ ID NO: 87935 - protein, 34 aa, Homo sapiens; identical to SEQ ID NO: 19841

SEQ ID NO: 87936 - protein, 446 aa, Homo sapiens
MELLCHEVDPVRRAVRDRNLLRDDRVLQNLLTIEERYLPQCSYFKCVQKDIQPYMRRMVATWMLEVCEEQKCEEEVFPLAMNYLDRFLAGVPTPKSHLQLLGAVCMFLASKLKETSPLTAEKLCIYTDNSIKPQELLEWELVVLGKLKWNLAAVTPHDFIEHILRKLPQQREKLSLIRKHAQTFIALCATDFKFAMYPPSMIATGSVGAAICGLQQDEEVSSLTCDALTELLAKITNTDVTMHGILERSKFCKDMTVKYDSRLRERKYGVVEGKALSELRAMAKAAREECPVFTPPGGETLDQVKMRGIDFFEFLCQLILKEADQKEQFSQGSPSNCLETSLAEIFPLGKNHSSKVNSDSGIPGLAASVLVVSHGAYMRSLFDYFLTDLKCSLPATLSRSELMSVTPNTGMSLFIINFEEGREVKPTVQCICMNLQDHLNGLTETR

SEQ ID NO: 87937 - protein, 46 aa, Homo sapiens
  MOD_RES (1)..(1): Any amino acid
XTTYRNLLYIYPQSLNFANRQGSARNITVKVQFMYGEDPSNAMPVS

SEQ ID NO: 87938 - protein, 38 aa, Homo sapiens
MYDNLYLHGIEDSEANNVMCYPRWCEQSFKPMEKTRPK

SEQ ID NO: 87939 - protein, 330 aa, Homo sapiens
MDVTIVKTDYEGQAKKLLELMENTDVIIVAGGDGTLQEVVTGVLRRTDEATFSKIPIGFIPLGETSSLSHTLFAESGNKVQHITDATLAIVKGETVPLDVLQIKGEKEQPVFAMTGLRWGSFRDAGVKVSKYWYLGPLKIKAAHFFSTLKEWPQTHQASISYTGPTERPPNEPEETPVQRPSLYRRILRRLASYWAQPQDALSQEVSPEVWKDVQLSTIELSITTRNNQLDPTSKEDFLNICIEPDTISKGDFITIGSRKVRNPKLHVEGTECLQASQCTLLIPEGAGGSFSIDSEEYEAMPVEVKLLPRKLQFFCDPRKREQMLTSPTQ

SEQ ID NO: 87940 - protein, 443 aa, Homo sapiens
MLENYRNLVSLGISSKCTMKEFSSTAQGNTEVIHTGTLQRHERHHIGDFSFQEIEKDIHNFEFQWQEDERNGHEAPMTKIKKLMGSTEQYDHRHAGNKPIKYQLGSSFHSHLSELHIFQPKGKINNQVEKSINDASSVSTAQRISCRPKTHISNNYGDNFLNYSLLTQRQEVRMREKSFQCIESGKAFNYSSLLRKHQIIHLGEKQYKCDVCDKVFIRKRYLARHRRCHTGEKPYKCNECGKSFSQMSSLTYHHRLHTGEKPYKCEECDKAFRHNSALQRHRRIHTGEKPHKCNECGKTFSQKSYLACHRSIHTGKKPYECEECDKAFSFKSNLESHRITHTGEKPYKCNDCGKTFSHMSTLTCHRRLHTGEKPYKCEECDEAFRFKSSLERHRRIHNGEKLYKCNECGKTFSQELSLTCHCRLHSGEKPCKCGECDKAYSFK

SEQ ID NO: 87941 - protein, 237 aa, Homo sapiens
MNEDTVERIVRCIIQNEANAEALKEMLGDSEGEGTVQLSSVDATSSLQDGAPSHHHTVHLGSAAPCLHCSRSKRPPLVRQGRSKEGKSRPRTGETTVFSVGRFRVTHIEKRYGLHEHRDGSPTDRSWGSGGGQDPGGGQGSGGGQPKAGMPAMERLPPERPQPQVLASPPVQNGGLRDSSLTPRALEGNPRASAEPTLRAGGRGPSPGLPTQEANGQPSKPDTSDHQVSLPQGAGSM

SEQ ID NO: 87942 - protein, 53 aa, Homo sapiens
MEMRWFLSKIQDDFRGGKINLEKTQRLLEKLDIRCSYIHVKQIFKLGKHTKCH

SEQ ID NO: 87943 - protein, 68 aa, Homo sapiens
MAAESGSDFQQRRRRRRDPEEPEKTELSERELAVAVAVSQENDEENEERWVGPLPVEATLAKKRKAAT

SEQ ID NO: 87944 - protein, 187 aa, Homo sapiens
MSGGGHGGVCFLCCILLQGRKGVWLRLRKILFCVLGLYIAIPFLIKLCPGIQAKLIFLNFVRVPYFIDLKKPQDQGLNHTCNYYLQPEEDVTIGVWHTVPAVWWKNAQGKDQMWYEDALASSHPIILYLHGNAGTRGGDHRVELYKVLSSLGYHVVTFDYRGWGDSVGTPSERGMTYDALHVFDWIK

SEQ ID NO: 87945 - protein, 198 aa, Homo sapiens
VFIHNPHTRNQHVSASRVFQSPLESDVSLLSINQAVSCLTAGVLNPELGYDALLVGTQTNLLAYDVYNNSDLFYREVADGANAIVLGTLGDISSPLAIIGGNCALQGFNHEGSDLFWTVTGDNVNSLALCDFDGDGKKELLVGSEDFDIRVFKEDEIVAEMTETESFTPSPRLECGGAISAYCKLHLPSSSDSHASAS

SEQ ID NO: 87946 - protein, 64 aa, Homo sapiens
  MOD_RES (1)..(1): Any amino acid
XRYYEKLTEFVADMTKIFDNCRYYNPSDSPFYQCAEVLESFFVQKLKGFKASRVNERTWLLLPD

SEQ ID NO: 87947 - protein, 185 aa, Homo sapiens
MRKPRAAVGSGHRKQAASQEGRQKHAKNNSQAKPSACDAGLARQPEEVVLQASVSSYHLFRDVAEVTAFRGSLLSWYDQEKRDLPWRRRAEDEMDLDRRAYAGGESTLGWPGLLFSWPAAAGGSSEGGRGARGPHATYSRDPAAAPAWRGALHSWGHCLYRLWPGNRCGGWQRSTGAVPCPSHWC

SEQ ID NO: 87948 - protein, 119 aa, Homo sapiens
MRKVKKLRLDKENTGSWRSFSLNSEGAERMATTGTPTADRGDAAATDDPAARFQVQKHSWDGLRSIIHGSRKYSGLIVNKAPHDFQFVQKTDESGPHSHRLYYLGMPYGSRENSLLYSE

SEQ ID NO: 87949 - protein, 1216 aa, Homo sapiens
MARAKLPRSPSEGKAGPGGAPAGAAAPEEPHGLSPLLPARGGGSVGSDVGQRLPVEDFSLDSSLSQVQVEFYVNENTFKERLKLFFIKNQRSSLRIRLFNFSLKLLTCLLYIVRVLLDDPALGIGCWGCPKQNYSFNDSSSEINWAPILWVERKMTLWAIQVIVAIISFLETMLLIYLSYKGNIWEQIFRVSFVLEMINTLPFIITIFWPPLRNLFIPVFLNCWLAKHALENMINDFHRAILRTQSAMFNQVLILFCTLLCLVFTGTCGIQHLERAGENLSLLTSFYFCIVTFSTVGYGDVTPKIWPSQLLVVIMICVALVVLPLQFEELVYLWMERQKSGGNYSRHRAQTEKHVVLCVSSLKIDLLMDFLNEFYAHPRLQDYYVVILCPTEMDVQVRRVLQIPLWSQRVIYLQGSALKDQDLMRAKMDNGEACFILSSRNEVDRTAADHQTILRAWAVKDFAPNCPLYVQILKPENKFHVKFADHVVCEEECKYAMLALNCICPATSTLITLLVHTSRGQEGQESPEQWQRMYGRCSGNEVYHIRMGDSKFFREYEGKSFTYAAFHAHKKYGVCLIGLKREDNKSILLNPGPRHILAASDTCFYINITKEENSAFIFKQEEKRKKRAFSGQGLHEGPARLPVHSIIASMGTVAMDLQGTEHRPTQSGGGGGGSKLALPTENGSGSRRPSIAPVLELADSSALLPCDLLSDQSEDEVTPSDDEGLSVVEYVKGYPPNSPYIGSSPTLCHLLPVKAPFCCLRLDKGCKHNSYEDAKAYGFKNKLIIVSAETAGNGLYNFIVPLRAYYRSRKELNPIVLLLDNKPDHHFLEAICCFPMVYYMEGSVDNLDSLLQCGIIYADNLVVVDKESTMSAEEDYMADAKTIVNVQTMFRLFPSLSITTELTHPSNMRFMQFRAKDSYSLALSKLEKRERENGSNLAFMFRLPFAAGRVFSISMLDTLLYQSFVKDYMITITRLLLGLDTTPGSGYLCAMKITEGDLWIRTYGRLFQKLCSSSAEIPIGIYRTESHVFSTSEPHDLRAQSQISVNVEDCEDTREVKGPWGSRAGTGGSSQGRHTGGGDPAEHPLLRRKSLQWARRLSRKAPKQAGRAAAAEWISQQRLSLYRRSERQELSELVKNRMKHLGLPTTGYDEMNDHQNTLSYVLINPPPDTRLEPSDIVYLIRSDPLAHVASSSQSRKSSCSHKLSSCNPETRDETQL

SEQ ID NO: 87950 - protein, 103 aa, Homo sapiens
MADKQISLPAKLINGGIAGLIGVTCVFPIDLAKTRLQNQQNGQRVYTSMSDCLIKTVRSEGYFGMYRGAAVNLTLVTPEKAIKLAANDFFRHQLSKDGQKLTL

SEQ ID NO: 87951 - protein, 274 aa, Homo sapiens
MNAPPAFESFLLFEGEKITINKDTKVPNACLFTINKEDHTLGNIIKSRACFPFAFCRDCQFPEASPATLPVQPAELLAWKSPCATGKDINKHQEVSKSTRSHRHHVDIHLPVFPGKILLNCAALAKRAAPEHISYVPQLSNDTLAGRLTLSTFTLEQPLGQFSSHNISDLDTIWLVVALSNATQSFTAPRTNQDIPAPANFSQRGYYLTLRANRVLYQTRGQLHVLRVGNDTHCQPTKIGCNHPLPGPGPYRVKFLVMNDEGPVAETKWSSDTR

SEQ ID NO: 87952 - protein, 104 aa, Homo sapiens
MADVLSVLRQYNIQKKEIVVKGDEVIFGEFSWPKNVKTNYVVWGTGKEGQPREYYTLDSILFLLNNVHLSHPVYVRRAAWRDLGSLQPPPPGFKGFSCLSLPSS

SEQ ID NO: 87953 - protein, 77 aa, Homo sapiens
MLSVRVAAAVVRALPRRAGLVSRNALGSSFIAARNFHASNTHLQKTGTAEMSSILEERILGADTSVDLEETGRVLSW

SEQ ID NO: 87954 - protein, 327 aa, Homo sapiens
MSELEQLRQEAEQLRNQIQITSNMDSVGRIQMRTRRTLRGHLAKIYAMHWGYDSRLLVSASQDGKLIIWDSYTTNKMHAIPLRSSWVMTCAYAPSGNYVACGGLDNICSIYNLKTREGNVRVSRELPGHTGYLSCCRFLDDSQIVTSSGDTTCALWDIETAQQTTTFTGHSGDVMSLSLSPDMRTFVSGACDASSKLWDIRDGMCRQSFTGHVSDINAVSFFPNGYAFATGSDDATCRLFDLRADQELLLYSHDNIICGITSVAFSKSGRLLLAGYDDFNCNVWDTLKGDRAGVLAGHDNRVSCLGVTDDGMAVATGSWDSFLRIWN

SEQ ID NO: 87955 - protein, 242 aa, Homo sapiens
MDCLCIVTTKKYRYQDEDTPPLEHSPAHLPNQVNAPELVHVAERNLSHLEAGHGVVGHAHLSPFKANSPPVIVNTDTLEAPGYVNGTEGEMEYEEITLERGNSGLGFSIAGGTDNPHIGDDPSIFITKIIPGGAAAQDGRLRVNDSILFVNEVDVREVTHSAAVEALKEAGSIVRLYVMRRKPPAEKVMEIKLIKGPKGLGFSIAGGVGNQHIPGDNSIYVTKIIEGGAAHKDGRLQIGDKI

SEQ ID NO: 87956 - protein, 133 aa, Homo sapiens
MHHQWLLLAACFWVIFMFMVASKFITLTFKDPDVYSAKQEFLFLTTMPEVRKLPEEKHIPEELKPTGKELPDSQLVQPLVYMERLELIRNVCRDDALKNLSHTPVSKFVLDRIFVCDKHKILFCQTPKVGNTQ

SEQ ID NO: 87957 - protein, 221 aa, Homo sapiens
MWMSYLGPQMHVNLASAPLLEQVMRQEGKYPVRNDMELWKEHRDQHDLTYGPFTTEGHHWYQLRQALNQRLLKPAEAALYTDAFNEVIDDFMTRLDQLRAESASGNQVSDMAQLFYYFALEAICYILFEKRIGCLQRSIPEDTVTFVRSIGLMFQNSLYATFLPKWTRPVLPFWKRYLDGWNAIFSFGKKLIDEKLEDMEAQLQAAGPDGIQVSGYLHFLL

SEQ ID NO: 87958 - protein, 70 aa, Homo sapiens
  MOD_RES (1)..(1): Any amino acid
XDQLLSARVFFENFKYEDALRLLQCAEPYKVSFCLKRTVPTGDLALRPGTVSGYEIKGPRAKVAKLFPHL

SEQ ID NO: 87959 - protein, 741 aa, Homo sapiens
  MOD_RES (1)..(1): Any amino acid
XPLLPAPSGSSAPPHPAKMPSGTEQQTEGTSVTFSPLKSPPQLEREMASPPECSEMPLDLSSKSNRQKLPLPNQRKTPPMPVLTPVHTSSKALLSTVLSRSQRTTQAAGGNVTSCLGSTSSPFVIFPEIVRNGDPSTWVKNSTALISTIPGTYVGVANPVPASLLLNKDPNLGLNRDPRHLPKQEPISIIDQGEPKGTGATCGKKGSQAGAEGQPSTVKRYTPARIAPGLPGCQTKELSLWKPTGPANIYPRCSVNGKPTSTQVLPVGWSPYHQASLLSIGISSAGQLTPSQGAPIRPTSVVSEFSGVPSLSSSEAVHGLPEGQPRPGGSFVPEQDPVTKNKTCRIAAKPYEEQVNPVLLTLSPQTGTLALSVQPSGGDIRMNQGPEESESHLCSDSTPKMEGPQGACGLKLAGDTKPKNQVLATYMSHELVLATPQNLPKMPELPLLPHDSHPKELILDVVPSSRRGSSTERPQLGSQVDLGRVKMEKVDGDVVFNLATCFRADGLPVAPQRGQAEVRAKAGQARVKQESVGVFACKNKWQPDDVTESLPPKKMKCGKEKDSEEQQLQPQAKAVVRSSHRPKCRKLPSDPQESTKKSPRGASDSGKEHNGVRGKHKHRKPTKPESQSPGKRADSHEEGSLEKKAKSSFRDFIPVVLSTRTRSQSDLKARKQKTSSSQSLEHRLRNRNLLLPNKVQGISDSPNGFLPNNLEEPACLENSEKPSGKRKCKTKHMATVSEEAK

SEQ ID NO: 87960 - protein, 8 aa, Homo sapiens
MNDDPSME

SEQ ID NO: 87961 - protein, 67 aa, Homo sapiens
MVKLANPLYTEWILEAIQKIKKQKQRPSEERICHAVSTSHGLDKKTVSEQLELSVQDGSVLKVTNKG

SEQ ID NO: 87962 - protein, 285 aa, Homo sapiens
EEINKRTTAENEFVVLKKETAQIQSHISDTSIILSMDNNRNLDLDSIIAEVRAQYEEIARKSKAEAEALYQTKFQELQLAAGRHGDDLKHTKNEISELTRLIQRLRSEIESVKKQCANLETAIADAEQRGDCALKDARAKLDELEGALQQAKEELARMLREYQELLSVKLSLDIEIATYRKLLEGEECRMSGEYTNSVSISVINSSMAGMAGTGAGFGFSNAGTYGYWPSSVSGGYSMLPGGCVTGSGNCSPRGEARTRLGSASEFRDSQGKTLALSSPTKKTMR

SEQ ID NO: 87963 - protein, 154 aa, Homo sapiens
MMASFQRSNSHDKVRRIVAEEGRTARNLIAWSVPLESKDDDGKPKCQTGGKSKRTIQGTHKTTKQEVLMMLDNYVRDFKALIDWIQLQEKLEKTDAQSRPTSLAWEVKKMSPGRHVIPSPSTDRINVTSNARRSLNFGGSTGTVPAPRLAPTGV

SEQ ID NO: 87964 - protein, 155 aa, Homo sapiens
  MOD_RES (1)..(1): Any amino acid
XAGVLVDSAVEVAFLWTFGDGEQALHQFQPPYNESFPVPDPSVAQVLVEHNVMHTYAAPGEYLLTVLASNAFENLTQQVLIRSGRVPIVSLECVSCKAQAVYEVSRSSYVYLEGRCLNCSSGSKRGRWAARTFSNKTLVLDETTTSTGSAGMRLV

SEQ ID NO: 87965 - protein, 39 aa, Homo sapiens
  MOD_RES (1)..(1): Any amino acid
XVHLTNVAVQKTSPDYHPKKVAPGGQCVPITDSQQPGRL

SEQ ID NO: 87966 - protein, 301 aa, Homo sapiens
EGRCLFVILLMAVYWCTEALPLSVTALLPIVLFPFMGILPSNKVCPQYFLDTNFLFLSGLIMASAIEEWNLHRRIALKILMLVGVQPARLILGMMVTTSFLSMWLSNTASTAMMLPIANAILKSLFGQKEVRKDPSQESEENTAKTTLGRQRFHWICRLTPGRRMNIVGTSGRASSSPSPTQPVLGAQPHSRAQPLTSSCLASSRGWLWISFLYGGLSFRGWRKNKSEIRTNAEDRARAVIREEYQNLGPIKFAEQAVFILFCMFAILLFTRDPKFIPGWASLFNPGCKMGIISISTIQKM

SEQ ID NO: 87967 - protein, 210 aa, Homo sapiens
MIAVSFKCRCQILRRLTKEEFKGSTVVELMKKEGTTLGLTVSGGIDKDGKPRVSNLRQGGIAARSDQLDVGDYIKAVNGINLAKFRHDEIISLLKNVGERVVLEVEYELPPVSVQGSSVIFRTVEVTLHKEGNTFGFVIRGGAHDDRNKSRPVVITCVRPGGPADREGTIKPGDRLLSVDGIRLLGTTHAEAMSILKQCGQEAALLIEYD

SEQ ID NO: 87968 - protein, 229 aa, Homo sapiens
MAEDEPDAKSPKTGGRAPPGGAEAGEPTTLLQRLRGTISKAVQNKVEGILQDVQKFSDNDKLYLYLQLPSGPTTGDKSSEPSTLSNEEYMYAYRWIRNHLEEHTDTCLPKQSVYDAYRKYCESLACCRPLSTANFGKIIREIFPDIKARRLGGRGQSKYCYSGIRRKTLVSMPPLPGLDLKGSESPEMGPEVTPAPRDELVEAACALTCDWAERILKRSFSSIVEVARF

SEQ ID NO: 87969 - protein, 64 aa, Homo sapiens
AQQESEIAGIENDEAFAILDGGAPGPQPHGEPPGGPDAVDGVMNGEYYQMPILGSKKQSGKKRQ

SEQ ID NO: 87970 - protein, 340 aa, Homo sapiens
TGHKQMFNPTEESQTFLQLTTLCQDRTLVGMKLLDKISSVPHGELSCTTELLILAHHCFTLTCHMEGIIRVLQAAHMLTDNHLAPSEEYGLVSGTLKTALLDYIKRCRPGDSEKHNMIALCFSMCREIGENHEAAARIQLKLIESQPWEDSLKDGHQLKQLLLKALTLMLDAAESYAKDSCVRQAQHCQRLTKLITLQIHFLNTGQNTMLINLGRHKLMDCILALPRFYQASIVAEAYDFVPDWAEILYQQVILKGDFNYLEEFKQQRLLKSSIFEEISKKYKQHQPTDMVMENLKKLLTYCEDVYLYYKLAYEHKFYEIVNVLLKDPQTGCCLKDMLAG

SEQ ID NO: 87971 - protein, 187 aa, Homo sapiens
MMDVSGVGFPSKVPWKKMSAEELENQYCPSRWVVRLGAEEALRTYSQIGIEATTRARATRKSLLHVPYGDGEGEKVDIYFPDESSEALPFFLFFHGGYWQSGRHPGPHGRPGDPQRCVCPEAVSKQQVGVASRFSSCWTSVGGRTVQSVPRIQPSCPSGLWSRKQIGTLRRGPDVVGKLRANPALCS

SEQ ID NO: 87972 - protein, 96 aa, Homo sapiens
MSPGLLLLGSAVLLAFGLCCTFVHRARSRYEHIPGPPRPSFLLGHLPCFWKKDEVGGRVLQDVFLDWAKKYGPVVRVNVFHKTSVIVTSPESVKFH

SEQ ID NO: 87973 - protein, 636 aa, Homo sapiens
MWRVCARRAQNVAPWAGLEARWTALQEVPGTPRVTSRSGPAPARRNSVTTGYGGVRALCGWTPSSGATPRNRLLLQLLGSPGRRYYSLPPHQKAGTIARWEKKEGDKINEGDLIAEVETDKATVGFESLEECYMAKILVAEGTRDVPIGAIICITVGKPEDIEAFKNYTLDSSAAPTPQAAPAPTPAATASPPTPSAQAPGSSYPPHMQVLLPALSPTMTMGTVQRWEKKVGEKLSEGDLLAEIETDKATIGFEVQEEGYLAKILVPEGTRDVPLGTPLCIIVEKEADISAFADYRPTEVTDLKPQVPPPTPPPVAAVPPTPQPLAPTPSAPCPATPAGPKGRVFVSPLAKKLAVEKGIDLTQVKGTGPDGRITKKDIDSFVPSKVAPAPAAVVPPTGPGMAPVPTGVFTDIPISNIRRVIAQRLMQSKQTIPHYYLSIDVNMGEVLLVRKELNKILEGRSKISVNDFIIKASALACLKVPEANSSWMDTVIRQNHVVDVSVAVSTPAGLITPIVFNAHIKGVETIANDVVSLATKAREGKLQPHEFQGGTFTISNLGMFGIKNFSAIINPPQACILAIGASEDKLVPADNEKGFDVASMMSVTLSCDHRVVDGAVGAQWLAEFRKYLEKPITMLL

SEQ ID NO: 87974 - protein, 325 aa, Homo sapiens
MWLLSQIGPLHYAKRRNHLERDVTMKGLYFQQSSTDEEITFVFQEKEDLPVTEDNFVKLQVKACALSQINTKLLAEMKMKKDLFPVGREIAGIVLDVGSKVSFFQPDDEVVGILPLDSEDPGLCEVVRVHEHYLVHKPEKVTWTEAAGSIRDGVRAYTALHYLSHLSPGKSVLIMDGASAFGTIAIQLAHHRGAKVISTACSLEDKQCLERFRPPIARVIDVSNGKVHVAESCLEETGGLGVDIVLDAGVRLYSKDDEPAVKLQLLPHKHDIITLLGVGGHWVTTEENLQLDPPDSHCLFLKGATLAFLNDEVWNLSNVQQGKYL

SEQ ID NO: 87975 - protein, 43 aa, Homo sapiens
MSAFDMSHGFFPREPICPFEEKTKIGTMVEDHRSNSYQISFSA

SEQ ID NO: 87976 - protein, 87 aa, Homo sapiens
MKNQVCSKCGEGTYSLGSGIKFDEWDELPAGFSNIATFMDTVVGPSDSRPDGCNNSSWIPRGNYIESNRDDCTVSLIYAVHLKKSGY

SEQ ID NO: 87977 - protein, 50 aa, Homo sapiens
  MOD_RES (1)..(1): Any amino acid
XGSGKVYQGPAKGAADTTIILSDEDFMEVVLGKLDPQKYGHLSTLLKVCF

SEQ ID NO: 87978 - protein, 912 aa, Homo sapiens
MFARKPPGAAPLGAMPVPDQPSSASEKTSSLSPGLNTSNGDGSETETTSAILASVKEQELQFERLTRELEAERQIVASQLERCKLGSETGSMSSMSSAEEQFQWQSQDGQKDIEDELTTGLELVDSCIRSLQESGILDPQDYSTGETGSRASYSSQHGHLGPELRALQSPEHHIDPIYEDRVYQKPPMRSLSQSQGDPLPPAHTGTYRTSTAPSSPGVDSVPLQRTGSQHGPQNAAAATFQRASYAAGPASNYADPYRQLQYCPSVESPYSKSGPALPPEGTLARSPSIDSIQKDPREFGWRDPELPEVIQMLQHQFPSVQSNAAAYLQHLCFGDNKIKAEIRRQGGIQLLVDLLDHRMTEVHRSACGALRNLVYGKANDDNKIALKNCGGIPALVRLLRKTTDLEIRELVTGVLWNLSSCDALKMPIIQDALAVLTNAVIIPHSGWENSPLQDDRKIQLHSSQVLRNATGCLRNVSSAGEEARRRMRECDGLTDALLYVIQSALGSSEIDSKTVENCVCILRNLSYRLAAETSQGQHMGTDELDGLLCGEANGKDAESSGCWGKKKKKKKSQDQWDGVGPLPDCAEPPKGIQMLWHPSIVKPYLTLLSECSNPDTLEGAAGALQNLAAGSWKGWAEDVAGMAYALRSLPEGAPCLPQWSVYIRAAVRKEKGLPILVELLRIDNDRVVCAVATALRNMALDVRNKELIGKYAMRDLVHRLPGGNNSNNTASKAMSDDTVTAVCCTLHEVITKNMENAKALRDAGGIEKLVGISKSKGDKHSPKVVKAASQVLNSMWQYRDLRSLYKKDGWSQYHFVASSSTIERDRQRPYSSSRTPSISPVRVSPNNRSASAPASPREMISLKERKTDYECTGSNATYHGAKGEHTSRKDAMTGAHSASMCRPYKGTPQRCS

SEQ ID NO: 87979 - protein, 30 aa, Homo sapiens
GDEVCLPPHLNEYCLFFVFPSRLDFGGFLI

SEQ ID NO: 87980 - protein, 36 aa, Homo sapiens
MATLKGLVQKGVKVDLGIPLELWDEPSVEVTYLKKQ

SEQ ID NO: 87981 - protein, 101 aa, Homo sapiens
  MOD_RES (1)..(1): Any amino acid
XLNFKDPEAVRALTCTLLREDFGLSIDIPLERLIPTVPLRLNYIHWVEDLIGHQDSDKSTLRRGIDIGIQGRACPVALGPGYPRAKMARGHLASTPYLEQP

SEQ ID NO: 87982 - protein, 701 aa, Homo sapiens
ITQERNRAKETLEEERKRMQELESLLAQQKKALAKSITQEKNRVKEALEEEQTRVQELEERLARQKEISESNIAYEKRKAKEAMEKEKKKVQDLENRLTKQKEELELKEQKEDVLNNKLSDALAMVEETQKTKATESLKAESLALKLNETLAELETTKTKMIMVEERLILQQKMVKALQDEQESQRHGFEEEIMEYKEQIKQHAQTIVSLEEKLQKVTQHHKKIEGEIATLKDNDPAPKEERPQDPLVAPMTESSAKDMAYEHLIDDLLAAQKEILSQQEVIMKLRKDLTEAHSRMSDLRGELNEKQKMELEQNVVLVQQQSKELSVLKEKMAQMSSLVEKKDRELKALEEALRASQEKHRLQLNTEKEQKPRKKTQTCDTSVQIEPVHTEAFSSSQEQQSFSDLGVRCKGSRHEEVIQRQKKALSELRARIKELEKARSPDHKDHQNESFLDLKNLRMENNVQKILLDAKPDLPTLSRIEILAPQNGLCNARFGSAMEKSGKMDVAEALELSEKLYLDMSKTLGSLMNIKNMSGHVSMKYLSRQEREKVNQLRQRDLDLVFDKITQLKNQLGRKEELLRGYEKDVEQLRRSKVSIEMYQSQVAKLEDDIYKEAEEKALLKEALERMEHQLCQEKRINRAIRQQKRRVFVEMVKNRMQNSNSQVGTRKASLKMDQEREMLRKETSSKSSQSLLHSKPSGKY

SEQ ID NO: 87983 - protein, 139 aa, Homo sapiens
MMKTITRLHKAMVFLEYFTSNSWVWNTENVNMLMNQLNPEDKKTFNIDVRQLHWAEYIENYCLGTKKYVLNEEMSGLPAARKHLNKLRNIRYGFNTILVILIWRIFIARSQMARNIWYFVVSLCYKFLSYFRASSTMRY

SEQ ID NO: 87984 - protein, 148 aa, Homo sapiens
MFLRGRPVPMMIPDELAPTYSLDTRSELPSCRLKLEWVYGYRGRDCRANLYLLPTGEIVYFVASVAVLYSVEEQRQRHYLGHNDDIKCLAIHPDMVTIATGQVAGTTKEGKPLPPHVRIWDSVSLSTLHVLGLGVFDRAVCCVGFSKS

SEQ ID NO: 87985 - protein, 1115 aa, Homo sapiens
MGPLMVLFCLLFLYPGLADSAPSCPQNVNISGGTFTLSHGWAPGSLLTYSCPQGLYPSPASRLCKSSGQWQTPGATRSLSKAVCKPVRCPAPVSFENGIYTPRLGSYPVGGNVSFECEDGFILRGSPVRQCRPNGMWDGETAVCDNGDHENGTGTNTYAALNSVYLMMNNQMRLLGMETMAWQEIRHAIILLTDGKSNMGGSPKTAVDHIREILNINQKRNDYLDVSKLTDTICGVGNMSANASDQERTPWHVTIKPKSQETCRGALISDQWVLTAAHCFRDGNDHSLWRVNVGDPKSQWGKEFLIEKAVISPGFDVFAKKNQGILEFYGDDIALLKLAQKVKMSTHARPICLPCTMEANLALRRPQGSTCRDHENELLNKQSVPAHFVALNGSKLNINLKMGVEWTSCAEVVSQEKTMFPNLTDVREVVTDQFLCSGTQEDESPCKGGSAIHCPRPHDFENGEYWPRSPYYNVSDEISFHCYDGYTLRGSANRTCQVNGRWSGQTAICDNGAGYCSNPGIPIGTRKVGSQYRLEDSVTYHCSRGLTLRGSQRRTCQEGGSWSGTEPSCQDSFMYDTPQEVAEAFLSSLTETIEGVDAEDGHGPGEQQKRKIVLDPSGSMNIYLVLDGSDSIGASNFTGAKKCLVNLIEKVASYGVKPRYGLVTYATYPKIWVKVSEADSSNADWVTKQLNEINYEDHKLKSGTNTKKALQAVYSMMSWPDDVPPEGWNRTRHVIILMTDGLHNMGGDPITVIDEIRDLLYIGKDRKNPREDYLDVYVFGVGPLVNQVNINALASKKDNEQHVFKVKDMENLEDVFYQMIDESQSLSLCGMVWEHRKGTDYHKQPWQAKISVIRPSKGHESCMGAVVSEYFVLTAAHCFTVDDKEHSIKVSVGGEKRDLEIEVVLFHPNYNINGKKEAGIPEFYDYDVALIKLKNKLKYGQTIRPICLPCTEGTTRALRLPPTTTCQQQKEELLPAQDIKALFVSEEEKKLTRKEVYIKNGDKKGSCERDAQYAPGYDKVKDISEVVTPRFLCTGGVSPYADPNTCRGDSGGPLIVHKRSRFIQVGVISWGVVDVCKNQKRQKQVPAHARDFHINLFQVLPWLKEKLQDEDLGFL

SEQ ID NO: 87986 - protein, 939 aa, Homo sapiens
TYTNADKLLEAAEQLAQTGECDPEEIYKAARHLEVRIQDFVRRVEQRKLLLDMSVSFHTHTKELWTWMEDLQKEMLEDVCADSVDAVQELIKQFQQQQTATLDATLNVIKEGEDLIQQLRSAPPSLGEPSEARDSAVSNNKTPHSSSISHIESVLQQLDDAQVQMEELFHERKIKLDIFLQLRIFEQYTIEVTAELDAWNEDLLRQMNDFNTEDLTLAEQRLQRHTERKLAMNNMTFEVIQQGQDLHQYITEVQASGIELICEKDIDLAAQVQELLEFLHEKQHELELNAEQTHKRLEQCLQLRHLQAEVKQVLGWIRNGESMLNASLVNASSLSEAEQLQREHEQFQLAIESLFHATSLQKTHQSALQVQQKAEVLLQAGHYDADAIRECAEKVALHWQQLMLKMEDRLKLVNASVAFYKTSEQVCSVLESLEQEYRRDEDWCGGRDKLGPAAEIDHVIPLISKHLEQKEAFLKACTLARRNAEVFLKYIHRNNVSMPSVASHTRGPEQQVKAILSELLQRENRVLHFWTLKKRRLDQCQQYVVFERSAKQALDWIQETGEFYLSTHTSTGETTEETQELLKEYGEFRVPAKQTKEKVKLLIQLADSFVEKGHIHATEIRKWVTTVDKHYRDFSLRMGKYRYSLEKALGVNTEDNKDLELDIIPASLSDREVKLRDANHEVNEEKRKSARKKEFIMAELLQTEKAYVRDLHECLETYLWEMTSGVEEIPPGILNKEHIIFGNIQEIYDFHNNIFLKELEKYEQLPEDVGHCFVTWADKFQMYVTYCKNKPDSNQLILEHAGTFFDEIQQRHGLANSISSYLIKPVQRITKYQLLLKELLTCCEEGKGELKDGLEVMLSVPKKANDAMHVSMLEGFDENLDVQGELILQDAFQVWDPKSLIRKGRERHLFLFEISLVFSKEIKDSSGHTKYVYKNKLLP

SEQ ID NO: 87987 - protein, 130 aa, Homo sapiens
MESSPFNRRQWTSLSLRVTAKELSLVNKNKSSAIVEIFSKYQKAAEETNMEKKRSNTENLSQHFRKGTLTVLKKKWENPGLGAESHTDSLRNSSTEIRHRADHPPAEVTSHAASGAKADQEEQIHPRSRL

SEQ ID NO: 87988 - protein, 232 aa, Homo sapiens
MEEEASSPGLGCSKPHLEKLTLGITRILESSPGVTEVTIIEKPPAERHMISSWEQKNNCVMPEDVKNFYLMTNGFHMTWSVKLDEHIIPLGSMAINSISKLTQLTQSSMYSLPNAPTLADLEDDTHEASDDQPEKPHFDSRSVIFELDSCNGSGKVCLVYKSGKPALAEDTEIWFLDRALYWHFLTDTFTAYYRLLITHLGLPQWQYAFTSYGISPQAKPKGSEGRSKRGCF

SEQ ID NO: 87989 - protein, 1739 aa, Homo sapiens
MAKPTSKDSGLKEKFKILLGLGTPRPNPRSAEGKQTEFIITAEILRELSMECGLNNRIRMIGQICEVAKTKKFEEHAVEALWKAVADLLQPERPLEARHAVLALLKAIVQGQGERLGVLRALFFKVIKDYPSNEDLHERLEVFKALTDNGRHITYLEEELADFVLQWMDVGLSSEFLLVLVNLVKFNSCYLDEYIARMVQMICLLCVRTASSVDIEVSLQVLDAVVCYNCLPAESLPLFIVTLCRTINVKELCEPCWKLMRNLLGTHLGHSAIYNMCHLMEDRAYMEDAPLLRGAVFFVGMALWGAHRLYSLRNSPTSVLPSFYQAMACPNEVVSYEIVLSITRLIKKYRKELQVVAWDILLNIIERLLQQLQTLDSPELRTIVHDLLTTVEELCDQNEFHGSQERYFELVERCADQRPESSLLNLISYRAQSIHPAKDGWIQNLQALMERFFRSESRGAVRIKVLDVLSFVLLINRQFYEEELINSVVISQLSHIPEDKDHQVRKLATQLLVDLAEGCHTHHFNSLLDIIEKVMARSLSPPPELEERDVAAYSASLEDVKTAVLGLLVILQTKLYTLPASHATRVYEMLVSHIQLHYKHSYTLPIASSIRLQAFDFLLLLRADSLHRLGLPNKDGVVRFSPYCVCDYMEPERGSEKKTSGPLSPPTGPPGPAPAGPAVRLGSVPYSLLFRVLLQCLKQESDWKVLKLVLGRLPESLRYKVLIFTSPCSVDQLCSALCSMLSGPKTLERLRGAPEGFSRTDLHLAVVPVLTALISYHNYLDKTKQREMVYCLEQGLIHRCASQCVVALSICSVEMPDIIIKALPVLVVKLTHISATASMAVPLLEFLSTLARLPHLYRNFAAEQYASVFAISLPYTNPSKFNQYIVCLAHHVIAMWFIRCRLPFRKDFVPFITKGLRSNVLLSFDDTPEKDSFRARSTSLNERPKSRIQTSLTSASLGSADENSVAQADDSLKNLHLELTETCLDMMARYVFSNFTAVPKRSPVGEFLLAGGRTKTWLVGNKLVTVTTSVGTGTRSLLGLDSGELQSGPESSSSPGVHVRQTKEAPAKLESQAGQQVSRGARDRVRSMSGGHGLRVGALDVPASQFLGSATSPGPRTAPAAKPEKASAGTRVPVQEKTNLAAYVPLLTQGWAEILVRRPTGNTSWLMSLENPLSPFSSDINNMPLQELSNALMAAERFKEHRDTALYKSLSVPAASTAKPPPLPRSNTDSAVVMEEGSPGEVPVLVEPPGLEDVEAALGMDRRTDAYSRSSSVSSQEEKSLHAEELVGRGIPIERVVSSEGGRPSVDLSFQPSQPLSKSSSSPELQTLQDILGDPGDKADVGRLSPEVKARSQSGTLDGESAAWSASGEDSRGQPEGPLPSSSPRSPSGLRPRGYTISDSAPSRRGKRVERDALKSRATASNAEKVPGINPSFVFLQLYHSPFFGDESNKPILLPNESFERSVQLLDQIPSYDTHKIAVLYVGEGQSNSELAILSNEHGSYRYTEFLTGLGRLIELKDCQPDKVYLGGLDVCGEDGQFTYCWHDDIMQAVFHIATLMPTKDVDKHRCDKKRHLGNDFVSIVYNDSGEDFKLGTIKGQFNFVHVIVTPLDYECNLVSLQCRKDMEGLVDTSVAKIVSDRNLPFVARQMALHANMASQVHHSRSNPTDIYPSKWIARLRHIKRLRQRICEEAAYSNPSLPLVHPPSHSKAPAQTPAEPTPGYEVGQRKRLISSVEDFTEFV

SEQ ID NO: 87990 - protein, 289 aa, Homo sapiens
MADQIPLYPVRSAAAAAANRKRAAYYSAAGPRPGADRHSRYQLEDESAHLDEMPLMMSEEGFENEESDYHTLPRARIMQRKRGLEWFVCDGWKFLCTSCCGWLINICRRKKELKARTVWLGCPEKCEEKHPRNSIKNQKYNVFTFIPGVLYEQFKFFLNLYFLVISCSQFVPALKIGYLYTYWAPLGFVLAVTMTREAIDEFRRFQRDKEVNSQLYSKLTVRGKVQVKSSDIQVGDLIIVEKNQRIPSDMVFLRTSEKAGPFFYQCLCLCSETTNGHSQFRRHIYQGRQ

SEQ ID NO: 87991 - protein, 1678 aa, Homo sapiens
MHPGLWLLLVTLCLTEELAAAGEKSYGKPCGGQDCSGSCQCFPEKGARGRPGPIGIQGPTGPQGFTGSTGLSGLKGERGFPGLLGPYGPKGDKGPMGVPGFLGINGIPGHPGQPGPRGPPGLDGCNGTQGAVGFPGPDGYPGLLGPPGLPGQKGSKGDPVLAPGSFKGMKGDPGLPGLDGITGPQGAPGFPGAVGPAGPPGLQGPPGPPGPLGPDGNMGLGFQGEKGVKGDVGLPGPAGPPPSTGELEFMGFPKGKKGSKGEPGPKGFPGISGPPGFPGLGTTGEKGEKGEKGIPGLPGPRGPMGSEGVQGPPGQQGKKGTLGFPGLNGFQGIEGQKGDIGLPGPDVFIDIDGAVISGNPGDPGVPGLPGLKGDEGIQGLRGPSGVPGLPALSGVPGALGPQGFPGLKGDQGNPGRTTIGAAGLPGRDGLPGPPGPPGPPSPEFETETLHNKESGFPGLRGEQGPKGNLGLKGIKGDSGFCACDGGVPNTGPPGEPGPPGPWGLIGLPGLKGARGDRGSGGAQGPAGAPGLVGPLGPSGPKGKKGEPILSTIQGMPGDRGDSGSQGFRGVIGEPGKDGVPGLPGLPGLPGDGGQGFPGEKGLPGLPGEKGHPGPPGLPGNGLPGLPGPRGLPGDKGKDGLPGQQGLPGSKGITLPCIIPGSYGPSGFPGTPGFPGPKGSRGLPGTPGQPGSSGSKGEPGSPGLVHLPELPGFPGPRGEKGLPGFPGLPGKDGLPGMIGSPGLPGSKGATGDIFGAENGAPGEQGLQGLTGHKGFLGDSGLPGLKGVHGKPGLLGPKGERGSPGTPGQVGQPGTPGSSGPYGIKGKSGLPGAPGFPGISGHPGKKGTRGKKGPPGSIVKKGLPGLKGLPGNPGLVGLKGSPGSPGVAGLPALSGPKGEKGSVGFVGFPGIPGLPGIPGTRGLKGIPGSTGKMGPSGRAGTPGEKGDRGNPGPVGIPSPRRPMSNLWLKGDKGSQGSAGSNGFPGPRGDKGEAGRPGPPGLPGAPGLPGIIKGVSGKPGPPGFMGIRGLPGLKGSSGITGFPGMPGESGSQGIRGSPGLPGASGLPGLKGDNGQTVEISGSPGPKGQPGESGFKGTKGRDGLIGNIGFPGNKGEDGKVGVSGDVGLPGAPGFPGVAGMRGEPGLPGSSGHQGAIGPLGSPGLIGPKGFPGFPGLHGLNGLPGTKGTHGTPGPSITGVPGPAGLPGPKGEKGYPGIGIGAPGKPGLRGQKGDRGFPGLQGPAGLPGAPGISLPSLIAGQPGDPGRPGLDGERGRPGPAGPPGPPGPSSNQGDTGDPGFPGIPGFSGLPGELGLKGMRGEPGFMGTPGKVGPPGDPGFPGMKGKAGPRGSSGLQGDPGQTPTAEAVQVPPGPLGLPGIDGIPGLTGDPGAQGPVGLQGSKGLPGIPGKDGPSGLPGPPGALGDPGLPGLQGPPGFEGAPGQQGPFGMPGMPGQSMRVGYTLVKHSQSEQVPPCPIGMSQLWVGYSLLFVEGQEKAHNQDLGFAGSCLPRFSTMPFIYCNINEVCHYARRNDKSYWLSTTAPIPMMPVSQTQIPQYISRCSVCEAPSQAIAVHSQDITIPQCPLGWRSLWIGYSFLMHTAAGAEGGGQSLVSPGSCLEDFRATPFIECSGARGTCHYFANKYSFWLTTVEERQQFGELPVSETLKAGQLHTRVSRCQVCMKSL

SEQ ID NO: 87992 - protein, 12 aa, Homo sapiens
MSKSKVDNQFYS

SEQ ID NO: 87993 - protein, 484 aa, Homo sapiens
MVAELATRPQNIETLQNAGVMSLLRTLLLDVVPTIQQTAALALGRLANYNDDLAEAVVKCDILPQLVYSLAEQNRFYKKAAAFVLRAVGKHSPQLAQAIVDCGALDTLVICLEDFDPGVKEAAAWALRYIARHNAELSQAVVDAGAVPLLVLCIQEPEIALKRIAASALSDIAKHSPELAQTVVDAGAVAHLAQMILNPDAKLKHQILSALSQVSKHSVDLAEMVVEAEIFPVVLTCLKDKDEYVKKNASTLIREIAKHTPELSQLVVNAGGVAAVIDCIGSCKGNTRLPGIMMLGYVAAHSENLAMAVIISKGVPQLSVCLSEEPEDHIKAAAAWALGQIGRHTPEHARAVAVTNTLPVLLSLYMSTESSEDLQVKSKKAIKNILQKCTYLPALEPFLYDAPPNILKHVVGQFSKVLPHDSKARRLFVTSGGLKKVQEIKAEPGSLLQEYINSINSCYPEEIVSKFFPELQVCALFRKFMRTP

SEQ ID NO: 87994 - protein, 42 aa, Homo sapiens
  MOD_RES (1)..(1): Any amino acid
XLGAAASTANLLDDVEGHACDEDFRGRRQEAPKVEEGLREGQ

SEQ ID NO: 87995 - protein, 115 aa, Homo sapiens
MGNSCYNIVATLLLVLNFERTRSLQDPCSNCPAGTFCDNNRNQICSPCPPNSFSSAGGQRTCDICRQCKGVFRTRKECSSTSNAECDCTPGFHCLGAGCSMCEQDCKQGQELTKK

SEQ ID NO: 87996 - protein, 136 aa, Homo sapiens
MTSEFFAAQLRAQISDDTTHPISYYKPEFYTPVDGGTAHLSVVAEDGSAVSATSTINLYFGSKVRSPVSEILFNDEMDDFSSPNITNEFGVPPSPANFIQPGKQPLSSMCPTIMVGQDGQVRMVVGAAGGTQITTA

SEQ ID NO: 87997 - protein, 185 aa, Homo sapiens
MVADNPSYNTKTQIIQDFLRKGSAGDGFHGDVYLTVKLLLPGVIKTVYNLNDKQIVKLFSRIFNCNPDDMARDLEQGDVSETIRVFFEQSKSFPPAAKSLLTIQEVDEFLLRLSKLTKEDEQQQALQDIASRCTANDLKCIIRLIKHDLKMNSGAKHVLDALDPNAYEAFKASRNLQDVVERVLH

SEQ ID NO: 87998 - protein, 259 aa, Homo sapiens
MWVTLPIDLNNKSAKQQEVQFKAYYLPKDDEYYQFCYVDEDGVVRGASIPFQFRPENEEDILVVTTQGEVEEIEQHNKELCKENQELKDSCISLQKQNSDMQAELQKKQEELETLQSINKKLELKVKEQKDYWETELLQLKEQNQKMSSENEKMGIRVDQLQAQLSTQEKEMEKLVQGDQDKTEQLEQLKKENDHLFLSLTEQRKDQKKLEQTVEQMKQNETTAMKKQQELMDENFDLSKRLSENEIICNALQRQKERL

SEQ ID NO: 87999 - protein, 162 aa, Homo sapiens
MGGSVYPADDEMFSDIYKIREIADGLCLEVEGKMVSRTEGNIDDSLIGGNASAEGPEGEGTESTVITGVDIVMNHHLQETSFTKEAYKKYIKDYMKSIKGKLEEQRPERVKPFMTGAAEQIKHILANFKNYQFFIGENMNPDGMVALLDYREDGVTPYMIFF

SEQ ID NO: 88000 - protein, 144 aa, Homo sapiens
MESGLAGNGTGAGLVMKVKQEKPERLLQTLAPQAMLVEKDKENIFQQHRGLPPRQTMGRPRALGGQEESGSPRWAPPTEQDAGLAGRAPGSASGPLSPSLSSGEGHFVCLDCGKRFSWWSSLKIHQRTHTGEKPYLCGKCGKSF

SEQ ID NO: 88001 - protein, 1384 aa, Homo sapiens
MVSSGCRMRSLWFIIVISFLPNTEGFSRAALPFGLVRRELSCEGYSIDLRCPGSDVIMIESANYGRTDDKICDADPFQMENTDCYLPDAFKIMTQRCNNRTQCIVVTGSDVFPDPCPGTYKYLEVQYECVPYMEQKVFVCPGTLKAIVDSPCIYEAEQKAGAWCKDPLQAADKIYFMPWTPYRTDTLIEYASLEDFQNSRQTTTYKLPNRVDGTGFVVYDGAVFFNKERTRNIVKFDLRTRIKSGEAIINYANYHDTSPYRWGGKTDIDLAVDENGLWVIYATEQNNGMIVISQLNPYTLRFEATWETVYDKRAASNAFMICGVLYVVRSVYQDNESETGKNSIDYIYNTRLNRGEYVDVPFPNQYQYIAAVDYNPRDNQLYVWNNNFILRYSLEFGPPDPAQERFCEALDSKGIKWPQTQRGMMVERPCPKGTRGTASYLCMISTGTWNPKGPDLSNCTSHWVNQLAQKIRSGENAASLANELAKHTKGPVFAGDVSSSVRLMEQLVDILDAQLQELKPSEKDSAGRSYNKAIVDTVDNLLRPEALESWKHMNSSEQAHTATMLLDTLEEGAFVLADNLLEPTRVSMPTENIVLEVAVLSTEGQIQDFKFPLGIKGAGSSIQLSANTVKQNSRNGLAKLVFIIYRSLGQFLSTENATIKLGADFIGRNSTIAVNSHVISVSINKESSRVYLTDPVLFTLPHIDPDNYFNANCSFWNYSERTMMGYWSTQGCKLVDTNKTRTTCACSHLTNFAILMAHREIAYKDGVHELLLTVITWVGIVISLVCLAICIFTFCFFRGLQSDRNTIHKNLCINLFIAEFIFLIGIDKTKYAIACPIFAGLLHFFFLAAFAWMCLEGVQLYLMLVEVFESEYSRKKYYYVAGYLFPATVVGVSAAIDYKSYGTEKACWLHVDNYFIWSFIGPVTFIILLNIIFLVITLCKMVKHSNTLKPDSSRLENIKSWVLGAFALLCLLGLTWSFGLLFINEETIVMAYLFTIFNAFQGVFIFIFHCALQKKVRKEYGKCFRHSYCCGGLPTESPHSSVKASTTRTSARYSSGTQSRIRRMWNDTVRKQSESSFISGDINSTSTLNQGMTGNYLLTNPLLRPHGTNNPYNTLLAETVVCNAPSAPVFNSPGHSLNNARDTSAMDTLPLNGNFNNSYSLHKGDYNDSVQVVDCGLSLNDTAFEKMIISELVHNNLRGSSKTHNLELTLPVKPVIGGSSSEDDAIVADASSLMHSDNPGLELHHKELEAPLIPQRTHSLLYQPQKKVKSEGTDSYVSQLTAEAEDHLQSPNRDSLYTSMPNLRDSPYPESSPDMEEDLSPSRRSENEDIYYKSMPNLGAGHQLQMCYQISRGNSDGYIIPINKEGCIPEGDVREGQMQLVTSL

SEQ ID NO: 88002 - protein, 7 aa, Homo sapiens
MMHPVAS

SEQ ID NO: 88003 - protein, 121 aa, Homo sapiens
MRLDEHDFLGQFSCSLGTIVSSKKITRPLLLLNDKPAGKGLITIAAQELSDNRVITLSLAGRRLDKKDLFGKSDPFLEFYKPGDDGKWMLVHRTEVIKYTLDPVWKPFTVPLVSLCDGDME

SEQ ID NO: 88004 - protein, 309 aa, Homo sapiens
MLLILLSVALLALSSAQSLNEDVSQEESPSVISGKPEGRRPQGGNQPQRTPPPPGKPEGRPPQGGNQSQGPPPRPGKPEGPPPQGGNQSQGPPPRPGKPEGQPPQGGNQSQGPPPRPGKPEGPPPQGGNQSQGPPPRPGKPEGPPPQGGNQSQGPPPRPGKPEGPPPQGGNQSQGPPPHPGKPEGPPPQGGNQSQGPPPRPGKPEGPPPQGGNQSQGPPPRPGKPEGPPSQGGNKPQGPPPHPGKPQGPPPQEGNKPQRPPPPGRPQGPPPPGGNPQQPLPPPAGKPQGPPPPPQGGRPHRPPQGQPPQ

SEQ ID NO: 88005 - protein, 99 aa, Homo sapiens
MEVAVPVKQEAEGLALDSPWHRFRRFHLGDAPGPREALGLLRALCRDWLRPEVHTKEQMLELLVLEQFLSALPADTQAWVCSRQPQSGEEAVALLEELW

SEQ ID NO: 88006 - protein, 172 aa, Homo sapiens
  MOD_RES (1)..(1): Any amino acid
XYTFSISQNPFPIENRDVLGETQTESHSITQAGVQWCDLGSLQPPPPGFKRFFCFSLLSSWDYRTSIAWPPICLRIPHLCSWIPSQISTSCCSWSPMKLCLCRTASACCWRPCGPEMRSSPRHGRGLSSGPPSSSCAAQLAGSSQVSMSTAPSGAPHTRPLQPCGPVSTARS

SEQ ID NO: 88007 - protein, 562 aa, Homo sapiens
MTVLEITLAVILTLLGLAILAILLTRWARRKQSEMYISRYSSEQSARLLDYEDGRGSRHAYSTQSDTSYDNRERSKRDYTPSTNSLALSRSSIALPQGSMSSIKCLQTTEEPPSRTAGAMMQFTAPIPGATGPIKLSQKTIVQTLGPIVQYPGSNVRSHPHTITGPPSAPRGPPMAPIIISQRTASQLAAPIRIPQVHTMDSSGKITLTPVVILTGYMDEELAKKSCSKIQILKCGGTARSQNSREENKEALKNDIIFTNSVESLKSAHIKEPEREGKGTDLEKDKIGMEVKVDSDAGIPKRQETQLKISEMSIPQGQGAQIKKSVSDVPRGQESQVKKSESGVPKGQEAQVTKSGLVVLKGQEAQVEKSEMGVPRRQESQVKKSQSGVSKGQEAQVKKRESVVLKGQEAQVEKSELKVPKGQEGQVEKTEADVPKEQEVQEKKSEAGVLKGPESQVKNTEVSVPETLESQVKKSESGVLKGQEAQEKKESFEDKGNNDKEKERDAEKDPNKKEKGDKNTKGDKGKDKVKGKRESEINGEKSKGSKRAKANTGRKYNKKVEE

SEQ ID NO: 88008 - protein, 121 aa, Homo sapiens
  MOD_RES (1)..(1): Any amino acid
XSLMGLGDIISQQLVERRGLQEHQRGRTLTMVSLGCGFVGPVVGGWYKVLDRFIPGTTKVDALKKMLLDQDYPDALITNYYLWPAVQLANFYLVPLHYRLAVVQCVAVIWNSYLSWKAHRL

SEQ ID NO: 88009 - protein, 99 aa, Homo sapiens
MDFFASGLPLVTEETPSGEAGSEEDDEVVAMIKELLDTRIRPTVQEDGGDVIYKGFEDGIVQLKLQGSCTSCPSSIITLKNGIQNMLQFYIPEVEGVEQ

SEQ ID NO: 88010 - protein, 496 aa, Homo sapiens
MVLWGPVLGALLVVIAGYLCLPGMLRQRRPWEPPLDKGTVPWLGHAMAFRKNMFEFLKRMRTKHGDVFTVQLGGQYFTFVMDPLSFGSILKDTQRKLDFGQYAKKLVLKVFGYRSVQGDHEMIHSASTKHLRGDGLKDLNETMLDSLSFVMLTSKGWSLDASCWHEDSLFRFCYYILFTAGYLSLFGYTKDKEQDLLQAGELFMEFRKFDLLFPRFVYSLLWPREWLEVGRLQRLFHKMLSVSHSQEKEGISNWLGNMLQFLREQGVPSAMQDKFNFMMLWASQGNTGPTSFWALLYLLKHPEAIRAVREEATQVLGEARLETKQSFAFKLGALQHTPVLDSVVEETLRLRAAPTLLRLVHEDYTLKMSSGQEYLFRHGDILALFPYLSVHMDPDIHPEPTVFKYDRFLNPNGSRKVDFFKTGKKIHHYTMPWGSGVSICPGRFFALSEADFERNVDSGPQLTQSIYDTMISWLMELFSAAETEPLLREPWSPPTL

SEQ ID NO: 88011 - protein, 515 aa, Homo sapiens
MFQFHAGSWESWCCCCLIPADRPWDRGQHWQLEMADTRSVHETRFEAAVKVIQSLPKNGSFQPTNEMMLKFYSFYKQATEGPCKLSRPGFWDPIGRYKWDAWSSLGDMTKEEAMIAYVEEMKKIIETMPMTEKVEELLRVIGPFYEIVEDKKSGRSSDITSDLGNVLTSTPNAKTVNGKAESSDSGAESEEEEAQEEVKGAEQSDNDKKMMKKSADHKNLEVIVTNGYDKDGFVQDIQNDIHASSSLNGRSTEEVKPIDENLGQTGKSAVCIHQDINDDHVEDVTGIQHLTSDSDSEVYCDSMEQFGQEESLDSFTSNNGPFQYYLGGHSSQPMENSGFREDIQVPPGNGNIGNMQVVAVEGKGEVKHGGEDGRNNSGAPHREKRGGETDEFSNVRRGRGHRMQHLSEGTKGRQVGSGGDGERWGSDRGSRGSLNEQIALVLMRLQEDMQNVLQRLQKLETLTALQAKSSTSTLQTAPQPTSQKTELRKMVFSSRRLLELDDLRMNWIVVFTRKS

SEQ ID NO: 88012 - protein, 158 aa, Homo sapiens
MPLSEVCEGFDEEGRNISKTRGWHSPGRGSLDEGYKASHKPEELDEHALVELELHRGSSMEINLGEKDTASQIEAEKSSSMSSLNIAKHMPHRAYWAEQQSRLPLPLMELMENEALEILTKALRSYQLGIGRDHFLTKELQRYIEGLKKRRSKRLYVN

SEQ ID NO: 88013 - protein, 197 aa, Homo sapiens
MVPWVRTMGQKLKQRLRLDVGREICRQYPLFCFLLLCLSAASLLLNRYIHILMIFWSFVAGVVTFYCSLGPDSLLPNIFFTIKYKPKQLGLQELFPQGHSCAVCGKVKCKRHRPSLLLENYQPWLDLKISSKVDASLSEVLELVLENFVYPWYRDVTDDESFVDELRITLRFFASVLIRRIHKRQGFTVLARMVSIS

SEQ ID NO: 88014 - protein, 164 aa, Homo sapiens
MKKVRLKELESRLQQVDGFEKPKLLLEQYPTRPHIAACMLYTIHNTYDDIENKVVADLGCGCGVLSIGTAMLGAGLCVGFDIDEDALEIFNRNAEEFELTNIDMVQCDVCLLSNRMSKSFDTVIMNPPFGTKNNKELRYDLPASYKFHKKKSVDIEVDLIRFSF

SEQ ID NO: 88015 - protein, 119 aa, Homo sapiens
IMEDTIEDKLDTKHYPYISTRSSASFSTTAVSARYGHWHKNKAPGEYRSGPRLIIFILGGVSLNEMRCAYEVTQANGKWEVLIGSTHILTPTKFLMDLRHPDFRESSRVSFEDQAPTME

SEQ ID NO: 88016 - protein, 30 aa, Homo sapiens
MSVPAFIDISEEDQELRFQKRTRKVDFMLI

SEQ ID NO: 88017 - protein, 184 aa, Homo sapiens [sequence omitted]

SEQ ID NO: 88018 - protein, 327 aa, Homo sapiens
MIEDSGKRGNTMAERRQLFAEMRAQDLDRIRLSTYRTACKLRFVQKKCNLHLVDIWNVIEALRENALNNLDPNTELNVSRLEAVLSTIFYQLNKRMPTTHQIHVEQSISLLLNFLLAAFDPEGHGKISVFAVKMALATLCGGKIMDKLRYIFSMISDSSGVMVYGRYDQFLREVLKLPTAVFEGPSFGYTEQSARSCFSQQKKVTLNGFLDTLMSDPPPQCLVWLPLLHRLANVENVFHPVECSYCHSESMMGFRYRCQQCHNYQLCQDCFWRGHAGGSHSNQHQMKEYTSWKSPAKKLTNALSKSLSCASSREPLHPMFPDQPEKP

SEQ ID NO: 88019 - protein, 371 aa, Homo sapiens
FSSQPAVHKLTKRIPLRRQVTVSAESSSSMNSNTPLVRITTRLSSTADTPMLAGVSEYELPEDPKWEFPRDKLTLGKPLGEGCFGQVVMAEAVGIDKDKPKEAVTVAVKMLKDDATEKDLSDLVSEMEMMKMIGKHKNIINLLGACTQDGPLYVIVEYASKGNLREYLRARRPPGMEYSYDINRVPEEQMTFKDLVSCTYQLARGMEYLASQKCIHRDLAARNVLVTENNVMKIADFGLARDINNIDYYKKTTNGRLPVKWMAPEALFDRVYTHQSDVWSFGVLMWEIFTLGGSPYPGIPVEELFKLLKEGHRMDKPANCTNELNTWTSANLSNSIHLVTLTQEVLVLQEMILFFLQTPCLTNHAFLSIHT

SEQ ID NO: 88020 - protein, 141 aa, Homo sapiens
  MOD_RES (1)..(1): Any amino acid
XPGTCVKVLTIEPPPADPRLREDMALLADCALPPELRGDLWELPFPCPDGFNSCPDICFRVAGCSFLCHKAFFCGRSDYFRALLDDHFRESEEPATSGGPPAVTLHGISPDVFTHVLYYMYSDHTEPPQVGMVIYTSWTGN

SEQ ID NO: 88021 - protein, 363 aa, Homo sapiens
MRWVRHDAPARRGQLRRLLEHVRLPLLAPAYFLEKVEADELLQACGECRPLLLEARACFILGREAGALRTRPRRFMDLAEVIVVIGGCDRKGLLKLPFADAYHPESQRWTPLPSLPGYTRSEFAACALRNDVYVSGGHINSHDVWMFSSHLHTWIKVASLHKGRWRHKMAVVQGQLFAVGGFDGLRRLHSVERYDPFSNTWAAAAPLPEAVSSAAVASCAGKLFVIGGARQGGVNTDKVQCFDPKEDRWSLRSPAPFSQRCLEAVSLEDTIYVMGGLMSKIFTYDPGTDVWGEAAVLPSPVESCGVTVCDGKVHILGGRDDRGESTDKVFTFDPSSGQVEVQPSLQRCTSSHGCVTIIQSLGR

SEQ ID NO: 88022 - protein, 138 aa, Homo sapiens
MSTVGLFHFPTPLTRICPAPWGLRLWEKLTLLSPGIAVTPVQMAGKKDYPALLSLDENELEEQFVKGHGPGGQATNKTSNCVVLKHIPSGIVVKCHQTRSVDQNRKLARKILQEKVDVFYNGENSPVHKEKREAAKKK

SEQ ID NO: 88023 - protein, 86 aa, Homo sapiens
  MOD_RES (1)..(1): Any amino acid
XQDSGLGYKDLDLIFCADLRGEGEFQTVKDVVLDCLLDFLPEGVNKEKITPLTLKVFHRLLRHWRAAEKTGVLFAEPLCGIGRPQV

SEQ ID NO: 88024 - protein, 266 aa, Homo sapiens
MARASSGNGSEEAWGALRAPQQQLCPGVNNQPYLCESGHCCGETGCCTYYYELWWFWLLWTVLILFSCCCAFRHRRAKLRLQQQQRQREINLLAYHGACHGAGPFPTGSLLDLRFLSTFKPPAYEDVVHRPGTPPPPYTVAPGRPLTASSEQTCCSSSSSCPAHFEGTNVEGVSSHQSAPPHQEGEPGAGVTPASTPPSCRYRRLTGDSGIELCPCPASGEGEPVKEVRVSATLPDLEDYSPCALPPESVPQIFPMGLSSSEGDIP

SEQ ID NO: 88025 - protein, 350 aa, Homo sapiens
MFCCLGYEWLSGGCKTWHSAWVINTLADHRHRGTDFGGSPWLLIITVFLRSYKFAISLCTSYLCVSFLKTIFPSQNGHDGSTDVQQRARRSNCRRQEGIKIVLEDIFTLWRQVETKVRAKIRKMKVTTKVNCHDKINGKRKTAKEHLRKLSMKEREHGEKERQVSEAEENGKLDMKEIHTYMEMFQRARALRRRAEDYYRCKITPSARKPLCNRVRMAAVEHRHSSGLPYWPYLTAETLKNRMGHQPPPPTQQHSIIDNSLSLKTPSERLLYPLPPSADDNLKTPPECLLTPLPPSALPSADDNLKTPAECLLTPLPPSAPPSADDNLKTPPECVCSLPFHPQRMIISRN

SEQ ID NO: 88026 - protein, 103 aa, Homo sapiens
  MOD_RES (1)..(1): Any amino acid
XSSQARHVNHSATEALGELRERAPGQGTNGFQLLRHAVKRDLLQPRTPPYQGTHSVAQAGVQWHCYRLLQPLPPGLKCSSHLSLPNTWDHRHAPLHTASFFRC

SEQ ID NO: 88027 - protein, 36 aa, Homo sapiens
QVAFGQDYCTTVPSPEYYSKTQSEHSIPANSLKPST

SEQ ID NO: 88028 - protein, 124 aa, Homo sapiens
MLAGQLEARDPKEGTHPEDPCPGAGAVMEKTAVAAEVLTEDCNTGEMPPLQQQIIRLHQELGRQKSLWADVHGKLRSHIDALREQNMELREKLRALQLQRWKARKKSAASPHAGQESHTLRAER

SEQ ID NO: 88029 - protein, 56 aa, Homo sapiens
  MOD_RES (1)..(1): Any amino acid
XKAEGKATSTTELPPEYLTSPLSQQSQRDETALQEEEELQLALALSQSEAEEKERL

SEQ ID NO: 88030 - protein, 511 aa, Homo sapiens
  MOD_RES (1)..(1): Any amino acid
XSAVHKMIVDRQYMGVSKRKCIVWGVAFLSDGTIISVDSAGKVQFWDSATGTLVKSHLIANADVQSIAVADQEDSFVVGTAEGTVFHFQLVPVTSNSSEKQWVRTKPFQHHTHDVRTVAHSPTALISGGTDTHLVFRPLMEKVEVKNYDAALRKITFPHRCLISCSKKRQLLLFQFAHHLELWRLGSTVATGKNGDTLPLSKNADHLLHLKTKGPENIICSCISPCGSWIAYSTVSRFFLYRLNYEHDNISLKRVSKMPAFLRSALQILFSEDSTKLFVASNQGALHIVQLSGGSFKHLHAFQPQSGTVEAMCLLAVSPDGNWLAASGTSAGVHVYNVKQLKLHCTVPAYNFPVTAMAIAPNTNNLVIAHSDQQVFEYSIPDKQYTDWSRTVQKQGFHHLWLQRDTPITHISFHPKRPMHILLHDAYMFCIIDKSLPLPNDKTLLYNPFPPTNESDVIRRRTAHAFKISKIYKPLLFMDLLDERTLVAVERPLDDIIAQLPPPIKKKKFGT

SEQ ID NO: 88031 - protein, 128 aa, Homo sapiens; identical to SEQ ID NO: 44672
  MOD_RES (1)..(1): Any amino acid

SEQ ID NO: 88032 - protein, 57 aa, Homo sapiens
MMESVGVYGFCGCKAKNKMKCDSRWEIAASAPPGCSSYHTKKQSYGNDRTSVSRIWI

SEQ ID NO: 88033 - protein, 54 aa, Homo sapiens
MFSLMASCCGWFKRWREPVRNHVQQSRGMERKLTSPLKKAFIGCYMLLQETLMP

SEQ ID NO: 88034 - protein, 15 aa, Homo sapiens
  MOD_RES (1)..(1): Any amino acid
XEFSRDYMVHDIATD

SEQ ID NO: 88035 - protein, 184 aa, Homo sapiens
ETCTGPGHDECSSCQEGLQLLRGMCVHATKTQEEGKFWNDILRKLQPCHSSCKTCNGSATLCTSCPKGAYLLAQACVSSCPQGTWPSVRSGSCENCTEACAICSGADLCKKCQMQPGHPLFLHEGRCYSKCPEGSYAEDGICERCSSPCRTCEGNATNCHSCEGGHVLHHGVCQENCPERHVAV

SEQ ID NO: 88036 - protein, 510 aa, Homo sapiens
  MOD_RES (1)..(1): Any amino acid
XTPILTVLICLGLSLGPRTHVQAGHLPKPTLWAEPGSVITQGSPVTLRCQGGQETQEYRLYREKKTALWITRIPQELVKKGQFPIPSITWEHAGRYRCYYGSDTAGRSESSDPLELVVTGAYIKPTLSAQPSPVVNSGGNVILQCDSQVAFDGFSLCKEGEDEHPQCLNSQPHARGSSRAIFSVGPVSPSRRWWYRCYAYDSNSPYEWSLPSDLLELLVLGVSKKPSLSVQPGPIVAPEETLTLQCGSDAGYNRFVLYKDGERDFLQLAGAQPQAGLSQANFTLGPVSRSYGGQYRCYGAHNLSSEWSAPSDPLDILIAGQFYDRVSLSVQPGPTVASGENVTLLCQSQGWMQTFLLTKEGAADDPWRLRSTYQSQKYQAEFPMGPVTSAHAGTYRCYGSQSSKPYLLTHPSDPLELVVSGPSGGPSSPTTGPTSTSGPEDQPLTPTGSDPQSGLGRHLGVVIGILVAVILLLLLLLLLFLILRHRRQGKHWTSSPAQLPMPRKKTSMLP

SEQ ID NO: 88037 - protein, 225 aa, Homo sapiens; identical to SEQ ID NO: 43850
  MOD_RES (1)..(1): Any amino acid

SEQ ID NO: 88038 - protein, 162 aa, Homo sapiens
MTERRVPFSLLRGPSWDPFRDWYPHSRLFDQAFGLPRLPEEWSQWLGGSSWPGYVRPLPPAAIESPAVAAPAYSRALSRQLSSGVSEIRHTADRWRVSLDVNHFAPDELTVKTKDGVVEITGDTRSGRTSMATSPGASRGNTRCPPVWTPPKFPPPCPLRAH

SEQ ID NO: 88039 - protein, 59 aa, Homo sapiens
VLLSLRILLLMKPSVLSRVSHQVAYGLHELLKTNAANIHSGVKPPAALQATARADAPDA

SEQ ID NO: 88040 - protein, 72 aa, Homo sapiens
MVRALTLGRSSKLKMTFSNFSRKLMSSLVLKNLTLAWPHQHSGIWLQISRHSRVNSLYRLPDITTCFGNLCL

SEQ ID NO: 88041 - protein, 73 aa, Homo sapiens
  MOD_RES (1)..(1): Any amino acid
XFPAAAYGPVAAAAVAAARGSGSAHLLSNTLLSTLSGKAPTRRGPEASRGPTAQDLSPISTALPARTPEWGIT

SEQ ID NO: 88042 - protein, 66 aa, Homo sapiens
PVEISGAIEEEFTVARLYISKIKSEVKSVVKRCRQLENLQVECHRKMEVTGRELSSCQLLISQVSA

SEQ ID NO: 88043 - protein, 50 aa, Homo sapiens
  MOD_RES (1)..(1): Any amino acid
XSAVHKMIVDRQYMGVSKRKCIVWGVAFLSDGTIISVDSAGKVQFWDSAT

SEQ ID NO: 88044 - protein, 449 aa, Homo sapiens
MKEVGSPPLDPTERFLPEEEKLTEQERSKRFEKVYTHNLYYLAQVYQHLEMFEKAAHYCHSTLKRQLEHNAYHPIEWAINAATLSQFYINKLCFMEARHCLSAANVIFGQTGKISATEDTPEAEGEVPELYHQRKGEIARCWIKYCLTLMQNAQLSMQDNIGELDLDKQSELRALRKKELDEEESIRKKAVQFGTGELCDAISAVEEKVSYLRPLDFEEARELFLLGQHYVFEAKEFFQIDGYVTDHIEVVQDHSALFKVLAFFETDMERRCKMHKRRIAMLEPLTVDLNPQYYLLVNRQIQFEIAHAYYDMMDLKVAIADRLRDPDSHIVKKINNLNKSALKYYQLFLDSLRDPNKVFPEHIGEDVLRPAMLAKFRVARLYGKIITADPKKELENLATSLEHYKFIVDYCEKHPEAAQEIEVELELSKEMVSLLPTKMERFRTKMALT

SEQ ID NO: 88045 - protein, 663 aa, Homo sapiens
MPTAAAPIISSVQKLVLYETRARYFLVGSNNAETKYRVLKIDRTEPKDLVIIDDRHVYTQQEVRELLGRLDLGNRTKMGQKGSSGLFRAVSAFGVVGFVRFLEGYYIVLITKRRKMADIGGHAIYKVEDTNMIYIPNDSVRVTHPDEARYLRIFQNVDLSSNFYFSYSYDLSHSLQYNLTVLRMPLEMLKSEMTQNRQESFDIFEDEGLITQGGSGVFGICSEPYMKYVWNGELLDIIKSTVHRDWLLYIIHGFCGQSKLLIYGRPVYVTLIARRSSKFAGTRFLKRGANCEGDVANEVETEQILCDASVMSFTAGSYSSYVQVRGSVPLYWSQDISTMMPKPPITLDQADPFAHVAALHFDQMFQRFGSPIIILNLVKEREKRKHERILSEELVAAVTYLNQFLPPEHTIVYIPWDMAKYTKSKLCNVLDRLNVIAESVVKKTGFFVNRPDSYCSILRPDEKWNELGGCVIPTGRLQTGILRTNCVDCLDRTNTAQFMVGKCALAYQLYSLGLIDKPNLQFDTDAVRLFEELYEDHGDTLSLQYGGSQLVHRVKTYRKIAPWTQHSKDIMQTLSRYYSNAFSDADRQDSINLFLGVFHPTEGKPHLWELPTDFYLHHKNTMRLLPTRRSYTYWWTPEVIKHLPLPYDEGFLARSPANLECSN

SEQ ID NO: 88046 - protein, 49 aa, Homo sapiens
VRDKKLLNDLNGAVEDAKTARLFNITSSALAASCIILVFIFLRYPLTDY

SEQ ID NO: 88047 - protein, 68 aa, Homo sapiens
TITGLLQEFDVQASRGCGFPSPSSSRLLFFLFLSIGLSRSLCKHCGQGERRQWSQLGPHPQLLLPDRS

SEQ ID NO: 88048 - protein, 977 aa, Homo sapiens
MDVAESPERDPHSPEDEEQPQGLSDDDILRDSGSDQDLDGAGVRASDLEDEESAARGPSQEEEDNHSDEEDRASEPKSQDQDSEVNELSRGPTSSPCEEEGDEGEEDRTSDLRDEASSVTRELDEHELDYDEEVPEEPAPAVQEDEAEKAGAEDDEEKGEGTPREEGKAGVQSVGEKESLEAAKEKKKEDDDGEIDDGEIDDDDLEEGEVKDPSDRKVRPRPTCRFFMKDVVTPLSTLLPPISNSIPFRGQVKGNCTWGMNCRFIHPGVNDKGNYSLITKADPFPPNGAPPLGPHPLMPANPWGGPVVDEILPPPPPEPPTESAWERGLRHAKEVLKKATIRKEQEPDFEEKRFTVTIGEDEREFDKENEVFRDWNSRIPRDVRDTVLEPYADPYYDYEIERFWRGGQYENFRVQYTETEPYHNYRERERERERENRQRERERERERDRERERRQRERERERERERDKERQRRKEEWERERAKRDEKDRQHRDRDREKEREKEKGKPKPRSPQPPSRQAEPPKKEAATTGPQVKRADEWKDPWRRSKSPKKKLGVSVSPSRARRRRKTSASSASASNSSRSSSRSSSYSGSGSSRSRSRSSSYSSYSSRSSRHSSFSGSRSRSRSFSSSPSPSPTPSPHRPSIRTKGEPAPPPGKAGEKSVKKPAPPPAPPQATKTTAPVPEPTKPGDPREARRKERPARTPPRRRTLSGSGSGSGSSYSGSSSRSRSLSVSSVSSVSSATSSSSSAHSVDSEDMYADLASPVSSASSRSPAPAQTRKEKGKSKKEDGVKEEKRKRDSSTQPPKSAKPPAGGKSSQQPSTPQQAPPGQPQQGTFVAHKEIKLTLLNKAADKGSRKRYEPSDKDRQSPPPAKRPNTSPDRGSRDRKSGGRLGSPKPERQRGQNSKAPAAPADRKRQLSPQSKSSSKVTSVPGKASDPGAASTKSGKASTLSRREELLKQLKAVEDAIARKRAKIPGKA

SEQ ID NO: 88049 - protein, 93 aa, Homo sapiens
MAMSQESLTFKDVFVDFTLEEWQQLDSAQKNLYRDVMLENYSHLVSVGYLVAKPDVIFRLGPGEESWMADGGTPVRTCAGTVLQRFQLKACGI

SEQ ID NO: 88050 - protein, 130 aa, Homo sapiens
MMLGTEGGEGFVVKVRGLPWSCSADEVQRFFSDCKIQNGAQGIRFIYTREGRPSGEAFVELESEDEVKLALKKDRETMGHRYVEVFKSNNVEMDWVLKHTGPNSPDTANDGFVRLRGLPFGCSKEEIVQF

SEQ ID NO: 88051 - protein, 348 aa, Homo sapiens
  MOD_RES (1)..(1): Any amino acid
XHLRCYSCPNEQRYIVRILFIVPIYAFDSWLSLLFFTNDQYYVYFGTVRDCYEALVIYNFLSLCYEYLGGESSIMSEIRGKPIESSCMYGTCCLWGKTYSIGFLRFCKQATLQFCVVKPLMAVSTVVLQAFGKYRDGDFDVTSGYLYVTIIYNISVSLALYALFLFYFATRELLSPYSPVLKFFMVKSVIFLSFWQGMLLAILEKCGAIPKIHSARVSVGEGTVAAGYQDFIICVEMFFAALALRHAFTYKVYADKRLDAQVPTYGPYGRCAPMKSISSSLKETMNPHDIVQDAIHNFSPAYQQYTQQSTLEPGPTWRGGAHGLSRSHSLSGARDNEKTLLLSSDDEF

SEQ ID NO: 88052 - protein, 449 aa, Homo sapiens
MARLFSPRPPPSEDLFYETYYSLSQQYPLLLLLLGIVLCALAALLAVAWASGRELTSDPSFLTTVLCALGGFSLLLGLASREQRLQRWTRPLSGLVWVALLALGHAFLFTGGVVSAWDQVSYFLFVIFTAYAMLPLGMRDAAVAGLASSLSHLLVLGLYLGPQPDSRPALLPQLAANAVLFLCGNVAGVYHKALMERALRATFREALSSLHSRRRLDTEKKHQEHLLLSILPAYLAREMKAEIMARLQAGQGSRPESTNNFHSLYVKRHQGVSVLYADIVGFTRLASECSPKELVLMLNELFGKFDQIAKVPLHTHIHTPRSMNACGSRSWGTVTTVSLGCHSHCQTMPSTACAWAWTCAGPSGNCGQPLAWTSTCVWACTQAAYCVESSGCRSGSTTFGHMMSHWLTTWRQAVYQGECTSQGLPWPCWQGLMLWRTQAWSIGTPTFGS

SEQ ID NO: 88053 - protein, 97 aa, Homo sapiens
MSGVVPTAPEQPAGEMENQTKPPDPRPDAPPEYNSHFLPGPPGTAVPPPTGYPGGLPMGYYSPQQPSTFPLYQPVGGIHPVRYQPGKYPMPNQSVPI

SEQ ID NO: 88054 - protein, 41 aa, Homo sapiens
MAASEDGSGCLVSRGRSQSDPSVLTDSSATSSADAGENPDE

SEQ ID NO: 88055 - protein, 738 aa, Homo sapiens
METKENRWVPVTVLPGCVGCRTVAALASWTVRDVKERIFAETGFPVSEQRLWRGGRELSDWIKIGDLTSKNCHLFVNLQSKGLKGGGRFGQTTPPLVDFLKDILRRYPEGGQILKELIQNAEDAGATEVKFLYDETQYGTETLWSKDMAPYQGPALYVYNNAVFTPEDWHGIQEIARSRKKDDPLKVGRFGIGFNSVYHITDVPCIFSGDQIGMLDPHQTLFGPHESGQCWNLKDDSKEISELSDQFAPFVGIFGSTKETFINGNFPGTFFRFPLRLQPSQLSSNLYNKQKVLELFESFRADADTVLLFLKSVQDVSLYVREADGTEKLVFRVTSSESKALKHERPNSIKILGTAISNYCKKTPSNNITCVTYHVNIVLEEESTKDAQKTSWLVCNSVGGRGISSKLDSLADELKFVPIIGIAMPLSSRDDEAKGATSDFSGKAFCFLPLPPGEESSTGLPVHISGFFGLTDNRRSIKWRELDQWRDPAALWNEFLVMNVVPKAYATLILDSIKRLEMEKSSDFPLSVDVIYKLWPEASKVKVHWQPVLEPLFSELLQNAVIYSISCDWVRLEQVYFSELDENLEYTKTVLNYLQSSGKQIAKVPGNVDAAVQLTAASGTTPVRKVTPAWVRQVLRKCAHLGCAEEKLHLLEFVLSDQAYSELLGLELLPLQNGNFVPFSSSVSDQDVIYITSAEYPRSLFPSLEGRFILDNLKPHLVAALKEAAQTRAHSPGVWRCT

SEQ ID NO: 88056 - protein, 244 aa, Homo sapiens
MASRIGLRMQLMREQAQQEEQRERMQQQAVMHYMQQQQQQQQQQLGGPPTPAINTPVHFQSPPPVPGEVLKVQSYLENPTSYHLQQSQHQKVREYLSETYGNKFAAHISPAQGSPKPPPAASPGVRAGHVLSSSAGNSAPNSPMAMLHIGSNPERELDDVIDNIMRLDDVLGYINPEMQMPNTLPLSSSHLNVYSSDPQVTASLVGVTSSSCPADLTQKRELTDAESRALAKERQKKDNHNLIE

SEQ ID NO: 88057 - protein, 8 aa, Homo sapiens
MFWKFDLH

SEQ ID NO: 88058 - protein, 629 aa, Homo sapiens
MTGPFMVAGEFKYHPECFACMSCKVIIEDGDAYALVQHATLYCGKCHNEVVLAPMFERLSTESVQEQLPYSVTLISMPATTEGRRGFSVSVESACSNYATTVQVKEVNRMHISPNNRNAIHPGDRILEINGTPVRTLRVEEVEDAISQTSQTLQLLIEHDPVSQRLDQLRLEARLAPHMQNAGHPHALSTLDTKENLEGTLRRRSLRRSNSISKSPGPSSPKEPLLFSRDISRSESLRCSSSYSQQIFRPCDLIHGEVLGKGFFGQAIKVTHKATGKVMVMKELIRCDEETQKTFLTEVKVMRSLDHPNVLKFIGVLYKDKKLNLLTEYIEGGTLKDFLRSMDPFPWQQKVRFAKGIASGMAYLHSMCIIHRDLNSHNCLIKLDKTVVVADFGLSRLIVEERKRAPMEKATTKKRTLRKNDRKKRYTVVGNPYWMAPEMLNGKSYDETVDIFSFGIVLCEIIGQVYADPDCLPRTLDFGLNVKLFWEKFVPTDCPPAFFPLAAICCRLEPESRAPPGAAGEGPGCADDEGPVRRQGKVTIKYDPKELRKHLNLEEWILEQLTRLYDCQEEEISELEIDVDELLDMESDDAWASRVKELLVDCYKPTEAFISGLLDKIRAMQKLSTPQKK

SEQ ID NO: 88059 - protein, 124 aa, Homo sapiens
MFNKSFGTPFGGGTGGFGTTSTFGQNTGFGTTSGGAFGTSAFGSSNNTGGLFGNSQTKPGGLFGTSSFSQPATSTSTGFGFDFGTSTSSGGLFGTTNTTSNPFGSTSGSLFGPSSFTAAPTGTT

SEQ ID NO: 88060 - protein, 155 aa, Homo sapiens
MCGICLSSLCAGWRFSVKEMKSERQIQLIREMLMCDTSGSIQLSEEQKSALAFLNRGQPSSSNAGNKRLSTIDESGSILSDISFDKTDESLDWDSSLVKTFKLKKREKRRSTSRQFVDGPPGPVKKTRSIGSAVDQGNESIVAKTTVTVPNDGGP

SEQ ID NO: 88061 - protein, 2965 aa, Homo sapiens [sequence omitted]

SEQ ID NO: 88062 - protein, 40 aa, Homo sapiens
MAPVGVEKKLLLGPNGPAVAAAGDLTSEEEEGQSLCPARG

SEQ ID NO: 88063 - protein, 459 aa, Homo sapiens
MAPWLQLLSLLGLLPGAVAAPAQPRAASFQAWGPPSPELLAPTRFALEMFNRGRAAGTRAVLGLVRGRVRRAGQGSLYSLEATLEEPPCNDPMVCRLPVSKKTLLCSFQVLDELGRHVLLRKDCGPVDTKVPDNRNETFSSVISLLNEDPLSQDLPVKMASIFKNFVITYNRTYESKEARWRLSVFVNNMVRAQKIQALDRGTAQYGVTKFSDLTEEEFRTIYLNTLLRKEPGNKMKQAKSVGDLAPPEWDWRSKGAVTKVKDQGMCGSCWAFSVTGNVEGQWFLNQGTLLSLSEQELLDCDKMDKACMGGLPSNAYSAIKNLGGLETEDDYSYQGHMQSCNFSAEKAKVYINDSVELSQNEQKLAAWLAKRGPISVAINAFGMQFYRHGISRPLRPLCSPWLIDHAVLLVGYGNRSDVPFWAIKNSWGTDWGEKGYYYLHRGSGACGVNTMASSAVVD

SEQ ID NO: 88064 - protein, 119 aa, Homo sapiens
MVLEGNPEVGSPRTSDLQHRGNKGSCVLSSPGEDAQPGEEPIKYGELIVLGCCEEGGEETEAQRGEVTGPRAHSCYNGCLASGDKGRRRSRLALSRRSHANGVKPDVMHHISTPLVSKA

SEQ ID NO: 88065 - protein, 634 aa, Homo sapiens
YSFNIPLEERSDMFTWDPYGPWEGCTKMCQGLQRRNITCIHKSDHSVVSDKECDHLPLPSFVTQSCNTDCELRWHVIGKSECSSQCGQGYRTLDIHCMKYSIHEGQTVQVDDHYCGDQLKPPTQELCHGNCVFTRWHYSEWSQCSRSCGGGERSRESYCMNNFGHRLADNECQELSRVTRENCNEFSCPSWAASEWSECLVTCGKGTKQRQVWCQLNVDHLSDGFCNSSTKPESLSPCELHTCASWQVGPWGPCTTTCGHGYQMRDVKCVNELASAVLEDTECHEASRPSDRQCSVSCGRGTQARYVSCRDALDRIADESYCAHLPRPAEIWDCFTPCGEWQAGDWSPCSASCGHGKTTRQVLCMNYHQPIDENYCDPEVRPLMEQECSLAACPPAHSHFPSSPVQPSYYLSTNLPLTQKLEDNENQVVHPSVRGNQWRTGPWGSCSSSCSGGLQHRAVVCQDENGQSASYCDAASKPPELQQCGPGPCPQWNYGNWGECSQTCGGGIKSRLVICQFPNGQILEDHNCEIVNKPPSVIQCHMHACPADVSWHQEPWTSEDLKVKLLPQRTIILWELMKNIFCHGKHSHMYLINVVTDHLLYPRHCDPETIETYFLSLWSLQFTWGDLKYYKNSL

SEQ ID NO: 88066 - protein, 351 aa, Homo sapiens
MHQDGISSMNQLGGLFVNGRPLPLDTRQQIVRLAVSGMRPCDISRILKVSNGCVSKILGRYYRTGVLEPKGIGGSKPRLATPPVVARIAQLKGECPALFAWEIQRQLCAEGLCTQDKTPSVSSINRVLRALQEDQGLPCTRLRSPAVLAPAVLTPHSGSETPRGTHPGTGHRNRTIFSPSQAEALEKEFQRGQYPDSVARGKLATATSLPEDTVRVWFSNRRAKWRRQEKLKWEMQLPGASQGLTVPRVAPGIISAQQSPGSVPTAALPALEPLGPSCYQLCWATAPERCLSDTPPKACLKPCWGHLPPQPNSLDSGLLCLPCPSSHCHLASLSGSQALLWPGCPLLYGLE

SEQ ID NO: 88067 - protein, 70 aa, Homo sapiens
MRLTRCQAALAAAITLNLLVLFYVSWLQHQPRNSRARGPRRASAAGPRVTVLVREFEAFDNAVPELVDSF

SEQ ID NO: 88068 - protein, 68 aa, Homo sapiens
MVAGWLTNYSQDSVTFEDVAVDFTQEEWTLLDQTQRNLYRDVMLENYKNLVAVDWESHINTKWSAPQQ

SEQ ID NO: 88069 - protein, 167 aa, Homo sapiens
MPPPADIVKVAIEWPGAYPKLMEIDQKKPLSAIIKEVCDGWSLANHEYFALQHADSSNFYITEKNRNEIKNGTILRLTTSPAQNAQQLHERIQSSSMDAKLEALKDLASLSRDVTFAQEFINLDGISLLTQMVESGTDFGDMLSFTLTAFVELMDHGIVSWDTFSVA

SEQ ID NO: 88070 - protein, 116 aa, Homo sapiens
  MOD_RES (1)..(1): Any amino acid
XLSSHTPVSRSSSIIQHVGLPLAPGTHSAPTSLPQSDLSQFQTQTQPLVGQVDDTRRKSEPLPQPPLSLIAENKPVVKPPVADSLANPLQLTPMNSLATSVFSIAIPVDGDEDRIW

SEQ ID NO: 88071 - protein, 49 aa, Homo sapiens
GKSYLFLLSSDYERSEWREAIQKLQKKGKFLPLPRSPMMSVALMGLLFF

SEQ ID NO: 88072 - protein, 104 aa, Homo sapiens
MNSRTASARGWFSSRPPTSESDLEPATDGPASETTTLSPEATTFNDTRIPDAAGGTAGVGTMLLSFGIITVIGLAVALRRGVSMLPRLDLNSWAQEILLPQPLE

SEQ ID NO: 88073 - protein, 181 aa, Homo sapiens
MKSVIYHALSQKEANDSDVQPSGAQRAEAFVRAFLKRSTPRMSPQAREDQLQRKAVVLEYFTRHKRKEKKKKAKGLSARQRRELRLFDIKPEQQSLFLPLHELWKQYIRDLCSGLKPDTQPQMIQAKLLKADLHGAIISVTKSKCPSYVGITGILLQETKHIFKIITKEDRLKVIPKLNCV

SEQ ID NO: 88074 - protein, 44 aa, Homo sapiens
MAAEEEEVDSADTGERSGWLTGWLPTWCPTSISHLKEAEEKMLK

SEQ ID NO: 88075 - protein, 240 aa, Homo sapiens
MNQGSGLDLLKISYGKGARRKNRFKGSDGSTSSDTTSNSFVRQGSADSYTSRPSDSDVSLEEDREAVRREAERQAQAQLEKAKTKPVAFAVRTNVSYSAAHEDDVPVPGMAISFEAKDFLHVKEKFNNDWWIGRLVKEGCEIGFIPSPVKLENMRLQHEQRAKQGKFYSSKSGGNSSSSLGDIVPSSRKSTPPSSAKQKQKSVQNLQMNKTSGKLQACFGGLLQSTLLRMMWYLPCDQWS

SEQ ID NO: 88076 - protein, 245 aa, Homo sapiens
MNIIDIVAIIPYFITLGTELAEKPEDAQQGQQAMSLAILRVIRLVRVFRIFKLSRHSKGLQILGQTLKASMRELGLLIFFLFIGVILFSSAVYFAEADERESQFPSIPDAFWWAVVSMTTVGYGDMVPTTIGGKIVGSLCAIAGVLTIALPVPVIVSNFNYFYHRETEGEEQAQYLQVTSCPKIPSSPDLKKSRSASTISKSDYMEIQEGVNNSNEDFREENLKTANCTLANTNYVNITKMLTDV

SEQ ID NO: 88077 - protein, 182 aa, Homo sapiens
MADFEELRNMVSSFRVSELQVLLGFAGRNKSGRKHDLLMRALHLLKSGCSPAVQIKIRELYRRRYPRTLEGLSDLSTIKSSVFSLDGGSSPVEPDLAVAGIHSLPSTSVTPHSPSSPVGSVLLQDTKPTFEMQQPSPPIPPVHPDVQLKNLPFYDVLDVLIKPTSLGIFCQVVGEIIQSKFS

SEQ ID NO: 88078 - protein, 1707 aa, Homo sapiens
MHPGLWLLLVTLCLTEELAAAGEKSYGKPCGGQDCSGSCQCFPEKGARGRPGPIGIQGPTGPQGFTGSTGLSGLKGERGFPGLLGPYGPKGDKGPMGVPGFLGINGIPGHPGQPGPRGPPGLDGCNGTQGAVGFPGPDGYPGLLGPPGLPGQKGSKGDPVLAPGSFKGMKGDPGLPGLDGITGPQGAPGFPGAVGPAGPPGLQGPPGPPGPLGPDGNMGLGFQGEKGVKGDVGLPGPAGPPPSTGELEFMGFPKGKKGSKGEPGPKGFPGISGPPGFPGLGTTGEKGEKGEKGIPGLPGPRGPMGSEGVQGPPGQQGKKGTLGFPGLNGFQGIEGQKGDIGLPGPDVFIDIDGAVISGNPGDPGVPGLPGLKGDEGIQGLRGPSGVPGLPALSGVPGALGPQGFPGLKGDQGNPGRTTIGAAGLPGRDGLPGPPGPPGPPSPEFETETLHNKESGFPGLRGEQGPKGNLGLKGIKGDSGFCACDGGVPNTGPPGEPGPPGPWGLIGLPGLKGARGDRGSGGAQGPAGAPGLVGPLGPSGPKGKKGEPILSTIQGMPGDRGDSGSQGFRGVIGEPGKDGVPGLPGLPGLPGDGGQGFPGEKGLPGLPGEKGHPGPPGLPGNGLPGLPGPRGLPGDKGKDGLPGQQGLPGSKGDCCCREVGKGDLDTERGITLPCIIPGSYGPSGFPGTPGFPGPKGSRGLPGTPGQPGSSGSKGEPGSPGLVHLPELPGFPGPRGEKGLPGFPGLPGKDGLPGMIGSPGLPGSKGATGDIFGAENGAPGEQGLQGLTGHKGFLGDSGLPGLKGVHGKPGLLGPKGERGSPGTPGQVGQPGTPGSSGPYGIKGKSGLPGAPGFPGISGHPGKKGTRGKKGPPGSIVKKGLPGLKGLPGNPGLVGLKGSPGSPGVAGLPALSGPKGEKGSVGFVGFPGIPGLPGIPGTRGLKGIPGSTGKMGPSGRAGTPGEKGDRGNPGPVGIPSPRRPMSNLWLKGDKGSQGSAGSNGFPGPRGDKGEAGRPGPPGLPGAPGLPGIIKGVSGKPGPPGFMGIRGLPGLKGSSGITGFPGMPGESGSQGIRGSPGLPGASGLPGLKGDNGQTVEISGSPGPKGQPGESGFKGTKGRDGLIGNIGFPGNKGEDGKVGVSGDVGLPGAPGFPGVAGMRGEPGLPGSSGHQGAIGPLGSPGLIGPKGFPGFPGLHGLNGLPGTKGTHGTPGPSITGVPGPAGLPGPKGEKGYPGIGIGAPGKPGLRGQKGDRGFPGLQGPAGLPGAPGISLPSLIAGQPGDPGRPGLDGERGRPGPAGPPGPPGPSSNQGDTGDPGFPGIPGPKGPKGDQGIPGFSGLPGELGLKGMRGEPGFMGTPGKVGPPGDPGFPGMKGKAGPRGSSGLQGDPGQTPTAEAVQVPPGPLGLPGIDGIPGLTGDPGAQGPVGLQGSKGLPGIPGKDGPSGLPGPPGALGDPGLPGLQGPPGFEGAPGQQGPFGMPGMPGQSMRVGYTLVKHSQSEQVPPCPIGMSQLWVGYSLLFVEGQEKAHNQDLGFAGSCLPRFSTMPFIYCNINEVCHYARRNDKSYWLSTTAPIPMMPVSQTQIPQYISRCSVCEAPSQAIAVHSQDITIPQCPLGWRSLWIGYSFLMHTAAGAEGGGQSLVSPGSCLEDFRATPFIECSGARGTCHYFANKYSFWLTTVEERQQFGELPVSETLKAGQLHTRVSRCQVCMKSL

SEQ ID NO: 88079 - protein, 156 aa, Homo sapiens
  MOD_RES (1)..(1): Any amino acid
XDPVISKFTNMMMIGGNKVLARSLMIQTLEAVKRKQFEKYHAASAEEQATIERNPYTIFHQALKNCEPMIGLVPILKGGRFYQVPVPLPDRRRRFLAMKWMITECRDKKHQRTLMPEKLSHKLLEAFHNQGPVIKRKHDLHKMAEANRALAHYRWW

SEQ ID NO: 88080 - protein, 235 aa, Homo sapiens
MGRVIRGQRKGAGSVFRAHVKHRKGAARLRAVDFAERHGYIKGIVKDIIHDPGRGAPLAKVVFRDPYRFKKRTELFIAAEGIHTGQFVYCGKKAQLNIGNVLPVGTMPEGTIVCCLEEKPGDRGKLARASGNYATVISSANRAVVGVVAGGGRIDKPILKAGRAYHKYKAKRNCWPRVRGVAMNPVEHPFGGGNHQHIGKPSTIRRDAPAGRKVGLIAARRTGRLRGTKTVQEKE

SEQ ID NO: 88081 - protein, 250 aa, Homo sapiens
MGKRQHQKDKMYITCAEYTHFYGGKKPDLPQTNFRRLPFDHCSLSLQPFVYPVCTPDGIVFDLLNIVPWLKKYGTNPSNGEKLDGRSLIKLNFSKNSEGKYHCPVLFTVFTNNTHIVAVRTTGNVYAYEAVEQLNIKAKNFRDLLTDEPFSRQDIITLQDPTNLDKFNVSNFYHVKNNMKIIDPDEEKAKQDPSYYLKNTNAETRETLQELYKEFKGDEILAATMKAPEKKKVDKLNALPSTRMCCATSL

SEQ ID NO: 88082 - protein, 48 aa, Homo sapiens
MWATLPLLCAGAWLLGVPVCGAAELCVNSLEKFHFKSWMSKENKKVSL

SEQ ID NO: 88083 - protein, 184 aa, Homo sapiens
MLEFHFEGEEQPLSMMKKFLKSSWVRIGFVPEEERNVLRRRKGTNISETSLIGTAACTSTSSQNDPEVIIVGAGVLGSALAAVLSRDGRKVTVIERDLKEPDRIVGEFLQPGGYHVLKDLGLGDTVEGLDAQVVNGYMIHDQESKSEVQIPYPLSENNQVQSGRAFHHGRFIMSLRKAAMAEPK

SEQ ID NO: 88084 - protein, 186 aa, Homo sapiens
  MOD_RES (1)..(1): Any amino acid
XFDVDDAKVLLGLKERSTSEPAVPPEEAEPHTEPEEQVPVEAEPQNIEDEAKEQIQSLLHEMVHAEHETEHSYHVEETVSQDCNQDMEEMMSEQENPDSSEPVVEDERLHHDTDDVTYQVYEEQAVYEPLENEGIEITEVTAPPEDNPVEDSQVIVEVKKKKPKLLNKFDKTIKAELDAAEKLRKR

SEQ ID NO: 88085 - protein, 68 aa, Homo sapiens
MALVRGGWLWRQSSILRRWKRNWFALWLDGTLGYYHDETAQDEEDRVLIHFNVRDIKIGPECHGEPGT

SEQ ID NO: 88086 - protein, 786 aa, Homo sapiens
MSSSSWLLLSLVAVTAAQSTIEEQAKTFLDKFNHEAEDLFYQSSLASWNYNTNITEENVQNMNNAGDKWSAFLKEQSTLAQMYPLQEIQNLTVKLQLQALQQNGSSVLSEDKSKRLNTILNTMSTIYSTGKVCNPDNPQECLLLEPGLNEIMANSLDYNERLWAWESWRSEVGKQLRPLYEEYVVLKNEMARANHYEDYGDYWRGDYEVNGVDGYDYSRGQLIEDVEHTFEEIKPLYEHLHAYVRAKLMNAYPSYISPIGCLPAHLLGDMWGRFWTNLYSLTVPFGQKPNIDVTDAMVDQAWDAQRIFKEAEKFFVSVGLPNMTQGFWENSMLTDPGNVQKAVCHPTAWDLGKGDFRILMCTKVTMDDFLTAHHEMGHIQYDMAYAAQPFLLRNGANEGFHEAVGEIMSLSAATPKHLKSIGLLSPDFQEDNETEINFLLKQALTIVGTLPFTYMLEKWRWMVFKGEIPKDQWMKKWWEMKREIVGVVEPVPHDETYCDPASLFHVSNDYSFIRYYTRTLYQFQFQEALCQAAKHEGPLHKCDISNSTEAGQKLFNMLRLGKSEPWTLALENVVGAKNMNVRPLLNYFEPLFTWLKDQNKNSFVGWSTDWSPYADQSIKVRISLKSALGDKAYEWNDNEMYLFRSSVAYAMRQYFLKVKNQMILFGEEDVRVANLKPRISFNFFVTAPKNVSDIIPRTEVEKAIRMSRSRINDAFRLNDNSLEFLGIQPTLGPPNQPPVSIWLIVFGVVMGVIVVGIVILIFTGIRDRKKPTPLLGKSWLTAILKD

SEQ ID NO: 88087 - protein, 91 aa, Homo sapiens
MLETYNHLVSLEIPSSKPKLIAQLERGEAPWREERKCPLDLCPDEVSLCCLGWSAVARSRLTATSTSWFQAVLCLSLPISWDYRIEARNST

SEQ ID NO: 88088 - protein, 329 aa, Homo sapiens
  MOD_RES (1)..(1): Any amino acid
XIKAQPFKDRCEWFYEHLHSGQPDSDMVHRPVNENDILLVHRDSIFRSSCEVVSKANCAKLKQGIAVRFHGEEGMGQGVVREWFDILSNEIVNPDYALFTQSADGTTFQPNSNSYVNPDHLNYFRFAGQILGLALNHRQLVNIYFTRSFYKHILGIPVNYQDVASIDPEYAKNLQWILDNDISDLGLELTFSVETDVFGAMEEVPLKPGGGSILVTQNNKELLLSGMPEIDVSDWIKNTEYTSGYEREDPVIQFVTGSSRVPHGGFANIMGGSGLQNFTIAAVPYTPNLLPTSSTCINMLKLPEYPSKEILKDRLLVALHCGSYGYTMA

SEQ ID NO: 88089 - protein, 131 aa, Homo sapiens
TAKEPHQNRRLERALTLPDLAEQFAPPDIAPPLLIKLVEAIEKKGLECSTLYRTQSSSNLAELRQLLDCDTPSVDLEMIDVHVLADAFKRYLLDLPNPVIPAAVYSEMISLAPEVQSSEEYIQLLKKLIRS

SEQ ID NO: 88090 - protein, 128 aa, Homo sapiens
  MOD_RES (1)..(1): Any amino acid
XYPYNQCAVVGNGGILNKSLCGTEIDKSDFVFRCNLPPTTGDVSKDVGSKTNLVTINPSIITLKYGNLKEKKALFLEDIATYGDAFFLLPAFSFRANTGTSFKVYYTLEESKARQKCKTKRKTINSIL

SEQ ID NO: 88091 - protein, 1645 aa, Homo sapiens
MASGLGSPSPCSAGSEEEDMDALLNNSLPPPHPENEEDPEEDLSETETPKLKKKKKPKKPRDPKIPKSKRQKKELGDSSGEGPEFVEEEEEVALRSDSEGSDYTPGKKKKKKLGPKKEKKSKSKRKEEEEEEDDDDDSKEPKSSAQLLEDWGMEDIDHVFSEEDYRTLTNYKAFSQFVRPLIAAKNPKIAVSKMMMVLGAKWREFSTNNPFKGSSGASVAAAAAAAVAVVESMVTATEVAPPPPPVEVPIRKAKTKEGKGPNARRKPKGSPRVPDAKKPKPKKVAPLKIKLGGFGSKRKRSSSEDDDLDVESDFDDASINSYSVSDGSTSRSSRSRKKLRTTKKKKKGEEEVTAVDGYETDHQDYCEVCQQGGEIILCDTCPRAYHMVCLDPDMEKAPEGKWSCPHCEKEGIQWEAKEDNSEGEEILEEVGGDLEEEDDHHMEFCRVCKDGGELLCCDTCPSSYHIHCLNPPLPEIPNGEWLCPRCTCPALKGKVQKILIWKWGQPPSPTPVPRPPDADPNTPSPKPLEGRPERQFFVKWQGMSYWHCSWVSELQLELHCQVMFRNYQRKNDMDEPPSGDFGGDEEKSRKRKNKDPKFAEMEERFYRYGIKPEWMMIHRILNHSVDKKGHVHYLIKWRDLPYDQASWESEDVEIQDYDLFKQSYWNHRELMRGEEGRPGKKLKKVKLRKLERPPETPTVDPTVKYERQPEYLDATGGTLHPYQMEGLNWLRFSWAQGTDTILADEMGLGKTVQTAVFLYSLYKEGHSKGPFLVSAPLSTIINWEREFEMWAPDMYVVTYVGDKDSRAIIRENEFSFEDNAIRGGKKASRMKKEASVKFHVLLTSYELITIDMAILGSIDWACLIVDEAHRLKNNQSKFFRVLNGYSLQHKLLLTGTPLQNNLEELFHLLNFLTPERFHNLEGFLEEFADIAKEDQIKKLHDMLGPHMLRRLKADVFKNMPSKTELIVRVELSPMQKKYYKYILTRNFEALNARGGGNQVSLLNVVMDLKKCCNHPYLFPVAAMEAPKMPNGMYDGSALIRASGKLLLLQKMLKNLKEGGHRVLIFSQMTKMLDLLEDFLEHEGYKYERIDGGITGNMRQEAIDRFNAPGAQQFCFLLSTRAGGLGINLATADTVIIYDSDWNPHNDIQAFSRAHRIGQNKKVMIYRFVTRASVEERITQVAKKKMMLTHLVVRPGLGSKTGSMSKQELDDILKFGTEELFKDEATDGGGDNKEGEDSSVIHYDDKAIERLLDRNQDETEDTELQGMNEYLSSFKVAQYVVREEEMGEEEEVEREIIKQEESVDPDYWEKLLRHHYEQQQEDLARNLGKGKRIRKQVNYNDGSQEDRDWQDDQSDNQSDYSVASEEGDEDFDERSEAPRRPSRKGLRNDKDKPLPPLLARVGGNIEVLGFNARQRKAFLNAIMRYGMPPQDAFTTQWLVRDLRGKSEKEFKAYVSLFMRHLCEPGADGAETFADGVPREGLSRQHVLTRIGVMSLIRKKVQEFEHVNGRWSMPELAEVEENKKMSQPGSPSPKTPTPSTPGDTQPNTPAPVPPAEDGIKIEENSLKEEESIEGEKEVKSTAPETAIECTQAPAPASEDEKVVVEPPEGEEKVEKAEVKERTEEPMETEPKGWSAMVRSRLTATSAS

SEQ ID NO: 88092 - protein, 1904 aa, Homo sapiens
MLNRYRQALETAVNLSVKHSLPLLPGRTVLVYLTDANADRLCPKSNPQGPPLNYALLLIGMMITRAEQVDVVLCGGDTLKTAVLKAEEGILKTAIKLQAQVQEFDENDGWSLNTFGKYLLSLAGQRVPVDRVILLGQSMDDGMINVAKQLYWQRVNSKCLFVGILLRRVQYLSTDLNPNDVTLSGCTDAILKFIAEHGASHLLEHVGQMDKIFKIPPPPGKTGVQSLRPLEEDTPSPLAPVSQQGWRSIRLFISSTFRDMHGERDLLLRSVLPALQARAAPHRISLHGIDLRWGVTEEETRRNRQLEVCLGEVENAQLFVGILGSRYGYIPPSYNLPDHPHFHWAQQYPSGRSVTEMEVMQFLNRNQRLQPSAQALIYFRDSSFLSSVPDAWKSDFVSESEEAARRISELKSYLSRQKGITCRRYPCEWGGVAAGRPYVGGLEEFGQLVLQDVWNMIQKLYLQPGALLEQPVSIPDDDLVQATFQQLQKPPSPARPRLLQDTVQRLMLPHGRLSLVTGQSGQGKTAFLASLVSALQAPDGAKVASLVFFHFSGARPDQGLALTLLRRLCTYLRGQLKEPGALPSTYRSLVWELQQRLLPKSAESLHPGQTQVLIIDGADRLVDQNGQLISDWIPKKLPRCVHLVLSVSSDAGLGETLEQSQGAHVLALGPLEASARARLVREELALYGKRLEESPFNNQRESGRPLYLRLVTDHLRLFTLYEQVSERLRTLPATVPLLLQHILSTLEKEHGPDVLPQALTALEVTRSGLTVDQLHGVLSVWRTLPKGTKSWEEAVAAGNSGDPYPMGPFACLVQSLRSLLGEGPLERPGARLCLPDGPLRTAAKRCYGKRPGLEDTAHILIAAQLWKTCDADASGTFRSCPPEALGDLPYHLLQSGNRGLLSKFLTNLHVVAAHLELGLVSRLLEAHALYASSVPKEEQKLPEADVAVFRTFLRQQASILSQYPRLLPQQAANQPLDSPLCHQASLLSRRWHLQHTLRWLNKPRTMKNQQSSSLSLAVSSSPTAVAFSTNGQRAAVGTANGTVYLLDLRTWQEEKSVVSGCDGISACLFLSDDTLFLTAFDGLLELWDLQHGCRVLQTKAHQYQITGCCLSPDCRLLATVCLGGCLKLWDTVRGQLAFQHTYPKSLNCVAFHPEGQVIATGSWAGSISFFQVDGLKVTKDLGAPGASIRTLAFNVPGGVVAVGRLDSMVELWAWREGARLAAFPAHHGFVAAALFLHAGCQLLTAGEDGKVQVWSGSLGRPRGHLGSLSLSPALSVALSPDGDRVAVGYRADGIRIYKISSGSQGAQGQALDVAVSALAWLSPKVLVSGAEDGSLQGWALKECSLQSLWLLSRFQKPVLGLATSQELLASASEDFTVQLWPRQLLTRPHKAEDFPCGTELRGHEGPVSCCSFSTDGGSLATGGRDRSLLCWDVRTPKTPVLIHSFPACHRDWVTGCAWTKDNLLISCSSDGSVGLWDPESGQRLGQFLGHQSAVSAVAAVEEHVVSVSRDGTLKVWDHQGVELTSIPAHSGPISHCAAAMEPRAAGQPGSELLVVTVGLDGATRLWHPLLVCQTHTLLGHSGPVRAAAVSETSGLMLTASEDGSVRLWQVPKEADDTCIPRSSAAVTAVAWAPDGSMAVSGNQAGELILWQEAKAVATAQAPGHIGALIWSSAHTFFVLSADEKISEWQVKLRKGSAPGNLSLHLNRILQEDLGVLTSLDWAPDGHFLILAKADLKLLCMKPGDAPSEIWSSYTENPMILSTHKEYGIFVLQPKDPGVLSFLRQKESGEFEERLNFDINLENPSRTLISITQAKPESESSFLCASSDGILWNLAKCSPEGEWTTGNMWQKKANTPETQTPGTDPSTCRESDASMDSDASMDSEPTPHLKTRQRRKPSMCYLSCW

SEQ ID NO: 88093 - protein, 109 aa, Homo sapiens
MSSILPFTPPVVKRLLGWKKSAGGSGGAGGGEQNGQEEKWCEKAVKSLVKKLKKTGRLDELEKAITTQNCNTKCVTIPSTCSEIWGLSTPNTIDQWDTTGLYSFSEQTR

SEQ ID NO: 88094 - protein, 42 aa, Homo sapiens
MLGLSNTVMRLIEKRAFQDKYFMIGGMLLTCVVMFLVVQYLT

SEQ ID NO: 88095 - protein, 37 aa, Homo sapiens
  MOD_RES (1)..(1): Any amino acid
XSKKLKSVFRVPDLSGMLQVLKELTDVQYYWENFCHA

SEQ ID NO: 88096 - protein, 162 aa, Homo sapiens
MAAAAAAGEARRVLVYGGRGALGSRCVQAFRARNWWVASVDVVENEEASASIIVKMTDSFTEQADQVTAEVGKLLGEEKVDAILCVAGGWAGGNAKSKSLFKNCDLMWKQSIWTSTISSHLATKHLKEGGLLTLAGAKAALDGTPELSMTGSQGKTDRAQEA

SEQ ID NO: 88097 - protein, 130 aa, Homo sapiens
MEARDKQVLRSLRLELGAEVLVEGLVLQYLYQEGILTENHIQEINAQTTGLRKTMLLLDILPSRGPKAFDTFLDSLQEFPWVREKLKKAREEAMTDLPAGLEEKGRTGRRMGWGAGEEKGQKCQTVGMRT

SEQ ID NO: 88098 - protein, 152 aa, Homo sapiens
MTPSPLLLLLLPPLLLGAFPPAAAARGPPKMADKVVPRQVARLGRTVRLQCPVEGDPPPLTMWTKDGRTIHSGWSRFRVLPQGLKVKQVEREDAGVYVCKATNGFGSLSVNYTLVVLDDISPGKESLGPDSSSGGQEDPASQQWARPRFTQP

SEQ ID NO: 88099 - protein, 70 aa, Homo sapiens
  MOD_RES (1)..(1): Any amino acid
XGSMVSLVSGASGYSATSTSSFKKGHSLREKLAEMETFRDILCRQVDTLQKYFDACADAVSKDELQRDKG

SEQ ID NO: 88100 - protein, 31 aa, Homo sapiens
MSLIDEQLSHKEKLFVLSFGTNAGSLWPDPM

SEQ ID NO: 88101 - protein, 276 aa, Homo sapiens
QLMVVVGILLAYLAGWVLEWRWLAVLGCVPPSLMLLLMCFMPETPRFLLTQHRRQEAMAALRFLWGSEQGWEDPPIGAEQSFHLALLRQPGIYKPFIIGVSLMAFQQLSGVNAVMFYAETIFEEAKFKDSSLASVVVGVIQVLFTAVAALIMDRAGRRLLLVLSGVVMVFSTSAFGAYFKLTQGGPGNSSHVAISAPVSAQPVDASVGLAWLAVGSMCLFIAGFAVGWGPIPWLLMSEIFPLHVKGVATGICVLTNWLMAFLVTKEFSSLMLLLLL

SEQ ID NO: 88102 - protein, 95 aa, Homo sapiens
MSMLRLQKRLASSVLRCGKKKVWLDPNETNEIANANSRQQIRKLIKDGLIIRKPVTVHSRARCRKNTLARRKGRHMGIGNGRVQPMPECQRRSHG

SEQ ID NO: 88103 - protein, 56 aa, Homo sapiens
MIGDILLFGTLLMNAGAVLNFKLKKKDTQGFGEESREPSTGWSAVVRSWLTADSTS

SEQ ID NO: 88104 - protein, 32 aa, Homo sapiens
VFPPSLVSSATKTLSSFISTHLTPNCNCDPPF

SEQ ID NO: 88105 - protein, 196 aa, Homo sapiens
  MOD_RES (1)..(1): Any amino acid
XSDWVKSEYKEPGIARCAGPGEMADKLLLTTPSKKFTCQGPVDVNILAKCNPCLSNPCKNDGTCNSDPVDFYRCTCPYGFKGQDCDVPIHACISNPCKHGGTCHLKEGEEDGFWCICADGFEGENCEVNVDDCEDNDCENNSTCVDGINNYTCLCPPEYTGTNNRKYFAFHQYICLKASLELCYICLVNLFLFDKW

SEQ ID NO: 88106 - protein, 208 aa, Homo sapiens
MFTKEKIWSEVILVQVNPGETFTIRAEDGTLQCIQGPAEVPMMSPNGSIPPIHVPPGYISQVIEDSTGVRRVVVTPQSPECYPPSYPSAMSPTHHLPPYLTHHPHFIHNSHTAYYPPVTGPGDMPPQFFPQHHLPHTIYGEQEIIPFYGMSTYITREDQYSKPPHKKLKDRQIDRQNRLNSPPSSIYKSSCTTVYNGYGKGHSGGSGG

SEQ ID NO: 88107 - protein, 177 aa, Homo sapiens
MPFPVTTQGSQQTQPPQKHYGITSPISLAAPKETDCVLTQKLIETLKPFGVFEEEEELQRSNDLEYLIDNCFINRILILGKLNNLVKEWIREISESKNLPQSVIENVGGKIFTFGSYRLGVHTKGADIDALCVAPRHVDRSDFFTSFYDKLKLQEEVKDLRAVEEAFVPVIKLCFDG

SEQ ID NO: 88108 - protein, 116 aa, Homo sapiens
  MOD_RES (1)..(1): Any amino acid
XFYNYMMGIEFNPRIGKWFDFKLFFNGRPGIVAWTLINLSFAAKQRELHSHVTNAMVLVNVLQAIYVIDFFWNETWYLKTIDICHDHFGWYLGWGDCVWLPYLYTLQMRNAAVEAE

SEQ ID NO: 88109 - protein, 71 aa, Homo sapiens
MAFSDLTSRTVHLYDNWIKDADPRVEDWLLMSSPLPQTILLGFYVYFVTSLGPKLMENRKPFELKKAMITL

SEQ ID NO: 88110 - protein, 140 aa, Homo sapiens
GTTTFLGFTAAGFVVFQGNKRIHLIKWPDVCKLKFEGKTFYVIGTQKEKKAMLAFHTSTPAACKHLWKCGVENQAFYKYAKSSQIKTVSSSKIFFKGSRFRYSGKVAKEVVEASSKIQREPPEVHRCVQKKICSCFGVTW

SEQ ID NO: 88111 - protein, 41 aa, Homo sapiens
MKSQWCRPVAMDLGVYQLRHFSISFLSSLLGTENASVRLDN

SEQ ID NO: 88112 - protein, 40 aa, Homo sapiens
MEREPSASEAAPAAAALFAWVSSKTNIFKRFYFSSPGRTS

SEQ ID NO: 88113 - protein, 373 aa, Homo sapiens
MGTHPRGDAKILDNRISQKTLSQWIAENQDSLGSKVKDTFNGNLPFLFKVLSVETPLSIQAHPNKELAEKLHLQAPQHYPDANHKPEMAIALTPFQGLCGFRPVEEIVTFLKKVPEFQFLIGDEAATHLKQTMSHDSQAVASSLQSCFSHLMKSEKKVVVEQLNLLVKRISQQAAAGNNMEDIFGELLLQLHQQYPGDIGCFAIYFLNLLTLKPGEAMFLEANVPHAYLKGDCVECMACSDNTVRAGLTPKFIDVPTLCEMLSYTPSSSKDRLFLPTRSQEDPYLSIYDPPVPDFTIMKTEVPGSVTEYKVLALDSASILLMVQGTVIASTPTTQTPIPLQRGGVLFIGANESVSLKLTEPKDLLIFRACCLL

SEQ ID NO: 88114 - protein, 165 aa, Homo sapiens
MLVAKLIQCIVFGPLRVSERQHLKDKFWNFIFYKFIFIFGVLNVQTVEEVVMWCLWFAGLVFLHLMVQLCKDRFEYLSFSPTTPMSSHGRVLSLLVAMLLSCCGLAAVCSITGYTHGMHTLAFMAAESLLVTVRTAHVILRYVIHLWDLNHEGTWEGKGTYVYYT

SEQ ID NO: 88115 - protein, 161 aa, Homo sapiens
MPVPERPAAGPDSPRPGTRRAAPRVLFGEWLLGEISSGCYEGLQWLDEARTCFRVPWKHFARKDLSEADARIFKAWAVARGRWPPSSRGGGPPPEAETAERAGWKTNFRCALRSTRRFVMLRDNSGDPADPHKVYALSRELCWREGPGTDQTEAEAPAAVP

SEQ ID NO: 88116 - protein, 948 aa, Homo sapiens
MHNFEEELTCPICYSIFEDPRVLPCSHTFCRNCLENILQASGNFYIWRPLRIPLKCPNCRSITEIAPTGIESLPVNFALRAIIEKYQQEDHPDIVTCPEHYRQPLNVYCLLDKKLVCGHCLTIGQHHGHPIDDLQSAYLKEKDTPQKLLEQLTDTHWTDLTHLIEKLKEQKSHSEKMIQGDKEAVLQYFKELNDTLEQKKKSFLTALCDVGNLINQEYTPQIERMKEIREQQLELMALTISLQEESPLKFLEKVDDVRQHVQILKQRPLPEVQPVEIYPRVSKILKEEWSRTEIGQIKNVLIPKMKISPKRMSCSWPGTPVYSVAWGPDSEKVLYTAGKQLIIKPLQPNAKVLQWKAHDGIILKVDWNSVNDLILSAGEDCKYKVWDSYGRPLYNSQPHEHPITSVAWAPDGELFAVGSFHTLRLCDKTGWSYALEKPNTGSIFNIAWSIDGTQIAGACGNGHVVFAHVVEQHWEWKNFQVTLTKRRAMQVRNVLNDAVDLLEFRDRVIKASLNYAHLVVSTSLQCYVFSTKNWNTPIIFDLKEGTVSLILQAERHFLLVDGSSIYLYSYEGRFISSPKFPGMRTDILNAQTVSLSNDTIAIRDKADEKIIFLFEASTGKPLGDGKFLSHKNEILEIALDQKGLTNDRKIAFIDKNRDLCITSVKRFGKEEQIIKLGTMVHTLAWNDTCNILCGLQDTRFIVWYYPNTVYVDRDILPKTLYERDASEFSKNPHIVSFVGNQVTIRRADGSLVHISITPYPAILHEYVSSSKWEDAVRLCRFVKEQTMWACLAAMAVANRDMTTAEIAYAAIGEIDKVQYINSIKNLPSKESKMAHILLFSGNIQEAEIVLLQAGLVYQAIQININLYNWERALELAVKYKTHVDTVLAYRQKFLETFGKQETNKRYLHYAEGLQIDWEKIKAKIEMEITKEREQSSSSQSSKSIGLKP

SEQ ID NO: 88117 - protein, 728 aa, Homo sapiens
MVACRAIGILSRFSAFRILRSRGYICRNFTGSSALLTRTHINYGVKGDVAVVRINSPNSKVNTLSKELHSEFSEVMNEIWASDQIRSAVLISSKPGCFIAGADINMLAACKTLQEVTQLSQEAQRIVEKLEKSTKPIVAAINGSCLGGGLEVGVPAALDMMLTGRSIRADRAKKMGLVDQLVEPLGPGLKPPEERTIEYLEEVAITFAKGLADKKISPKRDKGLVETFYFTELTAYAMTIPFVRQQVYKKVEEKVRKQTKGLYPAPLKIIDVVKTGIEQGSDAGYLCESQKFGELVMTKESKALMGLYHGQVLCKKNKFGAPQKDVKHLAILGAGLMGAGIAQVSVDKGLKTILKDATLTALDRGQQQVFKGLNDKVKKKALTSFERDSIFSNLTGQLDYQGFEKADMVIEAVFEDLSLKHRVLKEVEAVIPDHCIFASNTSALPISEIAAVSKRPEKVIGMHYFSPVDKMQLLEIITTEKTSKDTSASAVAVGLKQGKVIIVVKDGPGFYTTRCLAPMMSEVIRILQEGVDPKKLDSLTTSFGFPVGAATLVDEVGVDVAKHVAEDLGKVFGERFGGGNPELLTQMVSKGFLGRKSGKGFYIYQEGVKRKDLNSDMDSILASLKLPPKSEVSSDEDIQFRLVTRFVNEAVMCLQEGILATPAEGDIGAVFGLGFPPCLGGPFRFVDLYGAQKIVDRLKKYEAAYGKQFTPCQLLADHANSPNKKFYQ

SEQ ID NO: 88118 - protein, 122 aa, Homo sapiens
MIRNWLTIFILFPLKLVEKCESSVSLTVPPVVKLENGSSTNVSLTLRPPLNATLVITFEITFRSKNITILELPDELVEAGGEECRDEISSHEAHQDGLQISSEPPRKQTGVKHDQSPACGNL

SEQ ID NO: 88119 - protein, 128 aa, Homo sapiens
MASESSPLLAYRLLGEEGVALPANGAGGPGGASARKLSTFLGVVVPTVLSMFSIVVFLRIGFVVGHAGLLQALAMLLVAYFILALTVLSVCAIATNGAVQGGGAYFMISRTLGPEVGGSIGLMFYLAN

SEQ ID NO: 88120 - protein, 222 aa, Homo sapiens
MSNPSPQVPEEEASTSVCRPKSSMASTSRRQRRERRFRRYLSAGRLVRAQALLQRHPGLDVDAGQPPPLHRACARHDAPALCLLLRLGADPAHQDRHGDTALHAAARQGPDAYTDFFLPLLSRCPSAMGIKNKDGETPGQILGWGPPWDSAEEEEEDDASKEREWRQKLQGELEDEWQEVMGRFEGEKSTAIHSCPSPLAAFHLHECVTLGSSAPSSVLPCF

SEQ ID NO: 88121 - protein, 71 aa, Homo sapiens
MCKGLAALPHSCLERTSLDEALQWRDSLDKLLQNNYGLASFKSFLKSEFSEENLEFWIACEDYKKIKSPAK

SEQ ID NO: 88122 - protein, 68 aa, Homo sapiens
MSLPRLKVNIRTYDNSIPISESSRKSWNQKHFALTFPKPLQRGTNDKSRPLKSQITVTPEAPWIHKLL

SEQ ID NO: 88123 - protein, 136 aa, Homo sapiens
  MOD_RES (1)..(1): Any amino acid
XVSQSLTDLAKYMIGRLRPNFLAVCDPDWSRVNCSVYVQLEKVCRGNPADVTEARLSFYSGHSSFGMYCMVFLALYVQARLCWKWARLLRPTVQFFLVAFALYVGYTRVSDYKHHWSDVLVGLLQGALVAALTVSF

SEQ ID NO: 88124 - protein, 729 aa, Homo sapiens
MVTWEGTGSIRKKRFVSSHRYVETMLVADQSMAEFHGSGLKHYLLTLFSVAARLYKHPSIRNSVSLVVVKILVIHDEQKGPEVTSNAALTLRNFCNWQKQHNPPSDRDAEHYDTAILFTRQDLCGSQTCDTLGMADVGTVCDPSRSCSVIEDDGLQAAFTTAHELGHVFNMPHDDAKQCASLNGVNQDSHMMASMLSNLDHSQPWSPCSAYMITSFLDNGHGECLMDKPQNPIQLPGDLPGTSYDANRQCQFTFGEDSKHCPDAASTCSTLWCTGTSGGVLVCQTKHFPWADGTSCGEGKWCINGKCVNKTDRKHFDTPFHGSWGMWGPWGDCSRTCGGGVQYTMRECDNPVPKNGGKYCEGKRVRYRSCNLEDCPDNNGKTFREEQCEAHNEFSKASFGSGPAVEWIPKYAGVSPKDRCKLICQAKGIGYFFVLQPKVVDGTPCSPDSTSVCVQGQCVKAGCDRIIDSKKKFDKCGVCGGNGSTCKKISGSVTSAKPGYHDIITIPTGATNIEVKQRNQRGSRNNGSFLAIKAADGTYILNGDYTLSTLEQDIMYKGVVLRYSGSSAALERIRSFSPLKEPLTIQVLTVGNALRPKIKYTYFVKKKKESFNAIPTFSAWVIEEWGECSKSCELGWQRRLVECRDINGQPASECAKEVKPASTRPCADHPCPQWQLGEWSSCSKTCGKGYKKRSLKCLSHDGGVLSHESCDPLKKPKHFIDFCTMAECS

SEQ ID NO: 88125 - protein, 184 aa, Homo sapiens
  MOD_RES (1)..(1): Any amino acid
XCRCNAGGSFSEVCHSQTGQCECRANVQGQRCDKCKPNMWRDPEKRFCVLCDCDPVGSVSPQCDITGRCVCKSGFVGKQCNLGRQVHQQEEQPRRAQRVLGSPQRWAIGSSSGCPRGAYRAPAPAGTFGLQSARGCVPCNCNSFGSKSFDCEESGQCWCQPGVTGKKCDRCAHGYFNFQEGGCT

SEQ ID NO: 88126 - protein, 139 aa, Homo sapiens
MTAVHAGNINFKWDPKSLEIRTLAVERLLEPLVTQVTTLVNTNSKGPSNKKRGRSKKAHVLAASVEQATENFLEKGDKIAKESQFLKEELVAAVEDVRKQGDLMKAAAGEFADDPCSSVKRGNMVRAARALLSAVTRLL

SEQ ID NO: 88127 - protein, 322 aa, Homo sapiens
MYFCWGADSRELQRRRTAGSPGAELLQAASGERHSLLLLTNHRVLSCGDNSRGQLGRRGAQRGELPEPIQALETLIVDLVSCGKEHSLAVCHKGRVFAWGAGSEGQLGIGEFKEISFTPKKIMTLNDIKIIQVSCGHYHSLALSKDSQVFSWGKNSHGQLGLGKEFPSQASPQRVRSLEGIPLAQVAAGGAHSFALSLCGTSFGWGSNSAGQLALSGRNVPVQSNKPLSVGALKNLGVVYISCGDAHTAVLTQDGKVFTFGDNRSGQLGYSPTPEKRGPQLVERIDGLVSQIDCGRLRGCSSQTHFCWNICQLCDNSSVKLE

SEQ ID NO: 88128 - protein, 194 aa, Homo sapiens
MSDSEMDGRTHIPSLLNALLSRNRVMQMSYLKSKEQGYGKLSSDEDLEIIVDQKQLVNEQQESRPLLSPSIDDFLCETKSEAIARPVTSNTAVLTTGLDLLDLSEPVSQTQTKAKKSEPSSKTSSLKKKADGSDLISTDAEQRGQPLRVPETSSLDLDIQTQLEKWDDVKFHGDRNTKGHPMAERKSSSSRTGS

SEQ ID NO: 88129 - protein, 54 aa, Homo sapiens
LMKVVNEECPTITRTYSLGKSSRGLKIYAMEISDNPGEHELGEGLWGPAAGLCC

SEQ ID NO: 88130 - protein, 208 aa, Homo sapiens
MGPVMPPSKKPESSGISVSSGLSQCYGGSGFSKALQEDDDLDFSLPDIRLEEGAMEDEELTNLNWLHESKNLLKSFGESVLRSVSPVQDLDDDTPPSPAHSDMPYDARQNPNCKPPYSFSCLIFMAIEDSPTKRLPVKDIYNWILEHFPYFANAPTGWKNSVRHNLSLNKCFKKVDKERSQSIGKGSLWCIDPEYRQNLIQALKKTPY

SEQ ID NO: 88131 - protein, 71 aa, Homo sapiens
MSSTSSKRAPTTATQRLKQDYLRIKKDPVPYICAEPLPSNILEWHYVVRGPEMTPYEGGYYHGKLIFPREF

SEQ ID NO: 88132 - protein, 191 aa, Homo sapiens
MAAALRVAAVGARLSVLASGLRAAVRSLCSQATSVNERIENKRRTALLGGGQRRIDAQHKRARVQQLTATSASQLQAILLPQPPEYLGLQGKLTARERISLLLDPGSFVESDMFVEHRCADFGMAADKNKFPGDSVVTGRGRINGRLVYVFSQDFTVFGGSLSGAHAQKICKIMDQAITVGAPVIGLNDSG

SEQ ID NO: 88133 - protein, 60 aa, Homo sapiens
MDAQATTIFSQGVQMMPGQMWRTSRRRTVLFEVVTRIFLIRSEAMTSSCFDTCQSNTSVT

SEQ ID NO: 88134 - protein, 57 aa, Homo sapiens
MQGPLLLPGLCFLLSLFGAVTQKTKSECSEPEQRTCGPRAGPGATHGLQWAGEKCLF

SEQ ID NO: 88135 - protein, 84 aa, Homo sapiens
MFEIKKICCIGAGYVGGPTCSVIAHMCPEIRVTVVDVNESRINAWNSPTLPIYEPGLKEVVESCRGKNLFFSTNIDDAIKEADL

SEQ ID NO: 88136 - protein, 273 aa, Homo sapiens
MSQWYELQQLDSKFLEQVHQLYDDSFPMEIRQYLAQWLEKQDWEHAANDVSFATIRFHDLLSQLDDQYSRFSLENNFLLQHNIRKSKRNLQDNFQEDPIQMSMIIYSCLKEERKILENAQRFNQAQSGNIQSTVMLDKQKELDSKVRNVKDKVMCIEHEIKSLEDLQDEYDFKCKTLQNREHETNGVAKSDQKQEQLLLKKMYLMLDNKRKEVVHKIIELLNVTELTQNALINDELVEWKRRQQSACIGGPPNACLDQLQNCCGESAASSAAA

SEQ ID NO: 88137 - protein, 180 aa, Homo sapiens
MKSSRKILLAYFILMFIVYAFEVASCITAATQQDFFTPNLFLKQMLERYQNNSPPNNDDQWKNNGVTKTWDRLMLQDNCCGVNGPSDWQKYTSAFRTENNDADYPWPRQCCVMNNLKEPLNLEACKLGVPGFYHNQGCYELISGPMNRHAWGVAWFGFAILCWTFWVLLGTMFYWSRIEY

SEQ ID NO: 88138 - protein, 237 aa, Homo sapiens
QERRPRGRRRGQTPFYIRIPKYGFNEGHSFRRQYKPLSLNRLQYLIDLGRVDPSQPIDLTQLVNGRGVTIQPLKRDYGVQLVEEGADTFTAKVNIEVQLASELAIAAIEKNGGVVTTAFYDPRSLDIVCKPVPFFLRGQPIPKRMLPPEELVPYYTDAKNRGYLADPAKFPEARLELARKYGYILPDITKDELFKMLCTRKDPRQIFFGLAPGWVVNMADKKILKPTDENLLKYYTS

SEQ ID NO: 88139 - protein, 265 aa, Homo sapiens
MAWWKAWDLTETLKSELSGKFERLIVALMYPPYRYEAKELHDAMKGLGTKEGVIIEILASRTKNQLREIMKAYEEDYGSSLEEDIQADTSGYLERILVCLLQGSRDDVSSFVDPALALQDAQDLYAAGEKIRGTDEMKFITILCTRSATHLLRVFEEYEKIANKSIEDSIKSETHGSLEEAMLTVVKCTQNLHSYFAERLYYAMKGAGTRDGTLIRNIVSRSEIDLNLIKCHFKKMYGKTLSSMIMEDTSGDYKNALLSLVGSDP

SEQ ID NO: 88140 - protein, 210 aa, Homo sapiens
MVEKEEAGGGISEEEAAQYDRQIRLWGLEAQKRLRASRVLLVGLKGLGAEIAKNLILAGVKGLTMLDHEQVTPEDPGAQFLIRTGSVGRNRAEASLERAQNLNPMVDVKVDTEDIEKKPESFFTQFDAVCLTCCSRDVIVKVDQICHKNSIKFFTGDVFGYHGYTFANLGEHEFVEEKTKVAKVSQGVEDGPDTKRAKLDSSETTMVKKI

SEQ ID NO: 88141 - protein, 301 aa, Homo sapiens
MLPLTMTVLILLLLPTGQAAPKDGVTRPDSEVQHQLLPNPFQPGQEQLGLLQSYLKGLGRTEVQLEHLSREQVLLYLFALHDYDQSGQLDGLELLSMLTAALAPGAANSPTTNPVILIVDKVLETQDLNGDGLMTPAELINFPGVALRHVEPGEPLAPSPQEPQAVGRQSLLAKSPLRQETQEAPGPREEAKGQVEARRESLDPVQEPGGQAEADGDVPGPRGEAEGQAEAKGDAPGPRGEAGGQAEAEGDAPGPRGEAGGQAEARENGEEAKELPGETLESKNTQNDFEVHIVQVENDEI

SEQ ID NO: 88142 - protein, 196 aa, Homo sapiens
  MOD_RES (1)..(1): Any amino acid
XEIMLQYCFPRLDINVSKGINHLLKSPFSVHPKTGRISVPIDLQKVDQFDPFTVPTISFICRELDAISTNEEEKEENEAESDVKHRTRDYKKTSLAPYVKVFEHFLENLDKSRKGELLKKSGFLLQQAWVTLSLGLSAAILVPRSLHKMPGEATETVPATEQELPQPQAETGSGTESDSDESVPELEEQDSTQATT

SEQ ID NO: 88143 - protein, 24 aa, Homo sapiens
MTRDQNGTWEMESNENFEGYMKAL

SEQ ID NO: 88144 - protein, 39 aa, Homo sapiens
MWRLRRAAVACCTLTVEWSRSKWISKNIKNHLTGTGCGL

SEQ ID NO: 88145 - protein, 195 aa, Homo sapiens
  MOD_RES (1)..(1): Any amino acid
XDSALLKHELAYCLGQMQDARAIPMLVDVLQDTRQEPMVRHEAGEALGAIGDPEVLEILKQYSSDPVIEVAETCQLAVRRLEWLQQHGGEPAAGPYLSVDPAPPAEERDVGRLREALLDESRPLFERYRAMFALRNAGGEEAALALAEGEEGLLGWGPGQCLAVRFSDGICAVGPRPAPGNGIPGLAPSISHGAS

SEQ ID NO: 88146 - protein, 31 aa, Homo sapiens
MAFRLTGGTKDYIVVGSDSGRIVILEYQPSK

SEQ ID NO: 88147 - protein, 29 aa, Homo sapiens
  MOD_RES (1)..(1): Any amino acid
XEMIARMQAQMQMQMQGGDGDGGALGHHV

SEQ ID NO: 88148 - protein, 68 aa, Homo sapiens
  MOD_RES (1)..(1): Any amino acid
XLKALKGYIKHEARKGNENQDSSTSKRKTLCGFYSHQPTTLARPVLWPCKSEYLGSEGVTQALCYLCS

SEQ ID NO: 88149 - protein, 59 aa, Homo sapiens
MNQSIPVAPTPPRRVRLKPWLVAQVNSCQYPGLQWVNGEKKLFCIPWRHATRHGPSQDG

SEQ ID NO: 88150 - protein, 66 aa, Homo sapiens
TKVLLQEQGWQRLEELRDQQRSQALVDLHRSFHTCISRQRVLPRMQARMRGFQASLSSHIPPTAVG

SEQ ID NO: 88151 - protein, 15 aa, Homo sapiens
MATPPKRSCPSFSAS

SEQ ID NO: 88152 - protein, 152 aa, Homo sapiens
MKEYVLLLFLALCSAKPFFSPSHIALKNMMLKDMEDTDDDDDDDDDDDDDDEDNSLFPTREPRSHFFPFDLFPMCPFGCQCYSRVVHCSDLGLTSVPTNIPFDTRMLDLQNNKIKEIKENDFKGLTSLYIIIKFQQWNLRILNDTKNYKGWA

SEQ ID NO: 88153 - protein, 115 aa, Homo sapiens
MTASRWCRRLSKEVQNALARASNTAEETISAMKTVRSFANEEEEAEVYLRKLQQVYKLNRKEAAAYMYYVWGSGLTLLVVQVSILYYGGHLVISGQMTSGNLIAFIIYEFVLGDC

SEQ ID NO: 88154 - protein, 101 aa, Homo sapiens
MSKDEERAVKDELLGEKPEIKQKWASRLLAKLRKDIRPEFREDFVLTITGKKPPCCVLSNPDQKGKIRRIDCLRQADKNPDNQIVQTSKEMRTSNHCPTGT

SEQ ID NO: 88155 - protein, 14 aa, Homo sapiens
MSGYKRMRRQHQKQ

SEQ ID NO: 88156 - protein, 92 aa, Homo sapiens
  MOD_RES (1)..(1): Any amino acid
XQGCVWPKEWFCECMGERETDHQEALVRQDPGGWEAAARMVPEIVSGEMLGSRIGSPYSLDPLIRWSLGPGCCNSYNRTWHRVACGHAGPLS

SEQ ID NO: 88157 - protein, 223 aa, Homo sapiens
MAASIGTDFWYEYRSPVQENSSDLNKSIWDEFISDEADEKTYNDALFRYNGTVGLWRRCITIPKNMHWYSPPERTESFDVVTKCVSFTLTEQFMEKFVDPGNHNSGIDLLRTYLWRCQFLLPFVSLGLMCFGALIGLCACICRSLYPTIATGILHLLAGLCTLGSVSCYVAGIELLHQKLELPDNVSGEFGWSFCLACVSAPLQFMASALFIWAAHTNRKEYT

SEQ ID NO: 88158 - protein, 158 aa, Homo sapiens
SMLSRSFNSNFTTVSSFHCGSSRDLHGSQGSLALSVADRRGSGGHIFRKHPQTSSSGDPCQDGIFISGQQNYSSATLSHKDVPPDSLMKMPLSNGQMGQPLRPQANYSQIHHPPQASVARHPSREQLIDYLMLKVAHQPPYTQPHCSPRQGHELAKQE

SEQ ID NO: 88159 - protein, 138 aa, Homo sapiens
MDLRVGQRPPVEPPPEPTLLALQRPQRLHHHLFLAGLQQQRSVEPMRLSMDTPMPELQVGPQEQELRQLLHKDKSKRSAVASSVVKQKLAEVILKKQQAALERTVHPNSPGIPYRTLEPLETEGATRSMLSSFLPPVP

SEQ ID NO: 88160 - protein, 181 aa, Homo sapiens
FLEGGDVVTGDSGGNLYVWGKGGNRITQAVLGAHDGGVFGLCALRDGTLVSGGGRDRRVVLWGSDYSKLQEVEVPEDFGPVRTVAEGHGDTLYVGTTRNSILQGSVHTGFSLLVQDPARSAGFHPSGSVLAVGTVTGRWLLLDTETHDLVAIHTDGNEQISVVSFSPDGAYLAVGSHDNLV

SEQ ID NO: 88161 - protein, 125 aa, Homo sapiens
MALDSDLWSRLEEKARAKCERDEAGNPAKESSDADGEAEEEGESEKGAGPRSAGWRALRRLWDRVLGPARRWRRPLPSNGEGLPGEDAGERAPRNTEVRWHAPAATNPSSFPQCSTVRRSRTLAT

SEQ ID NO: 88162 - protein, 171 aa, Homo sapiens
MTLQWAAVATFLYAEIGLILIFCLPFIPPQRWQKIFSFNVWGKIATFWNKAFLTIIILLIVLFLDAVREVRKYSSVHTIEKSSTSRPDAYEHTQMKLFRSQRNLYISGFSLFFWLVLRRLVTLITQLAKELSNKGVLKTQAENTNKAAKKFMEENEKLKRFLLAKVHCRKL

SEQ ID NO: 88163 - protein, 443 aa, Homo sapiens
MRARPRPRPLWATVLALGALAGVGVGGPNICTTRGVSSCQQCLAVSPMCAWCSDEALPLGSPRCDLKENLLKDNCAPESIEFPVSEARVLEDRPLSDKGSGDSSQVTQVSPQRIALRLRPDDSKNFSIQVRQVEDYPVDIYYLMDLSYSMKDDLWSIQNLGTKLATQMRKLTSNLRIGFGAFVDKPVSPYMYISPPEALENPCYDMKTTCLPMFGYKHVLTLTDQVTRFNEEVKKQSVSRNRDAPEGGFDAIMQATVCDEKIGWRNDASHLLVFTTDAKTHIALDGRLAGIVQPNDGQCHVGSDNHYSASTTMDYPSLGLMTEKLSQKNINLIFAVTENVVNLYQNYSELIPGTTVGVLSMDSSNVLQLIVDAYGKIRSKVELEVRDLPEELSLSFNATCLNNEVIPGLKSCMGLKIGDTVRWAGQGLCPGASVGTQPPFFLL

SEQ ID NO: 88164 - protein, 95 aa, Homo sapiens
MESGERLPSSAASSTTPTSSSTPSVASVVSKGGLSTGVASLSSTINPCGVNGSINGSNTSSVIGINTSVLSTTASSSMGQTKSTSSGGGNRKCNQ

SEQ ID NO: 88165 - protein, 1880 aa, Homo sapiens
MSHYHFIKCCCFQLCNVFRSHEMEIDQCLLESLPLGQRQRLVKRMRCEQIKAYYEREKAFQKQEGFLKRLKHAKNPKVHFNLTDMLQDAIIHHNDKEVLRLLKEGADPHTLVSSGGSLLHLCARYDNAFIAEILIDRGVNVNHQDEDFWTPMHIACACDNPDIVLLLVLAGANVLLQDVNGNIPLDYAVEGTESSSILLTYLDENGVDLTSLRQMKLQRPMSMLTDVKHFLSSGGNVNEKNDEGVTLLHMACASGYKEVVSLILEHGGDLNIVDDQYWTPLHLAAKYGQTNLVKLLLMHQANPHLVNCNEEKASDIAASEFIEEMLLKAEIAWEEKMKEPLSASTLAQEEPYEEIIHDLPVLSSKLSPLVLPIAKQDSLLEKDIMFKDATKGLCKQQSQDSIPENPMMSGSTKPEQVKLMPPAPNDDLATLSELNDGSLLYEIQKRFGNNQIYTFIGDILLLVNPYKELPIYSSMVSQLYFSSSGKLCSSLPPHLFSCVERAFHQLFREQRPQCFILSGERGSGKSEASKQIIRHLTCRAGASRATLDSRFKHVVCILEAFGHAKTTLNDLSSCFIKYFELQFCERKQQLTGARIYTYLLEKSRLVSQPLGQSNFLIFYLLMDGLSAEEKYGLHLNNLCAHRYLNQTIQDDASTGERSLNREKLAVLKRALNVVGFSSLEVENLFVILAAILHLGDIRFTALNEGNSAFVSDLQLLEQVAGMLQVSTDELASALTTDIQYFKGDMIIRRHTIQIAEFFRDLLAKSLYSRLFSFLVNTMNSCLHSQDEQKSMQTLDIGILDIFGFEEFQKNEFEQLCVNMTNEKMHHYINEVLFLHEQVECVQEGVTMETAYSPGNQNGVLDFFFQKPSGFLTLLDEESQMIWSVESNFPKKLQSLLESSNTNAVYSPMKDGNGNVALKDHGTAFTIMHYAGRVMYDVVGAIEKNKDSLSQNLLFVMKTSENVVINHLFQSKLSQTGSLVSAYPSFKFRGHKSALLSKKMTASSIIGENKNYLELSKLLKKKGTSTFLQRLERGDPVTIASQLRKSLMDIIGKLQKCTPHFIHCIRPNNSKLPDTFDNFYVSAQLQYIGVLEMVKIFRYGYPVRLSFSDFLSRYKPLADTFLREKKEQSAAERCRLVLQQCKLQGWQMGVRKVFLKYWHADQLNDLCLQLQRKIITCQKVIRGFLARQHLLQRISIRQQEVTSINSFLQNTEDMGLKTYDALVIQNASDIARENDRLRSEMNAPYHKEKLEVRNMQEEGSKRTDDKSGPRHFHPSSMSVCAAVDGLGQCLVGPSIWSPSLHSVFSMDDSSSLPSPRKQPPPKPKRDPNTRLSASYEAVSACLSAAREAANEALARPRPHSDDYSTMKKIPPRKPKRSPNTKLSGSYEEISGSRPGDARPAGAPGAAARVLTPGTPQCALPPAAPPGDEDDSEPVYIEMLGHAARPDSPDPGESVYEEMKCCLPDDGGPGAGSFLLHGASPPLLHRAPEDEAAGPPGDACDIPPPFPNLLPHRPPLLVFPPTPVTCSPASDESPLTPLEVKKLPVLETNLKYPVQPEGSSPLSPQYSKSQKGDGDRPASPGLALFNGSGRASPPSTPPPPPPPPGPPPAPYRPCAHLAFPPEPAPVNAGKAGPSAEAPKVHPKPNSAPVAGPCSSFPKIPYSPVKATRADARKAGSSASPPAPYSPPSSRPLSSPLDELASLFNSGRSVLRKSAAGRKIREAEGFETNMNISSRDDPSTSEITSETQDRNANNHGIQLSNSLSSAITAENGNSISNGLPEEDGYSRLSISGTGTSTFQRHRDSHTTQVIHQLRLSENESVALQELLDWRRKLCEEGQDWQQILHHAEPRVPPPPPCKKPSLLKKPEGASCNRLPSELWDTTI

SEQ ID NO: 88166 - protein, 818 aa, Homo sapiens
MQGHAHPPEKETPARRRRPPPCTQPREPSRASALRGLCRAPREWGPHHAPPKPRFPKRGLQVRPSAADLALPCVRGCGLRRQDGRRLCFSFRPGPARAQGYLLCVWRRDMDQKLSKLVEELTTSGEPRLNPEKMKELKKICKSSEEQLSRAYRLLIAQLTQEHAEIRLSAFQIVEELFVRSHQFRMLVVSNFQEFLELTLGTDPAQPLPPPREAAQRLRQATTRAVEGWNEKFGEAYKKLALGYHFLRHNKKVDFQDTNARSLAERKREEEKQKHLDKIYQERASQAEREMQEMSGEIESCLTEVESCFRLLVPFDFDPNPETESLGMASGMSDALRSSCAGQVGPCRSGTPDPRDGEQPCCSRDLPASAGHPRAGGGAQPSQTATGDPSDEDEDSDLEEFVRSHGLGSHKYTLDVELCSEGLKVQENEDNLALIHAARDTLKLIRNKFLPAVCSWIQRFTRVGTHGGCLKRAIDLKAELELVLRKYKELDIEPEGGERRRTEALGDAEEDEDDEDFVEVPEKEGYEPHIPDHLRPEYGLEAAPEKDTVVRCLRTRTRMDEEVSDPTSAAAQLRQLRDHLPPPSSASPSRALPEPQEAQKLAAERARAPVVPYGVDLHYWGQELPTAGKIVKSDSQHRFWKPSEVEEEVVNADISEMLRSRHITFAGKFEPVQHWCRAPRPDGRLCERQDRLKCPFHGKIVPRDDEGRPLDPEDRAREQRRQLQKQERPEWQDPELMRDVEAATGQDLGSSRYSGKGRGKKRRYPSLTNLKAQADTARARIGRKVFAKAAVRRVVAAMNRMDQKKHEKFSNQFNYALN

SEQ ID NO: 88167 - protein, 20 aa, Homo sapiens
MFRPFVEVCILGPNLGDKKR

SEQ ID NO: 88168 - protein, 78 aa, Homo sapiens
MAGQGLPLHVATLLTGLLECLGFAGVLFGWPSLVFVFKNEDYFKDLCGPDAGPIGNATGQADCKAQDERFSLIFTLGS

SEQ ID NO: 88169 - protein, 505 aa, Homo sapiens
DRSEEVFDMTKGNLTLLEKAIALETERAKAMREKMAMEAGRRDNMRSYEDQSPRQLPGEDRKPKSSDSHVKKPYYDPSRTEKKESKCPTPGCDGTGHVTGLYPHHRSLSGCPHKDRVPPEILAMHESVLKCPTPGCTGRGHVNSNRNSHRSLSGCPIAAAEKLAKAQEKHQSCDVSKSSQASDRVLRPMCFVKQLEIPQYGYRNNVPTTTPRSNLAKELEKYSKTSFEYNSYDNHTYGKRAIAPKVQTRDISPKGYDDAKRYCKDPSPSSSSTSSYAPSSSSNLSCGGGSSASSTCSKSSFDYTHDMEAAHMAATAILNLSTRCREMPQNLSTKPQDLCATRNPDMEVDENGTLDLSMNKQRPRDSCCPILTPLEPMSPQQQAVMNNRCFQLGEGDCWDLPVDYTKMKPRRIDEDESKDITPEDLDPFQEALEERRYPGEVTIPSPKPKYPQCKESKKDLITLSGCPLADKSIRSMLATSSQELKIPVQGPRALDHLLMFSDFLN

SEQ ID NO: 88170 - protein, 116 aa, Homo sapiens
MAQTDKPTCIPPELPKMLKEFAKAAIRVQPQDLIQWAADYFEALSRGETPPVRERSERVALCNRAELTPELLKILHSQVAGRLIIRAEELAQMWKVVNLPTDLFNSVMNVGRFTEE

SEQ ID NO: 88171 - protein, 258 aa, Homo sapiens
NLLDIFIEMEKRVILGEGKLDILKRVCAQINKSLLKIINDYEEFSKGALTTTFEELHFEIKPHDDCTVEQIYEILKIYQLMDHSNMDCFICCILSHGDKGIIYGTDGQEAPIYELTSQFTGLKCPSLAGKPKVFFIQACQGDNYQKGIPVETDSEEQPYLEMDLSSPQTRYIPDEADFLLGMATVNNCVSYRNPAEGTWYIQSLCQSLRERCPRGDDILTILTEVNYEVSNKDDKKNMGKQMPQPTFTLRKKLVFPSD

SEQ ID NO: 88172 - protein, 231 aa, Homo sapiens
MQPLEVGLVPAPAGEPRLTRWLRRGSGILAHLVALGFTIFLTALSRPGTSLFSWHPVFMALAFCLCMAEAILLFSPEHSLFFFCSRKARIRLHWAGQTLAILCAALGLGFIISSRTRSELPHLVSWHSWVGALTLLATAVQALCGLCLLCPRAARVSRVARLKLYHLTCGLVVYLMATVTVLLGMYSVWFQAQIKGAAWYLCLALPVYPALVIMHQISRSYLPRKKMEIAT

SEQ ID NO: 88173 - protein, 122 aa, Homo sapiens
MEGGDIRVRRLFCRTQWYLRIDKRGKVKGTQEMKNNYNIMEIRTVAVGIVAIKGVESEFYLAMNKEGKLYAKKECNEDCNFKELILENHYNTYASAKWTHNGGEMFVALNQKGIPVRGKKTK

SEQ ID NO: 88174 - protein, 77 aa, Homo sapiens
MAGAIASRMSFSSLKRKQPKTFTVRIVTMDAEMEFNCESCSVTLAGVQWRDLGLLQPLPPKFKRFSCLSFPSSWDYR

SEQ ID NO: 88175 - protein, 119 aa, Homo sapiens
NPRGSSSRQSSSSAMSSSSASSSPAASLGSQGSGLEQSSFQWSPSGRRTGSLYCRVGIGFHLQIYPDGKVNGSHEANMLSVLEIFAVSQGIVGIRGVFSNKFLAMSKKGKLHASNTLET

SEQ ID NO: 88176 - protein, 178 aa, Homo sapiens
MMMYHMKVSDDEYTKLLHDGIQPVAAIDSNFASFTYTPRSLPEDDTSMAILSMLQDMNFINNYKIDCPTLARFCLMVKKGYRDPPYHNWMHAFSVSHFCYLLYKNLELTNYLEDIEIFALFISCMCHDLDHRGTNNSFQVASKSVLAALYSSEGSVMERHHFAQAIAILNTHGCNIFD

SEQ ID NO: 88177 - protein, 224 aa, Homo sapiens
MPNEGIPHSSQTQEQDCLQSQPVSNNEEMAIKQESGGDGEVEEYLSFRSVGDGLSTSAVGCASAAPRRGPALLHIDRHQIQAVEPSAQALELQGLGVDVYDQDVLEQGVLQQVDNAIHEASRASQLVDVEKEYRSVLDDLTSCTTSLRQINKIIEQLSPQAATSRDINRKLDSVKRQKYNKEQQLKKITAKQKHLQAILGGAEVKIELDHASLEEDAVPRCLEH

SEQ ID NO: 88178 - protein, 285 aa, Homo sapiens
MHTFASCGTLLILDPDEAGLRLFRSFDWNDGLFDVTWSENNEHVLITCSGDGSLQLWDTAKAAGPLQVYKEHAQEVYSVDWSQTRGEQLVVSGSWDQTVKLWDPTVGKSLCTFRGHESIIYSTIWSPHIPGCFASASGDQTLRIWDVKAAGVRIVIPAHQAEILSCDWCKYNENLLVTGAVDCSLRGWDLRNVRQPVFELLGHTYAIRRVKFSPFHASVLASCSYDFTVRFWNFSKPDSLLETVEHHTEFTCGLDFSLQSPTQVADCSWDETIKIYDPACLTIPA

SEQ ID NO: 88179 - protein, 103 aa, Homo sapiens
MLRHSPLTQMGPAKDKLVIGRIFHIVENDLYIDFGGKFHCVCRRPEVDGEKYQKGTRVRLRLLDLELTSRFLGATTDTTVLEANAVLLGIQESKDSRSKEEHH

SEQ ID NO: 88180 - protein, 353 aa, Homo sapiens
MRLRFWLLIWLLLGFISHQPTPVSFLKTIFWSRNGHDGSMDVQQRAWRSNRSRQKGLRSICMHTKKRVSSFRGNKIGLKDVITLRRHVETKVRAKIRKRKVTTKINRHDKINGKRKTARKQKMFQRAQELRRRAEDYHKCKIPPSARKPLCNWVRMAAAEHCHSSGLPYWLYLTAETLKNRMGRQPPPPTQQHSITDNSLSLKTPPECLLTPLPPSVDDNIKECPLAPLPPSPLPPSVDDNLKECLFVPLPPSPLPPSVDDNLKECLFVPLPPSPLPPSVDDNLKTPPLATQEAEVEKPPKPKRWRVDEVEQSPKPKRQREAEAQQLPKPKRRRLSKLRTRHCTQAWAIRINP

SEQ ID NO: 88181 - protein, 191 aa, Homo sapiens
  MOD_RES (1)..(1): Any amino acid
XALKSWLSRSVTSFFRYRQCLCVPVVANFKKRCFSELIRPWHKTVTIGFGVTLCAVPIAQKSEPHSLSSEALMRRAVSLVTDSTSTFLSQTTYALIEAITEYTKAVYTLTSLYRQYTSLLGKMNSEEEDEVWQVIIGARAEMTSKHQEYLKLETTWMTAVGLSEMAAEAAYQTECQLNPDLNIEVEVSLQR

SEQ ID NO: 88182 - protein, 141 aa, Homo sapiens
  MOD_RES (1)..(1): Any amino acid
XKLTIESTPFNVAEGKEVLLLVHNLPQHLFGYSWYKGERVDGNRQIIGYVIGTQQATPGPAYSGREIIYPNASLLIQNIIQNDTGFYTLHVIKSDLVNEEATGQFRVYPELPKPSISSNNSKPVEDKDAVAFTCEPEAQNT

SEQ ID NO: 88183 - protein, 98 aa, Homo sapiens
MGSVTVRYFCYGCLFTSATWTVLLFVYFNFSEVTQPLKNVPVKGSGPHGPSPKKFYPRFTRGPSRVLEPQFKANKIDDVIDSRVEDPEEGHLKFSSEL

SEQ ID NO: 88184 - protein, 188 aa, Homo sapiens
MAAAEPAVLALPNSGAGGAGAPSGTVPVLFCFSVFARPSSVPHGAGYELLIQKFLSLYGDQIDMHRKFVVQLFAEEWGQYVDLPKGFAVSERCKLTTLGNLTPSSTVFFCCDMQERFRPAIKYFGDIISVGQRLLQGARILGIPVIVTEQYPKGLGSTVQEIDLTGVKLVLPKTKFSMVLPEVEAALA

SEQ ID NO: 88185 - protein, 43 aa, Homo sapiens
MPRCIYCIHALSLYLFKLGLAPQIQDLYGKVDFTEEEINNMKT

SEQ ID NO: 88186 - protein, 77 aa, Homo sapiens
MDELQLFRGDTVLLKGKKRREAVCIVLSDDTCSDEKIRMNRVVRNNLRVRLGDVIRRHFSCPWWDACCGVQSGGNRS

SEQ ID NO: 88187 - protein, 103 aa, Homo sapiens
MGPYTFLETVCIYGYSLFVFIPMVVLWLIPVPWLQWLFGALALGLSAAGLVFTLWPVVREDTRLVATVLLSVVVLLHALLAMGCKLYFFQSLPPENVAPPPQI

SEQ ID NO: 88188 - protein, 691 aa, Homo sapiens
MTLHATRGAALLSWVNSLHVADPVEAVLQLQDCSIFIKIIDRIHGTEEGQQILKQPVSERLDFVCSFLQKNRKHPSSPECLVSAQKVLEGSELELAKMTMLLLYHSTMSSKSPRDWEQFEYKIQAELAVILKFVLDHEDGLNLNEDLENFLQKAPVPSTCSSTFPEELSPPSHQAKREIRFLELQKVASSSSGNNFLSGSPASPMGDILQTPQFQMRRLKKQLADERSNRDELELELAENRKLLTEKDAQIAMMQQRIDRLALLNEKQAASPLEPKELEELRDKNESLTMRLHETLKQCQDLKTEKSQMDRKINQLSEENGDLSFKLREFASHLQQLQDALNELTEEHSKATQEWLEKQAQLEKELSAALQDKKCLEEKNEILQGKLSQLEEHLSQLQDNPPQEKGEVLGDVLQLETLKQEAATLAANNTQLQARVEMLETERGQQEAKLLAERGHFEEEKQQLSSLITDLQSSISNLSQAKEELEQASQAHGARLTAQVASLTSELTTLNATIQQQDQELAGLKQQAKEKQAQLAQTLQQQEQASQGLRHQVEQLSSSLKQKEQQLKEVAEKQEATRQDHAQQLATAAEEREASLRERDAALKQLEALEKEKAAKLEILQQQLQVANEARDSAQTSVTQAQREKAELSRKVEELQACVETARQEQHEAQAQVAELELQLRSEQQKATEKE

SEQ ID NO: 88189 - protein, 59 aa, Homo sapiens
MSGTSSPEAVKKLLENMQSDLRALSLECKKKFPPVKEAAESGIIKVKTIAARNTEILAG

SEQ ID NO: 88190 - protein, 38 aa, Homo sapiens
  MOD_RES (1)..(1): Any amino acid
XLIRFCCCRPPEPPGSKIPSPGGGCVTWSCIVALLAGW

SEQ ID NO: 88191 - protein, 125 aa, Homo sapiens
MMDIYVCLKRPSWMVDNKRMRTASNFQWLLSTFILLYLMNQVNSQKKGAPHDLKCVTNNLQVWNCSWKAPSGTGRGTDYEVCIENRSRSCYQLEKTSIKIPALSHGDYEITINSLHDFGSSTSKF

SEQ ID NO: 88192 - protein, 453 aa, Homo sapiens
MELPNYSRQLLQQLYTLCKEQQFCDCTISIGTIYFRAHKLVLAAASLLFKTLLDNTDTISIDASVVSPEEFALLLEMMYTGKLPVGKHNFSKIISLADSLQMFDVAVSCKNLLTSLVNCSVQGQVVRDVSAPSSETFRKEPEKPQVEILSSEGAGEPHSSPELAATPGGPVKAETEEAAHSVSQEMSVNSPTAQESQRNAETPAETPTTAEACSPSPAVQTFSEAKKTSTEPGCERKHYQLNFLLENEGVFSDALMVTQDVLKKLEMCSEIKGPQKEMIVKCFEGEGGHSAFQRILGKVREESLDVQTVVSLLRLYQYSNPAVKTALLDRKPEDVDTVQPKGSTEEGKTLSVLLLEHKEDLIQCVTQLRPIMESLETAKEEFLTGTEKRVILNCCEGRTPKETIENLLHRMTEEKTLTAEGLVKLLQAVKTTFPNLGLLLEKLQKSATLPSTT

SEQ ID NO: 88193 - protein, 133 aa, Homo sapiens
  MOD_RES (1)..(1): Any amino acid
XDAGRLQHRRRHRQFHPGQEHGHRAPRFSGLLHGSPKTTSLAASAASTETLTPTPERNEGVYTAIAVQEIQGNPASPAQEYRALYDYTAQNPDELDLSAGDILEVILEGEDGWWTVERNGQRGFVPGSYLEKL

SEQ ID NO: 88194 - protein, 517 aa, Homo sapiens
MGLWGKKGTVAPHDQSPRRRPKKGLIKKKMVKREKQKRNMEELKKEVVMDDHKLTLEELSTKYSVDLTKGHSHQRAKEILTRGGPNTVTPPPTTPEWVKFCKQLFGGFSLLLWTGAILCFVAYSIQIYFNEEPTKDNLYLSIVLSVVVIVTGCFSYYQEAKSSKIMESFKNMVPQQALVIRGGEKMQINVQEVVLGDLVEIKGGDRVPADLRLISAQGCKVDNSSLTGESEPQSRSPDFTHENPLETRNICFFSTNCVEGTARGIVIATGDSTVMGRIASLTSGLAVGQTPIAAEIEHFIHLITVVAVFLGVTFFALSLLLGYGWLEAIIFLIGIIVANVPEGLLATVTVCLTLTAKRMARKNCLVKNLEAVETLGSTSTICSDKTGTLTQNRMTVAHMWFDMTVYEADTTEEQTGKTFTKSSDTWFMLARIAGLCNRADFKANQEILPIAKRATTGDASESALLKFIEQSYSSVAEMREKNPKVAEIPFNSTNKYQVQNPQRCPSTFGRTAPRPTY

SEQ ID NO: 88195 - protein, 124 aa, Homo sapiens
TNDGNIFFSPVGILTAIGMVLLGTRGATASQLEEVFHSEKETKSSRIKAEEKEVSTSKSVQMMTQSHSFSFTFLEDLQAKILGIPYKNNDLSMFVLLPNDIDGLEKVNHCSEDGVCNTSYASYF

SEQ ID NO: 88196 - protein, 153 aa, Homo sapiens
MSDPEMGWVPEPPTMTLGASRVELRVSCHGLLDRDTLTKPHPCVLLKLYSDEQWVEVRAAQVERTEVLRSCSSPVFSRVLALEYFFEEKQPLQFHVFDAEDGATSPRNDTFLGSTECTLGQIVSQTKVTKPLLLKNGKTAGKSTITIVAEEVS

SEQ ID NO: 88197 - protein, 219 aa, Homo sapiens
  MOD_RES (1)..(1): Any amino acid
XVNLYRYFGDKIQNIFSEEDFRLYREVRQKVQLTIAEAFGISASSLHLTKPTFFSRINSTEARTAHDEYWHAHVDKVTYGSFDYTSLLYLSNYLEDFGGGRFMFMEEGANKTVEPRAVVLSHLCIRGRVWTSSLCKQEPSLSALTPEVPVTAVLWENEKLTEHKTGVFLRSQAAEASWDSKLHNFLAYFDLSHFKHDKYLSQTFCITIFFQIIKTTCLL

SEQ ID NO: 88198 - protein, 140 aa, Homo sapiens
MENEPDHENVEQSLCAKTSEEELNKSFNLEASLSKFSYIDMDKELEFKNDLIDDKEFDIPQVDTPPTLESILNETDDEDESFILEDPTLLNIDTIDSHSYDTSSVASSDSGDRTNLKRKKKLPDSFSLHGSVMRHSLLKG

SEQ ID NO: 88199 - protein, 1271 aa, Homo sapiens
MAAATVGRDTLPEHWSYGVCRDGRVFFINDQLRCTTWLHPRTGEPVNSGHMIRSDLPRGWEEGFTEEGASYFIDHNQQTTAFRHPVTGQFSPENSEFILQEEPNPHMSKQDRNQRPSSMVSETSTAGTASTLEAKPGPKIIKSSSKVHSFGKRDQAIRRNPNVPVVVRGWLHKQDSSGMRLWKRRWFVLADYCLFYYKDSREEAVLGSIPLPSYVISPVAPEDRISRKYSFKAVHTGMRALIYNSSTAGSQAEQSGMRTYYFSADTQEDMNAWVRAMNQAAQVLSRSSLKRDMEKVERQAVPQANHTESCHECGRVGPGHTRDCPHRGHDDIVNFERQEQEGEQYRSQRDPLEGKRDRSKARSPYSPAEEDALFMDLPTGPRGQQAQPQRAEKNGMLPASYGPGEQNGTGGYQRAFPPRTNPEKHSQRKSNLAQVEHWARAQKGDSRSLPLDQTLPRQGPGQSLSFPENYQTLPKSTRHPSGGSSPPPRNLPSDYKYAQDRASHLKMSSEERRAHRDGTVWQLYEWQQRQQFRHGSPTAPICLGSPEFTDQGRSRSMLEVPRSISVPPSPSDIPPPGPPRVFPPRRPHTPAERVTVKPPDQRRSVDISLGDSPRRARGHAVKNSSHVDRRSMPSMGYMTHTVSAPSLHGKSADDTYLQLKKDLEYLDLKMTGRDLLKDRSLKPVKIAESDTDVKLSIFCEQDRVLQDLEDKIRALKENKDQLESVLEVLHRQMEQYRDQPQHLEKIAYQQKLLQEDLVHIRAELSRESTEMENAWNEYLKLENDVEQLKQTLQEQHRRAFFFQEKSQIQKDLWRIEDVTAGLSANKENFRILVESVKNPERKTVPLFPHPPVPSLSTSESKPPPQPSPPTSPVRTPLEVRLFPQLQTYVPYRPHPPQLRKVTSPLQSPTKAKPKVEDEAPPRPPLPELYSPEDQPPAVPPLPREATIIRHTSVRGLKRQSDERKRDRELGQCVNGDSRVELRSYVSEPELATLSGDMAQPSLGLVGPESRYQTLPGRGLSGSTSRLQQSSTIAPYVTLRRGLNAESSKATFPRPKSALERLYSGDHQRGKMSAEEQLERMKRHQKALVRERKRTLGQGERTGLPSSRYLSRPLPGDLGSWKREQDFDLQLLERVVQGEKKDKEENGWLKVQAMPVTELDLEPQDYDLDISRELSKPEKVSIPERYVELDPEEPPSLEELQARYRKAEKIRNILARSSMCNLQPTSGQDQNSVADLDLQLQEQERIINISYALASEASQRSKQVAAQAVTDP

SEQ ID NO: 88200 - protein, 38 aa, Homo sapiens
MEGQDEVSAREQHFHSQVRESTMNKKMKMPSSTGFRCF

SEQ ID NO: 88201 - protein, 171 aa, Homo sapiens
MEQPRKAVVVTGFGPFGEHTVNASWIAVQELEKLGLGDSVDLHVYEIPVEYQTVQRLIPALWEKHSPQLVVHVGVSGMATTVTLEKCGHNKGYKGLDNCRFCPGSQCCVEDGPESIDSIIDMDAVCKRVTTLGLDVSVTISQDAGRVTVDQPSSTCPHWGSRTTRTSWAGH

SEQ ID NO: 88202 - protein, 88 aa, Homo sapiens
MMSLSVRPQRRLLSARVNRSQSFAGVLGSHERGPRSFPVFSPPGPPRKPPALSRVSRMFSVAHPAAKVPQPERLDLVYTALKRGLTAY

SEQ ID NO: 88203 - protein, 587 aa, Homo sapiens
MQKPPLLLRRPLPPKFTKLSLHEKKTHTAKTGKIESLHVAFTEDETTSIKMDRTRFPDVLRNQSLTPINIQNIFLDHCVQERVTAISSPQKSTKHVREQIPDTATGSIFFPHCNSASTRIFGKQTNKMESSRKFKTMKDVYTEKRLENILILSSKFSKPKSTPGSVIAQKLEKMHPKHQPLPESPGYTYQHISRDLSATVPSPPPMTVSMKPEGQWPEHFKSTATLTLRVTEFPGFVSLPTPVLPRKPHRQSVIETLVTENGNIESVPKQIPPRPPEGLTKTEKIESEIHVVRGEGFKTVAATRYETITAMTNLAIVNCQVYGRNALNLKGFFILNCPDLTPLAFQLIYLNLSFNDLHYFPTEILCLKNLQILKLRNNPIKEIPSEIQQLEFLRIFTIAFNLITVLPIGLFSLSYLEELDVSYNELTFIPNEIQKLRSLEKLTVDGNELSFFPHGILKLNLTKIQFENNFTHPCFWRDNYLNNPQQLTQIISLFIVQNKLHKFYDKIPVEVQKLLKCTSRCEWCHGPKFGEGFRVIRSCDIFGASQLPVMFYVCSPSCYRRIKESSFVLDGSPSRRIALDVELSKEL

SEQ ID NO: 88204 - protein, 568 aa, Homo sapiens
  MOD_RES (1)..(1): Any amino acid
XIQGLEATKPTQQSLVGVLETAMKLANQDEGPEDEEDEQNSPVAPTAQPKAPPSRTPQSGSAPTAKAPPKATSTRAQQQLAFLEGRKKQLLQAALRAKQKNDVEGAKMHLRQAKGLEPMLEASRNGLPVDITKVPPAPVNKDDFALVQRPGPGLSQEAARRYGELTKLIRQQHEMCLNHSNQFTQLGNITETTKFEKLAEDCKRSMDILKQAFVRGLPTPTARFEQRTFSVIKIFPDLSSNDMLLFIVKGINLPTPPGLSPGDLDVFVRFDFPYPNVEEAQKDKTSVIKNTDSPEFKEQFKLCINRSHRGFRRAIQTKGIKFEVVHKGGLFKTDRVLGTAQLKLDALEIACEVREILEVLDGRRPTGGRLEVMVRIREPLTAQQLETTTERWLVIDPVPAAVPTVRPPTPTHQQPQGGKLGSGAQDSQDWFSPLKQVAGPKGKAPPVPAPARESGNRSARPLHSLSVLAFDQERLERKILALRQARRPVPPEVAQQYQDIMQRSQWQRAQLEQGGVGIRREYAAQLERQLQFYTEAARRLGNDGSRDAAKEALYRRNLVESELQRLRR

SEQ ID NO: 88205 - protein, 101 aa, Homo sapiens
MKVNRETKRLYVGGLSQDISEADLQNQFSRFGEVSDVEIITRKDDQGNPQKVFAYINISVAEADLKKCMSVLNKTKWKGGTLQIQLAKESFLHRRIWIIKT

SEQ ID NO: 88206 - protein, 138 aa, Homo sapiens
  MOD_RES (1)..(1): Any amino acid
XEMVLQFLAFSRVAQDCRGTSWPKTVYFTFQFYRFPPATTPRLQLVQLDEAGQPSSGALTHILVPVSRDGTFDAGSPGFQLRYMVGPGFLKPGERRCFARYLAVQTLQIDVWDGDSLLLIGSAAVQMKETSHIFSVSQ

SEQ ID NO: 88207 - protein, 55 aa, Homo sapiens
MATGRGRILQQHWLGLQTLRGPSRGGGAARGRARAFGCRSCSSAFQKHLQREEVK

SEQ ID NO: 88208 - protein, 50 aa, Homo sapiens
MVQASGHRRSTRGSKMVSWSVIAKIQEILQRKMVREFLAEFMSTYVMMRE

SEQ ID NO: 88209 - protein, 216 aa, Homo sapiens
MSDLLLLGLIGGLTLLLLLTLLAFAGYSGLLAGVEVSAGSPPIRNVTVAYKFHMGLYGETGRLFTESCSISPKLRSIAVYYDNPHMVPPDKCRCAVGSILSEGEESPSPELIDLYQKFGFKVFSFPAPSHVVTATFPYTTILSIWLATRRVHPALDTYIKERKLCAYPRLEIYQEDQIHFMCPLARQGDFYVPEMKETEWKWRGLVEAIDTQVDGT

SEQ ID NO: 88210 - protein, 129 aa, Homo sapiens
MANSGLQLLGFSMALLGWVGLVACTAIPQWQMSSYAGDNIITAQAMYKGLWMDCVTQSTGMMSCKMYDSVLALSAALQATRALMVVSLVLGFLAMFVATMGMKCTRCGGDDKVKKARIAMGGGIIFIVA

SEQ ID NO: 88211 - protein, 170 aa, Homo sapiens
  MOD_RES (1)..(1): Any amino acid
XAGFETGGQTREHGLLVRSLGVTQLAVAVNKMDQVNWQQERFQEITGKLGHFLKQAGFKESDVGFIPTSGLSGENLITRSQSSELTKWYKGLCLLEQIDSFKPPQRSIDKPFRLCVSDVFKDQGSGFCITGKIEAGYIQTGDRLLAMPPNETCTVKGIYLQDAFAKQALS

SEQ ID NO: 88212 - protein, 136 aa, Homo sapiens
  MOD_RES (1)..(1): Any amino acid
XRVDGGSCHRRGAPTGSTSNQIRGESSVAQQPLHTAQKTRKGEHKWAAVVGLEIHAQISSNSKLFSGSQVRFSAPPNSLVSFFDASLPGTLPVLNRRCVEAAVMTGLALNCHINKKSLFDRKHYFYADLPGRSRVR

SEQ ID NO: 88213 - protein, 316 aa, Homo sapiens
  MOD_RES (1)..(1): Any amino acid
XGHLTKAVEETKLSKENQTRAKESDFSDTLSPSKEKSSDDTTDAQMDEQDLNEPLAKVSLLKALLEEERKAYRNQVEESTKQIQVLQAQLQRLHIDTENLREEKDSEITSTRDELLSARDEILLLHQAAAKVASERDTDIASLQEELKKVRAELERWRKAASEYEKEITSLQNSFQLRCQQCEDQQREEATRLQGELEKLRKEWNALETECHSLKRENVLLSSELQRQEKELHNSQKQSLELTSDLSILQMSRKELENQVGSLKEQHLRDSADLKTLLSKAENQAKDVQKEVKRKDIMSPIMVGLKAKSKSDIHAS

SEQ ID NO: 88214 - protein, 257 aa, Homo sapiens
MPGKHQHFQEPEVGCCGKYFLFGFNIVFWVLGALFLAIGLWAWGEKGVLSNISALTDLGGLDPVWLFVVVGGVMSVLGFAGCIGALRENTFLLKFLATGILAFVFKDWIRDQLNLFINNNVKAYRDDIDLQNLIDFAQEYWSCCGARGPNDWNLNIYFNCTDLNPSRERCGVPFSCCVRDPAEDVLNTQCGYDVRLKLELEQQGFIHTKGCVGQFEKWLQDNLIVVAGVFMGIALLQIFGICLAQNLVSDIKAVKAN

SEQ ID NO: 88215 - protein, 187 aa, Homo sapiens
LAPAARAGYSEERCSWRGSGLTQEPGSVGQLALACAEGAVEWLYPAGALRLTLGGPDPRARPGIACLRPVRPFAGAQVFAERAGGALELLLAEGPGPAGGRCVRWGPRERRALFLQATPHQDISRRVAAFRFELREDGRPELPPQAHGLGVDGACRPCSDAELLLAACTSDFGECPRHGGSLEPAFP

SEQ ID NO: 88216 - protein, 150 aa, Homo sapiens
MCAQYCISFADVEKAHINIRDSIHLTPVLTSSILNQLTGRNLFFKCELFQKTGSFKIRGALNAVRSLVPDALERKPKAVVTHSSGNHGQALTYAAKLEGIPAYIVVPQTAPDCKKLAIQAYGASIVYCEPSDESKLKGKLMPNLYPPETI

SEQ ID NO: 88217 - protein, 272 aa, Homo sapiens
  MOD_RES (1)..(1): Any amino acid
XVYPFPTFQPAFQLKKDQVVLLNTSYSLVACAVSVHSAGDRSFCQILYDHSTCPLAPASPPEPQSPELPPALPSFCPEAAPARSSGSPEPSPAIAKAKEFVADIFRRAKEAKGGVPEEARPALCPGPSGSRCRAHSEPLALCGETAPRDSPPASEAPASEPGYVNYTKLYYVLESGEGTEPEDELEDDKISLPFVVTDLRGRNLRPMRERTAVQVGVGSGRAKDSPGELPGGSWHRPLRLPTHPQGQYLTVEQLTLDFEYVINEVIRHDATW

SEQ ID NO: 88218 - protein, 226 aa, Homo sapiens
MPQHGPWQTRMRKISNHGSLRVAKVAYPLGLCVGVFIYVAYIKWHRATATQAFFSITRAAPGARWGQQAHSPLGTAADGHEVFYGIMFDAGSTGTRVHVFQFTRPPRETPTLTHETFKALKPGLSAYADDVEKVKKVFKASPFLVGDDCVSIMNGTDEGVSAWITINFLTGSLKTPGGSSVGMLDLGGGSTQIAFLPRVEGTLQASPPGYLTALRMFNRTYKLYSY

SEQ ID NO: 88219 - protein, 104 aa, Homo sapiens
MLKNIELFDKLSLRFNGRVLFIKDVIGDEICCWSFYGQGRKIAEVCCTSIVYATEKKQTKVEFPEARIYEETLNILLYEAQDGRGPDNALLEATGGAAGRSHHL

SEQ ID NO: 88220 - protein, 17 aa, Homo sapiens
YWYFDLWGRGTLVTVSS

SEQ ID NO: 88221 - protein, 159 aa, Homo sapiens
MSTFGYRRGLSKYESIDEDELLASLSAEELKELERELEDIEPDRNLPVGLRQKSLTEKTPTGTFSREALMAYWEKESQKLLEKERLGECGKVKKQPNSILKEIKNSLRSVQEKKMEDSSRPSTPQRSAHENLMEAIRGSSIKQLKRVSNQRTDIGAQIK

SEQ ID NO: 88222 - protein, 28 aa, Homo sapiens
MLSALARPASAALRRSFSTSAQRSIALT

SEQ ID NO: 88223 - protein, 208 aa, Homo sapiens
  MOD_RES (1)..(1): Any amino acid
XEEMKKIRQVIRKYNYVAMDTEFPGVVARPIGEFRSNADYQYQLLRCNVDLLKIIQLGLTFMNEQGEYPPGTSTWQFNFKFNLTEDMYAQDSIELLTTSGIQFKKHEEEGIETQYFAELLMTSGVVLCEGVKWLSFHSGYDFGYLIKILTNSNLPEEELDFFEILRLFFPVIYDVKYLMKSCKNLKVRLRMALSTAAHCSDQVTVMRA

SEQ ID NO: 88224 - protein, 69 aa, Homo sapiens
MPPNLTGYYRFVSQKNMEDYLQALSSPHRHQLGCAEDRAAAEAGQGDRTPGQPHDGEDAQHLPKLHCAV

SEQ ID NO: 88225 - protein, 145 aa, Homo sapiens
MRPEGSLTYWVPERLRQGFCGVGRAAQALVELEPVNAQARKAFSRQREKMERRRKPHLDRRGAVIQSVPGFWANVIANHPQMSALITDEDEDMLSYMVSLEVEEEKHPVHLCKIMLFFRSNPYFQNKVITKEYLVNITEYRASHS

SEQ ID NO: 88226 - protein, 116 aa, Homo sapiens
MAAAGAAATHLEVARGKRAALFFAAVAIVLGLPLWWKTTETYRASLPYSQISGLNALQVRLLCGRVGGQPPRQGGDSVTALMLLPVAPPHGACHCRVYAGVSAPGRPGEAALHRCA

SEQ ID NO: 88227 - protein, 305 aa, Homo sapiens
MPLLTLYLLLFWLSGYSIVTQITGPTTVNGLERGSLTVQCVYRSGWETYLKWWCRGAIWRDCKILVKTSGSEQEVKRDRVSIKDNQKNRTFTVTMEDLMKTDADTYWCGIEKTGNDLGVTVQVTIDPASTPAPTTPTSTTFTAPVTQEETSSSPTLTGHHLDNRHKLLKLSVLLPLIFTILLLLLVAASLLAWRMMKYQQKAAGMSPEQVLQPLEGDLCYADLTLQLAGTSPQKATTKLSSAQVDQVEVEYVTMASLPKEDISYASLTLGAEDQEPTYCNMGHLSSHLPGRGPEEPTEYSTISRP

SEQ ID NO: 88228 - protein, 619 aa, Homo sapiens
MGTALVYHEDMTATRLLWDDPECEIERPERLTAALDRLRQRGLEQRCLRLSAREASEEELGLVHSPEYVSLVRETQVLGKEELQALSGQFDAIYFHPSTFHCARLAAGAGLQLVDAVLTGAVQNGLALVRPPGHHGQRAAANGFCVFNNVAIAAAHAKQKHGLHRILVVDWDVHHGQGIQYLFEDDPSVLYFSWHRYEHGRFWPFLRESDADAVGRGQGLGFTVNLPWNQVGMGNADYVAAFLHLLLPLAFEGGYHLESLAESVCMTVQTLLGDPAPPLSGPMAPCQSALESIQSARAAQAPHWKSLQQQDVTAVPMSPSSHSPEGRPPPLLPGGPVCKAAASAPSSLLDQPCLCPAPSVRTAVALTTPDITLVLPPDVIQQEASALREETEAWARPHESLAREEALTALGKLLYLLDGMLDGQVNSGIAATPASAAAATLDVAVRRGLSHGAQRLLCVALGQLDRPPDLAHDGRSLWLNIRGKEAAALSMFHVSTPLPVMTGGFLSCILGLVLPLAYGFQPDLVLVALGPGHGLQGPHAALLAAMLRGLAGGRVLALLEENSTPQLAGILARVLNGEAPPSLGPSSVASPEDVQALMYLRGQLEPQWKMLQCHPHLVA

SEQ ID NO: 88229 - protein, 1566 aa, Homo sapiens
MEKKLLIKSKELQDSQDKCHKMEQEMTRLHRRVSEVEAVLSQKEVELKASETQRSLLEQDLATYITECSSLKRSLEQARMEVSQEDDKALQLLHDIREQSRKLQEIKEQEYQAQVEEMRLMMNQLEEDLVSARRRSDLYESELRESRLAAEEFKRKATECQHKLLKAKDQGKPEVGEYAKLEKINAEQQLKIQELQEKLEKAVKASTEATELLQNIRQAKERAERELEKLQNREDSSEGIRKKLVEAEELEEKHREAQVSAQHLEVHLKQKEQHYEEKIKVLDNQIKKDLADKETLENMMQRHEEEAHEKGKILSEQKAMINAMDSKIRSLEQRIVELSEANKLAANSSLFTQRNMKAQEEMISELRQQKFYLETQAGKLEAQNRKLEEQLEKISHQDHSDKNRLLELETRLREVSLEHEEQKLELKRQLTELQLSLQERESQLTALQAARAALESQLRQAKTELEETTAEAEEEIQALTAHRDEIQRKFDALRNSCTVITDLEEQLNQLTEDNAELNNQNFYLSKQLDEASGANDEIVQLRSEVDHLRREITEREMQLTSQKQTMEALKTTCTMLEEQVMDLEALNDELLEKERQWEAWRSVLGDEKSQFECRVRELQRMLDTEKQSRARADQRITESRQVVELAVKEHKAEILALQQALKEQKLKAESLSDKLNDLEKKHAMLEMNARSLQQKLETERELKQRLLEEQAKLQQQMDLQKNHIFRLTQGLQEALDRADLLKTERSDLEYQLENIQVLYSHEKVKMEGTISQQTKLIDFLQAKMDQPAKKKKVPLQYNELKLALEKEKARCAELEEALQKTRIELRSAREEAAHRKATDHPHPSTPATARQQIAMSAIVRSPEHQPSAMSLLAPPSSRRKESSTPEEFSRRLKERMHHNIPHRFNVGLNMRATKCAVCLDTVHFGRQASKCLECQVMCHPKCSTCLPATCGLPAEYATHFTEAFCRDKMNSPGLQTKEPSSSLHLEGWMKVPRNNKRGQQGWDRKYIVLEGSKVLIYDNEAREAGQRPVEEFELCLPDGDVSIHGAVGASELANTAKADVPYILKMESHPHTTCWPGRTLYLLAPSFPDKQRWVTALESVVAGGRVSREKAEADAKLLGNSLLKLEGDDRLDMNCTLPFSDQVVLVGTEEGLYALNVLKNSLTHVPGIGAVFQIYIIKDLEKLLMIAGEERALCLVDVKKVKQSLAQSHLPAQPDISPNIFEAVKGCHLFGAGKIENGLCICAAMPSKVVILRYNENLSKYCIRKEIETSEPCSCIHFTNYSILIGTNKFYEIDMKQYTLEEFLDKNDHSLAPAVFAASSNSFPVSIVQVNSAGQREEYLLCFHEFGVFVDSYGRRSRTDDLKWSRLPLAFAYREPYLFVTHFNSLEVIEIQARSSAGTPARAYLDIPNPRYLGPAISSGAIYLASSYQDKLRVICCKGNLVKESGTEHHRGPSTSRSSPNKRGPPTYNEHITKRVASSPAPPEGPSHPREPSTPHRYREGRTELRRDKSPGRPLEREKSPGRMLSTRRERSPGRLFEDSSRGRLPAGAVRTPLSQVNKVWDQSSV

SEQ ID NO: 88230 - protein, 363 aa, Homo sapiens
MDSLQDTVALDHGGCCPALSRLVPRGFGTEMWTLFALSGPLFLFQVLTFMIYIVSTVFCGHLGKVELASVTLAVAFVNVCGVSVGVGLSSACDTLMSQSFGSPNKKHVGVILQRGALVLLLCCLPCWALFLNTQHILLLFRQDPDVSRLTQDYVMIFIPGLPVIFLYNLLAKYLQNQKITWPQVLSGVVGNCVNGVANYALVSVLNLGVRGSAYANIISQFAQTVFLLLYIVLKKLHLETWAGWSSQCLQDWGPFFSLAVPSMLMICVEWWAYEIGSFLMGLLSVVDLSAQAVIYEVATVTYMIPLGLSIGVCVRVGMALGAADTVQAKRSAVSGVLSIVGISLVLGTLISILKNQLGHIFTN

SEQ ID NO: 88231 - protein, 164 aa, Homo sapiens
MTSSSPAGLEGSDLSSINTMMSAVMSVGKVTENGGSPQGIKSPSKPPGPNRIGRRNQETKEEKSSYNCPLCEKICTTQHQLTMHIRQHNTDTGGADHSCSICGKSLSSASSLDRHMLVHSGERPYKCTVCGQSFTTNGNMHRHMKIHEKDPNSATATAPPSPLK

SEQ ID NO: 88232 - protein, 143 aa, Homo sapiens
MESIAEFSLVSGITWVLVYRTDKYKRLKAEVEKQSKKLEKKKETITESAGRQQKKKIERQEEKLKNNNRDLSMVRMKSMFAIGFCFTALMGMFNSIFDGRVVAKLPFTPLSYIQGLSHRNLLGDDTTDCSFIFLYILCTMSIR

SEQ ID NO: 88233 - protein, 61 aa, Homo sapiens
MRSSCVLLTALVALAAYYVYIPLPGSVSDPWKLMLLDATFRGAQQVKSGIMMSCVQQWLRN

SEQ ID NO: 88234 - protein, 324 aa, Homo sapiens
MAPAAASPPEVIRAAQKDEYYRGGLRSAAGGALHSLAGARKWLEWRKEVELLSDVAYFGLTTLAGYQTLGEEYVSIIQVDPSRIHVPSSLRRGVLVTLHAVLPYLLDKALLPLEQELQADPDSGRPLQGSLGPGGRGCSGARRWMRHHTATLTEQQRRALLRAVFVLRQGLACLQRLHVAWFYIHGVFYHLAKRLTGITYLRVRSLPGEDLRARVSYRLLGVISLLHLVLSMGLQLYGFRQRQRARKEWRLHRGLSHRRASLEERAVSRNPLCTLCLEERRHPTATPCGHLFCWECITAWCSSKCPLCREKFPPQKLIYLRHYR

SEQ ID NO: 88235 - protein, 71 aa, Homo sapiens
MTEQMTLRGTLKGHNGWVTQIATTPQFPDMILSASRDKTIIMWKLTRDETNYGIPQRAPPRGDLWAIPRMC

SEQ ID NO: 88236 - protein, 61 aa, Homo sapiens
  MOD_RES (1)..(1): Any amino acid
XIRPETHSPGMFSWFPILFPIKQPITVREGQTICVRFWRCSNSKKGSSHQSMKTSGQGVRN

SEQ ID NO: 88237 - protein, 211 aa, Homo sapiens
MAQTQGTRRKVCYYYDGDVGNYYYGQGHPMKPHRIRMTHNLLLNYGLYRKMEIYRPHKANAEEMTKYHSDDYIKFLRSIRPDNMSEYSKQMQRSSAVKLNKQQTDIAVNWAGGLHHAKKSEASGFCYVNDIVLAILELLKYHQRVLYIDIDIHHGDGVEEAFYTTDRVMTVSFHKYGEYFPGTGDLRDIGAGKGKYYAVNYPLRDGIDDES

SEQ ID NO: 88238 - protein, 170 aa, Homo sapiens
MAEKTQKSVKIAPGAVVCVESEIRGDVTIGPRTVIHPKARIIAEAGPIVIGEGNLIEEQALIINAYPDNITPDTEDPEPKPMIIGTNNVFEVGCYSQAMKMGDNNVIESKAYVGRNVILTSGCIIGACCNLNTFEVIPENTVIYGADCLRRVQTERPQVLEPLFKKSSIC

SEQ ID NO: 88239 - protein, 259 aa, Homo sapiens
MSKISEAVKRARAAFSSGRTRPLQFRIQQLEALQRLIQEQEQELNEWNAYYEEVVYVLEEIEYMIQKLPEWAADEPVEKTPQTQQDELYIHSEPLGVVLVIGTWNYPFNLTIQPMVGAIAAGNSVVLKPSELSENMASLLATIIPQYLDKDLYPVINGGVPETTELLKERFDHILYTGSTGVGKIIMTAAAKHLTPVTLELGGKSPCYVDKNCDLDVACRRIAWGKFMNSGQTCVAPDYILCDPSIQNQIVEKLKKSLK

SEQ ID NO: 88240 - protein, 92 aa, Homo sapiens
MNFTPTHTPVCRKRTVVSKRGVAVSGPTKRRGMADSLESTPLPSPEDRLAKLHPSKELLEYYQKKMAECEAENEDLLKKLELYKEACEGQHK

SEQ ID NO: 88241 - protein, 136 aa, Homo sapiens
AAAAMVFGGVVPYVPQYRDIRRTQNADGFSTYVCLVLLVANILRILFCPYYHFAKPAFSRSHSVECQHSGFGRFGRRFESPLLWQSAIMILTMLLMLKLCTEVRVANELNARRRSFTDFDPHHFWQWSSFSDYVQC

SEQ ID NO: 88242 - protein, 207 aa, Homo sapiens
MGLCKCPKRKVTNLFCFEHRVNVCEHCLVANHAKCIVQSYLQWLQDSDYNPNCRLCNIPLASRETTRLVCYDLFHWACLNERAAQLPRNTAPAGYQCPSCNGPIFPPTNLAGPVASALREKLATVNWARAGLGLPLIDEVVSPEPEPLNTSDFSDWSSFNASSTPGPEEVDSASAAPAFYSQAPRPPASPGRPEQHTVIHMGNPEPL

SEQ ID NO: 88243 - protein, 255 aa, Homo sapiens
MAEQDVENDLLDYDEEEEPQAPQESTPAPPKKDIKGSYVSIHSSGFRDFLLKPELLRAIVDCGFEHPSEGSRPSRSASPAVQHECIPQAILGMDVLCQAKSGMGKTAVFVLATLQQIEPVNGQVTVLVMCHTRELAFQISKEYERFSKYMPSVKVSVFFGGLSIKKDEEVLKKNCPHVVVGTPGRILALVRNRSFSLKNVKHFVLDECDKMLEQLDMRRDVQEIFRLTPHEKQCMMFSATLSKDIRPVCRKFMQD

SEQ ID NO: 88244 - protein, 212 aa, Homo sapiens
MTNQYGILFKQEQVDAWTLAFSPDSQYLATGTHVGKVNIFGVESGKKEYSLDTRGKFILSIAYSPDGKYLASGAIDGIINIFDIATGKLLHTLEGHAMPIRSLTFSPDSQLLVTASDDGYIKIYDVQHANLAGTLSGHASWVLNVAFCPDDTHFVSSSSDKSVKVWDVGTRTCVHTFFDHQDQVWGVKYNGNGSKIVSVGDDQEIHIYDCPI

SEQ ID NO: 88245 - protein, 39 aa, Homo sapiens
LHPQTATTKVPEIRDVTRIERIEMEFPRVSQDGLDLLTS

SEQ ID NO: 88246 - protein, 177 aa, Homo sapiens
MDYSYDEDLDELCPVCGDKVSGYHYGLLTCESCKGFFKRTVQNNKHYTCTESQSCKIDKTQRKRCPFCRFQKCLTVGMRLEAVRADRMRGGRNKFGPMYKRDRALKQQKKAQIRANGFKLETGPPMGVPPPPPPAPDYVLPPSLHGPEPKGLAAGPPAGPLGDFGAPALPMAVPGAH

SEQ ID NO: 88247 - protein, 588 aa, Homo sapiens
MYDFAAEPGNNELTVNEGEIITITNPDVGGGWLEGRNIKGERGLVPTDYVEILPSDGKDQFSCGNSVADQAFLDSLSASTAQASSSAASNNHQVGSGNDPWSAWSASKSGNWESSEGWGAQPEGAGAQRNTNTPNNWDTAFGHPQAYQGPATGDDDDWDEDWDGPKSSSYFKDSESADAGGAQRGNSRASSSSMKIPLNKFPGFAKPGTEQYLLAKQLAKPKEKIPIIVGDYGPMWVYPTSTFDCVVADPRKGSKMYGLKSYIEYQLTPTNTNRSVNHRYKHFDWLYERLLVKFGSAIPIPSLPDKQVTGRFEEEFIKMRMERLQAWMTRMCRHPVISESEVFQQFLNFRDEKEWKTGKRKAERDELAGVMIFSTMEPEAPDLDLVEIEQKCEAVGKFTKAMDDGVKELLTVGQEHWKRCTGPLPKEYQKIGKALQSLATVFSSSGYQGETDLNDAITEAGKTYEEIASLVAEQPKKDLHFLMECNHEYKGFLGCFPDIIGTHKGAIEKVKESDKLVATSKITLQDKQNMVKRVSIMSYALQAEMNHFHSNRIYDYNSVIRLYLEQQVQFYETIAEKLRQALSRFPVM

SEQ ID NO: 88248 - protein, 306 aa, Homo sapiens
MAKRSSLYIRIVEGKNLPAKDMTATVWKTLCPFWGEEYQVHLPPTFHAVAFYVMDEDALSRDDVIGKVCLTRDTIASHPKGFSGWAHLTEVDPDEEVQGEIHLRLEVWPGARACRLRCSVLEARDLAPKDRNGTSDPFVRVRYKGRTRETSIVKKSCYPRWNETFEFELQEGAMEALCVEAWDWDLVSRNDFLGKVVIDVQRLRVVQQEEGWFRLQPDQSKSRRHDEGNLGSLQLEVRLRDETVLPSSYYQPLVHLLCHEVKLGMQGPGQLIPLIEETTSTECRQDVATNLLKLFLGQGLAKDFLD

SEQ ID NO: 88249 - protein, 190 aa, Homo sapiens
  MOD_RES (1)..(1): Any amino acid
XSRQHVSRGTQQPESPKVAGAEVAVSWPEVEEALVLLQLWANLDVLLVASWQELSRHVCAVTKALAQYPLKQYRESQAFSFCTAGRWAAGEPVARDGAGLQAAWRRQIRQFSRVSPAVADAVVTAFPSPRLLQQALEACSTERERMGLLADLPVPPSEGGRPRRVGPDLSRRICLFLTTANPDLLLDLGS

SEQ ID NO: 88250 - protein, 636 aa, Homo sapiens
MNTGRDSQSPDSAKGFRSVRPNLQDKRSPTQSQITVNGNSGGAVSPMSYYQRPFSPSAYSLPASLNSSIVMQHGTSLDSTDTYPQHAQSLDGTTSSSIPLYRSSEEEKRVTVIKAPHYPGIGPVDESGIPTAIRTTVDRPKDWYKTMFKQIHMVHKPDDDTDMYNTPYTYNAGLYNPPYSAQSHPAAKTQTYRPLSKSHSDNSPNAFKDASSPVPPPHVPPPVPPLRPRDRSSTEKHDWDPPDRKVDTRKFRSEPRSIFEYEPGKSSILQHERPPPLPTTPTPVPREPGRKPLSSSRLGEVTGSPSPPPRSGAPTPSSRAPALSPTRPPKKPLDYVQDHSSGVFNEASLYQSSIDRSLERPMSSASMASDFRKRRKSEPAVGPPRGLGDQSASRTSPGRVDLPGSSTTLTKSFTSSSPSSPSRAKDRESPRSYSSTLTDMGRSAPRERRGTPEKEKLPAKAVYDFKAQTSKELSFKKGDTVYILRKIDQNWYEGEHHGRVGIFPISYVEKLTPPEKAQPARPPPPAQPGEIGEAIAKYNFNADTNVELSLRKGDRVILLKRVDQNWYEGKIPGTNRQGIFPVSYVEVVKKNTKGAEDYPDPPIPHSYSSDRIHSLSSNKPQRPVFTHENIQGGGEP

SEQ ID NO: 88251 - protein, 380 aa, Homo sapiens
MYVNSIGPVNAINMEYTIDIFFAQTWYDRRLKFNSTIKVLRLNSNMVGKIWIPDTFFRNSKKADAHWITTPNRMLRIWNDGRVLYTLRLTIDAECQLQLHNFPMDEHSCPLEFSSYGYPREEIVYQWKRSSVEVGDTRSWRLYQFSFVGLRNTTEVVKTTSGDYVVMSVYFDLSRRMGYFTIQTYIPCTLIVVLSWVSFWINKDAVPARTSLGITTVLTMTTLSTIARKSLPKVSYVTAMDLFVSVCFIFVFSALVEYGTLHYFVSNRKPSKDKDKKKKNPLLRMFSFKAPTIDIRPRSATIQMNNATHLQERDEEYGYECLDGKDCASFFCCFEDCRTGAWRHGRIHIRIAKMDSYARIFFPTAFCLFNLVYWVSYLYL

SEQ ID NO: 88252 - protein, 138 aa, Homo sapiens
MESEQLFHRGYYRNSYNSITSASSDEELLDGAGVIMDFQTSEDDNLLDGDTAVGTHYTMTNGGSINSSTHLLDLLDEPIPGVGTYDDFHTIDWVREKCKDRERHRRINSKKKESAWEMTKSLYDAWSGWLVVTLTGLA

SEQ ID NO: 88253 - protein, 479 aa, Homo sapiens
MAPWLQLLSLLGLLPGAVAAPAQPRAASFQAWGPPSPELLAPTRFALEMFNRGRAAGTRAVLGLVRGRVRRAGQGSLYSLEATLEEPPCNDPMVCRLPVSKKTLLCSFQVLDELGRHVLLRKDCGPVDTKVPGAGEPKSAFTQGSAMISSLSQNHPDNRNETFSSVISLLNEDPLSQDLPVKMASIFKNFVITYNRTYESKEEARWRLSVFVNNMVRAQKIQALDRGTAQYGVTKFSDLTEEEFRTIYLNTLLRKEPGNKMKQAKSVGDLAPPEWDWRSKGAVTKVKDQGMCGSCWAFSVTGNVEGQWFLNQGTLLSLSEQELLDCDKMDKACMGGLPSNAYSAIKNLGGLETEDDYSYQGHMQSCNFSAEKAKVYINDSVELSQNEQKLAAWLAKRGPISVAINAFGMQFYRHGISRPLRPLCSPWLIDHAVLLVGYGNRSDVPFWAIKNSWGTDWGEKLPLSPRVTTTCIVGPGPVA

SEQ ID NO: 88254 - protein, 114 aa, Homo sapiens
MTMESREMDCYLRRLKQELMSMKEVGDGLQDQMNCMMGALQELKLLQVQTALEQLEISGGGPVPGSPEGPRTQCEHPCWEGGRGPARPTVCSPSSQPSLEQPEPTSGAFPIRCS

SEQ ID NO: 88255 - protein, 140 aa, Homo sapiens
MLRKLWQWFYEETESSDDVEVLTLKKFKGDLAYRRQEYQKALQEYSSISEKLSSTNFAMKRDVQEGQARCLAHLGRHMEALEIAANLENKATNTDHLTTVLYLQLAICSSLQNLEKTIFCLQKLISLHPFNPWNWGKLAE

SEQ ID NO: 88256 - protein, 961 aa, Homo sapiens
MRYRLAWLLHPALPSTFRSVLGARLPPPERLCGFQKKTYSKMNNPAIKRIGNHITKSPEDKREYRGLELANGIKVLLISDPTTDKSSAALDVHIGSLSDPPNIAGLSHFCEHMLFLGTKKYPKENEYSQFLSEHAGSSNAFTSGEHTNYYFDVSHEHLEGALDRFAQFFLCPLFDESCKDREVNAVDSEHEKNVMNDAWRLFQLEKATGNPKHPFSKFGTGNKYTLETRPNQEGIDVRQELLKFHSAYYSSNLMAVCVLGRESLDDLTNLVVKLFSEVENKNVPLPEFPEHPFQEEHLKQLYKIVPIKDIRNLYVTFPIPDLQKYYKSNPGHYLGHLIGHEGPGSLLSELKSKGWVNTLVGGQKEGARGFMFFIINVDLTEEGLLHVEDIILHMFQYIQKLRAEGPQEWVFQECKDLNAVAFRFKDKERPRGYTSKIAGILHYYPLEEVLTAEYLLEEFRPDLIEMVLDKLRPENVRVAIVSKSFEGKTDRTEEWYGTQYKQEAIPDEVIKKWQNADLNGKFKLPTKNEFIPTNFEILPLEKEATPYPALIKDTAMSKLWFKQDDKFFLPKACLNFEFFSPFAYVDPLHCNMAYLYLELLKDSLNEYAYAAELAGLSYDLQNTIYGMYLSVKGYNDKQPILLKKIIEKMATFEIDEKRFEIIKEAYMRSLNNFRAEQPHQHAMYYLRLLMTEVAWTKDELKEALDDVTLPRLKAFIPQLLSRLHIEALLHGNITKQAALGIMQMVEDTLIEHAHTKPLLPSQLVRYREVQLPDRGWFVYQQRNEVHNNCGIEIYYQTDMQSTSENMFLELFCQIISEPCFNTLRTKEQLGYIVFSGPRRANGIQGLRFIIQSEKPPHYLESRVEAFLITMEKSIEDMTEEAFQKHIQALAIRRLDKPKKLSAECAKYWGEIISQQYNFDRDGVSLLLPRLECNGTISGSPQPPPPGFKQFCLSLPSSWDYR

SEQ ID NO: 88257 - protein, 53 aa, Homo sapiens
RDSLFRYFELLEKLQYNLEERKKLQEFAEPQITPLVSSSPSPCLPVPFCITGS

SEQ ID NO: 88258 - protein, 71 aa, Homo sapiens
  MOD_RES (1)..(1): Any amino acid
XDIYSRLLRERIVCVMGPIDDSVASLVIAQLLFLQSESNKKPIHMYINSPGPSHRHCHPGRGDHEAQEAAL

SEQ ID NO: 88259 - protein, 214 aa, Homo sapiens
MTIEDLPDFPLEGNPLFGRYPFIFSASDTPVIFSISAAPMPSDCEFSFFDPNDASCQEILFDPKTSVSELFAILRQWVPQVQQNIDIIGNEILKRGCNVNDRDGLTDMTLLHYTCKSGAHGIGDVETAVKFATQLIDLGADISLRSRWTNMNALHYAAYFDVPELIRVILKTSKPKDVDATCSDFNFGTALHIAAYNLCAGAVKCLLEQGANPA

SEQ ID NO: 88260 - protein, 556 aa, Homo sapiens
  MOD_RES (1)..(1): Any amino acid
XFLLVFSCLVLSVLSTIQEHQELANECLLILEFVMIVVFGLEYIVRVWSAGCCCRYRGWQGRFRFARKPFCVIDFIVFVASVAVIAAGTQGNIFATSALRSMRFLQILRMVRMDRRGGTWKLLGSVVYAHSKELITAWYIGFLVLIFASFLVYLAEKDANSDFSSYADSLWWGTITLTTIGYGDKTPHTWLGRVLAAGFALLGISFFALPAGILGSGFALKVQEQHRQKHFEKRRMPAANLIQAAWRLYSTDMSRAYLTATWYYYDSILPSFSQMFNNKRSFFRIHASWRPSSRMGIKDRIRMGSSQRRTGPSKQHLAPPTMPTSPSSEQVGEATSPTKVQKSWSFNDRTRFRASLRLKPRTSAEDAPSEEVAEEKSYQCELTVDDIMPAVKTVIRSIRILKFLVAKRKFKETLRPYDVKDVIEQYSAGHLDMLGRIKSLQTRVDQIVGRGPGDRKAREKGDKGPSDAEVVDEISMMGRVVKVEKQVQSIEHKLDLLLGFYSRCLRSGTSASLGAVQVPLFDPDITSDYHSPVDHEDISVSAQTLSISRSVSTNMD

SEQ ID NO: 88261 - protein, 27 aa, Homo sapiens
MAEKRPLRTLGPVMYGKLPRLETDSGL

SEQ ID NO: 88262 - protein, 274 aa, Homo sapiens
MRALWVLGLCCVLLTFGSVRADDEVDVDGTVEEDLGKSREGSRTDDEVVQREEEAIQLDGLNASQIRELREKSEKFAFQAEVNRMMKLIINSLYKNKEIFLRELISNASDALDKIRLISLTDENALSGNEELTVKIKCDKEKNLLHVTDTGVGMTREELVKNLGTIAKSGTSEFLNKMTEAQEDGQSTSELIGQFGVGFYSAFLVADKVIVTSKHNNDTQHIWESDSNEFSVIADPRGNTLGRGTTITLKLLRSPWRKKKQPKKRKKNLMMKLQ

SEQ ID NO: 88263 - protein, 131 aa, Homo sapiens
MATDWLGSIVSINCGDSLGVYQGRVSAVDQVSQTISLTRPFHNGVKCLVPEVTFRAGDITELKILEIPGPGDNQHFGDLHQTELGPSGAGCQVGINQNGTGKFVKKPASSSSAPQNIPKRTDVKSQDVAVS

SEQ ID NO: 88264 - protein, 201 aa, Homo sapiens
  MOD_RES (1)..(1): Any amino acid
XAVESGVISTLIPQDPPEQELILVKVEDNFSWDEKFKQNGSTQSCQELFRQQFRKFCYQETPGPREALSRLQELCYQWLMPELHTKEQILELLVLEQFLSILPEELQIWVQQHNPESGEEAVTLLEDLEREFDDPGQQVGTEKSDVGKGIYSLEHVMVPASPQGPAVPWKDLTCLRASQESTDIHLQPLKTQLKSWKPCLS

SEQ ID NO: 88265 - protein, 110 aa, Homo sapiens
SALPVTAYDKNGFRILFHFAKECPPGRPDVLVVVVSMLNTAPLPVKSIVLQAAVPKSMKVKLQPPSGTELSPFSPIQPPAAITQVMLLANPLKLLLPSPGRWPRKVPGPE

SEQ ID NO: 88266 - protein, 137 aa, Homo sapiens
MSLLRSLRVFLVARTGSYPAGSLLRQSPQPRHTFYAGPRLSASASSKELLMKLRRKTGYSFVNCKKALETCGGDLKQTESCSVAQAGVQWHDVGSLQPPPPGFKRFSCLSLLSSWDYRRAPRHPAILFFIFYFFLYF

SEQ ID NO: 88267 - protein, 623 aa, Homo sapiens
MSDEVFSTTLAYTKSPKVTKRTTFQDELIRAITARSARQRSSEYSDDFDSDEIVSLGDFSDTSADENSVNKKMNDFHISDDEEKNPSKLLFLKTNKSNGNITKDEPVCAIKNEEEMAPDGCEDIVVKSFSESQNKDEEFEKDKIKMKPKPRILSIKSTSSAENNSLDTDDHFKPSPRPRSMLKKKSHMEEKDGLEDKETALSEELELHSAPSSLPTPNGIQLEAEKKAFSENLDPEDSCLTSLASSSLKQILGDSFSPGSEGNASGKADHVTTAVEKSKESQVTADDLEEEKAKAELIMDDDRTVDPLLSKSQSILISTSATASSKKTIEDRNIKNKKSTNNRASSASARLMTSEFLKKSSSKRRTPSTTTSSHYLGTLKVLDQKPSQKQSIEPDRADNIRAAVYQEWLEKKNVYLHEMHRIKRIESENLRIQNEQKKAAKREEALASFEAWKAMKEKEAKKIAAKKRLEEKNKKKTEEENAARKGEALQAFEKWKEKKMEYLKEKNRKEREYERAKKQKEEETVAEKKKDNLTAVEKWNEKKEAFFKQKEKEKINEKRKEELKRAEKKDKDKQAINEYEKWLENKEKQERIERKQKKRHSFLESEALPPWSPPSRTVFAKVF

SEQ ID NO: 88268 - protein, 560 aa, Homo sapiens
MAACEGRRSGALGSSQSDFLTPPVGGAPWAVATTVVMYPPPPPPPHRDFISVTLSFGENYDNSKSWRRRSCWRKWKQLSRLQRNMILFLLAFLLFCGLLFYINLADHWKAPQKADTDPENLPEISSQKTQRHIQRGPPHLQIRPPSQDLKDGTQEEATKRQEAPVDPRPEGDPQRTVISWRGAVIEPEQGTELPSRRAEVPTKPPLPPARTQGTPVHLNYRQKGVIDVFLHAWKGYRKFAWGHDELKPVSRSFSEWFGLGLTLIDALDTMWILGLRKEFEEARKWVSKKLHFEKDVDVNLFESTIRILGGLLSAYHLSGDSLFLRKAEDFGNRLMPAFRTPSKIPYSDVNIGTGVAHPPRWTSDSTVAEVTSIQLEFRELSRLTGDKKFQEAVEKVTQHIHGLSGKKDGLVPMFINTHSGLFTHLGVFTLGARADSYYEYLLKQWIQGGKQETQLLEDYVEAIEGVRTHLLRHSEPSKLTFVGELAHGRFSAKMDHLVCFLPGTLALGVYHGLPASHMELAQELMETCYQMNRQMETGLSPEIVHFNLYPQPGRRDVEVK

SEQ ID NO: 88269 - protein, 292 aa, Homo sapiens
MEDVEARFAHLLQPIRDLTKNWEVDVAAQLGEYLEEVEYLYSLVYQALDFISGKRRAKQLSSVQEDRANGVASSGVPQEAENEFLSLDDFPDSRTNVDLKNDQTPSEVLIIPLLPMALVAPDEMEKNNNPLYSRQGEVLASRKDFRMNTCVPHPRGAFMLEPEGMSPMEPAGVSPMPGTQKDTGRTEEQPMEVSVCRSPVPALGFSQEPGPSPEGPMPLGGGEDEDAEEAVELPEASAPKAALEPKESRSPQQSAALPRRYMLREREGAPEPASCVKETPDPWQSLDPFDSL

SEQ ID NO: 88270 - protein, 51 aa, Homo sapiens
MNTEAEQQLLHHARNGNAEEVRQLLETMARNEVIADINCKGRSWCRSECVE

SEQ ID NO: 88271 - protein, 864 aa, Homo sapiens
MLETYSSLVSLGHYITKPEMIFKLEQGAEPWIVEETPNLRLSAVQIIDDLIERSHESHDRFFWQIVITNSNTSTQERVELGKTFNLNSNHVLNLIINNGNSSGMKPGQFNDCQNMLFPIKPGETQSGEKPHVCDITRRSHRHHEHLTQHHKIQTLLQTFQCNEQGKTFNTEAMFFIHKRVHIVQTFGKYNEYEKACNNSAVIVQVITQVGQPTCCRKSDFTKHQQTHTGEKPYECVECEKPSISKSDLMLQCKMPTEEKPYACNWCEKLFSYKSSLIIHQRIHTGEKPYGCNECGKTFRRKSFLTLHERTHTGDKPYKCIECGKTFHCKSLLTLHHRTHSGEKPYQCSECGKTFSQKSYLTIHHRTHTGEKPYACDHCEEAFSHKSRLTVHQRTHTGEKPYECNECGKPFINKSNLRLHQRTHTGEKPYECNECGKTFHRKSFLTIHQWTHTGEKPYECNECGKTFRCKSFLTVHQRTHAGEKPYACNECGKTYSHKSYLTVHHRTHTGEKPYECNECGKSFHCKSFLTIHQRTHAGKKPYECNECEKTFINKLNLGIHKRTHTGERPYECNECGKTFRQKSNLSTHQGTHTGEKPYVCNECGKTFHRKSFLTIHQRTHTGKNRMDVMNVEKLFVRNHTLLYIRELTPGKSPMNVMNVENPFIRRQIFRSIKVFTRGRNPMNVANVEKPCQKSVLTVHHRTHTGEKPYECNECGKTFCHKSNLSTHQGTHSGEKPYECDECRKTFYDKTVLTIHQRTHTGEKPFECKECRKTFSQKSKLFVHHRTHTGEKPFRCNECRKTFSQKSGLSIHQRTHTGEKPYECKECGKTFCQKSHLSRHQQTHIGEKSDVAEAGYVFPQNHSFFP

SEQ ID NO: 88272 - protein, 326 aa, Homo sapiens
ADHYKEKFKECQRLQKQINKLSDQSANNNNVFTKKTGNQQKVNDASVNTDPATSASTVDVKPSPSAAEADFDIVTKGQVCEMTKEIADKTEKYNKCKQLLQDEKAKCNKYADELAKMELKWKEQVKIAENVKLELAEVQDNYKLQLAEKDKEISGLISHLENLSREKELKRSLENPAERKMEDGADGAFYPDEIQRPPVRVPSWGLEDNVVCSQPARNFSRPDGLEDSEDSKEDENVPTAPDPPSQHLRGHGTGFCFDSSFDVHKKCPLCELMFPPNYDQSKFEEHVESHWKVCPMCSEQFPPDYDQQVFERHVQTHFDQNVLNFD

SEQ ID NO: 88273 - protein, 1206 aa, Homo sapiens
MSKSLKKKSHWTSKVHESVIGRNPEGQLGFELKGGAENGQFPYLGEVKPGKVAYESGSKLVSEELLLEVNETPVAGLTIRDVLAVIKHCKDPLRLKCVKQGGIVDKDLRHYLNLRFQKGSVDHELQQIIRDNLYLRTVPCTTRPHKEGEVPGVDYIFITVEDFMELEKSGALLESGTYEDNYYGTPKPPAEPAPLLLNVTDQILPGATPSAEGKRKRNKSVSNMEKASIEPPEEEEEERPVVNGNGVVVTPESSEHEDKSAGASGEMPSQPYPAPVYSQPEELKEQMDDTKPTKPEDNEEPDPLPDNWEMAYTEKGEVYFIDHNTKTTSWLDPRLAKKAKPPEECKENELPYGWEKIDDPIYGTYYVDHINRRTQFENPVLEAKRKLQQHNMPHTELGTKPLQAPGFREKPLFTRDASQLKGTFLSTTLKKSNMGFGFTIIGGDEPDEFLQVKSVIPDGPAAQDGKMETGDVIVYINEVCVLGHTHADVVKLFQSVPIGQSVNLVLCRGYPLPFDPEDPANSMVPPLAIMERPPPVMVNGRHNYETYLEYISRTSQSVPDITDRPPHSLHSMPTDGQLDGTYPPPVHDDNVSMASSGATQAELMTLTIVKGAQGFGFTIADSPTGQRVKQILDIQGCPGLCEGDLIVEINQQNVQNLSHTEVVDILKDCPIGSETSLIIHRGGFFSPWKTPKPIMDRWENQGSPQTSLSAPAIPQNLPFPPALHRSSFPDSTEAFDPRKPDPYELYEKSRAIYESRRPDYKELDVHLRRMESGFGFRILGGDEPGQPILIGAVIAMGSADRDGRLHPGDELVYVDGIPVAGKTHRYVIDLMHHAARNGQVNLTVRRKVLCGGEPCPENGRSPGSVSTHHSSPRSDYATYTNSNHAAPSSNASPPEGFASHSLQTSDVVIHRKENEGFGFVIISSLNRPESGSTIKLNSPTSAPSSEKQSPMAQQSPLAQQSPLAQPSPATPNSPIAQPAPPQPLQLQGHENSYRSEVKARQDVKPDIRQPPFTDYRQPPLDYRQPPGGDYQQPPPLDYRQPPLLDYRQHSPDTRQYPLSDYRQPQDFDYFTVDMEKGAKGFGFSIRGGREYKMDLYVLRLAEDGPAIRNGRMRVGDQIIEINGESTRDMTHARAIELIKSGGRRVRLLLKRGTGQVPEYDEPAPWSSPAAAAPGLPEIHEAPRPGSIDVKSHVSGVLGRHRINAQT

SEQ ID NO: 88274 - protein, 191 aa, Homo sapiens
  MOD_RES (1)..(1): Any amino acid
XRAGATSRGGQAPGFLLRLHTEGRAEAARVQEQDLRQWGLTGIHLRSYQLEGVNWLAQRFHCQNGCILGDEMGLGKTCQTIALFIYLAGRLNDEGPFLILCPLSVLSNWKEEMQRFAPGLSCVTYAGDKEERACLQQDLKQESRFHVLLTTYEICLKDASFLKSFPWSVLVVDEAHRLKNQSSLLHKTLSE

SEQ ID NO: 88275 - protein, 934 aa, Homo sapiens
  MOD_RES (1)..(1): Any amino acid
XREHWQLLGNLKTTVEGLVSTNSPNVWSKYGGLERLCRDMQSILYHGLIRDQACRRQTDYWQFVKDIRWLSPHSALHVEKFISVHENDQSSADGASERAVAELWLQHSLQYHCLSAQLRPLLGDRQYIRKFYTDAAFLLSDAHVTAMLQCLEAVEQNNPRLLAQIDASMFARKHESPLLVTKSQSLTALPSSTYTPPNSYAQHSYFGSFSSLHQSVPNNGSERRSTSFPLSGPPRKPQESRGHVSPAEDQTIQAPPVSVSALARDSPLTPNEMSSSTLTSPIEASWVSSQNDSPGDASEGPEYLAIGNLDPRGRTASCQSHSSNAESSSSNLFSSSSSQKPDSAASSLGDQEGGGESQLSSVLRRSSFSEGQTLTVTSGAKKSHIRSHSDTSIASRGAPGGPRNITIIVEDPIAEGGRYLCSGEGMFRRPSEGQSLISYLSEQDFGSCADLEKENAHFSISESLIAAIELMKCNMMSQCLEEEEVEEEDSDREIQELKQKIRLRRQQIRTKNLLPMYQEAEHGSFRVTSSSSQFSSRDSAQLSDSGSADEVDEFEIQDADIRRNTASSSKSFVSSQSFSHCFLHSTSAEAVAMGLLKQFEGMQLPAASELEWLVPEHDAPQKLLPIPDSLPISPDDGQHADIYKLRIRVRGNLEWAPPRPQIIFNVHPAPTRKIAVAKQNYRCAGCGIRTDPDYIKRLRYCEYLGKYFCQCCHENAQMAIPSRVLRKWDFSKYYVSNFSKDLLIKIWNDPLFNVQDINSALYRKVKLLNQVRLLRVQLCHMKNMFKTCRLAKELLDSFDTVPGHLTEDLHLYSLNDLTATRKGELGPRLAELTRAGATHVERCMLCQAKGFICEFCQNEDDIIFPFELHKCRTCEECKACYHKACFKSGSCPRCERLQARREALARQSLESYLSDYEEEPAEALALEAAVLEAT

SEQ ID NO: 88276 - protein, 277 aa, Homo sapiens
  MOD_RES (1)..(1): Any amino acid
XSVDQWEDEGFQSASNLTPDSQSEPSVTPDVDLWEAALTYEASKRSPPGHREEPYLTEAGRDAFDKFCRLHQGELQLLAGGVLQAPQPVLVKECELVKDVLNVLIGVVSATFSLCQPAQAFVVKRGVHVSGASPESISSLLSEVAEYGTCYTRLSHFSLQPVLDSLYSKGLVFQAFTSGLRRYLQYYRACVLSTPPTLSLLTIGFLFKKLGRQLRYLAELCGVGAVLPGTCGGGPRAAFPTGVKLLSYLYQEALHNCSNEHYPVLLSLLKTSCEPYT

SEQ ID NO: 88277 - protein, 475 aa, Homo sapiens
MINTGTQMDLEVKGVAATSRSQIQPFFGRKKPLQQRWTSESWTNQNSCPPVVPRLDLGSLVDSDDEDQNIIPENLPAPTDKCKLKYQQCKTEIKEGYKQYSQRNAENTKSNVTHKQSPRNKIDEKCVQDEEANTDDLTTLDRKAILQQGYADNSCDKQQRARKLDAEIVAAEKKKQIVAEQVMIDHLSRAVISDPEQNLAIEQKESDHILPDSKMTPLRFRKRTLHETKIRTHSTLTENVLSHKLQFDGRIVSRTNVLPFIQKSIYSHQCGRRKGKQYRLGDFYVGATLTFLSSDHLSLPESIKENTLLKLRITNIDQIALDSLKTASMEQEDDIIIQETNDRLVFKAIQDVLKEKLHKRGVRILTGLGKYFQQLDKEGNGLLDKADFKQALKVFHLEVSEKDFESAWLILNDNGNGKVDYGEFKRGIIGEMNEYRKSYVRKAFMKLDFNKSGSVPIINIRKCYCAKKHSQVISG

SEQ ID NO: 88278 - protein, 97 aa, Homo sapiens
MASYIDQDMQVLWYQDGRIVETDESQGIFVEKNMIHNCSLIASALTISNIQAGSTGNWGCHVQTKRGNNTRTVDIVVLESSAQYCPPERVVNNKGDF

SEQ ID NO: 88279 - protein, 165 aa, Homo sapiens
MGAGPSLLLAALLLLLSGDGAVRCDTPANCTYLDLLGTWVFQVGSSGSQRDVNCSVMGPQEKKVVVYLQKLDTAYDDLGNSGHFTIIYNQGFEIVLNDYKWFAFFKDVTDFISHLFMQLGTVGIYDLPHLRNKLEGDWRDYGFLMNFLLEPACLLFLSCLHYFIY

SEQ ID NO: 88280 - protein, 146 aa, Homo sapiens
MAAPALSWRLPLLILLLPLATSWASAAVNGTSQFTCFYNSRANISCVWSQDGALQDTSCQVHAWPDRRRWNQTCELLPVSQASWACNLILGAPDSQKLTTVDIVTLRVLCREGVRWRVMAIQDFKPFENLRLMAPISLQVVHVETH

SEQ ID NO: 88281 - protein, 107 aa, Homo sapiens
  MOD_RES (1)..(1): Any amino acid
XKAIELNPKDATSIHLMGIWCYTFAEMPWYQRRIAKMLFATPPSSTYEKALGYFHRAEQVDPNFYSKNLLLLGKTYLKLHNKKLAAFWLMKAKDYPAHTEEDKQEII

SEQ ID NO: 88282 - protein, 135 aa, Homo sapiens
MFRRPVLQVLRQFVRHESETTTSLVLERSLNRVHLLGRVGQDPVLRQVEGKNPVTIFSLATNEMWRSGDSEVYQLGDVSQKTTWHRISVFRPGLRDVAYQYVKKGSRIYLEGKIDYGEYMDKNNVRRQATTIIAD

SEQ ID NO: 88283 - protein, 133 aa, Homo sapiens
MGDAPSPEEKLHLITRNLQEVLGEEKLKEILKERELKIYWGTATTGKPHVAYFVPMSKIADFLKAGCEVTILFADLHAYLDNMKAPWELLELRVSYYENVIKAMLESIGVPLEKLKFIKGTDYQLSKLWMKSI

SEQ ID NO: 88284 - protein, 125 aa, Homo sapiens
MDSGTVLFEIKKPPVSERLPINRRDLDPNAGRFVRYQFTPAFLRLRQVGATVEFTVGDKPVNNFRMIERHYFRNQLLKSFDFHFGFCIPSSKNTCEHIYDFPPLSEELSARAGSSGSGEVGASRD

SEQ ID NO: 88285 - protein, 149 aa, Homo sapiens
MSDKMYSYSSDHTRVDEYYIEDTPIYGNLDDMISEPMDENCYEQMKARPEKSVNKMQEATPSAQATNETQMCYASLDHSVKGKRRKPRKQNTHFSDKDGDEQLHAIDASVSKTTLVDSFSPESQAVEENIHDDPIRLFGLIRAKREPIN

SEQ ID NO: 88286 - protein, 205 aa, Homo sapiens
MNISGSSCGSPNSADTSSDFKDLWTKLKECHDREVQGLQVKVTKLKQERILDAQRLEEFFTKNQQLREQQKVLHETIKVLEDRLRAGLCDRCAVTEEHMRKKQQEFENIRQQNLKLITELMNERNTLQEENKKLSEQLQQKIENDQQHQAAELECEEDVIPDSPITAFSFSGVNRLRRKENPHVRYIEQTHTKLEHSVCANEMRK

SEQ ID NO: 88287 - protein, 214 aa, Homo sapiens
MNINLAAEPKVNRGKAGVKRSAAEMYGSSFDLDYDFQRDYYDRMYSYPARVPPPPPIARAVVPSKRQRVSGNTSRRGKSGFNSKSGQRGSSKSGKLKGDDLQAIKKELTQIKQKVDSLLENLEKIEKEQSKQAVEMKNDKSEEEQSSSSVKKDETNVKMESEGGADDSAEEGDLLDDDDNEDRGDDQLELIKDDEKEAEEGEDDRDSANGEDDS

SEQ ID NO: 88288 - protein, 241 aa, Homo sapiens
MALELYMDLLSAPCRAVYIFSKKHDIQFNFQFVDLLKGHHHSKEYIDINPLRKLPSLKDGKFILSESAAILYYLCRKYSAPSHWCPPDLHARARVDEFVAWQHTAFQLPMKKIVWLKLLIPKITGEEVSAEKMEHAVEEVKNSLQLFEEYFLQDKMFITGNQISLADLVAVVEMMQPMAANYNVFLNSSKLAEWRMQVELNIGSGLFREAHDRLMQLADWDFSTLDSMVKENISELLKKSR

SEQ ID NO: 88289 - protein, 100 aa, Homo sapiens
MSASSSGGSPRFPSCGKNGVTSLTQKKVLRAPCGAPSVTVTKSHKRGMKGDTVNVRRSVRVKTKVPWMPPGKSSARPVGCKWENPPHCLEITPPSSEKLV

SEQ ID NO: 88290 - protein, 744 aa, Homo sapiens
MSSSPVNVKKLKVSELKEELKKRRLSDKGLKAELMERLQAALDDEEAGGRPAMEPGNGSLDLGGDSAGRSGAGLEQEAAAGGDEEEEEEEEEEEGISALDGDQMELGEENGAAGAADSGPMEEEEAASEDENGDDQGFQEGEDELGDEEEGAGDENGHGEQQPQPPATQQQQPQQQRGAAKEAAGKSSGPTSLFAVTVAPPGARQGQQQAGDNCDLHFKISRDRLSASSLTMESFAFLWAGGRASYGVSKGKVCFEMKVTEKIPVRHLYTKDIDIHEVRIGWSLTTSGMLLGEEEFSYGYSLKGIKTCNCETEDYGEKFDENDVITCFANFESDEVELSYAKNGQDLGVAFKISKEVLAGRPLFPHVLCHNCAVEFNFGQKEKPYFPIPEEYTFIQNVPLEDRVRGPKGPEEKKDCEVVMMIGLPGAGKTTWVTKHAAENPGKYNILGTNTIMDKMMVAGFKKQMADTGKLNTLLQRAPQCLGKFIEIAARKKRNFILDQTNVSAAAQRRKMCLFAGFQRKAVVVCPKDEDYKQRTQKKAEVEGKDLPEHAVLKMKGNFTLPEVAECFDEITYVELQKEEAQKLLEQYKEESKKALPPEKKQNTGSKKSNKNKSGKNQFNRGGGHRGRGGFNMRGGNFRGGAPGNRGGYNRRGNMPQRGGGGGGSGGIGYPYPRAPVFPGRGSYSNRGNYNRGGMPNRGNYNQNFRGRGNNRGYKNQSQGYNQWQQGQFWGQKPWSQHYHQGYY

SEQ ID NO: 88291 - protein, 138 aa, Homo sapiens
MFPLRALWLVWALLGVAGSCPEPCACVDKYAHQFADCAYKELREVPEGLPANVTTLSLSANKITVLRRGAFADVTQVTSLWLAHNEVRTVEPGALAVLSQLKNLDLSHNFISSFPWSDLRNLSALQLLKMNHNRLGSL

SEQ ID NO: 88292 - protein, 95 aa, Homo sapiens
  MOD_RES (1)..(1): Any amino acid
XAPFDRRATSLAWHPTHPSTVAVGSKGGDIMLWNFGIKDKPTFIKGIGAGGSITGLKFNPLNTNQFYASSMEGTTRLQDFKGNILRVFASSDTIK

SEQ ID NO: 88293 - protein, 140 aa, Homo sapiens
MTCILVCFPGAPRPSEEAIRRELALDAALGCRIAELCASAQKPPSLNTVFRTLASEDIPDLPPGGGLDCKSARSQKSAERRGRMGLGSPTPRIWAQPWTWRPDSCCPLGILCFSGASTELKKKTDPFPNYMYQRKEGRPM

SEQ ID NO: 88294 - protein, 91 aa, Homo sapiens
MAGSRRECRRGGSSGAKFRISLGLPVGAVINCADNTGAKNLYIISVKGIKGRLNRLPAAGVGDMVMATVKKGKPELRKKVHPAVVIRQRKS

SEQ ID NO: 88295 - protein, 103 aa, Homo sapiens
MSHCSGYSDPSSFAEDGPEVLDEEGTQEDLEYKLKGLIDLTLDKSAKTRQAALEGIKNALASKMLYEFILERRMTLTDSIERCLKKGKSDEQRAAAALASVLC

SEQ ID NO: 88296 - protein, 818 aa, Homo sapiens
MAQWEMLQNLDSPFQDQLHQLYSHSLLPVDIRQYLAVWIEDQNWQEAALGSDDSKATMLFFHFLDQLNYECGRCSQDPESLLLQHNLRKFCRDIQPFSQDPTQLAEMIFNLLLEEKRILIQAQRAQLEQGEPVLETPVESQQHEIESRILDLRAMMEKLVKSISQLKDQQDVFCFRYKIQAKGKTPSLDPHQTKEQKILQETLNELDKRRKEVLDASKALLGRLTTLIELLLPKLEEWKAQQQKACIRAPIDHGLEQLETWFTAGAKLLFHLRQLLKELKGLSCLVSYQDDPLTKGVDLRNAQVTELLQRLLHRAFVVETQPCMPQTPHRPLILKTGSKFTVRTRLLVRLQEGNESLTVEVSIDRNPPQLQGFRKFNILTSNQKTLTPEKGQSQGLIWDFGYLTLVEQRSGGSGKGSNKGPLGVTEELHIISFTVKYTYQGLKQELKNQQFFSNPPKAPWSLLGPALSWQFSSYVGRGLNSDQLSMLRNKLFGQNCRTEDPLLSWADFTKRESPPGKLPFWTWLDKILELVHDHLKDLWNDGRIMGFVSRSQERRLLKKTMSGTFLLRFSESSEGGITCSWVEHQDDDKVLIYSVQPYTKEVLQSLPLTEIIRHYQLLTEENIPENPLRFLYPRIPRDEAFGCYYQEKVNLQERRKYLKHRLIVVSNRQVDELQQPLELKPEPELESLELELGLVPEPELSLDLEPLLKAGLDLGPELESVLESTLEPVIEPTLCMVSQTVPEPDQGPVSQPVPEPDLPCDLRHLNTEPMEIFRNCVKIEEIMPNGDPLLAGQNTVDEVYVSRPSHFYTDGPLMPSDF

SEQ ID NO: 88297 - protein, 130 aa, Homo sapiens
MAEQDVENDLLDYDEEEEPQAPQESTPAPPKKDIKGSYVSIHSSGFRDFLLKPELLRAIVDCGFEHPSEVQHECIPQAILGMDVLCQAKSGMGKTAVFVLATLQQIEPVNGQVTVLVMCHTRELAFQISK

SEQ ID NO: 88298 - protein, 105 aa, Homo sapiens
MKNISRYLTDIKPLPPNIKDRLIKIMSMQGQITDSNISEGHAPLPRLEYSGAISAHCNLRCLDLVQTLDLRSCDISDAALLHLSNCRKLKKLNLNASKGNRVSVT

SEQ ID NO: 88299 - protein, 124 aa, Homo sapiens
KLALDIEIATYRKLLEGEENRITIPVQTFSNLQIRETSLDTKSVSEGHLKRNIVVKTVEMRDGEVRRDLGPVRLWLAPGILKARPWRKAWGWHIEGSQQLPVAPQGILEESKETECNSVSSVPP

SEQ ID NO: 88300 - protein, 219 aa, Homo sapiens
MALLVRVLRNQTSISQWVPVCSRLIPVSPTQGQGDRALSRTSQWPQMSQSRACGGSEQIPGIDIQLNRKYHTTRKLSTTKDSPQPVEEKVGAFTKIIEAMGFTGPLKYSKWVNPYILKKNMILMTNHFYAAILGYDEGILSDDHGLAAALWRTFFNRKCEDPRHLELLVEYVRKQIQYLDSMNGEDLLLTGEVSWRPLVEKNPQSILKPHSPTYNDEGL

SEQ ID NO: 88301 - protein, 121 aa, Homo sapiens
MKLENSIIPVHKQTENLQRLQENVEKTLSCLDHVISYYHVASDTEKIIREGPTGRLEEYLGSMAKIQKAVEYFQDNSPDSPELNKVKLLFERGKEALESEFRSLMTRHSKVVSPVLILDLI

SEQ ID NO: 88302 - protein, 27 aa, Homo sapiens
MLENYGNVASLGFPLLKPAVISQLEGG

SEQ ID NO: 88303 - protein, 215 aa, Homo sapiens
MPFPCLSLPSSWDYRIGFAIARRLAQDRAHVVVSSRKQQNVDQAVATLQGEGLSVTGTVCHVGKAEDRERLVAMTLDINVKAPALMTKAVVPEMEKRGGGSVVIVSSIAAFSPSPGFSPYNVSKTALLGLNNTLAIELAPRNIRVNCLPGLIKTSFSRMLWMDKEKEESMKETLRIRRLGEPEDCAGIVSFLCSEDASYITGETVVVGGGTPSRL

SEQ ID NO: 88304 - protein, 133 aa, Homo sapiens
MTKVPATKKLQSSPNSGAVRPFYASENLRQVPDKPMKSIKYMDKEIINLKKDLIRSRLSHCRTQRRMGKRPNREATSKQERNDNEMFHLATLLDPTNIKEGIRIPLQKETPCFPREVISPSGTNSLTPYPSIK

SEQ ID NO: 88305 - protein, 137 aa, Homo sapiens
IADIENEENRYCLFMELLESSHHEAEFQHLVLLLQAWPPMKSEYVITNNPWVRLATVMLTRCTMENKEGLGNEVLKMCRSLYNTKQMLPAEGVKELCLLLLNQSLLLPSLKLLLESRDEHLHEMALEQITAVTTDIF

SEQ ID NO: 88306 - protein, 183 aa, Homo sapiens
  MOD_RES (1)..(1): Any amino acid
XDRDRALPRGGVPPAALLRLPWVPSVYSHQGRHKRQHHENQSCVRHQPSQVPDPAEHPGGGERNVWSRVAQSRGHTGADVAEKSICDGERDENHPNLIRVNATKAYEMALKKYHGWIVQKIFQAALYAAPYKSDFLKALSKGQNVTEEECLEKIRLFLVNYTATIDVIYEMYTQMNAELNYKV

SEQ ID NO: 88307 - protein, 97 aa, Homo sapiens
MTGYTPDEKLRLQQLRELRRRWLKDQELSPREPVLPPQKMGPMEKFWNKFLENKSPWRKMEKPYGIVEKKSRIFPGDTILETGEVIPPMKEFPDQHH

SEQ ID NO: 88308 - protein, 230 aa, Homo sapiens
  MOD_RES (1)..(1): Any amino acid
XCLQEHSQPSQLLCTLLLCWCVLGRERPFRKAQSTSSPLEGVPRFLKRLLLTWVNCSSVRWATRVQDIFTAGKLLALALIIIMGIVQICKGEYFWLEPKNAFENFQEPDIGLVALAFLQGSFAYGGWNFLNYVTEELVDPYKLFFAGAREGHLPSVLAMIHVKRCTPIPALLFTCISTLLMLVTSDMYTLINYVGFINYLFYGVTVAGQIVLRWKKPDIPRPIKPLPYQG

SEQ ID NO: 88309 - protein, 692 aa, Homo sapiens
MPKNSKVVKRELDDDVTESVKDLLSNEDAADDAFKTSELIVDGQEEKDTDVEEGSEVEDERPAWNSKLQYILAQVGFSVGLGNVWRFPYLCQKNGGGAYLLPYLILLMVIGIPLFFLELSVGQRIRRGSIGVWNYISPKLGGIGFASCVVCYFVALYYNVIIGWSLFYFSQSFQQPLPWDQCPLVKNASHTFVEPECEQSSATTYYWYREALNISSSISESGGLNWKMTICLLAAWVMVCLAMIKGIQSSGKIIYFSSLFPYVVLICFLIRAFLLNGSIDGIRHMFTPKLEIMLEPKVWREAATQVFFALGLGFGGVIAFSSYNKRDNNCHFDAVLVSFINFFTSVLATLVVFAVLGFKANVINEKCITQNSETIMKFLKMGNISQDIIPHHINLSTVTAEDYHLVYDIIQKVKEEEFPALHLNSCKIEEELNKAVQGTGLAFIAFTEAMTHFPASPFWSVMFFLMLVNLGLGSMFGTIEGIVTPIVDTFKVRKEILTVILENIAVCFVYGIDKFMEDLKDMLGFAPSRYYYYMWKYISPLMLLSLLIASVVNMGLSPPGYNAWIEDKASEEFLSYPTWGLVVCVSLVVFAILPVPVVFIVRRFNLIDDSSGNLASVTYKRGRVLKEPVNLEGDDTSLIHGKIPSEMPSPNFGKNIYRKQSGSPTLDTAPNGRYGIGYLMADIMPDMPESDL

SEQ ID NO: 88310 - protein, 78 aa, Homo sapiens
MLLLGLLLLLPLLAGARLLWNWWKLRSLHLPPLAPGFLHLLQPDLPIYLLGLTQKFGPIYRLHLGLQAPTSSCRQAGV

SEQ ID NO: 88311 - protein, 217 aa, Homo sapiens
MEETMKLATMEDTVEYCLFLIPDESRDSDKHKEILQKYIERIITRFAPMLVPYIWQNQPFNLKYKPGKGGVPAHMFGVTKFGDNIEDEWFIVYVIKQITKEFPELVASTNRVFFCHGELCIIPAPRKSGAESWLPTTPPTIPQALNIITAHSEKILASESIRAAVNRRIRGYPEKIQASLHRAHCFLPAGIVAVLKQRPRLVAAAVQAFYLRDPIDL

SEQ ID NO: 88312 - protein, 160 aa, Homo sapiens
MAGEKVEKPDTKEKKPEAKKVDAGGKVKKGNLKAKKPKKGKPHCSRNPVLVRGIGRYSRSAMYSRKAMYKRKYSAAKSKVEKKKKEKVLATVTKPVGGDKNGGTRVVKLRKMPRYYPTEDVPRKLLSHGKKPFSQHVRKLRASITPGTILIILTGRHRGK

SEQ ID NO: 88313 - protein, 44 aa, Homo sapiens
MDIIETAKLEEHLENQPSDPTNTYARPAEPVEEENKNGNGKPKS

SEQ ID NO: 88314 - protein, 96 aa, Homo sapiens
MSKAHPPELKKFMDKKLSLKLNGGRHVQGILRGFDPFMNLVIDECVEMATSGQQNNIGMVDNIPNKAVSPKFLKKVNQKGQLTFSKLLSIKTSKEW

SEQ ID NO: 88315 - protein, 232 aa, Homo sapiens
  MOD_RES (1)..(1): Any amino acid
XSLEMRERVLGPDHPDCAQSLNNLAALCNEKKQYDKAEELYERALDIRRRALAPDHPSLAYTVKHLAILYKKMGKLDKAVPLYELAVEIRQKSFGPKHPSVATALVNLAVLYSQMKKHVEALPLYERALKIYEDSLGRMHPRVGETLKNLAVLSYEGGDFEKAAELYKRAMEIKEAETSLLGGKAPSRHSSSGDTFSLKTAHSPNVFLQQGQRAGKSNPTFYLQKGFQTYVL

SEQ ID NO: 88316 - protein, 68 aa, Homo sapiens
MVAALRAPEIHVRRCSIGPLQRLRTRLSPPTPTAQATGTPPFVEELLRRLLGLNCCPPTPRGEQKWPD

SEQ ID NO: 88317 - protein, 137 aa, Homo sapiens
MVSWGRFICLVVVTMATLSLARPSFSLVEDTTLEPEGAPYWTNTEKMEKRLHAVPAANTVKFRCPAGGNPMPTMRWLKNGKEFKQEHRIGGYKVRNQHWSLIMESVVPSDKGNYTCVVENEYGSINHTYHLDVVGFG

SEQ ID NO: 88318 - protein, 413 aa, Homo sapiens
MATAEVLNIGKKLYEGKTKEVYELLDSPGKVLLQSKDQITAGNAARKNHLEGKAAISNKITSCIFQLLQEAGIKTAFTRKCGETAFIAPQCEMIPIEWVCRRIATGSFLKRNPGVKEGYKFYPPKVELFFKDDANNDPQWSEEQLIAAKFCFAGLLIGQTEVDIMSHATQAIFEILEKSWLPQNCTLVDMKIEFGVDVTTKEIVLADVIDNDSWRLWPSGDRSQQKDKQSYRDLKEVTPEGLQMVKKNFEWVAERVELLLKSESQCRVVVLMGSTSDLGHCEKIKKACGNFGIPCELRVTSAHKGPDETLRIKAEYEGDGIPTVFVAVAGRSNGLGPVMSGNTAYPVISCPPLTPDWGVQDVWSSLRLPSGLGCSTVLSPEGSAQFAAQIFGLSNHLVWSKLRASILNTWISL

SEQ ID NO: 88319 - protein, 90 aa, Homo sapiens
  MOD_RES (1)..(1): Any amino acid
XLGSRIDDYDIVVRLNSAPVKGFEKDVGSKTTLRITYPEGAMQRPEQYERDSLFVLAGFKWQDFKWLKYIVYKERVLFPKQGQVQAVSSR

SEQ ID NO: 88320 - protein, 135 aa, Homo sapiens [sequence omitted]

SEQ ID NO: 88321 - protein, 461 aa, Homo sapiens
MSERKEGRGKGKGKKKERGSGKKPESAAGSQSPVTAVFWAIYWKNRVPIPYMLAASTGVCFPAGPHSPNSLTLPPRLKEMKSQESAAGSKLVLRCETSSEYSSLRFKWFKNGNELNRKNKPQNIKIQKKPGKSELRINKASLADSGEYMCKVISKLGNDSASANITIVESNEIITGMPASTEGAYVSSESPIRISVSTEGANTSSSTSTSTTGTSHLVKCAEKEKTFCVNGGECFMVKDLSNPSRYLCKCQPGFTGARCTENVPMKVQNQEKAEELYQKRVLTITGICIALLVVGIMCVVAYCKTKKQRKKLHDRLRQSLRSERNNMMNIANGPHHPNPPPENVQLVNQYVSKNVISSEHIVEREAETSFSTSHYTSTAHHSTTVTQTPSHSWSNGHTESILSESHSVIVMSSVENSRHSSPTGGPRGRLNGTGGPRECNSFLRHARETPDSYRDSPHSER

SEQ ID NO: 88322 - protein, 151 aa, Homo sapiens
MLRWLIGGGREPQGLAEKSPLQTIGEEQTQNPYTELLVLKAHHDIVRFLVQLDDYRFASAGDDGIVVVWNAQTGEKLLELNGHTQKITAIITFPSLESCEEKNQLILTASADRTVIVWDGDTTRQVQRISCFQSTVKVGSTHRRITRMGYS

SEQ ID NO: 88323 - protein, 444 aa, Homo sapiens
MAETKIIYHMDEEETPYLVKLPVAPERVTLADFKNVLSNRPVHAYKFFFKSMDQDFGVVKEEIFDDNAKLPCFNGRVVSWLVLAEGAHSDAGSQGTDSHTDLPPPLERTGGIGDSRPPSFHPNVASSRDGMDNETGTESMVSHRRERARRRNREEAARTNGHPRGDRRRDVGLPPDSASTALSSELESSSFVDSDEDGSTSRLSSSTEQSTSSRLIRKYASSLLKHGFLRHTVNKITFSEQCYYVFGDLCSNLATLNLNSGSSGTSDQDTLAPLPHPAAPWPLGQGYPYQYPGPPPCFPPAYQDPGFSYGSGSTGSQQSEGSKSSGSTRSSRRAPGREKERRAAGAGGSGSESDHTAPSGVGSSWRERPAGQLSRGSSPRSQASATAPGLPPPHPTTKAYTVVGGPPGGPPVRELAAVPPELTGSRQSFQKAMGNPCEFFVDIM

SEQ ID NO: 88324 - protein, 706 aa, Homo sapiens
IKFSKLTCPERNESLSVEDQMEQSSLYFWDLLEGSEKAVVGTTYKHLKDLLSKLLNSGYFESIPVPKNAKEKEVPLEEEMLIQSEKKTQLSKTESVKESESLMEFAQPEIQPQEFLNRRYMTEVDYSNKQGEEQPWEADYARKPNLPKRWDMLTEPDGQEKKQESFKSWEASGKHQEVSKPAVSLEQRKQDTSKLRSTLPEEQKKQEISKSKPSPSQWKQDTPKSKAGYVQEEQKKQETPKLWPVQLQKEQDPKKQTPKSWTPSMQSEQNTTKSWTTPMCEEQDSKQPETPKSWENNVESQKHSLTSQSQISPKSWGVATASLIPNDQLLPRKLNTEPKDVPKPVHQPVGSSSTLPKDPVLRKEKLQDLMTQIQGTCNFMQESVLDFDKPSSAIPTSQPPSATPGSPVASKEQNLSSQSDFLQEPLQATSSPVTCSSNACLVTTDQASSGSETEFMTSETPEAAIPPGKQPSSLASPNPPMAKGSEQGFQSPPASSSSVTINTAPFQAMQTVFNVNAPLPPRKEQEIKESPYSPGYNQSFTTASTQTPPQCQLPSIHVEQTVHSQETANYHPDGTIQVSNGSLAFYPAQTNVFPRPTQPFVNSRGSVRGCTRGGRLITNSYRSPGGYKGFDTYRGLPSISNGNYSQLQFQAREYSGAPYSQRCLETSEPLWLLGKARIISSSVISEEGHLVVHEQIREQGGVILLR

SEQ ID NO: 88325 - protein, 117 aa, Homo sapiens
  MOD_RES (1)..(1): Any amino acid
XGGKPFSCTSLSLSQWLWCLFIGIGELLWGQFISAIPTRSLKFLKEAGHGTTKEEITKDAEGLDEIDHAEMELRRGQILWFRGLNRIQTQHLLQDSDLLPDKEEAIISSSLFPSCNF

SEQ ID NO: 88326 - protein, 1698 aa, Homo sapiens
MAGASVKVAVRVRPFNSREMSRDSKCIIQMSGSTTTIVNPKQPKETPKSFSFDYSYWSHTSPEDINYASQKQVYRDIGEEMLQHAFEGYNVCIFAYGQTGAGKSYTMMGKQEKDQQGIIPQLCEDLFSRINDTTNDNMSYSVEVSYMEIYCERVRDLLNPKNKGNLRVREHPLLGPYVEDLSKLAVTSYNDIQDLMDSGNKARTVAATNMNETSSRSHAVFNIIFTQKRHDAETNITTEKVSKISLVDLAGSERADSTGAKGTRLKEGANINKSLTTLGKVISALAEMDSGPNKNKKKKKTDFIPYRDSVLTWLLRENLGGNSRTAMVAALSPADINYDETLSTLRYADRAKQIRCNAVINEDPNNKLIRELKDEVTRLRDLLYAQGLGDITDMTNALVGMSPSSSLSALSSRAASVSSLHERILFAPGSEEAIERLKETEKIIAELNETWEEKLRRTEAIRMEREALLAEMGVAMREDGGTLGVFSPKKTPHLVNLNEDPLMSECLLYYIKDGITRVGREDGERRQDIVLSGHFIKEEHCVFRSDSRGGSEAVVTLEPCEGADTYVNGKKVTEPSILRSGNRIIMGKSHVFRFNHPEQARQERERTPCAETPAEPVDWAFAQRELLEKQGIDMKQEMEQRLQELEDQYRREREEATYLLEQQRLDYESKLEALQKQMDSRYYPEVNEEEEEPEDEVQWTERECELALWAFRKWKWYQFTSLRDLLWGNAIFLKEANAISVELKKKVQFQFVLLTDTLYSPLPPDLLPPEAAKDRETRPFPRTIVAVEVQDQKNGATHYWTLEKLRQRLDLMREMYDRAAEVPSSVIEDCDNVVTGGDPFYDRFPWFRLVGRAFVYLSNLLYPVPLVHRVAIVSEKGEVKGFLRVAVQAISADEEAPDYGSGVRQSGTAKISFDDQHFEKFQSESCPVVGMSRSGTSQEELRIVEGQGQGADVGPSADEVNNNTCSAVPPEGLLLDSSEKAALDGPLDAALDHLRLGNTFTFRVTVLQASSISAEYADIFCQFNFIHRHDEAFSTEPLKNTGRGPPLGFYHVQNIAVEVTKSFIEYIKSQPIVFEVFGHYQQHPFPPLCKDVLSPLRPSRRHFPRVMPLSKPVPATKLSTLTRPCPGPCHCKYDLLVYFEICELEANGDYIPAVVDHRGGMPCMGTFLLHQGIQRRITVTLLHETGSHIRWKEVRELVVGRIRNTPETDESLIDPNILSLNILSSGYIHPAQDDRVSLGNDTRTFYQFEAAWDSSMHNSLLLNRVTPYREKIYMTLSAYIEMENCTQPAVVTKDFCMVFYSRDAKLPASRSIRNLFGSGSLRASESNRVTGVYELSLCHVADAGSPGMQRRRRRVLDTSVAYVRGEENLAGWRPRSDSLILDHQWELEKLSLLQEVEKTRHYLLLREKLETAQRPVPEALSPAFSEDSESHGSSSASSPLSAEGRPSPLEAPNERQRELAVKCLRLLTHTFNREYTHSHVCVSASESKLSEMSVTLLRDPSMSPLGVATLTPSSTCPSLVEGRYGATDLRTPQPCSRPASPEPELLPEADSKKLPSPARATETDKEPQRLLVPDIQEIRVSPIVSKKGYLHFLEPHTSGWARRFVVVRRPYAYMYNSDKDTVERFVLNLATAQVEYSEDQQAMLKTPNTFAVCTEHRGILLQAASDKDMHDWLYAFNPLLAGTIRSKLSRRRSAQMRV

SEQ ID NO: 88327 - protein, 269 aa, Homo sapiens
MRFKNRFQRFMNHRAPANGRYKPTCYEHAANCYTHAFLIVPAIVGSALLHRLSDDCWEKITAWIYGMGLCALFIVSTVFHIVSWKKSHLRTVEHCFHMCDRMVIYFFIAASYAPWFFSLRFVSNLLPNTWSEIKGQAVLTSFCLIGLNLRELGPLASHMRWFIWLMAAGGTIYVFLYHEKYKVVELFFYLTMGFSPALVVTSMNNTDGLQELACGGLIYCLGVVFFKSDGIIPFAHAIWHLFVATAAAVHYYAIWKYLYRSPTDFMRHL

SEQ ID NO: 88328 - protein, 83 aa, Homo sapiens
  MOD_RES (1)..(1): Any amino acid
XIIADDFAAFVGLPVEEAVKGILEQGWQADSTTRMVLPRKPVAGALDVSFNKFIPLSEPAPVPPIPNEQQLARLTDYVAFLEN

SEQ ID NO: 88329 - protein, 79 aa, Homo sapiens
  MOD_RES (1)..(1): Any amino acid
XLRRTKKLSDYVGKNEKTKIIAKIQQIFATFQVVVLCPPELGPRSLGPLDQNPNQLRNRLLADEPGGSGARDAVSNVAP

SEQ ID NO: 88330 - protein, 192 aa, Homo sapiens
  MOD_RES (1)..(1): Any amino acid
XAETYDFLFKFLVIGSAGTGKSCLLHQFIENKFKQDSNHTIGVEFGSRVVNVGGKTVKLQIWDTAGQERFRRETYNSLAAWLTDARTLASPNIVVILCGNKKDLDPEREVTFLEASRFAQENELMFLETSALTGENVEEAFLKCARTILNKIDSGELDPERMGSGIQYGDASLRQLRQPRSAQAVAPQPCGC

SEQ ID NO: 88331 - protein, 79 aa, Homo sapiens
  MOD_RES (1)..(1): Any amino acid
XPAESPQSATKQLDQPTAAYEYYDAGNHWCKDCNTICGTMFDFFTHMHNKKHTQGQFQKSSDFQKEGLQQTFLPPERQG

SEQ ID NO: 88332 - protein, 126 aa, Homo sapiens
MEEKGEGMLPAPSPDITLPSCSLAQSLWALFTSSLAISLVFAVIPFCRDVKVLASVMALAGLAMGCIDTVANMQLVRMYQKDSAVFLQLPVPMAVLMLLSKERLLTCCPQRRPLLLSADELALETQ

SEQ ID NO: 88333 - protein, 125 aa, Homo sapiens
TLGLGEEWRGGDVARTVGGGQKVRWLKKEMEKYADREDMIIMFVDSYDVILAGSPTELLKKFVQSGSRLLFSAESFCWPEWGLAEQYPEDSSVLPPPSTKSCASGSTRMMTTTSCSTHGSTWTQD

SEQ ID NO: 88334 - protein, 315 aa, Homo sapiens
  MOD_RES (1)..(1): Any amino acid
XQGGGAREENTSFRSRDPREEGQRLDSQAEDGNIEYKLKLVNPSQYRFEHLVTQMKWRLQEGRGEAVYQIGVEDNGLLVGLAEEEMRASLKTLHRMAEKVGADITVLREREVDYDSDMPRKITEVLVRKVPDNQQFLDLRVAVLGNVDSGKSTLLGVLTQGELDNGRGRARLNLFRHLHEIQSGRTSSISFEILGFNSKGEVVNYSDSRTAEEICESSSKMITFIDLAGHHKYLHTTIFGLTSYCPDCALLLVSANTGIAGTTREHLGLALALKVPFFIVVSKIDLCAKTTVERTVRQLERVLKQPGCHKVPMLV

SEQ ID NO: 88335 - protein, 351 aa, Homo sapiens
MEEPEEPADSGQSLVPVYIYSPEYVSMCDSLAKIPKRASMVHSLIEAYALHKQMRIVKPKVASMEEMATFHTDAYLQHLQKVSQEGDDDHPDSIEYGLGYDCPATEGIFDYAAAIGGATITAAQCLIDGMCKVAINWSGGWHHAKKDEASGFCYLNDAVLGILRLRRKFERILYVDLDLHHGDGTGDVSDVGLGKGRYYSVNVPIQDGIQDEKYYQICESVLKEVYQAFNPKAVVLQLGADTIAGDPMCSFNMTPVGIGKCLKYILQWQLATLILGGGGYNLANTARCWTYLTGVILGKTLSSEIPDHEFFTAYGPDYVLEITPSCRPDRNEPHRIQQILNYIKGNLKHVV

SEQ ID NO: 88336 - protein, 198 aa, Homo sapiens
MDFSRNLYDIGEQLDSEDLASLKFLSLDYIPQRKQEPIKDALMLFQRLQEKRMLEESNLSFLKELLFRINRLDLLITYLNTRKEEMERELQTPGRAQISAYRVMLYQISEEVSRSELRSFKFLLQEEISKCKLDDDMNLLDIFIEMEKRVILGEGKLDILKRVCAQINKSLLKIINDYEEFSKERSSSLEGSPDEFSN

SEQ ID NO: 88337 - protein, 190 aa, Homo sapiens
MSNRPNNNPGGSLRRSQRNTAGAQPQDDSIGGRSHLGQAKHKGYSPPESRKSNSKAPKVQSNTTSELSRGHLSKRSCSSSSAVIVPQPEDPDRANTSERQKTGQVPKKDNSRGVKRSASPDYNRTNSPSSAKKPKALQHTESPSETNKPHSKSKKRHLDQEQQLKSAQSPSTSKAHTRKSGATGGSRSQK

SEQ ID NO: 88338 - protein, 259 aa, Homo sapiens
MSRSPLNPSQLRSVGSQDALAPLPPPAPQNPSTHSWDPLCGSLPWGLSCLLALQHVLVMASLLCVSHLLLLCSLSPGGLSYSPSQLLASSFFSCGMSTILQTWMGSRLPLVQAPSLEFLIPALVLTSQKLPRAIQTPGNSSLMLHLCRGPSCHGLGHWNTSLQEVSGAVVVSGLLQGMMGLLGSPGHVFPHCGPLVLAPSLVVAGLSAHREVAQFCFTHWGLALLVILLMVVCSQHLGSCQFHVCPWRRASTSSTHTPL

SEQ ID NO: 88339 - protein, 874 aa, Homo sapiens
MAANVGDQRSTDWSSQYSMVAGAGRENGMETPMHENPEWEKARQALASISKSGAAGGSAKSSSNGPVASAQYVSQAEASALQQQQYYQWYQQYNYAYPYSYYYPMSMYQSYGSPSQYGMAGSYGSATPQQPSAPQHQGTLNQPPVPGMDESMSYQAPPQQLPSAQPPQPSNPPHGAHTLNSGPQPGTAPATQHSQAGPATGQAYGPHTYTEPAKPKKGQQLWNRMKPAPGTGGLKFNIQKRPFAVTTQSFGSNAEGQHSGFGPQPNPEKVQNHSGSSARGNLSGKPDDWPQDMKEYVERCFTACESEEDKDRTEKLLKEVLQARLQDGSAYTIDWSREPLPGLTREPVAESPKKKRWEAASSLHPPRGAGSATRGGGAPSQRGTPGAGGAGRARGNSFTKFGNRNVFMKDNSSSSSTDSRSRSSSRSPTRHFRRSDSHSDSDSSYSGNECHPVGRRNPPPKGRGGRGAHMDRGRGRAQRGKRHDLAPTKRSRKKMAALECEDPERELKKQKRAARFQHGHSRRLRLEPLVLQMSSLESSGADPDWQELQIVGTCPDITKHYLRLTCAPDPSTVRPVAVLKKSLCMVKCHWKEKQDYAFACEQMKSIRQDLTVQGIRTEFTVEVYETHARIALEKGDHEEFNQCQTQLKSLYAENLPGNVGEFTAYRILYYIFTKNSGDITTELAYLTRELKADPCVAHALALRTAWALGNYHRFFRLYCHAPCMSGYLVDKFADRERKVALKAMIKTYVVPSSLLPLLFPSFRLAPPLRPAPGRRPPPAPNPCPGPCFPIIFLHSALPSPVPLALLVGHLCVPGHSSPSPHCSQLTASGASSPPHLCVSSSCSLLPGPPSSLLALGFLRTLRSLLSQLVAVLPP

SEQ ID NO: 88340 - protein, 883 aa, Homo sapiens
  MOD_RES (1)..(1): Any amino acid
XPFSEVESILNQSFCSRRPLRLLVATKAKEIIKIPDQPDTLCFQIRGAAPPYVYAVGRGSEAMAAGLCAGQCILKVNGSNVMNDGAPEVLEHFQAFRSRREEALGLYQWIYHTHEDAQEARASQEASTEDPSGEQAQEEDQADSAFPLLSLGPRLSLCEDSPMVTLTVDNVHLEHGVVYEYVSTAGVRCHVLEKIVEPRGCFGLTAKILEAFAANDSVFVENCRRLMALSSAIVTMPHFEFRNICDTKLESIGQRIACYQEFAAQLKSRVSPPFKQAPLEPHPLCGLDFCPTNCHINLMEVSYPKTTPSVGRSFSIRFGRKPSLIGLDPEQGHLNPMSYTQHCITTMAAPSWKCLPAAEGDPQGQGLHDGSFGPASGTLGQEDRGLSFLLKQEDREIQDAYLQLFTKLDVALKEMKQYVTQINRLLSTITEPTSGGSCDASLAEEASSLPLVSEESEMDRSDHGGIKKVCFKVAEEDQEDSGHDTMSYRDSYSECNSNRDSVLSYTSVRSNSSYLGSDEMGSGDELPCDMRIPSDKQDKLHGCLEHLFNQVDSINALLKGPVMSRAFEETKHFPMNHSLQEFKQKEECTIRGRSLIQISIQEDPWNLPNSIKTLVDNIQRYVEDGKNQLLLALLKCTDTELQLRRDAIFCQALVAAVCTFSKQLLAALGYRYNNNGEYEESSRDASRKWLEQVAATGVLLHCQSLLSPATVKEERTMLEDIWVTLSELDNVTFSFKQLDENYVANTNVFYHIEGSRQALKVIFYLDSYHFSKLPSRLEGGASLRLHTALFTKGELQAWGREDHGGRAKATKHTGSQPPARPRHLPSQCWRTWRGCLLQAARPRRICSRTSTRSPWRKFSSITANSGHFTWSGLTCPRMPAPRR

SEQ ID NO: 88341 - protein, 187 aa, Homo sapiens
  MOD_RES (1)..(1): Any amino acid
XIQESVTFASQVYREIICVPYMAKFVVFAKSHDPIEARLRCFCMTDDKVDKTLEQQENFAEVARSRDVEVRDTTQEPCGRLSFMKEPKSTRGLVHQAICNLNITLPIYTKESESDQEQEEEIDMTSEKNPQDEQERIEERLAYIADHLGFSWTELARELDFTEEQIHQIRIENPNSLQDQSHALLKY

SEQ ID NO: 88342 - protein, 482 aa, Homo sapiens
MSSSHSRAGQSAAGAAPGGGVDTRDAEMPATEKDLAEDAPWKKIQQNTFTRWCNEHLKCVSKRIANLQTDLSDGLRLIALLEVLSQKKMHRKHNQRPTFRQMQLENVSVALEFLDRESIKLVSIDSKAIVDGNLKLILGLIWTLILHYSISMPMWDEEEDEEAKKQTPKQRLLGWIQNKLPQLPITNFSRDWQSGRALGALVDSCAPGLCPDWDSWDASKPVTNAREAMQQADDWLGIPQVITPEEIVDPNVDEHSVMTYLSQFPKAKLKPGAPLRPKLNPKKARAYGPGIEPTGNMVKKRAEFTVETRSAGQGEVLVYVEDPAGHQEEAKVTANNDKNRTFSVWYVPEVTGTHKVTVLFAGQHIAKSPFEVYVDKSQGDASKVTAQGPGLEPSGNIANKTTYFEIFTAGAGTGEVEVVIQDPMGQKGTVEPQLEARGDSTYRCSYQPTMEGVHTVHVTFAGVPIPRSPYTVTVGQELAPAV

SEQ ID NO: 88343 - protein, 173 aa, Homo sapiens
CSTGTLDYILQRCQLALQNVCDDVDNDDVSLKSFEPAVLKQGEEIHNEVEFEWLRQFWFQGNRYRKCTDWWCQPMAQLEALWKKMEGVTNAVLHEVKREGLPVEQRNEILTAILASLTARQNLRREWHARCQSRIARTLPADQKPECRPYWEKDDASMPLPFDLTDIVSELRG

SEQ ID NO: 88344 - protein, 357 aa, Homo sapiens
MIRIAALNASSTIEDDHEGSFKSHKTQTKEAQEAEAFALYHKALDLQKHDRFEESAKAYHELLEASLLREAVMLDSTDVNLWYKIGHVALRLIRIPLARHAFEEGLRCNPDHWPCLDNLITVLYTLSDYTTCLYFICKALEKDCRYSKGLVLKEKIFEEQPCLRKDSLRMFLKCDMSIHDVSVSAAETQAIVDEALGLRKKRQALIVREKEPDLKLVQPIPFFTWKCLGESLLAMYNHLTTCEPPRPSLGKRIDLSDYQDPSQPLESSMVVTPVNVIQPSTVSTNPAVAVAEPVVSYTSVATTSFPLHSPGLLETGAPVGDISGGDKSKKGVKRKKISEESGETAKRRSARVRNTKC

SEQ ID NO: 88345 - protein, 168 aa, Homo sapiens
MATAARPQPDHSSSAPGLRTSRLPSFQRGGRGCIRGSHSEYRVHAYLVQAVRAAGKCDAVFKGFSDCLLKLGDSMANYPQGLDDKTNIKTVCTYWEDFHSCTVTALTDCQEGAKDMWDKLRKESKNLNIQGSLFELCGSGNGAAGSLLPAFPVLLVSLSAALATWLSF

SEQ ID NO: 88346 - protein, 65 aa, Homo sapiens
TLIHPKDLTALSNMLPKGPSTPLPEDPNWNVTEFHTTPKMSTYLLAFIVSEFDYVEKQASNGVLV

SEQ ID NO: 88347 - protein, 1062 aa, Homo sapiens
LIAVFEEQEPLHKIESPSGNPADRQSPDAFETEVAAQLAAFKPIGGEIEVTPSALKLGTPLLVRRSSDPVPGPPADTQPSASHPGGQSLKLVVPDSTQNLEDREVLNGVQTELLTSPRTKDTLSDMTRTVEISGEGGPLGIHVVPFFSSLSGRILGLFIRGIEDNSRSKREGLFHENECIVKINNVDLVDKTFAQAQDVFRQAMKSPSVLLHVLPPQNREQYEKSVIGSLNIFGNNDGVLKTKVPPPVHGKSGLKTANLTGTDSPETDASASLQQNKSPRVPRLGGKPSSPSLSPLMGFGSNKNAKKIKIDLKKGPEGLGFTVVTRDSSIHGPGPIFVKNILPKGAAIKDGRLQSGDRILEVNGRDVTGRTQEELVAMLRSTKQGETASLVIARQEGHFLPRELKGEPDCCALSLETSEQLTFEIPLNDSGSAGLGVSLKGNKSRETGTDLGIFIKSIIHGGAAFKDGRLRMNDQLIAVNGESLLGKSNHEAMETLRRSMSMEGNIRGMIQLVILRRPERPMEDPAECGAFSKPCFENCQNAVTTSRRNDNSILHPLGTCSPQDKQKGLLLPNDGWAESEVPPSPTPHSALGLGLEDYSHSSGVDSAVYFPDQHINFRSVTPARQPESINLKASKSMDLVPDESKVHSLAGQKSDGLSDKSSHSGQGALNCESAPQGNSELEDMENKARKVKKTKEKEKKKEKGKLKVKEKKRKEENEDPERKIKKKGFGAMLRFGKKKEDKGGKAEQKGTLKHGGLREEELEKMKEERERIGAKHQELREKQARGLLDYATGAIGSVYDMDDDEMDPNYARVNHFREPCTSANVFRSPSPPRAGPFGYPRDGHPLSPERDHLEGLYAKVNKPYHPLVPADSGRPTGGSTDRIQKLRKEYYQARREGFPLYEDDEGRARPSEYDLLWVPGRGPDGNAHNLRFEGMERQYASLPRGGPADPVDYLPAAPRGLYKERELPYYPGAHPMHPPKGSYPRPTELRVADLRYPQHYPPPPAPQHKGPFRQDVPPSPPQHQRMPAYQETGRPGPRGGSPDQYPYRTQDSRQKNPMTAAV

SEQ ID NO: 88348 - protein, 1299 aa, Homo sapiens
MRNLKLFRTLEFRDIQGPGNPQCFSLRTEQGTVLIGSEHGLIEVDPVSREVKNEVSLVAEGFLPEDGSGRIVGVQDLLDQESVCVATASGDVILCSLSTQQLECVGSVASGISVMSWSPDQELVLLATGQQTLIMMTKDFEPILEQQIHQDDFGESKFITVGWGRKETQFHGSEGRQAAFQMQMHESALPWDDHRPQVTWRGDGQFFAVSVVCPETGARKVRVWNREFALQSTSEPVAGLGPALAWKPSGSLIASTQDKPNQQDIVFFEKNGLLHGHFTLPFLKDEVKVNDLLWNADSSVLAVWLEDLQREESSIPKTCVQLWTVGNYHWYLKQSLSFSTCGKSKIVSLMWDPVTPYRLHVLCQGWHYLAYDWHWTTDRSVGDNSSDLSNVAVIDGNRVLVTVFRQTVVPPPMCTYQLLFPHPVNQVTFLAHPQKSNDLAVLDASNQISVYKCGDCPSADPTVKLGAVGGSGFKVCLRTPHLEKRYKIQFENNEDQDVNPLKLGLLTWIEEDVFLAVSHSEFSPRSVIHHLTAASSEMDEEHGQLNVSSSAAVDGVIISLCCNSKTKSVVLQLADGQIFKYLWESPSLAIKPWKNSGGFPVRFPYPCTQTELAMIGEEECVLGLTDRCRFFINDIEVASNITSFAVYDEFLLLTTHSHTCQCFCLRDASFKTLQAGLSSNHVSHGEVLRKVERGSRIVTVVPQDTKLVLQMPRGNLEVVHHRALVLAQIRKWLDKLMFKEAFECMRKLRINLNLIYDHNPKVFLGNVETFIKQIDSVNHINLFFTELKEEDVTKTMYPAPVTSSVYLSRDPDGNKIDLVCDAMRAVMESINPHKYCLSILTSHVKKTTPELEIVLQKVHELQGNAPSDPDAVSAEEALKYLLHLVDVNELYDHSLGTYDFDLVLMVAEKSQKDPKEYLPFLNTLKKMETNYQRFTIDKYLKRYEKAIGHLSKCGPEYFPECLNLIKDKNLYNEALKLYSPSSQQYQDISIAYGEHLMQEHMYEPAGLMFARCGAHEKALSAFLTCGNWKQALCVAAQLNFTKDQLVGLGRTLAGKLVEQRKHIDAAMVLEECAQDYEEAVLLLLEGAAWEEALRLVYKYNRLDIIETNVKPSILEAQKNYMAFLDSQTATFSRHKKRLLVVRELKEQAQQAGLDDEVPHGQESDLFSETSSVVSGSEMSGKYSHSNSRISARSSKNRRKAERKKHSLKEGSPLEDLALLEALSEVVQNTENLKDEVYHILKVLFLFEFDEQGRELQKAFEDTLQLMERSLPEIWTLTYQQNSATPTWGEGVLLCCPSWS

SEQ ID NO: 88349 - protein, 123 aa, Homo sapiens
MAQKENSYPWPYGRQTAPSGLSTLPQRVLRKEPVTPSALVLMSRSNVQPTAAPGQKVMENSSGTPDILTRHFTIDDFEIGRPLGKDHGGVGRCSNVLPWEEGDSQRHKARKSALRAQGRAEDC

SEQ ID NO: 88350 - protein, 245 aa, Homo sapiens
MDIPLDLSSSAGSGKRRRRGNLPKESVQILRDWLYEHRYNAYPSEQEKALLSQQTHLSTLQVCNWFINARRRLLPDMLRKDGKDPNQFTISRRGAKISETSSVESVMGIKNFMPALEETPFHSCTAGPNPTLGRPLSPKPSSPGSVLARPSVICHTTVTALKDVPFSLCQSVGVGQNTDIQQIAAKNFTDTSLMYPEDTCKSGPSTNTQSGLFNTPPPTPPDLNQDFSGFQLLVDVALKRAAEME

SEQ ID NO: 88351 - protein, 149 aa, Homo sapiens
MSNRPNNNPGGSLRRSQRNTAGAQPQDDSIGGRSCSSSSAVIVPQPEDPDRANTSERQKTGQVPKKDNSRGVKRSASPDYNRTNSPSSAKKPKALQHTESPSETNKPHSKSKKRHLDQEQQLKSAQSPSTSKAHTRKSGATGGSRSQKR

SEQ ID NO: 88352 - protein, 332 aa, Homo sapiens
MAEGDAGSDQRQNEEIEAMAAIYGEEWCVIDDCAKIFCIRISDDIDDPKWTLCLQVMLPNEYPGTAPPIYQLNAPWLKGQERADLSNSLEEIYIQNIGESILYLWVEKIRDVLIQKSQMTEPGPDVKKKTEEEDVECEDDLILACQPESSLKALDFDISETRTEVEVEELPPIDHGIPITDRRSTFQAHLAPVVCPKQVKMVLSKLYENKKIASATHNIYAYRIYCEDKQTFLQDCEDDGETAAGGRLLHLMEILNVKNVMVVVSRWYGGILLGPDRFKHINNCARNILVEKNYTNSPEESSKALGKNKKCSSLSNGLSENPGVSICSYVLR

SEQ ID NO: 88353 - protein, 268 aa, Homo sapiens
MRELEAHSTLRRMAAFYQCIRPDPSELDMISTRVMDIKLREAAEGLGEDSTGKKKSKFKTFKKFFGKKKRKESPSSTGSSTWKQSQTRNEVIAIESGPVGYDSEDELEESRGTLGSRALSHDSIFIPESGQDATRPVRVFSQENVCDRIKALQLKIQCNVKMGPPPPPGGLPAKRGEDAGMSSEDDGLPRSPPEMSLLHDVGPGTTIKVSVVSPDHVSDSTVSARISDNSLAPVADFSYPAESSSCLDNSAAKHKLQVKPRNQRSSKM

SEQ ID NO: 88354 - protein, 114 aa, Homo sapiens
MKLLGEDSPVSKLQAYVEKYKFTSVVAQDLLDSFLSFFPELKEQSVDCRAGLEFERWLNATGPPLAEPDLSQGSSLTRPVEALFQLWTAEPLDQAAASASAIDISKWRTFQTAL

SEQ ID NO: 88355 - protein, 548 aa, Homo sapiens
MLHLHHSCLCFRSWLPAMLAVLLSLAPSASSDISASRPNILLLMADDLGIGDIGCYGNNTMRTPNIDRLAEDGVKLTQHISAASLCTPSRAAFLTGRYPVRSGKWHLGLNCESASDHCHHPLHHGFDHFYGMPFSLMGDCARWELSEKRVNLEQKLNFLFQVLALVALTLVAGKLTHLIPVSWMPVIWSALSAVLLLASSYFVGALIVHADCFLMRNHTITEQPMCFQRTTPLILQEVASFLKRNKHGPFLLFVSFLHVHIPLITMENFLGKSLHGLYGDNVEEMDWMVGRILDTLDVEGLSNSTLIYFTSDHGGSLENQLGNTQYGGWNGIYKGGKGMGGWEGGIRVPGIFRWPGVLPAGRVIGEPTSLMDVFPTVVRLAGGEVPQDRVIDGQDLLPLLLGTAQHSDHEFLMHYCERFLHAARWHQRDRGTMWKVHFVTPVFQPEGAGACYGRKVCPCFGEKVVHHDPPLLFDLSRDPSETHILTPASEPVFYQVMERVQQAVWEHQRTLSPVPLQLDRLGNIWRPWLQPCCGPFPLCWCLREDDPQ

SEQ ID NO: 88356 - protein, 47 aa, Homo sapiens
MVETPFLQQYNHYKSNVEIFKLQPNKPSKELAELVMFMAQNILNVCI

SEQ ID NO: 88357 - protein, 129 aa, Homo sapiens
MSTEGGFGGTSSSDAQQSLQSFWPRVMEEIRNLTVKDFRVQELPLARIKKIMKLDEDVKMISAEAPVLFAKAAQIFITELTLRAWIHTEDNKRRTLQRNDIAMAITKFDQFDFLIDIVPRDELKPPKRQ

SEQ ID NO: 88358 - protein, 193 aa, Homo sapiens
MAETSLPELGGEDKATPCPSILELEELLRAGKSSCSRVDEVWPNLFIGDAQGPGALCGGREPLCHAGPGLPHAAPAAVPAPGGDHREAAPMGLPQPRLPAPALQAGPATAGCRPELRGQSWSLLPAMGLCHFATLALILLVLLEALAQADTQKMVEAQRGVGPRACYSIWLLLAPTPPLSHCLQSPQKQHQVC

SEQ ID NO: 88359 - protein, 136 aa, Homo sapiens
  MOD_RES (1)..(1): Any amino acid
XHSLSCLLPRKTCLLPSAMIVRPPQPRGNGISMEAMSENKMVPSEFSTGPVEKAAKPLPFKDPNFVHSGHGGAVAGKKNRTWKNLKQILASERALPWQLNDPNYFSIDAPPSFKPAKKYSDVSGLLANYTDPQSKL

SEQ ID NO: 88360 - protein, 1031 aa, Homo sapiens
MLSKSVPVSGINCLLDRSDTDGNVSQSSAIDLRKRCSQLEGHSGTRVGSSLRQTFSFLSGMTGKAKTREKEKMKEAKDARYTNGHLFTTISVSGMTMCYACNKSITAKEALICPTCNVTIHNRCKDTLANCTKVKQKQQKAALLKNNTALQSVSLRSKTTIRERPSSAIYPSDSFRQSLLGSRRGRSSLSLAKSVSTTNIAGHFNDESPLGLRRILSQSTDSLNMRNRTLSVESLIDEAEVIYSELMSDFEMDEKDFAADSWSLAVDSSFLQQHKKEVMKQQDVIYELIQTELHHVRTLKIMTRLFRTGMLEELHLEPGVVQGLFPCVDELSDIHTRFLSQLLERRRQALCPGSTRNFVIHRLGDLLISQFSGPSAEQMCKTYSEFCSRHSKALKLYKELYARDKRFQQFIRKVTRPAVLKRHGVQECILLVTQRITKYPLLISRILQHSHGIEEERQDLTTALGLVKELLSNVDEGIYQLEKGARLQEIYNRMDPRAQTPVPGKGPFGREELLRRKLIHDGCLLWKTATGRFKDVLVLLMTDVLVFLQEKDQKYIFPTLDKPSVVSLQNLIVRDIANQEKGMFLISAAPPEMYEVHTASRDDRSTWIRVIQQSVRTCPSREDFPLIETEDEAYLRRIKMELQQKDRALVELLREKVGLFAEMTHFQAEEDGGSGMALPTLPRGLFRSESLESPRGERLLQDAIREVEGLKDLLVGPGVELLLTPREPALPLEPDSGGNTSPGVTANGEARTFNGSIELCRADSDSSQRDRNGNQLRSPQEEALQRLVNLYGLLHGLQAAVAQQDTLMEARFPEGPERREKLCRANSRDGEAGRAGAAPVAPEKQATELALLQRQHALLQEELRRCRRLGEERATEAGSLEARLRESEQARALLEREAEEARRQLAALGQTEPLPAEAPWARRPVDPRRRSLPAGDALYLSFNPPQPSRGTDRLDLPVTTRSVHRNFEDRERQELGSPEERLQDSSDPDTGSEEEGSSRLSPPHSPRDFTRMQDIPEETESRDGEAVASES

SEQ ID NO: 88361 - protein, 49 aa, Homo sapiens
MQTFTMVLEEIWTSLFMWFFYALIPCLLTGWSAVVQSQLTATSASEALH

SEQ ID NO: 88362 - protein, 27 aa, Homo sapiens
KNMELNVYGDDVEVDYRSYEGMVEMVS

SEQ ID NO: 88363 - protein, 316 aa, Homo sapiens
MAAAAAQGGGGGEPRRTEGVGPGVPGEVEMVKGQPFDVGPRYTQLQYIGEGAYGMVSSAYDHVRKTRVAIKKISPFEHQTYCQRTLREIQILLRFRHENVIGIRDILRASTLEAMRDVYIVQDLMETDLYKLLKSQQLSNDHICYFLYQILRGLKYIHSANVLHRDLKPSNLLINTTCDLKICDFGLARIADPEHDHTGFLTEYVATRWYRAPEIMLNSKGYTKSIDIWSVGCILAEMLSNRPIFPGKHYLDQLNHILGILGSPSQEDLNCIINMKARNYLQSLPSKTKVAWAKLFPKSDSKGSRDMRPLTCWTGC

SEQ ID NO: 88364 - protein, 44 aa, Homo sapiens
  MOD_RES (1)..(1): Any amino acid
XLNDKKSFVHGVTVKNRMIRLHPDGTVLYGLRYYGPGLEEVWHS

SEQ ID NO: 88365 - protein, 420 aa, Homo sapiens
MDSALSDPHNGSAEAGGPTNSTTRPPSTPEGIALAYGSLLLMALLPIFFGALRSVRCARGKNASDMPETITSRDAARFPIIASCTLLGLYLFFKVYFPNKSYAGSVLKTWKTQKSKKGKTAVIQNPTTRDSHSFPSEIFSQEYINLLLSMYFFVLGILALSHTISPFMNKFFPASFPNRQYQLLFTQGSGENKEEIINYEFDTKDLVCLGLSSIVGVWYLLRKHWIANNLFGLAFSLNGVELLHLNNVSTGCILLGGLFIYDVFWVFGTNVMVTVAKSFEAPIKLVFPQDLLEKGLEANNFAMLGLGDVVIPGIFIALLLRFDISLKKNTHTYFYTSFAAYIFGLGLTIFIMHIFKHAQPALLYLVPACIGFPVLVALAKGEVTEMFSYEESNPKDPAAVTESKEGTEASASKGLEKKEK

SEQ ID NO: 88366 - protein, 42 aa, Homo sapiens
MAAHLSYGRVNLNVLREAVRRELREFLDKCAGSKGLSVTLSY

SEQ ID NO: 88367 - protein, 182 aa, Homo sapiens
  MOD_RES (1)..(1): Any amino acid
XGSSQGTACAGTQPGAQPGAQPGASPSPSQPPADQSPHTLRKVSKKLAPIPPKVPFGQPGAMADQSAGQPSPVSLSPTPPSTPSPYGLSYPQGYSLASGQLSPAAAPPLASPSVFTSTLSKSRPTPKPRQRPTLPPPQPPTVNLSASSPQSTEAPMLDGMSPGESMSTGNQATGSLTFFYEL

SEQ ID NO: 88368 - protein, 162 aa, Homo sapiens
TGENKGWSGPKPGFPEPTNNTPKGILHLSPDVYQEMEASRHKVISGTTLGYLSPKDMNQPSSSFFSISPTSNSSATIARELLMNGTSSTAEAIGLKGSSPTPPCSPVQPSKQLEYLARIQGFQVHYCDRQSGKECVTCLTLAPVQMTFHAIGSSIEASHDQV

SEQ ID NO: 88369 - protein, 15 aa, Homo sapiens
  MOD_RES (1)..(1): Any amino acid
XRDGEGTHPETSGII

SEQ ID NO: 88370 - protein, 152 aa, Homo sapiens
MAEPGHSHHLSARVRGRTERRIPRLWRLLLWAGTAFQVTQGTGPELHACKESEYHYEYTACDSTGSRWRVAVPHTPGLCTSLPDPIKGTECSFSCNAGEFLDMKDQSCKPCAEGRYSLGTGIRFDEWDELPHGFASLSANMELDDSAAESTG

SEQ ID NO: 88371 - protein, 115 aa, Homo sapiens
YGGDDAQGMMAAMLSHAYGPGGCGAAAAALNGEQAALLRRKSVNTTECVPVPSSEHVAEIVGRQGECRGGEVQLGMAPGVGGETRERSVGRKRRTRRGPQVHREGVWEEPRVDQM

SEQ ID NO: 88372 - protein, 190 aa, Homo sapiens
MDKNIGEQLNKAYEAFRQACMDRDSAVKELQQKQTENYEQRIREQQEQLSLQQTIIDKLKSQLLLVNSTQDNNYGCVPLLEDSETRKNNLTLDQPQDKVISGIAREKLPKVRRQEVSSPRKETSARSLGSPLLHERGNIEKTFWDLKEEFHKICMLAKAQKDHLSKLNIPDTATETQCSVPIQCTDKTDK

SEQ ID NO: 88373 - protein, 84 aa, Homo sapiens
MLLLMSQCRKQFPPLCSAARRKQHCLGTRIITKNFSVNLSVCLLQLPVCPLWYLWKPVVGKSLLRYLMNLHISYTAHNKYPLNE

SEQ ID NO: 88374 - protein, 53 aa, Homo sapiens
MVLPQGLLTFRDVAIEFSQEEWKCLDPAQRTLYRDVMLENYRNLVSLDVLRSS

SEQ ID NO: 88375 - protein, 124 aa, Homo sapiens
MPCKRCRPSVYSLSYIKRGKTRNYLYPIWSPYAYYLYCYKYRITLREKMLPRCYKSITYKEEEDLTLQPRSCLQCSESLVGLQEGKSTEQGNHDQLKELYSFDCNPGVRGREDKCGLCVCELPE

SEQ ID NO: 88376 - protein, 105 aa, Homo sapiens
  MOD_RES (1)..(1): Any amino acid
XIEELIHTINGNPALCPNITVQKPFLRLSKEGVSFYTAITSDKTDVWKEQTLLCLLQLIHLPFLDNILEPPVKTQNLQLNKEEDLVITNTCLDRELIPSLCLPEK

SEQ ID NO: 88377 - protein, 139 aa, Homo sapiens
MKWMVVVLVCLQLLEAAVVKVPLKKFKSIRETMKEKGLLGEFLRTHKYDPAWKYRFGDLSVTYEPMAYMDVQSIQVPNQEFGLSENEPGTNFVYAQFDGIMGLAYPALSVDEATTAMQGMVQEGALTSPVFSVYLSNQQ

SEQ ID NO: 88378 - protein, 35 aa, Homo sapiens
  MOD_RES (1)..(1): Any amino acid
XGDETKLLVVDRETDEFFKKCRVIPSQEHLNGEQS

SEQ ID NO: 88379 - protein, 324 aa, Homo sapiens
MATALSEEELDNEDYYSLLNVRREASSEELKAAYRRLCMLYHPDKHRDPELKSQAERLFNLVHQAYEVLSDPQTRAIYDIYGKRGLEMEGWEVVERRRTPAEIREEFERLQREREERRLQQRTNPKGTISVGVDATDLFDRYDEEYEDVSGSSFPQIEINKMHISQSIEAPLTATDTAILSGSLSTQNGNGGGSINFALRRVTSAKGWGERMTDCLIIGLIDICQRCSPQPASASCRLCCCHVTLLELYIPVPSRTTAVSSFPICFVTTNCALQFSSRGIRPGLTTVLARNLDKNTVGYLQWRWGIQSAMNTSIVRDTKTSHFT

SEQ ID NO: 88380 - protein, 61 aa, Homo sapiens
MAAVELEWIPETLYNTAISAVVDNYIRSRRDIRSLPENIQFDVYYKTFASSLFSGFDGSWC

SEQ ID NO: 88381 - protein, 222 aa, Homo sapiens
TNQNSSSDSEAERRPPPRSESFRDKSRESLEEAAKRQDGGLFKGPPYPGYPFIMIPDLTSPYLPNGSLSPTARTLHFQSGSTHYSAYKTIEHQIAVQYLQMKWPLLDVQAGSLQSRQALKDARSPSPAHIVSPLPCCTQGHDCQHFYPPSDFTVSTQVFRDMKRSHSLQKVGEPWCIESNKVPVVQHPHHVHPLTPLITYSNEHFTPGNPPPHLPADVDPKT

SEQ ID NO: 88382 - protein, 82 aa, Homo sapiens
MDSVMPSQEPPVDDKNEDADLPSEETDGIAYISSSRKHDSIKDDSEDLKPVIDGMDGIKISQGLGLQDFDLIRVIGRGSYAK

SEQ ID NO: 88383 - protein, 44 aa, Homo sapiens
  MOD_RES (1)..(1): Any amino acid
XKSYNQSGLVAGAIFGFMATFLCMASIWLSYKISCVTQSTDAAV

SEQ ID NO: 88384 - protein, 80 aa, Homo sapiens
MWAPREQLLGWTAEALPAKDSAWPWEEKPRYLGPVTFEDVAVLFTEAEWKRLSLEQRNLYKEVMLENLRNLVSLVLSYQI

SEQ ID NO: 88385 - protein, 360 aa, Homo sapiens
AALDLLKGAFRSSEEQQQDVSEFTHKLLDWLEDAFQLAVNVNSPRNKSENPMVQLFYGTFLTEGVREGKPFCNNETFGQYPLQVNGYRNLDECLEGAMVEGDVELLPSDHSVKYGQERWFTKLPPVLTFELSRFEFNQSLGQPEKIHNKLEFPQIIYMDRYMYRSKELIRNKRECIRKLKEEIKILQQKLESTSTESSSQDVESTFSSPEDSLPKSKPLTSSRSSMEMPSQPAPRTVTDEEINFVKTCLQRWRSEIEQDIQDLKTCIASTTQTIEQMYCDPLLRQVPYRLHAVLVHEGQANAGHYWAYIYNQPRQSWLKYNDISVTESSWEEVERDSYGGLRNVSAYCLMYINDKLPYFN

SEQ ID NO: 88386 - protein, 171 aa, Homo sapiens
MACQQSRYHSFSSASRLQPRPSGVTIDESFLTEDKSTQNRKLLQKRRTLTGQFSMGGHLSPWPTYTSGQTILQNRKPCSDDYRKRVGSCQQHPFRTAKPQYLEELENYLRKELLLLDLGTDSTQELRLQVTKLRKNLAEEYLHYLSERDACKILIADLNELRYQREDMSLA

SEQ ID NO: 88387 - protein, 74 aa, Homo sapiens
  MOD_RES (1)..(1): Any amino acid
XLFRGRHYWVPAKRLFGGQIVGQALVAAAKSVSEDVHVHSLHCYFVRAEQMPSCVLRRSPAEKSLWTFTVCDLY

SEQ ID NO: 88388 - protein, 72 aa, Homo sapiens
MAYQLYRNTTLGNSLQESLDELIQITPQLALQVLLQFDKAINAALAQRVRNRVNFRGSLNTYRFCDNVWTFV

SEQ ID NO: 88389 - protein, 101 aa, Homo sapiens
MPVISPSPKPHASLPPLPLYDQPPSSPYPSPDKRSSLYFPRSPSANEKSLHAESPGFSQASRHTPETSYGKLRPVRAAPPPPTQNHRRPAEKIEDVEITLV

SEQ ID NO: 88390 - protein, 10 aa, Homo sapiens
MGMGRGAGRS

SEQ ID NO: 88391 - protein, 332 aa, Homo sapiens
MRQAGRYLPEFRETRAAQDFFSTCRSPEACCELTLQPLRRFPLDAAIIFSDILVVPQALGMEVTMVPGKGPSFPEPLREEQDLERLRDPEVVASELGYVFQAITLTRQRLAGRVPLIGFAGAPWTLMTYMVEGGGSSTMAQAKRWLYQRPQASHQLLRILTDALVPYLVGQVVAGAQALQLFESHAGHLGPQLFNKFALPYIRDVAKQVKARLREAGLAPVPMIIFAKDGHFALEELAQAGYEVVGLDWTVAPKKARECVGKTVTLQGNLDPCALYASEEEIGQLVKQMLDDFGPHRYIANLGHGLYPDMDPEHVGAFVDAVHKHSRLLRQN

SEQ ID NO: 88392 - protein, 278 aa, Homo sapiens
MAVLLLLLRALRRGPGPGPRPLWGPGPAWSPGFPARPGRGRPYMASRPPGDLAEAGGRALQSLQLRLLTPTFEGINGLLLKQHLVQNPVRLWQLLGGTFYFNTSRLKQKNKEKDKSKGKAPEEDEEERRRRERDDQMYRERLRTLLVIAVVMSLLNALSTSGGSISWNDFVHEMLAKGEVQRVQVVPESDVVEVYLHPGAVVFGRPRLALMYRMQVANIDKFEEKLRAAEDELNIEAKDRIPVSYKRTGFFGKVSLCRPGWSAVVQSQLTAASTSQDQ

SEQ ID NO: 88393 - protein, 332 aa, Homo sapiens
MKHSRDPNAVTVSWPSARSLLDGYIISISSESLMREEILPSTKRTFTFNSLSPGTDFLISIMTNKGLKRSHPTVLMVSTYPDPSDLLIWGQEENTICLSWKLSEGGFEKFQISYCMPSRQEKLIKVIVYGNKAKVKKLTLGMDYMFQVKKVKGKGYSVSVMKKVPIKPEQPEKLRAFNISTHSFSLHWSLPSGHVERYQVDLVPDSGFVTIRDLGGGEYQVDVSNVVPGTRYDITISSISTTYTSPVTRIVTTNVTKPGPPVFLAGERVGSAGILLSWNTPPNPNGRIISYIVKYKEVCPWMQTVYTQVRSKPDSLEVLLTNLNPGTTYEIK

SEQ ID NO: 88394 - protein, 275 aa, Homo sapiens
  MOD_RES (1)..(1): Any amino acid
XSPRPPPPVTPAALRVLGAAGAVGRKPLAERAGGIGGATIPESAPRAGPTRSAGTSSRNPASRPPASGRGERAPPAKNTSPGPVSSPGRASGTTRPGPLGQKGLRISAEETVARGKATEAPKRSALSAGARRARSGPSARGTPRAPAHPSQPKPKGLQALRPPQVTPPRKDAAPALGPLSSSPLATPSPSGTKPVQHAERPRPGRPQQQRHEHARGAAWLRQRARGRCRSLPAPRRRARRLPPGCLESRPRSAAGFPRSPRCAPAVASRYRTGLC

SEQ ID NO: 88395 - protein, 188 aa, Homo sapiens
  MOD_RES (1)..(1): Any amino acid
XYQILCGNQAPGFLTDIHTGKPLDVDECGSRESPCQQNADCINIPGSYRCKCTRGYKLSPGGACVGRNECREIPNVCSHGDCMDTEGSYMCLCHRGFQASADQTLCMDIDECDRQPCGNGTCKNIIGSYNCLCFPGFVVTHNGDCVDFDECTTLVGQVCRFGHCLNTAGSFHCLCQDGFELTADGKNC

SEQ ID NO: 88396 - protein, 776 aa, Homo sapiens
MAEPRQEFEVMEDHAGTYGLGDRKDQGGYTMHQDQEGDTDAGLKESPLQTPTEDGSEEPGSETSDAKSTPTAEDVTAPLVDEGAPGKQAAAQPHTEIPEGTTAEEAGIGDTPSLEDEAAGHVTQEPESGKVVQEGFLREPGPPGLSHQLMSGMPGAPLLPEGPREATRQPSGTGPEDTEGGRHAPELLKHQLLGDLHQEGPLLKGAGGKERPGSKEEVDEDRDVDESSPQDSPPSKASPAQDGRPPQTAAREATSIPGFPAEGAIPLPVDFLSKVSTEIPASEPNGPSAGRAKGQDAPLEFTFHVEITPNVQKEQAHSEEHLGRAAFPGAPGEGPEARGPSLGEDTKEADLPEPSEKQPAAAPRGKPVSWVPQLKARMVSKSKDGTGSDDKKAKTSTRSSAKTLKNRPCLSPKHPTPGSSDPLIQPSSPAVCPEPPSSPKYVSSVTPRTGSSGAKEMKLKGADGKTKIATPRGAAPPGQKGQANATRIPAKTPPAPKTPPSSATKQVQRRPPPAGPRSERGEPPKSGDRSGYSSPGSPGTPGSRSRTPSLPTPPTREPKKVAVVRTPPKSPSSAKSRLQTAPVPMPDLKNVKSKIGSTENLKHQPGGGKVQIINKKLDLSNVQSKCGSKDNIKHVPGGGSVQIVYKPVDLSKVTSKCGSLGNIHHKPGGGQVEVKSEKLDFKDRVQSKIGSLDNITHVPGGGNKKIETHKLTFRENAKAKTDHGAEIVYKSPVVSGDTSPRHLSNVSSTGSIDMVDSPQLATLADEVSASLAKQGL

SEQ ID NO: 88397 - protein, 208 aa, Homo sapiens
  MOD_RES (1)..(1): Any amino acid
XASQYLPNPMAATTCPTAYYQPAPQPGQQGDIGSVVDEHFSRALGQAITLHPESAISKSKMGLTPLWRDSSALSSQRNSFPTSFWTSSYQPPPAPCLGGVHPDFQVTGPPGTFSAADPSPWPGHNLHQTGPAPPPAVSESWPYPLTSQVSPSYSHMHDVYMRHHHPHAHMHHRHRHHHHHHHPPAGSALDPSYGPLLMPSVHAARIPA

SEQ ID NO: 88398 - protein, 77 aa, Homo sapiens
MAGAGGGGCPAGGNDFQWCFSQVKGAIDEDVAEADIISTVEFNYSGDLLATGDKGGRVVIFQREQEVLAQPRRPALP

SEQ ID NO: 88399 - protein, 205 aa, Homo sapiens
MGGEDDELKGLLGLPEEETELDNLTEFNTAHNKRISTLTIEEGNLDIQRPKRKRKNSRVTFSEDDEIINPEDVDPSVGRFRNMVQTAVVPVKKKRVEGPGSLGLEESGSRRMQNFAFSGGLYGGLPPTHSEAGSQPHGIHGTALIGGLPMPYPNLAPDVDLTPVVPSAVNMNPAPNPAVYNPEAVNEPKKKKYAKEAWPGKKPTP

SEQ ID NO: 88400 - protein, 1098 aa, Homo sapiens
MSKKIAQLTKVIYALNTKNDEHESAIQALKDAHEEEIQQILAETREKILQYKSKVTEELDLRRKIQVLESSLEDHIKMKQQALTEFEAYKHRVEDMQLCAEAQHVQRIVTMSREVEEIRRKFEEKLRSFGQLQVQFEKDKRLALEDLQAAHRREIQELLKSQQDHSASVNKGQEKAEELHRMEVESLNKMLEELRLERKKLIEDYEGKLNKAQSFYERELDTLKRSQLFTAESLQASKEKEADLRKEFQGQEAILRKTIGKLKTELQMVQDEAGSLLDKCQKLQTALAIAENNVQVLQKQLDDAKEGEMALLSKHKEVESELAAARERLQQQASDLVLKASHIGMLQATQMTQEVTIKDLESEKSRVNERLSQLEEERAFLRSKTQSLDEEQKQQILELEKKVNEAKRTQQEYYERELKNLQSRLEEEVTQLNEAHSKTLEELAWKHHMAIEAVHSNAIRDKKKLQMDLEEQHNKDKLNLEEDKNQLQQELENLKEVLEDKLVNLQKKEIGHLQDMVRKSEQGLGSAEGLIASLQDSQERLQNELDLTKDSLKETKDALLNVEGELEQERQQHEETIAAMKEEEKLKVDKMAHDLEIKWTENLRQECSKLREELRLQHEEDKKSAMSQLLQLKDREKNAARDSWQKKVEDLLNQISLLKQNLEIQLSQSQTSLQQLQAQFTQERQRLTQELEELEEQHQQRHKSLKEAHVLAFQTMEEEKEKEQRALENHLQQKHSAELQSLKDAHRESMEGFRIEMEQELQTLRFELEDEGKAMLASLRSELNHQHAAAIDLLRHNHHQELAAAKMELERSIDISRRQSKEHICRITDLQEELRHREHHISELDKEVQHLHENISALTKELEFKGKEILRIRSESNQQIRLHEQDLNKRLEKELDVMTADHLREKNIMRADFNKTNELLKEINAALQVSLEEMEEKYLMRESKPEDIQMITELKAMLTERDQIIKKLIEDNKFYQLELVNRETNFNKVFNSSPTVGVINPLAKQKKKNDKSPTNRFVSVPNLSALESGGVGNGHPNRLDPIPNSPVHDIEFNSSKPLPQPVPPKGPKTFLSPAQSEASPVASPDPQRQEWFARYFTF

SEQ ID NO: 88401 - protein, 16 aa, Homo sapiens
  MOD_RES (1)..(1): Any amino acid
XKEHYQVLGAFCLTLE

SEQ ID NO: 88402 - protein, 112 aa, Homo sapiens
  MOD_RES (1)..(1): Any amino acid
XGGNEQLPPKPAPEAGVAIAACVEMEQLYDPLDSDMPAMDTAGLFKESHEDMKKSDEEEEKQKMEDSLWAGVEACQKASGGSFNGFTQPQDTSLFTMQTDQSMICNLEITVN

SEQ ID NO: 88403 - protein, 1603 aa, Homo sapiens
MSVDAQTLKKKMGKLACDPAAHSILSSLLLYVTGRADRPPGTEAGGSRPSHQPQTQEATQRPTRFQLLQAKFLGTGRERYLKRTREVGRLISKDKQGPGGGLVGATINKLLEKTKEPAPKPCLSEKPRWGHPAGKSTVKNILKIFLAAEEKEAKEKEAREKPPVERPKAARGLLPKIMGKSSVLSKLREKFEQNSCLCSEASALRLHTQERKKRNLQRKRMHRPEVRVLHTATMASTCVKMPPARFLACTAEPLPALSIATVVCGPRSWLSHCTKISHSEARRPPRGEASVPPSARETGPSGNKAVGKGPLEEEPQRQPRPSKPVTPQVMAQRDGHAVPSLAFSCAPCTGGVLPGLVPASSPLGPASPWGTGSAGGDGTADPTAESTAGGVQEVRGARLTWPPGPPGECAGEGPEITMTVCSSEDEREGAGFPDPGRDPLFATQKYFPEQKVPEHIPPLNAPSVQAARRTQPATEPPRITVQIPVVHEMPAPPTRLQNMSSGENKPCICGGENVVENAHTEFPTVTENRRGHRAPVELSKLSGMQAGLSASSPQGPRAAPRLAAARGAVGADHSVPETLLTQRLQTDPAGGKENKGSFENSHGPRNPDDISGERTSELRDVKHPLPESNEISMQKKGSATNDPAASQNLLRGNTSHASSSQQVPSPTGRNPTGAPTSLAASSKGRTGPEGVTPMGMTVPGALEECRRPLLIESSQPLKAAEEITSHDVRENPLSSLNEPPKPGMKACGAMAAAGSVASRATPAPAPGSTQSPGDRTAGEPETLGQWGSRALSESHPRGEALPRDPHSHGLLAPGGSLEPKSGAAGRSLLRGVALVQHPEDIATLARHPEDAAALARHPEAARLYISNTSAASRHTAAVGGRKDVAVEGNLLGFSTESGIPASDHPRPQARSVAESPSYGPGLPPSPPENPQAKGREGVRFPRGAEPDHLLPAVPPAEVDMGWVGGTHQRGPPHLQAHLPPTAGDTQAKLRASVPEPRTQAGESQERPLTQADLGRQQSHQAQEETPQPGDAGKRVAPSGSKVVLNPAKEPQTWWAQDLAGDKGMAIGVGGACQRSDQGQQHLQGPWEERGRSTAWGEGTRAARNPAVPPGEPEGPGSPAAQGQAQKQVQEWDRGQVQGHAQEQAQWQTQIEAQGQAQEQAQGGTQGHSQGQAQKQFQNWAQGQAQGHAQEQAQWQTQIEAQGQAQEPAQGGAQGQVQGQAQKWAQGQIQGQAQKQVQGEVQKWAQEEAQGQAQWQTQIKAQKWAQEQTQKGAQERVQGQAQKGAQERAQEQAQEQTQIEAQGQAQKGAQERAREQAQKGAQERAREQAQKGAQERAREQAQKGAQERAREQAQKGAQERAREQAQKGAQERAREQAQKGAQERAQEQGREQTHIEAQGQAQKGAQEWARDRARDQGWEQTQIETQRQTQKGAQERAWEQGREQALTSGMAPRAWEQPISGIAEGVDAAGRSGGSRSPAPRDGGQSGGSGLGEPSAGYPPPGSRPLRGKSIATSPLGLGKSPTEPKPEAGGCGTPQAPAQEGSPDHPGAERALQDRMEASEPERRGRSRHLAKYKAQSFRDQRAFDLSFRPMSVRASDTSELPK

SEQ ID NO: 88404 - protein, 135 aa, Homo sapiens
MSGAGVAAGTRPPSSPTPGSRRRRQRPSVGVQSLRPQSPQLRQSDPQKRNLDLEKSLQFLQQQHSEMLAKLHEEIEHLKRENKGEPARGPRPALPPQAHSTLPLPQHRNTAINSSTRLGSGGTQDGSDTPLLKTL

SEQ ID NO: 88405 - protein, 1133 aa, Homo sapiens
MSVKEGAQRKWAALKEKLGPQDSDPTEANLESADPELCIRLLQMPSVVNYSGLRKRLEGSDGGWMVQFLEQSGLDLLLEALARLSGRGVARISDALLQLTCVSCVRAVMNSRQGIEYILSNQGYVRQLSQALDTSNVMVKKQVFELLAALCIYSPEGHVLTLDALDHYKTVCSQQYRFSIVMNELSGSDNVPYVVTLLSVINAVILGPEDLRARTQLRNEFIGLQLLDVLARLRDLEDADLLIQLEAFEEAKAEDEEELLRVSGGVDMSSHQEVFASLFHKVSCSPVSAQLLSVLQGLLHLEPTLRSSQLLWEALESLVNRAVLLASDAQECTLEEVVERLLSVKGRPRPSPLVKAHKSVQANLDQSQRGSSPQNTTTPKPSVEGQQPAAAAACEPVDHAQSESILKVSQPRALEQQASTPPPPPPPPLLPGSSAEPPPPPPPPPLPSVGAKALPTAPPPPPLPGLGAMAPPAPPLPPPLPGSCEFLPPPPPPLPGLGCPPPPPPLLPGMGWGPPPPPPPLLPCTCSPPVAGGMEEVIVAQVDHGLGSAWVPSHRRVNPPTLRMKKLNWQKLPSNVAREHNSMWASLSSPDAEAVEPDFSSIERLFSFPAAKPKEPTMVAPRARKEPKEITFLDAKKSLNLNIFLKQFKCSNEEVAAMIRAGDTTKFDVEVLKQLLKLLPEKHEIENLRAFTEERAKLASADHFYLLLLAIPCYQLRIECMLLCEGAAAVLDMVRPKAQLVLAACESLLTSRQLPIFCQLILRIGNFLNYGSHTGDADGFKISTLLKLTETKSQQNRVTLLHHVLEEAEKSHPDLLQLPRDLEQPSQAAGINLEIIRSEASSNLKKLLETERKVSASVAEVQEQYTERLQASISAFRALDELFEAIEQKQRELADYLCEDAQQLSLEDTFSTMKAFRDLFLRALKENKDRKEQAAKAERRKQQLAEEEARRPRGEDGKPVRKGPGKQEEVCVIDALLADIRKGFQLRKTARGRGDTDGGSKAASMDPPRATEPVATSNPAGDPVGSTRCPASEPGLDATTASESRGWDLVDAVTPGPQPTLEQLEEGGPRPLERRSSWPRPTAQVRGWRTLSTAVVPDPLQQAQVGMRTRTRRTRPQSPHWTHPWTSPSPRMR

SEQ ID NO: 88406 - protein, 155 aa, Homo sapiens
MEEDLFQLRQLPVVKFRRTGESARSEDDTASGEHEVQIEGVHVGLEAVELDDGAAVPKEFANPTDDTFMVEDAVEAIGFGKFQWKLSVLTGLAWVVFVGMMSSSTLWGNISDQYGRKTGLKISVLWTLYYGILSAFAPVYSWILVLRGLVGFGIG

SEQ ID NO: 88407 - protein, 383 aa, Homo sapiens
MIFGCFALFELLASLVFGNYLVHIGAKFMFVAGMFVSGGVTILFGVLDRVPDGPVFIAMCFLVRVMDAVSFAAAMTASSSILAKAFPNNVATVLGSLETFSGLGLILGPPVGGFLYQSFGYEVPFIVLGCVVLLMVPLNMYILPNYESDPGEHSFWKLIALPKVGLIAFVINSLSSCFGFLDPTLSLFVLEKFNLPAGYVGLVFLGMALSYAISSPLFGLLSDKRPPLRKWLLVFGNLITAGCYMLLGPVPILHIKSQLWLLVLILVVSGLSAGMSIIPTFPEILSCAHENGFEEGLSTLGLVSGLFSAMWSIGAFMGPTLGGFLYEKIGFEWAAAIQGLWALISGLAMGLFYLLEYSRRKRSKSQNILSTEEERTTLLPNET

SEQ ID NO: 88408 - protein, 227 aa, Homo sapiens
GFGFVTFENSADADRAREKLHGTVVEGRKIEVNNATARVMTNKKMVTPYANGWKLSPVVGAVYGPELYAASSFQADVSLGNDAAVPLSGRGGINTYIPLIIPGFPYPTAATTAAAFRGAHLRGRGRTVYGAVRAVPPTAIPAYPGIVLQEPIISAKIPQGGYAAYRYAQPATATAATAAAAAAAAYSDGYGRVYTADPYHALAPAASYGVGAVASLYRGGYSRFAPY

SEQ ID NO: 88409 - protein, 21 aa, Homo sapiens
  MOD_RES (1)..(1): Any amino acid
XKVTKGNVTIKIFLMPWMRNS

SEQ ID NO: 88410 - protein, 25 aa, Homo sapiens
QRSPRWEDSYPSAWEGFKENQTGSL

SEQ ID NO: 88411 - protein, 149 aa, Homo sapiens
MKMKIQKKEKQLSNLKVLNHSPMSDASVNFDYKSPSPFDCSTDQEEKIEDVASHCLPQKDLYTAEEEAATLFPRKMTSHNGMEDSGGGGTGVKKKRKKKEPGDQEGAAKGSKDREPKPKRKREPKEPKEPRKAKEPKKAKEHKEPKQKD

SEQ ID NO: 88412 - protein, 51 aa, Homo sapiens
MAGPCTWVLERPSLHSVATSASCQAGSTRSCFGVQTQRRNSSAASRARTHR

SEQ ID NO: 88413 - protein, 575 aa, Homo sapiens
  MOD_RES (1)..(1): Any amino acid
XQTYLQAASDVPVGHSLDPAANYNSPKFRSRNQSYMRAVSTLSQASCVSQVSEAEINGQFESVCESVFSEVESQAMDALDLPGCFRTRSHSYLRAIQAGYSQDDECIPMMTPSDITSTIRSTAAVSYTNYKKTPPPVPPRTTSKPLISVTAQSSTESTQDAYQDSRAQRMSPWPQDSRGLYNSTDSLDSNKAMNLALETAAAQRHLPESQSSSVRTSDKAILVSKAEELLKSRCSSIGIQDSEFPEHQPYPRSDVETATDSDTESRGLREYHSVGVQVEDEKRHGRFKRSNSVTAAVQADLELEGFPGHITTEDKGLQFGSSFQRHSEPSTPTQYSAVRTVRTQGLFSYREDYRTQVDTSTLPPPDPWLEPAIDTVETGRMSPCRRDGSWFLKLLHAETKRMEGWCKEMEREAEENDLSEEILGKIRSAVGSAQLLMSQKFQQFYWLCQQNMDPSAMPRPTSQDLAGYWDMLQLSIEDVSMKFDELQRLRLNDWKMMESPERKEERKVPPPIPKKPPKGKFPITREKSLDLPDRQRQEARRRLMAAKRAASFRQNSASERADSIEIYIPEAQTRL

SEQ ID NO: 88414 - protein, 724 aa, Homo sapiens
MHLEGRDGRRYPGAPAVELLQTSVPSGLAELVAGKRRLPRGAGGADPSHSCPRGAAGQSSWAPAGQEFASFLTKGRSHSSLPQMSSSRSKDSCFTENTPLLRNSLQEKGSRCIPVYHPEFITAEESWEDSSADWERRYLLSREVSGLSASASSEKGDLLDSPHIRLRLSKLRRCVQWLKVMGLFAFVVLCSILFSLYPDQGKLWQLLALSPLENYSVNLSSHVDSTLLQVDLAGALVASGPSRPGREEHIVVELTQADALGSRWRRPQQVTHNWTVYLNPRRSEHSVMSRTFEVLTRETVSISIRASLQQTQAVPLLMAHQYLRGSVETQVTIATAILAGVYALIIFERPSLTHVVEWIDFETLALLFGMMILVAIFSETGFFDYCAVKAYRLSRGRVWAMIIMLCLIAAVLSAFLDNVTTMLLFTPVTIRLCEVLNLDPRQVLIAEVIFTNIGGAATAIGDPPNVIIVSNQELRKMGLDFAGFTAHMFIGICLVLLVCFPLLRLLYWNRKLYNKEPSEIVELKHEIHVWRLTAQRISPASREETAVRRLLLGKVLALEHLLARRLHTFHRQISQEDKNWETNIQELQKKHRISDGILLAKCLTVLGFVIFMFFLNSFVPGIHLDLGWIAILGAIWLLILADIHDFEIILHRVEWATLLFFAALFVLMEALAHLHLIEYVGEQTALLIKMVPEEQRLIAAIVLVVWVSALASSLIDNIPFTATM

SEQ ID NO: 88415 - protein, 60 aa, Homo sapiens
LQAMPAAGGVLYQPSGPASFPSTFSPAGSVEGSPMHGVYMSQPAPAAGPYPSMPSTAAET

SEQ ID NO: 88416 - protein, 373 aa, Homo sapiens
MAEVLRTLAGKPKCHALRPMILFLIMLVLVLFGYGVLSPRSLMPGSLERGFCMAVREPDHLQRVSLPRMVYPQPKVLTPCRKDVLVTPWLAPIVWEGTFNIDILNEQFRLQNTTIGLTVFAIKKYVAFLKLFLETAEKHFMVGHRVHYYVFTDQPAAVPRVTLGTGRQLSVLEVRAYKRWQDVSMRRMEMISDFCERRFLSEVDYLVCVDVDMEFRDHVGVEILTPLFGTLHPGFYGSSREAFTYERRPQSQAYIPKDEGDFYYLGGFFGGSVQEVQRLTRACHQAMMVDQANGIEAVWHDESHLNKYLLRHKPTKVLSPEYLWDQQLLGWPAVLRKLRFTAVPKNHQAVRRERLPGALGGLPAAPSPSRPWF

SEQ ID NO: 88417 - protein, 131 aa, Homo sapiens
MKPIVLPPVVISWWTLGKSVTVVLQRNVNWTLAAKEVPVSLNHLLSVHMVTVVKTVGSFQEVLYAEEKPVSVMFQSTAMVLLSSVSQMFLFRMDILARITKPIATTACASIMMLNVKSSLAQECFVWKASV

SEQ ID NO: 88418 - protein, 145 aa, Homo sapiens
VGKDDVDNSKPGPSRPGPSPLINQYSLTVGLDLGPHDTKSLLKCVESLSFIVRDAAHITPDNFELCVKTLRIFVEARCKSQEKRGKSHKYDSKGNRFKKKSKEGSMLRRPRTSSQHASRGGQSDDDEDEGVPASYHTVSLQVSQD

SEQ ID NO: 88419 - protein, 351 aa, Homo sapiens
MGGCFCIPRERSLTRGPGKETPSKDPTVSSECIASSEYKEKCFLPQNINPDLTLSFCVKSRSRRCVNGPLQEAARRRLWALENEDQEVRMLFKDLSARLVSIQSQRAQFLITFKTMEEIWKFSTYLNLGYVSMCLEHLLFDHKYWLNCILVEDTEIQVSVDDKHLETIYLGLLIQEGHFFCRALCSVTPPAEKEGECLTLCKNELISVKMAEAGSELEGVSLVTGQRGLVLVSALEPLPLPFHQWFLKNYPGSCGLSRKRDWTGSYQIGRGRCKALTGYEPGEKDELNFYQGESIEIIGFVIPGLQWFIGKSTSSGQVGFVPTRNIDPDSYSPITLQISELLESQQQRDGF

SEQ ID NO: 88420 - protein, 2012 aa, Homo sapiens
  MOD_RES (1)..(1): Any amino acid
XFRFYEDNSTWDVHQQFLWGPGLLITPVLDEGAEKVMAYVPDAVWYDYETGSQVRWRKQKVEMELPGDKIGLHLRGGYIFPTQQPNTTTLASRKNPLGLIIALDENKEAKGELFWDNGETKDTVANKVYLLCEFSVTQNRLEVNISQSTYKDPNNLAFNEIKILGTEEPSNVTVKHNGVPSQTSPTVTYDSNLKVAIITDIDLLLGEAYTVEWSIKIRDEEKIDCYPDENGASAENCTARGCIWEASNSSGVPFCYFVNDLYSVSDVQYNSHGATADISLKSSVYANAFPSTPVNPLRLDVTYHKNEMLQFKIYDPNKNRYEVPVPLNIPSMPSSTPEGQLYDVLIKKNPFGIEIRRKSTGTIIWDSQLLGFTFSDMFIRISTRLPSKYLYGFGETEHRSYRRDLEWHTWGMFSRDQPPGYKKNSYGVHPYYMGLEEDGSAHGVLLLNSNAMDVTFQPLPALTYRTTGGVLDFYVFLGPTPELVTQQYTELIGRPVMVPYWSLGFQLCRYGYQNDSEIASLYDEMVAAQIPYDVQYSDIDYMERQLDFTLSPKFAGFPALINRMKADGMRVILILDPAISGNETQPYPAFTRGVEDDVFIKYPNDGDIVWGKVWPDFPDVVVNGSLDWDSQVELYRAYVAFPDFFRNSTAKWWKREIEELYNNPQNPERSLKFDGMWIDMNEPSSFVNGAVSPGCRDASLNHPPYMPHLESRDRGLSSKTLCMESQQILPDGSLVQHYNVHNLYGWSQTRPTYEAVQEVTGQRGVVITRSTFPSSGRWAGHWLGDNTAAWDQLKKSIIGMMEFSLFGISYTGADICGFFQDAEYEMCVRWMQLGAFYPFSRNHNTIGTRRQDPVSWDAAFVNISRNVLQTRYTLLPYLYTLMQKAHTEGVTVVRPLLHEFVSDQVTWDIDSQFLLGPAFLVSPVLERNARNVTAYFPRARWYDYYTGVDINARGEWKTLPAPLDHINLHVRGGYILPWQEPALNTHLSRKNPLGLIIALDENKEAKGELFWDDGQTKDTVAKKVYLLCEFSVTQNHLEVTISQSTYKDPNNLAFNEIKILGMEEPSNVTVKHNGVPSQTSPTVTYDSNLKVAIITDINLFLGEAYTVEWSIKIRDEEKIDCYPDENGDSAENCTARGCIWEASNSSGVPFCYFVNDLYSVSDVQYNSHGATADISLKSSVHANAFPSTPVNPLRLDVTYHKNEMLQFKIYDPNNNRYEVPVPLNIPSVPSSTPEGQLYDVLIKKNPFGIEIRRKSTGTIIWDSQLLGFTFNDMFIRISTRLPSKYLYGFGETEHTSYRRDLEWHTWGMFSRDQPPGYKKNSYGVHPYYMGLEEDGSAHGVLLLNSNAMDVTFQPLPALTYRTTGGVLDFYVFLGPTPELVTQQYTELIGRPVMVPYWSLGFQLCRYGYQNDSEISSLYDEMVAAQIPYDVQYSDIDYMERQLDFTLSPKFAGFPALINRMKADGMRVILILDPAISGNETQPYPAFTRGVEDDVFIKYPNDGDIVWGKVWPDFPDVVVNGSLDWDSQVELYRAYVAFPDFFRNSTAKWWKREIEELYNNPQNPERSLKFDGMWIDMNEPSSFVNGAVSPGCRDASLNHPPYMPYLESRDRGLSSKTLCMESQQILPDGSPVQHYNVHNLYGWSQTRPTYEAVQEVTGQRGVVITRSTFPSSGRWAGHWLGDNTAAWDQLKKSIIGMMEFSLFGISYTGADICGFFQDAEYEMCVRWMQLGAFYPFSRNHNTIGTRRQDPVSWDVAFVNISRTVLQTRYTLLPYLYTLMHKAHTEGVTVVRPLLHEFVSDQVTWDIDSQFLLGPAFLVSPVLERNARNVTAYFPRARWYDYYTGVDINARGEWKTLPAPLDHINLHVRGGYILPWQEPALNTHLSRQKFMGFKIALDDEGTAGGWLFWDDGQSIDTYGKGLYYLASFSASQNTMQSHIIFNNYITGTNPLKLGYIEIWGVGSVPVTSVSISVSGMVITPSFNNDPTTQVLSIDVTDRNISLHNFTSLTWISTL

SEQ ID NO: 88421 - protein, 327 aa, Homo sapiens
MDKGRERMAAAAAAAAAAAAAAQCRSPRCAAERRGFRRELDSWRHRLMHCVGFESILEGLYGPRLRRDLSLFEDCEPEELTDWSMDEKCSFCNLQREAVSDCIPSLDSSQSTPTEELSSQGQSNTDKIECQAENYLNALFRKKDLPQNCDPNIPLVAQELMKKMIRQFAIEYISKSGKTQENRNGSIGPSIVCKSIQMNQAENSLQEEQEGPLDLTVNRMQEQNTQQGDGVLDLSTKKTSIKSEESSICDPSSENSVAGLQTCFLYLSMLQVKTDEKLNVSDENTASCPLSPIKMCLNRPIEWNLNLTTASLTSCTVHNQNLKSEEK

SEQ ID NO: 88422 - protein, 43 aa, Homo sapiens
  MOD_RES (1)..(1): Any amino acid
XSWQENISLKELQSRGVCLLKLQVISWACTMLLMRAVSWPLGS

SEQ ID NO: 88423 - protein, 5386 aa, Homo sapiens
  MOD_RES (1)..(1): Any amino acid
XTTEDTLITGSKTAAPVTSTGSTTATLEGQSTAASSRTSNQDISASSQNHQTKSTETTSKAQTDTLTQMMTSTLFSSPSVHNVMETAPPDEMTTSFPSSVTNTLMMTSKTITMTTSTDSTLGNTEETSTAGTESSTPVTSAVSITAGQEGQSRTTSWRTSIQDTSASSQNHWTRSTQTTRESQTSTLTHRTTSTPSFSPSVHNVTGTVSQKTSPSGETATSSLCSVTNTSMMTSEKITVTTSTGSTLGNPGETSSVPVTGSLMPVTSAALVTFDPEGQSPATFSRTSTQDTTAFSKNHQTQSVETTRVSQINTLNTLTPVTTSTVLSSPSGFNPSGTVSQETFPSGETTTSSPSSVSNTFLVTSKVFRMPTSRDSTLGNTEETSLSVSGTISAITSKVSTIWWSDTLSTALSPSSLPPKISTAFHTQQSEGAETTGRPHERSSFSPGVSQEIFTLHETTTWPSSFSSKGHTTWSQTELPSTSTGAATRLVTGNPSTGTAGTIPRVPSKVSAIGEPGEPTTYSSHSTTLPKTTGAGAQTQWTQETGTTGEALLSSPSYSVTQMIKTATSPSSSPMLDRHTSQQITTAPSTNHSTIHSTSTSPQESPAVSQRGHTQAPQTTQESQTTRSVSPMTDTKTVTTPGSSFTASGHSPSEIVPQDAPTISAATTFAPAPTGDGHTTQAPTTALQAAPSSHDATLGPSGGTSLSKTGALTLANSVVSTPGGPEGQWTSASASTSPDTAAAMTHTHQAESTEASGQTQTSEPASSGSRTTSAGTATPSSSGASGTTPSGSEGISTSGETTRFSSNPSRDSHTTQSTTELLSASASHGAIPVSTGMASSIVPGTFHPTLSEASTAGRPTGQSSPTSPSASPQETAAISRMAQTQRTRTSRGSDTISLASQATDTFSTVPPTPPSITSTGLTSPQTETHTLSPSGSGKTFTTALISNATPLPVTYASSASTGHTTPLHVTDASSVSTGHATPLPVTSPSSVSTGHTTPLPVTDTSSESTGHVTPLPVTSFSSASTGDSTPLPVTDTSSASTGHVTPLPVTSLSSASTGDTTPLPVTDTSSASTGHATSLPVTDTSSVSTGHTTPLPVTDTSSASTGHATSLPVTDTSSVSTGHTTPLHVTDASSASTGQATPLPVTSLSSVSTGDTTPLPVTSPSSASTGHATPLLVTDTSSASTGHATPLPVTDASSVSTDHATSLPVTIPSAASTGHTTPLPVTDTSSASTGQATSLLVTDTSSVSTGDTTPLPVTSTSSASTGHVTPLHVTSPSSASTGHATPLPVTSLSSASTGDTMPLPVTSPSSASTGDTTPLPVTDASSVSTGHTTPLHVTDASSASTGQATPLPVTSLSSVSTGDTTPLPVTSPSSASTGHATPLLVTDTSSASTGHATPLPVTDASSVSTDHATSLPVTIPSAASTGHTTPLPVTDTSSASTGQATSLLVTDTSSVSTGDTTPLPVTSTSSASTGHVTPLHVTSPSSASTGHATPLPVTSLSSASTGDTMPLPVTSPSSASTGDTTPLPVTDASSVSTGHTTPLPVTSPSSASTGHTTPLPVTDTSSASKGDTTPLPVTSPSSASTGHTTPLPVTDTSSASTGDTTPLPVTNASSLSTGHATPLHVTSPSSASTGHATPLPVTSTSSASTGHATPLPVTGLSSATTDDTTRLPVTDVSSASTGQATPLPVTSLSSVSTGDTTPLPVTSPSSASTGHASPLLVTDASSASTGQATPLPVTDTSSVSTAHATPLPVTGLSSASTDDTTRLPVTDVSSASTGQAIPLPVTSPSSASTGDTTPLPVTDASSASTGDTTSLPVTIPSSASSGHTTSLPVTDASSVSTGHATSLLVTDASSVSTGDTTPLPVTDTNSASTGDTTPLHVTDASSVSTGHATSLPVTSLSSASTGDTTPLPVTSPSSASSGHTTPLPVTDASSVPTGHATSLPVTDASSVSTGHATPLPVTDASSVSTGHATPLPVTDTSSVSTGQATPLPVTSLSSASTGDTTPLPVTDTSSASTGHAPHLPVTGLSSASTGDTTRLPVTNVSSASTGHATPLPVTSTSSASTGDTTPLPGTDTSSVSTGHTTPLLVTDASSVSTGDTTRLPVTSPSSASTGHTTPLHVTDASSVSTGHTTPLPVTDTSSASTGQATSLLVTDTSSVSTGDTTPLPVTSTSSASTGHVTPLHVTSPSSASTGHATPLPVTSLSSASTGDTTPLPVTDTSSVSTGHTTPLPVTSPSSASTGHTTPLPVTDTSSASKGDTTPLPVTSPSSASTGHTTPLPVTDTSSASTGDTTPLPVTNASSLSTGHATPLHVTSPSSASTGHATPLPVTSTSSASTGHATPLPVTSTSSASTGHATPLPVTDNSSVSTGHATPLPVTGLSSATTDDTTRLPVTDVSSASTGQATPLPVTSLSSVSTGDTTPLPVTSPSSASTGHASPLLVTDASSASTGQATPLPVTDTSSVSTAHATPLPVTGLSSASTDDTTRLPVTDVSSASTGQAIPLPVTSPSSASTGDTTPLPVTDASSASTGDTTSLPVTIPSSASSGHTTSLPVTDASSVSTGHATSLLVTDASSVSTGDTTPLPVTDTNSASTGDTTPLHVTDASSVSTGHATSLPVTSLSSASTGDTTPLPVTSPSSASSGHTTSLPVTDASSVSTGHATSLPVTIPSSASSGHTTPLPVTDASSVPTGHATSLPVTDASSVSTGHATPLPVTDASSVSTGHATPLPVTDTSSVSTGQATPLPVTSLSSASSTGDTTPLPVTDTSSASTGQDTPLPVTSLFSVSTGDTTPLPVTSPSSASTGHATHLLVTDASSVSTGHATSLLVTDASSVSTGHATALHVTDASSLSTGDTTPLPVTSPSSASTGDTTPLPVTDTSSVSTGHATSLPVTDTSSASTGHATSLPVTDTSSASTGQATPLPVTSPSSASTGHAIPLLVTDTSSASTGQATPLPVTSLSSASTGDTTPLPVTDASSVSTGHATSLPVTSLSSVSTGDTTPLPVTSPSSASTGHATPLHVTSPSSASTGHATPLPVTSLSSASTGDTTPLPVTSPSSASTGHATPLHVTDASSVSTGDTTPLPVTSPSSASSGHTTPLPVTDASSASTGDTTPLPVTDTSSASTGHATHLPVTGLSSASTGDTTRLPVTDVSSASTGHATPLPVTSTSSASTGDTTPLPGTDTSSVSTGHTTPLLVTDASSVSTGDTTRLPVTSPSSASTGHTTPLPVTDTPSASTGDTTPLPVTNASSLSTRHATSLHVTSPSSASTGHATPLPVTDTSAASTGHATPLPVTSTSSASTGDTTPLPVTDTSSASTGHATPLPVTNTSSVSTGHATPLHVTSPSSASTGHTTPLPVTDASSVSTGHATSLPVTDASSVSTGHATPLPVTDASSVSTGHATPLPLTSLSSVSTGDTTPLPVTDTSSASTGQATPLPVTSLSSVSTGDTTPLPVTDTSSASTGHATSLPVTDTSSASTGHATPLHVTSPSSASTGHATPLPVTDTSSASTGHATPLPVTSLSSVSTGDTTPLPVTSPSSASTGHATPLLVTDASSASTGQATPLPVTSLSSVSTGDTTPLPVTSPSSASTGHATSLPVTDTSSASTGDTTSLPVTDTSSAYTGDTTSLPVTDTSSSSTGDTTPLLVTETSSASTGDTTPVPVTDTSSVSTGHATPLPVTGLSSASTGDTTRLPVTDISSASTGQATPLPVTNTSSVSTGDTMPLPVTSPSSASTGHATPLPVTSTSSASTGHATPVPVTSTSSASTGHTTPLPVTSPSSASTGHTTPLPVTDTSSASTGDTTPLPVTNASSLSTGHTTPLHVTIPSSASTGDTSTLPVTGASSASTGHATPLPVTDTSSVSTGHATPLPVTSFSSVSTGDTTPLPVTDASSASTGHATPLPVTDTSSASTGDTTPLPVTDASSASTGQATPLPVTSLSSVSTGDTTPLPVTIPSSASSGHTTSLPVSDTSSASTGQATPLPVTSLSSVSTGDTTPLLVTDASSVSTGHATPLPVTDTSSASTGDTTRLPVTDTSSASTGQATPLPVTSLSSVSTGDTTPLLVTNTSSVSTGHATSLPVTIPSSSSSGHTTPLPVTSTSSVSTGHVTPLHVTSPSSSSTGQATPLPVTSTSSSSTGQATPLPVTSTSSASTGHATPLPVTDASSVSTGHATPLPVTDTSSASTGDTTPLPVTDTSSASTGQATPLPVTSLSSVSTGHATPLAVSSATSASTVSSDSPLKMETSGMTTPSLKTDGGRRTATSPPPTTSQTIISTIPSTAMHTRSTAAPIPILPERGVSLFPYGADAGDLEFVRRTVDFTSPLFKPATGFPLGSSLRDSLYFTDNGQIIFPESDYQIFSYPNPLPTGFTGRDPVALVAPFWDDADFSTGRGTTFYQEYETFYGEHSLLVQQAESWIRKITNNGGYKARWALKVTWVNAHAYPAQWTLGSNTYQAILSTDGSRSYALFLYQSGGMQWDVAQRSGKPVLMGFSSGDGYFENSPLMSQPVWERYRPDRFLNSNSGLQGLQFYRLHREERPNYRLECLQWLKSQPRWPSWGWNQVSCPCSWQQGRRDLRFQPVSIGRWGLGSRQLCSFTSWRGGVCCSYGPWGEFREGWHVQRPWQLAQELEPQSWCCRWNDKPYLCALYQQRRPHVGCATYRPPQPAWMFGDPHITTLDGVSYTFNGLGDFLLVGAQDGNSSFLLQGRTAQTGSAQATNFIAFAAQYRSSSLGPVTVQWLLEPHDAIRVLLDNQTVTFQPDHEDGGGQETFNATGVLLSRNGSEVSASFDGWATVSVIALSNILHSSASLPPEYQNRTEGLLGVWNNNPEDDFRMPNGSTIPPGSPEEMLFHFGMTWQINGTGLLGKRNDQLPSNFTPVFYSQLQKNSSWAEHLISNCDGDSSCIYDTLALRNASIGLHTREVSKNYEQANATLNQYPPSINGGRVIEAYKGQTTLIQYTSNAEDANFTLRDSCTDLELFENGTLLWTPKSLEPFTLEILARSAKIGLASALQPRTVVCHCNAESQCLYNQTSRVGNSSLEVAGCKCDGGTFGRYCEGSEDACEEPCFPSVHCVPGKGCEACPPNLTGDGRHCAALGSSFLCQNQSCPVNYCYNQGHCYISQTLGCQPMCTCPPAFTDSRCFLAGNNFSPTVNLELPLRVIQLLLSEEENASMAEVNASVAYRLGTLDMRAFLRNSQVERIDSAAPASGSPIQHWMVISEFQYRPRGPVIDFLNNQLLAAVVEAFLYHVPRRSEEPRNDVVFQPISGEDVRDVTALNVSTLKAYFRCDGYKGYDLVYSPQSGFTCVSPCSRGYCDHGGQCQHLPSGPRCSCVSFSIYTAWGEHCEHLSMKLDAFFGIFFGALGGLLLLGVGTFVVLRFWGCSGARFSYFLNSAEALP

SEQ ID NO: 88424 - protein, 109 aa, Homo sapiens
MSEDLAKQLASYKAQLQQVEAALSGNGENEDLLKLKKDLQWLSASPKRLPSVSRVLECTPFDLLICRSQHLMLPGIADYCNCCPSVDEGAVSELRLEGGKVINVFVFLF

SEQ ID NO: 88425 - protein, 95 aa, Homo sapiens
  MOD_RES (1)..(1): Any amino acid
XPAGLGGPGGSRAAVLVQQWVSYADTELIPAACGATLPALGLRSSAQDPQAVLGALGRALSPLEEWLRLHTYLAGEAPTLADLAAVTALLLPFRY

SEQ ID NO: 88426 - protein, 51 aa, Homo sapiens
  MOD_RES (1)..(1): Any amino acid
XSRFPLCGGRRDHKGLTHIFNPPPKRFRWKELCKSCFLVSIQRQFHASMLL

SEQ ID NO: 88427 - protein, 34 aa, Homo sapiens
IDPKVAFPRRAQPKACLDLCSASVSWTENHCAAS

SEQ ID NO: 88428 - protein, 90 aa, Homo sapiens
  MOD_RES (1)..(1): Any amino acid
XYEKLMKINLEAAELGEISDIHTKLLRFSGNNRNQSSGYRQQIISRWITGRRMGTSRRHSSERQKCRKTTSPVKLHDRDLLSVQKRQSRT

SEQ ID NO: 88429 - protein, 290 aa, Homo sapiens; identical to SEQ ID NO: 43868

SEQ ID NO: 88430 - protein, 668 aa, Homo sapiens
ELGPEEVRWFYKEDKKTWKPFIGYDSLRIELAFRTLLQTTGARPQGGDRDGDHVCSPTGPASSSGEDDDEDRACGFCQSTTGHEPEMVELVNIEPVCVRGGLYEVDVTQGECYPVYWNQADKIPVMRGQWFIDGTWQPLEEEESNLIEQEHLNCFRGQQMQENFDIEVSKSIDGKDGSGINYSAVHSFKLSRNHVDWHSVDEVYLYSDATTSKIARTVTQKLGFSKASSSGTRLHRGYVEEATLEDKPSQTTHIVFVVHGIGQKMDQGRIIKNTAMMREAARKIEERHFSNHATHVEFLPVEWRSKLTLDGDTVDSITPDKVRGLRDMLNSSAMDIMYYTSPLYRDELVKGLQQELNRLYSLFCSRNPDFEEKGGKVSIVSHSLGCVITYDIMTGWNPVRLYEQLLQKEEELPDERWMSYEERHLLDELYITKRRLKEIEERLHGLKASSMTQTPALKFKAYRLEPLILKHYSNISPVQIHWYNTSNPLPYEHMKPSFLNPAKEPTSVSENEGISTIPSPVTSPVLSRRHYGESITNIGKASILGAASIGKGLGGMLFSRFGRSSTTQSSETSKDSMEDEKKPVASPSATTVGTQTLPHSSSGFLDSALELDHRIDFELREGLVESRYWSAVTSHTAYWSSLDVALFLLTFMYKHEHDDDAKPNLDPI

SEQ ID NO: 88431 - protein, 40 aa, Homo sapiens
MSSDHLNNSTLKEAQFKDLFLKKVTHLLQHHELQRRRRGM

SEQ ID NO: 88432 - protein, 380 aa, Homo sapiens
  MOD_RES (1)..(1): Any amino acid
XFLLVFSCLVLSVFSTIKEYEKSSEGALYILEIVTIVVFGVEYFVRIWAAGCCCRYRGWRGRLKFARKPFCVIDIMVLIASIAVLAAGSQGNVFATSALRSLRFLQILRMIRMDRRGGTWKLLGSVVYAHSKELVTAWYIGFLCLILASFLVYLAEKGENDHFDTYADALWWGLITLTTIGYGDKYPQTWNGRLLAATFTLIGVSFFALPAGILGSGFALKVQEQHRQKHFEKRRNPAAGLIQSAWRFYATNLSRTDLHSTWQYYERTVTVPMYSSQTQTYGASRLIPPLNQLELLRNLKSKSGLAFRKDPPPEPSPSPRGVAAKGKGSPQAQTVRRSPSADQSLEDSPSKVPKSWSFGDRSRARQAFRIKGAASRQNSE

SEQ ID NO: 88433 - protein, 549 aa, Homo sapiens
MGCLWGLALPLFFCWEVGVSGSSAGPSTRRADTAMTTDDTEVPAMTLAPGHAALETQTLSAETSSRASTPAGPIPEAETRGAKRISPARETRSFTKTSPNFMVLIATSVETSAASGSPEGAGMTTVQTITGSDPEEAIFDTLCTDDISEEAKTLTMDILTLAHTSTEAKGLSSESSASSDGPHPVITPSRASESSASSDGPHPVITPSRASESSASSDGPHPVITPSWSPGSDVTLLAEALVTVTNIEVINCSITETTTSSIPGASDIDLIPTEGVKASSTSDPPALPDSTEAKPHITEVTASAETLSTAGTTESAAPHATVGTPLPTNSATEREVTAPGATTLSGALVTVSRNPLEETSALSVETPSYVKVSGAAPVSIEAGSAVGKTTSFAGSSASSYSPSEAALKNFTPSETPTMDIATKGPFPTSRDPLPSVPPTTTNSSRGTNSTLAKITTSAKTTMKPPTATPTTARTRPTTDVSAGENGGFLLLWLSVASPEDLTDPRVAERLMQQMERSLALSPRLECSGVISAHCKLHLLGSRDSPASAS

SEQ ID NO: 88434 - protein, 24 aa, Homo sapiens
MREFEVLKKLNHKNIVKLFAIEEE

SEQ ID NO: 88435 - protein, 245 aa, Homo sapiens
  MOD_RES (1)..(1): Any amino acid
XALPSSEDDDDDDDSSSEEKETDNTKPNPVAPYWTSPEKMEKKLHAVPAAKTVKFKCPSSGTPNPTLRWLKNGKEFKPDHRIGGYKVRYATWSIIMDSVVPSDKGNYTCIVENEYGSINHTYQLDVVERSPHRPILQAGLPANKTVALGSNVEFMCKVYSDPQPHIQWLKHIEVNGSKIGPDNLPYVQILKHSGINSSDAEVLTLFNVTEAQSGEYVCKVSNYIGEANQSAWLTVTRPVAKDCWS

SEQ ID NO: 88436 - protein, 43 aa, Homo sapiens
  MOD_RES (1)..(1): Any amino acid
XMKKLKEEMEGVVKELAENNHILERRSFAVAQAGVQWRDLSSL

SEQ ID NO: 88437 - protein, 555 aa, Homo sapiens
MRRPLSKCGMEPGGGDASLTLHGLQNRSHGKIKLRKRKSTLYFNTQEKSARRRGDLLGENIYLLLFTIALRILNCFLVQTSFVPDEYWQSLEVSHHMVFNNYGYLTWEWTERLRSYTYPLIFASIYKILHLLGKDSVQLLIWIPRLAQALLSAVADVRLYSLMKQLENQEVARWVFFCQLCSWFTWYCCTRTLTNTMETVLTIIALFYYPLEGSKSMNSVKYSSLVALAFIIRPTAVILWTPLLFRHFCQEPRKLDLILHHFLPVGFVTLSLSLMIDRIFFGQWTLVQFNFLKFNVLQNWGTFYGSHPWHWYFSQGFPVILGTHLPFFIHGCYLAPKRYRILLVTVLWTLLVYSMLSHKEFRFIYPVLPFCMVFCGYSLTHLKTWKKPALSFLFLSNLFLALYTGLVHQRGTLDVMSHIQKVCYNNPNKSSASIFIMMPCHSTPYYSHVHCPLPMRFLQCPPDLTGKSHYLDEADVFYLNPLNWLHREFHDDASLPTHLITFSILEEEISAFLISSNYKRTAVFFHTHLPEGRIGSHIYVYERKLKGKFNMKMKF

SEQ ID NO: 88438 - protein, 2338 aa, Homo sapiens
MVRFGDELGGRYGGPGGGERARGGGAGGAGGPGPGGLQPGQRVLYKQSIAQRARTMALYNPIPVKQNCFTVNRSLFVFSEDNVVRKYAKRITEWPPFEYMILATIIANCIVLALEQHLPDGDKTPMSERLDDTEPYFIGIFCFEAGIKIIALGFVFHKGSYLRNGWNVMDFVVVLTGILATAGTDFDLRTLRAVRVLRPLKLVSGIPSLQVVLKSIMKAMVPLLQIGLLLFFAILMFAIIGLEFYMGKFHKACFPNSTDAEPVGDFPCGKEAPARLCEGDTECREYWPGPNFGITNFDNILFAILTVFQCITMEGWTDILYNTNDAAGNTWNWLYFIPLIIIGSFFMLNLVLGVLSGEFAKERERVENRRAFLKLRRQQQIERELNGYLEWIFKAEEVMLAEEDRNAEEKSPLDAVLKRAATKKSRNDLIHAEEGEDRFADLCAVGSPFARASLKSGKTESSSYFRRKEKMFRFFIRRMVKAQSFYWVVLCVVALNTLCVAMVHYNQPRRLTTTLYFAEFVFLGLFLTEMSLKMYGLGPRSYFRSSFNCFDFGVIVGSVFEVVWAAIKPGSSFGISVLRALRLLRIFKVTKYWSSLRNLVVSLLNSMKSIISLLFLLFLFIVVFALLGMQLFGGQFNFQDETPTTNFDTFPAAILTVFQILTGEDWNAVMYHGIESQGGVSKGMFSSFYFIVLTLFGNYTLLNVFLAIAVDNLANAQELTKDEEEMEEAANQKLALQKAKEVAEVSPMSAANISIAARQQNSAKARSVWEQRASQLRLQNLRASCEALYSEMDPEERLRFATTRHLRPDMKTHLDRPLVVELGRDGARGPVGGKARPEAAEAPEGVDPPRRHHRHRDKDKTPAAGDQDRAEAPKAESGEPGAREERPRPHRSHSKEAAGPPEARSERGRGPGPEGGRRHHRRGSPEEAAEREPRRHRAHRHQDPSKECAGAKGERRARHRGGPRAGPREAESGEEPARRHRARHKAQPAHEAVEKETTEKEATEKEAEIVEADKEKELRNHQPREPHCDLETSGTVTVGPMHTLPSTCLQKVEEQPEDADNQRNVTRMGSQPPDPNTIVHIPVMLTGPLGEATVVPSGNVDLESQAEGKKEVEADDVMRSGPRPIVPYSSMFCLSPTNLLRRFCHYIVTMRYFEVVILVVIALSSIALAAEDPVRTDSPRNNALKYLDYIFTGVFTFEMVIKMIDLGLLLHPGAYFRDLWNILDFIVVSGALVAFAFSGSKGKDINTIKSLRVLRVLRPLKTIKRLPKLKAVFDCVVNSLKNVLNILIVYMLFMFIFAVIAVQLFKGKFFYCTDESKELERDCRGQYLDYEKEEVEAQPRQWKKYDFHYDNVLWALLTLFTVSTGEGWPMVLKHSVDATYEEQGPSPGYRMELSIFYVVYFVVFPFFFVNIFVALIIITFQEQGDKVMSECSLEKNERACIDFAISAKPLTRYMPQNRQSFQYKTWTFVVSPPFEYFIMAMIALNTVVLMMKFYDAPYEYELMLKCLNIVFTSMFSMECVLKIIAFGVLNYFRDAWNVFDFVTVLGSITDILVTEIANNFINLSFLRLFRAARLIKLLRQGYTIRILLWTFVQSFKALPYVCLLIAMLFFIYAIIGMQVFGNIALDDDTSINRHNNFRTFLQALMLLFRSATGEAWHEIMLSCLSNQACDEQANATECGSDFAYFYFVSFIFLCSFLMLNLFVAVIMDNFEYLTRDSSILGPHHLDEFIRVWAEYDPAACGRISYNDMFEMLKHMSPPLGLGKKCPARVAYKRLVRMNMPISNEDMTVHFTSTLMALIRTALEIKLAPAGTKQHQCDAELRKEISVVWANLPQKTLDLLVPPHKPDEMTVGKVYAALMIFDFYKQNKTTRDQMQQAPGGLSQMGPVSLFHPLKATLEQTQPAVLRGARVFLRQKSSTSLSNGGAIQNQESGIKESVSWGTQRTQDAPHEARPPLERGHSTEIPVGRSGALAVDVQMQSITRRGPDGEPQPGLESQGRAASMPRLAAETQPVTDASPMKRSISTLAQRPRGTHLCSTTPDRPPPSQASSHHHHHRCHRRRDRKQRSLEKGPSLSADMDGAPSSAVGPGLPPGEGPTGCRRERERRQERGRSQERRQPSSSSSEKQRFYSCDRFGGREPPKPKPSLSSHPTSPTAGQEPGPHPQGSGSVNGSPLLSTSGASTPGRGGRRQLPQTPLTPRPSITYKTANSSPIHFAGAQTSLPAFSPGRLSRGLSEHNALLQRDPLSQPLAPGSRIGSDPYLGQRLDSEASVHALPEDTLTFEEAVATNSGRSSRTSYVSSLTSQSHPLRRVPNGYHCTLGLSSGGRARHSYHHPDQDHWC

SEQ ID NO: 88439 - protein, 164 aa, Homo sapiens
NEGSAKSIHPLALRPWDITVLVNLYKVHGRLPVHGTTDGPECPTAFLERLCFEMKKGFRETMLQLILSPLNVFVSDNYQQRPPVDEVLREGHINLSGLQLRAHAMFSAEGLPLGSDSLEYAWLIDVQAGSLTAKVTAPQLSCIPGPCPTSDDLKYTMIRLAVDG

SEQ ID NO: 88440 - protein, 371 aa, Homo sapiens
MGCSHSAMVWTDSGASSLIPLWADAGRGSCRFPLHCSSKMMNQVEGQQKNLVHAIESLPGSGPLTALDQDLLLLKATSAATLSCLGECLNLLQQSVHQAGQPSQKPGASENILGWHGSKSHSTEQLKNGTLGSLPSASANITWAILPNSAEDEQTSQPEPEPNSGSELVLSEDEKSDNEDKEETELGVMEDQRSIILHLISQLKLGMDLTKVVLPTFILEKRSLLEMYADFMAHPDLLLAITAGATPEERVICFVEYYLTAFHEGRKGALAKKPYNPIIGETFHCSWEVPKDRVKPKRTASRSPASCHEHPMADDPSKSYKLRFVAEQVSHHPPISCFYCECEEKRLCVNTHVWTKSKFMGMSVGVSMIGE

SEQ ID NO: 88441 - protein, 128 aa, Homo sapiens
MNVGGFLVGLFSSTLLGAWSDSVGRRPLLVLASLGLLLQALVSVFVVQLQLHVGYFVLGRILCALLGDFGGLLAASFASVADVSSSRSRTFRMALLEASIGVAGMLASLLGGHWLRAQGYANPFWLAL

SEQ ID NO: 88442 - protein, 188 aa, Homo sapiens
MAAQQRDCGGAAQLAGPAAEADPLGRFTCPVCLEVYEKPVQVPCGHVFCSACLQECLKPKKPVCGVCRSALAPGVRAVELERQIESTETSCHGCRKNFFLSKIRSHVATCSKYQNYIMEGVKATIKDASLQPRNVPNRYTFPCPYCPEKNFDQEGLVEHCKLFHSTDTKSVDYDVDEEDMMNQVLQRS

SEQ ID NO: 88443 - protein, 739 aa, Homo sapiens
MEVDTEEKRHRTRSKGVRVPVEPAIQELFSCPTPGCDGSGHVSGKYARHRSVYGCPLAKKRKTQDKQPQEPAPKRKPFAVKADSSSVDECDDSDGTEDMDEKEEDEGEEYSEDNDEPGDEDEEDEEGDREEEEEIEEEDEDDDEDGEDVEDEEEEEEEEEEEEEEEENEDHQMNCHNTRIMQDTEKDDNNNDEYDNYDELVAKSLLNLGKIAEDAAYRARTESEMNSNTSNSLEDDSDKNENLGRKSELSLDLDSDVVRETVDSLKLLAQGHGVVLSENMNDRNYADSMSQQDSRNMNYVMLGKPMNNGLMEKMVEESDEEVCLSSLECLRNQCFDLARKLSETNPQERNPQQNMNIRQHVRPEEDFPGRTPDRNYSDMLNLMRLEEQLSPRSRVFASCAKEDGCHERDDDTTSVNSDRSEEVFDMTKGNLTLLEKAIALETERAKAMREKMAMEAGRRDNMRSYEDQSPRQLPGEDRKPKSSDSHVKKPYYAKRYCKDPSPSSSSTSSYAPSSSSNLSCGGGSSASSTCSKSSFDYTHDMEAAHMAATAILNLSTRCREMPQNLSTKPQDLCATRNPDMEVDENGTLDLSMNKQRPRDSCCPILTPLEPMSPQQQAVMNNRCFQLGEGDCWDLPVDYTKMKPRRIDEDESKDITPEDLDPFQEALEERRYPGEVTIPSPKPKYPQCKESKKDLITLSGCPLADKSIRSMLATSSQELKIPVQGPRALDHLLMFSDFLN

SEQ ID NO: 88444 - protein, 59 aa, Homo sapiens
VDISKMHMILYDLQQNLSSSHRALEKQIDTLAGKLDALTELLSTALGPRQLPEPSQQSK

SEQ ID NO: 88445 - protein, 209 aa, Homo sapiens
  MOD_RES (1)..(1): Any amino acid
XDGAEPGRVDTFWYKFLKREPGGELSWEGNGPHHDRCCTYNENNLVDGVYCLPIGHWIEATGHTNEMKHTTDFYFNIAGHQAMHYSRILPNIWLGSCPRQVEHVTIKLKHELGITAVMNFQTEWDIVQNSSGCNRYPEPMTPDTMIKLYREEGLAYIWMPTPDMSTEDEKRTADMCCSGMWEETAGQILRGGRKWTKTNIQKGPMLWIL

SEQ ID NO: 88446 - protein, 283 aa, Homo sapiens
MSGAVLLERERLTSGTTWHTAGLLWQLRPSDVEVELLAHTRRVVSRELEEETGLHTGWIQNGGLFIASNRQRLDEYKRLMSLGKAYGVESHVLSPAETKTLYPLMNVDDLYGTLYVPHDGTMDPAGTCTTLARAASARGAQVIENCPVTGIRVWTDDFGVRRVAGVETQHGSIQTPCVVNCAGVWASAVGRMAGVKVPLVAMHHAYVVTERIEGIQNMPNVRDHDASVYLRLQGDALSVGGYEANPIFWEEAVKYRPRAAGGLCLKTSTEKVCAVWSDDLRRA

SEQ ID NO: 88447 - protein, 1167 aa, Homo sapiens
MEQDRTNHVEGNRLSPFLIPSPPICQTEPLATKLQNGSPLPERAHPEVNGDTKWHSFKSYYGIPCMKGSQNSRVSPDFTQESRGYSKCLQNGGIKRTVSEPSLSGLLQIKKLKQDQKANGERRNFGVSQERNPGESSQPNVSDLSDKKESVSSVAQENAVKDFTSFSTHNCSGPENPELQILNEQEGKSANYHDKNIVLLKNKAVLMPNGATVSASSVEHTHGELLEKTLSQYYPDCVSIAVQKTTSHINAINSQATNELSCEITHPSHTSGQINSAQTSNSELPPKPAAVVSEACDADDADNASKLAAMLNTCSFQKPEQLQQQKSVFEICPSPAENNIQGTTKLASGEEFCSGSSSNLQAPGGSSERYLKQNEMNGAYFKQSSVFTKDSFSATTTPPPPSQLLLSPPPPLPQVPQLPSEGKSTLNGGVLEEHHHYPNQSNTTLLREVKIEGKPEAPPSQSPNPSTHVCSPSPMLSERPQNNCVNRNDIQTAGTMTVPLCSEKTRPMSEHLKHNPPIFGSSGELQDNCQQLMRNKEQEILKGRDKEQTRDLVPPTQHYLKPGWIELKAPRFHQAESHLKRNEASLPSILQYQPNLSNQMTSKQYTGNSNMPGGLPRQAYTQKTTQLEHKSQMYQVEMNQGQSQGTVDQHLQFQKPSHQVHFSKTDHLPKAHVQSLCGTRFHFQQRADSQTEKLMSPVLKQHLNQQASETEPFSNSHLLQHKPHKQAAQTQPSQSSHLPQNQQQQQKLQIKNKEEILQTFPHPQSNNDQQREGSFFGQTKVEECFHGENQYSKSSEFETHNVQMGLEEVQNINRRNSPYSQTMKSSACKIQVSCSNNTHLVSENKEQTTHPELFAGNKTQNLHHMQYFPNNVIPKQDLLHRCFQEQEQKSQQASVLQGYKNRNQDMSGQQAAQLAQQRYLIHNHANVFPVPDQGGSHTQTPPQKDTQKHAALRWHLLQKQEQQQTQQPQTESCHSQMHRPIKVEPGCKPHACMHTAPPENKTWKKVTKQENPPASCDNVQQKSIIETMEQHLKQFHAKSLFDHKALTLKSQKQVKVEMSGPVTVLTRQTTAAELDSHTPALEQQTTSSEKTPTKRTAASVLNNFIESPSKLLDTPIKNLLDTPVKTQYDFPSCRCVEQIIEKDEGPFYTHLGAGPNVAAIREIMEER

SEQ ID NO: 88448 - protein, 108 aa, Homo sapiens
MVTSGLGSGGVRRNKAIAQPARTFMLGLMAAYHNLEKPAVPSREAEGEETELTTPVLPEETQEEDAKKTFKESREAALNLAYILIPSIPLLLLLVVTTVVCWVWICRK

SEQ ID NO: 88449 - protein, 836 aa, Homo sapiens
MTATVENLTFQKDTLGNAVDKNRRHGSTEPLVLAWSSQFRRLTWGCALDALHRSPCVAASQHGVTHLIRSSRTPHSTRCRKEDAQPGHHGNGAASVTAQARGQRSVLQVPLPVPRSCLFSESFVVSVSSQSRFLASVPGTGVQRSTAADMAASTAAGKQRIPKVAKVKNKAPAEVQITAEQLLREAKERELELLPPPPQQKITDEEELNDYKLRKRKTFEDNIRKNRTVISNWIKYAQWEESLKEIQRARSIYERALDVDYRNITLWLKYAEMEMKNRQVNHARNIWDRAITTLPRVNQFWYKYTYMEEMLGNVAGARQVFERWMEWQPEEQAWHSYINFELRYKEVDRARTIYERFVLVHPDVKNWIKYARFEEKHAYFAHARKVYERAVEFFGDEHMDEHLYVAFAKFEENQKEFERVRVIYKYALDRISKQDAQELFKNYTIFEKKFGDRRGIEDIIVSKRRFQYEEEVKANPHNYDAWFDYLRLVESDAEAEAVREVYERAIANVPPIQEKRHWKRYIYLWINYALYEELEAKDPERTRQVYQASLELIPHKKFTFAKMWILYAQFEIRQKNLSLARRALGTSIGKCPKNKLFKVYIELELQLREFDRCRKLYEKFLEFGPENCTSWIKFAELETILGDIDRARAIYELAISQPRLDMPEVLWKSYIDFEIEQEETERTRNLYRRLLQRTQHVKVWISFAQFELSSGKEGSLTKCRQIYEEANKTMRNCEEKEERLMLLESWRSFEEEFGTASDKERVDKLMPEKVKKRRKVQTDDGSDAGWEEYFDYIFPEDAANQPNLKLLAMAKLWKKQQQEKEDAEHHPDEDVDESES

SEQ ID NO: 88450 - protein, 438 aa, Homo sapiens
MSLTVVSMACVGFFLLQGAWPLMGGQDKPFLSARPSTVVPRGGHVALQCHYRRGFNNFMLYKEDRSHVPIFHGRIFQESFIMGPVTPAHAGTYRCRGSRPHSLTGWSTPSNPLVIMVTGNHRKPSLLAHPGPLLKSGETVILQCWSDVMFEHFFLHREGISEDPSRLVGQIHDGVSKANFSIGPLMPVLAGTYRCYGSVPHSPYQLSAPSDPLDIVITGLYEKPSLSAQPGPTVQAGENVTLSCSSWSSYDIYHLSRGGEAHERRLRAVPKVNRTFQADFPLGPATHGGTYRCFGSFRALPCVWSNSSDPLLVSVTGICRHLHVLIGTSVVIFLFILLLFFLLYRWCSNKKNAAVMDQEPAGDRTVNRQDSDEQDPQEVMYAQLDHCVFIQRKISRPSQRPKTPLTDTSVYTELPNAEPRSKVVSCPRAPQSGLEGVF

SEQ ID NO: 88451 - protein, 30 aa, Homo sapiens
MSESSSKSSQPLASKQEKDGTEKRGRGRPR

SEQ ID NO: 88452 - protein, 2302 aa, Homo sapiens
MARFGDEMPARYGGGGSGAAAGVVVGSGGGRGAGGSRQGGQPGAQRMYKQSMAQRARTMALYNPIPVRQNCLTVNRSLFLFSEDNVVRKYAKKITEWPPFEYMILATIIANCIVLALEQHLPDDDKTPMSERLDDTEPYFIGIFCFEAGIKIIALGFAFHKGSYLRNGWNVMDFVVVLTGILATVGTEFDLRTLRAVRVLRPLKLVSGIPSLQVVLKSIMKAMIPLLQIGLLLFFAILIFAIIGLEFYMGKFHTTCFEEGTDDIQGESPAPCGTEEPARTCPNGTKCQPYWEGPNNGITQFDNILFAVLTVFQCITMEGWTDLLYNSNDASGNTWNWLYFIPLIIIGSFFMLNLVLGVLSGEFAKERERVENRRAFLKLRRQQQIERELNGYMEWISKAEEVILAEDETDGEQRHPFDGALRRTTIKKSKTDLLNPEEAEDQLADIASVGSPFARASIKSAKLENSTFFHKKERRMRFYIRRMVKTQAFYWTVLSLVALNTLCVAIVHYNQPEWLSDFLYYAEFIFLGLFMSEMFIKMYGLGTRPYFHSSFNCFDCGVIIGSIFEVIWAVIKPGTSFGISVLRALRLLRIFKVTKYWASLRNLVVSLLNSMKSIISLLFLLFLFIVVFALLGMQLFGGQFNFDEGTPPTNFDTFPAAIMTVFQILTGEDWNEVMYDGIKSQGGVQGGMVFSIYFIVLTLFGNYTLLNVFLAIAVDNLANAQELTKDEQEEEEAANQKLALQKAKEVAEVSPLSAANMSIAVKEQQKNQKPAKSVWEQRTSEMRKQNLLASREALYNEMDPDERWKAAYTRHLRPDMKTHLDRPLVVDPQENRNNNTNKSRAAEPTVDQRLGQQRAEDFLRKQARYHDRARDPSGSAGLDARRPWAGSQEAELSREGPYGRESDHHAREGSLEQPGFWEGEAERGKAGDPHRRHVHRQGGSRESRSGSPRTGADGEHRRHRAHRRPGEEGPEDKAERRARHREGSRPARGGEGEGEGPDGGERRRRHRHGAPATYEGDARREDKERRHRRRKENQGSGVPVSGPNLSTTRPIQQDLGRQDPPLAEDIDNMKNNKLATAESAAPHGSLGHAGLPQSPAKMGNSTDPGPMLAIPAMATNPQNAASRRTPNNPGNPSNPGPPKTPENSLIVTNPSGTQTNSAKTARKPDHTTVDIPPACPPPLNHTVVQVNKNANPDPLPKKEEEKKEEEEDDRGEDGPKPMPPYSSMFILSTTNPLRRLCHYILNLRYFEMCILMVIAMSSIALAAEDPVQPNAPRNNVLRYFDYVFTGVFTFEMVIKMIDLGLVLHQGAYFRDLWNILDFIVVSGALVAFAFTGNSKGKDINTIKSLRVLRVLRPLKTIKRLPKLKAVFDCVVNSLKNVFNILIVYMLFMFIFAVVAVQLFKGKFFHCTDESKEFEKDCRGKYLLYEKNEVKARDREWKKYEFHYDNVLWALLTLFTVSTGEGWPQVLKHSVDATFENQGPSPGYRMEMSIFYVVYFVVFPFFFVNIFVALIIITFQEQGDKMMEEYSLEKNERACIDFAISAKPLTRHMPQNKQSFQYRMWQFVVSPPFEYTIMAMIALNTIVLMMKFYGASVAYENALRVFNIVFTSLFSLECVLKVMAFGILNYFRDAWNIFDFVTVLGSITDILVTEFGNNFINLSFLRLFRAARLIKLLRQGYTIRILLWTFVQSFKALPYVCLLIAMLFFIYAIIGMQVFGNIGIDVEDEDSDEDEFQITEHNNFRTFFQALMLLFRSATGEAWHNIMLSCLSGKPCDKNSGILTRECGNEFAYFYFVSFIFLCSFLMLNLFVAVIMDNFEYLTRDSSILGPHHLDEYVRVWAEYDPAACGRIHYKDMYSLLRVISPPLGLGKKCPHRVACKRLLRMDLPVADDNTVHFNSTLMALIRTALDIKIAKGGADKQQMDAELRKEMMAIWPNLSQKTLDLLVTPHKSTDLTVGKIYAAMMIMEYYRQSKAKKLQAMREEQDRTPLMFQRMEPPSPTQEGGPGQNALPSTQLDPGGALMAHESGLKESPSWVTQRAQEMFQKTGTWSPEQGPPTDMPNSQPNSQSVEMREMGRDGYSDSEHYLPMEGQGRAASMPRLPAENQRRRGRPRGNNLSTISDTSPMKRSASVLGPKARRLDDYSLERVPPEENQRHHQRRRDRSHRASERSLGRYTDVDTGLGTDLSMTTQSGDLPSKERDQERGRPKDRKHRQHHHHHHHHHHPPPPDKDRYAQERPDHGRARARDQRWSRSPSEGREHMAHRQFRKWKPSPLNIWYQHSAAGPPPAPPDPLHPPATRVLFPCDP

SEQ ID NO: 88453 - protein, 143 aa, Homo sapiens
MTRKALRRTLRPLVLFCNFMSHEKCLKHVRIPCTSVAPSLVRVPVAHCFGPRGLHKRKFCAVCRKVLEAPALHCEVCELHLHPDCVPFACSDCRQCHQDGHQDHDTHHHHWREGNLPSGARCEVCRKTCGSSDVLAGVRCEWC

SEQ ID NO: 88454 - protein, 132 aa, Homo sapiens
MVDAFLGTWKLVDSKNFDDYMKSLGVGFATRQVASMTKPTTIIEKNGDILTLKTHSTFKNTEISFKLGVEFDETTADDRKVKSIVTLDGGKLVHLQKWDGQETTLVRELIDGKLILTLTHGTAVCTRTYEKE

SEQ ID NO: 88455 - protein, 202 aa, Homo sapiens
MCMVIFAPLFAIFAFATCGGYSGGLRLSVDCVNKTESNLSIDIAFAYPFRLHQVTFEVPTCEGKERQKLALIGDSSSSAEFFVTVAVFAFLYSLAATVVYIFFQNKYRENNRGPLIDFIVTVVFSFLWLVGSSAWAKGLSDVKVATDPKEVLLLMSACKQPSNKCMAIHSPVMSSLNTSVLSEIQSAKALKKRERVATLTGL

SEQ ID NO: 88456 - protein, 109 aa, Homo sapiens
LSRMGNSRSALKMIMEELHDVDKAIEFAKEQDDGELWEDLILYSIDKPPFITGLLNNIGTHVDPILLIHRIKEGMEIPNLRDSLVKILQDYNLQVTITIFQDAGNFYRT

SEQ ID NO: 88457 - protein, 1359 aa, Homo sapiens
GYADTEDPLGNCILLLSKASSDTEEMLPCTTRLKSMLRLLLVKKPSVRSLALKLLAFHLTSEEGADTKRPLIDARVLSRVTDLFIGKKPIELRLDDRRELVIKLETVEKVYEIFTSDDVDLVLRKSAAEQLAVIMQDIKMHAVVKKLCLIDKIIEYLNECVSQDGKVVECLVQPCLTLLRKVLCGDPVMRVSLSQQSSLLTVLFRVSLIFHEDCSVVTEVGALFCLLLFDEVSRMDMWSVNPSNKPSLPSVFSLPVSVFRRFLQVLPACTEDEKLLIDIIHFLNKLIKEQRKNSSLELLNWILELLLRHSANPLLDLLVLTESQAREETDDIRTAVRQQLQKELIALFDTLLLNFMEVTDRKCSELLYVFQTQLALKLLQCLKVTDAPHFYGLPSLERTLRGMANLTAFPGWSSHSPLTKPLDICVKYLSGLLEVITSFYVERGGNAMSFMGKGVTKSTILCLLHLSHEMMAQAGSLEWMSLWFLPLGSHSEEHIPTQQGLAWLIPLWVDRDPEVRFTSLGLGSALTTLETGCVALANSCQNISGGLWGTVVNILLDQSECSMVRREAAFILQNLLVIPMPTEIIKDYTWQGPCVHDEDSGLSLIGKPALQALLYHCHFYEHLNQMVKHCYLGRCMFDLNFSAFDRNSESNDLNGLDDSFKFWRAPSRTSQDRDPSSLSTSETTVAPSLGSTEFQPLVQSTTLLPEASHDQFVAQGHQESTSPRPPHDSSLSAPLPKLCVFVTPSLLSAMCSLLDNLLTIAPRDTAKAFRQAHLIELLCSIADATLIQTCVQELRALLPSSPPAEHTQAQVSFLLEYLSSLSRLLQSCLLVEPDLVIQDELVKPLITNIIGILTICTKDVLDKELISAFYHTWTHLFNLLAMLLRKAGAITLPFVTVALAKHWTAAIDMFCTCAGLSATCPALYTASLQFLSVLLTEEAKGHLQAKSKTHLCCSPTVASLLDDSQENQKSLEQLSDVILQCYEGKSSKDILKRVAANALMSLLAVSRRAQKHALKANLIDNCMEQMKHINAQLNLDSLRPGKAALKKKEDGVIKELSIAMQLLRNCLYQNEECKEAALEAHLVPVLHSLWPWILMDDSLMQISLQLLCVYTANFPNGCSSLCWSSCGQHPVQATHRGAVSNSLMLCILKLASQMPLENTTVQQMVFMLLSNLALSHDCKGVIQKSNFLQNFLSLALPKGGNKHLSNLTILWLKLLLNISSGEDGQQMILRLDGCLDLLTEMSKYKHKSSPLLPLLIFHNVCFSPANKPKILANEKVITVLAACLESENQNAQRIGAAALWALIYNYQKAKTALKSPSVKRRVDEAYSLAKKTFPNSEANPLNAYYLKCLENLVQLLNSS

SEQ ID NO: 88458 - protein, 233 aa, Homo sapiens
MLDHKDLEAEIHPLKNEERKSQENLGNPSKNEDNVKSAPPQSRLSRCRAAAFFLSLFLCLFVVFVVSFVIPCPDRPASQRMWRIDYSAAVIYDFLAVDDINGDRIQDVLFLYKNTNSSNNFSRSCVDEGFSSPCTFAAAVSGANGSTLWERPVAQDVALVECAVPQPRGSEAPSACILVGRPSSFIAVNLFTGETLWNHSSSFSGNASILSPLLQVPDVDGDGAPDLLVLTQE

SEQ ID NO: 88459 - protein, 521 aa, Homo sapiens
MADTRSVHETRFEAAVKVIQSLPKNGSFQPTNEMMLKFYSFYKQATEGPCKLSRPGFWDPIGRYKWDAWSSLGDMTKEEAMIAYVEEMKKIIETMPMTEKVEELLRVIGPFYEIVEDKKSGRSSDITSDLGNVLTSTPNAKTVNGKAESSDSGAESEEEEAQEEVKGAEQSDNDKKMMKKSADHKNLEVIVTNGYDKDGFVQDIQNDIHASSSLNGRSTEEVKPIDENLGQTGKSAVCIHQDINDDHVEDVTGIQHLTSDSDSEVYCDSMEQFGQEESLDSFTSNNGPFQYYLGGHSSQPMENSGFREDIQVPPGNGNIGNMQVVAVEGKGEVKHGGEDGRNNSGAPHREKRGGETDEFSNVRRGRGHRMQHLSEGTKGRQVGSGGDGERWGSDRGSRGSLNEQIALVLMRLQEDMQNVLQRLQKLETLTALQAKSSTSTLQTAPQPTSQRPSWWPFEMSPGVLTFAIIWPFIAQWLVYLYYQRRRRVLLCHLGWSAVARSQLTATSASQVQAILLPQPPK

SEQ ID NO: 88460 - protein, 434 aa, Homo sapiens
MATIEEIAHQIIEQQMGEIVTEQQTGQKIQIVTALDHNTQGKQFILTNHDGSTPSKVILARQDSTPGKVFLTTPDAAGVNQLFFTTPDLSAQHLQLLTDNSPDQGPNKVFDLCVVCGDKASGRHYGAVTCEGCKGFFKRSIRKNLVYSCRGSKDCIINKHHRNRCQYCRLQRCIAFGMKQDSVQCERKPIEVSREKSSNCAASTEKIYIRKDLRSPLTATPTFVTDSESTRSTGLLDSGMFMNIHPSGVKTESAVLMTSDKAESCQGDLSTLANVVTSLANLGKTKDLSQNSNEMSMIESLSNDDTSLCEFQEMQTNGDVSRAFDTLAKALNPGESTACQSSVAGMEGSVHLITGDSSINYTEKEGPLLSDSHVAFRLTMPSPMPEYLNVHYIGESASRLLFLSMHWALSIPSFQALGKKKIIDGAHLQTTGVL

SEQ ID NO: 88461 - protein, 250 aa, Homo sapiens
MAEAVERTDELVREYLLFRGFTHTLRQLDAEIKADKEKGFRVDKIVDQLQQLMQVYDLAALRDYWSYLERRLFSRLEDIYRPTIHKLKTSLFRFYLVYTIQTNRNDKAQEFFAKQATELQNQAEWKDWFVLPFLPSPDTNPTFATYFSRQWADTFIVSLHNFLSVLFQCMPVPVILNFDAECQRTNQVQEENEVLRQKLFALQAEIHRLKKEEQQPEEEEALVQHKLPPYVSNMDRLGDSELPLTLWCVC

SEQ ID NO: 88462 - protein, 25 aa, Homo sapiens
MQQETVPVPVPSEKTKQPKECFLIQ

SEQ ID NO: 88463 - protein, 118 aa, Homo sapiens
MSRQANRGTESKKMSSELFTLTYGALVTQLCKDYENDEDVNKQLDKMGFNIGVRLIEDFLARSNVGRCHDFRETADVIAKERKMFLGKQNKTKRQAKLYDAVKERGAASCTDASPLLS

SEQ ID NO: 88464 - protein, 664 aa, Homo sapiens
MSTRTPLPTVNERDTENHTSHGDGRQEVTSRTSRSGARCRNSIASCADEQPHIGNYRLLKTIGKGNFAKVKLARHILTGREVAIKIIDKTQLNPTSLQKLFREVRIMKILNHPNIVKLFEVIETEKTLYLIMEYASGGEVFDYLVAHGRMKEKEARSKFRQIVSAVQYCHQKRIVHRDLKAENLLLDADMNIKIADFGFSNEFTVGGKLDTFCGSPPYAAPELFQGKKYDGPEVDVWSLGVILYTLVSGSLPFDGQNLKELRERVLRGKYRIPFYMSTDCENLLKRFLVLNPIKRGTLEQIMKDRWINAGHEEDELKPFVEPELDISDQKRIAGPAIPSVVAYPKRSQTSTADSDLKEDGISSRKSSGSAVGGKGIAPASPMLGNASNPNKADIPERKKSSTVPSSNTASGGMTRRNTYVCSERTTADRHSVIQNGKENSTIPDQRTPVASTHSISSAATPDRIRFPRGTASRSTFHGQPRERRTATYNGPPASPSLSHEATPLSQTRSRGSTNLFSKLTSKLTRRNMSFRFIKRLPTEYERNGRYEGSSRNVSAEQKDENKEAKPRSLRFTWSMKTTSSMDPGDMMREIRKVLDANNCDYEQRERFLLFCVHGDGHAENLVQWEMEVCKLPRLSLNGVRFKRISGTSIAFKNIASKIANELKL

SEQ ID NO: 88465 - protein, 57 aa, Homo sapiens
MALSQGLLTFRDVAIEFSQEEWKCLDPAQRTLYRDVMLENYRNLVSLDISSKCMMNT

SEQ ID NO: 88466 - protein, 1220 aa, Homo sapiens
MLQQVPENINFPAEEEKILEFWTEFNCFQECLKQSKHKPKFTFYDGPPFATGLPHYGHILAGTIKDIVTRYAHQSGFHVDRRFGWDCHGLPVEYEIDKTLGIRGPEDVAKMGITEYNNQCRAIVMRYSAEWKSTVSRLGRWIDFDNDYKTLYPQFMESVWWVFKQLYDKGLVYRGVKVMPFSTACNTPLSNFESHQNYKDVQDPSVFVTFPLEEDETVSLVAWTTTPWTLPSNLAVCVNPEMQYVKIKDVARGRLLILMEARLSALYKLESDYEILERFPGAYLKGKKYRPLFDYFLKCKENGAFTVLVDNYVKEEEGTGVVHQAPYFGAEDYRVCMDFNIIRKDSLPVCPVDASGCFTTEVTDFAGQYVKDADKSIIRTLKEQGRLLVATTFTHSYPFCWRSDTPLIYKAVPSWFVRVENMVDQLLRNNDLCYWVPELVREKRFGNWLKDARDWTISRNRYWGTPIPLWVSDDFEEVVCIGSVAELEELSGAKISDLHRESVDHLTIPSRCGKGSLHRISEVFDCWFESGSMPYAQVHYPFENKREFEDAFPADFIAEGIDQTRGWFYTLLVLATALFGQPPFKNVIVNGLVLASDGQKMSKRKKNYPDPVSIIQKYGADALRLYLINSPVVRAENLRFKEEGVRDVLKDVLLPWYNAYRFLIQNVLRLQKEEEIEFLYNENTVRESPNITDRWILSFMQSLIGFFETEMAAYRLYTVVPRLVKFVDILTNWYVRMNRRRLKGENGMEDCVMALETLFSVLLSLCRLMAPYTPFLTELMYQNLKVLIDPVSVQDKDTLSIHYLMLPRVREELIDKKTESAVSQMQSVIELGRVIRDRKTIPIKYPLKEIVVIHQDPEALKDIKSLEKYIIEELNVRKVTLSTDKNKYGIRLRAEPDHMVLGKRLKGAFKAVMTSIKQLSSEELEQFQKTGTIVVEGHELHDEDIRLMYTFDQATGGTAQFEAHSDAQALVLLDVTPDQSMVDEGMAREVINRIQKLRKKCNLVPTDEITVYYKAKSEGTYLNSVIESHTEFIFTTIKAPLKPYPVSPSDKVLIQEKTQLKGSELEITLTRGSSLPGPACAYVNLNICANGSEQEIQNQTDLLSLSGKTLCVTAGSAPSLINSSSTLLCQYINLQLLNAKPQECLMGTVGTLLLENPLGQNGLTHQGLLYEAAKVFGLRSRKLKLFLNETQTQEITEDIPVKTLNMKTVYVSVLPTTADF

SEQ ID NO: 88467 - protein, 126 aa, Homo sapiens
MTDTSVLDQWKASFFVEDFLEKKTITRMVTQINCEFEEVVPSSNPDSQIEVEEVSLYTHMDYNEVFTPVSCLEKCSALQNQNQDLFIDDKGILFVSSRKHLPTLPTLLSRLKLFLVKDPLLDFKGQ

SEQ ID NO: 88468 - protein, 179 aa, Homo sapiens
MDSSIHLSSLISRHDDEATRTSTSEGLEEGEVEGETLLIVESEDQASVDLSHDQSGDSLNSDEGDVSWMEEQLSYFCDKCQKWIPASQLREQLSYLKGDNFFRFTCSDCSADGKEQYERLKLTWQQVVMLAMYNLSLEGSGRQGYFRWKEDICAFIEKHWTFLLGNSSLKTNFRSHHYC

SEQ ID NO: 88469 - protein, 56 aa, Homo sapiens
SFEGDFKTRPKVSLGGASRKEEKASLLHRTQEERRKRECWDYRRELPRLADDVDVS

SEQ ID NO: 88470 - protein, 259 aa, Homo sapiens
  MOD_RES (1)..(1): Any amino acid
XKRERDEYKRRWEEELAKRMNLQTMVDTLQEAAQEADAIQEEMNEKIERLKAELVVFKGLMSDVVPKKKERKVASDDDISEQDGEVNRFSDDEVGSMNITDEMKRMFNQLRETFDFDDDCDSLTWEENEDTLLLWEDFTNCNPTIDLQGEQEENLGNLIHETESFFKTRDKEYQETIGQIELELATAKSDMNRHLHEYMEMCSMKRGLDVQMETCRRLIKGSADRNSPSPSSVASSDSGSTDEIQDEFEREADVEPMVS

SEQ ID NO: 88471 - protein, 180 aa, Homo sapiens
MASTDYSTYSQAAAQQGYSAYTAQPTQGYAQTTQASYAAQSAYGTQPAYPAYGQQPAATAPTRPQDGNKPTETSQPQSSTGGYNQPSLGYGQSNYSYPQVPGSYPMQPVTAPPSYPPTSYSSTQPTSYDQSSYSQQNTYGQPSSYGQQSSYGQQSSYGQQPPTSYPPQTGSYSQAPSQYS

SEQ ID NO: 88472 - protein, 349 aa, Homo sapiens
MSLMVVSMVCVGFFLLQGAWPHEGVHRKPSLLAHPGPLVKSEETVILQCWSDVRFQHFLLHREGKFKDTLHLIGEHHDGVSKANFSIGPMMQDLAGTYRCYGSVTHSPYQLSAPSDPLDIVITGLYEKPSLSAQPGPTVLAGESVTLSCSSRSSYDMYHLSREGEAHERRFSAGPKVNGTFQADFPLGPATHGGTYRCFGSFRDSPYEWSNSSDPLLVSVTGNPSNSWPSPTEPSSKTGNPRHLHVLIGTSVVIILFILLLFFLLHRWCSNKKNAAVMDQEPAGNRTANSEDSDEQDPQEVTYVQLDHCVFTQRKITRPSQRPKTPPTDTRVYTELPNAESRSKVVSCP

SEQ ID NO: 88473 - protein, 254 aa, Homo sapiens
MPLFFRKRKPSEEARKRLEYQMCLAKEAGADDILDISKCELSEIPFGAFATCKVLQKKVLIVHTNHLTSLLPKSCSLLSLATIKVLDLHDNQLTALPDDLGQLTALQVLNVERNQLMQLPRSIGNLTQLQTLNVKDNKLKELPDTVGELRSLRTLNISGNEIQRLPQMLAHVRTLEMLSLDASAMVYPPREVCGAGTAAILQFLCKESGLEYYPPSQYLLPILEQDGIENSRDSPDGPTDRFSREELEWQVLRL

SEQ ID NO: 88474 - protein, 265 aa, Homo sapiens
MGLPWGQPHLGLQMLLLALNCLRPSLSLELVPYTPQITAWDLEGKVTATTFSLEQPRCVFDGLASASDTVWLVVAFSNASRGFQNPETLADIPASPQLLTDGHYMTLPLSPDQLPCGDPMAGSGGAPVLRVGHDHGCHQQPFCNAPLPGPGPYREDPRIHRHLARAAKWQHDRHYLHPLFSGRPPTLGLLGSLYHALLQPVVAGGGPGAAADRLLHGQALHDPPHPTQRGRHTAGGLQAWPGPPPQPQPLAWPLCMGLGEMGRRE

SEQ ID NO: 88475 - protein, 98 aa, Homo sapiens
MDLSGVKKKSLLGVKENNKKSSTRAPSPTKRKDRSDEKSKDRSKDKGATKESSEKDRGRDKTRKRRSASSGSSSLGPARLPAQAPAPALAQAVAPALP

SEQ ID NO: 88476 - protein, 148 aa, Homo sapiens
MYLQVETRTSSRLHLKRAPGIRSWSLLVGILSIGLAAAYYSGDSLGWKLFYVTGCLFVAVQNLEDWEEAIFDKSTGKVVLKTFSLYKKLLTLFRAGHDQVVVLLHDVRDVSVEEEKVRYFGKGYMVVLRLATGFSHPLTQSAVMGHRR

SEQ ID NO: 88477 - protein, 127 aa, Homo sapiens
  MOD_RES (1)..(1): Any amino acid
XPAVAGARPELLVVGSRPELGRWEPRGAVRLRPAGTAAGDGALALQEPGLWLGEVELAAEEAAQDGAEPGRVDTFWYKFLKREPGGELSWEGSGSVTQAGVQWHDLGSLQPLPPRLKPSSHVNLLSS

SEQ ID NO: 88478 - protein, 29 aa, Homo sapiens
NRDIFAEALKIQESEEKVKYLQKITGTIV

SEQ ID NO: 88479 - protein, 192 aa, Homo sapiens
MATSLHEGPTNQLDLLIRAVEASVHSSNAHCTDKTIEAAEALLHMESPTCLRDSRSPEFIHAAMRPDVITETVVEVSTEESEPMDTSPIPTSPDSHEPMKKKKGNTTYLWEFLLDLLQDKNTCPRYIKWTQREKGIFKLVDSKAVSKLWGKHKNKPDMNYETMGRALRYYYQRGILAKVEGQRLVYQFKDMP

SEQ ID NO: 88480 - protein, 126 aa, Homo sapiens
MEAPDYEVLSVREQLFHERIRECIISTLLFATLYILCHIFLTRFKKPAEFTTVDDEDATVNKIALELCTFTLAIALGAVLLLPFSIISNEVLLSLPRNYYIQWLNGSLIHGLWNLVFLFSNLSLIF

SEQ ID NO: 88481 - protein, 658 aa, Homo sapiens
  MOD_RES (1)..(1): Any amino acid
XIMKCPMLRSRLGQESVHCGPMFIQVSRPLPLWRDNRQTPWLLSLRGELVASLEDASLMGLYVDMNATTVTVQSPRQGLLQRWEVSGGQQALPGVSFQPESEVLVHIPKQRLGLVKRGSYIEETLSLRFLRVHQSNIFMVTENKDFVVVSIPAAGVLQVQRCQEVGGTPGTQAFYRVDLSLEFAEMAAPVLWTVESFFQCVGSGTESPASTAALRTTPSPPSPGPETPPAGVPPAASSQVWAAGPAAQEWLSRDLLHRPSDALAKKGLGPFLQTAKPARRGQTSASILPRVVQAQRGPQPPPGEAGIPGHPTPPATLPSEPVEGVQASPWRPRPVLPTHPALTLPVSSDASSPSPPAPRPERPESLLVSGPSVTLTEGLGTVRPEQDPAKSPGSPLLLRGLSSGDVAAPEPIMGEPGQASEEFQPLARPWRATLAAEELVSHRSPGEPQETCSGTEVERPRQTGPGLPREGARGHMDLSSSEPSQDIEGPGLSILPARDATFSTPSVRQPDPSAWLSSGPELTGMPRVRLAAPLAVLPMEPLPPEPVRPAALLTPEASSVGGPDQARYLESAPGWPVGQEEWGVAHTSSPPSTQTLSLWAPTGVLLPSLVELEYPFQAGRGASLQQELTEPTLALSAESHRPPELQDSVEGLSERPSR

SEQ ID NO: 88482 - protein, 288 aa, Homo sapiens
  MOD_RES (1)..(1): Any amino acid
XNSDYAIPKFKHLKKMLLVHGHFYYIRISELVQYFFYKNVCFIFPQFLYQFFCGFSQQTLYDTAYLTLYNISFTSLPILLYSLMEQHVGIDVLKRDPTLYRDVAKNALLRWRVFIYWTLLGLFDALVFFFGAYFVFENTTVTSNGQIFGNWTFGTLVFTVMVFTVTLKLALDTHYWTWINHFVIWGSLLFYVVFSLLWGGVIWPFLNYQRMYYVFIQMLSSGPAWLAIVLLVTISLLPDVLKKVLCRQLWPTATERVQRGVKHKAPVQAAQSSDGPLLKDLLRRPRRS

SEQ ID NO: 88483 - protein, 537 aa, Homo sapiens
MGPWSRSLSALLLLLQVSSWLCQEPEPCHPGFDAESYTFTVPRRHLERGRVLGRVNFEDCTGRQRTAYFSLDTRFKVGTDGVITVKRPLRFHNPQIHFLVYAWDSTYRKFSTKVTLNTVGHHHRPPPHQASVSGIQAELLTFPNSSPGLRRQKRDWVIPPISCPENEKGPFPKNLVQIKSNKDKEGKVFYSITGQGADTPPVGVFIIERETGWLKVTEPLDRERIATYTLFSHAVSSNGNAVEDPMEILITVTDQNDNKPEFTQEVFKGSVMEGALPGTSVMEVTATDADDDVNTYNAAIAYTILSQDPELPDKNMFTINRNTGVISVVTTGLDRESFPTYTLVVQAADLQGEGLSTTATAVITVTDTNDNPPIFNPTTYKGQVPENEANVVITTLKVTDADAPNTPAWEAVYTILNDDGGQFVVTTNPVNNDGILKTAKGLDFEAKQQYILHVAVTNVVPFEVSLTTSTATVTVDVLDVNEAPIFVPPEKRVEVSEDFGVGQEITSYTAQEPDTFMEQKITFSSCYWNRDTSADPV

SEQ ID NO: 88484 - protein, 97 aa, Homo sapiens
MISQFFILSSKGDPLIYKDFRGDSGGRDVAELFYRKLTGLPGDESPVVMHHHGRHFIHIRHSGLYLVVTTSENVSPFSLLELLSRTMAMYRPHPRRC

SEQ ID NO: 88485 - protein, 75 aa, Homo sapiens
MAHRFPALTQEQKKELSEIAQSIVANGKGILAADESVGTMGNRLQRIKVENTEENRRQFREILFSVDSSINQSIG

SEQ ID NO: 88486 - protein, 524 aa, Homo sapiens
MATEHVNGNGTEEPMDTTSAVIHSENFQTLLDAGLPQKVAEKLDEIYVAGLVAHSDLDERAIEALKEFNEDGALAVLQQFKDSDLSHVQNKSAFLCGVMKTYRQREKQGTKVADSSKGPDEAKIKIFVGKIPRDLFEDELVPLFEKAGPIWDLRLMMDPLTGLNRGYAFVTFCTKEAAQEAVKLYNNHEIRSGKHIGVCISVANNRLFVGSIPKSKTKEQILEEFSKVTEGLTDVILYHQPDDKKKNRGFCFLEYEDHKTAAQARRRLMSGKVKVWGNVGTVEWADPIEDPDPEVMAKVKVLFVRNLANTVTEEILEKAFSQFGKLERVKKLKDYAFIHFDERDGAVKAMEEMNGKDLEGENIEIVFAKPPDQKRKERKAQRQAAKNQMYDDYYYYGPPHMPPPTRGRGRGGRGGYGYPPDYYGYEDYYDYYGYDYHNYRGGYEDPYYGYEDFQVGARGRGGRGARGAAPSRGRGAAPPRGRAGYSQRGGPGSARGVRGARGGAQQQRGRGQGKGVEAGPDLLQ

SEQ ID NO: 88487 - protein, 61 aa, Homo sapiens
TAYDQLKAFLCGRALTSDLYAPMVAGALARREHSLGPLTSLCPHLGPNPVSPSSQPQPLPA

SEQ ID NO: 88488 - protein, 897 aa, Homo sapiens
MSMRIPVDEEAFVIDFKPRASMDTVHHMLLFGCNMPSSTGSYWFCDEGTCTDKANILYAWARNAPPTRLPKGVGFRVGGETGSKYFVLQVHYGDISAFRDNNKDCSGVSLHLTRLPQPLIAGMYLMMSVDTVIPAGEKVVNSDISCHYKNYPMHVFAYRVHTHHLGKVVSGYRVRNGQWTLIGRQSPQLPQAFYPVGHPVDVSFGDLLAARCVFTGEGRTEATHIGGTSSDEMCNLYIMYYMEAKHAVSFMTCTQNVAPDMFRTIPPEANIPIPVKSDMVMMHEHHKETEYKDKIPLLQQPKREEEEVLDQGDFYSLLSKLLGEREDVVHVHKYNPTEKAESESDLVAEIANVVQKKDLGRSDAREGAEHERGNAILVRDRIHKFHRLVSTLRPPESRVFSLQQPPPGEGTWEPEHTGDFHMEEALDWPGVYLLPGQVSGVALDPKNNLVIFHRGDHVWDGNSFDSKFVYQQIGLGPIEEDTILVIDPNNAAVLQSSGKNLFYLPHGLSIDKDGNYWVTDVALHQVFKLDPNNKEGPVLILGRSMQPGSDQNHFCQPTDVAVDPGTGAIYVSDGYCNSRIVQFSPSGKFITQWGEESSGSSPLPGQFTVPHSLALVPLLGQLCVADRENGRIQCFKTDTKEFVREIKHSSFGRNVFAISYIPGLLFAVNGKPHFGDQEPVQGFVMNFSNGEIIDIFKPVRKHFDMPHDIVASEDGTVYIGDAHTNTVWKFTLTEKLEHRSVKKAGIEVQEIKEAEAVVETKMENKPTSSELQKMQEKQKLIKEPGSGVPVVLITTLLVIPVVVLLAIAIFIRWKKSRAFGDSEHKLETSSGRVLGRFRGKGSGGLNLGNFFASRKGYSRKGFDRLSTEGSDQEKEDDGSESEEEYSAPLPALAPSSS

SEQ ID NO: 88489 - protein, 1115 aa, Homo sapiens
MEEHSYIQKELDLQNGSLEEDSVVHSVENDSQNMMESLSPKKYSSSLRFKANGDYSGSYLTLSQPVPAKRSPSPLGTSVRSSPSLAKIQGSKQFSYDGTDKNIPMKPPTPLLNTTSSLSGYPLGRADFDHYTGRDSERALRLSEKPPYSKYSSRHKSHDNVYSLGGLEGRKASGSLLAMWNGSSLSDAGPPPISRSGAASMPSSPKQARKMSIQDSLALQPKLTRHKELASENINLRTRKYSSSSLSHMGAYSRSLPRLYRATENQLTPLSLPPRNSLGNSKRTKLGEKDLPHSVIDNDNYLNFSSLSSGALPYKTSASEGNPYVSSTLSVPASPRVARKMLLASTSSCASDDFDQASYVGTNPSHSLLAGESDRVFATRRNFSCGSVEFDEADLESLRQASGTPQPALRERKSSISSISGRDDLMDYHRRQREERLREQEMERLERQRLETILSLCAEYTKPDSRLSTGTTVEDVQKINKELEKLQLSDEESVFEEALMSPDTRYRCHRKDSLPDADLASCGSLSQSSASFFTPRSTRNDELLSDLTRTPPPPSSTFPKASSESSYLSILPKTPEGISEEQRSQELAAMEETRIVILNNLEELKQKIKDINDQMDESFRELDMECALLDGEQKSETTELMKEKEILDHLNRKIAELEKNIVGEKTKDADLLDVESKHFEDLEFQQLEHESRLDEEKENLTQQLLREVAEYQRNIVSRKEKISALKKQANHIVQQAQREQDHFVKEKNNLIMMLQREKENLCNLEKKYSSLSGGKGFPVNPNTLKEGYISVNEINEPCGNSTNLSPSTQFPADADAVATEPATAVLASQPQSKEHFRSLEERKKQHKEGLYLSDTLPRKKTTSSISPHFSSATMGRSITPKAHLPLGQSNSCGSVLPPSLAAMAKDSESRRMLRGYNHQQMSEGHRQKSEFYNRTASESNVYLNSFHYPDHSYKDQAFDTLSLDSSDSMETSISACSPDNISSASTSNIARIEEMERLLKQAHAEKTRLLESREREMEAKKRALEEEKRRREILEKRLQEETSQRQKLIEKEVKIRERQRAQARPLTRYLPVRKEDFDLRSHVETAGHNIDTCYHVSITEKTCRGFLIKMGGKIK

SEQ ID NO: 88490 - protein, 157 aa, Homo sapiens
MTSASTKVGEIFSAAGAAFTKLGELTMQLHPVADSSPAGAKWTETEIEMLRAAVKRFGDDLNHISCVIKERTVAQIKATVKRKVYEDSGIPLPAESPKKGPKKVASGVLSPPPAAPPPSSSSVPEAGGPPIKKQKADSLTLDSGLLMTSADPPLLSC

SEQ ID NO: 88491 - protein, 110 aa, Homo sapiens
  MOD_RES (1)..(1): Any amino acid
XAPGEGDGGGGGFGSWLDGRLEALGVDRAVYGAYILGILQEEEEEEKLDALQGILSAFLEEDSLLNICKEIVERWSETQNVVTKVKKEGTPCLCRLEALTISSFLRDCTM

SEQ ID NO: 88492 - protein, 82 aa, Homo sapiens
MAQRAFPNPYADYNKSLAEGYFDAAGRLTPEFSQRLTNKIRELLQQMERGLKSADPRDGTGYTGWAVGRIGKSSKIQCLKRR

SEQ ID NO: 88493 - protein, 371 aa, Homo sapiens
  MOD_RES (1)..(1): Any amino acid
XLREGEDLSKKNPIAKIHSDLAEERGLKITYKYTGKGITEPPFGIFVFNKDTGELNVTSILDREETPFFLLTGYALDARGNNVEKPLELRIKVLDINDNEPVFTQDVFVGSVEELSAAHTLVMKINATDADEPNTLNSKISYRIVSLEPAYPPVFYLNKDTGEIYTTSVTLDREEHSSYTLTVEARDGNGEVTDKPVKQAQVQIRILDVNDNIPVVENKVLEGMVEENQVNVEVTRIKVFDADEIGSDNWLANFTFASGNEGGYFHIETDAQTNEGIVTLIKEVDYEEMKNLDFSVIVANKAAFHKSIRSKYKPTPIPIKVKVKNVKEGIHFKSSVISIYVSESMDRSSKGQIIGNFQAFDEDTGLPAHAR

SEQ ID NO: 88494 - protein, 81 aa, Homo sapiens
  MOD_RES (1)..(1): Any amino acid
XLNLSIGGPDFMDHPFVDKVWELTANNVIMVSAIGNDGPLYGTLNNPADQMDVIGVGGIDFEDNIARFSSRGMTTWHSPEA

SEQ ID NO: 88495 - protein, 61 aa, Homo sapiens
MMDCLYAKCIPCITDCVMAEIEKLGQKYRVALRIAKDPRFERLPCTHKGTYADDCLVQRVT

SEQ ID NO: 88496 - protein, 54 aa, Homo sapiens
MVRISKPKTFQAYLDDCHRRYSCAHCRAHLANHDDLISKSFQGSQGRAYLFNSV

SEQ ID NO: 88497 - protein, 80 aa, Homo sapiens
MTGGTNKTSSSISEILDKVQEDAEDVLFSLGFGQEDHKDTSRIPARFFTTPSQAKGIDFQLFLKSQVRRIEMEDPCLMLA

SEQ ID NO: 88498 - protein, 75 aa, Homo sapiens
MLSFPNLNQVLENYSDAPMTPKQILQVIEAEGLKEMRSGTSPLACLNAMLHSNSRGGEGLFYKLPGRISLFTLKR

SEQ ID NO: 88499 - protein, 79 aa, Homo sapiens
MCSEIILRQEVLKDGFHRDLLIKVKFGESIEDLHTCRLLIKQDIPAGLYVDPYELASLRERNITEEKTSWRRLWLPSDN

SEQ ID NO: 88500 - protein, 195 aa, Homo sapiens
MPVMKGLLAPQNTFLDTIATRFDGTHSNFILANAQVAKGFPIVYCSDGFCELAGFARTEVMQKSCSCKFLFGVETNEQLMLQIEKSLEEKTEFKGEIMFYKKNGSPFWCLLDIVPIKNEKGDVVLFLASFKDITDTKVKITPEDKKEDKVKGRSRAGTHFDSARRRSRAVLYHISGHLQRREKNKLKINNVLQDP

SEQ ID NO: 88501 - protein, 135 aa, Homo sapiens
MAKSLLKTASLSGRTKLLHQTGLSLYSTSHGFYEEEVKKTLQQFPGGSIDLQKEDNGIGILTLNNPSRMNAFSGVMMLQLLEKVIELENWTEGKGLIVRGAKNTFSSGSDLNAVKSLGTPEDGMAVCMFMQNTLT

SEQ ID NO: 88502 - protein, 297 aa, Homo sapiens
  MOD_RES (1)..(1): Any amino acid
XREDGIQKRVIQEGRGELPDFQDGTKATFHYRTLHSDDEGTVLDDSRARGKPMELIIGKKFKLPVWETIVCTMREGEIAQFLCDIKHVVLYPLVAKSLRNIAVGKDPLEGQRHCCGVAQMREHSSLGHADLDALQQNPQPLIFHMEMLKVESPGTYQQDPWAMTDEEKAKAVPLIHQEGNRLYREGHVKEAAAKYYDAIACLKNLQMKEQPGSPEWIQLDQQITPLLLNYCQCKLVVEEYYEVLDHCSSILNKYDGEHRALGCRGLRVVREWPFSCHCWGQDLAFHNPHSELPRGPD

SEQ ID NO: 88503 - protein, 197 aa, Homo sapiens
MADFDTYDDRAYSSFGGGRGSRGSAGGHGSRSQKELPTEPPYTAYVGNLPFNTVQGDIDAIFKDLSIRSVRLVRDKDTDKFKGFCYVEFDEVDSLKEALTYDGALLGDRSLRVDIAEGRKQDKGGFGFRKGGPDDRGFRDDFLGGRGGSRPGDRRTGPPMGSRFRDGPPLRGSNMDFREPTEGTGSCVSGGHLVLMG

SEQ ID NO: 88504 - protein, 368 aa, Homo sapiens
MDFRTACEETKTGICLLQDGNQEPFKVRLHLAKDILMIQEQDVICVSGEPFYSGERTVTIRRQTVGGFGLSIKGGAEHNIPVVVSKISKEQRAELSGLLFIGDAILQINGINVRKCRHEEVIKKINRNFPVNQQIVYMGWCEAREQDPLQDRVYSPTFLALRGSCLYKFLAPPVTTWDWTRAEKTFSVYEIMCKILKDSDLLDRRKQCFTVQSESGEDLYFSVELESDLAQWERAFQTATFLEVERIQCKTYACVLESHLMGLTIDFSTGFICFDAATKAVLWRYKFSQLKGSSDDGKSKIKFLFQNPDTKQIEAKELEFSNLFAVLHCIHSFFAAKVACLDPLFLGNQATASTAASSATTSKAKYTT

SEQ ID NO: 88505 - protein, 469 aa, Homo sapiens
  MOD_RES (1)..(1): Any amino acid
XEPLSPAGGAGEEAPEEDEDEAEAEDPERPNAGAGGGRSGGGGSSVSGGGGGGGAGAGGCGGPGGALTRRAVTLRVLLKDALLEPGAGVLSIYYLGKKFLGDLQPDGRIMWQETGQTFNSPSAWATHCKKLVNPAKKSGCGWASVKYKGQKLDKYKATWLRLHQLHTPATAADESPASEGEEEELLMEEEEEDVLAGVSAEDKSRRPLGKSPSEPAHPEATTPGKRVDSKIRVPVRYCMLGSRDLARNPHTLVEVTSFAAINKFQPFNVAVSSNVLFLLDFHSHLTRSEVVGYLGGRWDVNSQMLTVLRAFPCRSRLGDAETAAAIEEEDIDAQMDYQLRLQGSSNGFQPCLALLCSPYYSGNPGPESKISPFWVMPPPEQRPSDYGIPMDVEMAYVQDSFLTNDILHEMMLLVEFYKGSPDLVRLQEPWSQEHTYLDKLKISLASRTPKDQSLCHVLEQVCGVLKQGS

SEQ ID NO: 88506 - protein, 1442 aa, Homo sapiens
MREAAAALVPPPAFAVTPAAAMEEPPPPPPPPPPPPEPETESEPECCLAARQEGTLGDSACKSPESDLEDFSDETNTENLYGTSPPSTPRQMKRMSTKHQRNNVGRPASRSNLKEKMNAPNQPPHKDTGKTVENVEEYSYKQEKKIRAALRTTERDRKKNVQCSFMLDSVGGSLPKKSIPDVDLNKPYLSLGCSNAKLPVSVPMPIARPARQTSRTDCPADRLKFFETLRLLLKLTSVSKKKDREQRGQENTSGFWLNRSNELIWLELQAWHAGRTINDQDFFLYTARQAIPDIINEILTFKVDYGSFAFVRDRAGFNGTSVEGQCKATPGTKIVGYSTHHEHLQRQRVSFEQVKRIMELLEYIEALYPSLQALQKDYEKYAAKDFQDRVQALCLWLNITKDLNQKLRIMGTVLGIKNLSDIGWPVFEIPSPRPSKGNEPEYEGDDTEGELKELESSTDESEEEQISDPRVPEIRQPIDNSFDIQSRDCISKKLERLESEDDSLGWGAPDWSTEAGFSRHCLTSIYRPFVDKALKQMGLRKLILRLHKLMDGSLQRARIALVKNDRPVEFSEFPDPMWGSDYVQLSRTPPSSEEKCSAVSWEELKAMDLPSFEPAFLVLCRVLLNVIHECLKLRLEQRPAGEPSLLSIKQLVRECKEVLKGGLLMKQYYQFMLQEVLEDLEKPDCNIDAFEEDLHKMLMVYFDYMRSWIQMLQQLPQASHSLKNLLEEEWNFTKEITHYIRGGEAQAGKLFCDIAGMLLKSTGSFLEFGLQESCAEFWTSADDSSASDEIRRSVIEISRALKELFHEARERASKALGFAKMLRKDLEIAAEFRLSAPVRDLLDVLKSKQYVKVQIPGLENLQMFVPDTLAEEKSIILQLLNAAAGKDCSKDSDDVLIDAYLLLTKHGDRARDSEDSWGTWEAQPVKVVPQVETVDTLRSMQVDNLLLVVMQSAHLTIQRKAFQQSIEGLMTLCQEQTSSQPVIAKALQQLKNDALELCNRISNAIDRVDHMFTSEFDAEVDESESVTLQQYYREAMIQGYNFGFEYHKEVVRLMSGEFRQKIGDKYISFARKWMNYVLTKCESGRGTRPRWATQGFDFLQAIEPAFISALPEDDFLSLQALMNECIGHVIGKPHSPVTGLYLAIHRNSPRPMKVPRCHSDPPNPHLIIPTPEGFSTRSMPSDARSHGSPAAAAAAAAAAVAASRPSPSGGDSVLPKSISSAHDTRGSSVPENDRLASIAAELQFRSLSRHSSPTEERDEPAYPRGDSSGSTRRSWELRTLISQSKDTASKLGPIEAIQKSVRLFEEKRYREMRRKNIIGQVCDTPKSYDNVMHVGLRKVTFKWQRGNKIGEGQYGKVYTCISVDTGELMAMKEIRFQPNDHKTIKETADELKIFEGIKHPNLVRYFGVELHRSTVTLPNSQEISMSYIISAFSLKLEEFLLK

SEQ ID NO: 88507 - protein, 169 aa, Homo sapiens
MLYDYVERKRKENSGAQLHVTYLVSGSLIQNGHSCHKVAVVREDKLEAVKSKLAVTASIHVYSIQKAMLKDSGPLFNTDYDILKSNLQNCSKFSAIQCAAAVPRAPAESSSSSKKFEQSHLHMSSETQANNELTTNGHGPPASKQVSQQPKGIMGMFASKAAAKTQETN

SEQ ID NO: 88508 - protein, 137 aa, Homo sapiens
MTCILVCFPGAPRPSEEAIRRELALDAALGCRIAELCASAQKPPSLNTVFRTLASEDIPDLPPGGGLDCKSQKSAERRGRMGLGSPTPRIWAQPWTWRPDSCCPLGILCFSGASTELKKKTDPFPNYMYQRKEGRPM

SEQ ID NO: 88509 - protein, 586 aa, Homo sapiens
MALTSPLQDDSINQAPLEIVSKLLSENTNLTTQEHENIIVAIAPLLENNHPPPDLCEFFCKHCRERPRSMVVIEVFTPVVQRILKHNMDFGKCPRLRLFTQEYILALNELNAGMEVVKKFIQSMHGPTGHCPHPRVLPNLVAVCLAAIYSCYEEFINSRDNSPSLKEIRNGCQQPCDRKPTLPLRLLHPSPDLVSQEATLSEARLKSVVVASSEIHVEVERTSTAKPALTASAGNDSEPNLIDCLMVSPACSTMSIELGPQADRTLGCYVEILKLLSDYDDWRPSLASLLQPIPFPKEALAHEKFTKELKYVIQRFAEDPRQEVHSCLLSVRAGKDGWFQLYSPGGVACDDDGELFASMVHILMGSCYKTKKFLLSLAENKLGPCMLLALRGNQTMVEILCLMLEYNIIDNNDTQLQIISTLESTDVGKRMYEQLCDRQRELKELQRKGGPTRLTLPSKSTDADLARLLSSGSFGNLENLSLAFTNVTSACAEHLIKLPSLKQLNLWSTQFGDAGLRLLSEHLTMLQVLNLCETPVTDAGLLALSSMKSLCSLNMNSTKLSADTYEDLKAKLPNLKEVDVRYTEAW

SEQ ID NO: 88510 - protein, 83 aa, Homo sapiens
MADQLTEEQIAEFKEAFSLFDKDGDGTITTKELGTVMRSLGQNPTEAELQDMINEVDADGWQWLYQCSRTTSRHDKLRRKTNR

SEQ ID NO: 88511 - protein, 32 aa, Homo sapiens
MFKGPEKDIEFIYTAPSSAVCGVSLDVGGKKE

SEQ ID NO: 88512 - protein, 14 aa, Homo sapiens
MAFLKLRDQACDWN

SEQ ID NO: 88513 - protein, 66 aa, Homo sapiens
MLRRALLCLAVAALVRADAPEEEDHVLVLRKSNFAEALAAHKYLLMPLGVATARLWPLSMPKPLGS

SEQ ID NO: 88514 - protein, 119 aa, Homo sapiens
MDGETAEEQGGPVPPPVAPGGPGLGGAPGGRREPKKYAVTDDYQLSKQVLGLGVNGKVLECFHRRTGQKCALKLLYDSPKARQEVDHHWQASGGPHIVCILDVYENMHHGKRCLLIIME

SEQ ID NO: 88515 - protein, 170 aa, Homo sapiens
MAVPFVEDWDLVQTLGEGAYGEVQLAVNRVTEEAVAVKIVDMKRAVDCPENIKKEICINKMLNHENVVKFYGHRREGNIQYLFLEYCSGGELFDRIEPDIGMPEPDAQRFFHQLMAGVVYLHGIGITHRDIKPENLLLDERDNLKISDFGLATVFRYNNRERLLNKMCGT

SEQ ID NO: 88516 - protein, 149 aa, Homo sapiens
MAIRAQHSNAAQTQTGEANRGWTGQESLSDSDPEMWELLQREKDRQCRGLELIASENFCSRAALEALGSCLNNKYSEGYPGKRYYGGAEVVDEIELLCQRRALEAFDLDPAQWGVNVQPYSGSPANLAVYTALLQPHDRIMGLDLPDGG

SEQ ID NO: 88517 - protein, 1028 aa, Homo sapiens
GKQLMDEKPQFTALVSQKLEALHRLWDELQATTKEKTQHLSAARSSDLRLQTHADLNKWISAMEDQLRSDDPGKDLTSVNRMLAKLKRVEDQVNVRKEELGELFAQVPSMGEEGGDADLSIEKRFLDLLEPLGRRKKQLESSRAKLQISRDLEDETLWVEERLPLAQSADYGTNLQTVQLFMKKNQTLQNEILGHTPRVEDVLQRGQQLVEAAEIDCQDLEERLGHLQSSWDRLREAAAGRLQRLRDANEAQQYYLDADEAEAWIGEQELYVISDEIPKDEEGAIVMLKRHLRQQRAVEDYGRNIKQLASRAQGLLSAGHPEGEQIIRLQGQVDKHYAGLKDVAEERKRKLENMYHLFQLKRETDDLEQWISEKELVASSPEMGQDFDHVTLLRDKFRDFARETGAIGQERVDNVNAFIERLIDAGHSEAATIAEWKDGLNEMWADLLELIDTRMQLLAASYDLHRYFYTGAEILGLIDEKHRELPEDVGLDASTAESFHRVHTAFERELHLLGVQVQQFQDVATRLQTAYAGEKAEAIQNKEQEVSAAWQALLDACAGRRTQLVDTADKFRFFSMARDLLSWMESIIRQIETQERPRDVSSVELLMKYHQGINAEIETRSKNFSACLELGESLLQRQHQASEEIREKLQQVMSRRKEMNEKWEARWERLRMLLEVCQFSRDASVAEAWLIAQEPYLASGDFGHTVDSVEKLIKRHEAFEKSTASWAERFAALEKPTTLELKERQIAERPAEETGPQEEEGETAGEAPVSHHAATERTSPGEEEGTWPQNLQQPPPPGQHKDGQKSTGDERPTTEPLFKVLDTPLSEGDEPATLPAPRDHGQSVQMEGYLGRKHDLEGPNKKASNSKGEEGEERRETEEEDEEEEETESVAVEMQQHASHVSWNNLYCVLRNSELTFYKDAKNLALGMPYHGEEPLALRHAICEIAANYKKKKHVFKLRLSNGSEWLFHGKDEEEMLSWLQGVSTAINESQSIRVKAQSLPLPSLSGPDASLGKKDKEKRFSFFPKKK

SEQ ID NO: 88518 - protein, 354 aa, Homo sapiens
MAAAMPLALLVLLLLGPGGWCLAEPPRDSLREELVITPLPSGDVAATFQFRTRWDSELQREGVSHYRLFPKALGQLISKYSLRELHLSFTQGFWRTRYWGPPFLQAPSGAELWVWFQDTVTDVDKSWKELSNVLSGIFCASLNFIDSTNTVTPTASFKPLGLANGLSVLLKADRLFHTSYHSQAVHIRPVCRNARCTSISWELRQTLSVVFDAFITGQGKKDWSLFRMFSRTLTEPCPLASESRVYVDITTYNQDNETLEVHPPPTTTYQDVILGTRKTYAIYDLLDTAMINNSRNLNIQLKWKRPPENEAPPVPFLHAQRYVSGYGLQKGELSTLLYNTHPYRAFPVLLLDTV

SEQ ID NO: 88519 - protein, 78 aa, Homo sapiens
MADKQISLPAKLINGGIAGLIGVTCVFPIDLAKTRLQNQQNGQRVYTSMSDCLIKTVRSEGYFGMYRGAAVNLTLVTP

SEQ ID NO: 88520 - protein, 937 aa, Homo sapiens
MALLCGLGSGGMEALTTQLGPGREGSSSPNSKQELQPYSGSSALKPNQVGETSLYGVPIVSLVIDGQERLCLAQISNTLLKNYSYNEIHNRRVALGITCVQCTPVQLEILRRAGAMPISSRRCGMITKREAERLCKSFLGEHKPPKLPENFAFDVVHECAWGSRGSFIPARYNSSRAKCIKCGYCSMYFSPNKFIFHSHRTPDAKYTQPDAANFNSWRRHLKLSDKSATDELSHAWEDVKAMFNGGTRKRTFSLQGGGGGGANGGSGGQGKGGAGGGGGGGPGCGAEMAPGPPPHKSLRCGEDEAAGPPGPPPPHPQRGLGLATGASGPAGPGGPGGGAGVRSYPVIPVPSKGFGLLQKLPPPLFPHPYGFPTAFGLCPKKDDPVLGAGEPKGGPGTGSGGGGAGTGGGAGGPGASHLPPGAGAGPGGGAMFWGHQPSGAAKDAAAVAAAAAAATVYPTFPMFWPAAGSLPVPSYPAAQSQAKAVAAAVAAAAAAAAAAAGSGAPEPLDGAEPAKESGLGAEERCPSALSRGPLDEDGTDEALPPPLAPLPPPPPPPARKGSYVSAFRPVVKDTESIAKLYGSAREAYGAGPARGPGPGAGSGGYVSPDFLSEGSSSYNSASPDVDTADEPEVDVESNRFPDDEDAQEETEPSAPSAGGGPDGEQPTGPPSATSSGADGPANSPDGGSPRPRRRLGPPPAGRPAFGDLAAEDLVRRPERSPPSGGGGYELREPCGPLGGPAPAKVFAPERDEHVKSAAVALGPAASYVCTPEAHEPDKEDNHSPADDLETRKSYPDQRSISQPSPANTDRGEDGLTLDVTGTHLVEKDIENLAREELQKLLLEQMELRKKLEREFQSLKDNFQDQMKRELAYREEMVQQLQIVRDTLCNELDQERKARYAIQQKLKEAHDALHHFSCKMLTPRHCTGNCSFKPPLLP

SEQ ID NO: 88521 - protein, 142 aa, Homo sapiens
MPSIKLQSSDGEIFEVDVEIAKQSVTIKTMLEDLGMDDEGDDDPVPLPNVNAAILKKVIQWCTHHKDDPPPPEDDENKEKRTDDIPVWDQEFLKVDQGTLFELILAANYLDIKGLLDVTCKTVANMIKGKTPEEIRKTFNIK

SEQ ID NO: 88522 - protein, 82 aa, Homo sapiens
MACSIVQFCYFQDLQAARDFLFPHLREEILSGALRRDPSKSTDWEDDGWGAWEENEPQEPGMCNQCSMYPTSKPKEEFHWAS

SEQ ID NO: 88523 - protein, 144 aa, Homo sapiens
MVSVDKHQSPSLKYTGSSMVHIPPGEPDFESSLCQTCLGEHAFQRGVLPQENESCSWETQSGCEVREPCNHANILTKPDPRTFWTNDDPAFMKQRRMGLNDFIQKIANNSYACKHPEVQSILKISQPQEPELMNANPSPPPSPS

SEQ ID NO: 88524 - protein, 1267 aa, Homo sapiens
MLVGQGAGPLGPAVVTAAVVLLLSGVGPAHGSEDIVVGCGGFVKSDVEINYSLIEIKLYTKHGTLKYQTDCAPNNGYFMIPLYDKGDFILKIEPPLGWSFEPTTVELHVDGVSDICTKGGDINFVFTGFSVNGKVLSKGQPLGPAGVQVSLRNTGTEAKIQSTVTQPGGKFAFFKVLPGDYEILATHPTWALKEASTTVRVTNSNANAASPLIVAGYNVSGSVRSDGEPMKGVKFLLFSSLVTKEDVLGCNVSPVPGFQPQDESLVYLCYTVSREDGSFSFYSLPSGGYTVIPFYRGERITFDVAPSRLDFTVEHDSLKIEPVFHVMGFSVTGRVLNGPEGDGVPEAVVTLNNQIKVKTKADGSFRLENITTGTYTIHAQKEHLYFETVTIKIAPNTPQLADIIATGFSVCGQISIIRFPDTVKQMNKYKVVLSSQDKDKSLVTVETDAHGSFCFKAKPGTYKVQVMVPEAETRAGLTLKPQTFPLTVTNRPMMDVAFVQFLASVSGKVSCLDTCGDLLVTLQSLSRQGEKRSLQLSGKVNAMTFTFDNVLPGKYKISIMHEDWCWKNKSLEVEVLEDDMSAVEFRQTGYMLRCSLSHAITLEFYQDGNGRENVGIYNLSKGVNRFCLSKPGVYKVTPRSCHRFEQAFYTYDTSSPSILTLTAIRHHVLGTITTDKMMDVTVTIKSSIDSEPALVLGPLKSVQELRREQQLAEIEARRQEREKNGNEEGEERMTKPPVQEMVDELQGPFSYDFSYWARSGEKITVTPSSKELLFYPPSMEAVVSGESCPGKLIEIHGKAGLFLEGQIHPELEGVEIVISEKGASSPLITVFTDDKGAYSVGPLHSDLEYTVTSQKEGYVLTAVEGTIGDFKAYALAGVSFEIKAEDDQPLPGVLLSLSGGLFRSNLLTQDNGILTFSNLSPGQYYFKPMMKEFRFEPSSQMIEVQEGQNLKITITGYRTAYSCYGTVSSLNGEPEQGVAMEAVGQNDCSIYGEDTVTDEEGKFRLRGLLPGCVYHVQLKAEGNDHIERALPHHRVIEVGNNDIDDVNIIVFRQINQFDLSGNVITSSEYLPTLWVKLYKSENLDNPIQTVSLGQSLFFHFPPLLRDGENYVVLLDSTLPRSQYDYILPQVSFTAVGYHKHITLIFNPTRKLPEQDIAQGSYIALPLTLLVLLAGYNHDKLIPLLLQLTSRLQGVRALGQAASDNSGPEDAKRQAKKQKTRRTLRLQEEFQLTWCLVPWRGTLGIHLFSSLPFASEILLETTATCIHY

SEQ ID NO: 88525 - protein, 179 aa, Homo sapiens
MATSLGSNTYNRQNWEDATCLGENPYIRMTKEKYGKECKICARPFTVFRWCPGVRMRFKKTEVCQTCSKLKNVCQTCLLDLEYGLPIQVRDAGLSFKDDMPKSDVNKEYYTQNMEREISNSDGTRPVGMLGKATSTSDMLLKLARTTPYYKRNRPHICSFWVKGECKRGEECPYRHEKP

SEQ ID NO: 88526 - protein, 87 aa, Homo sapiens
MKPTGTDPRILSIAAEVAKSPEQNVPVILLKLKEIINITPLGSSELKKIKQDIYCYDLIQYCLLVLSQDYSRIQGGWTTISQLTQIL

SEQ ID NO: 88527 - protein, 179 aa, Homo sapiens
RVLFPDRYVLQGFFRPSETVGDLRDFVRSHLGNPELSFYLFITPPKTVLDDHTQTLFQANLFPAALVHLGAEEPAGVYLEPGLLEHAISPSAADVLVARYMSRAAGSPSPLPAPDPAPKSEPAAEEGALVPPEPIPGTAQPVKRSLGKPARGESCQPEVPTPPATGPPPLPAGIKTCAS

SEQ ID NO: 88528 - protein, 980 aa, Homo sapiens
MATRGGAGVAMAVWSLLSARAVTAFLLLFLPRFLQAQTFSFPFQQPEKCDNNQYFDISALSCVPCGANQRQDARGTSCVCLPGFQMISNNGGPAIICKKCPENMKGVTEDGWNCISCPSDLTAEGKCHCPIGHILVERDINGTLLSQATCELCDGNENSFMVVNALGDRCVRCEPTFVNTSRSCACSEPNILTGGLCFSSTGNFPLRRISAARYGEVGMSLTSEWFAKYLQSSAAACWVYANLTSCQALGNMCVMNMNSYDFATFDACGLFQFIFENTAGLSTVHSISFWRQNLPWLFYGDQLGLAPQVLSSTSLPTNFSFKGENQNTKLKFVAASYDIRGNFLKWQTLEGGVLQLCPDTETRLNAAYSFGTTYQQNCEIPISKILIDFPTPIFYDVYLEYTDENQHQYILAVPVLNLNLQHNKIFVNQVDAVSGRENDLGTQPRVIRVATQISLSVHLVPNTINGNIYPPLITIAYSDIDIKDANSQSVKVSFSVTYEMDHGEAHVQTDIALGVLGGLAVLASLLKTAGWKRRIGSPMIDLQTVVKFLVYYAGDLANVFFIITVGTGLYWLIFFKAQKSVSVLLPMPIQEERFVTYVGCAFALKALQFLHKLISQITIDVFFIDWERPKGKVLKAVEGEGGVRSATVPVSIWRTYFVANEWNEIQTVRKINSLFQVLTVLFFLEVVGFKNLALMDSSSSLSRNPPSYIAPYSCILRYAVSAALWLAIGIIQVVFFAVFYERFIEDKIRQFVDLCSMSNISVFLLSHKCFGYYIHGRSVHGHADTNMEEMNMNLKREAENLCSQRGLVPNTDGQTFEIAISNQMRQHYDRIHETLIRKNGPARLLSSSASTFEQSIKAYHMMNKFLGSFIDHVHKEMDYFIKDKLLLERILGMEFMEPMEKSIFYNDEGYSFSSVLYYGNEATLLIFDLLFFCVVDLACQNFILASFLTYLQQEIFRYIRNTVGQKNLASKTLVDQRFLI

SEQ ID NO: 88529 - protein, 446 aa, Homo sapiens
MPSALAIFTCRPNSHPFQERHVYLDEPIKIGRSVARCRPAQNNATFDCKVLSRNHALVWFDHKTGKFYLQDTKSSNGTFINSQRLSRGSEESPPCEILSGDIIQFGVDVTENTRKGTVTHGCIVSTIKLFLPDGMEARLRSDVIHAPLPSPVDKVAANTPSMYSQELFQLSQYLQEALHREQMLEQKLATLQRLLAITQEASDTSWQALIDEDRLLSRLEVMGNQLQACSKNQTEDSLRKELIALQEDKHNYETTAKESLRRVLQEKIEVVRKLSEVERSLSNTEDECTHLKEMNERTQEELRELANKYNGAVNEIKDLSDKLKVAEGKQEEIQQKGQAEKKELQHKIDEMEEKEQELQAKIEALQADNDFTNERLTALQEHLLSKSGGDCTFIHQFIECQKKLIVEGHLTKAVEETKLSKVGKWTALNKSPSPQQSRHDPHYNLI

SEQ ID NO: 88530 - protein, 145 aa, Homo sapiens
  MOD_RES (1)..(1): Any amino acid
XDAGCFYTGAVLRHPGSLASFSTCGGGLMGFIQLNEDFIFIEPLNDTMAITGHPHRVYRQKRSMEEKVTEKSALHSHYCGIISDKGRPRSRKIAESGRGKRYSYKLPQEYNIETVVVADPAMVSYHGADAARRFILTILNMVGKL

SEQ ID NO: 88531 - protein, 2337 aa, Homo sapiens
MVRFGDELGGRYGGPGGGERARGGGAGGAGGPGPGGLQPGQRVLYKQSIAQRARTMALYNPIPVKQNCFTVNRSLFVFSEDNVVRKYAKRITEWPPFEYMILATIIANCIVLALEQHLPDGDKTPMSERLDDTEPYFIGIFCFEAGIKIIALGFVFHKGSYLRNGWNVMDFVVVLTGILATAGTDFDLRTLRAVRVLRPLKLVSGIPSLQVVLKSIMKAMVPLLQIGLLLFFAILMFAIIGLEFYMGKFHKACFPNSTDAEPVGDFPCGKEAPARLCEGDTECREYWPGPNFGITNFDNILFAILTVFQCITMEGWTDILYNTNDAAGNTWNWLYFIPLIIIGSFFMLNLVLGVLSGEFAKERERVENRRAFLKLRRQQQIERELNGYLEWIFKAEEVMLAEEDRNAEEKSPLDVLKRAATKKSRNDLIHAEEGEDRFADLCAVGSPFARASLKSGKTESSSYFRRKEKMFRFFIRRMVKAQSFYWVVLCVVALNTLCVAMVHYNQPRRLTTTLYFAEFVFLGLFLTEMSLKMYGLGPRSYFRSSFNCFDFGVIVGSVFEVVWAAIKPGSSFGISVLRALRLLRIFKVTKYWSSLRNLVVSLLNSMKSIISLLFLLFLFIVVFALLGMQLFGGQFNFQDETPTTNFDTFPAAILTVFQILTGEDWNAVMYHGIESQGGVSKGMFSSFYFIVLTLFGNYTLLNVFLAIAVDNLANAQELTKDEEEMEEAANQKLALQKAKEVAEVSPMSAANISIAARQQNSAKARSVWEQRASQLRLQNLRASCEALYSEMDPEERLRFATTRHLRPDMKTHLDRPLVVELGRDGARGPVGGKARPEAAEAPEGVDPPRRHHRHRDKDKTPAAGDQDRAEAPKAESGEPGAREERPRPHRSHSKEAAGPPEARSERGRGPGPEGGRRHHRRGSPEEAAEREPRRHRAHRHQDPSKECAGAKGERRARHRGGPRAGPREAESGEEPARRHRARHKAQPAHEAVEKETTEKEATEKEAEIVEADKEKELRNHQPREPHCDLETSGTVTVGPMHTLPSTCLQKVEEQPEDADNQRNVTRMGSQPPDPNTIVHIPVMLTGPLGEATVVPSGNVDLESQAEGKKEVEADDVMRSGPRPIVPYSSMFCLSPTNLLRRFCHYIVTMRYFEVVILVVIALSSIALAAEDPVRTDSPRNNALKYLDYIFTGVFTFEMVIKMIDLGLLLHPGAYFRDLWNILDFIVVSGALVAFAFSGSKGKDINTIKSLRVLRVLRPLKTIKRLPKLKAVFDCVVNSLKNVLNILIVYMLFMFIFAVIAVQLFKGKFFYCTDESKELERDCRGQYLDYEKEEVEAQPRQWKKYDFHYDNVLWALLTLFTVSTGEGWPMVLKHSVDATYEEQGPSPGYRMELSIFYVVYFVVFPFFFVNIFVALIIITFQEQGDKVMSECSLEKNERACIDFAISAKPLTRYMPQNRQSFQYKTWTFVVSPPFEYFIMAMIALNTVVLMMKFYDAPYEYELMLKCLNIVFTSMFSMECVLKIIAFGVLNYFRDAWNVFDFVTVLGSITDILVTEIANNFINLSFLRLFRAARLIKLLRQGYTIRILLWTFVQSFKALPYVCLLIAMLFFIYAIIGMQVFGNIALDDDTSINRHNNFRTFLQALMLLFRSATGEAWHEIMLSCLSNQACDEQANATECGSDFAYFYFVSFIFLCSFLMLNLFVAVIMDNFEYLTRDSSILGPHHLDEFIRVWAEYDPAACGRISYNDMFEMLKHMSPPLGLGKKCPARVAYKRLVRMNMPISNEDMTVHFTSTLMALIRTALEIKLAPAGTKQHQCDAELRKEISVVWANLPQKTLDLLVPPHKPDEMTVGKVYAALMIFDFYKQNKTTRDQMQQAPGGLSQMGPVSLFHPLKATLEQTQPAVLRGARVFLRQKSSTSLSNGGAIQNQESGIKESVSWGTQRTQDAPHEARPPLERGHSTEIPVGRSGALAVDVQMQSITRRGPDGEPQPGLESQGRAASMPRLAAETQPVTDASPMKRSISTLAQRPRGTHLCSTTPDRPPPSQASSHHHHHRCHRRRDRKQRSLEKGPSLSADMDGAPSSAVGPGLPPGEGPTGCRRERERRQERGRSQERRQPSSSSSEKQRFYSCDRFGGREPPKPKPSLSSHPTSPTAGQEPGPHPQGSGSVNGSPLLSTSGASTPGRGGRRQLPQTPLTPRPSITYKTANSSPIHFAGAQTSLPAFSPGRLSRGLSEHNALLQRDPLSQPLAPGSRIGSDPYLGQRLDSEASVHALPEDTLTFEEAVATNSGRSSRTSYVSSLTSQSHPLRRVPNGYHCTLGLSSGGRARHSYHHPDQDHWC

SEQ ID NO: 88532 - protein, 134 aa, Homo sapiens
MIDHLVTMKISHWDGVIRELAARALHNLAQQAPEFSATQVFPRLLSMTLSPDLHMRHGSILACAEVAYALYKLAAQENRPVTDHLDEQAVQGLKQIHQQLYDRQLYRGLGGQLMRQAVCVLIEKLSLSKMPFRG

SEQ ID NO: 88533 - protein, 81 aa, Homo sapiens
MAAVVEVEVGGGAAGERELDEVDMSDLSPEEQWRVEHARMHAKHRGHEAMHAEMVLILIATLVVAQLLLVQWKQRHPRSYN

SEQ ID NO: 88534 - protein, 87 aa, Homo sapiens
MTMYLWLKLLAFGFAFLDTEVFVTGQSPTPSPTGHLQAEEQGSQSKSPNLKSREADSSAFSWWPKAREPLTNHWSKSKSPKAEELGV

SEQ ID NO: 88535 - protein, 9 aa, Homo sapiens
MSGGWELEL

SEQ ID NO: 88536 - protein, 150 aa, Homo sapiens
MANNYKKIVLLKGLEVINDYHFRIVKSLLSNDLKLNPKMKEEYDKIQIADLMEEKFPGDAGLGKLIEFFKEIPTLGDLAETLKREKLKVANKIESIPVKGIIPSKKTKQKEVYPATPACTPSNRLTAKGAEETLGPQKRKKPSEEETGTK

SEQ ID NO: 88537 - protein, 103 aa, Homo sapiens
MDAELEFAIQPNTTGKQLFDQVVKTIGLREVWFFGLQYQDTKGFSTWLKLNKKVTAQDVRKESPLLFKFRAKFYPEDVSEELIQDITQRLFFLQVKEGILNDD

SEQ ID NO: 88538 - protein, 203 aa, Homo sapiens
MGDEKDSWKVKTLDEILQEKKRRKEQEEKAEIKRLKNSDDRDSKRDSLEEGELRDHRMEITIRNSPYRREDSMEDRGEEDDSLAIKPPQQMSRKEKAHHRKDEKRKEKRRHRSHSAEGGKHARVKEKEREHERRKRHREEQDKARREWERQKRREMAREHSRRESKRRENGRKGPAVRLTGHQRQREEDQLGRVLVSGIRLRF

SEQ ID NO: 88539 - protein, 162 aa, Homo sapiens
TFHHEGFFWRCWFNGIVEENDSNIWKFWYTNQPPSKNCTHAYLSPYPFMRGEHNSTSYDSAVIYRGFWAVLMLLGVVAVVIASFLIICAAPFASHFLYKAGGGSYIAADGISSLCYSSLSKSLLSQPLRETSSAINDISLLQALMPLLGWTSHWTCITVGLY

SEQ ID NO: 88540 - protein, 207 aa, Homo sapiens
MYAYGFVGRCAPFPAEEGRTFDLSEELGRSVTREGTGTTRLNSEPVPLLCLPLLNCSRKNCIENLMDEDEKDRAKRASRNKSEKKRRDQFNVLIKELSSMLPGNTRKMDKTTVLEKVIGFLQKHNEVSAQTEICDIQQDWKPSFLSNEEFTQLMLEALDGFIIAVTTDGSIIYVSDSITPLLGHLPSDVMDQNLLNFLPEQEHSEVY

SEQ ID NO: 88541 - protein, 60 aa, Homo sapiens
MDVAIEFCLEEWQCLDIAQQNLYRNVMLENYRNLVFLGIAVSKPDLITCLEQEKEPWEPM

SEQ ID NO: 88542 - protein, 128 aa, Homo sapiens
MDSEAFQSARDFLDMNFQSLAMKHMDLKQMELDTAAAKVDELTKQLESLWSDSPAPPGPQAGPPSRPPRYSSSSIPEPFGSRGSPRKAATDGADTPFGRSESAPTLHPYSPLSPKGRPSSPRTPLYLQ

SEQ ID NO: 88543 - protein, 172 aa, Homo sapiens
  MOD_RES (1)..(1): Any amino acid
XVLQNLGKDQYPQQSLEQIGTRIAKVLEKASTAGLGMYPYQNQTSWVLSSMAALYWRVKGQGKKAIDCLRQALHYAPHQMKDVPLISLANILHNAKLWNDAVIVATMAVEIAPHFAVNHFTLGNVYVAMEEFEKALVWYESTLKLQPEFVPAKNRIQTIQCHLMLKKGRRSP

SEQ ID NO: 88544 - protein, 130 aa, Homo sapiens
  MOD_RES (1)..(1): Any amino acid
XTSVRISPGEEAAGQDVLAVRVLVTSEDSSSDTESDYGGSEGSHTEPCEEKPWRPGSPHLPHTSLGEALSRAVSPQCPEEPRAVHAALQRANSFQSPTPSKYQNWRREFWWSESLALWGWEAGAGQKISG

SEQ ID NO: 88545 - protein, 495 aa, Homo sapiens
MAGVGRSGGPWGRTRGGRSGRLGVSLGALSSLPLEELPRPLCCRRCRRHFGFALRGETIPVSVAGSASSQFAPLALHLSLLLSRISASRLTRWPPPDKREGSAVDPGKRRSLAATPSSSLPCTLIALGLRHEKEANELMEDLFETFQDEMGFSNMEDDGPEEEERVAEPQANFNTPQALRFEELLANLLNEQHQIAKELFEQLKMKKPSAKQQKEVEKVKPQCKEVHQTLILDPAQRKRLQQQMQQHVQLLTQIHLLATCNPNLNPEASSTRICLKELGTFAQSSIALHHQYNPKFQTLFQPCNLMGAMQLIEDFSTHVSIDCSPHKTVKKTANEFPCLPKQVAWILATSKVFMYPELLPVCSLKAKNPQDKILFTKAEDNLLALGLKHFEGTEFLNPLISKYLLTCKTARQLTVRIKNLNMNRAPDNIIKFYKKTKQLPVLGKCCEEIQPHQWKPPIEREEHRLPFWLKVQPSSSKSVGGRRSLKVLREYQGLP

SEQ ID NO: 88546 - protein, 75 aa, Homo sapiens
LLEQSEWQPTNVDGKGYLLNEPGVQPTSVYGDFSWDIGLSLQRVFTDLKNMDATWLDSLLTPVRLPSIQAIPCAP

SEQ ID NO: 88547 - protein, 660 aa, Homo sapiens
  MOD_RES (1)..(1): Any amino acid
XISIHPLCFALELAPLSSLNTVLSENARDSSFIPLGHMLTQKIAYQIASGLAYLHKKNIIFCDLKSDNILVWSLDVKEHINIKLSDYGISRQSFHEGALGVEGTPGYQAPEIRPRIVYDEKVDMFSYGMVLYELLSGQRPALGHHQLQIAKKLSKGIRPVLGQPEEVQFRRLQALMMECWDTKPEKRPLALSVVSQMKDPTFATFMYELCCGKQTAFFSSQGQEYTVVFWDGKEESRNYTVVNTEKGLMEVQRMCCPGMKVSCQLQVQRSLWTATEDQKIYIYTLKGMCPLNTPQQALDTPAVVTCFLAVPVIKKNSYLVLAGLADGLVAVFPVVRGTPKDSCSYLCSHTANRSKFSIADEDARQNPYPVKAMEVVNSGSEVWYSNGPGLLVIDCASLEICRRLEPYMAPSMVTSVVCSSEGRGEEVVWCLDDKANSLVMYHSTTYQLCARYFCGVPSPLRDMFPVRPLDTEPPAASHTANPKVPEGDSIADVSIMYSEELGTQILIHQESLTDYCSMSSYSSSPPRQAARSPSSLPSSPASSSSVPFSTDCEDSDMLHTPGAASDRSEHDLTPMDGETFSQHLQAVKILAVRDLIWVPRRGGDVIVIGLEKDSGAQRGRVIAVLKARELTPHGIMPVSSVKVCWAGWPVRDMVYMVAVM

SEQ ID NO: 88548 - protein, 1100 aa, Homo sapiens
  MOD_RES (1)..(1): Any amino acid
XPYKPQWCRSREAWALYLFSPQNRFRVSCQKVITHKMFDHVVLVFIFLNCVTIALERPDIDPGSTERVFLSVSNYIFTAIFVAEMMVKVVALGLLSGEHAYLQSSWNLLDGLLVLVSLVDIVVAMASAGGAKILGVLRVLRLLRTLRPLRVISRAPGLKLVVETLISSLRPIGNIVLICCAFFIIFGILGVQLFKGKFYYCEGPDTRNISTKAQCRAAHYRWVRRKYNFDNLGQALMSLFVLSSKDGWVNIMYDGLDAVGVDQQPVQNHNPWMLLYFISFLLIVSFFVLNMFVGVVVENFHKCRQHQEAEEARRREEKRLRRLERRRRSKALPVAVAVAEAQRRPYYADYSPTRRSIHSLCTSHYLDLFITFIICVNVITMSMEHYNQPKSLDEALKYCNYVFTIVFVFEAALKLVAFGFRRFFKDRWNQLDLAIVLLSLMGITLEEIEMSAALPINPTIIRIMRVLRIARVLKLLKMATGMRALLDTVVQALPQVGNLGLLFMLLFFIYAALGVELFGRLECSEDNPCEGLSRHATFSNFGMAFLTLFRVSTGDNWNGIMKDTLRECSREDKHCLSYLPALSPVYFVTFVLVAQFVLVNVVVAVLMKHLEESNKEAREDAELDAEIELEMAQGPGSARRVDADRPPLPQESPGARDAPNLVARKVSVSRMLSLPNDSYMFRPVVPASAPHPRPLQEVEMETYGAGTPLGSVASVHSPPAESCASLQIPLAVSSPARSGEPLHALSPRGTARSPSLSRLLCRQEAVHTDSLEGKIDSPRDTLDPAEPGEKTPVRPVTQGGSLQSPPRSPRPASVRTRKHTFGQRCVSSRPAAPGGEEAEASDPADEEVSHITSSACPWQPTAEPHGPEASPVAGGERDLRRLYSVDAQGFLDKPGRADEQWRPSAELGSGEPGEAKAWGPEAEPALGARRKKKMSPPCISVEPPAEDEGSARPSAAEGGSTTLRRRTPSCEATPHRDSLEPTEGSGAGGDPAAKGERWGQASCRAEHLTVPSFAFEPLDLGVPSGDPFLDGSHSVTPESRASSSGAIVPLEPPESEPPMPVGDPPEKRRGLYLTVPQCPLEKPGSPSATPAPGGGADDPV

SEQ ID NO: 88549 - protein, 181 aa, Homo sapiens
MAPRSRRRRHKKPPSSVAPIIMAPTTIVTPVPLTPSKPGPSIDTLGFFSLDDNVPGLSQLILQKLNMKSYEEYKLVVDGGTPVSGFGFRCPQEMFQRMEDTFRFCAHCRALPSGLSDSKVLRHCKRCRNVYYCGPECQKSDWPAHRRVCQELRLVAVDRLMEWLLVTEHLNFTPGTWHNSA

SEQ ID NO: 88550 - protein, 163 aa, Homo sapiens
MSGARTASTPTPPQTGGGLEPQANGETPQVAVIVRPDDRSQGAIIADRPGLPGPEHSPSESQPSSPSPTPSPSPVLEPGSEPNLAVLSIPGDTMTTIQMSVEESTPISRETGEPYRLSPEPTPLAEPILEVEVTLSKPVPESEFSSSPLQAPTPLASHTVEIH

SEQ ID NO: 88551 - protein, 61 aa, Homo sapiens
  MOD_RES (1)..(1): Any amino acid
XELRELRHASRLSKKVTIDFAGRKILEEENSLAEYHSSFQTSVKSLILHLFSSAKILRKWL

SEQ ID NO: 88552 - protein, 429 aa, Homo sapiens
MDAPARLLAPLLLLCAQQLRGTRAMNDIGDYVGSNLEISWLPNLDGLIAGYARNFRPGIGGPPVNVALALEVASIDHISEANMEYTMTVFLHQSWRDSRLSYNHTNETLGLDSRFVDKLWLPDTFIVNAKSAWFHDVTVENKLIRLQPDGVILYSIRITSTVACDMDLAKYPMDEQECMLDLESYGYSSEDIVYYWSESQEHIHGLDKLQLAQFTITSYRFTTELMNFKSAGQFPRLSLHFHLRRNRGVYIIQSYMPSVLLVAMSWVSFWISQAAVPARVSLAIKALDVYFWICYVFVFAALVEYAFAHFNADYRKKQKAKVKVSRPRAEMDVRNAIVLFSLSAAGVTQELAISRRQRRVPGNLMGSYRSVGVETGETKKEGAARSGGQGGIRARLRPIDADTIDIYARAVFPAAFAAVNVIYWAAYAM

SEQ ID NO: 88553 - protein, 1182 aa, Homo sapiens
MLVGQGAGPLGPAVVTAAVVLLLSGVGPAHGSEDIVVGCGGFVKSDVEINYSLIEIKLYTKHGTLKYQTDCAPNNGYFMIPLYDKGDFILKIEPPLGWSFEPTTVELHVDGVSDICTKGGDINFVFTGFSVNGKVLSKGQPLGPAGVQVSLRNTGTEAKIQSTVTQPGGKFAFFKVLPGDYEILATHPTWALKEASTTVRVTNSNANAASPLIVAGYNVSGSVRSDGEPMKGVKFLLFSSLVTKEDVLGCNVSPVPGFQPQDESLVYLCYTVSREDGSFSFYSLPSGGYTVIPFYRGERITFDVAPSRLDFTVEHDSLKIEPVFHVMGFSVTGRVLNGPEGDGVPEAVVTLNNQIKVKTKADGSFRLENITTGTYTIHAQKEHLYFETVTIKIAPNTPQLADIVATGFSVCGQISIIRFPDTVKQMNKYKVVLSSQDKDKSLVTVETDAHGSFCFKANPGTYKVQVMVPEAETRAGLTLKPQTFPLTVTDRPVMDVAFVQFLASVSGKVSCLDTCGDLLVTLQSLSRQGEKRSLQLSGKVNAMTFTFDNVLPGKYKISIMHEDWCWKNKSLEVEVLEDDVSAVEFRQTGYMLRCSLSHAITLEFYQDGNGRENVGIYNLSKGVNRFCLSKPGVYKVTPRSCHRFEQAFYTYDTSSPSILTLTAIRHHVLGTITTDKMMDVTVTIKSSIDSEPALVLGPLKSVQELRREQQLAEIEARRQEREKNGNEEGEERMTKPPVQEMVDELQGPFSYDFSYWARSGEKITVTPSSKELLFYPPSMEAVVSGESCPGKLIEIHGKAGLFLEGQIHPELEGVEIVISEKGASSPLITVFTDDKGAYSVGPLHSDLEYTVTSQKEGYVLTAVEGTIGDFKAYALAGVSFEIKAEDDQPLPGVLLSLSGGLFRSNLLTQDNGILTFSNLSPGQYYFKPMMKEFRFEPSSQMIEVQEGQNLKITITGYRTAYSCYGTVSSLNGEPEQGVAMEAVGQNDCSIYGEDTVTDEEGKFRLRGLLPGCVYHVQLKAEGNDHIERALPHHRVIEVGNNDIDDVNIIVFRQINQFDLSGNVITSSEYLPTLWVKLYKSENLDNPIQTVSLGQSLFFHFPPLLRDGERKLPEQDIAQGSYIALPLTLLVLLAGYNHDKLIPLLLQLTSRLQGVGALGQAASDNSGPEDAKRQAKKQKTRRT

SEQ ID NO: 88554 - protein, 1014 aa, Homo sapiens
MASTRCKLARYLEDLEDVDLKKFKMHLEDYPPQKGCIPLPRGQTEKADHVDLATLMIDFNGEEKAWAMAVWIFAAINRRDLYEKAKRDEPKWGSDNARVSNPTVICQEDSIEEEWMGLLEYLSRISICKMKKDYRKKYRKYVRSRFQCIEDRNARLGESVSLNKRYTRLRLIKEHRSQQEREQELLAIGKTKTCESPVSPIKMELLFDPDDEHSEPVHTVVFQGAAGIGKTILARKMMLDWASGTLYQDRFDYLFYIHCREVSLVTQRSLGDLIMSCCPDPNPPIHKIVRKPSRILFLMDGFDELQGAFDEHIGPLCTDWQKAERGDILLSSLIRKKLLPEASLLITTRPVALEKLQHLLDHPRHVEILGFSEAKRKEYFFKYFSDEAQARAAFSLIQENEVLFTMCFIPLVCWIVCTGLKQQMESGKSLAQTSKTTTAVYVFFLSSLLQPRGGSQEHGLCAHLWGLCSLAADGIWNQKILFEESDLRNHGLQKADVSAFLRMNLFQKEVDCEKFYSFIHMTFQEFFAAMYYLLEEEKEGRTNVPGSRLKLPSRDVTVLLENYGKFEKGYLIFVVRFLFGLVNQERTSYLEKKLSCKISQQIRLELLKWIEVKAKAKKLQIQPSQLELFYCLYEMQEEDFVQRAMDYFPKIEINLSTRMDHMVSSFCIENCHRVESLSLGFLHNMPKEEEEEEKEGRHLDMVQCVLPSSSHAACSHGLVNSHLTSSFCRGLFSVLSTSQSLTELDLSDNSLGDPGMRVLCETLQHPGCNIRRLCNQKLVELDLSDNALGDFGIRLLCVGLKHLLCNLKKLWLVSCCLTSACCQDLASVLSTSHSLTRLYVGENALGDSGVAILCEKAKNPQCNLQKLGLVNSGLTSVCCSALSSVLSTNQNLTHLYLRGNTLGDKGIKLLCEGLLHPDCKLQVLELDNCNLTSHCCWDLSTLLTSSQSLRKLSLGNNDLGDLGVMMFCEVLKQQSCLLQNLGLSEMYFNYETKSALETLQEEKPELTVVFEPSW

SEQ ID NO: 88555 - protein, 132 aa, Homo sapiens
QVPGGGPQGRRVLGGADGYHTAGHRGQGLVRSQARLRVQVPAVRSAPVVRARASGDLPARPGDHPAEERCQVEGGLPHILQLPARRPLHLVSARRRGHSLLGRLVRPEGHQQQHHHRAPAALTPPEPPSAEP

SEQ ID NO: 88556 - protein, 80 aa, Homo sapiens
  MOD_RES (1)..(1): Any amino acid
XIHRLKQSLPKRKPGFMAKSYDPIAPIAEEISEEACLLCFDEFQVTDIADAMILKQLFENLFKNGVVVVATSNRPPEGIL

SEQ ID NO: 88557 - protein, 384 aa, Homo sapiens
MRYRLAWLLHPALPSTFRSVLGARLPPPERLCGFQKKTYSKMNNPAIKRIGNHITKSPEDKREYRGLELANGIKVLLISDPTTDKSSAALDVHIGSLSDPPNIAGLSHFCEHMLFLGTKKYPKENEYSQFLSEHAGSSNAFTSGEHTNYYFDVSHEHLEGALDRFAQFFLCPLFDESCKDREVNAVDSEHEKNVMNDAWRLFQLEKATGNPKHPFSKFGTGNKYTLETRPNQEGIDVRQELLKFHSAYYSSNLMAVCVLGRESLDDLTNLVVKLFSEVENKNVPLPEFPEHPFQEEHLKQLYKIVPIKDIRNLYVTFPIPDLQKYYKSNPGHYLGHLIGHEGPGSLLSELKSKGWVNTLVGGQKEGARGFMFFIINVDLTEEGL

SEQ ID NO: 88558 - protein, 99 aa, Homo sapiens
MALPRPSEAVPQDKVCYPPESSPQNLAAYYTPFPSYGHYRNSLATVEEDFQPFRQLEAAASAAPAMPPFPFRMAPPLLSPGLGLQREPLYDLPWYSKLP

SEQ ID NO: 88559 - protein, 410 aa, Homo sapiens
MTELQQDVEDTKPAKVLGKRESKLGSAHSEAENGVEEKKKACRSPTAQSPTPSVEADSPDQKKIISLCPYLLSKSMLHSGPRYKANMHFHKLFLSVPTEEPLKQSFTCALQKEILYQGKLFVSENWICFHSKVFGKDTKISIPAFSVTLIKKTKTALLVPNALIIATVTDRYIFVSLLSRDSTYKLLKSVCGHLENTSVGNSPNPSSAENSFRADRPSSLPLDFNDEFSDLDGVVQQRRQDMEGYSSSGSQTPESENSRVDFHATESQTVLNVSKGEAKPTRADAHVNRVPEGKAKSLPVQGLSETVGILHKVKSQKCPMLHHILIFYAIVVCALIISTFYMRYRINTLEEQLGLLTSIVDTHNTEQAAPSGLRSQVQFNVEVLCQELTANIVKLEKIQNNLQKLLENGD

SEQ ID NO: 88560 - protein, 48 aa, Homo sapiens
  MOD_RES (1)..(1): Any amino acid
XHSEVKGSAQQPFPCLPPALFIPFSLQTISAHSIMVEAELLQEGHPRV

SEQ ID NO: 88561 - protein, 55 aa, Homo sapiens
MDVSGQETDWRSTAFRQKLVSQIEDAMRKAGVAHSKSSKDMESHVFLKAKTRVRP

SEQ ID NO: 88562 - protein, 115 aa, Homo sapiens
MAFMTRKLWDLEQQVKAQTDEILSKDQKIAALEDLVQTLRPHPAEATLQRQEELETMCVQLQRQVREMERFLSDYGLQWVGEPMDQEDSESKTVSEHGERDWMTAKKFWKPGRAG

SEQ ID NO: 88563 - protein, 293 aa, Homo sapiens
MQSSLKLVDCIIEVHDARIPLSGRNPLFQETLGLKPHLLVLNKMDLADLTEQQKIMQHLEGEGLKNVIFTNCVKDENVKQIIPMVTELIGRSHRYHRKENLEYCIMVIGVPNVGKSSLINSLRRQHLRKGKATRVGGEPGITRAVMSKIQVSERPLMFLLDTPGVLAPRIESVETGLKLALCGTVLDHLVGEETMADYLLYTLNKHQRFGYVQHYGLGSACDNVERVLKSVAVKLGKTQKVKVLTGTGNVNIIQPNYPAAARDFLQTFRRGLLGSVMLDLDVLRGHPPAETLP

SEQ ID NO: 88564 - protein, 54 aa, Homo sapiens
VMRDPNTKRSRGFGFVTYATVEEVDAAMNARPHKVVEATMILGITTISLQILDP

SEQ ID NO: 88565 - protein, 70 aa, Homo sapiens
MADPRDKALQDYRKKLLEHKEIDGRLKELREQLKELTKQYEKSENDLKALQSVGQIVGEVLKQLTEEKCE

SEQ ID NO: 88566 - protein, 244 aa, Homo sapiens
GRGSPDTGSITVSGRESESFRGVGPSRVQRTGKGLPWLRPGHFDRISLFFPDPVSYPLELPRGDEICWAGSGGCCGRSRPREASLTELWTLGTAVSGLGRRYTLTVPGDSPCARVGHSCSYLPPVGNAKRGKVFIVGGANPNRSFSDVHTMDLGKHQWDLDTCKGLLPRYEHASFIPSCTPDRIWVFGGANQSGNRNCLQVLNPETRTWTTPEVTSPPPSPRTFHTSSAAIGNQLYVFGGGERG

SEQ ID NO: 88567 - protein, 100 aa, Homo sapiens
MSPAFRAMDVEPRAKGVLLEPFVHQVGGHSCVLRFNETTLCKPLVPREHQFYETLPAEMRKFTPQYKGVVSVRFEEDEDRNLCLIAYPLKGDHGIVDIVD

SEQ ID NO: 88568 - protein, 448 aa, Homo sapiens
MEALLEGIQNRGHGGGFLTSCEAELQELMKQIDIMVAHKKSEWEGRTHALETCLKIREQELKSLRSQLDVTHKEEFRQKSLDWEKQRLIYQQQVSSLEAQRKALAEQSEIIQAQLVNRKQKLESVELSSQSEIQHLSSKLERANDTICANELEIERLTMRVNDLVGTSMTVLQEQQQKEEKLRESEKLLEALQEEKRELKAALQSQENLIHEARIQKEKLQEKVKATNTQHAVEAIRPREESLAEKKYTSQGQGDLDSVLSQLNFTHTSEDLLQAEVTCLEGSLESVSATCKQLSQELMEKYEELKRMEAHNNEYKAEIKKLKEQILQGEQSYSSALEGMKMEISHLTQELHQRDITIASTKGSSSDMEKRLRAEMQKAEDKAVEHKEILDQLESLKLENRHLSEMVMKLELGLHERWGFTMLSSLVLNFGIQAIRQPQRPKVLELQV

SEQ ID NO: 88569 - protein, 191 aa, Homo sapiens
MAEAGTGEPSPSVEGEHGTEYDTLPSDTVSLSDSDSDLSLPGGAEVEALSPMGLPGEEDSGPDEPPSPPSGLLPATVQPFHLRGMSSTFSQRSRDIFDCLEGAARRAPSSVAHTSMSDNGGFKRPLAPSGRSPVEGLGRAHRSPASPRVPPVPDYVAHPERWTKYSLEDVTEVSEQSNQATALAFLGSQSL

SEQ ID NO: 88570 - protein, 200 aa, Homo sapiens
MAEEVISDFDMTLSRFAYNGKRCPSSYNILDNSKIISEECRKELTALLHHYYPIEIDPHRTVKEKLPHMVEWWTKAHNLLCQQKIQKFQIAQVVRESNAMLREGYKTFFNTLYHNNIPLFIFSAGIGDILEEIIRQMKVFHPNIHIVSNYMDFNEDVEERRERYMDSYDIVLEKDETLDVVNGLLQHILCQGVQLEMQGP

SEQ ID NO: 88571 - protein, 835 aa, Homo sapiens
MGKTANSPGSGARPDPVRSFNRWKKKHSHRQNKKKQLRKQLKKPEWQVERESISRLMQNYEKINVNEITRFSDFPLSKKTLKGLQEAQYRLVTEIQKQTIGLALQGKDVLGAAKTGSGKTLAFLVPVLEALYRLQWTSTDGLGVLIISPTRELAYQTFEVLRKVGKNHDFSAGLIIGGKDLKHEAERINNINILVCTPGRLLQHMDETVSFHATDLQMLVLDEADRILDMGFADTMNAVIENLPKKRQTLLFSATQTKSVKDLARLSLKNPEYVWVHEKAKYSTPATLEQNYIVCELQQKISVLYSFLRSHLKKKSIVFFSSCKEVQYLYRVFCRLRPGVSILALHGRQQQMRRMEVYNEFVRKRAAVLFATDIAARGLDFPAVNWVLQFDCPEDANTYIHRAGRTARYKEDGEALLILLPSEKAMVQQLLQKKVPVKEIKINPEKLIDVQKKLESILAQDQDLKERAQRCFVSYVRSVYLMKDKEVFDVSKLPIPEYALSLGLAVAPRVRFLQKMQKQPTKELVRSQADKVIEPRAPSLTNDEVEEFRAYFNEKMSILQKGGKRLEGTEHRQDNDTGNEEQEEEEDDEEEMEEKLAKAKGSQAPSLPNTSEAQKIKEVPTQFLDRDEEEEDADFLKVKRHNVFGLDLKDEKTLQKKEPSKSSIKKKMTKVAEAKKVMKRNFKVNKKITFTDEGELVQQWPQMQKSAIKDAEEDDDTGGINLHKAKERLQEEDKFDKEEYRKKIKAKHREKRLKEREARREANKRQAKAKDEEEAFLDWSDDDDDDDDGFDPSTLPDPDKYRSSEDSDSEDMENKIRYVFTMGMKYILSTLTSVF

SEQ ID NO: 88572 - protein, 1063 aa, Homo sapiens
MPHLPLASFRPPFWGLRHSRGLPRFHSVSTQSEPHGSPISRRNREAKQKRLREKQATLEAEIAGESKSPAESIKAWRPKELVLYEIPTKPGEKKDVSGPLPPAYSPRYVEAAWYPWWVREGFFKPEYQARLPQATGETFSMCIPPPNVTGSLHIGHALTVAIQDALVRWHRMRGDQVLWVPGSDHAGIATQAVVEKQLWKERGVRRHELSREAFLREVWQWKEAKGGEICEQLRALGASLDWDRECFTMDVGSSVAVTEAFVRLYKAGLLYRNHQLVNWSCALRSAISDIEVENRPLPGHTQLRLPGCPTPVSFGLLFSVAFPVDGEPDAEVVVGTTRPETLPGDVAVAVHPDDSRYTHLHGRQLRHPLMGQPLPLITDYAVQPHVGTGAVKVTPAHSPADAEMGARHGLSPLNVIAEDGTMTSLCGDWLQGLHRFVAREKIMSVLSEWGLFRGLQNHPMVLPICSRSGDVIEYLLKNQWFVRCQEMGARAAKAVESGALELSPSFHQKNWQHWFSHIGDWCVSRQLWWGHQIPAYLVVEDHAQGEEDCWVVGRSEAEAREVAAELTGRPGAELTLERDPDVLDTWFSSALFPFSALGWPQETPDLARFYPLSLLETGSDLLLFWVGRMVMLGTQLTGQLPFSKVLLHPMVRDRQGRKMSKSLGNVLDPRDIISGVEMQVLQEKLRSGNLDPAELAIVAAAQKKDFPHGIPECGTDALRFTLCSHGVQAGDLHLSVSEVQSCRHFCNKIWNALRFILNALGEKFVPQPAEELSPSSPMDAWILSRLALAAQECERGFLTRELSLVTHALHHFWLHNLCDVYLEAVKPVLWHSPRPLGPPQVLFSCADLGLRLLAPLMPFLAEELWQRLPPRPGCPPAPSISVAPYPSACSLEHWRQPELERRFSRVQEVVQVLRALRATYQLTKARPRVLLQSSEPGDQGLFEAFLEPLGTLGYCGAVGLLPPGAAAPSGWAQAPLSDTAQVYMELQGLVDPQIQLPLLAARRYKLQKQLDSLTARTPSEGEAGTQRQQKLSSLQLELSKLDKAASHLQQLMDEPPAPGSPEL

SEQ ID NO: 88573 - protein, 164 aa, Homo sapiens
MVADTCNPSNSGGQACRALMDEIEHDITKARQKKTKVGSFRINPDGTQERRKIPLAQSEAFLTDLLEKVCERMNDYKLEEDPVTKERTFKRFAPRKGDKIYQEFKKLYFYSDAYRPLKFACETIIEEYEDEISSLIAQETHYLADKLCSEKSDLCETSANHTEL

SEQ ID NO: 88574 - protein, 240 aa, Homo sapiens
MELNEIMSSECHSSVCAKIVQLLGQNEVDYRQKQVVILSQDSFYRVLTSEQKAKALKGQFNFDHPDAFDNELILKTLKEITEGKTVQIPVYDFVSHSRKEETVTVYPADVVLFEGILAFYSQEVRDLFQMKLFVDTDADTRLSRRVLRDISERGRDLEQILSQYITFVKPAFEEFCLPTKKYADVIIPRGADNLVAINLIVQHIQDILNGGPSKRQTNGCLNGYTPSRKRQASESSSRPH

SEQ ID NO: 88575 - protein, 67 aa, Homo sapiens
  MOD_RES (1)..(1): Any amino acid
XGFGGSRGGGGYGGSGDGYNGFGNDELYSCRWLWRRRPWLLWRKQRLWKWWTGLWKPGQWLWREWQL

SEQ ID NO: 88576 - protein, 270 aa, Homo sapiens
MADLDKLNIDSIIQRLLEVRGSKPGKNVQLQENEIRGLCLKSREIFLSQPILLELEAPLKICGDIHGQYYDLLRLFEYGGFPPESNYLFLGDYVDRGKQSLETICLLLAYKIKYPENFFLLRGNHECASINRIYGFYDECKRRYNIKLWKTFTDCFNCLPIAAIVDEKIFCCHGGLSPDLQSMEQIRRIMRPTDVPDQGLLCDLLWSDPDKDVLGWGENDRGVSFTFGAEVVAKFLHKHDLDLICRAHQVLILNFTCTLKSMCVSTDSPC

SEQ ID NO: 88577 - protein, 869 aa, Homo sapiens
VESAIAEGGASRFSASSGGGGSRGAPQHYPKTAGNSEFLGKTPGQNAQKWIPARSTRRDDNSAANNSANEKERHDAIFRKVRGILNKLTPEKFDKLCLELLNVGVESKLILKGVILLIVDKALEEPKYSSLYAQLCLRLAEDAPNFDGPAAEGQPGQKQSTTFRRLLISKLQDEFENRTRNVDVYDKRENPLLPEEEEQRAIAKIKMLGNIKFIGELGKLDLIHESILHKCIKTLLEKKKRVQLKDMGEDLECLCQIMRTVGPRLDHERAKSLMDQYFARMCSLMLSKELPARIRFLLQDTVELREHHWVPRKAFLDNGPKTINQIRQDAVKDLGVFIPAPMAQGMRSDFFLEGPFMPPRMKMDRDPLGGLADMFGQMPGSGIGTGPGVIQDRFSPTMGRHRSNQLFNGHGGHIMPPTQSQFGEMGGKFMKSQISLRPAQSFLMNKNQVPKLQPQITMIPPSAQPPRTQTPPLGQTPQLGLKTNPPLIQEKPAKTSKKPPPSKEELLKLTETVVTEYLNSGNANEAVNGVREMRAPKHFLPEMLSKVIILSLDRSDEDKEKASSLISLLKQEGIATSDNFMQAFLNVLDQCPKLEVDIPLVKSYLAQFAARAIISELVSISELAQPLESGTHFPLFLLCLQQLAKLQDREWLTELFQQSKVNMQKMLPEIDQNKDRMLEILEGKGLSFLFPLLKLEKELLKQIKLDPSPQTIYKWIKDNISPKLHVDKGFVNILMTSFLQYISSEVNPPSDETDSSSAPSKEQLEQEKQLLLSFKPVMQKFLHDHVDLQVSALYALQVHCYNSNFPKGMLLRFFVHFYDMEIIEEEAFLAWKEDITQEFPGKGKALFQVNQWLTWLETAEEEESEEEAD

SEQ ID NO: 88578 - protein, 1440 aa, Homo sapiens
MPNEGIPHSSQTQEQDCLQSQPVSNNEEMAIKQESGGDGEVEEYLSFRSVGDGLSTSAVGCASAAPRRGPALLHIDRHQIQAVEPSAQALELQGLGVDVYDQDVLEQGVLQQVDNAIHEASRASQLVDVEKEYRSVLDDLTSCTTSLRQINKIIEQLSPQAATSRDINRKLDSVKRQKYNKEQQLKKITAKQKHLQAILGGAEVKIELDHASLEEDAEPGPSSLGSMLMPVQETAWEELIRTGQMTPFGTQIPQKQEKKPRKIMLNEASGFEKYLADQAKLSFERKKQGCNKRAARKAPAPVTPPAPVQNKNKPNKKARVLSKKEERLKKHIKKLQKRALQFQGKVGLPKARRPWESDMRPEAEGDSEGEESEYFPTEEEEEEEDDEVEGAEADLSGDGTDYELKPLPKGGKRQKKVPVQEIDDDFFPSSGEEAEAASVGEGGGGGRKVGRYRDDGDEDYYKQRLRRWNKLRLQDKEKRLKLEDDSEESDAEFDEGFKVPGFLFKKLFKFEGLGPTVIVCPTTVMHQWVKEFHTWWPPFRVAILHETGSYTHKKEKLIRDVAHCHGILITSYSYIRLMQDDISRYDWHYVILDEGHKIRNPNAAVTLACKQFRTPHRIILSGSPMQNNLRELWSLFDFIFPGKLGTLPVFMEQFSVPITMGGYSNASPVQVKTAYKCACVLRDTINPYLLRRMKSDVKMSLSLPDKNEQVLFCRLTDEQHKVYQNFVDSKEVYRILNGEMQIFSGLIALRKICNHPDLFSGGPKNLKGLPDDELEEDQFGYWKRSGKMIVVESLLKIWHKQGQRVLLFSQSRQMLDILEVFLRAQKYTYLKMDGTTTIASRQPLITRYNEDTSIFVFLLTTRVGGLGVNLTGANRVVIYDPDWNPSTDTQARERAWRIGQKKQVTVYRLLTAGTIEEKIYHRQIFKQFLTNRVLKDPKQRRFFKSNDLYELFTLTSPDASQSTETSAIFAGTGSDVQTPKCHLKRRIQPAFGADHDVPKRKKFPASNISVNDATSSEEKSEAKGAEVNAVTSNRSDPLKDDPHMSSNVTSNDRLGEETNAVSGPEELSVISGNGECSNSSGTGKTSMPSGDESIDEKLGLSYKRERPSQAQTEAFWENKQMENNFYKHKSKTKHHSVAEEETLEKHLRPKQKPKNSKHCRDAKFEGTRIPHLVKKRRYQKQDSENKSEAKEQSNDDYVLEKLFKKSVGVHSVMKHDAIMDGASPDYVLVEAEANRVAQDALKALRLSRQRCLGAVSGVPTWTGHRGISGAPAGKKSRFGKKRNSNFSVQHPSSTSPTEKCQDGIMKKEGKDNVPEHFSGRAEDADSSSGPLASSSLLAKMRARNHLILPERLESESGHLQEASALLPTTEHDDLLVEMRNFIAFQAHTDGQASTREILQEFESKLSASQSCVFRELLRNLCTFHRTSGGEGIWKLKPEYC

SEQ ID NO: 88579 - protein, 117 aa, Homo sapiens
  MOD_RES (1)..(1): Any amino acid
XLRKRLTPLQYHVTQEKGTESAFEGEYTHHKDPGIYKCVVCGTPLFKSETKFDSGSGWPSFHDVINSEAITFTDDFSYGMHRVETSCSQQEGPHQMLPLNLGFPGLQNCEPINFYSF

SEQ ID NO: 88580 - protein, 90 aa, Homo sapiens
TVFILYEHLKRHKLGMLTIGEDLQGVLMTFARHLFIIHQEISAPNMQGETNFKTTIADIETILRVTKENKMRFEEEQQSKDDKNLSKPKK

SEQ ID NO: 88581 - protein, 211 aa, Homo sapiens
MAEWLLSASWQRRAKAMTAAAGSAGRAAVPLLLCALLAPGGAYVLDDSDGLGREFDGIGAVSGGGATSRLLVNYPEPYRSQILDYLFKPNFGASLHILKVEIGGDGQTTDGTEPSHMHYALDENYFRGYEWWLMKEAKKRNPNITLIGLPWSFPGWLGKGFDWPYVNLQLTAYYVVTWIVGAKRYHDLDIDYIGIWNERSYNANYIKVFGE

SEQ ID NO: 88582 - protein, 289 aa, Homo sapiens
MTRTYENFQYLENKVKVQGFKNGPLPLQSLLQRLCSGPCHLLLSLGLGLLLLVIICVVGFQNSKFQRDLVTLRTDFSNFTSNTVAEIQALTSQGSSLEETIASLKAEVEGFKQERQAVHSEMLLRVQQLVQDLKKLTCQVATLNNNASTEGTCCPVNWVEHQDSCYWFSHSGMSWAEAEKYCQLKNAHLVVINSREEQNFVQKYLGSAYTWMGLSDPEGAWKWVDGTDYATGFQNWKPGQPDDWQGHGLGGGEDCAHFHPDGRWNDDVCQRPYHWVCEAGLGQTSQESH

SEQ ID NO: 88583 - protein, 106 aa, Homo sapiens
MSCAGAAAAPRLWRLRPGARRSLSAYGRRTSVRFRSSGMTLDNISRAAVDRIIRVDHAGEYGANRIYAGQMAVLGRTSVGPVIQGRGPPCSGRKVPWPAPWRWKRA

SEQ ID NO: 88584 - protein, 152 aa, Homo sapiens
MQEVSRLLSEGADVNAKHRLGWTALMVAAINRNNSVVQVLLAAGADPNLGDDFSSVYKTAKEQGIHSLEVLITREDDFNNRLNNRASFKGCTALHYAVLADDYRTVKELLDGGANPLQRNEMGHTPLDYAREGEVMKLLRTSEAKYQEKQRK

SEQ ID NO: 88585 - protein, 73 aa, Homo sapiens
MHGRLKVKTSEEQAEAKRLEREQKLKLYQSATQAVFQKRQAGELDESVLELTSQILGANPDFATLWNCRREVS

SEQ ID NO: 88586 - protein, 174 aa, Homo sapiens
MADMQNLVERLERAVGRLEAVSHTSDMHRGYADSPSKAGAAPYVQAFDSLLAGPVAEYLKISKEIGGDVQKHAEMVHTGLKLERALLVTASQCQQPAENKLSDLLAPISEQIKEVITFREKNRGSKLFNHLSAVSESIQALGWVAMAPKPGPYVKEMNDAAMFYTNRVLKEYKD

SEQ ID NO: 88587 - protein, 85 aa, Homo sapiens
VVGGFLYQRLVVGAKGMEQFPHLAFWQDLGNLVAACGFDLFFNLLERERKQKWDIEGSAVLCAGCGMLLHLSLLLAQGSVFLPTF

SEQ ID NO: 88588 - protein, 38 aa, Homo sapiens
  MOD_RES (1)..(1): Any amino acid
XDYVMLRSAILGVPVPEGLDKGDSPAPTAQGTAATPAP

SEQ ID NO: 88589 - protein, 58 aa, Homo sapiens
MWTLGRRAVAGLLASPSPAQAQTLTRVPRPAELAPLCGRRGLRTDIDATCTPRRALSR

SEQ ID NO: 88590 - protein, 719 aa, Homo sapiens
MGKKPSDAKTFWMELEDDGKVDFIFEQVQNVLQSLKQKIKDGSATNKEYIQAMILVNEATIINSSTSIKGASQKEVNAQSSDPMPVTQKEQENKSNAFPSTSCENSFPEDCTFLTTENKEILSLEDKVVDFREKDSSSNLSYQSHDCSGACLMKMPLNLKGENPLQLPIKCHFQRRHAKTNSHSSALHVSYKTPCGRSLRNVEEVFRYLLETECNFLFTDNFSFNTYVQLARNYPKQKEVVSDVDISNGVESVPISFCNEIDSRKLPQFKYRKTVWPRAYNLTNFSSMFTDSCDCSEGCIDITKCACLQLTARNAKTSPLSSDKITTGYKYKRLQRQIPTGIYECSLLCKCNRQLCQNRVVQHGPQVRLQVFKTEQKGWGVRCLDDIDRGTFVCIYSGRLLSRANTEKSYGIDENGRDENTMKNIFSKKRKLEVACSDCEVEVLPLGLETHPRTAKTEKCPPKFSNNPKELTVETKYDNISRIQYHSVIRDPESKTAIFQHNGKKMEFVSSESVTPEDNDGFKPPREHLNSKTKGAQKDSSSNHVDEFEDNLLIESDVIDITKYREETPPRSRCNQATTLDNQNIKKAIEVQIQKPQEGRSTACQRQQVFCDEELLSETKNTSSDSLTKFNKGNVFLLDATKEGNVGRFLNHSCCPNLLVQNVFVETHNRNFPLVAFFTNRYVKARTELTWDYGYEAGTVPEKEIFCQCGVNKCRKKIL

SEQ ID NO: 88591 - protein, 294 aa, Homo sapiens
MARRGPGWRPLLLLVLLAGAAQGGLYFRRGQTCYRPLRGDGLAPLGRSTYPRPHEYLSPADLPKSWDWRNVDGVNYASITRNQHIPQYCGSCWAHASTSAMADRINIKRKGAWPSTLLSVQNVIDCGNAGSCEGGNDLSVWDYAHQHGIPDETCNNYQAKDQECDKFNQCGTCNEFKECHAIRNYTLWRVGDYGSLSGREKMMAEIYANGPISCGIMATERLANYTGGIYAEYQDTTYINHVVSVAGWGISDGTEYWIVRNSWGEPWVTNGGSSSWRRHQSRVNMFCEMNSLLA

SEQ ID NO: 88592 - protein, 162 aa, Homo sapiens
MTETEIVTSLCPMYGSRFGYALSNGTVGVYDKTSRYWRIKSKNHAMSIHAFDLNSDGVNELITGWSNGKVDARSDRTGEVIFKDNFSSAIAGVVEGDYRMDGHIQLICCSVDGEIRGYLPGTAEMRGNLMDTSAEQDLIRELSQKKQNLLLELRNYEENAKQ

SEQ ID NO: 88593 - protein, 235 aa, Homo sapiens
  MOD_RES (1)..(1): Any amino acid
XLVEDTFTIDEVSEVLNGLQAVVHSEVESELINTAYTNVLLLRQLFAQAEKWYLKLQTDISELENRELLEQVAEFEKAEITSSNKKPILDVTKPKLAPLNEGGTAELLNKATNALDEKSKLEKALQDLQLDQGNQKDFIKAQDLSNLENTVAALKSEFQKTLNDKTENQKSLEENLATAKHDLLRVQEQLHMAEKELEKKFQQTAAYRNMKEILTKKNDQIKDLRKRLAQYEPED

SEQ ID NO: 88594 - protein, 92 aa, Homo sapiens
MATPYVPVPMPIGNSASSFTTNRNQRSSSFGSVSTSSNSSKGQLEDSNMGNFKQTSVPDQMDNTSSVCSSPLIRTKFTGTASSIEYSTRPRD

SEQ ID NO: 88595 - protein, 61 aa, Homo sapiens
MQLHHSKHHAAYVNNLNVTEEKYQEALAKGELLEAIKRDFGSFDKFKEKLTAASVGVQGSG

SEQ ID NO: 88596 - protein, 948 aa, Homo sapiens
MLMLILEKLGESRILRVKVVSGIDLAKKDIFGASDPYVKLSLYVADENRELALVQTKTIKKTLNPKWNEEFYFRVNPSNHRLLFEVFDENRLTRDDFLGQVDVPLSHLPTEDPTMERPYTFKDFLLRPRSHKSRVKGFLRLKMAYMPKNGGQDEENSDQRDDMEHGWEVVDSNDSASQHQEELPPPPLPPGWEEKVDNLGRTYYVNHNNRTTQWHRPSLMDVSSESDNNIRQINQEAAHRRFRSRRHISEDLEPEPSEGGDVPEPWETISEEVNIAGDSLGLALPPPPASPGSRTSPQELSEELSRRLQITPDSNGEQFSSLIQREPSSRLRSCSVTDAVAEQGHLPPPSVAYVHTTPGLPSGWEERKDAKGRTYYVNHNNRTTTWTRPIMQLAEDGASGSATNSNNHLIEPQIRRPRSLSSPTVTLSAPLEGAKDSPVRRAVKDTLSNPQSPQPSPYNSPKPQHKVTQSFLPPGWEMRIAPNGRPFFIDHNTKTTTWEDPRLKFPVHMRSKTSLNPNDLGPLPPGWEERIHLDGRTFYIDHNSKITQWEDPRLQNPAITGPAVPYSREFKQKYDYFRKKLKKPADIPNRFEMKLHRNNIFEESYRRIMSVKRPDVLKARLWIEFESEKGLDYGGVAREWFFLLSKEMFNPYYGLFEYSATDNYTLQINPNSGLCNEDHLSYFTFIGRVAGLAVFHGKLLDGFFIRPFYKMMLGKQITLNDMESVDSEYYNSLKWILENDPTELDLMFCIDEENFGQTYQVDLKPNGSEIMVTNENKREYIDLVIQWRFVNRVQKQMNAFLEGFTELLPIDLIKIFDENELELLMCGLGDVDVNDWRQHSIYKNGYCPNHPVIQWFWKAVLLMDAEKRIRLLQFVTGTSRVPMNGFAELYGSNGPQLFTIEQWGSPEKLPRAHTCFNRLDLPPYETFEDLREKLLMAVENAQGFEGVD

SEQ ID NO: 88597 - protein, 253 aa, Homo sapiens
MEDAPQRLRWQAHLEFTHNHDVGDLTWDKIAVSLPRSEKLRSLVLAGIPHGMRPQLWMRLSGALQKKRNSELSYREIVKNSSNDETIAAKQIEKDLLRTMPSNACFASMGSIGVPRLRRVLRALAWLYPEIGYCQGTGMVAACLLLFLEEEDAFWMMSAIIEDLLPASYFSTTLLGVQTDQRVLRHLIVQYLPRLDKLLQEHDIELSLITLHWFLTAFASVVDIKLLLRIWDLFFYEGSRVLFQLTLGMLHLK

SEQ ID NO: 88598 - protein, 248 aa, Homo sapiens
MIISTPQRLTSSGSVLIGSPYTPAPAMVTQTHIAEATGWVPGDRKRARKFIDSDFSESKRSKKGDKNGKGLRHFSMKVCEKVQRKGTTSYNEVADELVSEFTNSNNHLAADSQAYDQKNIRRRVYDALNVLMAMNIISKEKKEIKWIGLPTNSAQECQNLEIEKQRRIERIKQKRAQLQELLLQQIAFKNLVQRNRQNEQQNQGPPALNSTIQLPFIIINTSRKTVIDCSISSDKFEYLFNFDNTFEI

SEQ ID NO: 88599 - protein, 115 aa, Homo sapiens
AASAPGPAPPVSAPAALPSSTAAENKIPDAVTGYYLNRAGFEASDPRIIRLISLAAQKFISDIANDALQHCKMKGTASGSSRSKSKDRKYTLTMEDLTPALSEYGINVKKPHYFT

SEQ ID NO: 88600 - protein, 300 aa, Homo sapiens
MSCVHYKFSSKLNYDTVTFDGLHISLCDLKKQIMGREKLKAADCDLQITNAQTKEEYTDDNALIPKNSSVIVRRIPIGGVKSTSKTYVISRTEPAMATTKAIDDSSASISLAQLTKTANLAEANASEEDKIKAMMSQSGHEYDPINYMKKPLGPPPPSYTCFRCGKPGHYIKNCPTNGDKNFESGPRIKKSTGIPRSFMMEVKDPNMKGAMLTNTGKYAIPTIDAEAYAIGKKEKPPFLPEEPSSSSEEDDPIPDELLCLICKDIMTDAVVIPCCGNSYCDECIRTALLESDEHTCPTCH

SEQ ID NO: 88601 - protein, 100 aa, Homo sapiens
MARLLQASCLLSLLLAGFVSQSRGQEKSKNCMHYRKSLHHSVWSFWAFPATNLENRNQERTQRSFLPSSMSDQVEALSLISSSLRKGMSMERKSRNSTLS

SEQ ID NO: 88602 - protein, 962 aa, Homo sapiens [sequence omitted]

SEQ ID NO: 88603 - protein, 852 aa, Homo sapiens
MAAATRRVFHLQPCENSPTMSQNGYFEDSSYYKCDTDDTFEAREEILGDEAFDTANSSIVSGESIRFFVNVNLEMQATNTENEATSGGCVLLHTSRKASIVLNETATSLDNVLRTMLRRFARDPDNNEPNCNLDLLMAMLFTDAGAPMRGKVHLLSDTIQGVTATVTGVRYQQSWLCIICTMKALQKRHVCISRLVRPQNWGENSCEVRFVILVLAPPKMKSTKTAMEVARTFATMFSDIAFRQKLLETRTEEEFKEALVHQRQLLTMVSHGPVAPRTKERSTVSLPAHRHPEPPKCKDFVPFGKGIREDIARRFPLYPLDFTDGIIGKNKAVGKYITTTLFLYFACLLPTIAFGSLNDENTDGAIDVQKTIAGQSIGGLLYALFSGQPLVILLTTAPLALYIQVIRVICDDYDLDFNSFYAWTGLWNSFFLALYAFFNLSLVMSLFKRSTEEIIALFISITFVLDAVKGTVKIFWKYYYGHYLDDYHTKRTSSLVSLSGLGASLNASLHTALNASFLASPTELPSATHSGQATAVLSLLIMLGTLWLGYTLYQFKKSPYLHPCVREILSDCALPIAVLAFSLISSHGFREIEMSKFRYNPSESPFAMAQIQSLSLRAVSGAMGLGFLLSMLFFIEQNLVAALVNAPENRLVKGTAYHWDLLLLAIINTGLSLFGLPWIHAAYPHSPLHVRALALVEERVENGHIYDTIVNVKETRLTSLGASVLVGLSLLLLPVPLQWIPKPVLYGLFLYIALTSLDGNQLVQRVALLLKEQTAYPPTHYIRRVPQRKIHYFTGLQVLQLLLLCAFGMSSLPYMKMIFPLIMIAMIPIRYILLPRIIEAKYLDVMDAEHRP

SEQ ID NO: 88604 - protein, 35 aa, Homo sapiens
MIEKMQGSRMDEQRCSFPPPLKTEEDYIPYPSVHE

SEQ ID NO: 88605 - protein, 211 aa, Homo sapiens
MTSRKKVLLKVIILGDSGVGKTSLMNQYVNKKFSNQYKATIGADFLTKEVMVDDRLVTMQIWDTAGQERFQSLGVAFYRGADCCVLVFDVTAPNTFKTLDSWRDEFLIQASPRDPENFPFVVLGNKIDLENRQVATKRAQAWCYSKNNIPYFETSAKEAINVEQAFQTIARNALKQRQGLALSVRLIRSGAIITRYNLQLLGSSSLPTIAS

SEQ ID NO: 88606 - protein, 111 aa, Homo sapiens
  MOD_RES (1)..(1): Any amino acid
XPASVCASSSESLPHCCWSAGSFLWQISSAASEHIPGPFWEGRSQGLVLGLAGYSSSANLGSWKRCPSCSAWGLPLAGEGRVPSPAAPTRWWPCSTPSPGSTPSFLSSRPP

SEQ ID NO: 88607 - protein, 65 aa, Homo sapiens
  MOD_RES (1)..(1): Any amino acid
XELENQVGSLKEQHLRDSADLKTLLSKAENQAKDVQKEPSILQPVPAVFIGLFLAFLFWCFGPLW

SEQ ID NO: 88608 - protein, 95 aa, Homo sapiens
  MOD_RES (1)..(1): Any amino acid
XETGDIRTMVFPVMYLNESVHIDKETASRLKSMINTTLIITNIPYIIMALGVFFGLVFTWLACKGQGSMDERMKEHPSFEPKHCLCLVKKLCELS

SEQ ID NO: 88609 - protein, 98 aa, Homo sapiens
  MOD_RES (1)..(1): Any amino acid
XLFKKSLLLIPIHLEVHWSLITVTLSNRIISFYDSQGIHFKFCVECIPQQKNDSDCGVFVLQYCKCLALEQPFQFSQEDMPRVRKRIYKELCECRLMD

SEQ ID NO: 88610 - protein, 613 aa, Homo sapiens
MQSTSNHLWLLSDILGQGATANVFRGRHKKTGDLFAIKVFNNISFLRPVDVQMREFEVLKKLNHKNIVKLFAIEEETTTRHKVLIMEFCPCGSLYTVLEEPSNAYGLPESEFLIVLRDVVGGMNHLRENGIVHRDIKPGNIMRVIGEDGQSVYKLTDFGAARELEDDEQFVSLYGTEEYLHPDMYERAVLRKDHQKKYGATVDLWSIGVTFYHAATGSLPFRPFEGPRRNKEVMYKIITGKPSGAISGVQKAENGPIDWSGDMPVSCSLSRGLQVLLTPVLANILEADQEKCWGFDQFFAETSDILHRMVIHVFSLQQMTAHKIYIHSYNTELIKDDYNETVHKKTEVVITLDFCIRNIEKTVKVYEKLMKINLEAAELGEISDIHTKLLRLSSSQGTIETSLQDIDSRLSPGGSLADAWAHQEGTHPKDRNVEKLQVLLNCMTEIYYQFKKDKAERRLAYNEEQIHKFDKQKLYYHATKAMTHFTDECVKKYEAFLNKSEEWIRKMLHLRKQLLSLTNQCFDIEEEVSKYQEYTNELQETLPQKMFTASSGIKHTMTPIYPSSNTLVEMTLGMKKLKEEMEGVVKELAENNHILERFGSLTMDGGLRNVDCL

SEQ ID NO: 88611 - protein, 94 aa, Homo sapiens
  MOD_RES (1)..(1): Any amino acid
XKSFKVSMIHRLRFTTDVQLGHAIFKLTYLSNHDYKHLYFESDAATVNEIVLKVNYILESRASTARADYFAQKQRKLNRRTSFSFQKEKKSGQQ

SEQ ID NO: 88612 - protein, 59 aa, Homo sapiens
MKSLKSSMDYKLWFIVRWNLSSSTLPIPMCYFCDSCLHKLRSGILSYRQTSLNLKTENY

SEQ ID NO: 88613 - protein, 267 aa, Homo sapiens
MTCSLGKVYISEIAYPAVRGLLGSCVQLMVVVGILLAYLAGWVLEWRWLAVLGCVPPSLMLLLMCFMPETPRFLLTQHRRQEAMAALRFLWGSEQGWEDPPIGAEQSFHLALLRQPGIYKPFIIGVSLMAFQQLSGVNAVMFYAETIFEEAKFKDSSLASVVVGVIQVLFTAVAALIMDRAGRRLLLVLSGVVMVFSTSAFGAYFKLTQGGPGNSSHVAISAPVSAQPVDASVGLAWLAVGSMCLFIAGFAVGWGPIPWLLMSEIFP

SEQ ID NO: 88614 - protein, 128 aa, Homo sapiens
MISTKEKNKIPKDSMTLLPCFYFVELPIVASSIVSLYFLELTDLFKPAKVGFQCYDRTLSMPYVETNEELIPLLMLLSLAFAAPAASIMVAEGMLYCLQSRLWGRAGGPAGAEGSINAGGCNFNSFLR

SEQ ID NO: 88615 - protein, 575 aa, Homo sapiens
MARVCRRQQCSVERRGFRQELDSWRHKLIHCVGFESILEGLFGPALLKDLSLFKDCEPESISDWTFDENCLFCCLRRDKVKGHLVGLDEPASGAGQEALLKQEQAKIIRFERQAEEFLNAVFYRKDSPWVSDPNIPLVAREIMQRMIQQFAAEYTSKNSSTQDPSQPNSTKNQSLPKASPVTTSPTAATTQNPVLSKLLMADQDSPLDLTVRKSQSEPSEQDGVLDLSTKKSPCAGSTSLSHSPGCSSTQGNGRPGRPSQYRPDGLRSGDGVPPRSLQDGTREGFGHSTSLKVPLARSLQISEELLSRNQLSTAASLGPSGLQNHGQHLILSREASWAKPHYEFNLSRMKFRGNGALSNISDLPFLAENSAFPKMALQAKQDGKKDVSHSSPVDLKIPQVRGMDLSWESRTGDQYSYSSLVMGSQTESALSKKLRAILPKQSRKSMLDAGPDSWGSDAEQSTSGQPYPTSDQEGDPGSKQPRKKRGRYRQYNSEILEEAISVVMSGKMSVSKAQSIYGIPHSTLEYKVKERLGTLKNPPKKKMKLMRSEGPDVSVKIELDPQGEAAQSANESKNE

SEQ ID NO: 88616 - protein, 216 aa, Homo sapiens
MSGQRGDWTSALWQLLFRVLSPLPAGNALASLALEVQARLVKSALCSQGYPRLALAQLPEDGSQGSRELLLALSWLLARGPVPEQMLAQARVPLGDEMTVCQCEALASPGPPAPHMEAEGPVDVRHVQWLMGKLRFRWRQLVSSQQEQCALLSKIHLYTRGCHSDQSLSHLSVTEAEMLRDPEGGQQLLRTLERENQRLEAVLAWRRSELVFWRWM

SEQ ID NO: 88617 - protein, 453 aa, Homo sapiens
MDFFRVVENQPPATMPLNVSFTNRNYDLDYDSVQPYFYCDEEENFYQQQQQSELQPPAPSEDIWKKFELLPTPPLSPSRRSGLCSPSYVAVTPFSLRGDNDGGGGSFSTADQLEMVTELLGGDMVNQSFICDPDDETFIKNIIIQDCMWSGFSAAAKLVSEKLASYQAARKDSGSPNPARGHSVCSTSSLYLQDLSAAASECIDPSVVFPYPLNDSSSPKSCASQDSSAFSPSSDSLLSSTESSPQGSPEPLVLHEETPPTTSSDSEEEQEDEEEIDVVSVEKRQAPGKRSESGSPSAGGHSKPPHSPLVLKRCHVSTHQHNYAAPPSTRKDYPAAKRVKLDSVRVLRQISNNRKCTSPRSSDTEENVKRRTHNVLERQRRNELKRSFFALRDQIPELENNEKAPKVVILKKATAYILSVQAEEQKLISEEDLLRKRREQLKHKLEQLRNSCA

SEQ ID NO: 88618 - protein, 76 aa, Homo sapiens
MPDNRQPRNRQPRIRSGNEPRSAPAMEPDGRGAWAHSRAALDRLEKLLRCSRCTNILREPVCLGGCEHIFCRFERR

SEQ ID NO: 88619 - protein, 66 aa, Homo sapiens
MTGIAAASFFSNTCRFGGCGLHFPTLADLIEHIEDNHIDTDPRVLEKQELQQPTYVALSYINRQRR

SEQ ID NO: 88620 - protein, 168 aa, Homo sapiens
MTSPEIASLSWGQMKVKGSNTTYKDCKVWPGGSRTWDWRETGTESLTLLPRLECSGAISAHCNLHLPGSCHSPASASQVAGTTGACHHTQHSPGVQPADVKEVVEKGVQTLVIGRGMSEALKVPSSTVEYLKKHGIDVRVLQTEQAVKEYNALVAQGVRVGGVFHSTC

SEQ ID NO: 88621 - protein, 138 aa, Homo sapiens
MMEGLKKRTRKAFGIRKKEKDTDSTGSPDRDGIKKSNGAPNGFYAEIDWERYNSPELDEEGYSIRPEEPGSTKGKHFYSSSESEEEEESHKKFNIKIKPLQSKDILKNAATVDELKASIGNIALSPSPVCLFLILGCN

SEQ ID NO: 88622 - protein, 298 aa, Homo sapiens
MHHQKYLQRFLGGKREKKQKEACSIPGIGKRMAEKIIEILESGHLRKLDHISESVPVLELFSNIWGAGTKTAQMWYQQGFRSLEDIRSQASLTTQQAIGLKHYSDFLERMPREEATEIEQTVQKAAQAFNSGLLCVACGSYRRGKATCGDVDVLITHPDGRSHRGIFSRLLDSLRQEGFLTDDLVSQEENGQQQKYLGVCRLPGPGRRHRRLDIIVVPYSEFACALLYFTGSAHFNRSMRALAKTKGMSLSEHALSTAVVRNTHGCKVGPGRVLPTPTEKDVFRLLGLPYREPAERDW

SEQ ID NO: 88623 - protein, 75 aa, Homo sapiens
MPDVVQTRQQAYRDKLAQQQAAAAAAAAAAASQQGSAKNGENTANGEENGAHTIANNHTDMMEVDGDVEIPPNKA

SEQ ID NO: 88624 - protein, 85 aa, Homo sapiens
MLPPQKKPWESMAKGLVLGALFTSFLLLVYSYAVPPLHAGLASTTPEAAASCSPPALEPEAVIRANGSAGECQPRRNIVFLKTHK

SEQ ID NO: 88625 - protein, 12 aa, Homo sapiens
LTFGGGTKVEIK

SEQ ID NO: 88626 - protein, 109 aa, Homo sapiens
MDTFSTVISSSIQLLVQDLDAACDPALTAMSKMQWQNVEHVGDQSPYVTSVILHIKQNVPIIRDNLASTRKYFTQFCVKFANSFIPKFITHLFKCKPISMVGAEQVRWT

SEQ ID NO: 88627 - protein, 276 aa, Homo sapiens
MQPSSLLPLALCLLAAPASALVRIPLHKFTSIRRTMSEVGGSVEDLIAKGPVSKYSQAVPAVTEGPIPEVLKNYMDAQYYGEIGIGTPPQCFTVVFDTGSSNLWVPSIHCKLLDIACWIHHKYNSDKSSTYVKNGTSFDIHYGSGSLSGYLSQDTVSVPCQSASSASALGGVKVERQVFGEATKQPGITFIAAKFDGILGMAYPRISVNNVLPVFDNLMQQKLVDQNIFSFYLSRDPDAQPGGELMLGGTDSKYYKGSLSYLNVTRKAYWQVHLDQ

SEQ ID NO: 88628 - protein, 131 aa, Homo sapiens
  MOD_RES (1)..(1): Any amino acid
XVGAVYGPEFYAVTGFPYPTTGTAVAYRGAHLRGRGRAVYNTFRAAPPPPPIPTYGAVVYQDGFYGAEIYGGYAAYRYAQPAAAAAAYSDSYGRVYAAADPYHHTIGPAATYSIGTMASLCRGGYSRFTPY

SEQ ID NO: 88629 - protein, 948 aa, Homo sapiens
MDRSSKRRQVKPLAASLLEALDYDSSDDSDFKVGDASDSEGSGNGSEDASKDSGEGSCSDSEENILEEELNEDIKVKEEQLKNSAEEEVLSSEKQLIKMEKKEEEENGERPRKKKEKEKEKEKEKEKEKEREKEKEKATVSENVAASAAATTPATSPPAVNTSPSVPTTTTATEEQVSEPKKWNLRRNRPLLDFVSMEELNDMDDYDSEDDNDWRPTVVKRKGRSASQKEGSDGDNEDDEDEGSGSDEDENDEGNDEDHSSPASEGGCKKKKSKVLSRNSADDEELTNDSLTLSQSKSNEDSLILEKSQNWSSQKMDHILICCVCLGDNSEDADEIIQCDNCGITVHEGCYGVDGESDSIMSSASENSTEPWFCDACKCGVSPSCELCPNQDGIFKETDAGRWVHIVCALYVPGVAFGDIDKLRPVTLTEMNYSKYGAKECSFCEDPRFARTGVCISCDAGMCRAYFHVTCAQKEGLLSEAAAEEDIADPFFAYCKQHADRLDRKWKRKNYLALQSYCKMSLQEREKQLSPEAQARINARLQQYRAKAELARSTRPQAWVPREKLPRPLTSSASAIRKLMRKAELMGISTDIFPVDNSDTSSSVDGRRKHKQPALTADFVNYYFERNMRMIQIQENMAEQKNIKDKLENEQEKLHVEYNKLCESLEELQNLNGKLRSEGQGIWALLGRITGQKLNIPAILRAPKERKPSKKEGGTQKTSTLPAVLYSCGICKKNHDQHLLLLCDTCKLHYHLGCLDPPLTRMPRKTKNSYWQCSECDQAGSSDMEADMAMETLPDGTKRSRRQIKEPVKFVPQDVPPEPKKIPIRNTRTRGRKRSFVPEEEKHEERVPRERRQRQSVLQKKPKAEDLRTECATCKGTGDNENLVRCDECRLCYHFGCLDPPLKKSPKQTGYGWICQECDSSSSKEDENEAERKNISQELNMEQKNPKK

SEQ ID NO: 88630 - protein, 182 aa, Homo sapiens
MTMESGAENQQSGDAAVTEAENQQMTVQAQPQIATLAQVSMPAAHATSSAPTVTLVQLPNGQTVQVHGVIQAAQPSVIQSPQVQTVQSSCKDLKRLFSGTQISTIAESEDSQESVDSVTDSQKRREILSRRPSYRKILNDLSSDAPGVPRIEEEKSEEETSAPAITTVTVPTPIYQTSSGQY

SEQ ID NO: 88631 - protein, 288 aa, Homo sapiens
MGKWKRSQAYADYIGFILTLNEGVKGKKLTFEYRVSEAIEKLVALLNTLDRWIDETPPVDQPSRFGNKAYRTWYAKLDEEAENLVATVVPTHLAAAVPEVAVYLKESVGNSTRIDYGTGHEAAFAAFLCCLCKIGVLRVDDQIAIVFKVFNRYLEVMRKLQKTYRMEPAGSQGVWGLDDFQFLPFIWGSSQLIDHPYLEPRHFVDEKAVNENHKDYMFLECILFITEMKTGPFAEHSNQLWNISAVPSWSKVNQGLIRMYKAECLEKFPVIQHFKFGSLLPIHPVTSG

SEQ ID NO: 88632 - protein, 131 aa, Homo sapiens
  MOD_RES (1)..(1): Any amino acid
XENKPIWMHAEEREECKGKQKDGTSFGEYGGWYKACKVDSPTVTTTLKNLGALYRRQGKFEAAETLEEAAMRSRKQGLDNVHKQRVAEVLNDPENMEKRRSRESLNVDVVKYESGPDGGEEMRKMKLGLVN

SEQ ID NO: 88633 - protein, 1372 aa, Homo sapiens
  MOD_RES (1)..(1): Any amino acid
XPSLQVVLNSIIKAMVPLLHIALLVLFVIIIYAIIGLELFIGKMHKTCFFADSDIVAEEDPAPCAFSGNGRQCTANGTECRSGWVGPNGGITNFDNFAFAMLTVFQCITMEGWTDVLYWVNDAIGWEWPWVYFVSLIILGSFFVLNLVLGVLSGEFSKEREKAKARGDFQKLREKQQLEEDLKGYLDWITQAEDIDPENEEEGGEEGKRNTSMPTSETESVNTENVSGEGENRGCCGSLWCWWRRRGAAKAGPSGCRRWGQAISKSKLSRRWRRWNRFNRRRCRAAVKSVTFYWLVIVLVFLNTLTISSEHYNQPDWLTQIQDIANKVLLALFTCEMLVKMYSLGLQAYFVSLFNRFDCFVVCGGITETILVELEIMSPLGISVFRCVRLLRIFKVTRHWTSLSNLVASLLNSMKSIASLLLLLFLFIIIFSLLGMQLFGGKFNFDETQTKRSTFDNFPQALLTVFQILTGEDWNAVMYDGIMAYGGPSSSGMIVCIYFIILFICGNYILLNVFLAIAVDNLADAESLNTAQKEEAEEKERKKIARKESLENKKNNKPEVNQIANSDNKVTIDDYREEDEDKDPYPPCDVPVGEEEEEEEEDEPEVPAGPRPRRISELNMKEKIAPIPEGSAFFILSKTNPIRVGCHKLINHHIFTNLILVFIMLSSAALAAEDPIRSHSFRNTILGYFDYAFTAIFTVEILLKMTTFGAFLHKGAFCRNYFNLLDMLVVGVSLVSFGIQSSAISVVKILRVLRVLRPLRAINRAKGLKHVVQCVFVAIRTIGNIMIVTTLLQFMFACIGVQLFKGKFYRCTDEAKSNPEECRGLFILYKDGDVDSPVVRERIWQNSDFNFDNVLSAMMALFTVSTFEGWPALLYKAIDSNGENIGPIYNHRVEISIFFIIYIIIVAFFMMNIFVGFVIVTFQEQGEKEYKNCELDKNQRQCVEYALKARPLRRYIPKNPYQYKFWYVVNSSPFEYMMFVLIMLNTLCLAMQHYEQSKMFNDAMDILNMVFTGVFTVEMVLKVIAFKPKHYFTDAWNTFDALIVVGSVVDIAITEVNPTESENVPVPTATPGNSEESNRISITFFRLFRVMRLVKLLSRGEGIRTLLWTFIKSFQALPYVALLIAMLFFIYAVIGMQMFGKVAMRDNNQINRNNNFQTFPQAVLLLFRCATGEAWQEIMLACLPGKLCDPESDYNPGEEYTCGSNFAIVYFISFYMLCAFLIINLFVAVIMDNFDYLTRDWSILGPHHLDEFKRIWSEYDPEAKGRIKHLDVVTLLRRIQPPLGFGKLCPHRVACKRLVAMNMPLNSDGTVMFNATLFALVRTALKIKTEGNLEQANEELRAVIKKIWKKTSMKLLDQVVPPAGGQCSLFPK

SEQ ID NO: 88634 - protein, 25 aa, Homo sapiens
MGNGDWDRRGVSPSLLLGRVPVLVS

SEQ ID NO: 88635 - protein, 37 aa, Homo sapiens
  MOD_RES (1)..(1): Any amino acid
XMKCLNMGVAVDCYHQLDRRNMVRWLVKLRKNMRRKR

SEQ ID NO: 88636 - protein, 213 aa, Homo sapiens
MSAPSATPIFAPGENCSPAWGAAPAAYDAADTHLRILGGRVLEVGFGMAIAASKVQEAPIDEHWIIECNDGVFQRLRDWAPRQTHKVIPLKGLWEDVAPTLPDGHFDGILYDTYPLSEETWHTHQFNFIKNHAFRLLKPGGVLTYCNLTSWGELMKSKYSDITIMFEETQVPALLEAGFRRENIRTEVMALVPPADCRYYAFPQMITPLVTKG

SEQ ID NO: 88637 - protein, 75 aa, Homo sapiens
MMASFQRSNSHDKVRRIVAEEGRTARNLIAWSVPLESKDDDGKPKCQTGGKSKRTIQGTHKTTKQLFEESPYFFP

SEQ ID NO: 88638 - protein, 457 aa, Homo sapiens
MEQKEGKLSEDGTTVSPAADNPEMSGGGAPAEETKGTAGKAINEGPPTESGKQEKAPAEDGMSAELQGEANGLDEVKVESQREAGGKEDAEAELKKEDGEKEETTVGSQEMTGRKEETKSEPKEAEEKESTLASEKQKAEEKEAKPESGQKADANDRDKPEPKATVEEEDAKTASQEETVVEDEAKAEPKEPDGKEEAKHGAKEEADEPGSPSEEQEQDVEKEPEGGAGVIPSSPEEWPESPTGEGHNLSTDGLGPDCVASGQTSPSASESSPSDVPQSPPESPSSGEKKEKAPERRVSAPARPRGPRAQNRKAIVDKFGGAASGPTALFRNTKAAGAAIGGVKNMLLEWCRAMTKKYEHVDIQNFSSSWSSGMAFCALIHKFFPDAFDYAELDPAKRRHNFTLAFSTAEKLADCAQLLDVDDMVRLAVPDSKCVYTYIQELYRSLVQKGLVKTKKK

SEQ ID NO: 88639 - protein, 198 aa, Homo sapiens
MKVFCEVLEELYKKVLLGATLENDSHDYIFYLNPAVSDQDCSTATSLEWANTCGIQGRHQPISVGVAPIAVAPVCLKTNSQMSGSREVMLLQLTVIKVMTTRILSVKTEFHAKEQYRDVIKILLESAKVDSKLICMFQNSDKLLSHMAAQCLALLLYFQLREKITLSNSWIAFCQKNLSEYSESNKAIYCLWTLTAII

SEQ ID NO: 88640 - protein, 111 aa, Homo sapiens
  MOD_RES (1)..(1): Any amino acid
XSFMDVFVDFTWEEWQLLDPAQKCLYRSVMLENYSNLVSLGYQHTKPDIIFKLEQGEELCMVQAQVPNQTCPILKAGKSKAKVLAGLVSGEGLLCASKMTPCCCILWSLEN

SEQ ID NO: 88641 - protein, 261 aa, Homo sapiens
MGPGEALLAGLLVMVLAVALLSNALVLLCCAYSAELRTRASGVLLVNLSLGHLLLAALDMPFTLLGVMRGRTPSAPGACQVIGFLDTFLASNAALSVAALSADQWLAVGFPLRYAGRLRPRYAGLLLGCAWGQSLAFSGAALGCSWLGYSSAFASCSLRLPPEPERPRFAAFTATLHAVGFVLPLAVLCLTSLQVHRVARRHCQRMDTVTMKALALLADLHPSVRQRCLIQQKRRRHRATRKIGIAIATFLICFAPYVMTR

SEQ ID NO: 88642 - protein, 142 aa, Homo sapiens
MLLAQINRDSQGMTEFPGGGMEAQHVTLCLTEAVTVADGDNLENMEGVSLQAVTLADGSTAYIQHNSKDAKLIDGQVIQLEDGSAAYVQHVPIPKSRDSLRLEDGQAVQLEDGTTAFIHHTSKDSYDQSALQAVQLEDGTTA

SEQ ID NO: 88643 - protein, 1092 aa, Homo sapiens
EKRKSARKKEFIMAELLQTEKAYVRDLHECLETYLWEMTSGVEEIPPGILNKEHIIFGNIQEIYDFHNNIFLKELEKYEQLPEDVGHCFVTWADKFQMYVTYCKNKPDSNQLILEHAGTFFDEIQQRHGLANSISSYLIKPVQRITKYQLLLKELLTCCEEGKGELKDGLEVMLSVPKKANDAMHVSMLEGFDENLDVQGELILQDAFQVWDPKSLIRKGRERHLFLFEISLVFSKEIKDSSGHTKYVYKNKLLTSELGVTEHVEGDPCKFALWSGRTPSSDNKTVLKASNIETKQEWIKNIREVIQERIIHLKGALKEPLQLPKTPAKQRNNSKRDGVEDIDSQGDGSSQPDTISIASRTSQNTVDSDKLSGGCELTVVLQDFSAGHSSELTIQVGQTVELLERPSERPGWCLVRTTERSPPLEGLVPSSALCISHSRSSVEMDCFFPLVKDAYSHSSSENGGKSESVANLQAQPSLNSIHSSPGPKRSTNTLKKWLTSPVRRLNSGKADGNIKKQKKVRDGRKSFDLGSPKPGDETTPQGDSADEKSKKGWGEDEPDEESHTPLPPPMKIFDNDPTQDEMSLEGSSYRGSLKDPAGCLNEGMAPPTPPKNPEEEQKAKALRGRMFVLNELVQTEKDYVKDLGIVVEGFMKRIEEKGVPEDMRGKDKIVFGNIHQIYDWHKDFFLAELEKCIQEQDRLAQLFIKHERKLHIYVWYCQNKPRSEYIVAEYDAYFEEVKQEINQRLTLSDFLIKPIQRITKYQLLLKDFLRYSEKAGLECSDIEKAVELMCLVPKRCNDMMNLGRLQGFEGTLTAQGKLLQQDTFYVIELDAGMQSRTKERRVFLFEQIVIFSELLRKGSLTPGYMFKRSIKMNYLVLEENVDNDPCKFALMNRETSERVVLQAANADIQQAWVQDINQVLETQRDFLNALQSPIEYQRKERSTAVMRSQPARLPQASPRPYSSVPAGSEKPPKGSSYNPPLPPLKISTSNGSPGFEYHQPGDKFEASKNDLGGCNGTSSMAVIKDYYALKENEICVSQGEVVQVLAVNQQNMCLVYQPASDHSPAAEGWVPGSILAPLTKATAAESSDGSIK

SEQ ID NO: 88644 - protein, 42 aa, Homo sapiens
MTLLFAVGCVFFPLCFTALRWGLQNHTNLQMERQEAVLVASK

SEQ ID NO: 88645 - protein, 153 aa, Homo sapiens
MGTPKPRILPWLVSQLDLGQLEGVAWVNKSRTRFRIPWKHGLRQDAQQEDFGIFQAWAEATGAYVPGRDKPDLPTWKRNFRSALNRKEGLRLAEDRSKDPHDPHKIYEFVNSGVGDFSQPDTSPDTNGGGSTSDTQEDILDELLEWEFEVTAF

SEQ ID NO: 88646 - protein, 53 aa, Homo sapiens
MRLFLSLPVLVVVLSIVLEGPAPAQGTPDVSSALDKLKEFGNTLEDKARELIS

SEQ ID NO: 88647 - protein, 36 aa, Homo sapiens
MSTSLGSNLSELDRLLLELNAVQHNPPGFPADEANS

SEQ ID NO: 88648 - protein, 43 aa, Homo sapiens
MGCTLSAEDKAAVERSKMIDRNLREDGEKAAREVKLLLLAQDN

SEQ ID NO: 88649 - protein, 229 aa, Homo sapiens
MKQFLDFGSVNACEKTSFMFLRQELPVRLANIMKEISLLPDNLLRTPSVQLVQSCFTDTVIRIRNRHNDVIPTMAQGVIEYKESFGVDPVTSQNVQYFLDRFYMSRISIRMLLNQHSLLFGGKGKGSPSHRKHIGSINPNCNVLEVIKDGYENARRLCDLYYINSPELELEELNAKSPGQPIQVVYVPSHLYHMVFELFKNAMRATMEHHANRGVYPPIQVHVTLGNED

SEQ ID NO: 88650 - protein, 40 aa, Homo sapiens
MKFFSYILVYRRFLFVVFTVLVLLPLPIVLHTKLILTFPR

SEQ ID NO: 88651 - protein, 126 aa, Homo sapiens
MADANKAEVPGATGGDSPHLQPAEPPGEPRREPHPAEAEKQQPQHSSSSNGVKMENDESAKEEKSDLKEKSTGSKKANRFHPYSKDKNSGAGEKKGPNRNRVFISNIPYDMKWQAIKDLMREKGCG

SEQ ID NO: 88652 - protein, 60 aa, Homo sapiens
MGCTLSAEDKAAVERSKMIDRNLREDGEKAAREVKLLLLECLMWEVRDLSGRSGFIASKE

SEQ ID NO: 88653 - protein, 1691 aa, Homo sapiens
MDSKKRSSTEAEGSKERGLVHIWQAGSFPITPERLPGWGGKTVLQAALGVKHGVLLTEDGEVYSFGTLPWRSGPVEICPSSPILENALVGQYVITVATGSFHSGAVTDNGVAYMWGENSAGQCAVANQQYVPEPNPVSIADSEASPLLAVRILQLACGEEHTLALSISREIWAWGTGCQLGLITTAFPVTKPQKVEHLAGRVVLQVACGAFHSLALVQCLPSQDLKPVPERCNQCSQLLITMTDKEDHVIISDSHCCPLGVTLTESQAENHASTALSPSTETLDRQEEVFENTLVANDQSVATELNAVSAQITSSDAMSSQQNVMGTTEISSARNIPSYPDTQAVNEYLRKLSDHSVREDSEHGEKPVPSQPLLEEAIPNLHSPPTTSTSALNSLVVSCASAVGVRVAATYEAGALSLKKVMNFYSTTPCETGAQAGSSAIGPEGLKDSREEQVKQESMQGKKSSSLVDIREEETEGGSRRLSLPGLLSQVQQSQPSGLNASQEWPADQQHQQHLGTCYKRRLSVSPRLLRKAARVKTRTVVLTPTYSGEADALLPSLRTEVWTWGKGKEGQLGHGDVLPRLQPLCVKCLDGKEVIHLEAGGYHSLALTAKSQVYSWGSNTFGQLGHSDFPTTVPRLAKISSENGVWSIAAGRDYSLFLVDTEDFQPGLYYSGRQDPTEGDNLPENHSGSKTPVLLSCSKLGYISRVTAGKDSYLALVDKNIMGYIASLHELATTERRFYSKLSDIKSQILRPLLSLENLGTTTTVQLLQEVASRFSKLCYLIGQHGASLSSFLHGVKEARSLVILKHSSLFLDSYTEYCTSITNFLVMGGFQLLAKPAIDFLNKNQELLQDLSEVNDENTQLMEILNTLFFLPIRRLHNYAKVLLKLATCFEVASPEYQKLQDSSSCYECLALHLGRKRKEAEYTLGFWKTFPGKMTDSLRKPERRLLCESSNRALSLQHAGRFSVNWFILFNDALVHAQFSTHHVFPLATLWAEPLSEEAGGVNGLKITTPEEQFTLISSTPQEKTKWLRAISQAVDQALRGMSDLPPYGSGSSVQRQEPPISRSAKYTFYKDPRLKDATYDGRWLSGKPHGRGVLKWPDGKMYSGMFRNGLEDGYGEYRIPNKAMNKEDHYVGHWKEGKMCGQGVYSYASGEVFEGCFQDNMRHGHGLLRSGKLTSSSPSMFIGQWVMDKKAGYGVFDDITRGEKYMGMWQDDVCQGNGVVVTQFGLYYEGNFHLNKMMGNGVLLSEDDTIYEGEFSDDWTLSGKGTLTMPNGDYIEGYFSGEWGSGIKITGTYFKPSLYESDKDRPKVFRKLGNLAVPADEKWKAVFDECWRQLGCEGPGQGEVWKAWDNIAVALTTSRRQHRDSPEILSRSQTQTLESLEFIPQHVGAFSVEKYDDIRKYLIKACDTPLHPLGRLVETLVAVYRMTYVGVGANRRLLQEAVKEIKSYLKRIFQLVRFLFPELPEEGSTIPLSAPLPTERKSFCTGKSDSRSESPEPGYVVTSSGLLLPVLLPRLYPPLFMLYALDNDREEDIYWECVLRLNKQPDIALLGFLGVQRKFWPATLSILGESKKVLPTTKDACFASAVECLQQISTTFTPSDKLKVIQQTFEEISQSVLASLHEDFLWSMDDLFPVFLYVVLRARIRNLGSEVHLIEDLMDPYLQHGEQGIMFTTLKACYYQIQREKLN

SEQ ID NO: 88654 - protein, 839 aa, Homo sapiens
MKTLRARFKKTESQDWGKSDERLLQAVENNDAPRVAALIARKGLVPTKLDPEGKSAFHLAAMRGAASCLEVMIAHGSNVMSADGAGYNALHLAAKYGHPQCLKQLLQASCVVDVVDSSGWTALHHAAAGGCLSCSEVLCSFKAHLNPQDRSGATPLIIAAQMCHTDLCRLLLQQGAAANDQDLQGRTALMLACEGASPETVEVLLQGGAQPGITDALGQDAAHYGALAGDKLILHLLQEAAQRPSPPSALTEDDSGEASSQNSMSSHGKQGAPKKRKAPPPPASIPMPDDRDAYEEIVRLRQERGRLLQKIRGLEQHKERRQQESPEASSLHILERQVQELQQLLVERQEEKESLGREVESLQSRLSLLENERENTSYDVTTLQDEEGELPDLPGAEVLLSRQLSPSAQEHLASLQEQVAVLTRQNQELMEKVQILENFEKDETQMEVEALAEVIPLALYDSLRAEFDQLRRQHAEALQALRQQETREVPREEGAACGESEVAGATATKNGPTHMELNGSVAPETKVNGAETIDEEAAGDETMEARTMEAEATGAEATGAEATGAKVTETKPTGAEVREMETTEEEANMETKPTGAQATDTETTGVEAMGVEATKTKAEEAEMQAYGVGAGQAEPPVTGTTNMEATGSRATGMESTGVSATGVENPGVEATVPGISAGPILHPGAAEASEKLQVELETRIRGLEEALRQREREAAAELEAALGKCEAAEAEAGRLRERVREAEGSGASGGGGGDTTQLRAALEQAREDLRDRDSRLRELEAASACLDEARASRLLAEEEARGLRAELAQREEARLEQSRELEVLREQLATARATGEQQR

SEQ ID NO: 88655 - protein, 110 aa, Homo sapiens
MGTRSSPEEGTPPPLVPECDVEVQPQGHPEESREQEASEVLAEPSSRGGAEQQAEEEEVGEGSSTESSRDAPEATPPIAMAATPPASTSSREGVRGAARRLQGQQLEALT

SEQ ID NO: 88656 - protein, 110 aa, Homo sapiens
AAACMNQKHLLRFIKHTYQTEPDRTVAEKRGRKITLRQVFDGLHMDPYDLTVDSLDVHAVSELLLQCRQQTAALAGDSAPWKATMIVLAGRCYGSSFLFYLTERSCGLRE

SEQ ID NO: 88657 - protein, 152 aa, Homo sapiens
MAAPMEVAVCTDSAAPMWSCIVWELHSGANLLTYRGGQAGPRGLALLNGEYLLAAQLGKNYISAWELQRKDQLQQKIMCPGPVTCLTASPNGLYVLAGVAESIHLWEVSTGNLLVILSRHYQDVSCLQFTGDSSHFISGGKDCLVLVWSLCR

SEQ ID NO: 88658 - protein, 573 aa, Homo sapiens
MPVAATNSETAMQQVLDNLGSLPSATGAAELDLIFLRGIMESPIVRSLAKVQCSREVGTRALPHLFCFHPQAHERLEETKLEAVRDNNLELVQEILRDLAQLAEQSSTAAELAHILQEPHFQSLLETHDSVASKTYETPPPSPGLDPTFSNQPVPPDAVRMVGIRKTAGEHLGVTFRVEGGELVIARILHGGMVAQQGLLHVGDIIKEVNGQPVGSDPRALQELLRNASGSVILKILPSYQEPHLPRQVFVKCHFDYDPARDSLIPCKEAGLRFNAGDLLQIVNQDDANWWQACHVEGGSAGLIPSQLLEEKRKAFVKRDLELTPNSGTLCGSLSGKKKKRMMYLTTKNAEFDRHELLIYEEVARMPPFRRKTLVLIGAQGVGRRSLKNKLIMWDPDRYGTTVPYTSRRPKDSEREGQGYSFVSRGEMEADVRAGRYLEHGEYEGNLYGTRIDSIRGVVAAGKVCVLDVNPQAVKVLRTAEFVPYVVFIEAPDFETLRAMNRAALESGISTKQLTEADLRRTVEESSRIQRGYGHYFDLCLVNSNLERTFRELQTAMEKLRTEPQWVPVSWVY

SEQ ID NO: 88659 - protein, 38 aa, Homo sapiens
DTPYEEQDPETADGPPSGQKPRQSRMPQEDERPADDAV

SEQ ID NO: 88660 - protein, 90 aa, Homo sapiens
MIRDLSKMYPQTRHPAPHQPAQPFKFTISESCDRIKEEFQFLQAQYHSLKLECEKLASEKTEMQRHYVMYYEMSYGLNIEMHKQRLFFTN

SEQ ID NO: 88661 - protein, 195 aa, Homo sapiens
  MOD_RES (1)..(1): Any amino acid
XRRRPPRRHREDGRHFQESLGARGESRAPSGHAPPRKASPPRRGCVPQRGWAGVGGSVFSFSPCGPQDLDAAPRSAHPRLGLAAPELRARWKGDQKSAASQKPRSRGILHSLFCCVCRDDGEALPAHSGAPLLVEENGAIPKTPVQYLLPEAKAQDSDKICVVIDLDETLVHSSFKPVNNADFIIPVEIDGVVHQ

SEQ ID NO: 88662 - protein, 87 aa, Homo sapiens
  MOD_RES (1)..(1): Any amino acid
XPSVCELVRAPGFARLPLVVEDFVKDSGACFSASEPDAVHVVLDRHLVTGQNASSTVPAVQNLLFLCGSRSSSLLPQGRPALAALSC

SEQ ID NO: 88663 - protein, 208 aa, Homo sapiens
MEPPMEPSGGEQEPGAVRFLDLPWEDVLLPHVLNRVPLRQLLRLQRVSRAFRSLVQLHLAGLRRFDAAQVGPQIPRAALARLLRDAEGLQELALAPCHEWLSDEDLVPVLARNPQLRSVALGGCGQLSRRALGALAEGCPRLQRLSLAHCDWVDGLALRGLADRCPALEELDLTACRQLKDEAIVYLAQRRGAGLRSLSLAVNANVGD

SEQ ID NO: 88664 - protein, 26 aa, Homo sapiens
GAAALGFASYGAHGAQFPDAYGKEVK

SEQ ID NO: 88665 - protein, 83 aa, Homo sapiens
  MOD_RES (1)..(1): Any amino acid
XEQVALYVDLDDVAEDDPELVDSICENARPSPLPRPAFSPHSMPAAPSWLPPTLPTGATTLAAAWSRTYSYLLHCSPGLTSSG

SEQ ID NO: 88666 - protein, 343 aa, Homo sapiens
MTSQPSLPADDFDIYHVLAECTDYYDTLPVKEADGNQPHFQGVTGLWNLGNTCCVNAISQCLCSILPLVEYFLTGKYITALQNKTYPFLLPSDCSEVATAFAYLMTDMWLGDSDCVSPEIFWSALGNLYPAFTKKMQQDAQEFLICVLNELHEALKKYHYSRRRSYEKGSTQRCCRKWITTETSIITQLFEEQLNYSIVCLKCEKCTYKNEVFTVFSLPIPSKYECSLRDCLQCFFQQDALTWNNEIHCSFCETKQETAVRASISKAPKIIIFHLKRFDIQGTTKRKLRTDIHYPLTNLDLTPYICSIFRKYPKYNLCAVVNHFGDLDGGHYTAFCKNSVTQA

SEQ ID NO: 88667 - protein, 101 aa, Homo sapiens
  MOD_RES (1)..(1): Any amino acid
XEFLRSVWVVFWPQSIPYQNLGPLGPFTQYLVDHHHTLLCNGYWLAWLIHVGESLYAIVLCKHKGITSGRAQLLWFLQTFFFGIASLTILIAYKRKRQKQT

SEQ ID NO: 88668 - protein, 140 aa, Homo sapiens
MPGCPCPGCGMAGPRLLFLTALALELLERAGGSQPALRSRGTATACRLDNKESESWGALLSGERLDTWICSLLGSLMVGLSGVFPLLVIPLEMGTMLRSEAGAWRLKQLLSFALGGLLGNVFLHLLPEAWAYTCSASPGK

SEQ ID NO: 88669 - protein, 141 aa, Homo sapiens
MSSLPVPYKLPVSLSVGSCVIIKGTPIHSFINDPQLQVDFYTDMDEDSDIAFRFRVHFGNHVVMNRREFGIWMLEETTDYVPFEDGKQFELCIYVHYNEYEIKVNGIRIYGFVHRIPPSFVKMVQVSRDISLTSVCVCNGR

SEQ ID NO: 88670 - protein, 37 aa, Homo sapiens
MAILLSYSERDPVPGGCNLEFDLDIDPNIYLEYNFFE

SEQ ID NO: 88671 - protein, 190 aa, Homo sapiens
MRKLHWNLSCGDFKLCETGRKEKGDPLNIAIDKMTKKTRDLRRQLRKAVMDHISDSFLETNVPLLVLIEAAKSGNEKEVKEYAQVFREHANKLVEVANLACSISNNEEGVKLVRMAATQIDSLCPQVINAALTLAARPQSKVAQDNMDVFKDQWEKQVRVLTEAVDDITSVDDFLSVSENHILEDVNKCV

SEQ ID NO: 88672 - protein, 223 aa, Homo sapiens
KMAAPSDGFKPRERSGGEQAQDWDALPPKRPRLGAGNKIGGRRLIVVLEGASLETVKVGKTYELLNCDKHKSILLKNGRDPGEARPDITHQSLLMLMDSPLNRAGLLQVYIHTQKNVLIEVNPQTRIPRTFDRFCGLMVQLLHKLSVRAADGPQKLLKVIKNPVSDHFPVGCMKVGTSFSIPVVSDVRELVPSSDPIVFVVGAFAHGKVSGSYLFQSKVMMAL

SEQ ID NO: 88673 - protein, 117 aa, Homo sapiens
MRLRTRKASQQSNQIQTQRTARAKRKYSEVDDSLPSGGEKPSKNETGLLSSIKKFIKGSTPKEERENPSKRSRIERDIDNNLITSTPRAGEKPNKQISRVRRKSQVNGEAGSYEMTN

SEQ ID NO: 88674 - protein, 56 aa, Homo sapiens
MRQSLLFLTSVVPFVLAPRPPDDPGFGPHQRLEKLDSLLSDYDILSLSNIQQHSAF

SEQ ID NO: 88675 - protein, 198 aa, Homo sapiens
MKRTTSFRMAEDDPYLGRPEQMFHLDPSLTHTIFNPEVFQPQMALPTADGPYLQILEQPKQRGFRFRYVCEGPSHGGLPGASSEKNKKSYPQVKICNYVGPAKVIVQLVTNGKNIHLHAHSLVGKHCEDGICTVTAGPKDMVVGFANLGILHVTKKKVFETLEARMTEACIRGYNPGLLVHPDLAYLQAEGGGDRQLG

SEQ ID NO: 88676 - protein, 72 aa, Homo sapiens
MVPRLLLRAWPRGPAVGPGAPSRPLSAGSGPGQYLQRSIVPTMHYQDSLPRTPRCYLRFSILNASQIPSPLT

SEQ ID NO: 88677 - protein, 1545 aa, Homo sapiens
MMPAQYALTSSLVLLVLLSTARAGPFSSRSNVTLPAPRPPPQPGGHTVGAGVGSPSSQLYEHTVEGGEKQVVFTHRINLPPSTGCGCPPGTEPPVLASEVQALRVRLEILEELVKGLKEQCTGGCCPASAQAGTGQTDVRTLCSLHGVFDLSRCTCSCEPGWGGPTCSDPTDAEIPPSSPPSASGSCPDDCNDQGRCVRGRCVCFPGYTGPSCGWPSCPGDCQGRGRCVQGVCVCRAGFSGPDCSQRSCPRGCSQRGRCEGGRCVCDPGYTGDDCGMRSCPRGCSQRGRCENGRCVCNPGYTGEDCGVRSCPRGCSQRGRCKDGRCVCDPGYTGEDCGTRSCPWDCGEGGRCVDGRCVCWPGYTGEDCSTRTCPRDCRGRGRCEDGECICDTGYSGDDCGVRSCPGDCNQRGRCEDGRCVCWPGYTGTDCGSRACPRDCRGRGRCENGVCVCNAGYSGEDCGVRSCPGDCRGRGRCESGRCMCWPGYTGRDCGTRACPGDCRGRGRCVDGRCVCNPGFTGEDCGSRRCPGDCRGHGLCEDGVCVCDAGYSGEDCSTRSCPGGCRGRGQCLDGRCVCEDGYSGEDCGVRQCPNDCSQHGVCQDGVCICWEGYVSEDCSIRTCPSNCHGRGRCEEGRCLCDPGYTGPTCATRMCPADCRGRGRCVQGVCLCHVGYGGEDCGQEEPPASACPGGCGPRELCRAGQCVCVEGFRGPDCAIQTCPGDCRGRGECHDGSCVCKDGYAGEDCGEARVPSSASAYDQRGLAPGQEYQVTVRALRGTSWGLPASKTITTMIDGPQDLRVVAVTPTTLELGWLRPQAEVDRFVVSYVSAGNQRVRLEVPPEADGTLLTDLMPGVEYVVTVTAERGRAVSYPASVRANTEEREEESPPRPSLSQPPRRPWGNLTAELSRFRGTVQDLERHLRAHGYPLRANQTYTSVARHIHEYLQRQVLGSSADGALLVSLDGLRGQFERVVLRWRPQPPAEGPGGELTVPGTTRTVSLPDLRPGTTYHVEVHGVRAGQTSKSYAFITTTGPSTTQGAQAPLLQQRPQELGELRVLGRDETGRLRVVWTAQPDTFAYFQLRMRVPEGPGAHEEVLPGDVRQALVPPPPPGTPYELSLHGVPPGGKPSDPIIYQGIMDKDEEKPGKSSGPPRLGELTVTDRTSDSLLLRWTVPEGEFDSFVIQYKDRDGQPQVVPVEGPQRSAVITSLDPGRKYKFVLYGFVGKKRHGPLVAEAKILPQSDPSPGTPPHLGNLWVTDPTPDSLHLSWTVPEGQFDTFMVQYRDRDGRPQVVPVEGPERSFVVSSLDPDHKYRFTLFGIANKKRYGPLTADGTTAPERKEEPPRPEFLEQPLLGELTVTGVTPDSLRLSWTVAQGPFDSFMVQYKDAQGQPQAVPVAGDENEVTVPGLDPDRKYKMNLYGLRGRQRVGPESVVAKTAPQEDVDETPSPTELGTEAPESPEEPLLGELTVTGSSPDSLSLFWTVPQGSFDSFTVQYKDRDGRPRAVRVGGKESEVTVGGLEPGHKYKMHLYGLHEGQRVGPVSAVGVT

SEQ ID NO: 88678 - protein, 572 aa, Homo sapiens
MAEAATGFLEQLKSCIVWSWTYLWTVWFFIVLFLVYILRVPLKINDNLSTVSMFLNTLTPKFYVALTGTSSLISGLILIFEWWYFRKYGTSFIEQVSVSHLRPLLGGVDNNSSNNSNSSNGDSDSNRQSVSECKVWRNPLNLFRGAEYNRYTWVTGREPLTYYDMNLSAQDHQTFFTCDSDHLRPADAIMQKAWRERNPQARISAAHEALEINEIRSRVEVPLIASSTIWEIKLLPKCATAYILLAEEEATTIAEAEKLFKQALKAGDGCYRRSQQLQHHGSQYEAQHRRDTNVLVYIKRRLAMCARRLGRTREAVKMMRDLMKEFPLLSMFNIHENLLEALLELQAYADVQAVLAKYDDISLPKSATICYTAALLKARAVSDKFSPEAASRRGLSTAEMNAVEAIHRAVEFNPHVPKYLLEMKSLILPPEHILKRGDSEAIAYAFFHLAHWKRVEGALNLLHSFRMIPYPLEKGHLFYPYPICTETADRELLPSFHEVSVYPKKELPFFILFTAGLCSFTAMLALLTHQFPELMGVFAKAFLSTLFAPLNFVMEKVESILPSSLWHQLTRI

SEQ ID NO: 88679 - protein, 11 aa, Homo sapiens
MFVPESTSKLQ

SEQ ID NO: 88680 - protein, 74 aa, Homo sapiens
MTSKGPEEEHPSVTLFRQYLRIRTVQPKPDYGGTWLCGDRVDLARHQPYTLLHLAQLPHGCGACLQGTLESRPL

SEQ ID NO: 88681 - protein, 393 aa, Homo sapiens
MADESETAVKPPAPPLPQMMEGNGNGHEHCSDCENEEDNSYNRGGLSPANDTGAKKKKKKQKKKKEKGSETDSAQDQPVKMNSLPAERIQEIQKAIELFSVGQGPAKTMEEASKRSYQFWDTQPVPKLGEVVNTHGPVEPDKDNIRQEPYTLPQGFTWDALDLGDRGVLKELYTLLNENYVEDDDNMFRFDYSPEFLLWALRPPGWLPQWHCGVRVVSSRKLVGFISAIPANIHIYDTEKKMVEINFLCVHKKLRSKRVAPVLIREITRRVHLEGIFQAVYTAGVVLPKPVGTCRYWHRSLNPRKLIEVKFSHLSRNMTMQRTMKLYRLPEASAAPGGGQGAERGQGEPGCQQERRALGGEGAFSYWKSEPAHSLQISWTFYFCYLKQDFILV

SEQ ID NO: 88682 - protein, 1341 aa, Homo sapiens [sequence omitted]

SEQ ID NO: 88683 - protein, 141 aa, Homo sapiens
MPSPLGPPCLPVMDPETTLEEPETARLRFRGFCYQEVAGPREALARLRELCCQWLQPEAHSKEQMLEMLVLEQFLGTLPPEIQAWVRGQRPGSPEEAAALVEGLQHDPGQLLGWITAHVLKQEVLPAAQKTEEPLGSPHPS

SEQ ID NO: 88684 - protein, 943 aa, Homo sapiens
MFLTYMETVTKELVSWMRGHESSVFSISVHASGKYAITTSSDTAQLWDLDTFQRKRKLNIRQSVGIQKVFFLPLSNTILSCFKDNSIFAWECDTLFCKYQLPAPPESSSILYKVFAVTRDGRILAAGGKSNHLHLWCLEARQLFRIIQMPTKVRAIRHLEFLPDSFDAGSNQVLGVLSQDGIMRFINMQTCKLLFEIGSLDEGISSSAISPHGRYIASIMENGSLNIYSVQALTQEINKPPPPLVKVIEDLPKNKLSSSDLKMKVTSGRVQQPAKSRESKMQTRILKQDLTGDFESKKNELPDGLNKKRLQILLKGYGEYPTKYSTLIDKGTHVAFLNLQKKYPIKSRKLLRVLQRTLSALAHWSVIFSDTPYLPLLAFPFVKLFQNNQLICFEVIATLIINWCQHWFEYFPNPPINILSMIENVLAFHDKELLQHFIDHDITSQLYAWPLLETVFSEVLTREEWLKLFDNIFSNHPSFLLMTVVAYNICSRTPLLSCNLKDDFEFFFHHRNNLDINVVIRQVYHLMETTPTDIHPDSMLNVFVALTKGQYPVFNQYPKFIVDYQTQERERIRNDELDYLRERQTVEDMQAKVDQQRVEDEAWYQKQELLRKAEETRREMLLQEEEKMIQQRQRLAAVKRELKVKEMHLQDAARRRFLKLQQDQQEMELRRLDDEIGRKVYMRDREIAATARDLEMRQLELESQKRLYEKNLTENQEALAKEMRADADAYRRKVDLEEHMFHKLIEAGETQSQKTQKVIKENLAKAEQACLNTDWQIQSLHKQKCDDLQRNKCYQEVAKLLRENRRKEIEIINAMVEEEAKKWKEAEGKEFRLRSAKKASALSDASRKWFLKQEINAAVEHAENPCHKEEPRFQNEQDSSCLPRTSQLNDSSEMDPSTQISLNRRAVEWDTTGQNLIKKVRNLRQRLTARARHRCQTPHLLAA

SEQ ID NO: 88685 - protein, 178 aa, Homo sapiens
MVELMFPLLLLLLPFLLYMAAPQIRKMLSSGVCTSTVQLPGKVVVVTGANTGIGKETAKELAQRGHFLLTHLLLEKLKESAPSRIVNVSSLAHHLGRIHFHNLQGEKFYNAGLAYCHSKLANILFTQELARRLKGSGVTTYSVHPGTVQSELVRHSSFMRWMWWLFSFFIKTPQQGAQ

SEQ ID NO: 88686 - protein, 488 aa, Homo sapiens
MLRRALLCLAVAALVRADAPEEEDHVLVLRKSNFAEALAAHKYLLVEFYAPWCGHCKALAPEYAKAAGKLKAEGSEIRLAKVDATEESDLAQQYGVRGYPTIKFFRNGDTASPKEYTAGREADDIVNWLKKRTGPAATTLPDGAAAESLVESSEVAVIGFFKDVESDSAKQFLQAAEAIDDIPFGITSNSDVFSKYQLDKDGVVLFKKFDEGRNNFEGEVTKENLLDFIKHNQLPLVIEFTEQSVSDYDGKLSNFKTAAESFKGKILFIFIDSDHTDNQRILEFFGLKKEECPAVRLITLEEEMTKYKPESEELTAERITEFCHRFLEGKIKPHLMSQELPEDWDKQPVKVLVGKNFEDVAFDEKKNVFVEFYAPWCGHCKQLAPIWDKLGETYKDHENIVIAKMDSTANEVEAVKVHSFPTLKFFPASADRTVIDYNGERTLDGFKKFLESGGQDGAGDDDDLEDLEEAEEPDMEEDDDQKAVKDEL

SEQ ID NO: 88687 - protein, 143 aa, Homo sapiens
MGAGPSLLLAALLLLLSGDGAVRCDTPANCTYLDLLGTWVFQVGSSGSQRDVNCSVMGPQEKKVVVYLQKLDTAYDDLGNSGHFTIIYNQGFEIVLNDYKWFAFFKYKEEGSKVTTYCNETMTGWVHDVLGRNWACFTGKKVF

SEQ ID NO: 88688 - protein, 502 aa, Homo sapiens
QVKMLQGELGGIMGQEPENKGDHSKVRIYTSPCMIQEHQETQKRLSEVWQKVSQQDDLIQELRNKLACSNALVLEREKALIKLQADFASCTATHRYPPSSSEECEDIKKILKHLQEQKDSQCLHVEEYQNLVKDLRVELEAVSEQKRNIMKDMMKLELDLHGLREETSAHIERKDKDITILQCRLQELQLEFTETQKLTLKKDKFLQEKDEMLQELEKKLTQVQNSLLKKEKELEKQQCMATELEMTVKEAKQDKSKEAECKALQAEVQKLKNSLEEAKQQERLAAQQAAQCKEEAALAGCHLEDTQRKLQKGLLLDKQKADTIQELQRELQMLQKESSMAEKEQTSNRKRVEELSLELSEALRKLENSDKEKRQLQKTVAEQDMKMNDMLDRIKHQHREQGSIKCKLEEDLQEATKLLEDKREQLKKSKEHEKLMEGELEALRQEFKKKDKTLKENSRKLEEENENLRAELQCCSTQLESSLNKYNTSQQVIQDLNKEKCS

SEQ ID NO: 88689 - protein, 519 aa, Homo sapiens
MRTTQEAAGGGGETSACKPSSVRLAPSFSFHAAGLQMAGQMPHSHQYSDRRQPNISDQQVSALSYSDQIQQPLTNQVMPDIVMLQRRMPQTFRDPATAPLRKLSVDLIKTYKHINEVYYAKKKRRHQQGQGDDSSHKKERKVYNDGYDDDNYDYIVKNGEKWMDRYEIDSLIGKGSFGQVVKAYDRVEQEWVAIKIIKNKKAFLNQAQIEVRLLELMNKHDTEMKYYIVHLKRHFMFRNHLCLVFEMLSYNLYDLLRNTNFRGVSLNLTRKFAQQMCTALLFLATPELSIIHCDLKPENILLCNPKRSAIKIVDFGSSCQLGQRIYQYIQSRFYRSPEVLLGMPYDLAIDMWSLGCILVEMHTGEPLFSGANEVLLFLFLIQVDQMNKIVEVLGIPPAHILDQAPKARKFFEKLPDGTWNLKKTKDGKREYKPPGTRKLHNILGVETGGPGGRRAGESGHTVADYLKFKDLILRMLDYDPKTRIQPYYALQHSFFKKTADEGTNTSNSVSTSPAMEQSQ

SEQ ID NO: 88690 - protein, 77 aa, Homo sapiens
MATPTQTPTKAPEEPDPFYYDYNTVQTVGMTLATILFLLGILIVISKKVKCRKADSSPTCKSCKSELPSSAPGGGGV

SEQ ID NO: 88691 - protein, 212 aa, Homo sapiens; identical to SEQ ID NO: 53783

SEQ ID NO: 88692 - protein, 115 aa, Homo sapiens
MVYDDTSKKWVPIKPGQQGFSRINIYHNTASNTFRVVGVKLQDQQVVINYSIVKGLKYNQATPTFHQWRDARQVYGLNFASKEEATTFSNAMLFALNIMNSQEGGPSSQRQVQNG

SEQ ID NO: 88693 - protein, 267 aa, Homo sapiens
MSTTGWEAETFKEQGNAYYAKKDYNEAYNYYTKAIDMCPKNASYYGNRAATLMMLGRFREALGDAQQSVRLDDSFVRGHLREGKCHLSLGNAMAACRSFQRALELDHKNAQAQQEFKNANAVMEYEKIAETDFEKRDFRKVVFCMDRALEFAPACHRFKILKAECLAMLGRYPEAQSVASDILRMDSTNADALYVRGLCLYYEDCIEKAVQFFVQALRMAPDHEKACIACRNAKALKAKKEDGNKAFKEGNYKLAYELYTEALGIDP

SEQ ID NO: 88694 - protein, 167 aa, Homo sapiens
  MOD_RES (1)..(1): Any amino acid
XLTEEFLNAPLPSIKEIKTDAHYSILSLLLCLSDSPSNSSYVETPRNKEVEKKDDFDWGKYLMEDEEMDIGPYMDTPNWSEESEEENDQQPLSREDSGIQVDRTPLEEQDQNRKLDPCISWKDDRSWLEHHVVHQYWTARPSQFPHSLHLHSNLAAVWDQHLYSSDP

SEQ ID NO: 88695 - protein, 2912 aa, Homo sapiens
MSSPRLIPLWKDLKLLLNDTINKSKQPSEDPKNCLIVLSDRSQVLFKESRYPQNMPCVCYYFSDAHFFASLSWVTSNTKEIQAVAWMKSKTEDMVEKRTFSMTERLPPIQSMVHAGSFHILVVYCGDLILRLFGDHFRAFKPLGKVPCRFNISCLCYDPEMKMLLSGILGAVVTWVIELGGTGLQIAHMVSMPGDELVQDIVLNGPSGSLLALCETVVRVLMHQGKGQLGEVKRFTSTSSGSSITCCFTCFDQGFLYAGNQAGEIQVWSLQQGHPLHSFQAHQSGVICIRSRPEAHTLLTAGSDSLIKEWNLTSGSLLRRLELGEELYRLQFIDSITFFCQTAHSFSLHRLPCFYSLFNVCGSAPQQLRRVCCGNNWFRILCTTEDGLLRFVSPVTGDLLVITWPFSILDQAVDWAYDPGKEELFVATGSSEVLVFDTTRCPCPAKYLLGTSPNSQDFVQCLAYGHFNLGRGLEGLIFSGHQSGVIRVLSQHSCARLEKFMHFGAVLALSTLSGGIFGGQGNSLLCSYGMDDYVHLSEAVLDGVKVQLRPLASILSSCHLTHLILLPKSVGAITETNCLRLWKFHDFLSSGSQNGLKFIETLPLHLCAITSFDVCLSLSLFVTGSADGSVRIWDFHGRLIGILDSSLHFGPVCFANDRGDLLVTFNQSLYLVSCLKLLPPALLTRLSFMSISDEVLEVPKPFIPSFFFSFETMFVPKYIYPGQAQQKLVGLEKLVNNRAIAFDHSVPHVIEEDEEGSPVLLRSSMHYSLQDMEDWMQVSKRYQCHYVLPPQLQLTSWDGLNPYQILRYYFGHGREWLFAPDCYIPNSVIRARLWPEGTPIYLQCNLHAPQRELEWDRSQEFFFWHSRVRAISNTEYPKNKEEDEHFLEMRLSKDVTYSVLTDGANRSWLGRKMSEITINSMIETMLNIMVHASLLKYQCCVGALGQIFASYQVSPALRSETARRLLNDTTNSNPLIRELAWEGLKRLGMITHLFAMPLAQGLMDKDERVRIKTLSLMAEIGIHSRTSLLQLTQKQETFREMQQQMIGEEPLDHLLGMRATDLQILSTQVEQRLNENLTLSHRDEKPAFSLDVSMPSELKSSLKPPTVSEESEVAIKPSKGQRRGQAGVKKHSQKWLRGLKKTKERDSKQMSTEPGLLEDESGTEAAPIEMEEASVYSQWSSSTSVIKLSKDVDSQEKDISKDHIALTLKRLQKIRDKRDKKATAQKLKKKHKKKGKEAKVINEETTPPVMEQPVTKKVKIQGRGASGISGRRSTAGDGSSWRDDLCRLMALRISGSQTKMSENLNAELVTFAQEMLVDRHPSWELFQEICPLLKKESKVLLEDLDWDVVPPEKKPIFIQEGAIREDMIQGVTQEVIRHKEVMPREEEQAQKKARDMLGLEETQVILKKGKKVIFLEPGNVTMGKEISKKEEKKTFQKSPKQGRKAVQKERKVGKIKREMTKEERDMSEEVEEMATLEEKVVKQEGKLVMIERTPSWQDWKKAWDEWKQVHGETRKSWKAWKEEWEKRLLQEEEKLHQAGEKLSPEEEMLQEDKKLKWEEWKQVWENMLSSKSKEQQYKDEEEVTLEEEVSREGEEKEQQVTEEQRHIQEEHKWARIHRKRARAEKKRAQEERKLAQEEEKLAQEERQLAQEERKLAQAYVKITQDDREMAQAEGKFAQKEETLAQRGEKLSQEAEKLAQKRKKLAKKWEKVAREEEKLAKKGGKLAEVKNILAQKVEELPQREQNLDWQEKELAQELEELEWDMEELSWKEEELNQEEGKLVEEKKKLAEEEEALAWQREKLSEEETKLAQEEELLIQEKEKLAQHKEKMPEEEERLGRKREQLIEKKMKLAQKRERWINSMEELTKNKMILYQKKNLAQEKKNLAQEKEKLAQRKENLLYNKERLTHSKKQLVQVKNKLGMFNKILAQVEEKLTQEKETVIKKKEKLAETEKKLVQVEDSLAKKQEKLAQEKMKLALEKAMVQGKKRLRGELDIAKEEKALNLEMKRLAEEKMRLVEGKETLSKGETPETSRQRKMTQVEQELFERKLSLEEKILLHEDRILAMEESEIAKGKLEFTRGQRIFVQGQRKLAKASRKLIKKRESLSKEPAKLNKILKALQKLTRDERKLTQEEIKMTKMKRALFVKERRLSIEQSKLDIKEWDFSEKRSELTKDEKKLARKQRKLANKMRRMINKEEKMTEEESKLARKHSEVILDDEEEGGIEEEEVIPFLKRRWRKRKEAKRGDKPKEKFSSQVDEVESEEHFSEEMESLLDELEKQESLSSEEEEEREEEEEREEEEEREEEEERKEEEEGEEKQVEKEEEEKKKKKKEKKKEEVQEKEEVFEEKEEIMSEEETESLSDEEEEEESCSLEEEVDREKEILKKEKQFKLQEQRRKSLRGRERVLSILRGVPHGKGRAIRLGVLKSPLKKLMSTALEMKEKTPVPVPEKQISWEDKKATVVEIPRKFLGTMDKEREVMGKYEPIPPHVLGTVLESQAQDLKTPFMSHILRRTVEAEELQHKPLGAWWKWFLQHPPLMGQTEVQLPLSQIPAKEQHADVSLSDVEWIRHVLERMEAGEQLSRDGFHRLCQLLKDLASKGNLEWLHLAKHEAIVYRHRQALESQDTRISSRQSMSPKYLKVIPPIKAKEKESWPKPLAVPTQKSPLATKRIPDPRAKNWHLLGEPYRSERAQQISIAHKEMEMQYFYPATRDIFPSAHASVEKQTLALMFQKDFWDFKDKRRFPKLPKLEKKTQPISKKKEELPLWETFVALYHVLRMLQQRYPKDSTAWMEQFYQLMDLYQLKSPRIQKLLQELLMREEPQPQEIIYEEALKATELVPGERLFCCLFCGSSHTPRSPQEFQGAVPLPWQNCVRTILPVGIARYGILELAWKSLPEADLHLTKALTHTVAPTL

SEQ ID NO: 88696 - protein, 828 aa, Homo sapiens
MAEAEFKDHSTAMDTEPNPGTSSVSTTTSSTTTTTITTSSSRMQQPQISVYSGSDRHAVQVIQQALHRPPSSAAQYLQQMYAAQQQHLMLHTAALQQQHLSSSQLQSLAAVQASLSSGRPSTSPTGSVTQQSSMSQTSLIFTPATTVAAVQSDIPVVSSSSSSSCQSAATQVQNLTLRSQKLGVLSSSQNGPPKSTSQTQSLTICHNKTTVTSSKISQRDPSPESNKKGESPSLESRSTAVTRTSSIHQLIAPASYSPIQPHSLIKHQQIPLHSPPSKVSHHQLILQQQQQQIQPITLQNSTQDPPPSQHCIPLQNHGLPPAPSNAQSQHCSPIQSHPSPLTVSPNQSQSAQQSVVVSPPPPHSPSQSPTIIIHPQALIQPHPLVSSALQPGPNLQQSTANQVQATAQLNLPSHLPLPASPVVHIGPVQQSALVSPGQQIVSPSHQQYSSLQSSPIPIASPPQMSTSPPAQIPPLPLQSMQSLQVQPEILSQGQVLVQNALVSEEELPAAEALVQLPFQTLPPPQTVAVNLQVQPPAPVDPPVVYQVEDVCEEEMPEESDECVRMDRTPPPPTLSPAAITVGRGEDLTSEHPLLEQVELPAVASVSASVIKSPSDPSHVSVPPPPLLLPAATTRSNSTSMHSSIPSIENKPPQAIVKPQILTHVIEGFVIQEGLEPFPVSRSSLLIEQPVKKRPLLDNQVINSVCVQPELQNNTKHADNSSDTEMEDMIAEETLEEMDSELLKCEFCGKMGYANEFLRSKRFCTMSCAKRYNVSCSKKFALSRWNRKPDNQSLGHRGRRPSGPDGAAREHILRQKKTWLLMKILCHLL

SEQ ID NO: 88697 - protein, 191 aa, Homo sapiens
MSLALRSELVVDKTKRKKRRELSEEQKQEIKDAFELFDTDKDEAIDYHELKVAMRALGFDVKKADVLKILKDYDREATGKITFEDFNEVVTDWILERDPHEEILKAFKLFDDDDSGKISLRNLRRVARELGENMSDEELRAMIEEFDKDGDGEILKNILLLPIWSRCLSLNREFFSEVNQEEFIAIMTGDI

SEQ ID NO: 88698 - protein, 28 aa, Homo sapiens
MNTFQASVSFQDVTVEFSQEEWQHMGPV

SEQ ID NO: 88699 - protein, 136 aa, Homo sapiens
MAEDKETKHGGHKNGRKGGLSGTSFFTWFMVIALLGVWTSVAVVWFDLVDYEEVLGKLGIYDADGDGDFDVDDAKVLLVKKKKPKLLNKFDKTIKAELDAAEKLRKRGKIEEAVNAFKELVRKYPQSPRARYGKAQ

SEQ ID NO: 88700 - protein, 110 aa, Homo sapiens
METGLGAPLFKAWLLISVWGLGVDPSLQIDVLTELELGESTTGVRQVPGLHNGTKAFLFQDTPRSIKASTATAEQFFQKLRNKHEFTILVTLKQTHLNSGVILSIHHLDH

SEQ ID NO: 88701 - protein, 130 aa, Homo sapiens
MFLLCLTGNPLREEDRLGNHASDICGGSELDAVKTDSSLPSPSSLWSASHPSSSKKMDGYILSLVQKKTHPVRTNKPRTSVNADPTKGLLRNGSVCVRAPGGVSQGNSVNLKNSKQACLPSGGIPSLNNG

SEQ ID NO: 88702 - protein, 408 aa, Homo sapiens
MGTPKPRILPWLVSQLDLGQLEGVAWVNKSRTRFRIPWKHGLRQDAQQEDFGIFQAWAEATGAYVPGRDKPDLPTWKRNFRSALNRKEGLRLAEDRSKDPHDPHKIYEFVNSGVGDFSQPDTSPDTNGGGSTSDTQEDILDELLGNMVLAPLPDPGPPSLAVAPEPCPQPLRSPSLDNPTPFPNLGPSENPLKRLLVPGEEWEFEVTAFYRGRQVFQQTISCPEGLRLVGSEVGDRTLPGWPVTLPDPGMSLTDRGVMSYVRHVLSCLGGGLALWRAGQWLWAQRLGHCHTYWAVSEELLPNSGHGPDGEVPKDKEGGVFDLGPFIVGCAHVPQGLGRNGPGRGCLLPGEYCGPAHFQQPPTLPHLRPVQGLPAGLGGGHGFPGPWGELSPRSSWCASNPPVPHHLNQ

SEQ ID NO: 88703 - protein, 640 aa, Homo sapiens
MMLPYPSALGDQYWEEILLPKNGENVETMKKLTQNHKAKGLPSNDTDCPQKKEGKAQIVVPVTFRDVTVIFTEAEWKRLSPEQRNLYKEVMLENYRNLLSLDGVSLLLPRLECNRAISAHHNLCLPGSSNSPATASRVVGITAEPKPEIYTCSSCLLAFSCQQFLSQHVLQIFLGLCAENHFHPGNSSPGHWKQQGQQYSHVSCWFENAEGQERGGGSKPWSARTEERETSRAFPSPLQRQSASPRKGNMVVETEPSSAQRPNPVQLDKGLKELETLRFGAINCREYEPDHNLESNFITNPRTLLGKKPYICSDCGRSFKDRSTLIRHHRIHSMEKPYVCSECGRGFSQKSNLSRHQRTHSEEKPYLCRECGQSFRSKSILNRHQWTHSEEKPYVCSECGRGFSEKSSFIRHQRTHSGEKPYVCLECGRSFCDKSTLRKHQRIHSGEKPYVCRECGRGFSQNSDLIKHQRTHLDEKPYVCRECGRGFCDKSTLIIHERTHSGEKPYVCGECGRGFSRKSLLLVHQRTHSGEKHYVCRECRRGFSQKSNLIRHQRTHSNEKPYICRECGRGFCDKSTLIVHERTHSGEKPYVCSECGRGFSRKSLLLVHQRTHSGEKHYVCRECGRGFSHKSNLIRHQRTH

SEQ ID NO: 88704 - protein, 151 aa, Homo sapiens
AAAALNGVDRRSLQRSARLALEVLERAKRRAVDWHALERPKGCMGVLAREAPHLEKQPAAGPQRVLPGEKYYSSVPEEGGATHVYRYHRGESKLHMCLDIGNGQAENISKDLYIEVYPGTYSVTVGSNDLTKKTHVVAVDSGQSVDLVFPV

SEQ ID NO: 88705 - protein, 871 aa, Homo sapiens
MAAPAEPCAGQGVWNQTEPEPAATSLLSLCFLRTAGVWVPPMYLWVLGPIYLLFIHHHGRGYLRMSPLFKAKMVLGFALIVLCTSSVAVALWKIQQGTPEAPEFLIHPTVWLTTMSFAVFLIHTERKKGVQSSGVLFGYWLLCFVLPATNAAQQASGAGFQSDPVRHLSTYLCLSLVVAQFVLSCLADQPPFFPEDPQQSNPCPETGAAFPSKATFWWVSGLVWRGYRRPLRPKDLWSLGRENSSEELVSRLEKEWMRNRSAARRHNKAIAFKRKGGSGMKAPETEPFLRQEGSQWRPLLKAIWQVFHSTFLLGTLSLIISDVFRFTVPKLLSLFLEFIGDPKPPAWKGYLLAVLMFLSACLQTLFEQQNMYRLKVLQMRLRSAITGLVYRKVLALSSGSRKASAVGDVVNLVSVDVQRLTESVLYLNGLWLPLVWIVVCFVYLWQLLGPSALTAIAVFLSLLPLNFFISKKRNHHQEEQMRQKDSRARLTSSILRNSKTIKFHGWEGAFLDRVLGIRGQELGALRTSGLLFSVSLVSFQVSTFLVALVVFAVHTLVAENAMNAEKAFVTLTVLNILNKAQAFLPFSIHSLVQARVSFDRLVTFLCLEEVDPGAVDSSSSGSAAGKDCITIQSATFAWSQESPPCLHRINLTVPQGCLLAVVGPVGAGKSSLLSALLGELSKVEGFVSIEGAVAYVPQEAWVQNTSVVENVCFGQELDPPWLERVLEACALQPDVDSFPEGIHTSIGEQGMNLSGGQKQRLSLARAVYRKAAVYLLDDPLAALDAHVGQHVFNQVIGPGGLLQGTKQNLGPAPRTPEAPLQAGGPSLDARGPSSQSLRRTVPLQKPRQRFLWMTLTGQDGQQERTASNTAG

SEQ ID NO: 88706 - protein, 128 aa, Homo sapiens
  MOD_RES (1)..(1): Any amino acid
XNLYHPGALTGTPPSLPPGPSAQSPQSSFPQPAAVYAIHHQQLPHGFTNMAHVTQAHVQTGITAAPPPHPGAPHPPQVMLLHPPQSHGGPPQGAVPQSGVPALSASTPSPYPYIGHPQALSDPDCLLT

SEQ ID NO: 88707 - protein, 465 aa, Homo sapiens
MEKILFYLFLIGIAVKAQICPKRCVCQILSPNLATLCAKKGLLFVPPNIDRRTVELRLADNFVTNIKRKDFANMTSLVDLTLSRNTISFITPHAFADLRNLRALHLNSNRLTKITNDMFSGLSNLHHLILNNNQLTLISSTAFDDVFALEELDLSYNNLETIPWDAVEKMVSLHTLSLDHNMIDNIPKGTFSHLHKMTRLDVTSNKLQKLPPDPLFQRAQVLATSGIISPSTFALSFGGNPLHCNCELLWLRRLSREDDLETCASPPLLTGRYFWSIPEEEFLCEPPLITRHTHEMRVLEGQRATLRCKARGDPEPAIHWISPEGKLISNATRSLVYDNGTLDILITTVKDTGAFTCIASNPAGEATQIVDLHIIKLPHLLNSTNHIHEPDPGSSDISTSTKSGSNTSSSNGDTKLSQDKIVVAEATSSTALLKFNFQRNIPGIRMFQIQYNGTYDDTLVYRGWS

SEQ ID NO: 88708 - protein, 445 aa, Homo sapiens
MFKKLKQKISEEQQQLQQALAPAQASSNSSTPTRMRSRTSSFTEQLDEGTPNRENASTHASKSPDSVNGSEPSIPQSGDTQSFAQKLQLRVPSVESLFRSPIKESLFRSSSKESLVRTSSRESLNRLDLDSSTASFDPPSDMDSEAEDLVGNSDSLNKEQLIQRLRRMERSLSSYRGKYSEGILSQSQDKSLRRIAELRELQMDQQAKKHLQEEFDASLEEKDQYISVLQTQVSLLKQRLRNGPMNVDVLKPLPQLEPQAEVFTKEENPESDGEPVVEDGTSVKTLETLQQRVKRQENLLKRCKETIQSHKEQCTLLTSEKEALQEQLDERLQELEKIKDLHMAEKTKLITQLRDAKNLIEQLEQDKGMVIAETKRQMHETLEMKEEEIAQLRSRIKQMTTQGEELREQKEKSERAAFEELEKALSTAQKTEEARRKLKAEMDEQ

SEQ ID NO: 88709 - protein, 122 aa, Homo sapiens
  MOD_RES (1)..(1): Any amino acid
XLLIAGTNSSDLQQILSLLESNKDLLLTSSYLSDSGSTGEHTKSLVTQYLNATGNRWCSWSLSQARLLTSFLPAQLLRLYQLMLFTLPGTPVFSYGDEIGLDAAALPGQPHEGLLLRFPYAA

SEQ ID NO: 88710 - protein, 167 aa, Homo sapiens
MVNGKPKKVRKPRTIYSSYQLAALQRRFQKAQYLALPERAELAAQLGLTQTQVKIWFQNRRSKFKKLYKNGEVPLEHSPNNSDSMACNSPPSPALWDTSSHSTPAPARSQLPPPLPYSASPSYLDDPTNSWYHAQNLSGPHLQQQPPQPATLHHASPGPPPNPGAVY

SEQ ID NO: 88711 - protein, 443 aa, Homo sapiens
MLASGLLLVALLACLTVMVLMSVWQQRKSRGKLPPGPTPLPFIGNYLQLNTEHICDSIMKVSQGVAFSNGERAKQLLRFAIATLRDFGVGKRGIEERIQEESGFLIEAIRSTHGANIDPTFFLSRTVSNVISSIVFGDRFDYEDKEFLSLLSMMLGIFQFTSTSTGQLYEMFSSVMKHLPGPQQQAFKLLQGLEDFIAKKVEHNQRTLDPNSPQDFIDSFLIHMQEEEKNPNTEFYLKNLMMSTLNLFIAGTETVSTTLRYGFLLLMKHPEVEAKVHEEIDRVIGKNRQPKFEDRTKMPYMEAVIHEIQRFGDVIPMSLARRVKKDTKFRDFFLPKGTEVFPMLGSVLRDPSFFSNPQDFNPQHFLDDKGQFKKSDAFVPFSIGKRNCFGEGLARMELFLFFTTVMQNFRLKSSQSPKDIDVSPKHVVFATIPRNYTMSFLPR

SEQ ID NO: 88712 - protein, 346 aa, Homo sapiens
MEANGLGPQGFPELKNDTFLRAAWGEETDYTPVWCMRQAGRYLPEFRETRAAQDFFSTCRSPEACCELTLQALGMEVTMVPGKGPSFPEPLREEQDLERLRDPEVVASELGYVFQAITLTRQRLAGRVPLIGFAGAPWTLMTYMVEGGGSSTMAQAKRWLYQRPQASHQLLRILTDALVPYLVGQVVAGAQALQLFESHAGHLGPQLFNKFALPYIRDVAKQVKARLREAGLAPVPMIIFAKDGHFALEELAQAGYEVVGLDWTVAPKKARECVGKTVTLQGNLDPCALYASEEEIGQLVKQMLDDFGPHRYIANLGHGLYPDMDPEHVGAFVDAVHKHSRLLRQN

SEQ ID NO: 88713 - protein, 156 aa, Homo sapiens
MTAVHAGNINFKWDPKSLEIRTLAVERLLEPLVTQVTTLVNTNSKGPSNKKRGRSKKAHVLAASVEQATENFLEKGDKIAKESQFLKEELVAAVEDVRKQGDLMKAAAGEFADDPCSSVKRGNMVRAARALLSAVTRLLILADMADVYKLLVQLKV

SEQ ID NO: 88714 - protein, 174 aa, Homo sapiens
MADAAATAGAGGSGTRSGSKQSTNPADNYHLARRRTLQVVVSSLLTEAGFESAEKASVETLTEMLQSYISEIGRSAKSYCEHTARTQPTLSDIVVTLVEMGFNVDTLPAYAKRSQRMVITAPPVTNQPVTPKALTAGQNRPHPPHIPSHFPEFPDPHTYIKTPVSDEALGLRVV

SEQ ID NO: 88715 - protein, 211 aa, Homo sapiens
  MOD_RES (1)..(1): Any amino acid
XLVGPQDATHCSPGLSCRLWDSDILCLPGDIVPAPGPVLAPTHLQTELVLRCQKETDCDLCLRVAVHLAVHGHWEEPEDEEKFGGAADSGVEEPRNASLQAQVVLSFQAYPTARCVLLEVQVPAALVQFGQSVPRYEKELNHTQQLPALPWLNVSADGDNVHLVLNVSEEQHFGLSLYWNQVQGPPKPRWHKNLTGPQIITLNHTDLVPCL

SEQ ID NO: 88716 - protein, 113 aa, Homo sapiens
MSHQTGIQEQLVIGSYSQPSDSWDKDYDSFVLPLLEDKQPCYILFRLDSQNAQGYEWIFIAWSPDHSHVRQKMLYAATRATLKKEFGGGHIKDEVFGTVKEDVSLHGYKKYLL

SEQ ID NO: 88717 - protein, 258 aa, Homo sapiens
MSHLPGLELRREAPPLLGPLLSPFPLPAGSWHRQMLRSSLRFPITNSAGFKISKVIVVGDLSVGKTCLINRFCKDTFDKNYKATIGVDFEMERFEVLGIPFSLQLWDTAGQERFKCIASTYYRGAQAIIIVFNLNDVASLEHTKQWLADALKENDPSSVLLFLVGSKKDLSTPAQYALMEKDALQVAQEMKAEYWAVSSLTGENVREFFFRVAALTFEANVLAELEKSGARRIGDVVRINSDDSNLYLTASKKKPTCC

SEQ ID NO: 88718 - protein, 240 aa, Homo sapiens
MFVPCGESAPDLAGFTLLMPAVSVGNVGQLAMDLIISTLNMSKIGYFYTDCLVPMVGNNPYATTEGNSTELSINAEVYSLPSRKLVALQLRSIFIKYKSKPFCEKLLSWVKSSGCARVIVLSSSHSYQRNDLQLRSTPFRYLLTPSMQKSVQNKIKSLNWEEMEKSRCIPEIDDSEFCIRIPGGGITKTLYDESCSKEIQMAVLLKFVSEGDNIPDALGLVEYLNEWLQILKPLVSSIIA

SEQ ID NO: 88719 - protein, 193 aa, Homo sapiens
MDEDGLPLMGSGIDLTKVPAIQQKRTVAFLNQFVVHTVQFLNRFSTVCEEKLADLSLRIQQIETTLNILDAKLSSIPGLDDVTVEVSPLNVTSVTNGAHPEATSEQPQNSTQDSGLQESEVSAENILTVAKDPRYARYLKMVQVGVPVMAIRNKMISEGLDPDLLERPDAPVPDGESEKTVEESSDSESSFSD

SEQ ID NO: 88720 - protein, 104 aa, Homo sapiens
MFSSVAHLARANPFNTPHLQLVHDGLGDLRSSSPGPTGQPRRPRNLAAAAVEEQYSCDYGSGRFFILCGLGGIISCGTTHTALVPLDLVKCRMQVCFACWTRAY

SEQ ID NO: 88721 - protein, 622 aa, Homo sapiens
MDGAAAVPEPSEDPTSKDPQSPEGQAQARIRNLEDSLFTLQSQLQLLQSASTGAQHKPSGRPSWRRQGHRPLSQSIVEAGSVGQTDLNKRASLPAGLVGTPPESPSEPREDVLGFLPGPRQVPGAAGDSSEANGPCPSPIPTPEQGLSQRAVPSEGRVGEAKGGGVVSVVWEGLRATEDCATGATGPELEAKVEEVVLEAIGDRKGAGSLELPAWVKEDRGIVEVVWEGVGGSDAEAMGEIGRVPEVVQTSSPRLQERLEAAASIEGEDVPQGSPEGDGQGGSGGEEGSFIWVERVTLSEEWEELLVEGLEGPEVAGRERGDESPLGAEGAKTGGGEETWEAEKRKAEESMGIGSEEKPGTGRDEAEMSPVVERKGGEKKLELESRGSAEKLGTEREGGEEPLGIERKVEGHLRAEKEGDEEKRGAEEEEVEEPLGVEKKGGEEEPEATKEPLEAERKGGEETLEAEKRGGEESLETEKTQGTEGDLNLEQGSREGSESQAEEMNEAGPPLEANTETRPEKEGPQPQEKPVGALEEEGVKPQTAAEGQGPLGDATPLLAETPAPEQPAECQPLLQGEGPSANPSAHPVPTYAPARQPEPSAPTEGEEASGPKQKTCQCCAVM

SEQ ID NO: 88722 - protein, 73 aa, Homo sapiens
MTVHDKFLALGTHYGKVYLLDVQGNITQKFDVSPVKINQISLDESGEHMGVCSEDGKVQVFGLYSGEEFHETF

SEQ ID NO: 88723 - protein, 109 aa, Homo sapiens
MSTRSVSSSSYRRMFGGPGTASRPSSSRSYVTTSTRTYSLGSALRPSTSRSLYASSPGGVYATRSSAVRLRSSVPGVRLLQDSVDFSLADAINTEFKNTRTNEKVELQE

SEQ ID NO: 88724 - protein, 125 aa, Homo sapiens
MVLPQGLLTFRDVAIEFSQEEWKCLDPAQRTLYRDVMLENYRNLVSLGHDLILFFLFPRWSFCSCCPGWSAVAQSRLTTTSASRVQAILPPQPQKLLELQVFFLNVRSRNYHQKRRVIQEKYSRQ

SEQ ID NO: 88725 - protein, 127 aa, Homo sapiens
MPSARGKSKSKAPITFGDLAIYFSQEEWEWLSPIQKDLYEDVMLENYRNLVSLGLSFRRPNVITLLEKGKAPWMVEPVRRRRAPELTEASPEAKEVPAPCLYSLLNQEPIEPLLFINYPLKYLFIAI

SEQ ID NO: 88726 - protein, 217 aa, Homo sapiens
MPGLTSLIGIQEKGHITAGSNKTMVVSGAAGACGSVAGQIGHFLGCSRVVGICGTHEKCILLTSELGFDAAINYKKDNVAEQLRESCPAGVDVYFDNVGGNISDTVISQMNENSHIILCGQISQYNKDVPYPPPLSPAIEAIQKERNITRERFLVLNYKDKFEPGILQLSQWFKEGKLKIKETVINGLENMGAAFQSMMTGGNIGKQIVCISEEISL

SEQ ID NO: 88727 - protein, 129 aa, Homo sapiens
  MOD_RES (1)..(1): Any amino acid
XAVAGTESAQGPPGPAASLELWLNKATDPSMSEQDWSAIQNFCEQVNTDPNGPTHAPWLLAHKIQSPQEKEALYALTCPHRLEAGLALVPAQSPASDYQPGGEPGTTGFPPSPGGPVSVQVLEMCMNHC

SEQ ID NO: 88728 - protein, 1245 aa, Homo sapiens
MLTMSVTLSPLRSQDLDPMATDASPMAINMTPTVEQGEGEEAMKDMDSDQQYEKPPPLHTGADWKIVLHLPEIETWLRMTSERVRDLTYSVQQDSDSKHVDVHLVQLKDICEDISDHVEQIHALLETEFSLKLLSYSVNVIVDIHAVQLLWHQLRVSVLVLRERILQGLQDANGNYTRQTDILQAFSEETKEGRLDSLTEVDDSGQLTIKCSQNYLSLDCGITAFELSDYSPSEDLLSGLGDMTSSQVKTKPFDSWSYSEMEKEFPELIRSVGLLTVAADSISTNGSEAVTEEVSQVSLSVDDKGGCEEDNASAVEEQPGLTLGVSSSSGEALTNAAQPSSETVQQESSSSSHHDAKNQQPVPCENATPKRTIRDCFNYNEDSPTQPTLPKRGLFLKEETFKNDLKGNGGKRQMVDLKPEMSRSTPSLVDPPDRSKLCLVLQSSYPNSPSAASQSYECLHKVGNGNLENTVKFHIKEISSSLGRLNDCYKEKSRLKKPHKTSEEVPPCRTPKRGTGSGKQAKNTKSSAVPNGELSYTSKAIEGPQTNSASTSSLEPCNQRSWNAKLQLQSETSSSPAFTQSSESSVGSDNIMSPVPLLSKHKSKKGQASSPSHVTRNGEVVEAWYGSDEYLALPSHLKQTEVLALKLENLTKLLPQKPRGETIQNIDDWELSEMNSDSEIYPTYHVKKKHTRLGRVSPSSSSDIASSLGESIESGPLSDILSDEESSMPLAGMKKYADEKSERASSSEKNESHSATKSALIQKLMQDIQHQDNYEAIWEKIEGFVNKLDEFIQWLNEAMETTENWTPPKAEMDDLKLYLETHLSFKLNVDSHCALKEAVEEEGHQLLELIASHKAGLKDMLRMIASQWKELQRQIKRQHSWILRALDTIKAEILATDVSVEDEEGTGSPKAEVQLCYLEAQRDAVEQMSLKLYSEQYTSSSKRKEEFADMSKVHSVGSNGLLDFDSEYQELWDWLIDMESLVMDSHDLMMSEEQQQHLYKRYSVEMSIRHLKKTELLSKVEALKKGGVLLPNDLLEKVDSINEKWELLGKTLGEKIQDTMAGHSGSSPRDLLSPESGSLVRQLEVRIKELKGWLRDTELFIFNSCLRQEKEGTMNTEKQLQYFKSLCREIKQRRRGVASILRLCQHLLDDRETCNLNADHQPMQLIIVNLERRWEAIVMQAVQWQTRLQKKMGKESIRLAATQGWPHPPALGWPLVPSRLSLPFITLTSPKMNLPSKCVFSTQAL

SEQ ID NO: 88729 - protein, 318 aa, Homo sapiens
MSDHGDVSLPPEDRVRALSQLGSAVEVNEDIPPRRYFRSGVEIIRMASIYSEEGNIEHAFILYNKYITLFIEKLPKHRDYKSAVIPEKKDTVKKLKEIAFPKAEELKAELLKRYTKEYTEYNEEKKKEAEELARNMAIQQELEKEKQRVAQQKQQQLEQEQFHAFEEMIRNQELEKERLKIVQEFGKVDPGLGGPLVPDLEKPSLDVFPTLTVSSIQPSDCHTTVRPAKPPVVDRSLKPGALSNSESIPTIDGLRHVVVPGRLCPQFLQLASANTARGVETCGILCGKLMRNEFTITHVLIPKQSAGSDYCNTENEEE

SEQ ID NO: 88730 - protein, 1545 aa, Homo sapiens
MSLVLNDLLICCRQLEHDRATERKKEVEKFKRLIRDPETIKHLDRHSDSKQGKYLNWDAVFRFLQKYIQKETECLRIAKPNVSASTQASRQKKMQEISSLVKYFIKCANRKLFSVYFRLYLKPSQDVHRVLVARIIHAVTKGCCSQTDGLNSKFLDFFSKAIQCARQEKSSSGLNHILAALTIFLKTLAVNFRIRVCELGDEILPTLLYIWTQHRLNDSLKEVIIELFQLQIYIHHPKGAKTQEKGAYESTKWRSILYNLYDLLVNEISHIGSRGKYSSGFRNIAVKENLIELMADICHQVFNEDTRSLEISQSYTTTQRESSDYSVPCKRKKIELGWEVIKDHLQKSQNDFDLVPWLQIATQLISKYPASLPNCELSPLLMILSQLLPQQRHGERTPYVLRCLTEVALCQDKRSNLESSQKSDLLKLWNKIWCITFRGISSEQIQAENFGLLGAIIQGSLVEVDREFWKLFTGSACRPSCPAVCCLTLALTTSIVPGTVKMGIEQNMCEVNRSFSLKESIMKWLLFYQLEGDLENSTEVPPILHSNFPHLVLEKILVSLTMKNCKAAMNFFQSVPECEHHQKDKEELSFSEVEELFLQTTFDKMDFLTIVRECGIEKHQSSIGFSVHQNLKESLDRCLLGLSEQLLNNYSSEITNSETLVRCSRLLVGVLGCYCYMGVIAEEEAYKSELFQKAKSLMQCAGESITLFKNKTNEEFRIGSLRNMMQLCTRCLSNCTKKSPNKIASGFFLRLLTSKLMNDIADICKSLASFIKKPFDRGEVESMEDDTNGNLMEVEDQSSMNLFNDYPDSSVSDANEPGESQSTIGAINPLAEEYLSKQDLLFLDMLKFLCLCVTTAQTNTVSFRAADIRRKLLMLIDSSTLEPTKSLHLHMYLMLLKELPGEEYPLPMEDVLELLKPLSNVCSLYRRDQDVCKTILNHVLHVVKNLGQSNMDSENTRDAQGQFLTVIGAFWHLTKERKYIFSVRMALVNCLKTLLEADPYSKWAILNVMGKDFPVNEVFTQFLADNHHQVRMLAAESINRLFQDTKGDSSRLLKALPLKLQQTAFENAYLKAQEGMREMSHSAENPETLDEIYNRKSVLLTLIAVVLSCSPICEKQALFALCKSVKENGLEPHLVKKVLEKVSETFGYRRLEDFMASHLDYLVLEWLNLQDTEYNLSSFPFILLNYTNIEDFYRSCYKVLIPHLVIRSHFDEVKSIANQIQEDWKSLLTDCFPKILVNILPYFAYEGTRDSGMAQQRETATKVYDMLKSENLLGKQIDHLFISNLPEIVVELLMTLHEPANSSASQSTDLCDFSGDLDPAPNPPHFPSHVIKATFAYISNCHKTKLKSILEILSKSPDSYQKILLAICEQAAETNNVYKKHRILKIYHLFVSLLLKDIKSGLGGAWAFVLRDVIYTLIHYINQRPSCIMDVSLRSFSLCCDLLSQVCQTAVTYCKDALENHLHVIVGTLIPLVYEQVEVQKQVLDLLKYLVIDNKDNENLYITIKLLDPFPDHVVFKDLRITQQKIKYSRGPFSLLEIIRKMGLW

SEQ ID NO: 88731 - protein, 36 aa, Homo sapiens
MRTKQVNLLITLVAVALFSFSCFSIYRITQTNSKGK

SEQ ID NO: 88732 - protein, 778 aa, Homo sapiens
MSSARTPLPTLNERDTEQPTLGHLDSKPSSKSNMIRGRNSATSADEQPHIGNYRLLKTIGKGNFAKVKLARHILTGKEVAVKIIDKTQLNSSSLQKLFREVRIMKVLNHPNIVKLFEVIETEKTLYLVMEYASGGEVFDYLVAHGRMKEKEARAKFRQIVSAVQYCHQKFIVHRDLKAENLLLDADMNIKIADFGFSNEFTFGNKLDTFCGSPPYAAPELFQGKKYDGPEVDVWSLGVILYTLVSGSLPFDGQNLKELRERVLRGKYRIPFYMSTDCENLLKKFLILNPSKRGTLEQIMKDRWMNVGHEDDELKPYVEPLPDYKDPRRTELMVSMGYTREEIQDSLVGQRYNEVMATYLLLGYKSSELEGDTITLKPRPSADLTNSSAPSPSHKVQRSVSANPKQRRFSDQAGPAIPTSNSYSKKTQSNNAENKRPEEDRESGRKASSTAKVPASPLPGLERKKTTPTPSTNSVLSTSTNRSRNSPLLERASLGQASIQNGKDSLTMPGSRASTASASAAVSAARPRQHQKSMSASVHPNKASGLPPTESNCEVPRPSTAPQRVPVASPSAHNISSSGGAPDRTNFPRGVSSRSTFHAGQLRQVRDQQNLPYGVTPASPSGHSQGRRGASGSIFSKFTSKFVRRNLNEPESKDRVETLRPHVVGSGGNDKEKEEFREAKPRSLRFTWSMKTTSSMEPNEMMREIRKVLDANSCQSELHEKYMLLCMHGTPGHEDFVQWEMEVCKLPRLSLNGVRFKRISGTSMAFKNIASKIANELKL

SEQ ID NO: 88733 - protein, 177 aa, Homo sapiens
MISFCPDCGKSIQAAFKFCPYCGNSLPVEEHVGSQTFVNPHVSSFQGSGSRPPTPKSSPQKTRKSPQVTRGSPQKTSCSPQKTRQSPQTLKRSRVTTSLEALPTGTVLTDKSGRQWKLKSFQTRDNQGILYEAAPTSTLTCDSGPQKQKFSLKLSTSGRSCTRPHCWPSLPAWVSVF

SEQ ID NO: 88734 - protein, 446 aa, Homo sapiens
MASCDLDRNSLCKKEEDTRSASPTIEAQGTSPAHDNIAFQDSTSKDKTILNLEAKEEPETIEEHKKEHASGDSVVSPLPVTTVKSVNLRQSENTSANEKEVEAEFLRLSLGFKCDWFTLEKRVKLEERSRDLAEENLKKEITNCLKLLESLTPLCEDDNQAQEIIKKLEKSIKFLSQCAARVASRAEMLGAINQESRVSKAVEVMIQHVENLKRMYAKEHAELEELKQVLLQNERSFNPLEDDDDCQIKKRSASLNSKPSSLRRVTIASLPRNIGNAGMVAGMENNDRFSRRSSSWRILGSKQSEHRPSLPRFISTYSWADAEEEKCELKTKDDSEPSGEETVERTRKPSLSEKKNNPSKWDVSSVYDTIASWATNLKSSIRKANKALWLSIAFIVLFAALMSFLTGQLFQKSVDAAPTQQEDSWTSLEHILWPFTRLRHNGPPPV

SEQ ID NO: 88735 - protein, 158 aa, Homo sapiens
MLARVTRKMLRHAKCFQRLAIFGSVRALHKDNRTATPQNFSNYESMKQDFKLGIPEYFNFAKDVLDQWTDKEKAGKKPSNPAFWWINRNGEEMRWSFEELGSLSRKFANILSEACSLQRGDRVILILPRVPEWWLANVACLRTGTVLIPGTTQLTQKD

SEQ ID NO: 88736 - protein, 633 aa, Homo sapiens
MVKLANPLYTEWILEAIQKIKKQKQRPSEERICHAVSTSHGLDKKTVSEQLELSVQDGSVLKVTNKGLASYKDPDNPGRFSSVKPGTFPKSAKGSRGSCNDLRNVDWNKLLRRAIEGLEEPNGSSLKNIEKYLRSQSDLTSTTNNPAFQQRLRLGAKRAVNNGRLLKDGPQYRVNYGSLDGKGAPQYPSAFPSSLPPVSLLPHEKDQPRADPIPICSFCLGTKESNREKKPEELLSCADCGSSGHPSCLKFCPELTTNVKALRWQCIECKTCSACRVQGRNADNMLFCDSCDRGFHMECCDPPLSRMPKDTEIKINIKQESADVNVIGNKDVVTEEDLDVFKQAQELSWEKIECESGVEDCGRYPSVIEFGKYEIQTWYSSPYPQEYARLPKLYLCEFCLKYMKSKNILLRHSKKCGWFHPPANEIYRRKDLSVFEEKLCQQKYNVSCIMIMPQHQRQGFGRFLIDFSYLLSRREGQAGSPEKPLSDLGRLSYLAYWKSVILEYLYHHHERHISIKAISRATGMCPHDIATTLQHLHMIDKRDGRFVIIRREKLILSHMEKLKTCSRANELDPDSLRWTPILISNAAVSEEEREAEKEAERLMEQASCWEKEEQEILSTRANSRQSPAKVQSK

SEQ ID NO: 88737 - protein, 273 aa, Homo sapiens
  MOD_RES (1)..(1): Any amino acid
XHLYGSLLYYLQIAQRPDEPDTLEAAKKTMWERLTAPEDVFSKLQRENIAIIESYGAALMEVVCRDACDGHEIGRMLALALLDRIVSVDKQQQWLLYLSNSGYLKVLVDSLVEDDRTLQSLLTPQPPLLKALYTYESKMAFLTRVAKIQQGALELLRSGVIVRLAQCQVYDMRPETDPQSMFGMRDPPMFIPTPVDRYRQILLPALQLCQVILTSSMAQHLQAAGQVLQFLISHSDTIQAILRCQDVSAGSLQELALLTGIISKAALPAFYIL

SEQ ID NO: 88738 - protein, 304 aa, Homo sapiens
MSSGLWSQEKVTSPYWEERIFYLLLQECSVTDKQTQKLLKVPKGSIGQYIQDRSVGHSRIPSAKGKKNQIGLKILEQPHAVLFVDEKDVVEINEKFTELLLAITNCEERFSLFKNRNRLSKGLQIDVGCPVKVQLRSGEEKFPGVVRFRGPLLAERTVSGIFFGVELLEEGRGQGFTDGVYQGKQLFQCDEDCGVFVALDKLELIEDDDTALESDYAGPGDTMQVELPPLEINSRVSLKVGETIESGTVIFCDVLPGKESLGYFVGVDMDNPIGNWDGRFDGVQLCSFACVESTILLHINDIIP

SEQ ID NO: 88739 - protein, 108 aa, Homo sapiens
MAELQMLLEEEIPGGRRALFDSYTNLERVADYCENNYIQSADKQRALEETKAYTTQSLASVAYLINTLANNVLQMLDIQASQLRRMESSINHISQMFSHTDGQLTEAN

SEQ ID NO: 88740 - protein, 53 aa, Homo sapiens
MKTRSPKPLLTGLRYFCPPFGLPVLLCGDRWQGSPTTRGWGQGAVEVYQWAHQ

SEQ ID NO: 88741 - protein, 90 aa, Homo sapiens
  MOD_RES (1)..(1): Any amino acid
XPQLLVLLKLDEDLHVKYPRLLTFASQLKAGKGLTIVGSVIQGSFLESYGEAQAAEQTPCAALRLPTWPCSCPRTSPSTPATTSATWRAT

SEQ ID NO: 88742 - protein, 19 aa, Homo sapiens
LLAAFEFDIHQVIKECSFL

SEQ ID NO: 88743 - protein, 148 aa, Homo sapiens
  MOD_RES (1)..(1): Any amino acid
XNICDVNWKDYVLIGDYSSSAQFYVTFAVFVFLYCIAALLLYVGYTSLYLDSRKLPMIDFVVTLVATFLWLVSTSAWAKALTDIKIATGHNIIDELPPCKKKAVLCYFGSVTSMGSLNVSVMEFRYVAQTGVQWHDLGTLQPPPPGFK

SEQ ID NO: 88744 - protein, 138 aa, Homo sapiens
  MOD_RES (1)..(1): Any amino acid
XDESHSEWVSCVRFSPNSSNPIIVSCGWDKLVKVWNLANCKLKTNHIGHTGYLNTVTVSPDGSLCASGGKDGQAMLWDLNEGKHLYTLDGGDIINALCFSPNRYWLCAATGPSIKIWTLFAGYTDNLVRVWQVTIGTR

SEQ ID NO: 88745 - protein, 174 aa, Homo sapiens
MPLSRWLRSVGVFLLPAPYWAPRERWLGSLRRPSLVHGYPVLAWHSARCWCQAWTEEPRALCSSLRMNGDQNSDVYAQEKQDFVQHFSQIVRVLTEDEMGHPEIGDAIARLKEVLEYNAIGGKYNRGLTVVVAFRELVEPRKQDADSLQRAWTVGWCVELLQAFFLVADDIMDS

SEQ ID NO: 88746 - protein, 439 aa, Homo sapiens
MHSAEKVPLQNPPIKWAEGHKGVFNIEVQAVSSVHTQDNHLEKFFTLCHSLESQVTFPIRVLDQKISEMALEHELKLSIICLNSSRLEPLVLFLHLVLDKLFQLSVQPMVIAGQTANFSQFAFESVVAIANSLHNSKDLSKDQHGRNCLLASYVHYVFRLPEVQRDVPKSGAPTALLDPRSYHTYGRTSAAAVSSKLLQARVMSSSNPDLAGTHSAADEEVKNIMSSKIADRNCSRMSYYCSGSSDAPSSPAAPRPASKKHFHEELALQMVVSTGMVRETVFKYAWFFFELLVKSMAQHVHNMDKRDSFRRTRFSDRFMDDITTIVNVVTSEIAALLVKPQKENEQAEKMNISLAFFLYDLLSLMDRGFVFNLIRHYCSQLSAKLSNLPTLISMRLEFLRILCSHEHYLNLNLFFMNADTAPTSPCPSISSQVIKELFN

SEQ ID NO: 88747 - protein, 82 aa, Homo sapiens
  MOD_RES (1)..(1): Any amino acid
XLPFDGDFAREKTKAAGLVRKAPNNRSSHNELEKHRCSVISKAVCSRTSPAPHPRDRIPGTQRLSHILHCSPRALTLPMRLG

SEQ ID NO: 88748 - protein, 367 aa, Homo sapiens
MALQGISVVELSGLAPGPFCAMVLADFGARVVRVDRPGSRYDVSRLGRGKRSLVLDLKQPRGAAVLRRLCKRSDVLLEPFRRGVMEKLQLGPEILQRENPRLIYARLSGFGQSGSFCRLAGHDINYLALSGVLSKIGRSGENPYAPLNLLADFAGGGLMCALGIIMALFDRTRTGKGQVIDANMKLSLWEAPRGQNMLDGGAPFYTTYRTADGEFMAVGAIEPQFYELLIKGLGLKSDELPNQMSMDDWPEMKKKFADVFAEKTKAEWCQIFDGTDACVTPVLTFEEVVHHDHNKERGSFITSEEQDVSPRPAPLLLNTPAIPSFKRDPFIGEHTEEILEEFGFSREEIYQLNSDKIIESNKVKASL

SEQ ID NO: 88749 - protein, 12 aa, Homo sapiens
MTNSKGRSITDK

SEQ ID NO: 88750 - protein, 441 aa, Homo sapiens
MYQSLPWPPTTGRPPVPTRRAAPAPSCTARAPRPRQSTCPHRGALLRAGPVLPPGRRRGLCVRRASGGSSGGAASGAGPGTQQGSPGWSQAGADGAAYTPPPVSPRFSFPGTTGSLAAAAAAAAAREAAAYSSGGGAAGAGLAGREQYGRAGFAGSYSSPYPAYMADVGASWAAAAAASAGPFDSPVLHSLPGRANPAARHPNLDMFDDFSEGRECVNCGAMSTPLWRRDGTGHYLCNACGLYHKMNGINRPLIKPQRRLSASRRVGLSCANCQTTTTTLWRRNAEGEPVCNACGLYMKLHGVPRPLAMRKEGIQTRKRKPKNLNKSKTPAAPSGSESLPPASGASSNSSNATTSSSEEMRPIKTEPGLSSHYGHSSSVSQTFSVSAMSGHGPSIHPVLSALKLSPQGYASPVSQSPQTSSKQDSWNSLVLADSHGDIITA

SEQ ID NO: 88751 - protein, 843 aa, Homo sapiens
MSKRGMSSRAKGDKAEALAALQAANEDLRAKLTDIQIELQQEKSKVSKVEREKNQELRQVREHEQHKTAVLLTELKTKLHEEKMKELQAVRETLLRQHEAELLRVIKIKDNENQRLQALLSALRDGGPEKVKTVLLSEAKEEAKKGFEVEKVKMQQEISELKGAKRQVEEALTLVIQADKIKAAEIRSVYHLHQEEITRIKKECEREIRRLMEEIKFKDRAVFVLERELGVQAGHAQRLQLQKEALDEQLSQVREADRHPGSPRRELPHAAGAGDASDHSGSPEQQLDEKDARRFQLKIAELSAIIRKLEDRNALLSEERNELLKRVREAESQYKPLLDKNKRLSRKNEDLSHALRRMENKLKFVTQENIEMRQRAGIIRRPSSLNDLDQSQDEREVDFLKLQIVEQQNLIDELSKTLETAGYVKSVLERDKLLRFRKQRKKMAKLPKPVVVETFFGYDEEASLESDGSSVSYQTDRTDQTPCTPDDDLEEGMAKEETELRFRQLTMEYQALQRAYALLQEQVGGTLDAEREVKTREQLQAEVQRAQARIEDLEKALAEQGQDMKWIEEKQALYRRNQELVEKIKQMETEEARLRHEVQDARDQNELLEFRILELEERERKSPAISFHHTPFVDGKSPLQVYCEAEGVTDIVVAELMKKLDILGDNANLTNEEQVVVIQARTVLTLAEKWLQQIEETEAALQRKMVDLESEKELFSKQKGYLDEELDYRKQALDQANKHILELEAMLYDALQQEAGAKVAELLSEEEREKLKVAVEQWKRQVMSELRERDAQILRERMELLQLAQQRIKELEERIEAQKRQIKELEEKWDQKAGTKWDVASPS

SEQ ID NO: 88752 - protein, 190 aa, Homo sapiens
MGSLSTANVEFCLDVFKELNSNNIGDNIFFSSLSLLYALSMVLLGARGETEEQLEKIEKQLNSGTFHEWTSSSNMMEREVEVHLPRFKLETKYELNSLLKSLGVTDLFNQVKADLSGMSPTKGLYLSKAIHKSYLDVSEEGTEAAAATGDSIAVKSLPMRAQFKANHPFLFFIRHTHTNTILFCGKLASP

SEQ ID NO: 88753 - protein, 591 aa, Homo sapiens
MRLLGAAAVAALGRGRAPASLGWQRKQVNWKACRWSSSGVIPNEKIRNIGISAHIDSGKTTLTERVLYYTGRIAKMHEVKGKDGVGAVMDSMELERQRGITIQSAATYTMWKDVNINIIDTPGHVDFTIEVERALRVLDGAVLVLCAVGGVQCQTMTVNRQMKRYNVPFLTFINKLDRMGSNPARALQQMRSKLNHNAAFMQIPMGLEGNFKGIVDLIEERAIYFDGDFGQIVRYGEIPAELRAAATDHRQELIECVANSDEQLGEMFLEEKIPSISDLKLAIRRATLKRSFTPVFLGSALKNKGVQPLLDAVLEYLPNPSEVQNYAILNKEDDSKEKTKILMNSSRDNSHPFVGLAFKLEVGRFGQLTYVRSYQGELKKGDTIYNTRTRKKVRLQRLARMHADMMEDVEEVYAGDICALFGIDCASGDTFTDKANSGLSMESIHVPDPVISIAMKPSNKNDLEKFSKGIGRFTREDPTFKVYFDTENKETVISGMGELHLEIYAQRLEREYGCPCITGKPKVAFRETITAPVPFDFTHKKQSGGAGQYGKVIGVLEPLDPEDYTKLEFSDETFGSNIPKQFVPAVEKVNF

SEQ ID NO: 88754 - protein, 280 aa, Homo sapiens
MLSCNICGETVTSEPDMKAHLIVHMESEIICPFCKLSGVNYDEMCFHIETAHFEQNTLERNFERINTVQYGTSDNKKDNTLQCGMEVNSSILSGCASNHPKNSAQNLTKDSTLKHEGFYSENLTESRKFLKSREKQSSLTEIKGSVYETTYSPPECPFCGKIEEHSEDMETHVKTKHANLLDIPLEDCDQPLYDCPMCGLICTNYHILQEHVDLHLEENSFQQGMDRVQCSGDLQLAHQLQQEEDRKRRSEESRQEIEEFQKLQELLKHFIGIIRMLPQM

SEQ ID NO: 88755 - protein, 665 aa, Homo sapiens
MSTRTPLPTVNERDTENVAIKIIDKTQLNPTSLQKLFREVRIMKILNHPNIVKLFEVIETEKTLYLIMEYASGGEVFDYLVAHGRMKEKEARSKFRQIVSAVQYCHQKRIVHRDLKAENLLLDADMNIKIADFGFSNEFTVGGKLDTFCGSPPYAAPELFQGKKYDGPEVDVWSLGVILYTLVSGSLPFDGQNLKELRERVLRGKYRIPFYMSTDCENLLKRFLVLNPIKRGTLEQIMKDRWINAGHEEDELKPFVEPELDISDQKRIDIMVGMGYSQEEIQESLSKMKYDEITATYLLLGRKSSELDASDSSSSSNLSLAKVRPSSDLNNSTGQSPHHKVQRSVSSSQKQRRYSDHAGPAIPSVVAYPKRSQTSTADSDLKEDGISSRKSSGSAVGGKGIAPASPMLGNASNPNKADIPERKKSSTVPSSNTASGGMTRRNTYVCSERTTADRHSVIQNGKENSTIPDQRTPVASTHSISSAATPDRIRFPRGTASRSTFHGQPRERRTATYNGPPASPSLSHEATPLSQTRSRGSTNLFSKLTSKLTRSRNVSAEQKDENKEAKPRSLRFTWSMKTTSSMDPGDMMREIRKVLDANNCDYEQRERFLLFCVHGDGHAENLVQWEMEVCKLPRLSLNGVRFKRISGTSIAFKNIASKIANELKL

SEQ ID NO: 88756 - protein, 229 aa, Homo sapiens
  MOD_RES (1)..(1): Any amino acid
XEYRTLKRTTGQAGGGLRSSESLPAAAEEAPEPRCWGPHLNRAATKSPQSTPGRSRQGSVPDYGQRLKANLKGTLQGPEASAFQEVSIRVGSPQPSSSGGEKRRWNEEPWESPAQVQQESSQAGPPSEGAGAVAVEEDPPGEPVQAQPPQPCSSPSNPRYHGLSPSSQARAGKAEGTAPLHIFPRLARHDRGNYVRLNMKQKHYVRGRALRSRLLRKQAWKQKWRKKGE

SEQ ID NO: 88757 - protein, 132 aa, Homo sapiens
MARACLQAVKYLMFAFNLLFWFFLLLLLVFLLEATIAILFFAYTDKIDRYAQQDLKKGLHLYGTQGNVGLTNAWSIIQTDFRCCGVSNYTDWFEVYNATRVPDSCCLEFSESCGLHAPGTWWKAPCYETVKV

SEQ ID NO: 88758 - protein, 98 aa, Homo sapiens
MDTLPDNRTRVVEDNHSYYVSRLYGPSEPHSRELWVDVAEANRSQVKIHTILSNTHRQASRVVLSFDFPFYGHPLRQITIATGGFIFMGDVIHRMLTA

SEQ ID NO: 88759 - protein, 46 aa, Homo sapiens
MLKALFLTMLTLALVKSQDTEETITYTQCTDGYEWDPVRQQCKEDS

SEQ ID NO: 88760 - protein, 122 aa, Homo sapiens
MSVNMDELKHQVMINQFVLTAGCAADQAKQLLQAAHWQFEVRGAGAGRGPGPRAECVPRGRRAGADGVDACRLCAPSGPQTRPAFPTAVPGVRIPRARGGRRQPSAPFSRRPTSPTATITTR

SEQ ID NO: 88761 - protein, 859 aa, Homo sapiens
  MOD_RES (1)..(1): Any amino acid
XDHQMNCHNTRIMQDTEKDDNNNDEYDNYDELVAKSLLNLGKIAEDAAYRARTESEMNSNTSNSLEDDSDKNENLGRKSELSLDLDSDVVRETVDSLKLLAQGHGVVLSENMNDRNYADSMSQQDSRNMNYVMLGKPMNNGLMEKMVEESDEEVCLSSLECLRNQCFDLARKLSETNPQERNPQQNMNIRQHVRPEEDFPGRTPDRNYSDMLNLMRLEEQLSPRSRVFASCAKEDGCHERDDDTTSVNSDRSEEVFDMTKGNLTLLEKAIALETERAKAMREKMAMEAGRRDNMRSYEDQSPRQLPGEDRKPKSSDSHVKKPYYGKDPSRTEKKESKCPTPGCDGTGHVTGLYPHHRSLSGCPHKDRVPPEILAMHESVLKCPTPGCTGRGHVNSNRNSHRSLSGCPIAAAEKLAKAQEKHQSCDVSKSSQASDRVLRPMCFVKQLEIPQYGYRNNVPTTTPRSNLAKELEKYSKTSFEYNSYDNHTYGKRAIAPKVQTRDISPKGYDDAKRYCKDPSPSSSSTSSYAPSSSSNLSCGGGSSASSTCSKSSFDYTHDMEAAHMAATAILNLSTRCREMPQNLSTKPQDLCATRNPDMEVDENGTLDLSMNKQRPRDSCCPILTPLEPMSPQQQAVMNNRCFQLGEGDCWDLPVDYTKMKPRRIDEDESKDITPEDLDPFQEALEERRYPGEVTIPSPKPKYPQCKESKKDLITLSGCPLADKSIRSMLATSSQELKCPTPGCDGSGHITGNYASHRSLSGCPRAKKSGIRIAQSKEDKEDQEPIRCPVPGCDGQGHITGKYASHRSASGCPLAAKRQKDGYLNGSQFSWKSVKTEGMSCPTPGCDGSGHVSGSFLTHRR

SEQ ID NO: 88762 - protein, 79 aa, Homo sapiens
MAAARLCLSLLLLSTCVALLLQPLLGAQGAPLEPVYPGDNATPEQMAQYAADLRRYINMLTRPRPRPMCPGQDGAYRQI

SEQ ID NO: 88763 - protein, 1505 aa, Homo sapiens
  MOD_RES (1)..(1): Any amino acid
XDNVIFVHNTIHLISQVMDNMVMACGGILPLLSAATSATHELENIEPTQGLSIEASVTFLQRLISLVDVLIFASSLGFTEIEAEKSMSSGGILRQCLRLVCAVAVRNCLECQQHSQLKTRGDKALKPMHSLIPLGKSAAKSPVDIVTGGISPVRDLDRLLQDMDINRLRAVVFRDIEDSKQAQFLALAVVYFISVLMVSKYRDILEPQNERHSQSCTETGSENENVSLSEITPAAFSTLTTASVEESESTSSARRRDSGIGEETATGLGSHVEVTPHTAPPGVSAGPDAISEVLSTLSLEVNKSPETKNDRGNDLDTKATPSVSVSKNVNVKDILRSLVNIPADGVTVDPALLPPACLGALGDLSVEQPVQFRSFDRSVIVAAKKSAVSPSTFNTSIPTNAVSVVSSVDSAQASDMGGESPGSRSSNAKLPSVPTVDSVSQDPVSNMSITERLEHALEKAAPLLREIFVDFAPFLSRTLLGSHGQELLIEGTSLVCMKSSSSVVELVMLLCSQEWQNSIQKNAGLAFIELVNEGRLLSQTMKDHLVRVANEAEFILSRQRAEDIHRHAEFESLCAQYSADKREDEKMCDHLIRAAKYRDHVTATQLIQKIINILTDKHGAWGNSAVSRPLEFWRLDYWEDDLRRRRRFVRNPLGSTHPEATLKTAVEHATDEDILAKGKQSIRSQALGNQNSENEILLEGDDDTLSSVDEKDLENLAGPVSLSTPAQLVAPSVVVKGTLSVTSSELYFEVDEEDPNFKKIDPKILAYTEGLHGKWLFTEIRSIFSRRYLLQNTALEIFMANRVAVMFNFPDPATVKKVVNYLPRVGVGTSFGLPQTRRISLASPRQLFKASNMTQRWQHREISNFEYLMFLNTIAGRSYNDLNQYPVFPWVITNYESEELDLTLPTNFRDLSKPIGALNPKRAAFFAERYESWEDDQVPKFHYGTHYSTASFVLAWLLRIEPFTTYFLNLQGGKFDHADRTFSSISRAWRNSQRDTSDIKELIPEFYYLPEMFVNFNNYNLGVMDDGTVVSDVELPPWAKTSEEFVHINRLALESEFVSCQLHQWIDLIFGYKQQGPEAVRALNVFYYLTYEGAVNLNSITDPVLREAVEAQIRSFGQTPSQLLIEPHPPRGSAMQVSPLMFTDKAQQDVIMVLKFPSNSPVTHVAANTQPGLATPAVITVTANRLFAVNKWHNLPAHQGAVQDQPYQLPVEIDPLIASNTGMHRRQITDLLDQSIQVHSQCFVITSDNRYILVCGFWDKSFRVYSTDTGRLIQVVFGHWDVVTCLARSESYIGGNCYILSGSRDATLLLWYWNGKCSGIGDNPGSETAAPRAILTGHDYEVTCAAVCAELGLVLSGSQEGPCLIHSMNGDLLRTLEGPENCLKPKLIQASREGHCVIFYENGLFCTFSVNGKLQATMETDDNIRAIQLSRDGQYLLTGGDRGVVVVRQVSDLKQLFAYPGCDAGIRAMALSYDQRCIISGMASGSIVLFYNDFNRWHHEYQTRY

SEQ ID NO: 88764 - protein, 175 aa, Homo sapiens
MASPDWGYDDKNGPEQWSKLYPIANGNNQSPVDIKTSETKHDTSLKPISVSYNPATAKEIINVGHSFHVNFEDNDNRSVLKGGPFSDSYRLFQFHFHWGSTNEHGSEHTVDGVKYSAELHVAHWNSAKYSSLAEAASKADGLAVIGVLMKVGEANPKLQKVLDALQAIKTKGKRA

SEQ ID NO: 88765 - protein, 221 aa, Homo sapiens
MSSVAVLTQESFAEHRSGLVPQQIKVATLNSEEESDPPTYKDAFPPLPEKAACLESAQEPAGAWGNKIRPIKASVITQVFHVPLEERKYKDMNQFGEGEQAKICLEIMQRTGAHLELSLAKDQGLSIMVSGKLDAVMKARKDIVARLQTQASATVAIPKEHHRFVIGKNGEKLQDLELKTATKIQIPRPDDPSNQIKITGTKEGIEKARHEVLLISAEQDK

SEQ ID NO: 88766 - protein, 70 aa, Homo sapiens
RHETIRVAVCDMMEGKCPCPEPLRGVMEKSFLEYYDFYEVACKDRLHLQGQTMQVIQPLLLIAEALQLAM

SEQ ID NO: 88767 - protein, 36 aa, Homo sapiens
MSTVGLFHFPTPLTRICPAPWGLRLWEKLTLLSPGI

SEQ ID NO: 88768 - protein, 189 aa, Homo sapiens
MERRRITSAARRSYVSSGEMMVGGLAPGRRLGPGTRLSLARMPPPLPTRVDFSLAGALNAGFKETRASERAEMMELNDRFASYIEKVRFLEQQNKALAAELNQLRAKEPTKLADVYQAELRELRLRLDQLTANSARLEVERDNLAQDLATVRQKNVSPHSRLQDETNLRLEAENNLAAYRQEADEATLA

SEQ ID NO: 88769 - protein, 125 aa, Homo sapiens
  MOD_RES (1)..(1): Any amino acid
XIQASIDQIFSRLERLEILSSKEPPNKRQNARLRVDQLKYDVQHLQTALRNFQHRRHAREQQERQREELLSRTFTTNGTQKKILDIANMLGLSNTVMRLIEKRAFQDKYFMIEGLTLLPRLISNS

SEQ ID NO: 88770 - protein, 292 aa, Homo sapiens
MRELKRTLDAKGHGVLEMPSGTGKTVSLLALIMAYQRAYPLEVTKLIYCSRTVPEIEKVIEELRKLLNFYEKQEGEKLPFLGLALSSRKNLCIHPEVTPLRFGKDVDGKCHSLTASYVRAQYQHDTSLPHCRFYEEFDAHGREVPLPAGIYNLDDLKALGRRQGWCPYFLARYSILHANVVVYSYHYLLDPKIADLVSKELARKAVVVFDEAHNIDNVCIDSMSVNLTRRTLDRCQGNLETLQKTVLRIKETDEQRLRDEYRRLVEGLREASAARETDAHLANPVLPDEVLQ

SEQ ID NO: 88771 - protein, 97 aa, Homo sapiens
MTEMSFLSSEVLVGDLMSPFDQSGLGAEESLGLLDDYLEVAKHFKPHGFSSDKAKAGSSEWLAVDGLVSPSNNSKGEWATTTSSWWDLGLGASYLCI

SEQ ID NO: 88772 - protein, 73 aa, Homo sapiens
MESQPFLNMKFETDYFVKVVPFPSIKNESNYHPFFFRTRACDLLLQPDNLACKPFWKPRNLNISQHGSDMQVS

SEQ ID NO: 88773 - protein, 265 aa, Homo sapiens [sequence omitted]

SEQ ID NO: 88774 - protein, 136 aa, Homo sapiens
  MOD_RES (1)..(1): Any amino acid
XALKGLVNKPELLALTESLTPDHTVAFWMPESEMEVMELELGAGVRLKTRGDGPFLDSLAKLEAGTVTKCNFTGDGKTGASWTDNIMAQKCSKGAAAEIREQGDGAEDEEWVGTWCWCSCISWQEHGTYWLRLWVG

SEQ ID NO: 88775 - protein, 598 aa, Homo sapiens
MQPPPRKVKPAQEVKLRFLEQLSILQTWQQREADLLEDIRSYSKQRAAIEREYGQALQKLAGPFLKREGHRSGEMDSRTVFGAWRCLLDATVAGGQTRLQASDRYRDLAGGTGRSAKEQVLRKGTENLQRAQAEVLQSVRELSRSRKLYGQRERVWALAQEKAADVQARLNRSDHGIFHSRTSLQKLSTKLSAQSAQYSQQLQAARNEYLLNLVATNAHLDHYYQEELPALLKALVSELSEHLRDPLTSLSHTELEAAEVILEHAHRGEQTTSQVSWEQDLKLFLQEPGVFSPTPPQQFQPAGTDQVCVLEWGAEGVAGKSGLEKEVQRLTSRAARDYKIQNHGHRERRLSEARLSQRDLSPTAEDAELSDFEECEETGELFEEPAPQALATRALPCPAHVVFRYQAGREDELTITEGEWLEVIEEGDADEWVKARNQHGEVGFVPERYLNFPDLSLPESSQDSDNPCGAEPTAFLAQALYSYTGQSAEELSFPEGALIRLLPRAQDGVDDGFWRGEFGGRVGVFPSLLVEELLGPPGPPELSDPEQMLPSPSPPSFSPPAPTSVLDGPPAPVLPGDSGGTCACLSYGYIAYWWRLGF

SEQ ID NO: 88776 - protein, 42 aa, Homo sapiens
  MOD_RES (1)..(1): Any amino acid
XFYFRMYLAMVLLGATHGLIFLPVLLSYIDDLKVPVLQSETG

SEQ ID NO: 88777 - protein, 155 aa, Homo sapiens
MKLLLLHPAFQSCLLLTLLGLWRTTPEAHASSLGAPAISAASFLQDLIHRYGEGDSLTLQQLKALLNHLDVGVGRGNVTQHVQGHRNLSTCFSSGDLFTAHNFSEQSRIGSSELQEFCPTILQQLDSRACTSENQENEENEQTEEGRPSAVEVWG

SEQ ID NO: 88778 - protein, 70 aa, Homo sapiens
THKFRLHVTALDYLAPYAKYKVWIKPGAEQSFLYGNHVLKSGLGRITENTSQYQGVVVYSMADIPLCLFF

SEQ ID NO: 88779 - protein, 943 aa, Homo sapiens
MSHLVDPTSGDLPVRDIDAIPLVLPASKGKNMKTQPPLSRMNREELEDSFFRLREDHMLVKELSWKQQDEIKRLRTTLLRLTAAGRDLRVAEEAAPLSETARRGQKAGWRQRLSMHQRPQMHRLQGHFHCVGPASPRRAQPRVQVGHRQLHTAGAPVPEKPKRGPRDRLSYTAPPSFKEHATNENRGEVASKPSELAHIMASNTMQVEEPPKSPEKMWPKDENFEQRSSLECAQKAAELRASIKEKVELIRLKKLLHERNASLVMTKAQLTEVQEAYETLLQKNQGILSAAHEALLKQVNELRAELKEESKKAVSLKSQLEDVSILQMTLKEFQERVEDLEKERKLLNDNYDKLLESMLDSSDSSSQPHWSNELIAEQLQQQVSQLQDQLDAELEDKRKVLLELSREKAQNEDLKLEVTNILQKHKQEVELLQNAATISQPPDRQSEPATHPAVLQENTQIEPSEPKNQEEKKLSQVLNELQVSHAETTLELEKTRDMLILQRKINVCYQEELEAMMTKADNDNRDHKEKLERLTRLLDLKNNRIKQLEGILRSHDLPTSGDFNLTDPAEKPNGSIQVQLDWKFPYIPPESFLKPEAQTKGKDTKDSSKISSEEEKASFPSQDQMASPEVPIEAGQYRSKRKPPHGGERKEKEHQVVSYSRRKHGKRIGVQGKNRMEYLSLNILNGNTPEQVNYTEWKFSETNSFIGDGFKNQHEEEEMTLSHSALKQKEPLHPVNDKESSEQGSEVSEAQTTDSDDVIVPPMSQKYPKADSEKMCIEIVSLAFYPEAEVMSDENIKQVYVEYKFYDLPLSETETPVSLRKPRAGEEIHFHFSKVIDLDPQEQQGRRRFLFDMLNGQDPDQGHLKFTVVSDPLDEEKKECEEVGYAYLQLWQILESGRDILEQELDIVSPEDLATPIGRLKVSLQAAAVLHAIYKEMTEDLFS

SEQ ID NO: 88780 - protein, 99 aa, Homo sapiens
VTHAYGNRKGIRYLTSGLKVYYLPLKVMYNQSTATTLFHSLPLLRSLLDQISKSHWNVLSEREDKSKFSLSRLFGCLFPEPPLPSLFCSQSGFTSTLHV

SEQ ID NO: 88781 - protein, 140 aa, Homo sapiens
LDAIRHRAICFNLSAHIESLGKGHSVVFHSTVIAKRKEDSGKIKLLLHWMPEDILPDVWVNESERHQLKTKVVHLSKLPKDTALLLDPNIYRTMPQKRLKRWSFTLVAQAGVQWRDLGSPQPPLPGFKRFFCLSFLSSWD

SEQ ID NO: 88782 - protein, 88 aa, Homo sapiens
MVALPMVLVLLLVLSRGESELDAKIPSTGDATEWRNPHLSMLGSCQPAPSCQKCILSHPSCAWCKQLNFTASGEAEARRCARREELLA

SEQ ID NO: 88783 - protein, 461 aa, Homo sapiens
MSWSLHPRNLILYFYALLFLSSTCVAYVATRDNCCILDERFGSYCPTTCGIADFLSTYQTKVDKDLQSLEDILHQVENKTSEVKQLIKAIQLTYNPDESSKPNMIDAATLKSRKMLEEIMKYEASILTHDSSIRYLQEIYNSNNQKIVNLKEKVAQLEAQCQEPCKDTVQIHDITGKVKVDSPSLDCQDIANKGAKQSGLYFIKPLKANQQFLVYCEIDGSGNGWTVFQKRLDGSVDFKKNWIQYKEGFGHLSPTGTTEFWLGNEKIHLISTQSAIPYALRVELEDWNGRTSTADYAMFKVGPEADKYRLTYAYFAGGDAGDAFDGFDFGDDPSDKFFTSHNGMQFSTWDNDNDKFEGNCAEQDGSGWWMNKCHAGHLNGVYYQGGTYSKASTPNGYDNGIIWATWKTRWYSMKKTTMKIIPFNRLTIGEGQQHHLGGAKQVRPEHPAETEYDSLYPEDDL

SEQ ID NO: 88784 - protein, 136 aa, Homo sapiens
  MOD_RES (1)..(1): Any amino acid
XLFSKPFGQATTTQNTGFSFGNTSTIGQPSTNTMGLFGVTQASQPGGLFGTATNTSTGTAFGTGTGLFGQTNTGFGAVGSTLFGNNKLTTFGSSTTSAPSFGTTSGGLFGNKPTLTLGTNTNTSNFGTYKKQVWLS

SEQ ID NO: 88785 - protein, 110 aa, Homo sapiens
  MOD_RES (1)..(1): Any amino acid
XASGLGHCHHLEELDLSNNQFDEEGTKALMRALEGKWMLKRLDLSHLLLNSSTLALLTHRLSQMTCLQSLSLTLSPRLECSGMISLHCNLCLLGSSDSGASAAQVAGITD

SEQ ID NO: 88786 - protein, 173 aa, Homo sapiens
MAAAPLKVCIVGSGNWGSAVAKIIGNNVKKLQKFASTVKMWVFEETVNGRKLTDIINNDHENVKYLPGHKLPENVGIDEGPEGLKLISDIIREKMGIDISVLMGANIANEVAAEKFCETTIGSKVMENGLLFKELLQTPNFRITVVDDADTVELCGALKNIVAVGAGFCDGLR

SEQ ID NO: 88787 - protein, 185 aa, Homo sapiens
  MOD_RES (1)..(1): Any amino acid
XTKVRAKIRKMKVTTKVNRHDKINGKRKTAKEHLRKLSMKEREHGEKERQVSEAEENGKLDMKEIHTYMEMFQRAQALRRRAEDYYRCKITPSARKPLCNRVSLLVFLAFGHSLPGQDMDTFFSLRLCAQALQREMAERKAAYKHHSPIPVGNRVAQKHLHPHPVGPPSNILSVRGSVFVIANGP

SEQ ID NO: 88788 - protein, 46 aa, Homo sapiens
ETLEMWLMPQGSLKLLGRSDQASRLQSLEVGQVPHLLSPNPHPDLG

SEQ ID NO: 88789 - protein, 255 aa, Homo sapiens
MALLWGLLVLSWSCLQGPCSVFSPVSAMEPLGRQLTSGPNQEQVSPLTLLKLGNQEPGGQTALKSPPGVCSRDPTPEQTHRLARAMMAFTADLFSLVAQTSTCPNLILSPLSVALALSHLALGAQNHTLQRLQQVLHAGSGPCLPHLLSRLCQDLGPGAFRLAARMYLQKGFPIKEDFLEQSEQLFGAKPVSLTGKQEDDLANINQWVKEATEGKIQEFLSGLPEDTVLLLLNAIHFQGFWRNKFDPSLTQRDSF

SEQ ID NO: 88790 - protein, 334 aa, Homo sapiens; identical to SEQ ID NO: 54017

SEQ ID NO: 88791 - protein, 15 aa, Homo sapiens
  MOD_RES (1)..(1): Any amino acid
XGAEGALTGKQPDDC

SEQ ID NO: 88792 - protein, 640 aa, Homo sapiens
MATDGASCEPDLSRAPEDAAGAAAEAAKKEFDVDTLSKSELRMLLSVMEGELEARDLVIEALRARRKEVFIQERYGRFNLNDPFLALQRDYEAGAGDKEKKPVCTNPLSILEAVMAHCKKMQERMSAQLAAAESRQKKLEMEKLQLQALEQEHKKLAARLEEERGKNKQVVLMLVKECKQLSGKVIEEAQKLEDVMAKLEEEKKKTNELEEELSAEKRRSTEMEAQMEKQLSEFDTEREQLRAKLNREEAHTTDLKEEIDKMRKMIEQLKRGSDSKPSLSLPRKTKDRRLVSISVGTEGTVTRSVACQTDLVTENADHMKKLPLTMPVKPSTGSPLVSANAKGSVCTSATMARPGIDRQASYGDLIGASVPAFPPPSANKIEENGPSTGSTPDPTSSTPPLPSNAAPPTAQTPGIAPQNSQAPPMHSLHSPCANTSLHPGLNPRIQAARFRFQGNANDPDQNGNTTQSPPSRDVSPTSRDNLVAKQLARNTVTQALSRFTSPQAGAPSRPGVPPTGDVGTHPPVGRTSLKTHGVARVDRGNPPPIPPKKPGLSQTPSPPHPQLKVIIDSSRASNTGAKVDNKTVASTPSSLPQGNRVINEENLPKSSSPQLPPKPSIDLTVAPAGCAVSALATSQAGHPP

SEQ ID NO: 88793 - protein, 241 aa, Homo sapiens
MGKTFSQLGSWREDENKSILSSKPAIGSKAVNYSSTGSSKSFCSCVPCEGTADASFVTCPTCQGSGKIPQELEKQLVALIPYGDQRLKPKHTKLFVFLAVLICLVTSSFIVFFLFPRSVIVQPAGLNSSTVAFDEADIYLNITNILNISNGNYYPIMVTQLTLEVLHLSLVVGQVSNNLLLHIGPLASEQMFYAVATKIRDENTYKICTWLEIKVHHVLLHIQGTLTCSYLSHSEQLVFQS

SEQ ID NO: 88794 - protein, 530 aa, Homo sapiens
  MOD_RES (1)..(1): Any amino acid
XESPHKRNLYYFSYPLFVGFALLRLVAFHLGLLFVWLCQRFSRALMAAKRSSGAAPAPASASAPAPVPGGEAERVRVFHKQAFEYISIALRIDEDEKAGQKEQAVEWYKKGIEELEKGIAVIVTGQGEQCERARRLQAKMMTNLVMAKDRLQLLEKMQPVLPFSKSQTDVYNDSTNLACRNGHLQSESGAVPKRKDPLTHTSNSLPRSKTVMKTGSAGLSGHHRAPSYSGLSMVSGVKQGSGPAPTTHKGTPKTNRTNKPSTPTTATRKKKDLKNFRNVDSNLANLIMNEIVDNGTAVKFDDIAGQDLAKQALQEIVILPSLRPELFTGLRAPARGLLLFGPPGNGKTMLAKAVAAESNATFFNISAASLTSKYVGEGEKLVRALFAVARELQPSIIFIDEVDSLLCERREGEHDASRRLKTEFLIEFDGVQSAGDDRVLVMGATNRPQELDEAVLRRFIKRVYVSLPNEETRLLLLKNLLCKQGSPLTQKELAQLARMTDGYSGSDLTALAKDAALGPIRVPDFYVLQN

SEQ ID NO: 88795 - protein, 60 aa, Homo sapiens
MMRVCWLVRQDSRHQRIRLPHLEAVVIGRGPETKITDKKCSRQQGTLLNGQQDVNSGVYS

SEQ ID NO: 88796 - protein, 142 aa, Homo sapiens
MLDEQKEQLNRIEEGLDQINKDMRETEKTLTELNKCCGLCVCPCNRTKNFESGKAYKTTWGDGGENSPCNVVSKQPGPVTNGQLQQPTTGAASGGYIKRITNDAREDEMEENLTQVGSILGNLKDMALNIGNEIDAQNPQIK

SEQ ID NO: 88797 - protein, 169 aa, Homo sapiens
MKHTLALLAPLLGLGLGLALSQLAAGATDCKFLGPAEHLTFTPAARARWLAPRVRAPGLLDSLYGTVRRFLSVVQLNPFPSELVKALLNELASVKVNEAEARAGQWGSGHPSCPAACPGGAVRGGLRGMRCDRGPLPAAGAHCRALLLLLPLPPALRGTSEDRAQGAGL

SEQ ID NO: 88798 - protein, 142 aa, Homo sapiens
MPDSWDKDVYPEPPRRTPVQPNPIVYMMKAFDLIVDRPVTLVREFIERQHAKNRYYYYHRQYRRVPDITECKEEDIMCMYEAEMQWKRDYKVDQEIINIMQDRLKACQQREGQNYQQNCIKEVEQFTQIRTWGPTVLPGSAW

SEQ ID NO: 88799 - protein, 62 aa, Homo sapiens
MDLWQLLLTLALAGSSDAFSGSEATAAILSRAPWSLQSVNPGLKTRWGPCSHIKKMESYMQA

SEQ ID NO: 88800 - protein, 509 aa, Homo sapiens
MDVIARQNFTEPTAIQAQGWPVALSGLDMVGVAQTGSGKTLSYLLPAIVHINHQPFLERGDGPICLVLAPTRELAQQVQQVAAEYCRACRLKSTCIYGGAPKGPQIRDLERGVEICIATPGRLIDFLECGKTNLRRTTYLVLDEADRMLDMGFEPQIRKIVDQIRPDRQTLMWSATWPKEVRQLAEDFLKDYIHINIGALELSANHNILQIVDVCHDVEKDEKLIRLMEEIMSEKENKTIVFVETKRRCDELTRKMRRDGWPAMGIHGDKSQQERDWVLNEFKHGKAPILIATDVASRGLDVEDVKFVINYDYPNSSEDYIHRIGRTARSTKTGTAYTFFTPNNIKQVSDLISVLREANQAINPKLLQLVEDRGSGRSRGRGGMKDDRRDRYSAGKRGGFNTFRDRENYDRGYSSLLKRDFGAKTQNGVYSAANYTNGSFGSNFVSAGIQTSFRTGNPTGTYQNGYDSTQQYGSNVPNMHNGMNQQAYAYPATAAAPMIGYPMPTGYSQ

SEQ ID NO: 88801 - protein, 575 aa, Homo sapiens
MASVWQRLGFYASLLKRQLNGGPDVIKWERRVIPGCTRSIYSATGKWTKEYTLQTRKDVEKWWHQRIKEQASKISEADKSKPKFYVLSMFPYPSGKLHMGHVRVYTISDTIARFQKMRGMQVINPMGWDAFGLPAENAAVERNLHPQSWTQSNIKHMRKQLDRLGLCFSWDREITTCLPDYYKWTQYLFIKLYEAGLAYQKEALVNWDPVDQTVLANEQVDEHGCSWRSGAKVEQKYLRQWFIKTTAYAKAMQDALADLPEWYGIKGMQAHWIGDCVGCHLDFTLKVHGQATGEKLTAYTATPEAIYGTSHVAISPSHRLLHGHSSLKEALRMALVPGKDCLTPVMAVNMLTQQEVPVVILAKADLEGSLDSKIGIPSTSSEDTILAQTLGLAYSEVIETLPDGTERLSSSAEFTGMTRQDAFLALTQKARGKRVGGDVTSDKLKDWLISRQRYWGTPIPIVHCPVCGPTPVPLEDLPVTLPNIASFTGKGGPPLAMASEWVNCSCPRCKGAAKRETDTMDTFVDSAWYYFRYTDPHNPHRVSPCCPGWSAMARSWLTATSASRVQVVLLPQPPE

SEQ ID NO: 88802 - protein, 114 aa, Homo sapiens
MDSSTAHSPVFLVFPPEITASEYESTELSATTFSTQSPLQKLFARKMKILGTIQILFGIMTFSFGVIFLFTLLKPYPRFPFIFLSGYPFWGSVLFINSGAFLIAVKRKTTETLK

SEQ ID NO: 88803 - protein, 1041 aa, Homo sapiens
MAAMAPALTDAAAEAHHIRFKLAPPSSTLSPGSAENNGNANILIAANGTKRKAIAAEDPSLDFRNNPTKEDLGKLQPLVASYLCSDVTSVPSKESLKLQGVFSKQTVLKSHPLLSQSYELRAELLGRQPVLEFSLENLRTMNTSGQTALPQAPVNGLAKKLTKSSTHSDHDNSTSLNGGKRALTSSALHGGEMGGSESGDLKGGMTNCTLPHRSLDVEHTTLYSNNSTANKSSVNSMEQPALQGSSRLSPGTDSSSNLGGVKLEGKKSPLSSILFSALDSDTRITALLRRQADIESRARRLQKRLQVVQAKQVERHIQHQLGGFLEKTLSKLPNLESLRPRSQLMLTRKAEAALRKAASETTTSEGLSNFLKSNSISEELERFTASGIANLRCSEQAFDSDVTDSSSGGESDIEEEELTRADPEQRHVPLRRRSEWKWAADRAAIVSRWNWLQAHVSDLEYRIRQQTDIYKQIRANKGLIVLGEVPPPEHTTDLFLPLSSEVKTDHGTDKLIESVSQPLENHGAPIIGHISESLSTKSCGALRPVNGVINTLQPVLADHIPGDSSDAEEQLHKKQRLNLVSSSSDGTCVAARTRPVLSCKKRRLVRPNSIVPLSKKVHRNSTIRPGCDVNPSCALCGSGSINTMPPEIHYEAPLLERLSQLDSCVHPVLAFPDDVPTSLHFQSMLKSQWQNKPFDKIKPPKKLSLKHRAPMPGSLPDSARKDRHKLVSSFLTTAMLKHHTDMSSSSYLAATHHPPHSPLVRQLSTSSDSPAPASSSSQVTASTSQPVRRRRGESSFDINNIVIPMSVAATTRVEKLQYKEILTPSWREVDLQSLKGSPDEENEEIEDLSDAAFAALHAKCEEMERARWLWTTSVPPQRRGSRSYRSSDGRTTPQLGSANPSTPQPASPDVSSSHSLSEYSHGQSPRSPISPELHSAPLTPVARDTLRHLASEDTRCSTPELGLDEQSVQPWERRTFPLAHSPQAECEDQLDAQERAARCTRRTSGSKTGRETEAAPTSPPIVPLKSRHLVAAATAQRPTHR

SEQ ID NO: 88804 - protein, 63 aa, Homo sapiens
MSLQVLNDKNVSNEKNTENCDFLFSPPEVTGRSSVLRVSQKENVPPKNLAKAMKVLSSSLRNR

SEQ ID NO: 88805 - protein, 128 aa, Homo sapiens
MLNHATQRVMEAEQTKTRSELVHKETAARYNAAMGRMRQLEKKLKRAINKSKPYFELKAKYYVQLEQLKKTVDDLQAKLTLAKGEYKMALKNLEMISDEIHERRRSSAMGPRGCGVGAEGSSTSVEDL

SEQ ID NO: 88806 - protein, 83 aa, Homo sapiens
MEAEETMECLQEFPEHHKMILDRLNEQREQDRFTDITLIVDGHHFKAHKAVLAACSKFFYKFFQEFTQEPLVEIEGTKKTQLP

SEQ ID NO: 88807 - protein, 214 aa, Homo sapiens
MKEAKDARYTNGHLFTTISVSGMTMCYACNKSITAKEALICPTCNVTIHNRCKDTLANCTKVKQKQQKAALLKNNTALQSVSLRSKTTIRERPSSAIYPSDSFRQSLLGSRRGRSSLSLAKSVSTTNIAGHFNDESPLGLRRILSQSTDSLNMRNRTLSVESLIDEAEVIYSELMSDFEMDEKDFAADSWSLAVDSSFLQQHKKEVMKQQDVIY

SEQ ID NO: 88808 - protein, 237 aa, Homo sapiens
MKFKLHVNSARQYKDLWNMSDDKPFLCTAPGCGQRFTNEDHLAVHKHKHEMTLKFGPARNDSVIVADQTPTPTRFLKNCEEVGLFNELASPFENEFKKASEDDIKKMPLDLSPLATPIIRSKIEEPSVVETTHQDSPLPHPESTTSDEKEVPLAQTAQPTSAIVRPASLQVPNVLLTSSDSSVIIQQAVPSPTSSTVITQAPSSNRPIVSFDQSPWCLVFQESQVLPLPNQYSQKQK

SEQ ID NO: 88809 - protein, 499 aa, Homo sapiens
ESESESGQAEEEKEEAEEALKEKEKPKEEEWEKPKDAAGLECKPRPLHKTCSLFMRNIAPNISRAEIISLCKRYPGFMRVALSEPQPERRFFRRGWVTFDRSVNIKEICWNLQNIRLRECELSPGVNRDLTRRVRNINGITQHKQIVRNDIKLAAKLIHTLDDRTQLWASEPGTPPLPTSLPSQNPILKNITDYLIEEVSAEEEELLGSSGGAPPEEPPKEGNPAEINVERDEKLIKVLDKLLLYLRIVHSLDYYNTCEYPNEDEMPNRCGIIHVRGPMPPNRISHGEVLEWQKTFEEKLTPLLSVRESLSEEEAQKMGRKDPEQEVEKFVTSNTQELGKDKWLCPLSGKKFKGPEFVRKHIFNKHAEKIEEVKKEVAFFNNFLTDAKRPALPEIKPAQPPGPAQILPPGLTPGLPYPHQTPQGLMPYGQPRPPILGYGVPTGGPPYPHAPYGAGRGNYDAFRGQGGYPGKPRNRMVRGDPRAIVEYRDLDAPDDVDFF

SEQ ID NO: 88810 - protein, 637 aa, Homo sapiens
MAACEGRRSGALGSSQSDFLTPPVGGAPWAVATTVVMYPPPPPPPHRDFISVTLSFGENYDNSKSWRRRSCWRKWKQLSRLQRNMILFLLAFLLFCGLLFYINLADHWKALAFRLEEEQKMRPEIAGLKPANPPVLPAPQKADTDPENLPEISSQKTQRHIQRGPPHLQIRPPSQDLKDGTQEEATKRQEAPVDPRPEGDPQRTVISWRGAVIEPEQGTELPSRRAEVPTKPPLPPARTQGTPEFEEARKWVSKKLHFEKDVDVNLFESTIRILGGLLSAYHLSGDSLFLRKAEDFGNRLMPAFRTPSKIPYSDVNIGTGVAHPPRWTSDSTVAEVTSIQLEFRELSRLTGDKKFQEAVEKVTQHIHGLSGKKDGLVPMFINTHSGLFTHLGVFTLGARADSYYEYLLKQWIQGGKQETQLLEDYVEAIEGVRTHLLRHSEPSKLTFVGELAHGRFSAKMDHLVCFLPGTLALGVYHGLPASHMELAQELMETCYQMNRQMETGLSPEIVHFNLYPQPGRRDVEVKPADRHNLLRPETVESLFYLYRVTGDRKYQDWGWEILQSFSRFTRVPSGGYSSINNVQDPQKPEPRDKMESFFLGETLKYLFLLFSDDPNLLSLDAYVFNTEAHPLPIWTPA

SEQ ID NO: 88811 - protein, 61 aa, Homo sapiens
FEDFYKLVVHTHHISNSDVTIGYADVHGDLLPINNDDNFCKAVSSANPLLRVFIQKRGGEH

SEQ ID NO: 88812 - protein, 216 aa, Homo sapiens
MASVHESLYFNPMMTNGVVHANVFGIKDWVTPYKIAVLVLLNEMSRTGEGAVSLMERRRLNQLLLPLLQRRDFAMLPRLAGNSWTQAILPSGLPEYWDYRSEPLRPAVMCYFILQTQGPDITLSKLYKLIEESCPQLANSVQIRIKLMAEGELKDMEQFFDDLSDSFSGTEPEVHKTSVVGLFLRHMILAYSKLSFSQVFKLYTALQQYFQNGEKK

SEQ ID NO: 88813 - protein, 118 aa, Homo sapiens
MKWLGESKNMVVNGRRNGGKLSNDHQQNQSKLQHTGKDTLKAGKNAVERRSNRCNGNSGFEGQSRYVPSSGMSAKELCENDDLATSLVLDPYLGFQTHKMNTSAFPSRSSRHFSKSDS

SEQ ID NO: 88814 - protein, 74 aa, Homo sapiens
MSEESDMDKAIKDAPVKLCDFGFAKIDQGDLMTPQFTPYYVAPQVLEAQRRHQKEKSGIIPTSPTPYTYNKSSP

SEQ ID NO: 88815 - protein, 183 aa, Homo sapiens
  MOD_RES (1)..(1): Any amino acid
XAATMTAAGHHAEVVVDPEDERAIEMFMNKNPPARRTLADIIMEKLTEKQTEVETVMSEVSGFPMPQLDPRVLEVYRGVREVLSKYRSGKLPKAFKIIPALSNWEQILYVTEPEAWTAAAMYQATRIFASNLKERMAQRFYNLVLLPRVRDDVAEYKRLNFHLYMALKKALFKPGAWFKVAAL

SEQ ID NO: 88816 - protein, 292 aa, Homo sapiens
MFHLLLAARSGPARLLGPPASLPGLEVLWSPRALLLWLAWLGLQAALYLLPARKVAEGQELKDKSRLRYPINGFQALVLTALLVGLGMSAGLPLGALPEMLLPLAFVATLTAFIFSLFLYMKAQVAPVSALAPGGNSGNPIYDFFLGRELNPRICFFDFKYFCELRPGLIGWVLINLALLMKEAELRGSPSLAMWLVNGFQLLYVGDALWHEEAVLTTMDITHDGFGFMLAFGDMAWVPFTYSLQAQFLLHHPQPLGLPMASVICLINATGYYIFRGANSQKNTFRKNPSDP

SEQ ID NO: 88817 - protein, 144 aa, Homo sapiens
QEAENAVSSGNRDSKVPSEGKKSLYTDESSKPGKNKRTAITTPNFKKLHEAHFKEMESIDQYIERKKKHFEEHNSMNELKQPINKGGVRTPVPPRGRLSVASTPISQRRSQGRSCGPASQSTLGLKGSLKRSAISAAKTGVRFK

SEQ ID NO: 88818 - protein, 145 aa, Homo sapiens
  MOD_RES (1)..(1): Any amino acid
XKIKFETMIIDNCCMQLVQNPYQFDVLVMPNLYGNIIDNLAAGLVGGAGVVPGESYSAEYAVFETGARHPFAQAVGRNIANPTAMLLSASNMLRHLNLEYHSSMIADAVKKVIKVGKVRTRDMGGYSTTTDFIKSVIGHLQTKGS

SEQ ID NO: 88819 - protein, 125 aa, Homo sapiens
LQLIVIQEEVVEIDGKQVQQKDVTEIDILVKNRGVLRHSNYTLPLEESMLYSISRDSDILFTLPNLSKKESVSSLQTTSQYLIRNVETTVDEDVLPGKLPETPLRAEPPSSYKVLETVDSAPFRL

SEQ ID NO: 88820 - protein, 170 aa, Homo sapiens
  MOD_RES (1)..(1): Any amino acid
XTGNSIMVMKMNGSLHQELKIEENFKDTSTSFLAFQLLPEEEQLWAACAGRSEVYIWSLKDLAQPPQRVPLEDCSEINCMIRVKKQVGWRARHPQHPRQVSLALAASPCSREPAARPRALLPSPLRVPLLTGTCRVGANGPTGHHVLVSWCGPSTPQRIPPNWMASNDRT

SEQ ID NO: 88821 - protein, 159 aa, Homo sapiens
PGVLPAGRVIGEPTSLMDVFPTVVQLVGGEVPQDRVIDGHSLVPLLQGAEARSAHEFLFHYCGQHLHAARWHQKDSGSVWKVHYTTPQFHPEGAGACYGRGVCPCSGEGVTHHRPPLLFDLSRDPSEARPLTPDSEPLYHAVIARGHLLAELNLKPKRR

SEQ ID NO: 88822 - protein, 63 aa, Homo sapiens
MTRLDRSSHSGGGHAKGSRPLNSLLAGHRVAQPASAPGSRASVQDIDLIDILWRQDIDLGAGR

SEQ ID NO: 88823 - protein, 50 aa, Homo sapiens
MRGRDLCSSTQSQALGSMTPEIPGVESHGLTLQLDPGQMESCSGALSCKQ

SEQ ID NO: 88824 - protein, 47 aa, Homo sapiens
MATSNLLKNKGSLQFEDKWDFMRPIVLKLLRQESVTKQQWFDLFSEY

SEQ ID NO: 88825 - protein, 104 aa, Homo sapiens
MYDNVLPPQSLKAKQEIRACHGKMEGITTFKSDYCPYEIVKQPRHVPEEYKPKQGKIDLGTTYKRDLNSYKVQPVAIVRPLERQVKKGKLDTVPTYKGNLLFHT

SEQ ID NO: 88826 - protein, 126 aa, Homo sapiens
MEEDTDYRIRFSSLCFFNDHVGFHGTIKSSPSDFIVIEIDEQGQLVNKTIDEPIFKISEIQLEPNNFPKKPKLDLQNLSLEDGRNQEVHTLIKYTDGDQNHQSGSEKEDTIVDGTSKCEEKADVLS

SEQ ID NO: 88827 - protein, 604 aa, Homo sapiens
MHVKKYLLKGLHRLQKGPGYTYKELLVWYCDNTNTHGPKRIICEGPKKKAMWFLLTLLFAALVCWQWGIFIRTYLSWEVSVSLSVGFKTMDFPAVTICNASPFKYSKIKHLLKDLDELMEAVLERILAPELSHANATRNLNFSIWNHTPLVLIDERNPHHPMVLDLFGDNHNGLTSSSASEKICNAHGCKMAMRLCSLNRTQCTFRNFTSATQALTEWYILQATNIFAQVPQQELVEMSYPGEQMILACLFGAEPCNYRNFTSIFYPHYGNCYIFNWGMTEKALPSANPGTEFGLKLILDIGQEDYVPFLASTAGVRLMLHEQRSYPFIRDEGIYAMSGTETSIGVLVACLRSCFQDHMIRNCNCGHYLYPLPRGEKYCNNRDFPDWAHCYSDLQMSVAQRETCIGMCKESCNDTQYKMTISMADWPSEASEDWIFHVLSQERDQSTNITLSRKGIVKLNIYFQEFNYRTIEESAANNIVWLLSNLGGQFGFWMGGSVLCLIEFGEIIIDFVWITIIKLVALAKSLRQRRAQASYAGPPPTVAELVEAHTNFGFQPDTAPRSPNTGPYPSEQALPIPGTPPPNYDSLRLQPLDVIESDSEGDAI

SEQ ID NO: 88828 - protein, 125 aa, Homo sapiens
MASSLLAGERLVRALGPGGELEPERLPRKLRAELEAALGKKHKGGDSSSGPQRLVSFRLIRDLHQHLRERDSKLYLHELLEGSEIYLPEVVKPPRNPELVARLEKIKIQLANEEYKRITRNVTCQ

SEQ ID NO: 88829 - protein, 146 aa, Homo sapiens
MKVTLSALDTSESSFTPLVVIELAQDVKEETKEWLKNRIIAKKKDGGAQLLFRPLLNKYEQETLENQNLYLVGASKIRMLLGAEAVGLVKECNDNTMRAFTYRTRQNFKGFDDNNDDFLTMAECQFIIKHELENLRAKDEKMIPGY

SEQ ID NO: 88830 - protein, 639 aa, Homo sapiens
SQGSPLSWEETKRHADHVRRHGILQFLHIYHAVKDRHKDVLKWGDEVEYMLVSFDHENKKVRLVLSGEKVLETLQEKGERTNPNHPTLWRPEYGSYMIEGTPGQPYGGTMSEFNTVEANMRKRRKEATSILEENQALCTITSFPSSSICCRLGCPGFTLPEVKPNPVEGGASKSLFFPDEAINKHPRFSTLTRNIRHRRGEKVVINVPIFKDKNTPSPFIETFTEDDEASRASKPDHIYMDAMGFGMGNCCLQVTFQACSISEARYLYDQLATICPIVMALSAASPFYRGYVSDIDCRWGVISASVDDRTREERGLEPLKNNNYRISKSRYDSIDSYLSKCGEKYNDIDLTIDKEIYEQLLQEGIDHLLAQHVAHLFIRDPLTLFEEKIHLDDANESDHFENIQSTNWQTMRFKPPPPNSDIGWRVEFRPMEVQLTDFENSAYVVFVVLLTRVILSYKLDFLIPLSKVDENMKVAQKRDAVLQGMFYFRKDICKGGNAVVDGCGKAQNSTELAAEEYTLMSIDTIINGKEGVFPGLIPILNSYLENMEVDVDTRCSILNYLKLIKKRASGELMTVARWMREFIANHPDYKQDSVITDEMNYSLILKCNQIANELCECPELLGSAFRKVKYSGSKTDSSN

SEQ ID NO: 88831 - protein, 59 aa, Homo sapiens
MAKPYEFNWQKEVPSFLQEGAVFDRYEEESFVFEPNCLFKVDEFGFFLTWRSEGKEGQV

SEQ ID NO: 88832 - protein, 60 aa, Homo sapiens
  MOD_RES (1)..(1): Any amino acid
XVMFGTQVHSICTDETAADDHPGRECRMPKANHLSWSLLLCQEGRPGEGPVRKQHGITCS

SEQ ID NO: 88833 - protein, 200 aa, Homo sapiens
YRVSKQAQLSAPTKQLFPGGTFPEDFSILFTVKPKKGIQSFLLSIYNEHGIQQIGVEVGRSPVFLFEDHTGKPAPEDYPLFRTVNIADGKWHRVAISVEKKTVTMIVDCKKKTTKPLDRSERAIVDTNGITVFGTRILDEEVFEGDIQQFLITGDPKAAYDYCEHYSPDCDSSAPKAAQAQEPQIDEVRSTRPEKVFVFQ

SEQ ID NO: 88834 - protein, 21 aa, Homo sapiens
MRLSFIVFSSQATIILPLTGD

SEQ ID NO: 88835 - protein, 198 aa, Homo sapiens
MLLILLSVALLALSSAQNLNEDVSQEESPSLIAGKPQGPPPQGGNQPQGPPPPPGKPQGPPPQGGNKPQGPPPPGKPQGPPPQGDKSRSPRSPPGKPQGPPPQGGKPQGPPPQGGNKPQGPPPPGKPQGPPPQGGSKSRSARSPPGKPQGPPQQEGNNPQGPPPPAGGNPQQPQAPPAGQPQGPPRPPQGGRPSRPPQ

SEQ ID NO: 88836 - protein, 46 aa, Homo sapiens
MASPGCLLCVLGLLLCGAASLELSRPHGDTAKKPIIVSEQEEKEFA

SEQ ID NO: 88837 - protein, 124 aa, Homo sapiens; identical to SEQ ID NO: 43774
  MOD_RES (1)..(1): Any amino acid

SEQ ID NO: 88838 - protein, 21 aa, Homo sapiens
MRFARSKRGLRLKTVDSCFQD

SEQ ID NO: 88839 - protein, 218 aa, Homo sapiens
  MOD_RES (1)..(1): Any amino acid
XVEEGVADFFEVFCQQVGSSQKTKLQEPVAVSSHVVTISSLLPATAYNCSVTSFSHDSPSVPTFIAVSTMVTEMNPNVVVISVLAILSTLLIGLLLVTLIILRKKHLQMARECGAGTFVNFASLERDGKLPYNWRRSIFAFLTLLPSCLWTDYLLAFYINPWSKNGLKKRKLTNPVQLDDFDAYIKDMAKDSDYKFSLQFEDTYFFGSKTICQKRWKS

SEQ ID NO: 88840 - protein, 185 aa, Homo sapiens
GGCGSGCGGRGSGCGGCGSGCGGCGSGCGGCGSGCGGCGGCGSGCSCSCSSCGKGGCGSCGGSKRGCVSCGVSKGACGSCGGSKGGCGSCGGSKGGCGSCGGSKGGCGSYGCSQCSCCKPCCCSSGCGSSCCQSSCCKPYCCQSSCCKPCSCFSGCGSSCCQSSCYKPCCCQSSCCVPVCCQCKI

SEQ ID NO: 88841 - protein, 230 aa, Homo sapiens
MEKTQETVQRILLEPYKYLLQLPGKQVRTKLSQAFNHWLKVPEDKLQIIIEVTEMLHNASLLIDDIEDNSKLRRGFPVAHSIYGIPSVINSANYVYFLGLEKVLTLDHPDAVKLFTRQLLELHQGQGLDIYWRDNYTCPTEEEYKAMVLQKTGGLFGLAVGLMQLFSDYKEDLKPLLNTLGLFFQIRDDYANLHSKEYSENKSFCEDLTEGKFSFPTIHAIWSRPESTQV

SEQ ID NO: 88842 - protein, 136 aa, Homo sapiens
GLRQAAQRGLQQNAALRPHQGAGMQLRRQLHRSEGDLQSQRADPVNITPESTKTGKVSSPTVNISAHVLMAPWAAFLCVPKNYLSPTWAVPTLGWSKLPGSAARSGSVTRIVSRTPWRTRTASLARSWDSMPPRWS

SEQ ID NO: 88843 - protein, 77 aa, Homo sapiens
  MOD_RES (1)..(1): Any amino acid
XATIFHELVYKQTKIISSNQELIYEGRRLVLEPGRLAQHFPKTTEENPIFVVSREPLNTIGLIYEKKLPVPYCFIRN

SEQ ID NO: 88844 - protein, 212 aa, Homo sapiens
MGLGPVFLLLAGIFPFAPPGAAAEPHSLRYNLTVLSWDGSVQSGFLTEVHLDGQPFLRCDRQKCRAKPQGQWAEDVLGNKTWDRETRDLTGNGKDLRMTLAHIKDQKEVLQSSDLGHERQEFLEGRCHEDQDTLSRYACRLPAGTTAISKIRRSPEENSAPHGECHPQRGLRGQHYRDMQGFWLLSLEYHTELASGWGIFEPRHPAVGGCPA

SEQ ID NO: 88845 - protein, 33 aa, Homo sapiens
  MOD_RES (1)..(1): Any amino acid
XFANSCTSSGATSSGGPLASYQKANMDNDINDN

SEQ ID NO: 88846 - protein, 46 aa, Homo sapiens
MDVRALPWLPWLLWLLCRGGGDADSRAPFTPTWPRSREREAAAFRS

SEQ ID NO: 88847 - protein, 65 aa, Homo sapiens
MYIKKLMEIITVENPKMPYEMKEMALEAIVQLWRIPSFVTELYINYDCDYYCSNLFEELTKLLSK

SEQ ID NO: 88848 - protein, 196 aa, Homo sapiens
  MOD_RES (1)..(1): Any amino acid
XVSPDLSCADEISECYHKLDSLTYKIDECEKKKREDYESQSNPVFRRYLNKILIEAGKLGLPDENKGDMHYDAEIILKRETLLEIQKFLNGEDWKPGALDDALSDILINFKFHDFETWKWRFEDSFGVDPYNVLMVLLCLLCIVVLVATELWTYVRWYTQLRRVLIISFLFSLGWNWMYLYKLLHSIRLKSPRWSH

SEQ ID NO: 88849 - protein, 65 aa, Homo sapiens
  MOD_RES (1)..(1): Any amino acid
XLSIQPSLNAILIPPHLRSPAGTTTLTPSSQEFHSPPRLQCSGSISAHCNLRLLGSGNSPASASE

SEQ ID NO: 88850 - protein, 21 aa, Homo sapiens
  MOD_RES (1)..(1): Any amino acid
XATLQQLEPVTGQVSVLVMCH

SEQ ID NO: 88851 - protein, 181 aa, Homo sapiens; identical to SEQ ID NO: 66396
  MOD_RES (1)..(1): Any amino acid

SEQ ID NO: 88852 - protein, 49 aa, Homo sapiens
MPLHSRWSLLMNLEREPTRWMGSRFWPLCSDTGWHVDPHAPTSLWPPTF

SEQ ID NO: 88853 - protein, 229 aa, Homo sapiens; identical to SEQ ID NO: 62053

SEQ ID NO: 88854 - protein, 61 aa, Homo sapiens
MVAGMLGLRVSLSPRLECSGVISAHCNLRLPGSSDSPASASQIAGITGPRREKQLPGEVSS

SEQ ID NO: 88855 - protein, 47 aa, Homo sapiens
GELPEKSKQQEIYQELTQLKAAVGSHSVTGWSAAGTITAHCSLKLLG

SEQ ID NO: 88856 - protein, 218 aa, Homo sapiens; identical to SEQ ID NO: 66723
  MOD_RES (1)..(1): Any amino acid

SEQ ID NO: 88857 - protein, 171 aa, Homo sapiens
  MOD_RES (1)..(1): Any amino acid
XQFEMDIQINKLKHKIDDLTAELETAGSKCLHLDTKNQILQEELLSMKTVQKKCEKLQKNKKKLEQEVINLRSHIERNMVELGQVKQYKQEIEERARQEIAEKLKEVNLFLQMQQELEKNITRELKEAAAELESGSIASPLGSTDESNLNQDLVWKASREYVQVLKKNYMI

SEQ ID NO: 88858 - protein, 83 aa, Homo sapiens
  MOD_RES (1)..(1): Any amino acid
XTNALVGMSPSSSLSALSSRAASVSSLHERILFAPGSEEAIERLKPRQLTVLCLNPQETEKIIAELNETWEEKLRRTEAIRME

SEQ ID NO: 88859 - protein, 62 aa, Homo sapiens
MDKQTEEILGDEVQLFSLDEEFDYDNVMLTSKFSPAEIENIKELCKQQKRKDTSPDLEKSCD

SEQ ID NO: 88860 - protein, 539 aa, Homo sapiens
MPPAGGPRAPRPAALPRSLSRLRECPGRSRIVLALGATQMALGCLIVAVSFAALALTTSARVRHSCPFWAGFSVLLSGLIGVVSWKRPLSLVITFFMLLSAVCVMLNLAGSILSCQNAQLVNSLEGCQLIKFDSVEVCVCCELQHQSSGCSNLGETLKLNPLQENCNAVRLTLKDLLFSVCALNVLSTIVCALATAMCCMQMVSSDVLQMFLPQRSHPANPTCVTPHGTVLHQTLDFDEFIPPLPPPPYYPPEYTCTPSTEAQRGLHLDFAPSPFGTLYDVAINSPGLLYPAELPPPYEAVVGQPPASQVTSIGQQVAESSSGDPNTSAGFSTPVPADSTSLLVSEGTATPGSSPSPDGPVGAPAPSEPALPPGRVSPEDPGMGSQVQPGPGHVSRSTSDPTLCTSSMAGDASSHRPSCSQDLEAGLSEAVPGSASMSRSATAACRAQLSPAGDPDTWKTDQRPTPEPFPATSKERPRSLVDSKAYADARVLVAKFLEHSHCALPTEAQHMVGAMRLAVTNEERLEEEAVFGADVLDQV

SEQ ID NO: 88861 - protein, 161 aa, Homo sapiens
MALVLILQLLTLWPLCHTDITPSAGRILSGGGDSSPRGNLPLLLPKARLGAGCLVPAQRCPGAAGDRGAAAAVAGGAARAGGGSWRQREPALRGPPAEHELRAVPRGRGGPAAVPPLRAALGRLHAAGRPRPRHLQLLLSHALRALRAVAAQRGAGHQLGR

SEQ ID NO: 88862 - protein, 39 aa, Homo sapiens
  MOD_RES (1)..(1): Any amino acid
XSRFPLCGGRRDHKGLTHIFNPPPKKHVTLRFLKHQQMD

SEQ ID NO: 88863 - protein, 86 aa, Homo sapiens; identical to SEQ ID NO: 56815

SEQ ID NO: 88864 - protein, 38 aa, Homo sapiens
MISASRAAAARLVGAAASRGPTAARHQIRSNQGSSCWY

SEQ ID NO: 88865 - protein, 93 aa, Homo sapiens
MLEGVSQLLCLTCHLKVQLKETDQMCRLLAPDCEIIQEVGKLYPLEIVFGMNGRIWVKAKTIQQTLILANILEACEHMTSDQRKQIFSRLAES

SEQ ID NO: 88866 - protein, 76 aa, Homo sapiens
MVHGNITPENIILNKSGAWKIMGFDFCVSSTNPSEQEPKFPCKEWDPNLPSLCLPNPEYLAPEYILSVSCETASDM

SEQ ID NO: 88867 - protein, 921 aa, Homo sapiens
MTANRDAALSSHRHPGCAQRPRTPTFASSSQRRSAFGFDDGNFPGLGERSHAPGSRLGARRRAKTARGLRGHRQRGAGAGLSRPGSARAPSPPRPGAPENPGGVLSVELPGLLAQLARSFALLLPVYALGYLGLSFSWVLLALALLAWCRRSRGLKALRLCRALALLEDEERVVRLGVRACDLPAWVHFPDTERAEWLNKTVKHMWPFICQFIEKLFRETIEPAVRGANTHLSTFSFTKVDVGQQPLRINGVKVYTENVDKRQIILDLQISFVGNCEIDLEIKRYFCRAGVKSIQIHGTMRVILEPLIGDMPLVGALSIFFLRKPLLEINWTGLTNLLDVPGLNGLSDTIILDIISNYLVLPNRITVPLVSEVQIAQLRFPVPKGVLRIHFIEAQDLQGKDTYLKGLVKGKSDPYGIIRVGNQIFQSRVIKENLSPKWNEVYEALVYEHPGQELEIELFDEDPDKDDFLGSLMIDLIEVEKERLLDEWFTLDEVPKGKLHLRLEWLTLMPNASNLDKVLTDIKADKDQANDGLSSALLILYLDSARNLPSGKKISSNPNPVVQMSVGHKAQESKIRYKTNEPVWEENFTFFIHNPKRQDLEVEVRDEQHQCSLGNLKVPLSQLLTSEDMTVSQRFQLSNSGPNSTIKMKIALRVLHLEKRERPPDHQHSAQVKRPSVSKEGRKTSIKSHMSGSPGPGGSNTAPSTPVIGGSDKPGMEEKAQPPEAGPQGLHDLGRSSSSLLASPGHISVKEPTPSIASDISLPIATQELRQRLRQLENGTTLGQSPLGQIQLTIRHSSQRNKLIVVVHACRNLIAFSEDGSDPYVRMYLLPDKRRSGRRKTHVSKKTLNPVFDQSFDFSVSLPEVQRRTLDVAVKNSGGFLSKDKGLLGKVLVALASEELAKGWTQWYDLTEDGTRPQAMT

SEQ ID NO: 88868 - protein, 125 aa, Homo sapiens
MQAPRAALVFALVIALVPVGRGNYEELENSGDTTVESERPNKVTIPSTFAAVTIKETLNANINSTNFAPDENQLEFILMVLIPLILLVLLLLSVVFLATYYKRKRTKQEPSSQGSQSALQTYLLV

SEQ ID NO: 88869 - protein, 352 aa, Homo sapiens
MSIVIPLGVDTAETSYLEMAAGSENLDKERAVLLQRRKRENMSDGDTSATESGDEVPVELYTAFQHTPTSITLTASRVSKVNDKRRKKSGEKEQHISKCKKAFREGSRKSSRVKGSAPEIDPSSDGSNFGWETKIKAWMDRYEEANNNQYSEGVQREAQRIALRLGNGNDKKEMNKSDLNTNNLLFKPPVESHIQKNKKILKSAKDLPPDALIIEYRGKFMLREQFEANGYFFKRPYPFVLFYSKFHGLEMCVDARTFGNEARFIRRSCTPNAEVRHEIQDGTIHLYIYSIHSIPKGTEITIAFDFDYGNCKYKVDCACLKENPECPVLKRSSESMENINSGYETRRKKGKK

SEQ ID NO: 88870 - protein, 142 aa, Homo sapiens
MAATASPQPLATEDADSENSSFYYYDYLDEVAFMLCRKDAVVSFGKVFLPVFYSLIFVLGLSGNLLLLMVLLRYVPRRRMVEIYLLNLAISNLLFLVTLPFWGISVAWHWVFGSFLCKMVSTLYTINFYSGIFFISCMSLDK

SEQ ID NO: 88871 - protein, 70 aa, Homo sapiens
  MOD_RES (1)..(1): Any amino acid
XGWKCARCDLRENLWLNLTDGSVLCGKWFFDSSGGNGHALEHYRDMGYPLAVKLGTITPDGADREWAPGQ

SEQ ID NO: 88872 - protein, 17 aa, Homo sapiens
MSQLVKVDEVNQIMETN

SEQ ID NO: 88873 - protein, 335 aa, Homo sapiens
MASPGCLWLLAVALLPWTCASRALQHLDPPAPLPLVIWHGMGSRYVAQTGLELLASSNPPASSYQSAGMIGDSCCNPLSMGAIKKMVEKKIPGIYVLSLEIGKTLMEDVENSFFLNVNSQVTTVCQALAKDPKLQQGYNAMGFSQGGQFLRAVAQRCPSPPMINLISVGGQHQGVFGLPRCPGESSHICDFIRKTLNAGAYSKVVQERLVQAEYWHDPIKEDVYRNHSIFLADINQERGINESYKKNLMALKKFVMVKFLNDSIVDPVDSEWFGFYRSGQAKETIPLQETSLYTQDRLGLKEMDNAGQLVFLATEGDHLQLSEEWFYAHIIPFLG

SEQ ID NO: 88874 - protein, 377 aa, Homo sapiens
MEESHFNSNPYFWPSIPTVSGQIENTMFINKMKDQLLPEKGCGLAPPHYPTLLTVPASVSLPSGISMDTESKSDQLTPHSQASVTQNITVVPVPSTGLMTAGVSCSQRWRREGSQSRGPGLVITSPSGSLVTTASSAQTFPISAPMIVSALPPGSQALQVVPDLSKKVASTLTEEGGGGGGGGGSVAPKPPRGRKKKRMLESGLPEMNDPYVLSPEDDDDHQKDGKTYRSEGNCGTGNGQSLGLMDSVPGSTTNLLCDPGCRMCSLTFYSKSEMQIHSKSHTETKPHKCPHCSKTFANSSYLAQHIRIHSGAKPYSCNFCEKSFRQLSHLQQHTRIHSKMHTETIKPHKCPHCSKTFANTSYLAQHLRIHSGAKPYN

SEQ ID NO: 88875 - protein, 117 aa, Homo sapiens
MDGIHIVAFAEEADPDGFEFLETLKAVAQDNTENPDLSIIWIDPDDFPLLVPYWEKTFDIDLSAPQIGVVNVTDADSVWMEMDDEEDLPSAEELEDWLEDVLEGEINTEDDDDDDDD

SEQ ID NO: 88876 - protein, 179 aa, Homo sapiens
GDHRVELYKVLSSLGYHVVTFDYRGWGDSVGTPSERGMTYDALHVFDWIKARSGDNPVYIWGHSLGTGVATNLVRRLCERETPPDALILESPFTNIREEAKSHPFSVIYRYFPGFDWFFLDPITSSGIKFANDENVKHISCPLLILHAEDDPVVPFQLGRKTLATGTNTFTRALSCHGY

SEQ ID NO: 88877 - protein, 48 aa, Homo sapiens
  MOD_RES (1)..(1): Any amino acid
XESVQKGFQMLADPRSFDSNAFTLLLRAAFQSLLDAQADEAVLGITGS

SEQ ID NO: 88878 - protein, 147 aa, Homo sapiens
MQELHLLWWALLLGLAQACPEPCDCGEKYGFQIADCAYRDLESVPPGFPANVTTLSLSANRLPGLPEGAFREVPLLQSLWLAHNEIRTVAAGALASLSHLKSLDLSHNLISDFAWSDLHNLSALQLLKMDSNELTFIPRDAFRSLRA

SEQ ID NO: 88879 - protein, 233 aa, Homo sapiens
MRRLICKRICDYKSFDDEESVDGNRPSSAASAFKVPAPKTSGNPANSARKPGSAGGPKVGGASKEGGAGAVDEDDFIKAFTDVPSIQIYSSRELEETLNKIREILSDDKHDWDQRANALKKIRSLLVAGAAQYDCFFQHLRLLDGALKLSAKDLRSQVVREACITVAHLSTVLGNKFDHGAEAIVPTLFNLVPNSAKVMATSGCAAIRFIIRHTHVPRLIPLITSNCTSKSVP

SEQ ID NO: 88880 - protein, 204 aa, Homo sapiens
MHSFNFVLSANLHGGAVVANYPYDKSFEHRVRGVRRTASTPTPDDKLFQKLAKVYSYAHGWMFQGWNCGDYFPDGITNGASWYSLSKGMQDFNYLHTNCFEITLELSCDKFPPEEELQREWLGNREALIQFLEQVHQGIKGMVLDENYNNLANAVISVSGINHDVTSGDHGDYFRLLLPGIYTVSATAPGYDPETVTVTVGPAE

SEQ ID NO: 88881 - protein, 153 aa, Homo sapiens
MEPAVSLAVCALLFLLWVRLKGLEFVLIHQRWVFVCLFLLPLSLIFDIYYYVRAWVVFKLSSAPRLHEQRVRDIQKQVREWKEQGSKTFMCTGRPGWLTVSLRVGKYKKTHKNIMINLMDILEVDTKKQSLALSSRLECSGTVLAHCNLHGFK

SEQ ID NO: 88882 - protein, 624 aa, Homo sapiens
MSLAAYCVICCRRIGTSTSPPKSGTHWRDIRNIIKFTGSLILGGSLFLTYEVLALKKAVTLDTQVVEREKMKSYIYVHTVSLDKGENHDPFSTVDIEDHECAVWLLLRKSKSDDKTTRLEAVREMSETHHWHDYQYRIIAQACDPKTLIGLARSEESDLRFFLLPPPLPSLKEDSSTEEELRQLLASLPQTELDECIQYFTSLALSESSQSLAAQKGGLWCFGGNGLPYAESFGEVPSATVEMFCLEAIVKHSEISTHCDKIEANGGLQLLQRLYRLHKDCPKVQRNIMRVIGNMALNEHLHSSIVRSGWVSIMAEAMKSPHIMESSHAARILANLDRETVQEKYQDGVYVLHPQYRTSQPIKADVLFIHGLMGAAFKTWRQQDSEQAVIEKPMEDEDRYTTCWPKTWLAKDCPALRIISVEYDTSLSDWRARCPMERKSIAFRSNELLRKLRAAGVGDRPVVWISHSMGGLLVKKMLLEASTKPEMSTVINNTRGIIFYSVPHHGSRLAEYSVNIRYLLFPSLEVKELSKDSPALKTLQDDFLEFAKDKNFQVLNFVETLPTYIGSMIKLHVVPVESADLGIGDLIPVDVNHLNICKPKKKDAFLYQRTLQFIREALAKDLEN

SEQ ID NO: 88883 - protein, 161 aa, Homo sapiens
  MOD_RES (1)..(1): Any amino acid
XETQKIQSNDGKELDINNQVVPKNIPKVAENVADKNEEPSSNHIPHGKALRKPPISVSQHESHQAISHLPTGQPLSPNMPPDSHINHNGNPGTSKQNPSSPLQRLIPGSNLDSEPRIQTDILKQATKDRVSDFHKLKQNDEERELQMDPADYGKQHFNDVL

SEQ ID NO: 88884 - protein, 444 aa, Homo sapiens
MESAIAEGGASRFSASSGGGGSRGAPQHYPKTAGNSEFLGKTPGQNAQKWIPARSTRRDDNSAANNSANEKERHDAIFRKVRGILNKLTPEKFDKLCLELLNVGVESKLILKGVILLIVDKALEEPKYSSLYAQLCLRLAEDAPNFDGPAAEGQPGQKQSTTFRRLLISKLQDEFENRTRNVDVYDKRENPLLPEEEEQRAIAKIKMLGNIKFIGELGKLDLIHESILHKCIKTLLEKKKRVQLKDMGEDLECLCQIMRTVGPRLDHERAKSLMDQYFARMCSLMLSKELPARIRFLLQDTVELREHHWVPRKAFLDNGPKTINQIRQDAVKDLGVFIPAPMAQGMRSDFFLEGPFMPPRMKMDRDPLGGLADMFGQMPGSGIGTGPGVIQDRFSPTMGRHRSNQLFNGHGGHIMPPTQSQFGEMGGKFMKSQISLRPAQSFLM

SEQ ID NO: 88885 - protein, 350 aa, Homo sapiens [sequence omitted]

SEQ ID NO: 88886 - protein, 702 aa, Homo sapiens
MATQADLMELDMAMEPDRKAAVSHWQQQSYLDSGIHSGATTTAPSLSGKGNPEEEDVDTSQVLYEWEQGFSQSFTQEQVADIDGQYAMTRAQRVRAAMFPETLDEGMQIPSTQFDAAHPTNVQRLAEPSQMLKHAVVNLINYQDDAELATRAIPELTKLLNDEDQVVVNKAAVMVHQLSKKEASRHAIMRSPQMVSAIVRTMQNTNDVETARCTAGTLHNLSHHREGLLAIFKSGGIPALVKMLGSPVDSVLFYAITTLHNLLLHQEGAKMAVRLAGGLQKMVALLNKTNVKFLAITTDCLQILAYGNQESKLIILASGGPQALVNIMRTYTYEKLLWTTSRVLKVLSVCSSNKPAIVEAGGMQALGLHLTDPSQRLVQNCLWTLRNLSDAATKQEGMEGLLGTLVQLLGSDDINVVTCAAGILSNLTCNNYKNKMMVCQVGGIEALVRTVLRAGDREDITEPAICALRHLTSRHQEAEMAQNAVRLHYGLPVVVKLLHPPSHWPLIKATVGLIRNLALCPANHAPLREQGAIPRLVQLLVRAHQDTQRRTSMGGTQQQFVEGVRMEEIVEGCTGALHILARDVHNRIVIRGLNTIPLFVQLLYSPIENIQRVAAGVLCELAQDKEAAEAIEAEGATAPLTELLHSRNEGVATYAAAVLFRMSEDKPQDYKKRLSVELTSSLFRTEPMAWNEVGKCEQLFIW

SEQ ID NO: 88887 - protein, 100 aa, Homo sapiens
MELALQQTYQDTCNCIKSRIKLEFEKRQQERLLLSLLPAHIAMEMKAEIIQRLQGPKAGQMENTNNFHNLYVKRHTNVSILYADIVGFTRLASDCSPGEL

SEQ ID NO: 88888 - protein, 61 aa, Homo sapiens
MFRFGQAVTRHGKIWLDDVSCYGNESALWECQHREWGSHNCYHGEDVGVNCYGEANLGLRL

SEQ ID NO: 88889 - protein, 1739 aa, Homo sapiens
  MOD_RES (1)..(1): Any amino acid
XSNVPGALDFEHIEEQAEGIFGGSEENTPLDLDDHGGRTFLRVLLHLTMHDYPPLVSGALQLLFRHFSQRQEVLQAFKQVQLLVTSQDVDNYKQIKQDLDQLRSIVEKSELWVYKGQGPDETMDGASGENEHKKTEEGNNKPQKHESTSSYNYRVVKEILIRLSKLCVQESASVRKSRKQQQRLLRNMGAHAVVLELLQIPYEKAEDTKMQEIMRLAHEFLQNFCAGNQQNQALLHKHINLFLNPGILEAVTMQHIFMNNFQLCSEINERVVQHFVHCIETHGRNVQYIKFLQTIVKAEGKFIKKCQDMVMAELVNSGEDVLVFYNDRASFQTLIQMMRSERDRMDENSPLMYHIHLVELLAVCTEGKNVYTEIKCNSLLPLDDIVRVVTHEDCIPEVKIAYINFLNHCYVDTEVEMKEIYTSNHMWKLFENFLVDICRACNNTSDRKHADSILEKYVTEIVMSIVTTFFSSPFSDQSTTLQTRQPVFVQLLQGVFRVYHCNWLMPSQKASVESCIRVLSDVAKSRAIAIPVDLDSQVNNLFLKSHSIVQKTAMNWRLSARNAARRDSVLAASRDYRNIIERLQDIVSALEDRLRPLVQAELSVLVDVLHRPELLFPENTDARRKCESGGFICKLIKHTKQLLEENEEKLCIKVLQTLREMMTKDRGYGEKLISIDELDNAELPPAPDSENATEELEPSPPLRQLEDHKRGEALRQVLVNRYYGNVRPSGRRESLTSFGNGPLSAGGPGKPGGGGGGSGSSSMSRGEMSLAEVQCHLDKEGASNLVIDLIMNASSDRVFHESILLAIALLEGGNTTIQHSFFCRLTEDKKSEKFFKVFYDRMKVAQQEIKATVTVNTSDLGNKKKDDEVDRDAPSRKKAKEPTTQITEEVRDQLLEASAATRKAFTTFRREADPDDHYQPGEGTQATADKAKDDLEMSAVITIMQPILRFLQLLCENHNRDLQNFLRCQNNKTNYNLVCETLQFLDCICGSTTGGLGLLGLYINEKNVALINQTLESLTEYCQGPCHENQNCIATHESNGIDIITALILNDINPLGKKRMDLVLELKNNASKLLLAIMESRHDSENAERILYNMRPKELVEVIKKAYMQGEVEFEDGENGEDGAASPRNVGHNIYILAHQLARHNKELQSMLKPGGQVDGDEALEFYAKHTAQIEIVRLDRTMEQIVFPVPSICEFLTKESKLRIYYTTERDEQGSKINDFFLRSEDLFNEMNWQKKLRAQPVLYWCARNMSFWSSISFNLAVLMNLLVAFFYPFKGVRGALPFEGFQKGRGTLEPHWSGLLWTAMLISLAIVIALPKPHGIRALIASTILRLIFSVGLQPTLFLLGAFNVCNKIIFLMSFVGNCGTFTRGYRAMVLDVEFLYHLLYLVICAMGLFVHEFFYSLLLFDLVYREETLLNVIKSVTRNGRSIILTAVLALILVYLFSIVGYLFFKDDFILEVDRLPNETAVPETGESLASEFLFSDVCRVESGENCSSPAPREELVPAEETEQDKEHTCETLLMCIVTVLSHGLRSGGGVGDVLRKPSKEEPLFAARVIYDLLFFFMVIIIVLNLIFGVIIDTFADLRSEKQKKEEILKTTCFICGLERDKFDNKTVTFEEHIKEEHNMWHYLCFIVLVKVKDSTEYTGPESYVAEMIKERNLDWFPRMRAMSLVSSDSEGEQNELRNLQEKLESTMKLVTNLSGQLSELKDQMTEQRKQKQRIGLLGHPPHMNVNPQQPA

SEQ ID NO: 88890 - protein, 21 aa, Homo sapiens
  MOD_RES (1)..(1): Any amino acid
XYESITSQLQFGKGTRVSTSP

SEQ ID NO: 88891 - protein, 1731 aa, Homo sapiens
MDDRCYPVIFPDERNFRPFTSDSLAAIEKRIAIQKEKKKSKDQTGEVPQPRPQLDLKASRKLPKLYGDIPRELIGKPLEDLDPFYRNHKTFMVLNRKRTIYRFSAKHALFIFGPFNSIRSLAIRVSVHSLFSMFIIGTVIINCVFMATGPAKNSNSNNTDIAECVFTGIYIFEALIKILARGFILDEFSFLRDPWNWLDSIVIGIAIVSYIPGITIKLLPLRTFRVFRALKAISVVSHHCFEKKENSPEFKMCGIWMGNSACSIQYECKHTKINPDYNYTNFDNFGWSFLAMFRLMTQDSWEKLYQQTLRTTGLYSVFFFIVVIFLGSFYLINLTLAVVTMAYEEQNKNVAAEIEAKEKMFQEAQQLLKEEKEALVAMGIDRSSLTSLETSYFTPKKRKLFGNKKRKSFFLRESGKDQPPGSDSDEDCQKKPQLLEQTKRLSQNLSLDHFDEHGDPLQRQRALSAVSILTITMKEQEKSQEPCLPCGENLASKYLVWNCCPQWLCVKKVLRTVMTDPFTELAITICIIINTVFLAMEHHKMEASFEKMLNIGNLVFTSIFIAEMCLKIIALDPYHYFRRGWNIFDSIVALLSFADVMNCVLQKRSWPFLRSFRVLRVFKLAKSWPTLNTLIKIIGNSVGALGSLTVVLVIVIFIFSVVGMQLFGRSFNSQKSPKLCNPTGPTVSCLRHWHMGDFWHSFLVVFRILCGEWIENMWECMQEANASSSLCVIVFILITVIGKLVVLNLFIALLLNSFSNEERNGNLEGEARKTKVQLALDRFRRAFCFVRHTLEHFCHKWCRKQNLPQQKEVAGGCAAQSKDIIPLVMEMKRGSETQEELGILTSVPKTLGVRHDWTWLAPLAEEEDDVEFSGEDNAQRITQPEPEQQAYELHQENKKPTSQRVQSVEIDMFSEDEPHLTIQDPRKKSDVTSILSECSTIDLQDGFGWLPEMVPKKQPERCLPKGFGCCFPCCSVDKRKPPWVIWWNLRKTCYQIVKHSWFESFIIFVILLSSGALIFEDVHLENQPKIQELLNCTDIIFTHIFILEMVLKWVAFGFGKYFTSAWCCLDFIIVIVSVTTLINLMELKSFRTLRALRPLRALSQFEGMKVVVNALIGAIPAILNVLLVCLIFWLVFCILGVYFFSGKFGKCINGTDSVINYTIITNKSQCESGNFSWINQKVNFDNVGNAYLALLQVATFKGWMDIIYAAVDSTEKEQQPEFESNSLGYIYFVVFIIFGSFFTLNLFIGVIIDNFNQQQKKLGGQDIFMTEEQKKYYNAMKKLGSKKPQKPIPRPLNKCQGLVFDIVTSQIFDIIIISLIILNMISMMAESYNQPKAMKSILDHLNWVFVVIFTLECLIKIFALRQYYFTNGWNLFDCVVVLLSIVSTMISTLENQEHIPFPPTLFRIVRLARIGRILRLVRAARGIRTLLFALMMSLPSLFNIGLLLFLIMFIYAILGMNWFSKVNPESGIDDIFNFKTFASSMLCLFQISTSAGWDSLLSPMLRSKESCNSSSENCHLPGIATSYFVSYIIISFLIVVNMYIAVILENFNTATEESEDPLGEDDFDIFYEVWEKFDPEATQFIKYSALSDFADALPEPLRVAKPNKYQFLVMDLPMVSEDRLHCMDILFAFTARVLGGSDGLDSMKAMMEEKFMEANPLKKLYEPIVTTTKRKEEERGAAIIQKAFRKYMMKVTKGDQGDQNDLENGPHSPLQTLCNGDLSSFGVAKGKVHCD

SEQ ID NO: 88892 - protein, 1084 aa, Homo sapiens
LTEYSKSLPGLSTSYAALLRIKKSSSSSLFGSKTRPRYSSPSLGTLSASSPSWLGAAQNYYSPINLYHSSDAFKQDESVDYGPVFVQEPDDIIFPTDSDEKKVALNCEVRGNPVPSYRWLRNGTEIDLESDYRYSLIDGTFIISNPSEAKDSGHYQCLATNTVGSILSREATLQFAYLGNFSGRTRSAVSVREGQGVVLMCSPPPHSPEIIYSWVFNEFPSFVAEDSRRFISQETGNLYISKVQTSDVGSYICLVKNTVTNARVLSPPTPLTLRNDGVMGEYEPKIEVHFPFTVTAAKGTTVKMECFALGNPVPTITWMKVNGYIPSKARLRKSQAVLEIPNVQLDDAGIYECRAENSRGKNSFRGQLQVYTYPHWVEKLNDTQLDSGSPLRWECKATGKPRPTYRWLKNGVPLSPQSRVEMVNGVLMIHNVNQSDAGMYQCLAENKYGAIYASAELKILASAPTFALNQLKKTIIVTKDQEVVIECKPQGSPKPTISWKKGDRAVRENKRIAILPDGSLRILNASKSDEGKYVCRGENVFGSAEIIASLSVKEPTRIELTPKRTELTVGESIVLNCKAIHDASLDVTFYWTLKGQPIDFEEEGGHFESIRAQASSADLMIRNILLMHAGRYGCRVQTTADSVSDEAELLVRGPPGPPGIVIVEEITESTATLSWSPAADNHSPISSYNLQARSPFSLGWQTVKTVPEIITGDMESAMAVDLNPWVEYEFRVVATNPIGTGDPSTPSRMIRTNEAVPKTAPTNVSGRSGRRHELVIAWEPVSEEFQNGEGFGYIVAFRPNGTRGWKEKMVTSSEASKFIYRDESVPPLTPFEVKVGVYNNKGDGPFSQIVVICSAEGEPSAAPTDVKATSVSVSEILVAWKHIKESLGRPQGFEVGYWKDMEQEDTAETVKTRGNESFVILTGLEGNTLYHFTVRAYNGAGYGPPSSEVSATTKKSPPSQAPSNLRWEQQGSQVSLGWEPVIPLANESEVVGYKVFYRQEGHSNSQVIETQKLQAVVPLPDAGVYIIEVRAYSEGGDGTASSQIRVPSYSGGKITSAQSTLHSLSTSSSSVTLLLALMIPSTSW

SEQ ID NO: 88893 - protein, 1299 aa, Homo sapiens
MWPSQLLIFMMLLAPIIHGGKHSERHPALAAPLRHAERSPGGALPPRHLLQQPAAERTAAHRGQGPRGATRGVRGPGAQGAQIAAQAFSRAPIPMAVVRRELSCESYPIELRCPGTDVIMIESANYGRTDDKICDSDPAQMENIRCYLPDAYKIMSQRCNNRTQCAVVAGPDVFPDPCPGTYKYLEVQYECVPYKVEQKVFLCPGLLKGVYQSEHLFESDHQSGAWCKDPLQASDKIYYMPWTPYRTDTLTEYSSKDDFIAGRPTTTYKLPHRVDGTGFVVYDGALFFNKERTRNIVKFDLRTRIKSGEAIIANANYHDTSPYRWGGKSDIDLAVDENGLWVIYATEQNNGKIVISQLNPYTLRIEGTWDTAYDKRSASNAFMICGILYVVKSVYEDDDNEATGNKIDYIYNTDQSKDSLVDVPFPNSYQYIAAVDYNPRDNLLYVWNNYHVVKYSLDFGPLDSRSGQAHHGQVSYISPPIHLDSELERPSVKDISTTGPLGMGSTTTSTTLRTTTLSPGRSTTPSVSGRRNRSTSTPSPAVEVLDDMTTHLPSASSQIPALEESCEAVEAREIMWFKTRQGQIAKQPCPAGTIGVSTYLCLAPDGIWDPQGPDLSNCSSPWVNHITQKLKSGETAANIARELAEQTRNHLNAGDITYSVRAMDQLVGLLDVQLRNLTPGGKDSAARSLNKLQKRERSCRAYVQAMVETVNNLLQPQALNAWRDLTTSDQLRAATMLLHTVEESAFVLADNLLKTDIVRENTDNIKLEVARLSTEGNLEDLKFPENMGHGSTIQLSANTLKQNGRNGEIRVAFVLYNNLGPYLSTENASMKLGTEALSTNHSVIVNSPVITAAINKEFSNKVYLADPVVFTVKHIKQSEENFNPNCSFWSYSKRTMTGYWSTQGCRLLTTNKTHTTCSCNHLTNFAVLMAHVEVKHSDAVHDLLLDVITWVGILLSLVCLLICIFTFCFFRGLQSDRNTIHKNLCISLFVAELLFLIGINRTDQPIACAVFAALLHFFFLAAFTWMFLEGVQLYIMLVEVFESEHSRRKYFYLVGYGMPALIVAVSAAVDYRSYGTDKVCWLRLDTYFIWSFIGPATLIIMLNVIFLGIALYKMFHHTAILKPESGCLDNIKSWVIGAIALLCLLGLTWAFGLMYINESTVIMAYLFTIFNSLQGMFIFIFHCVLQKKVRKEYGKCLRTHCCSGKSTESSIGSGKTSGSRTPGRYSTGSQSRIRRMWNDTVRKQSESSFITGDINSSASLNREPYRETSMGVKLNIAYQIGASEQCQGYKCHGYSTTEW

SEQ ID NO: 88894 - protein, 122 aa, Homo sapiens
  MOD_RES (1)..(1): Any amino acid
XPLYAVMYPVFNELERVNLSAAQTLRAAFIKAEKENPGLTQDIIMKILEKKSVEVNFTESLLRMAADDVEEYMIERPEPEFQDLNEKARALKQILSKIPDEINDRVRFLQTIKHLNTKRKNL

SEQ ID NO: 88895 - protein, 94 aa, Homo sapiens
MAAEPNKTEIQTLFKRLRAVPTNKACFDCGAKNPSWASITYGVFLCIDCSGVHRSLGVHLSFIRSTELDSNWNWFQLRCMQVGGNANAIITSLS

SEQ ID NO: 88896 - protein, 670 aa, Homo sapiens [sequence omitted]

SEQ ID NO: 88897 - protein, 524 aa, Homo sapiens
LGSEVSTSVMRLKLEVEEKKQAMLLLQRALAQQRDLTARRVKETEKALSRQLQRQREHYEATIQRHLAFIDQLIEDKKVLSEKCEAVVAELKQEDQRCTERVAQAQAQHELEIKKLKELMSATEKARREKWISEKTKKIKEVTVRGLEPEIQKLIARHKQEVRRLKSLHEAELLQSDERASQRCLRQAEELREQLEREKEALGQQERERARQRFQQHLEQEQWALQQQRQRLYSEVAEERERLGQQAARQRAELEELRQQLEESSSALTRALRAEFEKGREEQERRHQMELNTLKQQLELERQAWEAGRTRKERMSPQEAWLLNREQELREEIRKGRDKEIELVIHRLEADMALAKEESEKAAESRIKRLRDKYEAELSELEQSERKLQERCSELKGQLGEAEGENLRLQGLVRQKERALEDAQAVNEQLSSERSNLAQVIRQEFEDRLAASEEETRQAKAELATLQARQQLELEEVHRRVKTALARKEEAVSSLRTQHEAAVKRADHLEELLEQHRRPTPSTK

SEQ ID NO: 88898 - protein, 1035 aa, Homo sapiens
MPEQERQITAREGASRKILSKLSLPTRAWEPAMKKSFAFDNVGYEGGLDGLGPSSQVATSTVRILGMTCQSCVKSIEDRISNLKGIISMKVSLEQGSATVKYVPSVVCLQQVCHQIGDMGFEASIAEGKAASWPSRSLPAQEAVVKLRVEGMTCQSCVSSIEGKVRKLQGVVRVKVSLSNQEAVITYQPYLIQPEDLRDHVNDMGFEAAIKSKVAPLSLGPIDIERLQSTNPKRPLSSANQNFNNSETLGHQGSHVVTLQLRIDGMHCKSCVLNIEENIGQLLGVQSIQVSLENKTAQVKYDPSCTSPVALQRAIEALPPGNFKVSLPDGAEGSGTDHRSSSSHSPGSPPRNQVQGTCSTTLIAIAGMTCASCVHSIEGMISQLEGVQQISVSLAEGTATVLYNPSVISPEELRAAIEDMGFEASVVSGEAMPVTKKPGSTVIAGSINAHGSVLIKATHVGNDTTLAQIVKLVEEAQMSKAPIQQLADRFSGYFVPFIIIMSTLTLVVWIVIGFIDFGVVQRYFPNPNKHISQTEVIIRFAFQTSITVLCIACPCSLGLATPTAVMVGTGVAAQNGILIKGGKPLEMAHKIKTVMFDKTGTITHGVPRVMRVLLLGDVATLPLRKVLAVVGTAEASSEHPLGVAVTKYCKEELGTETLGYCTDFQAVPGCGIGCKVSNVEGILAHSERPLSAPASHLNEAGSLPAEKDAVPQTFSVLIGNREWLRRNGLTISSDVSDAMTDHEMKGQTAILVAIDGVLCGMIAIADAVKQEAALAVHTLQSMGVDVVLITGDNRKTARAIATQVGINKVFAEVLPSHKVAKVQELQNKGKKVAMVGDGVNDSPALAQADMGVAIGTGTDVAIEAADVVLIRNDLLDVVASIHLSKRTVRRIRINLVLALIYNLVGIPIAAGVFMPIGIVLQPWMGSAAMAASSVSVVLSSLQLKCYKKPDLERYEAQAHGHMKPLTASQVSVHIGMDDRWRDSPRATPWDQVSYVSQVSLSSLTSDKPSRHSAAADDDGDKWSLLLNGRDEEQYI

SEQ ID NO: 88899 - protein, 293 aa, Homo sapiens
MGLGKTCQTIALFIYLAGRLNDEGPFLILCPLSVLSNWKEEMQRFAPGLSCVTYAGDKEERACLQQDLKQESRFHVLLTTYEICLKDASFLKSFPWSVLVVDEAHRLKNQSSLLHKTLSEFSVVFSLLLTGTPIQNSLQELYSLLSFVEPDLFSKEEVGDFIQRYQDIEKESESASELHKLLQPFLLRRVKAEVATELPKKTEVVIYHGMSALQKKYYKAILMKDLDAFENETAKKVKLQNILSQLRKCVDHPYLFDGVEPEPFEVGDHLTEASGKLHLLDKLLAFLYSGLQL

SEQ ID NO: 88900 - protein, 136 aa, Homo sapiens
MELLKLNRSVQGTGPGPGASLCRPGAPLLNSSSVGNLSCEPPRIRGAGTRELELAIRITLYAVIFLMSVGGNMLIIVVLGLSRRLRTVTNAFLLSLAVSDLLLAVACMPFTLLPNLMGTFIFGTVICKAVSYLMGG

SEQ ID NO: 88901 - protein, 411 aa, Homo sapiens
MTSTNSVKLEMQSDEECDRKPLSREDEIRGHDEGSSLEEPLIESSEVADNRKVQELQGEGGIRLPNGERPFHCNQCGASFTQKGNLLRHIKLHSGEKPFKCPFCSYACRRRDALTGHLRTHSVPPMEDCKEQEPIMDNNISLVPFERPAVIEKLTGNMGKRKSSTPQKFVGEKLMRFSYPDIHFDMNLTYEKEAELMQSHMMDQAINNAITYLGAEALHPLMQHPPSTIAEVAPVISSAYSQVYHPNRIERPISRETADSHENNMDGPISLIRPKSRPQEREASPSNSCLDSTDSESSHDDHQSYQGHPALNPKRKQSPAYMKEDVKALDTTKAPKGSLKDIYKVFNGEGEQIRAFKCEHCRVLFLDHVMYTIHMGCHGYRDPLECNICGYRSQDRYEFSSHIVRGEHTFH

SEQ ID NO: 88902 - protein, 98 aa, Homo sapiens
MAFWCQRDSYAREFTTTVVSCCPAELQTEGSNGKKEVLSGFQVVLEDTVLFPEGGGQMVSCSVARLERSGVISAYCNLRLPGSSNSPASVSRVARTTA

SEQ ID NO: 88903 - protein, 173 aa, Homo sapiens
MGKAEMWLIRTYWDFEFPRPFLPNVDFVGGLHCKPAKPLPKEMEEFVQSSGENGIVVFSLGSMISNMSEESANMIASALAQIPQKVLWRFDGKKPNTLGSNTRLYKWLPQNDLLGHPKTKAFITHGGTNGIYEAIYHGIPMVGIPLFADQHDNIAHMKAKGAALSVDIRTMSS

SEQ ID NO: 88904 - protein, 162 aa, Homo sapiens
MNPAAEAEFNILLATDSYKVTHYKQYPPNTSKVYSYFECREKKTENSKLRKVKYEETVFYGLQYILNKYLKGKVVTKEKIQEAKDVYKEHFQDDVFNEKGWNYILEKYDGHLPIEIKAVPEGFVIPRGNVLFTVENTDPECYWLTNWIEVNCFFNSYLTLIE

SEQ ID NO: 88905 - protein, 187 aa, Homo sapiens
MALAPGPDAHAHLPPLIELKFQMANSMNGRNPGGRGGNPRKGRILGIIDAIQDAVGPPKQAAADRRTVEKTWKLMDKVVRLCQNPKLQLKNSPPYILDILPDTYQHLRLILSKYDDNQKLAQLSENEYFKIYIDSLMKKSKRAIRLFKEGKERMYEEQSQDRRNLTKLSLIFSHMLAEIKAIFPNGQ

SEQ ID NO: 88906 - protein, 294 aa, Homo sapiens [sequence omitted]

SEQ ID NO: 88907 - protein, 62 aa, Homo sapiens
  MOD_RES (1)..(1): Any amino acid
XREAGEVAGVIRYRRGEWWPCMTTTPEKARPTSMSRPNLHFAQEILLQFLVKLMKMDFIMGS

SEQ ID NO: 88908 - protein, 492 aa, Homo sapiens
MVTPSPPGNHSLSLEAPRLHTASDLLDPWSLERPRFCLLSKEEGKSFGFHLQQELGRAGHVVCRVDPGTSAQRQGLQEGDRILAVNNDVVEHEDYAVVVRRIRASSPRVLLTVLARHAHDVARAQLGEDAHLCPTLGPGVRPRLCHIVKDEGGFGFSVTHGNQGPFWLVLSTGGAAERAGVPPGARLLEVNGVSVEKFTHNQLTRKLWQSGQQVTLLVAGPEVEEQCRQLGLPLAAPLAEGWALPTKPRCLHLEKGPQGFGFLLREEKGLDGRPGQFLWEVDPGLPAKKAGMQAGDRLVAVAGESVEGLGHEETVSRIQGQGSCVSLTVVDPEADRFFSMVRLSPLLFLENTEAPASPRGSSSASLVETEDPSLEDTSVPSVPLGSRQCFLYPGPGGSYGFRLSCVASGPRLFISQVTPGGSAARAGLQVGDVILEVNGYPVGGQNDLERLQQLPEAEPPLCLKLAARSLRGLEAWIPPGAAEDWALASDLL

SEQ ID NO: 88909 - protein, 50 aa, Homo sapiens
  MOD_RES (1)..(1): Any amino acid
XRNLHSHHFTSPLSGNQENNMVDLSVGKKRCMAWPSQVRTTTGKPWKASS

SEQ ID NO: 88910 - protein, 111 aa, Homo sapiens
MMDVSGVGFPSKVPWKKMSAEELENQYCPSRWVVRLGAEEALRTYSQIGIEATTRARATRKSLLHVPYGDGEGEKVDIYFPDESSEALPFFLFFHGGYWQSGRLFPGEWGL

SEQ ID NO: 88911 - protein, 536 aa, Homo sapiens
MGRGSGTFERLLDKATSQLLLETDWESILQICDLIRQGDTQAKYAVNSIKKKVNDKNPHVALYALEVMESVVKNCGQTVHDEVANKQTMEELKDLLKRQVEVNVRNKILYLIQAWAHAFRNEPKYKVVQDTYQIMKVEGHVFPEFKESDAMFAAERAPDWVDAEECHRCRVQFGVMTRKHHCRACGQIFCGKCSSKYSTIPKFGIEKEVRVCEPCYEQLNRKAEGKATSTTELPPEYLTSPLSQQSQLPPKRDETALQEEEELQLALALSQSEAEEKERLRQKSTYTSYPKAEPMPSASSAPPASSLYSSPVNSSAPLAEDIDPELARYLNRNYWEKKQEEARKSPTPSAPVPLTEPAAQPGEGHAAPTNVVENPLPETDSQPIPPSGGPFSEPQFHNGESEESHEQFLKALQNAVTTFVNRMKSNHMRGRSITNDSAVLSLFQSINGMHPQLLELLNQLDERRRRCPRHGASAQGQPVYYEGLQDKLAQIRDARGALSALREEHREKLRRAAEEAERQRQIQLAQKLEIMRQKKQ

SEQ ID NO: 88912 - protein, 130 aa, Homo sapiens
MQLSFTQLTIDYYPYHKAGDSCNHWMYFSDATKTKNGWANELLHEFECNVEMLKQAVKDHNVGSPPKSPTHASPQHTQTEKDYPLKGTCRTPSVLSQQSKAKLMSSSVVVRLADFNIYQVSTAEQCRSSP

SEQ ID NO: 88913 - protein, 59 aa, Homo sapiens
MKAQRERLQIPGLTLDCRTSNRKSLIGNGQSPALPRPHSPLSAHAGNSPQDSPRNFSPS

SEQ ID NO: 88914 - protein, 94 aa, Homo sapiens
MAGCAARAPPGSEARLSLATFLLGASVLALPLLTRAGLQGRTGLALYVAGLNALLLLLYRPPRYQIAIRACFLGFVFGCGTLLSFSQSSWSHFG

SEQ ID NO: 88915 - protein, 43 aa, Homo sapiens
MESPCSPCSPCNPCSPCNPCSPYDPCNPCYPCGSRFSCRKMIL

SEQ ID NO: 88916 - protein, 159 aa, Homo sapiens
MSSKESCGKKETSQRKDTTTSSPNFGEKDKKERKTPASSTSSSSIRSVSSEKRKLKSDHTDVLYYNIKRRQGLKRLSVEIDTLRRRPKIGSSSQRPIKLKEASYSNDNQIILQSPSSNGTKKDIHKCVDFKPKDIKLTNAGSKLDHGIKSLSSPKIASD

SEQ ID NO: 88917 - protein, 23 aa, Homo sapiens
MSASPDDLSTGGRLQNMTVDECF

SEQ ID NO: 88918 - protein, 325 aa, Homo sapiens
  MOD_RES (1)..(1): Any amino acid
XATLQQLEPVTGQVSVLVMCHTRELAFQISKEYERFSKYMPNVKVAVFFGGLSIKKDEEVLKKNCPHIVVGTPGRILALARNKSLNLKHIKHFILDECDKMLEQLDMRRDVQEIFRMTPHEKQVMMFSATLSKEIRPVCRKFMQDPMEIFVDDETKLTLHGLQQYYVKLKDNEKNRKLFDLLDVLEFNQVVIFVKSVQRCIALAQLLVEQNFPAIAIHRGMPQEERLSRYQQFKDFQRRILVATNLFGRGMDIERVNIAFNYDMPEDSDTYLHRCYPLSPSRWPEQAGLAPRAWLSHLCPMRMMPRSSMMCRIALRSILVSCLMR

SEQ ID NO: 88919 - protein, 79 aa, Homo sapiens
MASRLPTAWSCEPVTFEDVTLGFTPEEWGLLDLKQKSLYREVMLENYRNLVSVEHQLSKPDVVSQLEEAEDFWPVERGI

SEQ ID NO: 88920 - protein, 172 aa, Homo sapiens
MALSLAQGLAFLHEERWQNGQYKPGIAHRDLSSQNVLIREDGSCAIGDLGLALVLPGLTQPPAWTPTQPQGPAAIMEAGTQRYMAPELLDKTLDLQDWGMALRRADIYSLALLLWEILSRCPDLRPDSSPPPFQLAYEAELGNTPTSDELWALAVQERRRPYIPSTWRCFAT

SEQ ID NO: 88921 - protein, 271 aa, Homo sapiens
MFEACSQGPLNICEEMTILHGGFLLAEQLFHPKALAELTKSDWERVGRPIVEALREISSAAAHSQPFAWKKKALIIIWAKVLQPHPVTPSDTETRWQEDLFFSVGNMIPTINHTILFELLKSLEASGLFIQLLMALPTTICHAELERFLEHVTVDTSAEDVAFFLDVWWEVMKHKGHPQDPLLSQFSAMAHKYLPALDEFPHPPKRLRSDPDACPTMPLLAMLLRGLTQIQSRILGPGRKCCALANLADMLTVFALTEDDPQEVSATVYLD

SEQ ID NO: 88922 - protein, 117 aa, Homo sapiens
MSEIPSTIVSKNMTNDKNSLESMNISSSSSTEENPKKQARKNEEHGPDPSANPFHLSGDVDFFLLRDQERNKALSVSIQDRRQHLRELPCSHCFLEWPHCPSQRSTFLRSFSFQNSQ

SEQ ID NO: 88923 - protein, 211 aa, Homo sapiens
  MOD_RES (1)..(1): Any amino acid
XIQQIRMEKELRAQQILEAKKKKKEEAANAKLLEAEKRIKEKEMRRQQAVLLKHQELERHRLDMERERRRQHMMLMKAMEARKKAEEKERLKQEKRDEKRLNKERKLEQRRLELEMAKELKKPNEDMCLADQKPLPELPRIPGLVLSGSTFSDCLMVVQFLRNFGKVLGFDVNIDVPNLSVLQEGLLNIGDSMGEVQDLLVRLLSAAVCDP

SEQ ID NO: 88924 - protein, 196 aa, Homo sapiens
MRVVVIGAGVIGLSTALCIHERYHSVLQPLDIKVYADRFTPLTTTDVAAGLWQPYLSDPNNPQEADWSQQTFDYLLSHVHSPNAENLGLFLISGYNLFHEAIPDPSWKDTVLGFRKLTPRELDMFPDYGYGWFHTSLILEGKNYLQWLTERLTERGVKFFQRKVESFEEVAREGADVIVNCTGVWAGALQRDPLLQ

SEQ ID NO: 88925 - protein, 410 aa, Homo sapiens
MSLMVVSMACVGFFLLEGPWPHVGGQDKPFLSAWPGTVVSEGQHVTLQCRSRLGFNEFSLSKEDGMPVPELYNRIFRNSFLMGPVTPAHAGTYRCCSSHPHSPTGWSAPSNPVVIMVTGVHRKPSLLAHPGPLVKSGETVILQCWSDVRFEHFLLHREGITEDPLRLVGQLHDAGSQVNYSMGPMTPALAGTYRCFGSVTHLPYELSAPSDPLDIVVVGLYGKPSLSAQPGPTVQAGENVTLSCSSRSLFDIYHLSREAEAGELRLTAVLRVNGTFQANFPLGPVTHGGNYRCFGSFRALPHAWSDPSDPLPVSVTGNSRNLHVLIGTSVVIIPFAILLFFLLHRWCANKKNAVVMDQEPAGNRTVNREDSDEQDPQEVTYAQLNHCVFTQRKITRPSQRPKTPPTDTSV

SEQ ID NO: 88926 - protein, 844 aa, Homo sapiens
MPAVKKEFPGREDLALALATFHPTLAALPLPPLPGYLAPLPAAAALPPAASLPASAAGYEALLAPPLRPPRAYLSLHEAAPHLHLPRDPLALERFSATAAAAPDFQPLLDNGEPCIEVECGANRALLYVRKLCQGSKGPSIRHRGEWLTPNEFQFVSGRETAKDWKRSIRHKGKSLKTLMSKGILQVHPPICDCPGCRISSPVNRGRLADKRTVALPAARNLKKERTPSFSASDGDSDGSGPTCGRRPGLKQEDGPHIRIMKRRVHTHWDVNISFREASCSQDGNLPTLISSVHRSRHLVMPEHQSRCEFQRGSLEIGLRPAGDLLGKRLGRSPRISSDCFSEKRARSESPQEALLLPRELGPSMAPEDHYRRLVSALSEASTFEDPQRLYHLGLPSHDLLRVRQEVAAAALRGPSGLEAHLPSSTAGQRRKQGLAQHREGAAPAAAPSFSERELPQPPPLLSPQNAPHVALGPHLRPPFLGVPSALCQTPGYGFLPPAQAEMFAWQQELLRKQNLARLELPADLLRQKELESARPQLLAPETALRPNDGAEELQRRGALLVLNHGAAPLLALPPQGPPGSGPPTPSRDSARRAPRKGGPGPASARPSESKEMTGARLWAQDGSEDEPPKDSDGEDPETAAVGCRGPTPGQAPAGGAGAEGKGLFPGSTLPLGFPYAVSPYFHTGAVGGLSMDGEEAPAPEDVTKWTVDDVCSFVGGLSGCGEYTRVFREQGIDGETLPLLTEEHLLTNMGLKLGPALKIRAQVARRLGRVFYVASFPVALPLQPPTLRAPERELGTGEQPLSPTTATSPYGGGHALAGQTSPKQENGTLALLPGAPDPSQPLC

SEQ ID NO: 88927 - protein, 251 aa, Homo sapiens
MGVGTKARASHWRRLLSLGATPEEPLLDFKIPDDNFSIPEGEEDLAKAIQMAQEQATDTEILERKTVLPSKHAVPEVIEDFLCNFLIKMGMTRTLDCFQSEWYELIQKGVTELRTVGNVPDVYTQIMLLENENKNLKKDLKHYKQAADKAREDLLKIQKERDFHRMHHKRIVQEKNKLINDLKGLKLHYASYEPTIRVLHEKHHTLLKEKMLTSLERDKVVGQISGLQETLKKLQRGHSYHGPQIKGKCKM

SEQ ID NO: 88928 - protein, 26 aa, Homo sapiens
MHYPTALLFLILANGAQAFRICAFNA

SEQ ID NO: 88929 - protein, 456 aa, Homo sapiens
MQSVVQLIMTRDSDGYENSTDGEMCDKDALEEDSESVSEIGSDEESENEITSVGRASGDDDGSEDDEEEDEDEEEDEDEDSEDDDKSDSGPDLARGKGNIETSSEDEDDTADLFPEESGFEHAWRELDKDAPRADEITRRLAVCNMDWDRLKAKDLLALFNSFKPKGGVIFSVKIYPSEFGKERMKEEQVQGPVELLSIPEDAPEKDWTSREKLRDYQFKRLKYYYAVVDCDSPETASKIYEDCDGLEFESSCSFIDLRFIPDDITFDDEPKDVASEVNLTAYKPKYFTSAAMGTSTVEITWDETDHERITMLNRKFKKEELLDMDFQAYLASSSEDEEEIEEELQGDDGVNVEEDGKTKKSQKDDEEQIAKYRQLLQVIQEKEKKGKENDMEMEIKWVPGLKESAEEMVKNKLEGKDKLTPWEQFLEKKKEKKRLKRKQKALAEEASEEELPSLI

SEQ ID NO: 88930 - protein, 1571 aa, Homo sapiens
VEDRKHFGAVEAKPELSLEVQLQAERDAIDRKEKEITNLEEQLEQFREELENKNEEVQQLHMQLEIQKKESTTRLQELEQENKLFKDDMEKLGLAIKESDAMSTQDQHVLFGKFAQIIQEKEVEIDQLNEQVTKLQQQLKITTDNKVIEEKNELIRDLETQIECLMSDQECVKRNREEEIEQLNEVIEKLQQELANIGQKTSMNAHSLSEEADSLKHQLDVVIAEKLALEQQVETANEEMTFMKNVLKETNFKMNQLTQELFSLKRERESVEKIQSIPENSVNVAIDHLSKDKPELEVVLTEDALKSLENQTYFKSFEENGKGSIINLETRLLQLESTVSAKDLELTQCYKQIKDMQEQGQFETEMLQKKIVNLQKIVEEKVAAALVSQIQLEAVQEYAKFCQDNQTISSEPERTNIQNLNQLREDELGSDISALTLRISELESQVVEMHTSLILEKEQVEIAEKNVLEKEKKLLELQKLLEGNEKKQREKEKKRSPQDVEVLKTTTELFHSNEESGFFNELEALRAESVATKAELASYKEKAEKLQEELLVKETNMTSLQKDLSQVRDHLAEAKEKLSILEKEDETEVQESKKACMFEPLPIKLSKSIASQTDGTLKISSSNQTPQILVKNAGIQINLQSECSSEEVTEIISQFTEKIEKMQELHAAEILDMESRHISETETLKREHYVAVQLLKEECGTLKAVIQCLRSKEGSSIPELAHSDAYQTREICSSDSGSDWGQGIYLTHSQGFDIASEGRGEESESATDSFPKKIKGLLRAVHNEGMQVLSLTESPYSDGEDHSIQQVSEPWLEERKAYINTISSLKDLITKMQLQREAEVYDSSQSHESFSDWRGELLLALQQVFLEERSVLLAAFRTELTALGTTDAVGLLNCLEQRIQEQGVEYQAAMECLQKADRRSLLSEIQALHAQMNGRKITLKREQESEKPSQELLEYNIQQKQSQMLEMQVELSSMKDRATELQEQLSSEKMVVAELKSELAQTKLELETTLKAQHKHLKELEAFRLEVKDKTDEVHLLNDTLASEQKKSRELQWALEKEKAKLGRSEERDKEELEDLKFSLESQKQRNLQLNLLLEQQKQLLNESQQKIESQRMLYDAQLSEEQGRNLELQPTTWSLTSDRTRNWVLQQKIEGETKESNYAKLIEMNGGGTGCNHELEMIRQKLQCVASKLQVLPQKASERLQFETADDEDFIWVQENIDEIILQLQKLTGQQGEEPSLVSPSTSCGSLTERLLRQNAELTGHISQLTEEKNDLRNMVMKLEEQIRWYRQTGAGRDNSSRFSLNGGANIEAIIASEKEVWNREKLTLQKSLKRAEAEVYKLKAELRNDSLLQTLSPDSEHVTLKRIYGKYLRAESFRKALIYQKKYLLLLLGGFQECEDATLALLARMGGQPAFTDLEVITNRPKGFTRFRSAVRVSIAISRMKFLVRRWHRVTGSVSININRDGFGLNQGAEKTDSFYHSSGGLELYGEPRHTTYRSRSDLDYIRSPLPFQNRYPGTPADFNPGSLACSQLQNYDPDRALTDYITRLEALQRRLGTIQSGSTTQFHAGMRR

SEQ ID NO: 88931 - protein, 779 aa, Homo sapiens
MGDEKDSWKVKTLDEILQEKKRRKEQEEKAEIKRLKNSDDRDSKRDSLEEGELRDHCMEITIRNSPYRREDSMEDRGEEDDSLAIKPPQQMSRKEKVHHRKDEKRKEKWKHARVKEREHERRKRHREEQDKARREWERQKRREMAREHSRRERGNDGVCLFRDRLEQLERKRERERKMREQQKEQREQKERERRAEERRKEREARREVSAHHRTMREDYSDKVKASHWSRSPPRPPRERFELGDGRKPVKEEKMEERDLLSDLQDISDSERKTSSAESSSAESGSGSEEEEEEEEEEEEEGSTSEESEEEEEEEEEEEEETGSNSEEASEQSAEEVSEEEMSEDEERENENHLLVVPESRFDRDSGESEEAEEEVGEGTPQSSALTEGDYVPDSPALLPIELKQELPKYLPALQGCRSVEEFQCLNRIEEGTYGVVYRAKDKKTDEIVALKRLKMEKEKEGFPITSLREINTILKAQHPNIVTVREIVVGSNMDKIYIVMNYVEHDLKSLMETMKQPFLPGEVKTLMIQLLRGVKHLHDNWILHRDLKTSNLLLSHAGILKVGDFGLAREYGSPLKAYTPVVVTQWYRAPELLLGAKEYSTAVDMWSVGCIFGELLTQKPLFPGNSEIDQINKVFKELGTPSEKIWPGYSELPVVKKMTFSEHPYNNLRKRFGALLSDQGFDLMNKFLTYFPGRRISAEDGLKHEYFRETPLPIDPSMFPTWPAKSEQQRVKRGTSPRPPEGGLGYSQLGDDDLKETGFHLTTTNQGASAAGPGFSLKF

SEQ ID NO: 88932 - protein, 77 aa, Homo sapiens
MEAASRLTSAIKPEIAKMLMELSAGAANFTDQKEFSLQDIEVLGRCFLTVVQVHFQFLTHALQKVQPVAHSCFAEVI

SEQ ID NO: 88933 - protein, 107 aa, Homo sapiens
MGDKPIWEQIGSSFIQHYYQLFDNDRTQLGAIYIDASCLTWEGQQFQGKAAIVEKLSSLPFQKIQHSITAQDHQPTPDSCIISMVVGQLKADEDPIMGFHQMFLLKN

SEQ ID NO: 88934 - protein, 88 aa, Homo sapiens
VRKLLGPPEKGKCILASVAVSAGWGEVIPVVAPWRPWGPSPSMNMGALSSSSRIRTASPVLWDLRPSSLRMMKLEMEPQEWLSWLVPC

SEQ ID NO: 88935 - protein, 143 aa, Homo sapiens
  MOD_RES (1)..(1): Any amino acid
XFPRGERLGFSGCSAVLSGGIGSSSASFRARVKGSASFGSKSLSCLGGSRSLALSAAARRGGGRLGGFVGTAFGSAGLGPKCPSVCPPGGIPQVTVNKSLLAPLNVEMDPEIQRVRAQEREQIKALNNKFASFIDKKTPAFIA

SEQ ID NO: 88936 - protein, 160 aa, Homo sapiens
TPEDGDPEVRDGSQGRKTEREKKEREAGGNTGRERKRNRKQGNAKTSETQTQGERMTEIQGHTARPRPPENWTQKHTAGCTGEEDGGERDQGGHSHSPPTAGGADDQQGDPGEEPSGPVPPHPEAGLRLLRPRAPCPASPGGSSCGSEAPASGFGPEKHL

SEQ ID NO: 88937 - protein, 62 aa, Homo sapiens
MHQLFRLVLGQKDLSRAGDLFSLDDSEIEDSLTEALEQIKIISSSSDYQTNNNDQAVVEICI

SEQ ID NO: 88938 - protein, 178 aa, Homo sapiens
  MOD_RES (1)..(1): Any amino acid
XHSFHVNFEDNDNRSVLKGGPFSDSYRLFQFHFHWGSTNEHGSEHTVDGVKYSAELHVAHWNSAKYSSLAEAASKADGLAVIGVLMKVGEANPKLQKVLDALQAIKTKGKRAPFTNFDPSTLLPSSLDFWTYPGSLTHPPLYESVTWIICKESISVSSEQHNNRPTQPLKGRTVRASF

SEQ ID NO: 88939 - protein, 129 aa, Homo sapiens
MENDNTVLLNPPLFALDKDAPLRYAGEICGFRLHGSGVPFEAVILDKATGEGLIRAKEPVDCEAQKEHTFTIQAYDCGEGPDGANTKKSHKATVHVRVNDVNEFAPVFVERLYRAAVTEGKLYDRILRV

SEQ ID NO: 88940 - protein, 308 aa, Homo sapiens
MAAALGASGGAGAGDDDFDQFDKPGAERSWRRRAADEDWDSELEDDLLGEDLLSGKKNQSDLSDEELNDDLLQSDNEDEENFSSQGVTISLNATSGMVTSFELSDNTNDQSGEQESEYEQEQGEDELVYHKSDGSELYTQEYPEEGQYEGHEAELTEDQIEYVEEPEEEQLYTDEVLDIEINEPLDEFTDEEYLQAYGGQQGLQEQEDCVAEDELDEITDAQVAPATEEGGMETLELQKDIKEESDEEEEDDEESGRLRFKTERKEGTIIRLSDVTRERRNIPETLGNFFACLPSSFTLISTSSIVLL

SEQ ID NO: 88941 - protein, 64 aa, Homo sapiens
  MOD_RES (1)..(1): Any amino acid
XKPCLMIRVANMRKSLLIGCQVTGKLLQTHQTKEGENIRLNQAAQRRSVSLCPVNGRTQANMFL

SEQ ID NO: 88942 - protein, 47 aa, Homo sapiens
MCDRNGGRRLRQWLIEQIDSSMYPGLIWENEEKSMFRIPWKHAGKQD

SEQ ID NO: 88943 - protein, 358 aa, Homo sapiens
MEPGRRGAAALLALLCVACALRAGRAQYERYSFRSFPRDELMPLESAYRHALDKYSGEHWAESVGYLEISLRLHRLLRDSEAFCHRNCSAAPQPEPAAGLASYPELRLFGGLLRRAHCLKRCKQGLPAFRQSQPSREVLADFQRREPYKFLQFAYFKANNLPKAIAAAHTFLLKHPDDEMMKRNMAYYKSLPGAEDYIKDLETKSYESLFIRAVRAYNGENWRTSITDMELALPDFFKAFYECLAACEGSREIKDFKDFYLSIAVNDLKNAAPCAVSYLLFDQNDKVMQQNLVYYQYHRDTWGLSDEHFQPRPEAVQFFNVTTLQKELYDFAKENIMDDDEGEVVEYVDDLLELEETS

SEQ ID NO: 88944 - protein, 114 aa, Homo sapiens
MAMGLFRVCLVVVTAIINHPLLFPRENATVPENEEEIIRKMQAHQEKLQLEQLRLEEEVARLAAEKEALEQVAEEGRQQNETRVAWDLWSTLCMILFLMIEVWRQDHQEGPSPE

SEQ ID NO: 88945 - protein, 66 aa, Homo sapiens
MGRGSGTFERLLDKATSQLLLETDWESILQICDLIRQGDTQAKYAVNSIKKKVNDKNPHVALYALE

SEQ ID NO: 88946 - protein, 76 aa, Homo sapiens
MAGSQDIFDAIVMADERFHGEGYREGYEEGSSLGVMEGRQHGTLHGAKIGSEIGCYQGFAFAWKCLLHSCTTEKDR

SEQ ID NO: 88947 - protein, 559 aa, Homo sapiens
MATITCTRFTEEYQLFEELGKGAFSVVRRCVKVLAGQEYAAKIINTKKLSARDHQKLEREARICRLLKHPNIVRLHDSISEEGHHYLIFDLVTGGELFEDIVAREYYSEADASHCIQQILEAVLHCHQMGVVHRDLKPENLLLASKLKGAAVKLADFGLAIEVEGEQQAWFGFAGTPGYLSPEVLRKDPYGKPVDLWACGVILYILLVGYPPFWDEDQHRLYQQIKAGAYDFPSPEWDTVTPEAKDLINKMLTINPSKRITAAEALKHPWISHRSTVASCMHRQETVDCLKKFNARRKLKGAILTTMLATRNFSGGKSGGNKKSDGVKKRKSSSSVQLMESSESTNTTIEDEDTKVRKQEIIKVTEQLIEAISNGDFESYTVVPEQQARAHHHPESPHPPDGRRVSLHRLHPHHAVPGRWRHPTHRPVGGDPCLAPPGWQMADRPLPQIWGALRPAPLRDQAGVAALLCRRDPLCPWSGAAGSPRWILLEFSHVITPPPSLLYLHQENLLVHKSHRNFRANGHISPPLTPTLSPARLGLPQAWVSTALAPSPQPQLLSA

SEQ ID NO: 88948 - protein, 109 aa, Homo sapiens
  MOD_RES (1)..(1): Any amino acid
XSQHSAAARPSSCRRKQEDDRDGLLAEREQEEAIAQFPYVEFTGRDSITCLTCQGTGYIPTEQVNELVALIPHSDQRLRPQRTTSVKISYIGLMTQSSLETHHYVDCGG

SEQ ID NO: 88949 - protein, 1128 aa, Homo sapiens
MEELIWEQYTVTLQKDSKRGFGIAVSGGRDNPHFENGETSIVISDVLPGGPADGLLQENDRVVMVNGTPMEDVLHSFAVQQLRKSGKVAAIVVKRPRKVQVAALQASPPLDQDDRAFEVMDEFDGRSFRSGYSERSRLNSHGGRSRSWEDSPERGRPHERARSRERDLSRDRSRGRSLERGLDQDHARTRDRSRGRSLERGLDHDFGPSRDRDRDRSRGRSIDQDYERAYHRAYDPDYERAYSPEYRRGARHDARSRGPRSRSREHPHSRSPSPEPRGRPGPIGVLLMKSRANEEYGLRLGSQIFVKEMTRTGLATKDGNLHEGDIILKINGTVTENMSLTDARKLIEKSRGKLQLVVLRDSQQTLINIPSLNDSDSEIEDISEIESNRSFSPEERRHQYSDYDYHSSSEKLKERPSSREDTPSRLSRMGATPTPFKSTGDIAGTVVPETNKEPRYQEDPPAPQPKAAPRTFLRPSPEDEAIYGPNTKMVRFKKGDSVGLRLAGGNDVGIFVAGIQEGTSAEQEGLQEGDQILKVNTQDFRGLVREDAVLYLLEIPKGEMVTILAQSRADVYRDILACGRGDSFFIRSHFECEKETPQSLAFTRGEVFRVVDTLYDGKLGNWLAVRIGNELEKGLIPNKSRAEQMASVQNAQRDNAGDRADFWRMRGQRSGVKKNLRKSREDLTAVVSVSTKFPAYERVLLREAGFKRPVVLFGPIADIAMEKLANELPDWFQTAKTEPKDAGSEKSTGVVRLNTVRQIIEQDKHALLDVTPKAVDLLNYTQWFPIVIFFNPDSRQGVKTMRQRLNPTSNKSSRKLFDQANKLKKTCAHLFTATINLNSANDSWFGSLKDTIQHQQGEAVWVSEGKMEGMDDDPEDRMSYLTAMGADYLSCDSRLISDFEDTDGEGGAYTDNELDEPAEEPLVSSITRSSEPVQHEESIRKPSPEPRAQMRRAASSDQLRDNSPPPAFKPEPPKAKTQNKEESYDFSKSYEYKSNPSAVAGNETPGASTKGYPPPVAAKPTFGRSILKPSTPIPPQEGEEVGESSEEQDNAPKSVLGKVKIFEKMDHKARLQRMQELQEAQNARIEIAQKHPDIYAVPIKTHKPDPGTPQHTSKPRKKDWMCMSCRRP

SEQ ID NO: 88950 - protein, 133 aa, Homo sapiens
MWLLKVRKNVKKDWSDHALWWEKKRTWLLKTHWTLDKYGIQADAKLQFTPQHKLLRLQLPNMKYVKVKVNFSDRVFKAVSDICKTFNIRHPEELSLLKKPRDPTKKKKKKLDDQSEDEALELEGPLITPGSGK

SEQ ID NO: 88951 - protein, 105 aa, Homo sapiens
MIYTMKKVHALWASVCLLLNLAPAPLNADSEEDEEHTIITDTELPPLKLMHSFCAFKADDGPCKAIMKRFFFNIFTRQCEEFIYGGCEGNQNRFESLEECKKMCT

SEQ ID NO: 88952 - protein, 29 aa, Homo sapiens
MKSLESQLEKQQKDLSEDHSSLLLHVKQF

SEQ ID NO: 88953 - protein, 85 aa, Homo sapiens
  MOD_RES (1)..(1): Any amino acid
XTYIYTGLSKHVEDVPAFQALGSLNDLQFFRYNSKDRKSQPMGLWRQQKYPGPARSSLCGGHQPPGPRRKEETEVPGLRLLPREN

SEQ ID NO: 88954 - protein, 503 aa, Homo sapiens
MATPDAGLPGAEGVEPAPWAQLEAPARLLLQALQAGPEGARRGLGVLRALGSRGWEPFDWGRLLEALCREEPVVQGPDGRLELKPLLLRLPRICQRNLMSLLMAVRPSLPESGLLSVLQIAQQDLAPDPDAWLRALGELLRRDLGVGTSMEGASPLSERCQRQLQSLCRGLGLGGRRLKSPQAPDPEEEENRDSQQPGKRRKDSEEEAASPEGKRVPKRLRCWEEEEDHEKERPEHKSLESLADGGSASPIKDQPVMAVKTGEDGSNLDDAKGLAESLELPKAIQDQLPRLQQLLKTLEEGLEGLEDAPPVELQLLHECSPSQMDLLCAQLQLPQLSDLGLLRLCTWLLALSPDLSLSNATVLTRSLFLGRILSLTSSASRLLTTALTSFCAKYTYPVCSALLDPVLQAPGTGPAQTELLCCLVKMESLEPDAQVLMLGQILELPWKEETFLVLQSLLERQVEMTPEKFSVLMEKLCKKGLAATTSMAYAKLMLTVMTKYQAN

SEQ ID NO: 88955 - protein, 223 aa, Homo sapiens
MYRNEFTAWYRRMSVVYGIGTWSVLGSLLYYSRTMAKSSVGGEQISAIGRGICVLLGISLEDTQKELEHMVRKILNLRVFEDESGKHWSKSVMDKQYEILCVSQFTLQCVLKGNKPDFHLAMPTEQAEGFYNSFLEQLRKTYRPELIKDGKFGAYMQVHIQNDGPVTIELESPAPGTATSDPKQLSKLEKQQQRKEKTRAKGPSESSKERNTPRKEDRSASSG

SEQ ID NO: 88956 - protein, 123 aa, Homo sapiens
MAAYSYRPGPGAGPGPAAGAALPDQSFLWNVFQRVDKDRSGVISDTELQQALSNGYRLSDQFHDILIRKFDRQGRGQIAFDDFIQGCIVLQRLTDIFRRYDTDQDGWIQVSYEQYLSMVFSIV

SEQ ID NO: 88957 - protein, 158 aa, Homo sapiens
MEENSKKDHRALLNQGEEDELVESCPGWSEMARSRLTATSASQEVFGYRDHNVRKAFCLVASVLTCGGLLLVFYWRPQWRVWANCIPCPLQEADTVLLRTTDEFQRYMRKKVFCLYLSTLKFPVSKKWEESLVADRHSVINQALIKPELKLRCMEVQK

SEQ ID NO: 88958 - protein, 230 aa, Homo sapiens
MAALSKSIPHNCYEIGHTWHPSCRVSFLQITGGALEESLKIYAPLYLIAAILRKRKLDYYLHKLLPEILQSASFLTANGALYMAFFCILRKILGKFYSWTPGFGAALPASYVAILIERKSRRGLLTIYMANLTESRFVAQAGVQWCDLSSLQPAPPGFKRFLFLSHLSSWDYRFVPPCLANFCIFVEMRFHHVSQAGLEFLALSDPPALASQSAEITGVSHCAWPKNKIF

SEQ ID NO: 88959 - protein, 199 aa, Homo sapiens
  MOD_RES (1)..(1): Any amino acid
XVSSLLVLTLLLYTALWWSATPTEGACAPGKPTLVCSRAVGSWSYSQQRRQRVCSEEGPPKTDLMAFSPSLPLGLNKEEEGERQEPGSNHPGQPRQPNPDWRYSASLRAGMHSSVHLEEAGILRAGPGGPDQQWPTVSSATPEPEAGEVSPPVGAGVNSNSWTFKYGPGNPKQSGPEPKKQTQVSFLLRRKGEASQPRQ

SEQ ID NO: 88960 - protein, 751 aa, Homo sapiens
MEPSTCRTMESEEDYVEEKESEKCVKEGVTNPSNSSQQALLKADYKALKNGVPSPIMATKIPKKVIAPVDTGDLEAGRRKRRRKRRSLAINLTNCKYESVRRAAQMCGLKEVGEDEEWTLYWTDCAVSLERVMDMKRFQKINHFPGMTEICRKDLLARNLNRMYKLYPSEYNIFPRTWCLPADYGDFQSYGRQRKARTYICKPDSGCQGRGIFITRNPREIKPGEHMICQQYISKPLLIDGFKFDMRVYVLITSCDPLRIFTYEEGLARFATTPYMEPSHNNLDNVCMHLTNYAINKHNENFVRDGAVGSKRKLSTLNIWLQEHSYNPGELWGDIEDIIIKTIISAHSVLRHNYRTCFPQYLNGGTCACFEILGFDILLDHKLKPWLLEVNHSPSFTTDSCLDQEVKDALLCDAMTLVNLRGCDKRKVMEEDKRRVKERLFQCYRQPRESRKEKTESSHVAMLDQERYEDSHLGKYRRIYPGPDTEKYARFFKHNGSLFQETAASKAREECARQQLEEIRLKQEQQETSGTKRQKARDQNQGESAGEKSRPRAGLQSLSTHLAYRNRNWEKELLPGQLDTMRPQEIVEEEELERMKALLQRETLIRSLGIVEQLTRLQHPGPQGQKKLHESRPKNFNWTGEPAAINSCSLSMKKAGRCYFSSARIRLTSQGQASRRLEAINRVLAGSVPPTLTPKQGYFLQPERVASDSWTECTLPSMVNSEHRAAKVPLCPASAPMLQRSRALLNINQFR

SEQ ID NO: 88961 - protein, 63 aa, Homo sapiens
  MOD_RES (1)..(1): Any amino acid
XWMPVTKLGRLVKDMKIKSLEEIYLFSLPIKQGTVVMARPKLDKAKGNLSGKPHLTKQEKKGK

SEQ ID NO: 88962 - protein, 8 aa, Homo sapiens
MQGTPGGG

SEQ ID NO: 88963 - protein, 18 aa, Homo sapiens
AAAQVAALAAWLLGRRNL

SEQ ID NO: 88964 - protein, 166 aa, Homo sapiens
MSELSDEASEPELLNRSLSMWHGLGTQVSGEELDVPLDLHTAASIGQYEVVKECVQRRELDLNKKNGGGWTPLMYASYIGHDTIVHLLLEAGVSVNVPTPEGQTPLMLASSCGNESIAYFLLQQGAELEMKDIQGWTALFHCTSAGHQHMVRFLLDSGANANVREP

SEQ ID NO: 88965 - protein, 44 aa, Homo sapiens
MRLRNGTVATALAFITSFLTLSWYTTWQNGKGKENDSENVHEMY

SEQ ID NO: 88966 - protein, 210 aa, Homo sapiens
MGEEANDDKKPTTKFELERETELRFEVEASQSVQLELLTGMAEIFGTELTRNKKFTFDAGAKVAVFTWHGCSVQLSGRTEVAYVSKDTPMLLYLNTHTALEQMRRQAEKEEERGPRVMVVGPTDVGKSTVCRLLLNYAVRLGRRPTYVELDVGQGSVSIPGTMGALYIERPADVEEGFSIQAPLVYHFGSTTPGTNIKLYNKMCSTKGVR

SEQ ID NO: 88967 - protein, 616 aa, Homo sapiens
MELQPPEASIAVVSIPRQLPGSHSEAGVQGLSAGDDSELGSHCVAQTGLELLASETGSDCVTQAGLQLLASSDPPALASKNAEVTGTMSQDTEVDMKEVELNELEPEKQPMNAASGAAMSLAGAEKNGLVKIKVAEDEAEAAAAAKFTGLSKEELLKVAGSPGWVRTRWALLLLFWLGWLGMLAGAVVIIVRAPRCRELPAQKWWHTGALYRIGDLQAFQGHGAGNLAGLKGRLDYLSSLKVKGLVLGPIHKNQKDDVAQTDLLQIDPNFGSKEDFDSLLQSAKKKSIRVILDLTPNYRGENSWFSTQVDTVATKVKDALEFWLQAGVDGFQVRDIENLKDASSFLAEWQNITKGFSEDRLLIAGTNSSDLQQILSLLESNKDLLLTSSYLSDSGSTGEHTKSLVTQYLNATGNRWCSWSLSQARLLTSFLPAQLLRLYQLMLFTLPGTPVFSYGDEIGLDAAALPGQPMEAPVMLWDESSFPDIPGAVSANMTVKGQSEDPGSLLSLFRRLSDQRSKERSLLHGDFHAFSAGPGLFSYIRHWDQNERFLVVLNFGDVGLSAGLQASDLPASASLPAKADLLLSTQPGREEGSPLELERLKLEPHEGLLLRFPYAA

SEQ ID NO: 88968 - protein, 101 aa, Homo sapiens
MESAGLEQLLRELLLPDTERIRRATEQLQIVLRAPAALPALCDLLASAADPQIRQFAAVLTRRRLNTRWRRLAAEQRESLKSLILTALQRETESLLFAGTV

SEQ ID NO: 88969 - protein, 386 aa, Homo sapiens
  MOD_RES (1)..(1): Any amino acid
XGAVEPGPPGAAVAPSPAPAPPPAPDHLFRPISAEDEEQQPTEIESLCMNCYCNDMNREVVKTDSAATRIPELDFEIPAFSQKGALTTVEGLITRAISGLEQDQPARRANKDATAERIDEFIVKLKELKQVASPFTLIIDDPSGNSFVENPHAPQKDDALVITHYNRTRQQEEMLGLQVLQFSTNCPECNAPAQTNMKLVQIPHFKEVIIMATNCENCGHRTNEVKSGGAVEPLGTRITLHITDASDMTRDLLKSETCSVEIPELEFELGMAVLGGKFTTLEGLLKDIRELVTKNPFTLGDSSNPGQTERLQEFSQKMDQIIEGNMKAHFIMDDPAGNSYLQNVYAPEDDPEMKVERYKRTFDQNEELGLNDMKTEGYEAGLAPQR

SEQ ID NO: 88970 - protein, 1936 aa, Homo sapiens
MAMLPPPGPQSFVHFTKQSLALIEQRIAERKSKEPKEEKKDDDEEAPKPSSDLEAGKQLPFIYGDIPPGMVSEPLEDLDPYYADKKTFIVLNKGKTIFRFNATPALYMLSPFSPLRRISIKILVHSLFSMLIMCTILTNCIFMTMNNPPDWTKNVEYTFTGIYTFESLVKILARGFCVGEFTFLRDPWNWLDFVVIVFAYVTEFVDLGNVSALRTFRVLRALKTISVIPGLKTIVGALIQSVKKLSDVMILTVFCLSVFALIGLQLFMGNLKHKCFRNSLENNETLESIMNTLESEEDFRKYFYYLEGSKDALLCGFSTDSGQCPEGYTCVKIGRNPDYGYTSFDTFSWAFLALFRLMTQDYWENLYQQTLRAAGKTYMIFFVVVIFLGSFYLINLILAVVAMAYEEQNQANIEEAKQKELEFQQMLDRLKKEQEEAEAIAAAAAEYTSIRRSRIMGLSESSSETSKLSSKSAKERRNRRKKKNQKKLSSGEEKGDAEKLSKSESEDSIRRKSFHLGVEGHRRAHEKRLSTPNQSPLSIRGSLFSARRSSRTSLFSFKGRGRDIGSETEFADDEHSIFGDNESRRGSLFVPHRPQERRSSNISQASRSPPMLPVNGKMHSAVDCNGVVSLVDGRSALMLPNGQLLPEGTTNQIHKKRRCSSYLLSEDMLNDPNLRQRAMSRASILTNTVEELEESRQKCPPWWYRFAHKFLIWNCSPYWIKFKKCIYFIVMDPFVDLAITICIVLNTLFMAMEHHPMTEEFKNVLAIGNLVFTGIFAAEMVLKLIAMDPYEYFQVGWNIFDSLIVTLSLVELFLADVEGLSVLRSFRLLRVFKLAKSWPTLNMLIKIIGNSVGALGNLTLVLAIIVFIFAVVGMQLFGKSYKECVCKINDDCTLPRWHMNDFFHSFLIVFRVLCGEWIETMWDCMEVAGQAMCLIVYMMVMVIGNLVVLNLFLALLLSSFSSDNLTAIEEDPDANNLQIAVTRIKKGINYVKQTLREFILKAFSKKPKISREIRQAEDLNTKKENYISNHTLAEMSKGHNFLKEKDKISGFGSSVDKHLMEDSDGQSFIHNPSLTVTVPIAPGESDLENMNAEELSSDSDSEYSKVRLNRSSSSECSTVDNPLPGEGEEAEAEPMNSDEPEACFTDGCVWRFSCCQVNIESGKGKIWWNIRKTCYKIVEHSWFESFIVLMILLSSGALAFEDIYIERKKTIKIILEYADKIFTYIFILEMLLKWIAYGYKTYFTNAWCWLDFLIVDVVVNALIGAIPSIMNVLLVCLIFWLIFSIMGVNLFAGKFYECINTTDGSRFPASQVPNRSECFALMNVSQNVRWKNLKVNFDNVGLGYLSLLQVATFKGWTIIMYAAVDSVNVDKQPKYEYSLYMYIYFVVFIIFGSFFTLNLFIGVIIDNFNQQKKKLGGQDIFMTEEQKKYYNAMKKLGSKKPQKPIPRPGNKIQGCIFDLVTNQAFDISIMVLICLNMVTMMVEKEGQSQHMTEVLYWINVVFIILFTGECVLKLISLRHYYFTVGWNIFDFVVVIISIVGMFLADLIETYFVSPTLFRVIRLARIGRILRLVKGAKGIRTLLFALMMSLPALFNIGLLLFLVMFIYAIFGMSNFAYVKKEDGINDMFNFETFGNSMICLFQITTSAGWDGLLAPILNSKPPDCDPKKVHPGSSVEGDCGNPSVGIFYFVSYIIISFLVVVNMYIAVILENFSVATEESTEPLSEDDFEMFYEVWEKFDPDATQFIEFSKLSDFAAALDPPLLIAKPNKVQLIAMDLPMVSGDRIHCLDILFAFTKRVLGESGEMDSLRSQMEERFMSANPSKVSYEPITTTLKRKQEDVSATVIQRAYRRYRLRQNVKNISSIYIKDGDRDDDLLNKKDMAFDNVNENSSPEKTDATSSTTSPPSYDSVTKPDKEKYEQDRTEKEDKGKDSKESKK

SEQ ID NO: 88971 - protein, 204 aa, Homo sapiens
MEPGGEPTGAKESSTLMESLAAVKAAFLAQAPSGSRSAEVQAAQSTEPAAEAGAPEGEGHRGGPPRALGSLGLCENQEARERPGGSPRGPVTSEKTGGQSGLESDVPPNAGPGAEGGGSWKGRPFPCGACGRSFKCSSDAAKHRSIHSGEKPYECSDCGKAFIHSSHVVRHQRAHSGERPYACAECGKAFGQSFNLLRHQRVHT

SEQ ID NO: 88972 - protein, 145 aa, Homo sapiens
MSLPLTEEQRKKIEENRQKALARRAEKLLAEQHQRTSSGTSIAGNPFQAKQGPSQNFPRESCKPVSHGVIFKQQNLSSSSNADQRPHDSHSFQAKGIWKKPEEMPTACPGHSPRSQMALTGISPPLAQSPPEVPKQQLLSYELGQ

SEQ ID NO: 88973 - protein, 85 aa, Homo sapiens
MDLWQLLLTLALAGSSDAFSGSEATAAILSRAPWSLQSVNPGLKTRTLKNGLKNGKNALIMFLLGKTAVTLIHRLPPSGYLIVSS

SEQ ID NO: 88974 - protein, 17 aa, Homo sapiens
MHSFRLARLSSWRVHAG

SEQ ID NO: 88975 - protein, 112 aa, Homo sapiens
MAQNLKDLAGRLPAGPRGMGTALKLLLGAGAVAYGVRESVFTVEGGHRAIFFNRIGGVQQDTILAEGLHFRIPWFQYPIIYDIRARPRKISSPTDGEYLPASVVSTQCSGAS

SEQ ID NO: 88976 - protein, 284 aa, Homo sapiens
RYSLGDARRPLHETAVLVEDVVHTQLINLLQQAAEVSQLRGARVITPEDLLFLMRKDKKKLRRLLKYMFIRDYKSKIVKGIDEDDLLEDKLSGSNNANKRQKIAQDFLNSIDQTGELLAMFEDDEIDEVKQERMERAERQTRIMDSAQYAEFCESRQLSFSKKASKFRDWLDCSSMEIKPNVVAMEILAYLAYETVAQLVDLALLVRQDMVTKAGDPFSHAISATFIQYHNSAESTAACGVEAHSDAIQPCHIREAIRRYSHRIGPLSPFTNAYRRNGMAFLAC

SEQ ID NO: 88977 - protein, 138 aa, Homo sapiens
MKLIILEHYSQASEWAAKYIRNRIIQFNPGPEKYFTLGLPTGSTPLGCYKKLIEYYKNGDLSFKYVKTFNMDEYVGLPRDHPESYHSFMWNNFFKHIDIHPENTHILDGNAVDLQAECDAFEEKIKAAGGIELFVGGI

SEQ ID NO: 88978 - protein, 10 aa, Homo sapiens
MNISGSSCGS

SEQ ID NO: 88979 - protein, 749 aa, Homo sapiens
NIDVTDPESCSRVTGECLRCLHNTQGANCQLCKPGHYGSALNQTCRRCSCHASGVSPMECPPGGGACLCDPVTGACPCLPNVTGLACDRCADGYWNLVPGRGCQSCDCDPRTSQSSHCDQLTGQCPCKLGYGGKRCSECQENYYGDPPGRCIPCDCNRAGTQKPICDPDTGMCRCREGVSGQRCDRCARGHSQEFPTCLQCHLCFDQWDHTISSLSKAVQGLMRLAANMEDKRETLPVCEADFKDLRGNVSEIERILKHPVFPSGKFLKVKDYHDSVRRQIMQLNEQLKAVYEFQDLKDTIERAKNEADLLLEDLQEEIDLQSSVLNASIADSSENIKKYYHISSSAEKKINETSSTINTSANTRNDLLTILDTLTSKGNLSLERLKQIKIPDIQILNEKVCGDPGNVPCVPLPCGGALCTGRKGHRKCRGPGCHGSLTLSTNALQKAQEAKSIIRNLDKQVRGLKNQIESISEQAEVSKNNALQLREKLGNIRNQSDSEEENINLFIKKVKNFLLEENVPPEDIEKVANGVLDIHLPIPSQNLTDELVKIQKHMQLCEDYRTDENRLNEEADGAQKLLVKAKAAEKAANILLNLDKTLNQLQQAQITQGRANSTITQLTANITKIKKNVLQAENQTREMKSELELAKQRSGLEDGLSLLQTKLQRHQDHAVNAKVQAESAQHQAGSLEKEFVELKKQYAILQRKTSTTGLTKETLGKVKQLKDAAEKLAGDTEAKIRRITGCFQNSAR

SEQ ID NO: 88980 - protein, 116 aa, Homo sapiens
MGKQNSKLRPEVMQDLLESTDFTEHEIQEWYKGFLRDCPSGHLSMEEFKKIYGNFFPYGDASKFAEHVFRTFDANGDGTIDFREFIIALSVTSRGKLEQKLKWAFSMYDLDGNGYI

SEQ ID NO: 88981 - protein, 57 aa, Homo sapiens
MAAAAAEQQQFYLLLGNLLSPDNVVRKQAEETYENIPGQSKITFLLQAIRNTTAAEE

SEQ ID NO: 88982 - protein, 123 aa, Homo sapiens
MQTYEVDLNKCGPMVLDALIKIKNEVDSTLTFRRSCREGICGSCAMNINGGNTLACTRRIDTNLNKVSKIYPLPHMYVIKDLVPDLSNFYAQYKSIEPYLKKKDESQEGKQQYLQSIEEREKL

SEQ ID NO: 88983 - protein, 1099 aa, Homo sapiens
  MOD_RES (1)..(1): Any amino acid
XFRPLLPRRLAPVTSPPPLAPTCGRSRRAPVQETYENIPGQSKITFLLQAIRNTTAAEEARQMAAVLLRRLLSSAFDEVYPALPSDVQTAIKSELLMIIQMETQSSMRKKVCDIAAELARNLIDEDGNNQWPEGLKFLFDSVSSQNVGLREAALHIFWNFPGIFGNQQQHYLDVIKRMLVQCMQDQEHPSIRTLSARATAAFILANEHNVALFKHFADLLPGFLQAVNDSCYQNDDSVLKSLVEIADTVPKYLRPHLEATLQLSLKLCGDTSLNNMQRQLALEVIVTLSETAAAMLRKHTNIVAQTIPQMLAMMVDLEEDEDWANADELEDDDFDSNAVAGESALDRMACGLGGKLVLPMIKEHIMQMLQNPDWKYRHAGLMALSAIGEGCHQQMEGILNEIVNFVLLFLQDPHPRVRYAACNAVGQMATDFAPGFQKKFHEKVIAALLQTMEDQGNQRVQAHAAAALINFTEDCPKSLLIPYLDNLVKHLHSIMVLKLQELIQKGTKLVLEQVVTSIASVADTAEEKFVPYYDLFMPSLKHIVENAVQKELRLLRGKTIECISLIGLAVGKEKFMQDASDVMQLLLKTQTDFNDMEDDDPQISYMISAWARMCKILGKEFQQYLPVVMGPLMKTASIKPEVALLDTQDMENMSDDDGWEFVNLGDQQSFGIKTAGLEEKSTACQMLVCYAKELKEGFVEYTEQVVKLMVPLLKFYFHDGVRVAAAESMPLLLECARVRGPEYLTQMWHFMCDALIKAIGTEPDSDVLSEIMHSFAKCIEVMGDGCLNNEHFEELGGILKAKLEEHFKNQELRQVKRQDEDYDEQVEESLQDEDDNDVYILTKVSDILHSIFSSYKEKVLPWFEQLLPLIVNLICPHRPWPDRQWGLCIFDDVIEHCSPASFKYAEYFLRPMLQYVCDNSPEVRQAAAYGLGVMAQYGGDNYRPFCTEALPLLVRVIQSADSKTKENVNATENCISAVGKIMKFKPDCVNVEEVLPHWLSWLPLHEDKEEAVQTFNYLCDLIESNHPIVLGPNNTNLPKIFSIIAEGEMHEAIKHEDPCAKRLANVVRQVQTSGGLWTECIAQLSPEQQAAIQELLNSA

SEQ ID NO: 88984 - protein, 55 aa, Homo sapiens
PRVLFGEWLLGEISSGCYEGLQWLDEARTCFRVPWKHFARKDLSEADARIFKVAA

SEQ ID NO: 88985 - protein, 94 aa, Homo sapiens
MKILLFFCILLFFGVLIPPARSEGHHITFSRWKSCTAIGGRCKNQCDDSEFRISYCARPTTHCCVTECDPTDPNNWIPKDSVGTQEWYPKDSRH

SEQ ID NO: 88986 - protein, 268 aa, Homo sapiens
  MOD_RES (1)..(1): Any amino acid
XAPMEVAVCTDSAAPMWSCIVWELHSGANLLTYRGGQAGPRGLALLNGEYLLAAQLGKNYISAWELQRKDQLQQKIMCPGPVTCLTASPNGLYVLAGVAESIHLWEVSTGNLLVILSRHYQDVSCLQFTGDSSHFISGGKDCLVLVWSLCSVLQADPSRIPAPRHVWSHHALPITDLHCGFGGPLARVATSSLDQTVKLWEVSSGELLLSVLFDVSIMAVTMDLAEHHMFCGGSEGSIFQVDLFTWPGQRERSFHPEQDAGKVFKGHR

SEQ ID NO: 88987 - protein, 379 aa, Homo sapiens
MNLQPIFWIGLISSVCCVFAQTDENRCLKANAKSCGECIQAGPNCGWCTNSTFLQEGMPTSARCDDLEALKKKGCPPDDIENPRGSKDIKKNKNVTNRSKGTAEKLKPEDITQIQPQQLVLRLRSGEPQTFTLKFKRAEDYPIDLYYLMDLSYSMKDDLENVKSLGTDLMNEMRRITSDFRIGFGSFVEKTVMPYISTTPAKLRNPCTSEQNCTSPFSYKNVLSLTNKGEVFNELVGKQRISGNLDSPEGGFDAIMQVAVCGSLIGWRNVTRLLVFSTDAGFHFAGDGKLGGIVLPNDGQCHLENNMYTMSHYYDYPSIAHLVQKLSENNIQTIFAVTEEFQPVYKELKNLIPKSAVGTLSANSSNVIQLIIDAYNAFF

SEQ ID NO: 88988 - protein, 84 aa, Homo sapiens
MGCTLSAEERAALERSKAIEKNLKEDGISAAKDVKLLLLGAGESGKSTIVKQMKYPLSFYSVPSTILSVVTEQDTQNLCPPGVF

SEQ ID NO: 88989 - protein, 1037 aa, Homo sapiens
MGCFPTHLMPRPRVAMAEAEAGVAVEVRGLPPAVPDELLTLYFENRRRSGGGPVLSWQRLGCGGVLTFREPADAERVLAQADHELHGAQLSLRPAPPRAPARLLLQGLPPGTTPQRLEQHVQALLRASGLPVQPCCALASPRPDRALVQLPKPLSEADVRVLEEQAQNLGLEGTLVSLARVPQARAVRVVGDGASVDLLLLELYLENERRSGGGPLEDLQRLPGPLGTVASFQQWQVAERVLQQEHRLQGSELSLVPHYDILEPEELAENTSGGDHPSTQGPRATKHALLRTGGLVTALQGAGTVTMGSGEEPGQSGASLRTGPMVQGRGIMTTGSGQEPGQSGTSLRTGPMGSLGQAEQVSSMPMGSLEHEGLVSLRPVGLQEQEGPMSLGPVGSAGPVETSKGLLGQEGLVEIAMDSPEQEGLVGPMEITMGSLEKAGPVSPGCVKLAGQEGLVEMVLLMEPGAMRFLQLYHEDLLAGLGDVALLPLEGPDMTGFRLCGAQASCQAAEEFLRSLLGSISCHVLCLEHPGSARFLLGPEGQHLLQGLEAQFQCVFGTERLATATLDTGLEEVDPTEALPVLPGNAHTLWTPDSTGGDQEDVSLEEVRELLATLEGLDLDGEDWLPRELEEEGPQEQPEEEVTPGHEEEEPVAPSTVAPRWLEEEAALQLALHRSLEPQGQVAEQEEAAALRQALTLSLLEQPPLEAEEPPDGGTDGKAQLVVHSAFEQDVEELDRALRAALEVHVQEETVGPWRRTLPAELRARLERCHGVSVALRGDCTILRGFGAHPARAARHLVALLAGPWDQSLAFPLAASGPTLAGQTLKGPWNNLERLAENTGEFQEVVRAFYDTLDAARSSIRVVRVERVSHPLLQQQYELYRERLLQRCERRPVEQVLYHGTTAPAVPDICAHGFNRSFCGRNATVYGKGVYFARRASLSVQDRYSPPNADGHKAVFVARVLTGDYGQGRRGLRAPPLRGPGHVLLRYDSAVDCICQPSIFVIFHDTQALPTHLITCEHVPRASPDDPSGLPGRSPDT

SEQ ID NO: 88990 - protein, 122 aa, Homo sapiens
MSSSRKDHLGASSSEPLPVIIVGNGPSGICLSYLLSGYTPYTKPDAIHPHPLLQRKLTEAPGVSILDQDLDYLSEGLEGRSQSPVALLFDALLRPDTDFGGNMKSVLTWKHRKEHAIPHVVL

SEQ ID NO: 88991 - protein, 194 aa, Homo sapiens
  MOD_RES (1)..(1): Any amino acid
XFAKGTLANSASKDYTLHLWNLLSGQEKFTIWDGGSKNPAEPQIWNLHVDEAHKVVYSASGSKINAWNLETAEPVFHILGDASDPWMCMAVLASQATLLTVSRDGVVSLWSSATGKLQGKQHMSSIKEETPTCAVSVQKQGKLVTGFSNGSISLALEDRCGYSWRTRGAFADSWPWIWNMKTWWRRLFLVLRTT

SEQ ID NO: 88992 - protein, 132 aa, Homo sapiens
  MOD_RES (1)..(1): Any amino acid
XEISEVDCKDALEMICNLESEGDEKSALVLCTAFLSRQLQQGDMYCAWELTLFWSKLQQRVEPSIQVYLERCRQLSLLTKTVYHIFFLIKVINSERWGLTILPRFISNSWAQVILRALAFQSGGITGMSHHT

SEQ ID NO: 88993 - protein, 151 aa, Homo sapiens
MIQNSRPSLLQPQDVGDTVETLMLHPVIKAFLCGSISGTCSTLLFQPLDLLKTRLQTLQPSDHGSRRVGMLAVLLKVVRTESLLGLWKGMSPSGKYGYESIYAALRSIYHSEGHRGLFSGLTATLLRDAPFSGIYLMFYNQTKNIVPHDQV

SEQ ID NO: 88994 - protein, 36 aa, Homo sapiens
MEFEPFGNLDQPDLYYEYYPHVYPGRRGSMVPFSMR

SEQ ID NO: 88995 - protein, 209 aa, Homo sapiens
MESTAYPLNLSLKEEEEEEEIQSRELEDGPADMQKVRICSEGGWVPALFDEVAIYFSDEEWEVLTEQQKALYREVMRMNYETVLSLEFPFPKPDMITRLEGEEESQNSDEWQLQGGTSAENEESDVKPPDWPNPMNATSQFPQPQHFDSFGLRLPRDITELPEWSEGYPFYMAMGFPGYDLSADDIAGKFQFSRGMRRSYDAGFKLMVV

SEQ ID NO: 88996 - protein, 125 aa, Homo sapiens
MDKNIGEQLNKAYEAFRQACMDRDSAVKELQQKTENYEQRIREQQEQLSLQQTIIDKLKSQLLLVNSTQDNNYGCVPLLEDSETRKNNLTLDQPQDKVISGIAREKLPKPETPHFCPQLLLLILS

SEQ ID NO: 88997 - protein, 151 aa, Homo sapiens
  MOD_RES (1)..(1): Any amino acid
XSNETLSCVIIFVIVYYALMAGVVWFVVLTYAWHTSFKALGTTYQPLSGKTSYFHLLTWSLPFVLTVAILAVAQVDGDSVSGICFVGYKNYRYRAGFVLAPIGLVLIVGGYFLIRGVMTLFSIKSNHPGLLSEKAASKINETMLRLDVRPM

SEQ ID NO: 88998 - protein, 18 aa, Homo sapiens
KSSLRNVVLRDYIYNWRS

SEQ ID NO: 88999 - protein, 172 aa, Homo sapiens
MAQLKCYYFDYKEQLPESAYMHQLLGLNLLFLLSQNRVAEFHTELERLPAKDIQTNVYIKHPVSLEQYLMEGSYNKVFLAKGNIPAESYTFFIDILLDTIRDEIAGCIEKAYEKILFTEATRILFFNTPKKMTDYAKKVAGVQGKGPWDQGVKSLTTVWGGLEGHWNKTAQV

SEQ ID NO: 89000 - protein, 37 aa, Homo sapiens
MLFHGISGGHIQGIMEEMERRSKTEARLAKGAQLNGR

SEQ ID NO: 89001 - protein, 178 aa, Homo sapiens
MGTLMGVYLPCLQNIFGVILFLRLTWMVGTAGVLQALLIVLICCCCTLLTAISMSAIATNGVVPAGGSYFMISRSLGPEFGGAVGLCFYLGTTFAAAMYILGAIEILLTYIAPPAAIFYPSGAHDTSNATLNNMRVYGTIFLTFMTLVVFVGVKYVNKFASLFLACVIISILSIYAGG

SEQ ID NO: 89002 - protein, 290 aa, Homo sapiens
MTTRQATKDPLLRGVSPTPSKIPVRSQKRTPFPTVTSCAVDQENQDPRRWVQKPPLNIQRPLVDSAGPRPKARHQAETSQRLVGISQPRNPLEELRPSPRGQNVGPGPPAQTEAPGTIEFVADPAALATILSGEGVKSCHLGRQPSLAKRVLVRGSQGGTTQRVQGVRASAYLAPRTPTHRLDPARASCFSRLEGPGPRGRTLCPQRLQALISPSGPSFHPSTRPSFQELRRETAGSSRTSVSQASGLLLETPVQPGEREVVTHSDEGGVASLGLAQRVPLRENREMSHT

SEQ ID NO: 89003 - protein, 596 aa, Homo sapiens
MGGCFSKPKPVELKIEVVLPEKERGKEELSASGKGSPRAYQGNGTARHFHTEERLSTPHPYPSPQDCVEAAVCHVKDLENGQMREVELGWGKVLLVKDNGEFHALGHKCPHYGAPLVKGVLSRGRVRCPWHGACFNISTGDLEDFPGLDSLHKFQVKIEKEKVYVRASKQALQLQRRTKVMAKCISPSAGYSSSTNVLIVGAGAAGLVCAETLRQEGFSDRIVLCTLDRHLPYDRPKLSKSLDTQPEQLALRPKEFFRAYGIEVLTEAQVVTVDVRTKKVVFKDGFKLEYSKLLLAPGSSPKTLSCKGKEVENVFTIRTPEDANRVVRLARGRNVVVVGAGFLGMEVAAYLTEKAHSVSVVELEETPFRRFLGERVGRALMKMFENNRVKFYMQTEVSELRGQEGKLKEVVLKSSKVVRADVCVVGIVPATGFLRQSGIGLDSRGFIPVNKMMQTNVPGVFAAGDAVTFPLAWRNNRKVNIPHWQMAHAQGRVAAQNMLAQEAEMSTVPYLWTAMFGKSLRYAGYGEGFDDVIIQGDLEELKFVAFYTKGDEVIAVASMNYDPIVSKVAEVLASGRAIRKREVETGDMSWLTGKGS

SEQ ID NO: 89004 - protein, 138 aa, Homo sapiens
MRGAGPSPRQSPRTLRPDPGPAMSFFRRKVKGKEQEKTSDVKSIKALKIMPCWRLQDQVMLQSMPFLPTWTPFQVAGQPHLRSSQATWRPLILVTWADLVWTTRLKRPNQAFLRPLNKSCTTLLSSLTSFNSWNFGEW

SEQ ID NO: 89005 - protein, 135 aa, Homo sapiens
  MOD_RES (1)..(1): Any amino acid
XLAVEGPSKVDIQTEDLEDGTCKVSYFPTVPGVYIVSTKFADEHVPEINSSDMSAHVTSPSGRVTEAEIVPMGKNSHCVRFVPQEMGVHTVSVKYRGQHVTGSPFQFTVGPLGEGGAHKVRAGGPGLERGEAGVP

SEQ ID NO: 89006 - protein, 74 aa, Homo sapiens
MLANKECQAALEVLQESPLYDCRCKRGMKKELQCLQIYWSIHLGLTEGEEFYEASPYEPVTSRLSDIFRLASIF

SEQ ID NO: 89007 - protein, 121 aa, Homo sapiens
MMGLGNGRRSMKSPPLVLAALVACIIVLGFNYWIASSRSVDLQTRIMELEGRVRRAAAERGAVELKKNEFQGELEKQREQLDKIQSSHNFQLESVNKLYQDEKAVLVNNITTGERLIRVLQ

SEQ ID NO: 89008 - protein, 998 aa, Homo sapiens
MLSSLGCLLLCGSITLALGNAQKLPKGKRPNLKVHINTTSDSILLKFLRPSPNVKLEGLLLGYGSNVSPNQYFPLPAEGKFTEAIVDAEPKYLIVVRPAPPPSQKKSCSGKTRSRKPLQLVVGTLTPSSVFLSWGFLINPHHDWTLPSHCPNDRFYTIRYREKDKEKKWIFQICPATETIVENLKPNTVYEFGVKDNVEGGIWSKIFNHKTVVGSKKVNGKIQSTYDQDHTVPAYVPRKLIPITIIKQVIQNVTHKDSAKSPEKAPLGGVILVHLIIPGLNETTVKLPASLMFEISDALKTQLAKNETLALPAESKTPEVEKISARPTTVTPETVPRSTKPTTSSALDVSETTLVLSKRTPETLQTILIPQFELPLSTLAPKSLPEFPEAKTPFPFEKPRGTLASSEKPWIVPTAKISEDSKVLQPQTATYDVFSSPTTSDEPEISDSYTATSDRILDSIPPKTSRTLEQPRATLAPSETPFVPQKLEIFTSPEMQPTTPAPQQTTSIPSTPKRRPRPKPPRTKPERTTSAGTITPKISKSPEPTWTTPAPGKTQFISLKPKIPLSPEVTHTKPAPEPQTLLPSQSTIGPETPGTKPSTTLAPRKTKRPGRRPRPRPRPKTTPSPEVPKSKPALEPATIQPEPLVPTTASKPSERPKTTHRPDAPQIQPGSKPPKQLLPKPQTTAEPDMPPTKSVSEPVPFETEAPSMTIVPTTDIEPVTVRTEATVTTLAPKTSQRTRTRRPRPKHKTTPRPETLQTKLDFGPITPGTSSAPTTTTKRTRRPHPKPKTTPHPEVPQTKLATKTSKRTRPPRPRPKTTPSPQAPETKPVPATVLEPVTLRPEASTTLASKTSQRTRRPRLRTKTTPRPEAPESKPVPTAELKPVTLRTETWVTTQAPKTSQRTRRPRPKTKTTPSPEVPQTKLVPSTDLEPGTLRTEAPKTMVVTTVLEPDTFRTKFPETTLAPKTQRTRRPRPRPKTTSSPEVPQNKSGKCMNPWLK

SEQ ID NO: 89009 - protein, 102 aa, Homo sapiens
MSGGGPSGGGPGGSGRARTSSFAEPGGGGGGGGGGPGGSASGPGGTGGGKASVGAMGGGVGASSSGGGPGGSGGGGSGGPGAGTSFPPPGVKLGQPRAADHA

SEQ ID NO: 89010 - protein, 59 aa, Homo sapiens
  MOD_RES (1)..(1): Any amino acid
XKVVGKDYLLCDYNRDGDSYRSPWSNKYDPPLEDGAMPSARLRKLEVEANNAFDQYRDL

SEQ ID NO: 89011 - protein, 561 aa, Homo sapiens
  MOD_RES (1)..(1): Any amino acid
XQTYLQAASDVPVGHSLDPAANYNSPKFRSRNQSYMRAVSTLSQASCVSQVSEAEINGQFESVCESVFSEVESQAMDALDLPGCFRTRSHSYLRAIQAGYSQDDECIPMMTPSDITSTIRSTAAVSYTNYKKTPPPVPPRTTSKPLISVTAQSSTESTQDAYQDSRAQRMSPWPQDSRGLYNSTDSLDSNKAMNLALETAAAQRHLPESQSSSVRTSDKAILVSKAEELLKSRCSSIGIQVETATDSDTESRGLREYHSVGVQVEDEKRHGRFKRSNSVTAAVQADLELEGFPGHITTEDKGLQFGSSFQRHSEPSTPTQYSAVRTVRTQGLFSYREDYRTQVDTSTLPPPDPWLEPAIDTVETGRMSPCRRDGSWFLKLLHAETKRMEGWCKEMEREAEENDLSEEILGKIRSAVGSAQLLMSQKFQQFYWLCQQNMDPSAMPRPTSQDLAGYWDMLQLSIEDVSMKFDELQRLRLNDWKMMESPERKEERKVPPPIPKKPPKGKFPITREKSLDLPDRQRQEARRRLMAAKRAASFRQNSASERADSIEIYIPEAQTRL

SEQ ID NO: 89012 - protein, 205 aa, Homo sapiens
MTPILTVLICLGLSLDPRTHVQAGPLPKPTLWAEPGSVITQGSPVTLRCQGSLETQEYHLYREKKTALWITRIPQELVKKGQFPILSITWEHAGRYCCIYGSHTAGLSSKRQSHKYQAEFPMSPVTSAHAGTYRCYGSLSSNPYLLTHPSDPLELVVSASPTSHPQDYTVENLIHMGKAGLILVVLRILLFEAQHSQRSPDAARR

SEQ ID NO: 89013 - protein, 370 aa, Homo sapiens
MPTAAAPIISSVQKLVLYETRARYFLVGSNNAETKYRVLKIDRTEPKDLVIIDDRHVYTQQEVRELLGRLDLGNRTKMGQKGSSGLFRAVSAFGVVGFVRFLEGYYIVLITKRRKMADIGGHAIYKVEDTNMIYIPNDSVRVTHPDEARYLRIFQNVDLSSNFYFSYSYDLSHSLQYNLTVLRMPLEMLKSEMTQNRQESFDIFEDEGLITQGGSGVFGICSEPYMKYVWNGELLDIIKSTVHRDWLLYIIHGFCGQSKLLIYGRPVYVTLIARRSSKFAGTRFLKRGANCEGDVANEVETEQILCDASVMSFTAGSYSSYVQVRGSVPLYWSQDISTMMPKPPITCAFSSFFLLSGSGRSICTCGCPSL

SEQ ID NO: 89014 - protein, 390 aa, Homo sapiens
MYFQQAWRDKRLSYNVIPLNLTLDNRVADQLWVPDTYFLNDKKSFVHGVTVKNRMIRLHPDGTVLYGLRITTTAACMMDLRRYPLDEQNCTLEIESYGYTTDDIEFYWRGDDNAVTGVTKIELPQFSIVDYKLITKKVVFSTGSYPRLSLSFKLKRNIGYFILQTYMPSILITILSWVSFWINYDASAARVALGITTVLTMTTINTHLRETLPKIPYVKAIDMYLMGCFVFVFMALLEYALVNYIFFGRGPQRQKKAAEKAASANNEKMRLDVNKMDPHENILLSTLEIKNEMATSEAVMGLGDPRSTMLAYDASSIQYRKAGLPRHSFGRNALERHVAQKKSRLRRRASQLKITIPDLTDVNAIDRWSRIFFPVVFSFFNIVYWLYYVN

SEQ ID NO: 89015 - protein, 1340 aa, Homo sapiens
MEEDLEGENWQTFSIPWCFSRAAEDEGEHICHHRTKSSGWPPPSGTWGLSQVPPYGWEMTANRDGRDYFINHMTQAIPFDDPRLESCQIIPPAPRKVEMRRDPVLGFGFVAGSEKPVVVRSVTPGGPSEGKLIPGDQIVMINDEPVSAAPRERVIDLVRSCKESILLTVIQPYPSPKSAFISAAKKARLKSNPVKVRFSEEVIINGQVSETVKDNSLLFMPNVLKVYLENGQTKSFRFDCSTSIKDVILTLQEKLSIKGIEHFSLMLEQRTEGAGTKLLLLHEQETLTQVTQRPSSHKMRCLFRISFVPKDPIDLLRRDPVAFEYLYVQSCNDVVQERFGPELKYDIALRLAALQMYIATVTTKQTQKISLKYIEKEWGLETFLPSAVLQSMKEKNIKKALSHLVKANQNLVPPGKKLSALQAKVHYLKFLSDLRLYGGRVFKATLVQAEKRSEVTLLVGPRYGISHVINTKTNLVALLADFSHVNRIEMFSEEESLVRVELHVLDVKPITLLMESSDAMNLACLTAGYYRLLVDSRRSIFNMANKKNTATQETGPENKGKHNLLGPDWNCIPQMTTFIGEGEQEAQITYIDSKQKTVEITDSTMCPKEHRHLYIDNAYSSDGLNQQLSQPGEAPCEADYRSLAQRSLLTLSGPETLKKAQESPRGAKVSFIFGDFALDDGISPPTLGYETLLDEGPEMLEKQRNLYIGSANDMKGLDLTPEAEGIQFVENSVYANIGDVKSFQAAEGIEEPLLHDICYAENTDDAEDEDEVSCEEDLVVGEMNQPAILNLSGSSDDIIDLTSLPPPEGDDNEDDFLLRSLNMAIAAPPPGFRDSSDEEDSQSQAASFPEDKEKGSSLQNDEIPVSLIDAVPTSAEGKCEKGLDNAVVSTLGALEALSVSEEQQTSDNSGVAILRAYSPESSSDSGNETNSSEMTESSELATAQKQSENLSRMFLATHEGYHPLAEEQTEFPASKTPAGGLPPKSSHALAARPATDLPPKVVPSKQLLHSDHMEMEPETMETKSVTDYFSKLHMGSVAYSCTSKRKSKLADGEGKAPPNGNTTGKKQQGTKTAEMEEEASGKFGTVSSRDSQHLSTFNLERTAFRKDSQRWYVATEGGMAEKSGLEAATGKTFPRASGLGAREAEGKEEGAPDGETSDGSGLGQGDRFLTDVTCASSAKDLDNPEDADSSTCDHPSKLPEADESVARLCDYHLAKRMSSLQSEGHFSLQSSQGSSVDAGCGTGSSGSACATPVESPLCPSLGKHLIPDASGKGVNYIPSEERAPGLPNHGATFKELHPQTEGMCPRMTVPALHTAINTEPLFGTLRDGCHRLPKIKETTV

SEQ ID NO: 89016 - protein, 88 aa, Homo sapiens
  MOD_RES (1)..(1): Any amino acid
XKRNQSHKEMHCLHPGDLYPFTRKPLFIIVDSSNSVAYKNFTNLFGQPLVCLLSPTAYPKALQVLMSLCGRWHFTATSQPEVLSADIV

SEQ ID NO: 89017 - protein, 127 aa, Homo sapiens
MVVFNGLLKIKICEAVSLKPTAWSLRHAVGPRPQTFLLDPYIALNVDDSRIGQTATKQKTNSPAWHDEFVTDVCNGRKIELAVFHDAPIGYDDFVANCTIQFEELLQNGSRHFEDWIDLEPEGRVYV

SEQ ID NO: 89018 - protein, 267 aa, Homo sapiens
EEITVGQLISHLQVSNQEIQTYAIALINALFLKAPEDKRQDMANAFAQKHLRSIILNHVIRGNRPIKTEMAHQLYVLQVLTFNLLEERMMTKMDPNDQAQRDIIFELRRIAFDAESDPSNAPGSGTEKRKAMYTKDYKMLGFTNHINPAMDFTQTPPGMLALDNMLYLAKVHQDTYIRIVLENSSREDKHECPFGRSAIELTKMLCEILQVGELPNEGRNDYHPMFFTHDRAFEELFGICIQLLNKTWKEMRATAEDFNKVSVSGLL

SEQ ID NO: 89019 - protein, 141 aa, Homo sapiens
MVDSTEYEVASQPEVETSPLGDGASPGPEQVKLKKEISLLNGVCLIVGNMIGSGIFVSPKGVLIYSASFGLSLVIWAVGGLFSVFGALCYAELGTTIKKSGASYAYILEAFGGFLAFIRLWTSLLIIEPTSQAIIAITFAN

SEQ ID NO: 89020 - protein, 923 aa, Homo sapiens [sequence omitted]

SEQ ID NO: 89021 - protein, 924 aa, Homo sapiens
MAQPLSRPLVLSQSPPWPPAPPSPRFPHRPQPLPGSPSRTPFQSLPLAWPPSRPRPSFHPLSQIPAQALSQPHSQCLLKALAQPRPLLQSPSQPFLPSHSLPLFKPQCPAQPNPLSQPLPSSLCLPKSLPLVPPISHTLPLSQPRLKSGFQLPPALLLLLLFSVLGPGAGGLFLTDYSTCSPRKLSPFRSFASTELFHFHVPEDTFLAVWNLIIFKEQGGTFGDHCPDQSVTVYFRSGAPPVINPLHTHFPGDTAVPGVFSLTLSWTLPNRTSGIFNVSSPLPGDWFLAAHLPQAHGHISVKGLQDECQYLLQPQLIVRRLLDVAVLVPGRPSEQTLSPHNRSALYKVFVPSFTYRVSAQLVCVGGRGVSACPLSLRLRPKAPPLHNSSSVACGGASGCQLELALPPWGHWVYVRVETSSRGPGRTIRFQLCVRLQECPQPGLLRALVPGAAMNMPQSLGNQPLPPEPPSLGTPAEGPGTTSPPEHCWPVRPTLRNELDTFSVHFYIFFGPSVALPPERPAVFAMRLLPVLDSGGVLSLELQLNASSVRQENVTVFGCLTHEVPLSLGDAAVTCSKESLAGFLLSVSATTRVARLRIPFPQTGTWFLALRSLCGVGPRFVRCRNATAEVRMRTFLSPCVDDCGPYGQCKLLRTHNYLYAACECKAGWRGWGCTDSADALTYGFQLLSTLLLCLSNLMFLPPVVLAIRSRYVLEAAVYTFTMFFSTFYHACDQPGIVVFCIMDYDVLQFCDFLGSLMSVWVTVIAMARLQPVVKQVLYLLGAMLLSMALQLDRHGLWNLLGPSLFALGILATAWTVRSVRRRHCYPPTWRRWLFYLCPGSLIAGSAVLLYAFVETRDNYFYIHSIWHMLIAGSVGFLLPPRAKTDHGVPSGARARGCGYQLCINEQEELGLVGPGGATVSSICAS

SEQ ID NO: 89022 - protein, 148 aa, Homo sapiens
MVLLRVLILLLSWAAGMGDRDFDDGVLGLAWVGAPSGSSGGICEKSKLYSDGKKKSLNTGIITVQNYGSHVPPKVSHITFAHEVGHNFGSPHDSGTECTPGESKNLGQKENGNYIMYARATSGDKLNNNKFSLCSIRNISQVLEKKRN

SEQ ID NO: 89023 - protein, 153 aa, Homo sapiens
MAGSPSRAAGRRLQLPLLCLFLQGATAVLFAVFVRYNHKTDAALWHRSNHSNADNEFYFRYPKESHSVAQAGVQRRNLGSLQPSPPRLPGRACHGLRGLWLPHGLPAALRLQQRGLHLPPGRLCPAVVHTGPGLSPLLPRWPHPCWRGEHDQC

SEQ ID NO: 89024 - protein, 460 aa, Homo sapiens
MSSMWSEYTIGGVKIYFPYKAYPSQLAMMNSILRGLNSKQHCLLESPTGSGKSLALLCSALAWQQSLSGKPADEGVSEKAEVQLSCCCACHSKDFTNNDMNQGTSRHFNYPSTPPSERNGTSSTCQDSPEKTTLAAKLSAKKQASIYRDENDDFQVEKKRIRPLETTQQIRKRHCFGTEVHNLDAKVDSGKTVKLNSPLEKINSFSPQKPPGHCSRCCCSTKQGNSQESSNTIKKDHTGKSKIPKIYFGTRTHKQIAQITRELRRTAYSGVPMTILSSRDHTCVHPEVVGNFNRNEKCMELLDGKNGKSCYFYHGVHKISDQHTLQTFQGMCKAWDIEELVSLGKKLKACPYYTARELIQDADIIFCPYNYLLDAQIRESMDLNLKEQVVILDEAHNIEDCARESASYSVTEVQLRFARDELDSMVNNNIRKKDHEPLRAVCCSLIKCHEHALRERQSLQ

SEQ ID NO: 89025 - protein, 163 aa, Homo sapiens
MERARRRGGGGGRGRGGKNVGGSGLSKSRLYPQAQHSHYPHYAASATPNQAGGAAEIQELASKRVDIQKKRFYLDVKQSSRGRFLKIAEVWIGRGRQDNIRKSKLTLSLSVAAELKDCLGDFIEHYAHLGLKGHRQEHGHSKEQGSRRRQKHSAPSPPVSVGS

SEQ ID NO: 89026 - protein, 161 aa, Homo sapiens
MTTEKSLVTEAENSQHQQKEEGEEAINSGQQEPQQEESCQTAAEGDNWCEQKLKASNGDTPTHEDLTKNKERTSESRGLSRLFSSFLKRPKSQVSEEEGKEVESDKEKGEGGQKEIEFGTSLDEEIILKAPIAAPEPELKTDPSLDLHSLSSAETQPHHYN

SEQ ID NO: 89027 - protein, 251 aa, Homo sapiens
MSGARSKLALFLCGCYVVALGAHTGEESVADHHEAEYYVAAVYEHPSILSLNPLALISRQEALELMNQNLDIYEQQVMTAAQKDVQIIVFPEDGIHGFNFTRTSIYPFLDFMPSPQVVRWNPCLEPHRFNDTEVLQRLSCMAIRGDMFLVANLGTKEPCHSSDPRCPKDGRYQFNTNVVFSNNGTLVDRYRKHNLYFEAAFDVPLKVDLITFDTPFAGRFGIFTCFDILFFDPAIRVLRDYKVKHVVYPTA

SEQ ID NO: 89028 - protein, 103 aa, Homo sapiens
MALRHLALLAGLLVGVASKSMENTAQLPECCVDVVGVNASCPGASLCGPGCYRRWNADGSASCVRCGNGTLPAYNGSECRSFAGPGAPFPMNRSSGTPGRPHP

SEQ ID NO: 89029 - protein, 90 aa, Homo sapiens
  MOD_RES (1)..(1): Any amino acid
XPTPSAPRSTSRPTGRPATVAAAPRHARTATSTCSSATRHGTRAGTRGSLVAKTTRRWTGTAARAEWPGLALAEPSRAAEEAGGKKRTEK

SEQ ID NO: 89030 - protein, 253 aa, Homo sapiens
PTLGLFSNYSTMDPVQKAVLSHTFGGPLLKTKRPVISCNICQIRFNSQSQAEAHYKGNRHARRVKGIEAAKTRGREPGVREPGDPAPPGSTPTNGDGVAPRPESHSVAQARVQWHNLSSLQPPPPRFKRFSCLSLLSSWDYRHLPPHPVSMENGLGPAPGSPEKQPGSPSPPSIPETGQGVTKGEGGTPAPASLPGGSKEEEEKAKRLLYCALCKVAVNSLSQLEAHNKGTKHKTILEARSGLGPIKAYPRLG

SEQ ID NO: 89031 - protein, 443 aa, Homo sapiens
  MOD_RES (1)..(1): Any amino acid
XQISGQYSGSPQLLKNLNIVGNISHHTTVPLTEAVDPVDLEDYLITHPLAVDSGPLRDLIEFPPDDIEVVYSPRDCRTLVSAVPEESEMDPHVRDCIRSYTEDWAIVIRKYHKLGTGFNPNTLDKQKERQKGLPKQVFESDEAPDGNSYQDDQDDLKRRSMSIDDTPRGSWACSIFDLKNSLPDALLPNLLDRTPNEEIDRQNDDQRKSNRHKELFALHPSPDEEEPIERLSVPDIPKEHFGQRLLVKCLSLKFEIEIEPIFASLALYDVKEKKKISENFYFDLNSEQMKGLLRPHVPPAAITTLARSAIFSITYPSQDVFLVIKLEKVLQQGDIGECAEPYMIFKEADATKNKEKLEKLKSQADQFCQRLGKYRMPFAWTAIHLMNIVSSAGSLERDSTEVEISTGGFCNHCYRILLYPSWNTFVPISSGHSSFPQSLATCP

SEQ ID NO: 89032 - protein, 508 aa, Homo sapiens
MIHVRRHETRRNSKSHVPEQKSRVDWRRTKRSSISQLLDSDEELDSEEFDSDEELDSDESFENDEELDSNKGPDCNKTPGSERELNLSKIQSEGNDSKCLINSGNGSTYEEETNKIKHRNIDLQDQEKHLSQEDNDLNKQTGQIIEDDQEKHLSQEDNDLNKQTGQIIEDDLEEEDIKRGKRKRLSSVMCDSDESDDSDILVRKVGVKRPRRVVEDEGSSVEMEQKTPEKTLAAQKREKLQKLKELSKQRSRQRRSSGRDFEDSEKESCPSSDEVDEEEEEDNYESDEDGDDYIIDDFVVQDEEGDEENKNQQGEKLTTSQLKLVKQNSLYSFSDHYTHFERVVKALLINALDESFLGTLYDGTRQKSYAKDMLTSLHYLDNRFVQPRLESLVSRSRWKEQYKERVENYSNVSIHLKNPENCSCQACGLHRYCKYSVHLSGELYNTRTMQIDNFMSHDKQECCTIAMTEEVEDEQVKETVERIFRRSKENGWIKESIGLTSACLLPIL

SEQ ID NO: 89033 - protein, 47 aa, Homo sapiens
MADAKYVLCRWEKRLWPAKVLARTATSTKNKRRKEYFLAVQILSLEE

SEQ ID NO: 89034 - protein, 174 aa, Homo sapiens
MRFLAATFLLLALSTAAQAEPVQFKDCGSVDGVIKEVNVSPCPTQPCQLSKGQSYSVNVTFTSNIQSKSSKAVVHGILMGVPVPFPIPEPDGCKSGINCPIQKDKTYSYLNKLPVKSEYPSIKLVVEWQLQDDKNQSLFCWEIPVQIVSLSGGERAWVEGRKWRRNQTETKSVP

SEQ ID NO: 89035 - protein, 74 aa, Homo sapiens
MMPSRTNLATGIPSSKVKYSRLSSTDDGYIDLQFKKTPPKIPYKAIALATVLFLIGAFLIIIGSLLLSGYISKG

SEQ ID NO: 89036 - protein, 109 aa, Homo sapiens
VSWFERTTGILTSEGLASDTSLICVIEDFFDTALIISRSSSEGKIQMLDSFLLSLGFLVTEKTVNHLLQQEGLKTFNCILHAVPREERKKFPLSEGMCHLMTVDVFSIT

SEQ ID NO: 89037 - protein, 133 aa, Homo sapiens
MHLLGPWLLLLVLEYLAFSDSSKWVFEHPETLYAWEGACVWIPCTYRALDGDLESFILFHNPEYNKNTSKFDGTRLYESTKDGKVPSEQKRVQFLGDKNKNCTLSIHPVHLNDSGQLGLRMESKTEKWMERIH

SEQ ID NO: 89038 - protein, 37 aa, Homo sapiens
MEKRELKIYSKHTEQYLSYSLNPCASSPQRGMPQYQN

SEQ ID NO: 89039 - protein, 64 aa, Homo sapiens
MEQDNSPRKIQFTVPLLEPHLDPEAAEQIRRRRPTPATLVLTSDQSSPEIDEDRIPNPHLKSSR

SEQ ID NO: 89040 - protein, 129 aa, Homo sapiens
MASLDRVKVLVLGDSGVGKSSLVHLLCQNQVLGNPSWTVGCSVDVRVHDYKEGTPEEKTYYIELWDVGGSVGSASSVKSTRAVFYNSVNGIIFVHDLTNKKSSQNLRRWSLEALNRDLVPTGVLVTNGD

SEQ ID NO: 89041 - protein, 375 aa, Homo sapiens
DAPKAGQLEAWLEMNPGYEVAPRSDSEESGSEEEEEIKGLEWLVSLYNNNLNGILADEMGLGKTIQTIALITYLMEHKRINGPFLIIVPLSTLSNWAYEFDKWAPSVVKVSYKGSPAARRAFVPQLRSGKFNVLLTTYEYIIKDKHILAKIRWKYMIVDEGHRMKNHHCKLTQVLNTHYVAPRRLLLTGTPLQNKLPELWALLNFLLPTIFKSCSTFEQWFNAPFAMTGEKVDLNEEETILIIRRLHKVLRPFLLRRLKKEVEAQLPEKVEYVIKCDMSALQRVLYRHMQAKGVLLTDGSEKDKKGKGGTKTLMNTIMQLRKICNHPYMFQHIEESFSEHLGFTGGIVQGLDLYRASGKFELLDRILPKLRATNH

SEQ ID NO: 89042 - protein, 224 aa, Homo sapiens
MLVMAPRTVLLLLSAALALTETWAGSHSMRYFDTAMSRPGRGEPRFISVGYVDDTQFVRFDSDAASPREEPRAPWIEQEGPEYWDRNTQIFKTNTQTDRESLRNLRGYYNQSEAGSHTLQSMYGCDVGPDGRLLRGHNQYAYDGKDYIALNEDLRSWTAADTAAQITQRKWEAARVAEQDRAYLEGTCVEWLRRYLENGKDTLERADQEQKSLFPAQRLELSNE

SEQ ID NO: 89043 - protein, 256 aa, Homo sapiens
MSSSSYAKNGTADGPHSPTSQVARGTTTRRSRLKRSDGSTTSTSFILRQGSADSYTSRPSDSDVSLEEDREAIRQEREQQAAIQLERAKSKPVAFAVKTNVSYCGALDEDVPVPSTAISFDAKDFLHIKEKYNNDWWIGRLVKEGCEIGFIPSPLRLENIRIQQEQKRGRFHGGKSSGNSSSSLGEMVSGTFRATPTSTAKQKQKVTEHIPPYDVVPSMRPVVLVGPSLKGYEVTDMMQKALFDFLKHRFDGRVSE

SEQ ID NO: 89044 - protein, 1230 aa, Homo sapiens
AHIYSLGATLKAALEYVAEPTLEPRLSQDLEALLSRMQAEDPGDRPDLESIIALCEEKLQLTSSCRVCRSLSAVGRRVLSIESFGALQDVSESSWRERPAPGNAGPRRPPGDPSTDPEVLPTPEGPESETSRGPRASPTKALLSTPVRNGESHSREGLAGLVLDAERTLGELDRDALRRSRLRKVQTFPRLLSDSPEATLCLPLTRGKSQLPISELFSPDPRKAFLDRKNGLSSFQAQPKCRLWPEQEPEHQLGRVPCAGRSTDRGPGVPGSPGQPETSHPSQGPAEAPADPRDASGEAQTPRDDERIPEGARQLESAAAEQWVSLQDLLSQLGRPFREYELWALCLACLRALQTRPEHPAYLCLDSVLVAEDGAVLFQPPPANGSYDSFFLAPELAEERLVTEKASVYCVAAVLWTAAKFSVPRNHKLALPRRLKTLLLDMARRSAPERPSAAEAIKVCGSYLLQRGMDSRKILAHLRASICQVYQEEETISLQNAFSVVELKPSVAPAPEPSPGFLPVNSDTGLVAVPGPVPGQHPCGEEATQLPAAFTSEATHFKPIVLAQNASVARDQPALAQEESEERGGQREGEGEEKLSLEAHAGSPSLKTPDGPVPGPGPQGAAPEPLGASVQRDSAQGRPCPPPQAPANQPEGASSAAPGSPVPAPPTKASALPVEQGPAEPIPPGVASGGLRPDALGPTTAHHGPRHPPKPPRSKATERPGQEPEGPGATPAGERDDQSPDSVPERPRPADRRLCLPCVDASPLPGRTACPSLQEATRLIQEEFAFDGYLDNGLEALIMGEYIFALKDLTFATFCGAISEKFCDLYWDEKLLQNLFKVVNGQASPSPSTAEEAGSQLEGSQSPRSPSSKRPSLHRLGKEKPAMARTSSRAPCSPTSVSDVDSDALSRGNFEVGFRPQRSVKAERAQQPEAGEDRRPAGGASDVEAVTRLARSKGVGPALSPGPAGFQSCSPGWCSAFYEADCFGADVHNYVKDLGRQQADGALPDAQSPELEQQLMMEKRNYRKTLKFYQKLLQKEKRNKGSDVKTMLSKLKGQLEEMKSRVQFLSLVKKYLQVMYAERWGLEPCTLPVIVNIAAAPCDTLDFSPLDESSSLIFYNVNKHPGGRQKARILQAGTPLGLMAYLYSSDAFLEGYVQQFLYTFRYFCTPHDFLHFLLDRINSTLTSSPASPGPTRTPPRPSPRSTGGASASCRPGWRTATLWTSLGTAGCWGS

SEQ ID NO: 89045 - protein, 222 aa, Homo sapiens
MTDSATANGDDRDPEIELFVKAGIDGESIGNCPFSQRLFMILWLKGVVFNVTTVDLKRKPADLHNLAPGTHPPFLTFNGDVKTDVNKIEEFLEETLTPEKYPKLAAKHRESNTAGIDIFSKFSAYIKNTKQQNNAALERGLTKALKKLDDYLNTPLPEEIDANTCGEDKGSRRKFLDGDELTLADCNLLPKLHVVKTHLLTSSSNFLRYSMRPTTVAYVHKQ

SEQ ID NO: 89046 - protein, 54 aa, Homo sapiens
MAPGSRGERSSFRSRRGPGVPSPQPDVTMLSRLLKEHQAKQNERKELQVWPRPT

SEQ ID NO: 89047 - protein, 99 aa, Homo sapiens
  MOD_RES (1)..(1): Any amino acid
XDPLEAFMAEVEDQAARDMKRLEEKDKERKNVKGIRDDIEEEDDQEAYFRYMAENPTAGVVQEEEEDNLEYDSDGNPIAPTKKIIDPLPPIDHSETNFE

SEQ ID NO: 89048 - protein, 143 aa, Homo sapiens
MFFLSSSKLTKWKGEVKKRLDSEYKEGGQRNWVQVFCNGAVPTELALLYMIENGPGEIPVDFSKQYSASWMCLSLLAALACSAGDTWASEVGPVLSKSSPRLITTWEKVPVGTNGGVTVVGLVSSLLGGTFVGIAYFLTQLIF

SEQ ID NO: 89049 - protein, 188 aa, Homo sapiens
MDGAANSQLSTSQPSLRHKVNEHEQDGNELQTTPEFRAHVAKKLGALLDSFITISEAAKEPAKAKVQKVALEDDGFRLFFTSVPGGREKEESPQPRRKRQPSSSSSEDSDEEWRRCREAAVSASDILQESAIHSPGTVEKEAKKKRKLKKKAKKVASVDSAVAATTPTSMATVQKQKSGELNGDQVSL

SEQ ID NO: 89050 - protein, 101 aa, Homo sapiens
FTESGLVGLLEQAAASFSMAGMYEAVNEVYKVLIPIHEANRDAKKLSTIHGKLQEAFSKIVHQFFYDLPFFTFYYTEYWLGADVWHLFSCWFLWNQVRGFG

SEQ ID NO: 89051 - protein, 84 aa, Homo sapiens
MVRTKADSVPGTYRKAENKYAGGNPVCVRPTPKWQKGIGEFFRLSPKDSEKENQIPEEAGSSGLGKAKRKACPLQPDHTNDEKE

SEQ ID NO: 89052 - protein, 57 aa, Homo sapiens
MAAQRGMPSSAVRVLEEALGMGLTAAGDARDTADAVAAEGAYYLEPYLYPVPLLLND

SEQ ID NO: 89053 - protein, 736 aa, Homo sapiens
MSKLGISFSEDQQKEKDQLGKAPKKEEAAALRKDISGSDKRSLEKNQINFWRNQMTKRWEPSLNWKTTVNYKGKGSAKEIQEDKHTGKLEKPRPSVSHGRAQLLRKSAEKIEETVSDSSSESEEDEEPPDHRQEASADLPSEYWQIQKLVKYLKGGNQTATVIALCSMRDFSLAQETCQLAIRDVGGLEVLINLLETDEVKCKIGSLKILKEISHNPQIRQNIVDLGGLPIMVNILDSPHKSLKCLAAETIANVAKFKRARRVVRQHGGITKLVALLDCAHDSTKPAQSSLYEARDVEVARCGALALWSCSKSHTNKEAIRKAGGIPLLARLLKTSHENMLIPVVGTLQECASEENYRAAIKAERIIENLVKNLNSENEQLQEHCAMAIYQCAEDKETRDLVRLHGGLKPLASLLNNTDNKERLAAVTGAIWKCSISKENVTKFREYKAIETLVGLLTDQPEEVLVNVVGALGECCQERENRVIVRKCGGIQPLVNLLVGINQALLVNVTKAVGACAVEPESMMIIDRLDGVRLLWSLLKNPHPDVKASAAWALCPCIKNAKDAGEMVRSFVGGLELIVNLLKSDNKEVLASVCAAITNIAKDQENLAVITDHGVVPLLSKLANTNNNKLRHHLAEAISRCCMWGRNRVAFGEHKAVAPLVRYLKSNDTNVHRATAQALYQLSEDADNCITMHENGAVKLLLDMVGSPDQDLQEAAAGCISNIRRLALATEKARYT

SEQ ID NO: 89054 - protein, 99 aa, Homo sapiens
MDSFGQPRPEDNQSVVRRMQKKYWKTKQVFIKATGKKEDEHLVASDAELDAKLEVFHSVQETCTELLKIIEKYQLRLNVISEEENELGLFLKFQAERDA

SEQ ID NO: 89055 - protein, 231 aa, Homo sapiens
  MOD_RES (1)..(1): Any amino acid
XSLHPGSLLKDLDTEKYFHLVLPTDELAEPKKSHRQSHRKKVLPEIYLTRLLSTKGTLQKFLDDLFKAILSIREDKPPLAVKYFFDFLEEQAEKRGISDPDTLHIWKTNSLPLRFWVNILKNPQFVFDIDKTDHIDACLSVIAQAFIDACSISDLQLGKDSPTNKLLYAKEIPEYRKIVQRYYKQIQDMTPLSEQEMNAHLAEESRKYQNEFNTNVAMAEIYKYAKRYRPQ

SEQ ID NO: 89056 - protein, 112 aa, Homo sapiens
MESQNLADFPRPVHHRIPNFKGSYLACQNIKDLDVFARTQEVKVDPDKPLEGVRLLVLQSKKTLLVPTPRLRTGLFNKITPPPGATKDILRKCATSQVPPERLGRQDRISKT

SEQ ID NO: 89057 - protein, 116 aa, Homo sapiens
MVGKGAKGMLVTLLPVQRSFFLPPFSGATPSTSLAESVLKVWHGAYNSGLLPQLMAQHSLAMAQNGAVPSEATKRDQNLKRGNWGNQIEFVLTSVGYAVGLGNVWRFPYLCYRNGG

SEQ ID NO: 89058 - protein, 87 aa, Homo sapiens
MLDCGLDMTSTLNFLPLPLVQSPRLSNLPGWSLKDGNAFLDKELKECSGHVFVDSVPEFCLPETELIDLSTVDVILISNYHCMMALP

SEQ ID NO: 89059 - protein, 87 aa, Homo sapiens
MKMLTRLQVLTLALFSKGFLLSLGDHNFLRREIKIEGDLVLGGLFPINEKGTGTEECGRINEDRGIQRLEAMLFAIDEINKDDYLLP

SEQ ID NO: 89060 - protein, 101 aa, Homo sapiens
MASAGTQHYSIGLRQKNSFKQSGPSGTVPATPPEKPSEGRVWPQAHQQVKPIWKLEKKQVETLSAGLGPGLLGVPPQPAYFFCPSTLCSSGTTAVIAGHSS

SEQ ID NO: 89061 - protein, 994 aa, Homo sapiens
MKAQKSGKEQQLDIMNKQYQQLESRLDEILSRIAKETEEIKDLEEQLTEGQIAANEALKKDLEGVISGLQEYLGTIKGQATQAQNECRKLRDEKETLLQRLTEVEQERDQLEIVAMDAENMRKELAELESALQEQHEVNASLQQTQGDLSAYEAELEARLNLRDAEANQLKEELEKVTRLTQLEQSALQAELEKERQALKNALGKAQFSEEKEQENSELHAKLKHLQDDNNLLKQQLKDFQNHLNHVVDGLVRPEEVAARVDELRRKLKLGTGEMNIHSPSDVLGKSLADLQKQFSEILARSKWERDEAQVRERKLQEEMALQQEKLATGQEEFRQACERALEARMNFDKRQHEARIQQMENEIHYLQENLKSMEEIQGLTDLQLQEADEEKERILAQLRELEKKKKLEDAKSQEQVFGLDKELKKLKKAVATSDKLATAELTIAKDQLKSLHGTVMKINQERAEELQEAERFSRKAAQAARDLTRAEAEIELLQNLLRQKGEQFRLEMEKTGVGTGANSQVLEIEKLNETMERQRTEIARLQNVLDLTGSDNKGGFENVLEEIAELRREVSYQNDYISSMADPFKRRGYWYFMPPPPSSKVSSHSSQATKDSGVGLKYSASTPVRKPRPGQQDGKEGSQPPPASGYWVYSPIRSGLHKLFPSRDADSGGDSQEESELDDQEEPPFVPPPGYMMYTVLPDGSPVPQGMALYAPPPPLPNNSRPLTPGTVVYGPPPAGAPMVYGPPPPNFSIPFIPMGVLHCNVPEHHNLENEVSRLEDIMQHLKSKKREERWMRASKRQSEKEMEELHHNIDDLLQEKKSLECEVEELHRTVQKRQQQKDFIDGNVESLMTELEIEKSLKHHEDIVDEIECIEKTLLKRRSELREADRLLAEAESELSCTKEKTKNAVEKFTDAKRSLLQTESDAEELERRAQETAVNLVKADQQLRSLQADAKDLEQHKIKQEEILKEINKIVAAKDSDFQCLSKKKEKLTEE

SEQ ID NO: 89062 - protein, 118 aa, Homo sapiens
MPVQLSEHPEWNESMHSLRISVGGLPVLASMTKAADPRFRPRWKDTGWDSVSNRSYRRPGHRVKGPRGKHLVQLPEKGLPDPVRQWGQGGRGMGQRPWGPGVPPGGEGERHGAIRPDC

SEQ ID NO: 89063 - protein, 341 aa, Homo sapiens
MLRSPTFTDAGPRCSCLPVSQTLDSMDTVLMGSLQHCCCLLPKMGDTWAQLPWPGPPHPAMLLISLLLAAGLMHSDAGTSCPVLCTCRNQVVDCSSQRLFSVPPDLPMDTRNLSLAHNRITAVPPGYLTCYMELQVLDLHNNSLMELPRGLFLHAKRLAHLDLSYNNFSHVPADMFQEAHGLVHIDLSHNPWLRRVHPQAFQGLMQLRDLDLSYGGLAFLSLEALEGLPGLVTLQIGGNPWVCGCTMEPLLKWLRNRIQRCTADSQLAECRGPPEVEGAPLFSLTEESFKACHLTLTLDDYLFIAFVGFVVSIASVATNFLLGITANCCHRWSKASEEEEI

SEQ ID NO: 89064 - protein, 515 aa, Homo sapiens
MASMLLAQRLACSFQHSYRLLVPGSRHISQAAAKVDVEFDYDGPLMKTEVPGPRSQELMKQLNIIQNAEAVHFFCNYEESRGNYLVDVDGNRMLDLYSQISSVPIGYSHPALLKLIQQPQNASMFVNRPALGILPPENFVEKLRQSLLSVAPKGMSQLITMACGSCSNENALKTIFMWYRSKERGQRGFSQEELETCMINQAPGCPDYSILSFMGAFHGRTMGCLATTHSKAIHKIDIPSFDWPIAPFPRLKYPLEEFVKENQQEEARCLEEVEDLIVKYRKKKKTVAGIIVEPIQSEGGDNHASDDFFRKLRDIARKHGCAFLVDEVQTGGGCTGKFWAHEHWGLDDPADVMTFSKKMMTGGFFHKEEFRPNAPYRIFNTWLGDPSKNLLLAEVINIIKREDLLNNAAHAGKALLTGLLDLQARYPQFISRVRGRGTFCSFDTPDDSIRNKLILIARNKALPACDFEKPRSSPTSCLFQVWCWVAVVTNPFVSVPRWSSGITTLTCSSIFSVTS

SEQ ID NO: 89065 - protein, 21 aa, Homo sapiens
  MOD_RES (1)..(1): Any amino acid
XQGPSLASKPVPCSAARPGQG

SEQ ID NO: 89066 - protein, 74 aa, Homo sapiens
MDCLCIVTTKQNQGRCPAQNCSVEAPAWMPVHHCTKYRYQDEDAPHDHSLPRLTHEVRGPELVHVSEKNLSQIE

SEQ ID NO: 89067 - protein, 182 aa, Homo sapiens
SAGPLETSSGPPVLDVRTTTALEMPDRENTFVVKVEGPSEYIMETVDAQHVKAWVSDIQECLSPGPCPATSPRPMTLPLAPGTSFLTRENTDSLELSCLNHSESLPSQDLLLGPSESNDRLSQGAYGGLSDRPSASISPSSASIAASHFDSMELLPPELPPRIPIEEGPPTGTVHPLSAPYP

SEQ ID NO: 89068 - protein, 407 aa, Homo sapiens
DKVRPWVVAQYPESCKKAASLVEGLADVLEEPGMLLGSPAGSSSILSDGVYERHMDPLLLPGELASPSQALGAGEIPAPSETPWLSPDPLFLEQRRVREAKTEEDGPANTEQKLKSFPEDPQHLGEWGHLDPAEENLKSYRKLLLWGYQLSQPDAASRLDTEELRLVERDPQGSSLPGGRRQESAGCACEEAAPAGVLPELPTEAPPGDALADPPSGTTEEEEEQPGKAPDPQDPQDAESDSATGSQRQSVIQQPAPDRGTAKLGTKRPHPEDGDGQSLEGVSSSGDSAGLEAGQGPGADEPGLSRGKPYACGECGEAFAWLSHLMEHHSSHGGRKRYACQGCWKTFHFSLALAEHQKTHEKEKSYALGGARGPQPSTREAQAGARAGGPPESVEGEAPPAPPEAQR

SEQ ID NO: 89069 - protein, 91 aa, Homo sapiens
TSVNVVGDSFGAGIVYHLSKSELDTIDSQHRVHEDIEMTKTQSIYDDMKNHRESNSNQCVYAAHNSVIVDECKGPFVLRIKPAIGTDLTAL

SEQ ID NO: 89070 - protein, 135 aa, Homo sapiens
  MOD_RES (1)..(1): Any amino acid
XYVRVPFLEVNDPGEPSGLETLKDTPPPRLIKSHLPLALLPQTLLDQKVKVVYVARNPKDVAVSYYHFHRMEKAHPEPGTWDSFLEKFMAGEVSYGSWYQHVQEWWELSRTHPVLYLFYEDMKEELMDHSISPFM

SEQ ID NO: 89071 - protein, 193 aa, Homo sapiens
MAAAFEASGALAAVATAMPAEHVAVQVPAPEPTPGPVRILRTAQDLSSPRTRTGDVLLAEPADFESLLLSRPVLEGLRAAGFERPSPVQLKAIPLGRCGLDLIVQAKSGTGKTCVFSTIALDSLVLENLSTQILILAPTREIAVQIHSVITAIGIKMEGLECHVFIGGTPLSQDKTRLKKCHIAVGSPELSNS

SEQ ID NO: 89072 - protein, 52 aa, Homo sapiens
MAADRRVCTYSAGTDTNPIFLFNKEMILCDRPPAIPKTTFSTENDMEIKVEE

SEQ ID NO: 89073 - protein, 87 aa, Homo sapiens
MTDGDYDYLIKLLALGDSGVGKTTFLYRYTDNKFNPKFITTVGIDFREKRVVYNAQGPNGSSGKAFKVHLQLWDTAGQERFRSLTTA

SEQ ID NO: 89074 - protein, 109 aa, Homo sapiens
PDLSTTYCGSAAYASPEVLLGIPYDPKKYDVWSMGVVLYVMVTGCMPFDDSDIAGLPRRQKRGVLYPEGLELSERCKALIAELLQFSPSARPSAGQVARNCWLRAGDSG

SEQ ID NO: 89075 - protein, 74 aa, Homo sapiens
SIVHRYMTITSERSVPADVFQIQATSVYPGAYNAFQIRAGNSQGDFYIRQINNVSAMLVLARPVTGPREPRGPH

SEQ ID NO: 89076 - protein, 53 aa, Homo sapiens
MTTFKEAMTFKDVAVVFTEEELGLLDLAQRKLYRDVMLENFRNLLSVGHQAFH

SEQ ID NO: 89077 - protein, 167 aa, Homo sapiens
MAELQEVQITEEKPLLPGQTPEAAKTHSVETPYGSVTFTVYGTPKPKRPAILTYHDVGLNYKSCFQPLFQFEDMQEIIQNFVRVHVDAPGMEEGAPVFPLGYQYPSLDQLADMIPCVLQYLNFSTIIGVGVGAGAYILARYALNHPDTVEGLVLINIDPNAKGWMDW

SEQ ID NO: 89078 - protein, 230 aa, Homo sapiens
MFRFMRDVEPEDPMFLMDPFAIHRQHMSRMLSGGFGYSPFLSITDGNMPGTRPASRRMQQAGAVSPFGMLGMSGGFMDMFGMMNDMIGNMEHMTAGGNCQTFSSSTVISYSNTGDGAPKVYQETSEMRSAPGGVSWGALLSQRRSGRHGGLFGIQTVDWSRCPLGITSGTGLTSSSAPETIARGTRRSGRTISTWMRVRPQRLMTSGGGRPPDSGSSVPWSFGGLSPQGL

SEQ ID NO: 89079 - protein, 108 aa, Homo sapiens
  MOD_RES (1)..(1): Any amino acid
XALAWSFHEGKAKAVVGLSGDASKRKAIVADRMVEILFHYADRALKKCPDQGKIQVMEQHFQDMVPVIVDYCLLLQRKTSDESKPHPSPFRSFLDVFVELVMKDHTCE

SEQ ID NO: 89080 - protein, 196 aa, Homo sapiens
MCVRRSLVGLTFCTCYLASYLTNKYVLSVLKFTYPTLFQGWQTLIGGLLLHVSWKLGWVEINSSSRSHVLVWLPASVLFVGIIYAGSRALSRLAIPVFLTLHNVAEVIICGYQKCFQKEKTSPAKICSALLLLAAAGCLPFNDSQFNPDGYFWAIIHLLCVGDLFSVLDFPFLYFYRFHGSCCASGFLGFFLMFST

SEQ ID NO: 89081 - protein, 151 aa, Homo sapiens
METGALRRPQLLPLLLLLCGGCPRAGGCNETGMLERLPLCGKAFADMMGKVDVWKWCNLSEFIVYYESFTNCTEMEANVVGCYWPNPLAQGFITGIHRQFFSNCTVDRVHLEDPPDEVLIPLIVIPVVLTVAMAGLVVWRSKRTDTLLCGN

SEQ ID NO: 89082 - protein, 4869 aa, Homo sapiens
MAEGGEGGEDEIQFLRTEDEVVLQCIATIHKEQRKFCLAAEGLGNRLCFLEPTSEAKYIPPDLCVCNFVLEQSLSVRALQEMLANTGENGGEGAAQGGGHRTLLYGHAVLLRHSFSGMYLTCLTTSRSQTDKLAFDVGLREHATGEACWWTIHPASKQRSEGEKVRIGDDLILVSVSSERYLHLSVSNGNIQVDASFMQTLWNVHPTCSGSSIEEGYLLGGHVVRLFHGHDECLTIPSTDQNDSQHRRIFYEAGGAGTRARSLWRVEPLRISWSGSNIRWGQAFRLRHLTTGHYLALTEDQGLILQDRAKSDTKSTAFSFRASKELKEKLDSSHKRDIEGMGVPEIKYGDSVCFVQHIASGLWVTYKAQDAKTSRLGPLKRKVILHQEGHMDDGLTLQRCQREESQAARIIRNTTALFSQFVSGNNRTAAPITLPIEEVLQTLQDLIAYFQPPEEEMRHEDKQNKLRSLKNRQNLFKEEGMLALVLNCIDRLNVYNSVAHFAGIAREESGMAWKEILNLLYKLLAALIRGNRNNCAQFSNNLDWLISKLDRLESSSGILEVLHCILTESPEALNLIAEGHIKSIISLLDKHGRNHKVLDILCSLCLCNGVAVRANQNLICDNLLPRRNLLLQTRLINDVTSIRPNIFLGVAEGSAQYKKWYFELIIDQVDPFLTAEPTHLRVGWASSSGYAPYPGGGEGWGGNGVGDDLYSYGFDGLHLWSGRIPRAVASINQHLLRSDDVVSCCLDLGVPSISFRINGQPVQGMFENFNTDGLFFPVMSFSAGVKVRFLMGGRHGEFKFLPPSGYAPCYEALLPKEKMRLEPVKEYKRDADGIRDLLGTTQFLSQASFIPCPVDTSQVILPPHLEKIRDRLAENIHELWGMNKIELGWTFGKIRDDNKRQHPCLVEFSKLPETEKNYNLQMSTETLKTLLALGCHIAHVNPAAEEDLKKVKLPKNYMMSNGYKPAPLDLSDVKLLPPQEILVDKLAENAHNVWAKDRIKQGWTYGIQQDLKNKRNPRLVPYALLDERTKKSNRDSLREAVRTFVGYGYNIEPSDQELADSAVEKVSIDKIRFFRVERSYAVRSGKWYFEFEVVTGGDMRVGWARPGCRPDVELGADDQAFVFEGNRGQRWHQGSGYFGRTWQPGDVVGCMINLDDASMIFTLNGELLITNKGSELAFADYEIENGFVPICCLGLSQIGRMNLGTDASTFKFYTMCGLQEGFEPFAVNMNRDVAMWFSKRLPTFVNVPKDHPHIEVMRIDGTMDSPPCLKVTHKTFGTQNSNADMIYCRLSMPVECHSSFSHSPCLDSEAFQKRKQMQEILSHTTTQCYYAIRIFAGQDPSCVWVGWVTPDYHLYSEKFDLNKNCTVTVTLGDERGRVHESVKRSNCYMVWGGDIVASSQRSNRSNVDLEIGCLVDLAMGMLSFSANGKELGTCYQVEPNTKVFPAVFLQPTSTSLFQFELGKLKNAMPLSAAIFRSEEKNPVPQCPPRLDVQTIQPVLWSRMPNSFLKVETERVSERHGWVVQCLEPLQMMALHIPEENRCVDILELCEQEDLMRFHYHTLRLYSAVCALGNSRVAYALCSHVDLSQLFYAIDNKYLPGLLRSGFYDLLISIHLASAKERKLMMKNEYIIPITSTTRNIRLFPDESKRHGLPGVGLRTCLKPGFRFSTPCFVVTGEDHQKQSPEIPLESLRTKALSMLTEAVQCSGAHIRDPVGGSVEFQFVPVLKLIGTLLVMGVFDDDDVRQILLLIDPSVFGEHSAGTEEGAEKEEVTQVEEKAVEAGEKAGKEAPVKGLLQTRLPESVKLQMCELLSYLCDCELQHRVEAIVAFGDIYVSKLQANQKFRYNELMQALNMSAALTARKTKEFRSPPQEQINMLLNFQLGENCPCPEEIREELYDFHEDLLLHCGVPLEEEEEEEEDTSWTGKLCALVYKIKGPPKPEKEQPTEEEERCPTTLKELISQTMICWAQEDQIQDSELVRMMFNLLRRQYDSIGELLQALRKTYTISHTSVSDTINLLAALGQIRSLLSVRMGKEEELLMINGLGDIMNNKVFYQHPNLMRVLGMHETVMEVMVNVLGTEKSQIAFPKMVASCCRFLCYFCRISRQNQKAMFEHLSYLLENSSVGLASPSMRGSTPLDVAASSVMDNNELALSLEEPDLEKVVTYLAGCGLQSCPMLLAKGYPDVGWNPIEGERYLSFLRFAVFVNSESVEENASVVVKLLIRRPECFGPALRGEGGNGLLAAMQGAIKISENPALDLPSQGYKREVTGDDEEEEEIVHMGNAIMSFYSALIDLLGRCAPEMHLIQTGKGEAIRIRSILRSLVPTEDLVGIISIPLKLPSLNKDGSVSEPDMAANFCPDHKAPMVLFLDRVYGIKDQTFLLHLLEVGFLPDLRASASLDTVSLSTTEAALALNRYICSAVLPLLTRCAPLFAGTEHCTSLIDSTLQTIYRLSKGRSLTKAQRDTIEECLLAICNHLRPSMLQQLLRRLVFDVPQLNEYCKMPLKLLTNHYEQCWKYYCLPSGWGSYGLAVEEELHLTEKLFWGIFDSLSHKKYDPDLFRMALPCLSAIAGALPPDYLDTRITATLEKQISVDADGNFDPKPINTMNFSLPEKLEYIVTKYAEHSHDKWACDKSQSGWKYGISLDENVKTHPLIRPFKTLTEKEKEIYRWPARESLKTMLAVGWTVERTKEGEALVQQRENEKLRSVSQANQGNSYSPAPLDLSNVVLSRELQGMVEVVAENYHNIWAKKKKLELESKGGGSHPLLVPYDTLTAKEKFKDREKAQDLFKFLQVNGIIVSRGMKDMELDASSMEKRFAYKFLKKILKYVDSAQEFIAHLEAIVSSGKTEKSPRDQEIKFFAKVLLPLVDQYFTSHCLYFLSSPLKPLSSSGYASHKEKEMVAGLFCKLAALVRHRISLFGSDSTTMVSCLHILAQTLDTRTVMKSGSELVKAGLRAFFENAAEDLEKTSENLKLGKFTHSRTQIKGVSQNINYTTVALLPILTSIFEHVTQHQFGMDLLLGDVQISCYHILCSLYSLGTGKNIYVERQRPALGECLASLAAAIPVAFLEPTLNRYNPLSVFNTKTPRERSILGMPDTVEDMCPDIPQLEGLMKEINDLAESGARYTEMPHVIEVILPMLCNYLSYWWERGPENLPPSTGPCCTKVTSEHLSLILGNILKIINNNLGIDEASWMKRIAVYAQPIISKARPDLLRSHFIPTLEKLKKKAVKTVQEEEQLKADGKGDTQEAELLILDEFAVLCRDLYAFYPMLIRYVDNNRSNWLKSPDADSDQLFRMVAEVFILWCKSHNFKREEQNFVIQNEINNLAFLTGDSKSKMSKAMQVKSGGQDQERKKTKRRGDLYSIQTSLIVAALKKMLPIGLNMCTPGDQELISLAKSRYSHRDTDEEVREHLRNNLHLQEKSDDPAVKWQLNLYKDVLKSEEPFNPEKTVERVQRISAAVFHLEQVEQPLRSKKAVWHKLLSKQRKRAVVACFRMAPLYNLPRHRSINLFLHGYQRFWIETEEYSFEEKLVQDLAKSPKVEEEEEEETEKQPDPLHQIILYFSRNALTERSKLEDDPLYTSYSSMMAKSCQSGEDEEEDEDKEKTFEEKEMEKQKTLYQQARLHERGAAEMVLQMISASKGEMSPMVVETLKLGIAILNGGNAGVQQKMLDYLKEKKDAGFFQSLSGLMQSCSVLDLNAFERQNKAEGLGMVTEEGTLIVRERGEKVLQNDEFTRDLFRFLQLLCEGHNSDFQNFLRTQMGNTTTVNVIISTVDYLLRLQESISDFYWYYSGKDIIDESGQHNFSKALAVTKQIFNSLTEYIQGPCIGNQQSLAHSRLWDAVVGFLHVFANMQMKLSQDSSQIELLKELLDLLQDMVVMLLSLLEGNVVNGTIGKQMVDTLVESSTNVEMILKFFDMFLKLKDLTSSDTFKEYDPDGKGIISKKEFQKAMEGQKQYTQSEIDFLLSCAEADENDMFNYVDFVDRFHEPAKDIGFNVAVLLTNLSEHMPNDSRLKCLLDPAESVLNYFEPYLGRIEIMGGAKKIERVYFEISESSRTQWEKPQVKESKRQFIFDVVNEGGEQEKMELFVNFCEDTIFEMQLASQISESDSADRPEEEEEDEDSSYVLEIAGEEEEDGSLEPASAFAMACASVKRNVTDFLKRATLKNLRKQYRNVKKMTAKELVKVLFSFFWMLFVGLFQLLFTILGGIFQILWSTVFGGGLVEGAKNIRVTKILGDMPDPTQFGIHDDTMEAERAEVMEPGITTELVHFIKGEKGDTDIMSDLFGLHPKKEGSLKHGPEVGLGDLSEIIGKDEPPTLESTVQKKRKAQAAEMKAANEAEGKVESEKADMEDGEKEDKDKEEEQAEYLWTEVTKKKKRRCGQKVEKPEAFTANFFKGLEIYQTKLLHYLARNFYNLRFLALFVAFAINFILLFYKVTEEPLEEETEDVANLWNSFNDEEEEEAMVFFVLQESTGYMAPTLRALAIIHTIISLVCVVGYYCLKVPLVVFKREKEIARKLEFDGLYITEQPSEDDIKGQWDRLVINTPSFPNNYWDKFVKRKVINKYGDLYGAERIAELLGLDKNALDFSPVEETKAEAASLVSWLSSIDMKYHIWKLGVVFTDNSFLYLAWYTTMSVLGHYNNFFFAAHLLDIAMGFKTLRTILSSVTHNGKQLVLTVGLLAVVVYLYTVVAFNFFRKFYNKSEDDDEPDMKCDDMMTCYLFHMYVGVRAGGGIGDEIEDPAGDPYEMYRIVFDITFFFFVIVILLAIIQGLIIDAFGELRDQQEQVREDMETKCFICGIGNDYFDTTPHGFETHTLQEHNLANYLFFLMYLINKDETEHTGQESYVWKMYQERCWDFFPAGDCFRKQYEDQLG

SEQ ID NO: 89083 - protein, 34 aa, Homo sapiens
  MOD_RES (1)..(1): Any amino acid
XQLARMLVEYTQNQKDVLSEKEKKLEGVMIDFGL

SEQ ID NO: 89084 - protein, 157 aa, Homo sapiens
MGGVASTLQGLPMRLGYTGAGGFPGVCLEHLEPQPGSSDQESEEQQQFRNIFKQIAGDDMEICADELKKVLNTVVNKHKDLKTHGFTLESCRSMIALMDTDGSGKLNLQEFHHLWNKIKAWQKIFKHYDTDQSGTINSYEMRNAVNDAGFHLNNQLY

SEQ ID NO: 89085 - protein, 298 aa, Homo sapiens
  MOD_RES (1)..(1): Any amino acid
XGPPIAATPPAYSTQYVAYSPQQFPNQPLVQHVPHYQSQHPHVYSPVIQGNARMMAPPTHAQPGLVSSSATQYGAHEQTHAMYVSTGSLAQQYAHPNATLHPHTPHPQPSATPTGQQQSQHGGSHPAPSPVQHHQHQAAQALHLASPQQQSAIYHAGLAPTPPSMTPASNTQSPQNSFPAAQQTVFTIHPSHVQPAYTNPPHMAHVPQCASEALARCGLEMRLSWIYLSEGYLAHVQSGMVPSHPTAHAPMMLMTTQPPGGPQAALAQSALQPIPVSTTAHFPYMTHPSVQAHHQQQL

SEQ ID NO: 89086 - protein, 405 aa, Homo sapiens
EDDEDDFPTTRSDGDFLHSTNGNKEKLFPHVTPKGINGIDFKGEAITFKATTAGILATLSHCIELMVKREDSWQKRLDKETEKKRRTEEAYKNAMTELKKKSHFGGPDYEEGPNSLINEEEFFDAVEAALDRQDKIEEQSQSEKVRLHWPTSLPSGDAFSSVGTHRFVQKPYSRSSSMSSIDLVSASDDVHRFSSQVEEMVQNHMTYSLQDVGGDANWQLVVEEGEMKVYRREVEENGIVLDPLKATHAVKGVTGHEVCNYFWNVDVRNDWETTIENFHVVETLADNAIIIYQTHKRVWPASQRDVLYLSVIRKIPALTENDPETWIVCNFSVDHDSAPLNNRCVRAKINVAMICQTLVSPPEGNQEISRDNILCKITYVANVNPGGWAPASVLRAVAKREFIRL

SEQ ID NO: 89087 - protein, 836 aa, Homo sapiens
MLQNVTPHNKLPGEGNAGLLGLGPEAAAPGKRIRKPSLLYEGFESPTMASVPALQLTPANPPPPEVSNPKKPGRVTNQLQYLHKVVMKALWKHQFAWPFRQPVDAVKLGLPDYHKIIKQPMDMGTIKRRLENNYYWAASECMQDFNTMFTNCYIYNKPTDDIVLMAQTLEKIFLQKVASMPQEEQELVVTIPKNSHKKGAKLAALQGSVTSAHQVPAVSSVSHTALYTPPPEIPTTVFNIPHPSVISSPLLKSLHSAGPPLLAVTAAPPAQPLAKKKGVKRKADTTTPTPTAILAPGSPASPPGSLEPKAARLPPMRRESGRPIKPPRKDLPDSQQQHQSSKKGKLSEQLKHCNGILKELLSKKHAAYAWPFYKPVDASALGLHDYHDIIKHPMDLSTVKRKMENRDYRDAQEFAADVRLMFSNCYKYNPPDHDVVAMARKLQDVFEFRYAKMPDEPLEPGPLPVSTAMPPGLAKSSSESSSEESSSESSSEEEEEEDEEDEEEEESESSDSEEERAHRLAELQEQLRAVHEQLAALSQGPISKPKRKREKKEKKKKRKAEKHRGRAGADEDDKGPRAPRPPQPKKSKKASGSGGGSAALGPSGFGPSGGSGTKLQAGVQWRDLGLLQPPLLGFKRFSCLSLPSSQNYRLPKKATKTAPPALPTGYDSEEEEESRPMSYDEKRQLSLDINKLPGEKLGRVVHIIQAREPSLRDSNPEEIEIDFETLKPSTLRELERYVLSCLRKKPRKPYTIKKPVGKTKEELALEKKRELEKRLQDVSGQLNSTKKPPKKANEKTESSSAQQVAVSRLSASSSSSDSSSSSSSSSSSDTSDSDSG

SEQ ID NO: 89088 - protein, 119 aa, Homo sapiens
MDHLGASLWPQVGSLCLLLAGAAWAPPPNLPDPKFESKAALLAARGPEELLCFTERLEDLVCFWEEAASAGVGPGNYSFSYQLEAGTPSMGRGANTPAITAGTRPQTSGWDNNASKSRG

SEQ ID NO: 89089 - protein, 151 aa, Homo sapiens
DTTEQLPDLCVNLLLALNLHLPAADQNVIMAALSKHANVKIFSEKLLLLLNRGDDPVRIFKHEPQPPHSVLKFLQDVFGSPATAAIFYHTDMMALIDITVRHIADLSPGDKVPGAAHGVPLPDACYSPHHTLPAAPPPATRPAGHTATHPE

SEQ ID NO: 89090 - protein, 34 aa, Homo sapiens
MSALTRLASFARVGGRLFRSGCARTAGDGGVRQN

SEQ ID NO: 89091 - protein, 793 aa, Homo sapiens
MSRRKQGKPQHLSKREFSPEPLEAILTDDEPDHGPLGAPEGDHDLLTCGQCQMNFPLGDILIFIEHKRKQCNGSLCLEKAVDKPPSPSPIEMKKASNPVEVGIQVTPEDDDCLSTSSRGICPKQEHIAGKDEPSSYTCTTCKQPFTSAWFLLQHAQNTHGLRIYLESEHGSPLTPRVGIPSGLGAECPSQPPLHGIHIADNNPFNLLRIPGSVSREASGLAEGRFPPTPPLFSPPPRHHLDPHRIERLGAEEMALATHHPSAFDRVLRLNPMAMEPPAMDFSRRLRELAGNTSSPPLSPGRPSPMQRLLQPFQPGSKPPFLATPPLPPLQSAPPPSQPPVKSKSCEFCGKTFKFQSNLVVHRRSHTGEKPYKCNLCDHACTQASKLKRHMKTHMHKSSPMTVKSDDGLSTASSPEPGTSDLVGSASSALKSVVAKFKSENDPNLIPENGDEEEEEDDEEEEEEEEEEEEELTESERVDYGFGLSLEAARHHENSSRGAVVGVGDESRALPDVMQGMVLSSMQHFSEAFHQVLGEKHKRGHLAEAEGHRDTCDEDSVAGESDRIDDGTVNGRGCSPGESASGGLSKKLLLGSPSSLSPFSKRIKLEKEFDLPPAAMPNTENVYSQWLAGYAASRQLKDPFLSFGDSRQSPFASSSEHSSENGSLRFSTPPGELDGGISGRSGTGSGGSTPHISGPGPGRPSSKEGRRSDTCEYCGKVFKNCSNLTVHRRSHTGERPYKCELCNYACAQSSKLTRHMKTHGQVLHTPPFGVVPRELKMCGSFRMEAREPLSSEKI

SEQ ID NO: 89092 - protein, 232 aa, Homo sapiens
MPAPTQLFFPLIRNCELSRIYGTACYCHHKHLCCSSSYIPQSRLRYTPHPAYATFCRPKENWWQYTQGRRYASTPQKFYLTPPQVNSILKANEYSFKVPEFDGKNVSSILGFDSNQLPANAPIEDRRSAATCLQTRGMLLGVFDGHAGCACSQAVSERLFYYIAVSLLPHETLLEIENAVESGRALLPILQWHKHPNDYFSKEASKLYFNSLRTYWQELIDLNTGESTDIDV

SEQ ID NO: 89093 - protein, 182 aa, Homo sapiens
MAFMKKYLLPILGLFMAYYYYSANEEFRPEMLQGKKVIVTGASKGIGREMAYHLAKMGAHVVVTARSKETLQKVVSHCLELGAASAHYIAGTMEDMTFAEQFVAQAGKLMGGLDMLILNHITNTSLNLFHDDIHHVRKSMEVNFLSYVVLTVAALPMLKQSNGSIVVVSSLAGKVAYPMVAA

SEQ ID NO: 89094 - protein, 369 aa, Homo sapiens
MADNLDEFIEEQKARLAEDKAELESDPPYMEMKGKLSAKLSENSKILISMAKENIPPNSQQTRGSLGIDYGLSLPLGEDYERKKHKLKEELRQDYRRYLTQERLKLERNKEYNQFLRGKEESSEKFRQVEKSTEPKSQRNKKPIGQVKPDLTSQIQTSCENSEGPRKDVLTPSEAYEELLNQRRLEEDRYRQLDDEIELRNRRIIKKANEEVGISNLKHQRFASKAGIPDRRFHRFNEDRVFDRRYHRPDQDPEVSEEMDERFRYESDFDRRLSRVYTNDRMHRNKRGNMPPMEHDGDVIEQSNIRISSAENKSAPDNETSKSANQDTCSPFAGMLFGGEDRELIQRRKEKYRLELLEQMAEQQRNKRR

SEQ ID NO: 89095 - protein, 130 aa, Homo sapiens
MEKEKGNDDGIPDQENSLDFSEHFNQLELLETHGHLIPTGTQSLWLTTVRRLLSEKATHVNTRDEDEYTPLHRAAYSGHLDIVQELIAQGADVHAVTVDGWTPLHSACKWNNTRVASFLLQHDADINAQT

SEQ ID NO: 89096 - protein, 149 aa, Homo sapiens
  MOD_RES (1)..(1): Any amino acid
XVAHAYYLKHQFYPTVVYLTKSSPSMAVLYIQAFVLVFLLGKVMGKVFFGQLRAAEMEHLLERSWYAVTETCLAFTVFRDDFSPRFVALFTLLLFLKCFHWLAEDRVDFMERSPNISWLFHCRIVLCHPDDDGAHHLHQVCAALRGPPE

SEQ ID NO: 89097 - protein, 96 aa, Homo sapiens
MDLSAASHRIPLSDGNSIPIIGLGTYSEPKSLWATNHVPEMVRPTLERTLRVLQLDYVDLYIIEVPMAFKPGDEIYPRDENGKWLYHKSNLCATWE

SEQ ID NO: 89098 - protein, 43 aa, Homo sapiens
MEKKECPEKSSSSEEELPRRVYRELPCVSETLCDISHFFQEDD

SEQ ID NO: 89099 - protein, 339 aa, Homo sapiens
MAVLLLLLRALRRGPGPGPRPLWGPGPAWSPGFPARPGRGRPYMASRPPGDLAEAGGRALQSLQLRLLTPTFEGINGLLLKQHLVQNPVRLWQLLGGTFYFNTSRLKQKNKEKDKSKGKAPEEDEEERRRRERDDQMYRERLRTLLVIAVVMSLLNALSTSGGSISWNDFVHEMLAKGEVQRVQVVPESDVVEVYLHPGAVVFGRPRLALMYRMQVANIDKFEEKLRAAEDELNIEAKDRIPVSYKRTGFFGNALYSVGMTAVGLAILWYVFRLAGMTGREGGFSAFNQLKMARFTIVDGKMGKGVSFKDVAGMHEAKLEVREFVDYLKVKAAWAGREV

SEQ ID NO: 89100 - protein, 273 aa, Homo sapiens
PLSCPSGISTQNSLSCSPPHQSPALEDIGCSSCAEKSKKTPCGTANGPVNTEVKANGPHLYSSPTDSTDPRRLPGANTPLPGLSHRQGWPRPLTPPAAGGLQNHTVGIIVKTENATGPSSCPQRSLVPVPSLPPSIPSSCASIENTSTLQRKTVQSQIGPPLTDSRPLGSPPNATRVLTPPQAAGDGILATTANQRFSSPAPSSANSTAMVDLTNSLRAFMDVNGEIEINMLDEKLIKFLALQRIHQLFPSRVQPSPGSVGTHQLASGGHHIE

SEQ ID NO: 89101 - protein, 655 aa, Homo sapiens
MSTRTPLPTVNERDTENHTSHGDGRQEVTSRTSRSGARCRNSIASCADEQPHIGNYRLLKTIGKGNFAKVKLARHILTGREVAIKIIDKTQLNPTSLQKLFREVRIMKILNHPNIVKLFEVIETEKTLYLIMEYASGGEVFDYLVAHGRMKEKEARSKFRQIVSAVQYCHQKRIVHRDLKAENLLLDADMNIKIADFGFSNEFTVGGKLDTFCGSPPYAAPELFQGKKYDGPEVDVWSLGVILYTLVSGSLPFDGQNLKELRERVLRGKYRIPFYMSTDCENLLKRFLVLNPIKRGTLEQIMKDRWINAGHEEDELKPFVEPELDISDQKRIAGPAIPSVVAYPKRSQTSTADSDLKEDGISSRKSSGSAVGGKGIAPASPMLGNASNPNKADIPERKKSSTVPSSNTASGGMTRRNTYVCSERTTADRHSVIQNGKENSTIPDQRTPVASTHSISSAATPDRIRFPRGTASRSTFHGQPRERRTATYNGPPASPSLSHEATPLSQTRSRGSTNLFSKLTSKLTRRLPTEYERNGRYEGSSRNVSAEQKDENKEAKPRSLRFTWSMKTTSSMDPGDMMREIRKVLDANNCDYEQRERFLLFCVHGDGHAENLVQWEMEVCKLPRLSLNGVRFKRISGTSIAFKNIASKIANELKL

SEQ ID NO: 89102 - protein, 1049 aa, Homo sapiens
MSACNTFTEHVWKPGECKNCFKPKSLHQLPPDPEKAPITHGNVKTNANHSNNHRIRNTGNFRPPVAKKPTIAVKPTMIVADGQSICGELSIQEHCENKPVIIGWNRNRAALSQKPLNNNNEDDEGISHVPKPYGNNDSAKKMSDNNNGLTEVLKEIAGLDTAPQIRGNETNSRETFLGRINDCYKRSLERKLPPSCMIGGIKETQGKHVILSGSTEVISNEGGRFCYPEFSSGEESEEDVLFSNMEEEHESWDESDEELLAMEIRMRGQPRFANFRANTLSPVRFFVDKKWNTIPLRNKSLQRICAVDYDDSYDEILNGYEENSVVSYGQGSIQSMVSSDSTSPDSSLTEESRSETASSLSQKICNGGLSPGNPGDSKDMKEIEPNYESPSSNNQDKDSSQASKSSIKVPETHKAVLALRLEEKDGKIAVQTEKEESKASTDVAGQAVTINLVPTEEQAKPYRVVNLEQPLCKPYTVVDVSAAMASEHLEGPVNSPKTKSSSSTPNSPVTSSSLTPGQISAHFQKSSAIRYQEVWTSSTSPRQKIPKVELITSGTGPNVPPRKNCHKSAPTSPTATNISSKTIPVKSPNLSEIKFNSYNNAGMPPFPIIIHDEPTYARSSKNAIKVPIVINPNAYDNLAIYKSFLGTSGELSVKEKTTSVISHTYEEIETESKVPDNTTSKTTDCLQTKGFSNSTEHKRGSVAQKVQEFNNCLNRGQSSPQRSYSSSHSSPAKIQRATQEPVAKIEGTQESQMVGSSSTREKASTVLSQIVASIQPPQSPPETPQSGPKACSVEELYAIPPDADVAKSTPKSTPVRPKSLFTSQPSGEAEAPQTTDSPTTKVQKDPSIKPVTPSPSKLVTSPQSEPPAPFPPPRSTSSPYHAGNLLQRHFTNWTKPTSPTRSTEAESVLHSEGSRRAADAKPKRWISFKSFFRRRKTDEEDDKEKEREKGKLVGLDGTVIHMLPPPPVQRHHWFTEAKGESSEKPAIVFMYRCDPAQGQLSVDQSKARTDQAAVMEKGRAENALLQDSEKKRSHSSPSQIPKKILRYVK

SEQ ID NO: 89103 - protein, 43 aa, Homo sapiens
MSSESSKKRKPKVIRSDGAPAEGKRNRSDTEQEGKYYSEEADG

SEQ ID NO: 89104 - protein, 80 aa, Homo sapiens
MNGEEEFFDAVTGFDSDNSSGEFSEANQKVTGMIDLDTSKNNRIGKTGESLWLLLLFRLWLPSGRGPANHLIHSWEKRMN

SEQ ID NO: 89105 - protein, 286 aa, Homo sapiens
MAVPQPMPSIPEDLESREAMVAFFNSAVASAEEEQARLRGQLKEQRVRCRRLAHLLASAQKEPEAAAPAPGTGGDSVCGETHRALQGAMEKLQSRFMELMQEKADLKERVEELEHRCIQLSGETDTIGEYIALYQSQRAVLKERHREKEEYISRLAQDKEEMKVKLLELQELVLRLVGDRNEWHGRFLAAAQNPADEPTSGAPAPQELGAANQQGDLCEVSLAGSVEPAQGEAREGSPRDNPTAQQIMQLLREMQNPRERPGLGSNPCIPFFYRADENDEVKITVI

SEQ ID NO: 89106 - protein, 141 aa, Homo sapiens
  MOD_RES (1)..(1): Any amino acid
XRGRRWAFARVDGGSCHRRGAPTGSTSNQIRGESSVAQQPLHTAQKTRKGEHKWAAVVGLEIHAQISSNSKLFSGSQVRFSAPPNSLVSFFDASLPGTLPVLNRRCVEAAVMTGLALNCHINKKSLFDRKHYFYADLPRAS

SEQ ID NO: 89107 - protein, 130 aa, Homo sapiens
MNEYPKKRKRKTLHPSRYSDSSGISRIADGFNGIFSDHCYSVCSMRQPDLKYFDNKDDDSDTETSNDLPKFADGIKARNRNQNYLVPSPVLRILDHTAFSTEKSADIVICDEECDSPESVNQQTQEESPI

SEQ ID NO: 89108 - protein, 92 aa, Homo sapiens
RNRIGSENPSDVFRFLVEERIQCCQTRKVRYTERVDYLMQLPVAMEAATNKDVSIDMPDLLDINHLRARGLQPGEEELPDISPPIVIPDDSK

SEQ ID NO: 89109 - protein, 121 aa, Homo sapiens
MELSAIGEQVFAVESIRKKRVRKGKVEYLVKWKGWPPKEERDRASGYRKRGPKPKRLLLQRLYSMDLRSSHKAKGKEKLCFSLTCPLGSGSPEGVVKAGAPELVDKGPLVPTLPFPLRKPR

SEQ ID NO: 89110 - protein, 169 aa, Homo sapiens
MRRAALWLWLCALALSLQPALPQIVATNLPPEDQDGSGDDSDNFSGSGAGALQDITLSQQTPSTWKDTQLLTAIPTSPEPTGLEATAASTSTLPAGEGPKEGEAVVLPEVEPGLTAREQEATPRPRETTQLPTTHLASTTTATTAQEPATSHPHRDMQPVHFVSWGGLI

SEQ ID NO: 89111 - protein, 150 aa, Homo sapiens
MNIKGSPWKGSLLLLLVSNLLLCQSVAPLPICPGGAARCQVTLRDLFDRAVVLSHYIHNLSSEMFSEFDKRYTHGRGFITKAINSCHTSSLATPEDKEQAQQMNQKDFLSLIVSILRSWNEPLYHLVTEVRGMQEAPEAILSKAVEIEEQ

SEQ ID NO: 89112 - protein, 144 aa, Homo sapiens
MRFPSCGKNGVTSLTQKKVLRAPCGAPSVTVTKSHKRGMKGDTVNVRRSVRVKTKVPWMPPGKSSARPVGCKWENPPHCLEITPPSSEKLVSVMRLSDLSTEDDDSGHCKMNRYDKKIDSLMNAVGCLKSEVKMQKGERQMAKR

SEQ ID NO: 89113 - protein, 752 aa, Homo sapiens
  MOD_RES (1)..(1): Any amino acid
XEIIVAHIEKCSMNQNGNSLKKLAPSGRISGLCFKKLNVTTPIHKIIVNRLARKVEVDSIVVPLPFSSQELSIEDSGSMYVITTPAGLIIKWSHLTGIIDIHFGFRFNLSSYTEGLCGICNEDPDDDLRMQNGTIITNMEDIGLFIESWEIEKSFEVTMRRPVRNCTEHDCSQCIDLLNRRIFIPCHDKVSPEDFCEKMWINYTYFWNYECDALSAYVALCNKFDICIQWRTPDYCSLSCPEGKEYQPCVRPCEARTCLNQWFYGHTSCLNLREDCVCKVGTILHRPHSAQCIPEKECACTDSEDQPRTAGEIWNGGIDECTLYKCLENGSIIPIEPDCDEEPTPVCEREAEVVMGIIDKWTCCSKEVCGCDTTLCETSIPTCTNSQKLIVGHSPLSCCPQYKCECDPLKCPSISTPECREDQFMIQVRQEEPCCFSPFCVCESCTKPVPLCHDGEFLTVDLNSTHFCCPQYYCVCEPNLCPMPLLNCAEDMNLVKENVSGQCCPTWHCEKDDVCVFQEVSVLNPGQSMIKYLEEDFCYAIECLEEKDNHTGFHTLNFTLVNCSKKCDVHQVYTPSPSDYGCCGTCKNVSCKFHMENGTSVVYAVGSTWHYNCTTYECVKTDEGAIILNYTMVCPPFNETECKMNEGIVKLYNEGCCKICKREERICQKVIIKSVIRKQDCMSQSPINVASCDGKCPSATIYNINIESHLRFCKCCRENGVRNLSVPLYCSGNGTEIMYTLQEPIDCTCQWN

SEQ ID NO: 89114 - protein, 77 aa, Homo sapiens
MAASSSSMTSSAARPGCIRAPGSPSTRGPRQGSSSRPPLLPTSHSGGVSMPKAARRPSLDLRVPWSACTQGITSEAR

SEQ ID NO: 89115 - protein, 955 aa, Homo sapiens
MALIMEPVSKWSPSQVVDWMKGLDDCLQQYIKNFEREKISGDQLLRITHQELEDLGVSRIGHQELILEAVDLLCALNYGLETENLKTLSHKLNASAKNLQNFITGRRRSGHYDGRTSRKLPNDFLTSVVDLIGAAKSLLAWLDRSPFAAVTDYSVTRNNVIQLCLELTTIVQQDCTVYETENKILHVCKTLSGVCDHIISLSSDPLVSQSAHLEVIQLANIKPSEGLGMYIKSTYDGLHVITGTTENSPADRCKKIHAGDEVIQVNHQTVPLIPRSPTSSVATPSSTISTPTKRDSSALQDLYIPPPPAEPYIPRDEKGNLPCEDLRGHMVGKPVHKGSESPNSFLDQEYRKRFNIVEEDTVLYCYEYEKGRSSSQGRRESTPTYENSLLRYMSNEKIAQEEYMFQRNSKKDTGKKSKKKGDKSNSPTHYSLLPSLQMDALRQDIMGTPVPETTLYHTFQQSSLQHKSKKKNKGPIAGKSKRRISCKDLGRGDCEGWLWKKKDAKSYFSQKWKKYWFVLKDASLYWYINEEDEKAEGFISLPEFKIDRASECRKKYAFKACHPKIKSFYFAAEHLDDMNRWLNRINMLTAGYAERERIKQEQDYWSESDKEEADTPSTPKQDSPPPPYDTYPRPPSMSCASPYVEAKHSRLSSTETSQSQSSHEEFRQEVTGSSAVSPIRKTASQRRSWQDLIETPLTSSGLHYLQTLPLEDSVFSDSAAISPEHRRQSTLPTQKCHLQDHYGPYPLAESERMQVLNGNGGKPRSFTLPRDSGFNHCCLNAPVSACDPQDDVQPPEVEEEEEEEEEEGEAAGENIGEKSESREEKLGDSLQDLYRALEQASLSPLGEHRISTKMEYKLSFIKRCNDPVMNEKLHRLRILKSTLKAREGEVAIIDKVLDNPDLTSKEFQQWKQMYLDLFLDICQNTTSNDPLSISSEVDVITSSLAHTHSYIETHV

SEQ ID NO: 89116 - protein, 765 aa, Homo sapiens
MKRAAAKHLIERYYHQLTEGCGNEACTNEFCASCPTFLRMDNNAAAIKALELYKINAKLCDPHPSKKGASSAYLENSKGAPNNSCSEIKMNKKGARIDFKDVTYLTEEKVYEILELCREREDYSPLIRVIGRVFSSAEALVQSFRKVKQHTKEELKSLQAKDEDKDEDEKEKAACSAAAMEEDSEASSSRIGDSSQGDNNLQKLGPDDVSVDIDAIRRVYTRLLSNEKIETAFLNALVYLSPNVECDLTYHNVYSRDPNYLNLFIIVMENRNLHSPEYLEMALPLFCKAMSKLPLAAQGKLIRLWSKYNADQIRRMMETFQQLITYKVISNEFNSRNLVNDDDAIVAASKCLKMVYYANVVGGEVDTNHNEEDDEEPIPESSELTLQELLGEERRNKKGPRVDPLETELGVKTLDCRKPLIPFEEFINEPLNEVLEMDKDYTFFKVETENKFSFMTCPFILNAVTKNLGLYYDNRIRMYSERRITVLYSLVQGQQLNPYLRLKVRRDHIIDDALVRLEMIAMENPADLKKQLYVEFEGEQGVDEGGVSKEFFQLVVEEIFNPDIGMFTYDESTKLFWFNPSSFETEGQFTLIGIVLGLAIYNNCILDVHFPMVVYRKLMGKKGTFRDLGDSHPVLYQSLKDLLEYEGNVEDDMMITFQISQTDLFGNPMMYDLKENGDKIPITNENRKEFVNLYSDYILNKSVEKQFKAFRRGFHMVTNESPLKYLFRPEEIELLICGSRNLDFQALEETTEYDGGYTRDSVLIR

SEQ ID NO: 89117 - protein, 987 aa, Homo sapiens
PELGVGTLPEHDSQDAGPIVPKISGLERSQEKSQDCCKEPIFEPVVLKDPCPQVAQPIPQPQTEPQLRAPSPDPDLVQRTEAPPQPPPLSTQPPQGPPEAQLQPAPQPQVQRPPRPQSPTQLLHQNLPPVQAHPSAQSLSQPLSAYNSSSLSLNSLSSSRSSTPAKTQPAPPHISHHPSASPFPLSLPNHSPLHSFTPTLQPPAHSHHPNMFAPPTALPPPPPLTSGSLQVAGHPAGSTYSEQDILRQELNTRFLASQSADRGASLGPPPYLRTEFHQHQHQHQHTHQHTHQHTFTPFPHAIPPTAIMPTPAPPMFDKYPTKVDPFYRHSLFHSYPPAVSGIPPMIPPTGPFGSLQGAFQPKLTDPFRPMLRKPGKWCAMHVHIAWQIYHHQQKVKKQMQSDPHKLDFGLKPEFLSRPPGPSLFGAIHHPHDLARPSTLFSAAGAAHPTGTPFGPPPHHSNFLNPAAHLEPFNRPSTFTGLAAVGGNAFGGLGNPSVTPNSMFGHKDGPSVQNFSNPHEPWNRLHRTPPSFPTPPPWLKPGELERSASAAAHDRDRDVDKRDSSVSKDDKERESVEKRHSSHPSPAPVLPVNALGHTRSSTEQIRAHLNTEAREKDKPKERERDHSESRKDLAADEHKAKEGHLPEKDGHGHEGRAAGEEAKQLARVPSPYVRTPVVESARPNSTSSREAEPRKGEPAYENPKKSSEVKVKEERKEDHDLPPEAPQTHRASEPPPPNSSSSVHPGPLASMPMTVGVTGIHPMNSISSLDRTRMMTPFMGISPLPGGERFPYPSFHWDPIRDPLRDPYRELDIHRRDPLGRDFLLRNDPLHRLSTPRLYEADRSFRDREPHDYSHHHHHHHHPLSVDPRREHERGGHLDERERLHMLREDYEHTRLHSVHPASLDGHLPHPSLITPGLPSMHYPRISPTAGNQNGLLNKTPPTAALSAPPPLISTLGGRPVSPRRTTPLSAEIRERPPSHTLKDIEAR

SEQ ID NO: 89118 - protein, 197 aa, Homo sapiens
  MOD_RES (1)..(1): Any amino acid
XRSCTSPAPSPEGWSPWSEWSKCTDDGAQSRSRHCEELLPGSSACAGNSSQSRPCPYSEIPVILPASSMEEATDCAGFNLIHLVATGISCFLGSGLLTLAVYLSCQHCQRQSQESTLVHPATPNHLHYKGGGTPKNEKYTPMEFKTLNKNNLIPDDRANFYPLQQTNVYTTTYYPSPLNKHSFRPEASPGQRCFPNS

SEQ ID NO: 89119 - protein, 1765 aa, Homo sapiens
  MOD_RES (1)..(1): Any amino acid
XDSQRKQYEEWLQETQQLLQMQQKYLEEQIGAHRKSKKALSAKQRTAKKAGREFPEEDAEQLKHVTEQQSMVQKQLEQIRKQQKEHAELIEDYRIKQQQQCAMAPPTMMPSVQPQPPLIPGATPPTMSQPTFPMVPQQLQHQQHTTVISGHTSPVRMPSLPGWQPNSAPAHLPLNPPRIQPPIAQLPIKTCTPAPGTVSNANPQSGPPPRVEFDDNNPFSESFQERERKERLREQQERQRIQLMQEVDRQRALQQRMEMEQHGMVGSEISSSRTSVSQIPFYSSDLPCDFMQPLGPLQQSPQHQQQMGQVLQQQNIQQGSINSPSTQTFMQTNERRQVGPPSFVPDSPSIPVGSPNFSSVKQGHGNLSGTSFQQSPVRPSFTPALPAAPPVANSSLPCGQDSTITHGHSYPGSTQSLIQLYSDIIPEEKGKKKRTRKKKRDDDAESTKAPSTPHSDITAPPTPGISETTSTPAVSTPSELPQQADQESVEPVGPSTPNMAAGQLCTELENKLPNSDFSQATPNQQTYANSEVDKLSMETPAKTEEIKLEKAETESCPGQEEPKLEEQNGSKVEGNAVACPVSSAQSPPHSAGAPAAKGDSGNELLKHLLKNKKSSSLLNQKPEGSICSEDDCTKDNKLVEKQNPAEGLQTLGAQMQGGFGCGNQLPKTDGGSETKKQRSKRTQRTGEKAAPRSKKRKKDEEEKQAMYSSTDTFTHLKQLSLLPLMEPIIGVNFAHFLPYGSGQFNSGNRLLGTFGSATLEGVSDYYSQLIYKKMANGFATTEELAGKAGVLVSHEVTKTLGPKPFQLPFRPQDDLLARALAQGPKTVDVPASLPTPPHNNQEELRIQDHCGDRDTPDSFVPSSSPESVVGVEVSRYPDLSLVKEEPPEPVPSPIIPILPSTAGKSSESRRNDIKTEPGTLYFASPFGPSPNGPRSGLISVAITLHPTAAENISSVVAAFSDLLHVRIPNSYEVSSAPDVPSMGLVSSHRINPGLEYRQHLLLRGPPPGSANPPRLVSSYRLKQPNVPFPPTSNGLSGYKDSSHGIAESAALRPQWCCHCKVVILGSGVRKSFKDLTLLNKDSRESTKRVEKDIVFCSNNCFILYSSTAQAKNSENKESIPSLPQSPMRETPSKAFHQYSNNISTLDVHCLPQLPEKASPPASPPIAFPPAFEAAQVEAKPDELKVTVKLKPRLRAVHGGFEDCRPLNKKWRGMKWKKWSIHIVIPKGTFKPPCEDEIDEFLKKLGTSLKPDPVPKDYRKCCFCHEEGDGLTDGPARLLNLDLDLWVHLNCALWSTEVYETQAGALINVELALRRGLQMKCVFCHKTGATSGCHRFRCTNIYHFTCAIKAQCMFFKDKTMLCPMHKPKGIHEQELSYFAVFRRVYVQRDEVRQIASIVQRGERDHTFRVGSLIFHTIGQLLPQQMQAFHSPKALFPVGYEASRLYWSTRYANRRCRYLCSIEEKDGRPVFVIRIVEQGHEDLVLSDISPKGVWDKILEPVACVRKKSEMLQLFPAYLKGEDLFGLTVSAVARIAESLPGVEACENYTFRYGRNPLMELPLAVNPTGCARSEPKMSAHVKRPHTLNSTSTSKSFQSTVTGELNAPYSKQFVHSKSSQYRKMKTEWKSNVYLARSRIQGLGLYAARDIEKHTMVIEYIGTIIRNEVANRKEKLYESQNRGVYMFRMDNDHVIDATLTGGPARYINHSCAPNCVAEVVTFERGHKIIISSSRRIQKGEELCYDYKFDFEDDQHKIPCHCGAVNCRKWMN

SEQ ID NO: 89120 - protein, 530 aa, Homo sapiens
MASLSLAPVNIFKAGADEERAETARLTSFIGAIAIGDLVKSTLGPKGMDKILLSSGRDASLMVTNDGATILKNIGVDNPAAKVLVDMSRVQDDEVGDGTTSVTVLAAELLREAESLIAKKIHPQTIIAGWREATKAAREALLSSAVDHGSDEVKFRQDLMNIAGTTLSSKLLTHHKDHFTKLAVEAVLRLKGSGNLEAIHIIKKLGGSLADSYLDEGFLLDKKIGVNQPKRIENAKILIANTGMDTDKIKIFGSRVRVDSTAKVAEIEHAEKEKMKEKVERILKHGINCFINRQLIYNYPEQLFGAAGVMAIEHADFAGVERLALVTGGEIASTFDHPELVKLGSCKLIEEVMIGEDKLIHFSGVALGEACTIVLRGATQQILDEAERSLHDALCVLAQTVKDSRTVYGGGCSEMLMAHAVTQLANRTPGKEAVAMESYAKALRMLPTIIADNAGYDSADLVAQLRAAHSEGNTTAGLGNVSLITTPVKHSHVLSIFGPVSSKVVFERYSIKEDCGICLSVPIISLSLDI

SEQ ID NO: 89121 - protein, 590 aa, Homo sapiens
MVAPWRVSVRVCLSHLRCFELRQGLSLLRPSECPRDARLCWLLLGTLPKVVSLCGDVGEGAPDVLSRRRVRCSGAAGAGPAESLPRAGPLGGVFLHLRLWLRAGALLVKFFPLLLLYPLTYLAPSVSTLWLHLLLKATETSGPTYIKLGQWASTRRDLFSEAFCAQFSKLHVRVTPHPWTHTERFLRQAFGDDWGSILSFENREPVGSGCVAQVYKAYANTAFLETDSVQRLGRASCLPPFSHTGAVGGLRELFGYLGNGRKPPENLADQSFLERLLLPKADLVGSNAGVSRAQVPGHQPEATNLISVAVKVLHPGLLAQVHMDLLLMKIGSRVLGVLPGIKWLSLPEIVEEFEKLMVQQIDLRYEAQNLEHFQVNFRNVKAVKFPTPLRPFVTREVLVETYEESVPVSSYQQAGIPVDLKRKIARLGINMLLKMIFVDNFVHADLHPGNILVQGANGLSSSQEAQLQQADICDTLVVAVPSSLCPLRLVLLDAGIVAELQAPDLRNFRAVFMAVVMGQGQRVAELILHHARASECRDVEGFKTEMAMLVTQARKNTITLEKLHVSSLLSSVFKLLMTHKVKSQFIPAPS

SEQ ID NO: 89122 - protein, 300 aa, Homo sapiens
  MOD_RES (1)..(1): Any amino acid
XAPDEDQGHLEDSWTALEGAEDKEALLIEDTLSNHTDLTDNDPVTYVVQKQFMRQLSALSSDGEGQGRPVPRRHLGPSEKVQVTEAKADGALTQEEKAAIGTVELSVFWDYAKAVGLCTTLAICLLYVGQSAAAIGANVWLSAWTNDAMADSRQNNTSLRLGVYAALGILQGFLVMLAAMAMAAGGIQAARVLHQALLHNKIRSPQSFFDTTPSGRILNCFSKDIYVVDERFYAATSRQLKRLESVSRSPIYSHFSETVTGASVIRAYNRSRDFEIISDTKVDANQRSCYPYIISNRWLS

SEQ ID NO: 89123 - protein, 1305 aa, Homo sapiens
MSVLISQSVINYVEEENIPALKALLEKCKDVDERNECGQTPLMIAAEQGNLEIVKELIKNGANCNLEDLDNWTALISASKEGHVHIVEELLKCGVNLEHRDMGGWTALMWACYKGRTDVVELLLSHGANPSVTGLQYSVYPIIWAAGRGHADIVHLLLQNGAKVNCSDKYGTTPLVWAARKGHLECVKHLLAMGADVDQEGANSMTALIVAVKGGYTQSVKEILKRNPNVNLTDKDGNTALMIASKEGHTEIVQDLLDAGTYVNIPDRSGDTVLIGAVRGGHVEIVRALLQKYADIDIRGQDNKTALYWAVEKGNATMVRDILQCNPDTEICTKDGETPLIKATKMRNIEVVELLLDKGAKVSAVDKKGDTPLHIAIRGRSRKLAELLLRNPKDGRLLYRPNKAGETPYNIDCSHQKSILTQIFGARHLSPTETDGDMLGYDLYSSALADILSEPTMQPPICVGLYAQWGSGKSFLLKKLEDEMKTFAGQQIEPLFQFSWLIVFLTLLLCGGLGLLFAFTVHPNLGIAVSLSFLALLYIFFIVIYFGGRREGESWNWAWVLSTRLARHIGYLELLLKLMFVNPPELPEQTTKALPVRFLFTDYNRLSSVGGETSLAEMIATLSDACEREFGFLATRLFRVFKTEDTQGKKKWKKTCCLPSFVIFLFIIGCIISGITLLAIFRVDPKHLTVNAVLISIASVVGLAFVLNCRTWWQVLDSLLNSQRKRLHNAASKLHKLKSEGFMKVLKCEVELMARMAKTIDSFTQNQTRLVVIIDGLDACEQDKVLQMLDTVRVLFSKGPFIAIFASDPHIIIKAINQNLNSVLRDSNINGHDYMRNIVHLPVFLNSRGLSNARKFLVTSATNGDVPCSDTTGIQEDADRRVSQNSLGEMTKLGSKTALNRRDTYRRRQMQRTITRQMSFDLTKLLVTEDWFSDISPQTMRRLLNIVSVTGRLLRANQISFNWDRLASWINLTEQWPYRTSWLILYLEETEGIPDQMTLKTIYERISKNIPTTKDVEPLLEIDGDIRNFEVFLSSRTPVLVARDVKVFLPCTVNLDPKLREIIADVRAAREQISIGGLAYPPLPLHEGPPRAPSGYSQPPSVCSSTSFNGPFAGGVVSPQPHSSYYSGMTGPQHPFYNRGSGPAPGPVVLLNSLNVDAVCEKLKQIEGLDQSMLPQYCTTIKKANINGRVLAQCNIDELKKEMNMNFGDWHLFRSTVLEMRNAESHVVPEDPRFLSESSSGPAPHGEPARRASHNELPHTELSSQTPYTLNFSFEELNTLGLDEGAPRHSNLSWQSQTRRTPSLS

SEQ ID NO: 89124 - protein, 341 aa, Homo sapiens
  MOD_RES (335)..(335): Any amino acid
MATLKEKLIAPVAEEEATVPNNKITVVGVGQVGMACAISILGKSLADELALVDVLEDKLKGEMMDLQHGSLFLQTPKIVADKDYSVTANSKIVVVTAGVRQQEGESRLNLVQRNVNVFKFIIPQIVKYSPDCIIIVVSNPVDILTYVTWKLSGLPKHRVIGSGCNLDSARFRYLMAEKLGIHPSSCHGWILGEHGDSSVAVWSGVNVAGVSLQELNPEMGTDNDSENWKEVHKMVVESAYEVIKLKGYTNWAIGLSVADLIESMLKNLSRIHPVSTMVKGMYGIENEVFLSLPCILNARGLTSVINQKLKDDEVAQLKKSADTLWDIQKDLKDLXLVSSRL

SEQ ID NO: 89125 - protein, 267 aa, Homo sapiens
MLRHLMYKIKSTGPITVAEYMKEVLTNPAKGYYVYRDMLGEKGDFITSPEISQIFGELLGIWFISEWMATGKSTAFQLVELGPGRGTLVGDILRVFTQLGSVLKNCDISVHLVEVSQKLSEIQALTLTKEKVPLERNAGSPVYMKGVTKSGIPISWYRDLHDVPKGYSFYLAHEFFDVLPVHKFQKTPQGWREVFVDIDPQVSDKLRFVLAPSATPAEAFIQHDETRDHVEVCPDAGVIIEELSQRIALTGGAALVADYGHDGTKTD

SEQ ID NO: 89126 - protein, 223 aa, Homo sapiens
  MOD_RES (1)..(1): Any amino acid
XVEDEGLLASLFRDRFPEAQWRERPDVGRYLRELSGSGLERLRREPERLAEERAQLLQQTRDLAFANYKTFIRGAECTERIHRLFGDVEASLGRLLDRLPSFQQSCRNFVKEAEEISSNRRMNSLTLNRHTEILEILEIPQLMDTCVRNSYYEEALELAAYVRRLERKYSSIPVIQGIVNEVRHAGITGGSHGARPGAFLAAHPQHQPQGQTLARMARARLCR

SEQ ID NO: 89127 - protein, 329 aa, Homo sapiens
MRSATETLFRMGVARGTITTLRNGEVLLFCITAAMYMFFFRCKDGLKGFTFSALRFIVGKEEIPTHSFSPEAAYAKVEQKREQHEEKPGRMNMIGLVRKFVDSICKHGPRHRCCKHYEDNCISYCIKGFIRMFSVGYLIQCCLRIPSAFRHLFTQPSRLLSLFYNKENFQLGAFLGSFVSIYKGTSCFLRWIRNLDDELHAIIAGFLAGISMMFYKSTTISMYLASKLVETMYFKGIEAGKVPYFPHADTIIYSISTAICFQAAVMEVQTLRPSYWKFLLRLTKGKFAVMNRKVLDVFGTGASKHFQDFIPRLDPRYTTVTPELPTEFS

SEQ ID NO: 89128 - protein, 138 aa, Homo sapiens
MPFDFRRFDIYRKVPKDLTQPTYTGAIISICCCLFILFLFLSELTGFITTEVVNELYVDDPDKDSGGKIDVSLNISLPNLHCELVGLDIQDEMGRHEVGHIDNSMKIPLNNGAGCRFEGQFSINKEVDQQPDVRVCVF

SEQ ID NO: 89129 - protein, 100 aa, Homo sapiens
MSDVTIVKEGWVQKRGEYIKNWRPRYFLLKTDGSFIGYKEKPQDVDLPYPLNNFSVAKCQLMKTERPKPNTFIIRCLQWTTVIERTFHVDTPEESLASQG

SEQ ID NO: 89130 - protein, 166 aa, Homo sapiens
MALKIPAKRIFGDNFDPDFIKQRRAGLNEFIQNLVRYPELYNHPDVRAFLQMDSPKHQSDPSEDEDERSSQKVLLAKRKLDGKFYAVKVLQKKIVLNRKEQKHIMAERNVLLKNVKHPFLVGLHYSFQTTEKLYFVLDFVNGGELFFHLQRERSFPEHRARFYAAE

SEQ ID NO: 89131 - protein, 93 aa, Homo sapiens
MSLADLTKTNIDEHFFGVALENNRRSAACKRSPGTGDFSRNSNASNKSVDYSRSQCSCGSLSSQYDYSEDFLCDCSEKAINRNYLKQPVVKEK

SEQ ID NO: 89132 - protein, 340 aa, Homo sapiens
  MOD_RES (1)..(1): Any amino acid
XLPTNRGRITPVPRSQEPLSCAFTHRPCSHPRLEGQEFCIKHILEDKNAPFKQCSYISTKNGKRCPNAAPKPEKKDGVSFCAEHVRRNALALHAQMKKTNPGPVGETLLCQLSSYAKTELGSQTPESSRSEASRILDEDSWSDGEQEPITVDQTWRGDPDSEADSIDSDQEDPLKHAGVYTAEEVALIMREKLIRLQSLYIDQFKRLQHLLKEKKRRYLHNRKVEHEALGSSLLTGPEGLLAKERENLKRLKCLRRYRQRYGVEALLHRQLKERRMLATDGAAQQAHTTRSSQRCLAFVDDVRCSNQSLPMTRHCLTQKDATAIGDLLTLYCGLMETALD

SEQ ID NO: 89133 - protein, 225 aa, Homo sapiens
RSVDLNFLPSVDPETVLQTGHELLSELQQRRFNGSDGGVSWSPMDDELLAQPQVMKLLDSLREQYTRYQEVCRQRSKRTQLEEIQQKVMQVVNWLEGPGSEQLRAQWGIGDSIRASQALQQKHEEIESQHSEWFAVYVELNQQIAALLNAGDEEDLVELKSLQQQLSDVCYRQASQLEFRQNLLQAALEFHGVAQDMWDCKVCVKKVKVSWIRSPIRHPGPMERM

SEQ ID NO: 89134 - protein, 961 aa, Homo sapiens
MAEQESLEFGKADFVLMDTVSMPEFMANLRLRFEKGRIYTFIGEVVVSVNPYKLLNIYGRDTIEQYKGRELYERPPHLFAIADAAYKAMKRRSKDTCIVISGESGAGKTEASKYIMQYIAAITNPSQRAEVERVKNMLLKSNCVLEAFGNAKTNRNDNSSRFGKYMDINFDFKGDPIGGHINNYLLEKSRVIVQQPGERSFHSFYQLLQGGSEQMLRSLHLQKSLSSYNYIHVGAQLKSSINDAAEFRVVADAMKVIGFKPEEIQTVYKILAAILHLGNLKFVVDGDTPLIENGKVVSIIAELLSTKTDMVEKALLYRTVATGRDIIDKQHTEQEASYGRDAFAKAIYERLFCWIVTRINDIIEVKNYDTTIHGKNTVIGVLDIYGFEIFDNNSFEQFCINYCNEKLQQLFIQLVLKQEQEEYQREGIPWKHIDYFNNQIIVDLVEQQHKGIIAILDDACMNVGKVTDEMFLEALNSKLGKHAHFSSRKLCASDKILEFDRDFRIRHYAGDVVYSVIGFIDKNKDTLFQDFKRLMYNSSNPVLKNMWPEGKLSITEVTKRPLTAATLFKNSMIALVDNLASKEPYYVRCIKPNDKKSPQIFDDERCRHQVEYLGLLENVRVRRAGFAFRQTYEKFLHRYKMISEFTWPNHDLPSDKEAVKKLIERCGFQDDVAYGKTKIFIRTPRTLFTLEELRAQMLIRIVLFLQKVWRGTLARMRYKRTKAALTIIRYYRRYKVKSYIHEVARRFHGVKTMRDYGKHVKWPSPPKVLRRFEEALQTIFNRWRASQLIKSIPASDLPQVRAKVAAVEMLKGQRADLGLQRAWEGNYLASKPDTPQTSGTFVPVANELKRKDKYMNVLFSCHVRKVNRFSKVEDRAIFVTDRHLYKMDPTKQYKVMKTIPLYNLTGLSVSNGKDQLVVFHTKDNKDLIVCLFSKQPTHESRIGELVGVLVNHFKRNHLLIL

SEQ ID NO: 89135 - protein, 177 aa, Homo sapiens
MALRSAQGDGPTSGHWDGGAEKADFNAKRKKKVAEIHQALNSDPTDVAALRRMAISEGGLLTDEIRRKVWPKLLNVNANDPPPISGKNLRQMSKDYQQVLLDVRRSLRRFPPGMPEEQREGLQEELIDIILLILERNPQLHYYQGYHDIVVTFLLVVGERLATSLVEKLSTHHLRYQ

SEQ ID NO: 89136 - protein, 749 aa, Homo sapiens
  MOD_RES (1)..(1): Any amino acid
XQIEKWKLKQKKKLERKKLIKDMKAKIRVDTIAKRRAELILERDKKRRENVVRDDEEISEEELEEDNDDIENILEDEFPKDEEEMSGEEDEEQETDAIERLRGELGEKFEADTHNLQIIQDELERYLIPIISINGARRNHIVQYTLNMKLKPLVENRASIFEKCHPIPAPLAQKMLTFTYKYISSFGYWDPVKLSEGETIKPVENAENPIYPVIHRQYIYFLSSKETKEKFMKNPIKYIRQPKPKPTVPIRIIIVGPPKSGKTTVAKKITSEYGLKHLSIGGALRYVLNNHPETELALMLNWHLHKGMTAPDELAIQALELSLMESVCNTAGVVIDGYPVTKHQMNLLEARSIIPMVIFELSVPSKEIFKRLLLEKENEQRLPYPLHNSAQIVAVNNVKYRKNIGEIRQYYQEQHQNWYVIDGFHSKWWVWNEVIKNVQMVNKYMQTYLERIKAGKAACIDKLCITPQELLSRLGEFEQFCPVSLAESQELFDCSATDSLEFAAEFRGHYYKMSSQEKLNKFLENPELYVPPLAPHPLPSADMIPKRLTLSELKSRFPKCAELQGYCPVTYKDGNQRYEALVPGSINYALEYHNRIYICENKEKLQKFLRSPLKYWEQKLPHKLPPLREPILLTSLPLPGYLEQGIATSLIKAMNAAGCLKPKFPFLSIRRSALLYIALHLKAFNPKGSEYTRKKYKKKMEQFMESCELITYLGAKMTRKYKEPQFRAIDFDHKLKTFLSLRNIDPING

SEQ ID NO: 89137 - protein, 172 aa, Homo sapiens
  MOD_RES (1)..(1): Any amino acid
XADVVFEIQGTTVPAHRAILVARCEVMAAMFNGNYMEAKSVLIPVYGVSKETFLSFLEYLYTDSCCPAGIFQAMCLLICAEMYQVSRLQHICELFIITQLQSMPSRELASMNLDIVDLLKKAKFHHSDCLSTWLLHFIATNYLIFSQKPEFQDLSGRLLISVLKRKLYVLCS

SEQ ID NO: 89138 - protein, 117 aa, Homo sapiens
MPQASEHRLGRTREPPVNIQPRVGSKLPFAPRARSKERRNPASGPNPMLRPLPPRPGLPDERLKKLELGRGRTSGPRPRGPLRADHGVPLPGSPPPTVALPLPSRTNLARSKSVSSG

SEQ ID NO: 89139 - protein, 90 aa, Homo sapiens
MARRLLGADSATVFNIQEPEEETANQEYKVSSCEQRLISEIEYRLERSPVDESGDEVQYGDVPVENGMAPFFEMKLKHYKIFEGMPVTFT

SEQ ID NO: 89140 - protein, 93 aa, Homo sapiens
MASSSGRVTIQLVDEEAGVGAGRLQLFRGQSYEAIRAACLDSGILFRDPYFPAGPDALGYDQLGPDSEKAKGVKWMRPHAEAWNPPPPTGVLC

SEQ ID NO: 89141 - protein, 15 aa, Homo sapiens
MNTDSGGCARKRAAM

SEQ ID NO: 89142 - protein, 347 aa, Homo sapiens
MAETLFWTPLLVAVPPAVHITYHAHLQGHPDLPRWLRYTQRSPHHPGFLYGSATPEDRGLQVIEVTAYNRDSFDTTRQRLVLEIGDPEGPLLPYQAEFLVRSHDAEEVLPSTPASRFLSALGGLWEPGELQLLNVTSALDRGGRVPLPIEGRKEGVYIKVGSASPFSTCLKMVASPDSHARCAQGQPPLLSCYDTLAPHFRVDWCNVTLVDKSVPEPADEVPTPGDGILEHDPFFCPPTEAPDRDFLVDALVTLLVPLLVALLLTLLLAYVMCCRREGRLKRDLATSDIQMVHHCTIHGNTEELRQMAASREVPRPLSTLPMFNVHTGERLPPRVDSAQVPLILDQH

SEQ ID NO: 89143 - protein, 146 aa, Homo sapiens
MYPESTTGSPARLSLRQTGSPGMIYRNLGKSGLRVSCLGLGTWVTFGGQITDEMAEQLMTLAYDNGINLFDTAEVYAAGKAEVVLGNIIKKKGWRNIRSSYKVGPPSSLPSKCHSESQCQGEPPPPPPWIPDTPSSCPIKFVFWQL

SEQ ID NO: 89144 - protein, 75 aa, Homo sapiens
  MOD_RES (1)..(1): Any amino acid
XALDIEIATYRKLLEGEENRITIPVQTFSNLQIRGGKSTKDGENHKVTRYLKSLTIRVIPIQAHQIVNGTPPARG

SEQ ID NO: 89145 - protein, 570 aa, Homo sapiens
MNISIDLDTNYAELVLNVGRVTLGENNRKKMKDCQLRKQQNENVSRAVCALLNSGGGVIKAEVENKGYSYKKDGIGLDLENSFSNMLPFVPNFLDFMQNGNYFHIFVKSWSLETSGPQIATLSSSLYKRDVTSAKVMNASAALEFLKDMEKTGGRAYLRPEFPAKRACVDVQEESNMEALAADFFNRTELGYKEKLTFTESTHVEIKNFSTEKLLQRITEILPQYVSAFANTDGGYLFVGLNEDKEVIGFKAEKSYLTKLEEVTKNSIGKLPVHHFCVEKGTINYLCKFLGVYDKGRLCGYVYALRVERFCCAVFAKKPDSWHVKDNRVKQLTEKEWIQFMVDSEPVCEELPSPASTSSPVSQSYPLREYINFKIQPLRYHLPGLSEKITCAPKTFCRNLFSQHEGLKQLICEEMGSVNKGSLIFSRSWSLDLGLQENHKVLCDALLISQDKPPVLYTFHMVQDEEFKDYSTQTAQTLKQKLAKIGGYTKKVCVMTKIFYLSPEGKTSCQYDLNSQVIYPESYYWTTAQTMKDLEKALSNILPKENQIFLFVCLFRFCLFVCWFVCFFLR

SEQ ID NO: 89146 - protein, 1156 aa, Homo sapiens
MCKCCNLFSPNQSELLSHVSEKHMEEGVNVDEIIIPLRPLSTPEPPNSSKTGDEFLVMKRKRGRPKGSTKKSSTEEELAENIVSPTEDSPLAPEEGNSLPPSSLECSKCCRKFSNTRQLRKHICIIVLNLGEEEGEAGNESDLELEKKCKEDDREKASKRPRSQKTEKVQKISGKEARQLSGAKKPIISVVLTAHEAIPGATKIVPVEAGPPETGATNSETTSADLVPRRGYQEYAIQQTPYEQPMKSSRLGPTQLKIFTCEYCNKVFKFKHSLQAHLRIHTNEKPYKCPQCSYASAIKANLNVHLRKHTGEKFACDYCSFTCLSKGHLKVHIERVHKKIKQHCRFCKKKYSDVKNLIKHIRDAHDPQDKKVKEALDELCLMTREGKRQLLYDCHICERKFKNELDRDRHMLVHGDKWPFACELCGHGATKYQALELHVRKHPFVYVCAVCRKKFVSSIRLRTHIKEVHGAAQEALVFTSSINQSFCLLEPGGDIQQEALGDQLQLVEEEFALQGVNALKEEACPGDTQLEEGRKEPEAPGEMPAPAVHLASPQAESTALPPCELETTVVSSSDLHSQEVVSDDFLLKNDTSSAEAHAAPEKPPDMQHRSSVQTQGEVITLLLSKAQSAGSDQESHGAQSPLGEGQNMAVLSAGDPDPSRCLRSNPAEASDLLPPVAGGGDTITHQPDSCKAAPEHRSGITAFMKVLNSLQKKQMNTSLCERIRKVYGDLECEYCGKLFWYQVHFDMHVRTHTREHLYYCSQCHYSSITKNCLKRHVIQKHSNILLKCPTDGCDYSTPDKYKLQAHLKVHTALDKRSYSCPVCEKSFSEDRLIKSHIKTNHPEVSMSTISEVLGRRVQLKGLIGKRAMKCPYCDFYFMKNGSDLQRHIWAHEGVKPFKCSLCEYATRSKSNLKAHMNRHSTEKTHLCDMCGKKFKSKGTLKSHKLLHTADGKQFKCTVCDYTAAQKPQLLRHMEQHVSFKPFRCAHCHYSCNISGSLKRHYNRKHPNEEYANVGTGELAAEVLIQQGGLKCPVCSFVYGTKWEFNRHLKNKHGLKVVEIDGDPKWETATEAPEEPSTQYLHITEAEEDVQGTQAAVAALQDLRYTSESGDRLDPTAVNILQQLQPHGHDPGDGPASVRGACRAAPPGGVLRRRGGH

SEQ ID NO: 89147 - protein, 56 aa, Homo sapiens
MVLSLILCCLSFILFMFQLYTMRRGGLFYATGLCQLCTSVAVFTGALIYAIHAEEI

SEQ ID NO: 89148 - protein, 41 aa, Homo sapiens
MPSIKLQSSDGEIFEVDVEIAKQSVTIKTMLEVTVHQVPIE

SEQ ID NO: 89149 - protein, 153 aa, Homo sapiens
MEVIHGRPYCCRELEGADILSNTFYSNELHNPLQTVTRPTASEDRYQELRESLQQCRLPWGAEREYGGIIPISLPEDHRPKYEPPRVMGKGHQHYGFGGETWPRKLPVEQFYYLTQNKKSDVYGNDSLIPKPPNSTVGEICLPYPIEHPYHTH

SEQ ID NO: 89150 - protein, 223 aa, Homo sapiens
  MOD_RES (1)..(1): Any amino acid
XVCDRIERGSHFWLLVFMPLFFVSPVSVAACVWGFRHDRSLEVVCVPLWILMSFLCLVVLYYIVWSVLFLRSMDVIAEQRRTHITMALSWMTIVVPLLTFEILLVHKLDGHNAFSCIPIFVPLWLSLITLMATTFGQKGGNHWWFGIRKDFCQFLLEIFPFLREYGNISYDLHHEDNEETEETPVPEPPKIAPMFRKKARVVITQSPGKYVLPPPKLNIEMPD

SEQ ID NO: 89151 - protein, 70 aa, Homo sapiens
MGPEALSSLLLLLLVASGDADMKGHFDPAKCRYALGMQDRTIPDSDISASSSWSDSTAARHSRLESSDGD

SEQ ID NO: 89152 - protein, 172 aa, Homo sapiens
MVAMAEAEAGVAVEVRGLPPAVPDELLTLYFENRRRSGGGPVLSWQRLGCGGVLTFREPADAERVLAQADHELHGAQLSLRPAPPRAPARLLLQGLPPGTTPQRLEQHVQALLRASGLPVQPCCALASPRPDRALVQLPKPLSEADVRVLEEQAQNLGLEGTLVSLARVPQA

SEQ ID NO: 89153 - protein, 47 aa, Homo sapiens
MAAAAPAAAAASSEAPAASATAEPEAGDQDSREVKQKIYCHILDPTK

SEQ ID NO: 89154 - protein, 143 aa, Homo sapiens
METLEELDWCLDQLETIQTYRSVSEMASNKFKRMLNRELTHLSEMSRSGNQVSEYISNTFLDKQNDVEIPSPTQKDREKKKKQQLMTQISGVKKLMHSSSLNNTSISRFGVNTENEDHLAKELEDLNKWGLNIFNVAGYSHNR

SEQ ID NO: 89155 - protein, 332 aa, Homo sapiens
MALPTARPLLGSCGTPALGSLLFLLFSLGWVQPSRTLAGETGQEAAPLDGVLANPPNISSLSPRQLLGFPCAEVSGLSTERVRELAVALAQKNVKLSTEQLRCLAHRLSEPPEDLDALPLDLLLFLNPDAFSGPQACTRFFSRITKANVDLLPRGAPERQRLLPAALACWGVRGSLLSEADVRALGGLACDLPGRFVAESAEVLLPRLGIVAAWRQRSSRDPSWRQPERTILRPRFRREVEKTACPSGKKAREIDESLIFYKKWELEACVDAALLATQMDRVNAIPFTYEQLDVLKHKLDELYPQGYPESVIQHLGYLFLKMSPEDIRKWNV

SEQ ID NO: 89156 - protein, 79 aa, Homo sapiens
MDRSKENCISGPVKATAPVGGPKRVLVTQQFPCQNPLPVNSGQAQRVLCPSNSSQRIPLQAQKLVSSHKPVQNQKQKQL

SEQ ID NO: 89157 - protein, 22 aa, Homo sapiens
MNLLASHVQFVNQIKNIKVPAP

SEQ ID NO: 89158 - protein, 39 aa, Homo sapiens
MSRPSSRAIYLHRKEYSQNLTSEPTLLQHRVEHACGPPL

SEQ ID NO: 89159 - protein, 128 aa, Homo sapiens
MAAGQREARPQVSLTFEDVAVLFTRDEWRKLAPSQRNLYRDVMLENYRNLVSLGLPFTKPKVISLLQQGEDPWEVEKDGSGVSSLALRNLLEPPVSTTTCKRLGSSHPYPYKKKLVKLKSSDFYLSEN

SEQ ID NO: 89160 - protein, 90 aa, Homo sapiens
  MOD_RES (1)..(1): Any amino acid
XQIIFYKNGVNQGVAYKDIFEGVYFPAISLYKSCTVSINFGPCFKYPPKDLTYRPMSDMGWGAVVEHTLADVLYHVETEVDGRRSPPWEP

SEQ ID NO: 89161 - protein, 182 aa, Homo sapiens
  MOD_RES (1)..(1): Any amino acid
XQQTQSALEQRGGSPHRFCRRREFPFFTLTAFPPGFLVHVGGVVSARSVKLLDRIHNPAFVGIMGNTRSYKLLDWNSFNSDEPETRDAWWAEIRQEIKSHAKALGCHAVVGYSESTSICEEVCILSASGTAAVLNPRFLQDGTVEGCLEQRLEENLPTRCGFCHIPYDELNMPFPAHLTYCY

SEQ ID NO: 89162 - protein, 205 aa, Homo sapiens
MVTQLRYESFCLHQFQEQDGESIPENQELASKQEILKEMEHLGDSKLQRDVSLDSKYRETCKRDSKAEKQQAHSTGERRHRCNECGKSFTKSSVLIEHQRIHTGEKPYECEECGKAFSRRSSLNEHRRSHTGEKPYQCKECGKAFSASNGLTRHRRIHTGEKPYECKVCGKAFLLSSCLVQHQRIHTGEKRYQCRECGKAFIQNA

SEQ ID NO: 89163 - protein, 320 aa, Homo sapiens
MQNSHSGVNQLGGVFVNGRPLPDSTRQKIVELAHSGARPCDISRILQTHADAKVQVLDNQNVSNGCVSSINRVLRNLASEKQQMGADGMYDKLRMLNGQTGSWGTRPGWYPGTSVPGQPTQDGCQQQEGGGENTNSISSNGEDSDEAQMRLQLKRKLQRNRTSFTQEQIEALEKEFERTHYPDVFARERLAAKIDLPEARIQVWFSNRRAKWRREEKLRNQRRQASNTPSHIPISSSFSTSVYQPIPQPTTPVSSFTSGSMLGRTDTALTNTYSALPPMPSFTMANNLPMQPPVPSQTSSYSCMLPTSPSVNGRSYDTYT

SEQ ID NO: 89164 - protein, 168 aa, Homo sapiens
MDPECAQLLPALCAVLVDPRQPVADDTCLEKLLDWFKTVTEGESSVVLLQEHPCLVELLSHVLKVQDLSSGVLSFSLRLAGTFAAQENCFQYLQVRSTPSSPCRETPACLWPRRPVSSWCTSWLCPCEVEPRGSPACRGVTGPRVPRRSWITLKSPCAPRPPPRSLRP

SEQ ID NO: 89165 - protein, 88 aa, Homo sapiens
GRHHPGSHQQWDQLLCWLRGLLHPGLHGCRAGRAHLQGGRVRAGPGLHRLPAGCHADASGPTLGCPVLLHAVAAWSRQPGVEGFITGL

SEQ ID NO: 89166 - protein, 308 aa, Homo sapiens
TPRLAPAAERRLWNVRLLSRESPSGTMKAVLRKAGGTGPGEEKQFLEVWEKNRKLKSFNLSALEKHGPVYEDDCFGCLSWSHSETHLLYVAEKKRPKAESFFQTKALDVSASDDEIARLKKPDQAIKGDQFVFYEDWGENMVSKSIPVLCVLDVESGNISVLEGVPENVSPGQAFWAPGDAGVVFVGWWHEPFRLGIRFCTNRRSALYYVDLIGGKCELLSDDSLAVSSPRLSPDQCRIVYLQYPSLIPHHQCSQLCLYDWYTKVTSVVVDVVPRQLGENFSGIYCSLLPLGCWSADSQRVVFDSAQR

SEQ ID NO: 89167 - protein, 116 aa, Homo sapiens
MSKPLEAEKQGLDSPSEHTDTERNGPDTNHQNPQNKTSPFSVSPTGPSTKIKAEDPSGDSAPAAPLPPQPAQPHLPQAQLMLTGSQLAGLTALMPAQQQLLLQQAQAQLLAAAVQQ

SEQ ID NO: 89168 - protein, 586 aa, Homo sapiens
  MOD_RES (1)..(1): Any amino acid
XRMKQSCLLRQCTAPVLPHTAVCLLCGEAGKEDTVEGEEEKFGLSLMECTICNEIVHPGCLKMGKAEGVINAEIPNCWECPRCTQEGRTSKDSGEGPGRRRADNGEEGASLGSGWKLTEEPPLPPPPPRRKGPLPAGPPPEDVPGPPKRKEREAGNEPPTPRKKVKGGRERHLKKKPKPPLASAEGPAVPSPSPQREKLERFKRMCQLLERVPDTSSSSSDSDSDSDSSGTSLSEDEAPGEARNGRRPARGSSGEKENRGGRRAVRPGSGGPLLSWPLGPAPPPRPPQLERHVVRPPPRSPEPDTLPLAAGSDHPLPRAAWLRVFQHLGPRELCICMRVCRTWSRWCYDKRLWPRMDLSRRKSLTPPMLSGVVRRQPRALDLSWTGVSKKQLMWLLNRLQGLQELVLSGCSWLSVSALGSAPLPALRLLDLRWIEDVKDSQLRELLLPPPDTKPGQTESRGRLQGVAELRLAGLELTDASLRLLLRHAPQLSALDLSHCAHVGDPSVHLLTAPTSPLRETLVHLNLAGCHRLTDHCLPLFRRCPRLRRLDLRSCRQLSPEACARLAAAGPPGPFRCPEEKLLLKDS

SEQ ID NO: 89169 - protein, 1570 aa, Homo sapiens
MPLAFCGSENHSAAYRVDQGVLNNGCFVDALNVVPHVFLLFITFPILFIGWGSQSSKVHIHHSTWLHFPGHNLRWILTFMLLFVLVCEIAEGILSDGVTESHHLHLYMPAGMAFMAAVTSVVYYHNIETSNFPKLLIALLVYWTLAFITKTIKFVKFLDHAIGFSQLRFCLTGLLVILYGMLLLVEVNVIRVRRYIFFKTPREVKPPEDLQDLGVRFLQPFVNLLSKGTYWWMNAFIKTAHKKPIDLRAIGKLPIAMRALTNYQRLCEAFDAQRKDIQGTQGARAIWQALSHAFGRRLVLSSTFRILADLLGFAGPLCIFGIVDHLGKENDVFQPKTQFLGVYFVSSQEFLANAYVLAVLLFLALLLQRTFLQASYYVAIETGINLRGAIQTKIYNKIMHLSTSNLSMGEMTAGQICNLVAIDTNQLMWFFFLCPNLWAMPVQIIVGVILLYYILGVSALIGAAVIILLAPVQYFVATKLSQAQRSTLEYSNERLKQTNEMLRGIKLLKLYAWENIFRTRVETTRRKEMTSLRAFAIYTSISIFMNTAIPIAAVLITFVGHVSFFKEADFSPSVAFASLSLFHILVTPLFLLSSVVRSTVKALVSVQKLSEFLSSAEIREEQCAPHEPTPQGPASKYQAVPLRVVNRKRPAREDCRGLTGPLQSLVPSADGDADNCCVQIMGGYFTWTPDGIPTLSNITIRIPRGQLTMIVGQVGCGKSSLLLAALGEMQKVSGAVFWSSLPDSEIGEDPSPERETATDLDIRKRGPVAYASQKPWLLNATVEENIIFESPFNKQRYKMVIEACSLQPDIDILPHGDQTQIGERGINLSGGQRQRISVARALYQHANVVFLDDPFSALDIHLSDHLMQAGILELLRDDKRTVVLVTHKLQYLPHADWIIAMKDGTIQREGTLKDFQRSECQLFEHWKTLMNRQDQELEKETVTERKATEPPQGLSRAMSSRDGLLQDEEEEEEEAAESEEDDNLSSMLHQRAEIPWRACAKYLSSAGILLLSLLVFSQLLKHMVLVAIDYWLAKWTDSALTLTPAARNCSLSQECTLDQTVYAMVFTVLCSLGIVLCLVTSVTVEWTGLKVAKRLHRSLLNRIILAPMRFFETTPLGSILNRFSSDCNTIDQHIPSTLECLSRSTLLCVSALAVISYVTPVFLVALLPLAIVCYFIQKYFRVASRDLQQLDDTTQLPLLSHFAETVEGLTTIRAFRYEARFQQKLLEYTDSNNIASLFLTAANRWLEVRMEYIGACVVLIAAVTSISNSLHRELSAGLVGLGLTYALMVSNYLNWMVRNLADMELQLGAVKRIHGLLKTEAESYEGLLDQGKIQIQNLSVRYDSSLKPVLKHVNALIAPGQKIGICGRTGSGKSSFSLAFFRMVDTFEGHIIIDGIDIAKLPLHTLRSRLSIILQDPVLFSGTIRFNLDPERKCSDSTLWEALEIAQLKLVVKALPGGLDAIITEGGENFSQGQRQLFCLARAFVRKTSIFIMDEATASIDMATENILQKVVMTAFADRTVVTIAHRVHTILSADLVIVLKRGAILEFDKPEKLLSRKDSVFASFVRADK

SEQ ID NO: 89170 - protein, 110 aa, Homo sapiens
MKDSSCMKVHQDSARRDRWSHPTTILLHKSQSSQATLMLQEHRMFMGEAYSAATGFKMLQDMNSADPFHLKYIIKKIKNMAHGSPKLVMETIHDYFIDNPEISSRHKFRL

SEQ ID NO: 89171 - protein, 94 aa, Homo sapiens
MLPCLVVLLAALLSLRLGSDAHGTELPSPPSVWFEAEFFHHILHWTPIPNQSESTCYEVALLSDSDSWQCEPRDPQWLHPREDSATQAQDGPRK

SEQ ID NO: 89172 - protein, 565 aa, Homo sapiens
  MOD_RES (1)..(1): Any amino acid
XCPPCWYKFANTFLIWECHPYWIKLKEIVNLIVMDPFVDLAITICIVLNTLFMAMEHHPMTPQFEHVLAVGNLVFTGIFTAEMFLKLIAMDPYYYFQEGWNIFDGFIVSLSLMELSLADVEGLSVLRSFRLLRVFKLAKSWPTLNMLIKIIGNSVGALGNLTLVLAIIVFIFAVVGMQLFGKSYKECVCKINQDCELPRWHMHDFFHSFLIVFRVLCGEWIETMWDCMEVAGQAMCLIVFMMVMVIGNLVVLNLFLALLLSSFSADNLAATDDDGEMNNLQISVIRIKKGVAWTKLKVHAFMQAHFKQREADEVKPLDELYEKKANCIANHTGADIHRNGDFQKNGNGTTSGIGSSVEKYIIDEDHMSFINNPNLTVRVPIAVGESDFENLNTEDVSSESDPEGSKDKLDDTSSSEGSTIDIKPEVEEVPVEQPEEYLDPDACFTEGCVQRFKCCQVNIEEGLGKSWWILRKTCFLIVEHNWFETFIIFMILLSSGALAFEDIYIEQRKTIRTILEYADKVFTYIFILEMLLKWTAYGFVKFFTNAWCWLDFLIVAVPLNLSGLI

SEQ ID NO: 89173 - protein, 244 aa, Homo sapiens
MYGCDLGPDGRLLRGYDQSAYDGKDYIALNEDLRSWTAADTAAQITQRKWEAAREAEQWRAYLEGTCVEWLRRYLENGKETLQRAEHPKTHVTHHPVSDHEATLRCWALGFYPAEITLTWQRDGEDQTQDTELVETRPAGDGTFQKWAAVVVPSGEEQRYTCHVQHEGLPEPLTLRWEPSSQPTIPIVGIVAGLAVLAVLAVLGAVMAVVMCRRKSSGGKGGSCSQAASSNSAQGSDESLIACK

SEQ ID NO: 89174 - protein, 102 aa, Homo sapiens
MKLRLPASPETHLDMLRHLYQGCQVVQGNLELTYLPTNASLSFLQDIQEVQGYVLIAHNQVRQVPLQRLRIVRGTQLFEDNYALAVLDNGDPLNNTTPVTGA

SEQ ID NO: 89175 - protein, 54 aa, Homo sapiens
MSTRKRRGGAINSRQAQKRTREATSTPEISLEAEPIELVETAGDEIVDLTCESL

SEQ ID NO: 89176 - protein, 119 aa, Homo sapiens
MAKFLAELLGCTLPSKGASPMFESKSHSRVGLKSSTKQKTTIFSTLASEKSLSDCKKEQQWKPSMYSSITPVCFPSPLIEKPIGKVRMNLLLSDTMIRASWLLFLFALSYFGEIIKLIL

SEQ ID NO: 89177 - protein, 1239 aa, Homo sapiens
MKQPIMADGPRCKRRKQANPRRKNVVNYDNVVDTGSETDEEDKLHIAEDDGIANPLDQETSPASVPNHESSPHVSQALLPREEEEDEIREGGVEHPWHNNEILQASVDGPEEMKEDYDTMGPEATIQTAINNGTVKNANCTSDFEEYFAKRKLEERDGHAVSIEEYLQRSDTAIIYPEAPEELSRLGTPEANGQEENDLPPGTPDAFAQLLTCPYCDRGYKRLTSLKEHIKYRHEKNEENFSCPLCSYTFAYRTQLERHMVTHKPGTDQHQMLTQGAGNRKFKCTECGKAFKYKHHLKEHLRIHSDSSLGRQLQLLSNQGNVTVILIIILGEKPYECPNCKKRFSHSGSYSSHISSKKCIGLISVNGRMRNNIKTGSSPNSVSSSPTNSAITQLRNKLENGKPLSMSEQTGLLKIKTEPLDFNDYKVLMATHGFSGTSPFMNGGLGATSPLGVHPSAQSPMQHLGVGMEAPLLGFPTMNSNLSEVQKVLQIVDNTVSRQKMDCKAEEISKLKGYHMKDPCSQPEEQGVTSPNIPPVGLPVVSHNGATKSIIDYTLEKVNEAKACLQSLTTDSRRQISNIKKEKLRTLIDLVTDDKMIENHNISTPFSCQFCKESFPGPIPLHQHERYLCKMNEEIKAVLQPHENIVPNKAGVFVDNKALLLSSVLSEKGMTSPINPYKDHMSVLKAYYAMNMEPNSDELLKISIAVGLPQEFVKEWFEQRKVYQYSNSRSPSLERSSKPLAPNSNPPTKDSLLPRSPVKPMDSITSPSIAELHNSVTNCDPPLRLTKPSHFTNIKPVEKLDHSRSNTPSPLNLSSTSSKNSHSSSYTPNSFSSEELQAEPLDLSLPKQMKEPKSIIATKNKTKASSISLDHNSVSSSSENSDEPLNLTFIKKEFSNSNNLDNKSTNPVFSMNPFSAKPLYTALPPQSAFPPATFMPPVQTSIPGLRPYPGLDQMSFLPHMAYTYPTGAATFADMQQRRKYQRKQGFQGELLDGAQDYMSGLDDMTDSDSCLSRKKIKKTESGMYACDLCDKTFQKSSSLLRHKYEHTGKRPHQCQICKKAFKHKHHLIEHSRLHSGEKPYQCDKCGKRFSHSGSYSQHMNHRYSYCKREAEEREAAEREAREKGHLEPTELLMNRAYLQSITPQGYSDSEERESMPRDGESEKEHEKEGEDGYGKLGRQDGDEEFEEEEEESENKSMDTDPETIRDEEETGDHSMDDSSEDGKMETKSDHEEDNMEDGM

SEQ ID NO: 89178 - protein, 57 aa, Homo sapiens
MKSNPAIQAAIDLTAGAAGGTACVLTGQPFDTMKVKMQTFPDLYRGLTDCCLKTYSQ

SEQ ID NO: 89179 - protein, 175 aa, Homo sapiens
MVAGWLTNYSQDSVTFEDVAVDFTQEEWTLLDQTQRNLYRDVMLENYKNLVAVDWESHINTKWSAPQQNFLQGKTSSVVEMVRFRRYNLLSSMLEEDWKFLKMEKQHNNLETFETSVFHPKIICLLERLWIMSLTNTLNIPQNIFVYIFPSTFPYVSQMFLINNSLLGRYQLSSI

SEQ ID NO: 89180 - protein, 107 aa, Homo sapiens
QSKVIPKNRIHHKLVLPSNTPNVRRTKRTRLKPLEYWRGERIDYQGRPSGGFVISGVLSPDTISSKRKAKENIGKVNKKSNKKRICLDNDERSMNLFLKVTFRFYFK

SEQ ID NO: 89181 - protein, 44 aa, Homo sapiens
MAEEEGPPVELRQRKKPKSSENKESAKEEKISDIPIPERAPKRA

SEQ ID NO: 89182 - protein, 66 aa, Homo sapiens
  MOD_RES (1)..(1): Any amino acid
XASLLAEWPSHVPVSEDILELSGPAHMTYILDMFMQLEEKHEWEKANPPAWLGTPSRTRTLYDWFS

SEQ ID NO: 89183 - protein, 953 aa, Homo sapiens
MLVVEAKFDGEQLATDPVDHTDQPEFATELAWEIDRKALHQHRLQRTPIKLQCFALDPVTSAKETIGYIVLDLRTAQETKQAPKWYQLLSNKYTKFKSEIQISIALETDTKPPVDSFKAKGAPPRDGKVPAILAGLDPRDIVAVLNEEGGYHQIGPAEYCTDSFIMSVTIAFATQLEQLIPCTMKLPERQPEFFFYYSLLGNDVTNEPFNDLINPNFEPERASVRIRSSVEILRVYLALQSKLQIHLCCGDQSLGSTEIPLTGLLKKGSTEINQHPVTVEGAFTLDPPNRAKQKLAPIPVELAPTVGVSVALQREGIDSQSLIELKTQNEHEPEHSKKKVLTPIKEKTLTGPKSPTVSPVPSHNQSPPTKDDATESEVESLQYDKDTKPNPKASSSVPASLAQLVTTSNASEVASGQKIAVPATSHHFCFSIDLRSIHALEIGFPINCILRYSYPFFGSAAPIMTNPPVEVRKNMEVFLPQSYCAFDFATMPHQLQDTFLRIPLLVELWHKDKMSKDLLLGIARIQLSNILSSEKTRFLGSNGEQCWRQTYSESVPVIAAQGSNNRIADLSYTVTLEDYGLVKMREIFISDSSQGVSAVQQKPSSLPPAPCPSEIQTEPRETLEYKAALELEMWKEMQEDIFENQLKQKELAHMQALAEEWKKRDRERESLVKKKVAEYTILEGKLQKTLIDLEKREQQLASVESELQREKKELQSERQRNLQELQDSIRRAKEDCIHQVELERLKIKQLEEDKHRLQQQYKILEKEFQQFKDQQNNKPEIRLQSEINLLTLEKVELERKLESATKSKLHYKQQWGRALKELARLKQREQESQMARLKKQQEELEQMRLRYLAAEEKDTVKTERQELLDIRNELNRLRQQEQKQYQDSTEIASGKKDGPHGSVLEEGLDDYLTRLIEERDTLMRTGVYNHEDRIISELDRQIREILAKSNASN

SEQ ID NO: 89184 - protein, 85 aa, Homo sapiens
NAELCRYLSKVLELRKSDVVLDKGLSLCHPGWSTAAQPRVTAALTSLAQTILPPQPPKLLELQVHATHTRLIFVFFEETGSRHVA

SEQ ID NO: 89185 - protein, 147 aa, Homo sapiens
MSGVVPTAPEQPAGEMENQTKPPDPRPDAPPEYNSHFLPGPPGTAVPPPTGYPGGLPMGYYSPQQPSTFPLYQPVGGIHPVRYQPGKYPMPNQSVPITWMPGPTPMANCPPGLEYLVQLEVQCPPGVTIGFVAEHWNLCRAVYSIQN

SEQ ID NO: 89186 - protein, 139 aa, Homo sapiens
MNMFKEAVTFKDVAVAFTEEELGLLGPAQRKLYRDVMVENFRNLLSVGHPPFKQDVSPIERNEQLWIMTTATRRQGNLGEKNQSKLITVQDRESEEELSCWQIWQQIANDLTRCQDSMINNSQCHKQGDFPYQVGTELS

SEQ ID NO: 89187 - protein, 543 aa, Homo sapiens
MAERKGTAKVDFLKKIEKEIQQKWDTERVFEVNASNLEKQTSKGKYFVTFPYPYMNGRLHLGHTFSLSKCEFAVGYQRLKGKCCLFPFGLHCTGMPIKACADKLKREIELYGCPPDFPDEEEEEEETSVKTEDIIIKDKAKGKKSKAAAKAGSSKYQWGIMKSLGLSDEEIVKFSEAEHWLDYFPPLAIQDLKRMGLKVDWRRSFITTDVNPYYDSFVRWQFLTLRERNKIKFGKRYTIYSPKDGQPCMDHDRQTGEGVGPQEYTLLKLKVLEPYPSKLSGLKGKNIFLVAATLRPETMFGQTNCWVRPDMKYIGFETVNGDIFICTQKAARNMSYQGFTKDNGVVPVVKELMGEEILGASLSAPLTSYKVIYVLPMLTIKEDKGTGVVTSVPSDSPDDIAALRDLKKKQALRAKYGIRDDMVLPFEPVPVIEIPGFGNLSAVTICDELKIQSQNDREKLAEAKEKIYLKGFYEGIMLVDGFKGQKVQDVKKTIQKKMIDAVCDRLCSEGCFRRAVNRLDSVISRRCTYLHGTRETSDVQVVR

SEQ ID NO: 89188 - protein, 29 aa, Homo sapiens
  MOD_RES (1)..(1): Any amino acid
XADGKLLSTGFSRMSERQLALWDPFCCVA

SEQ ID NO: 89189 - protein, 211 aa, Homo sapiens
MVKETQYYDILGVKPSASPEEIKKAYRKLALKYHPDKNPDEGEKFKLISQAYEVLSDPKKRDVYDQGGEQAIKEGGSGSPSFSSPMDIFDMFFGGGGRMARERRGKNVVHQLSVTLEDLYNGVTKKLALQKNVICEKCEGVGGKKGSVEKCPLCKGRGMQIHIQQIGPGMVQQIQTVCIECKGQGERINPKDRCESCSGAKVIREKKIIEV

SEQ ID NO: 89190 - protein, 173 aa, Homo sapiens
RERALARQLLRDGRKERAKLLLKKKRYQEQLLDRTENQISSLEAMVQSIEFTQIEMKVMEGLQFGNECLNKMHQVMSIEEVERILDETQEAVEYQRQIDELLAGSFTQEDEDAILEELSAITQEQIELPEVPSEPLPEKIPALPQDGPQLRNCTETRKAKTPIETLSFWQEKL

SEQ ID NO: 89191 - protein, 105 aa, Homo sapiens
MSVPGPYQAATGPSSAPSAPPSYEETVAVNSYYPTPPAPMPGPTTGLVTGPDGKGMNPPSYYTQPAPIPNNNPSTCGLPGPPYHSLALHPGNQESDRSDSAKESK

SEQ ID NO: 89192 - protein, 163 aa, Homo sapiens
MGLHLRPYRVGLLPDGLLFLLLLLMLLADPALPAGRHPPVVLVPGDLGNQLEAKLDKPTVVHYLCSKKTESYFTIWLNLELLLPVIIDCWIDNIRLVYNKTSRATQFPDGVDVRVPGFGKTFSLEFLDPSKSSVDENGPYFLALREMIEEMYQLYGGPVVLVA

SEQ ID NO: 89193 - protein, 395 aa, Homo sapiens
  MOD_RES (1)..(1): Any amino acid
XHKVCRCLLSGFGGRVDAGQPELLTERSSPKGGHVKSHAELEGNGEHPEAPGSGEGSEALLEICQRRHFLSGSKQQLSRDSLLSGCHPGFGPLGVELRKNLAAEWWTSVVVFREQVFPVDALHHKPGPLLPGDSAFRLVSAETLREILQDKELSKEQLVAFLENVLKTSGKLRENLLHGALEHYVNCLDLVNKRLPYGLAQIGVCFHPVFDTKQIRNGVKSIGEKTEASLVWFTPPRTSNQWLDFWLRHRLQWWRKFAMSPSNFSSSDCQDEEGRKGNKLYYNFPWGKELIETLWNLGDHELLHMYPGNVSKLHGRDGRKNVVPCVLSVNGDLDRGMLAYLYDSFQLTENSFTRKKNLHRKDLTLSPRLECSGTILAHCSLDLPGQAFFPPQPPE

SEQ ID NO: 89194 - protein, 1633 aa, Homo sapiens
MHPGLWLLLVTLCLTEELAAAGEKSYGKPCGGQDCSGSCQCFPEKGARGRPGPIGIQGPTGPQGFTGSTGLSGLKGERGFPGLLGPYGPKGDKGPMGVPGFLGINGIPGHPGQPGPRGPPGLDGCNGTQGAVGFPGPDGYPGLLGPPGLPGQKGSKGDPVLAPGSFKGMKGDPGLPGLDGITGPQGAPGFPGAVGPAGPPGLQGPPGPPGPLGPDGNMGLGFQGEKGVKGDVGLPGPAGPPPSTGELEFMGFPKGKKGSKGEPGPKGFPGISGPPGFPGLGTTGEKGEKGEKGIPGLPGPRGPMGSEGVQGPPGQQGKKGTLGFPGLNGFQGIEGQKGDIGLPGPDVFIDIDGAVISGNPGDPGVPGLPGLKGDEGIQGLRGPSGVPGLPALSGVPGALGPQGFPGLKGDQGNPGRTTIGAAGLPGRDGLPGPPGPPGPPSPEFETETLHNKESGFPGLRGEQGPKGNLGLKGIKGDSGFCACDGGVPNTGPPGEPGPPGPWGLIGLPGLKGARGDRGSGGAQGPAGAPGLVGPLGPSGPKGKKGEPILSTIQGMPGDRGDSGSQGFRGVIGEPGKDGVPGLPGLPGLPGDGGQGFPGEKGLPGLPGEKGHPGPPGLPGNGLPGLPGPRGLPGDKGKDGLPGQQGLPGSKGITLPCIIPGSYGPSGFPGTPGFPGPKGSRGLPGTPGQPGSSGSKGEPGSPGLVHLPELPGFPGPRGEKGLPGFPGLPGKDGLPGMIGSPGLPGSKGATGDIFGAENGAPGEQGLQGLTGHKGFLGDSGLPGLKGVHGKPGLLGPKGERGSPGTPGQVGQPGTPGSSGPYGIKGKSGLPGAPGFPGISGHPGKKGTRGKKGPPGSIVKKGLPGLKGLPGNPGLVGLKGSPGSPGVAGLPALSGPKGEKGSVGFVGFPGIPGLPGIPGTRGLKGIPGSTGKMGPSGRAGTPGEKGDRGNPGPVGIPSPRRPMSNLWLKGDKGSQGSAGSNGFPGPRGDKGEAGRPGPPGLPGAPGLPGIIKGVSGKPGPPGFMGIRGLPGLKGSSGITGFPGMPGESGSQGIRGSPGLPGASGLPGLKGDNGQTVEISGSPGPKGQPGESGFKGTKGRDGLIGNIGFPGNKGEDGKVGVSGDVGLPGAPGFPGVAGMRGEPGLPGSSGHQGAIGPLGSPGLIGPKGPSITGVPGPAGLPGPKGEKGYPGIGIGAPGKPGLRGQKGDRGFPGLQGPAGLPGAPGISLPSLIAGQPGDPGRPGLDGERGRPGPAGPPGPPGPSSNQGDTGDPGFPGIPGPKGPKGDQGIPGFSGLPGELGLKGSSGLQGDPGQTPTAEAVQVPPGPLGLPGIDGIPGLTGDPGAQGPVGLQGSKGLPGIPGKDGPSGLPGPPGALGDPGLPGLQGPPGFEGAPGQQGPFGMPGMPGQSMRVGYTLVKHSQSEQVPPCPIGMSQLWVGYSLLFVEGQEKAHNQDLGFAGSCLPRFSTMPFIYCNINEVCHYARRNDKSYWLSTTAPIPMMPVSQTQIPQYISRCSVCEAPSQAIAVHSQDITIPQCPLGWRSLWIGYSFLMHTAAGAEGGGQSLVSPGSCLEDFRATPFIECSGARGTCHYFANKYSFWLTTVEERQQFGELPVSETLKAGQLHTRVSRCQVCMKSL

SEQ ID NO: 89195 - protein, 2489 aa, Homo sapiens
MVGERHAGDLMVPLGPRLQAYPEELIRQRPGHDGHPEYLIRWSVLKCGEVGKVGVEEGKAEHILMWLSAPEVYANCPGLLGERALSKGLQHEPAGVSGSFPRDPGGLDEVAMGEMEADVQALVRRAARQLAESGTPSLTAAVLHTIHVLSAYASIGPLTGVFRETGALDLLMHMLCNPEPQIRRSAGKMLQALAAHDAGSRAHVLLSLSQQDGIEQHMDFDSRYTLLELFAETTSSEEHCMAFEGIHLPQIPGKLLFSLVKRYLCVTSLLDQLNSSPELGAGDQSSPCATREKSRGQRELEFSMAVGNLISELVRSMGWARNLSEQGMSPPRPTRSIFQPYISGPSLLLPTIVTTPRRQGWVFRQRSEFSSRSGYGEYVQQTLQPGMRVRMLDDYEEISAGDEGEFRQSNNGIPPVQVFWQSTGRTYWVHWHMLEILGPEEATEDKASAAVEKGAGATVLGTAFPSWDWNPMDGLYPLPYLQPEPQKNERVGYLTQAEWWELLFFIKKLDLCEQQPIFQNLWKNLDETLGEKALGEISVSVEMAESLLQVLSSRFEGSTLNDLLNSQIYTKYGLLSNEPSSSSTSRNHSCTPDPEEESKSEASFSEEETESLKAKAEAPKTEAEPTKTRTETPMAQSDSQLFNQLLVTEGMTLPTEMKEAASEMARALRGPGPRSSLDQHVAAVVATVQISSLDTNLQLSGLSALSQAVEEVTERDHPLVRPDRSLREKLVKMLVELLTNQVGEKMVVVQALRLLYLLMTKHEWRPLFAREGGIYAVLVCMQEYKTSVLVQQAGLAALKMLAVASSSEIPTFVTGRDSIHSLFDAQMTREIFASIDSATRPGSESLLLTVPAAVILMLNTEGCSSAARNGLLLLNLLLCNHHTLGDQIITQELRDTLFRHSGIAPRTEPMPTTRTILMMLLNRYSEPPGSPERAALETPIIQGQDGSPELLIRSLVGGPSAELLLDLERVLCREGSPGGAVRPLLKRLQQETQPFLLLLRTLDAPGPNKTLLLSVLRVITRLLDFPEAMVLPWHEVLEPCLNCLSGPSSDSEIVQELTCFLHRLASMHKDYAVVLCCLGAKEILSKVLDKHSAQLLLGCELRDLVTECEKYAQLYSNLTSSILAGCIQMVLGQIEDHRRTHQPINIPFFDVFLRHLCQGSSVEVKEDKCWEKVEVSSNPHRASKLTDHNPKTYWESNGSTGSHYITLHMHRGVLVRQLTLLVASEDSSYMPARVVVFGGDSTSCIGTELNTVNVMPSASRVILLENLNRFWPIIQIRIKRCQQGGIDTRVRGVEVLGPKPTFWPLFREQLCRRTCLFYTIRAQAWSRDIAEDHRRLLQLCPRLNRVLRHEQNFADRFLPDDEAAQALGKTCWEALVSPLVQNITSPDAEGVSALGWLLDQYLEQRETSRNPLSRAASFASRVRRLCHLLVHVEPPPGPSPEPSTRPFSKNSKGRDRSPAPSPVLPSSSLRNITQCWLSVVQEQVSRFLAAAWRAPDFVPRYCKLYEHLQRAGSELFGPRAAFMLALRSGFSGALLQQSFLTAAHMSEQFARYIDQQIQGGLIGGAPGVEMLGQLQRHLEPIMVLSGLELATTFEHFYQHYMADRLLSFGSSWLEGAVLEQIGLCFPNRLPQLMLQSLSTSEELQRQFHLFQLQRLDKLFLEQEDEEEKRLEEEEEEEEEEEAEKELFIEDPSPAISILVLSPRCWPVSPLCYLYHPRKCLPTEFCDALDRFSSFYSQSQNHPVLDMGPHRRLQWTWLGRAELQFGKQILHVSTVQMWLLLKFNQTEEVSVETLLKDSDLSPELLLQALVPLTSGNGPLTLHEGQDFPHGEKDEGRTLEQKRNLLSCLLVRILKAHGEKGLHIDQLVCLVLEAWQKGPNPPGTLGHTVAGGVACTSTDVLSCILHLLGQGYVKRRDDRPQILMYAAPEPMGPCRGQADVPFCGSQSETSKPSPEAVATLASLQLPAGRTMSPQEVEGLMKQTVRQVQETLNLEPDVAQHLLAHSHWGAEQLLQSYSEDPEPLLLAAGLCVHQAQAVPVRPDHCPVCVSPLGCDDDLPSLCCMHYCCKSCWNEYLTTRIEQNLVLNCTCPIADCPAQPTGAFIRAIVSSPEVISKYEKALLRGYVESCSNLTWCTNPQGCDRILCRQGLGCGTTCSKCGWASCFNCSFPEAHYPASCGHMSQWVDDGGYYDGMSVEAQSKHLAKLISKRCPSCQAPIEKNEGCLHMTCAKCNHGFCWRCLKSWKPNHKDYYNCSAMVSKAARQEKRFQDYNERCTFHHQAREFAVNLRNRVSAIHEVPPPRSFTFLNDACQGLEQARKVLAYACVYSFYSQDAEYMDVVEQQTENLELHTNALQILLEETLLRCRDLASSLRLLRADCLSTGMELLRRIQERLLAILQHSAQDFRVGLQSPSVEAWEAKGPNMPGSQPQASSGPEAEEEEEDDEDDVPEWQQDEFDEELDNDSFSYDESENLDQETFFFGDEEEDEDEAYD

SEQ ID NO: 89196 - protein, 320 aa, Homo sapiens [sequence omitted]

SEQ ID NO: 89197 - protein, 10 aa, Homo sapiens
MVSHSELRKL

SEQ ID NO: 89198 - protein, 152 aa, Homo sapiens
MSENSSDSDSSCGWTVISHEGSDIEMLNSVTPTDSCEPAPECSSLEQEELQALQIEQGESSQNGTVLMEETAYPALEETSSTIEAEEQKIPEDSIYIGTASDDSDIVTLEPPKLEEIGNQEVVIVEEAQSSEDFNMGSSSSSQYTFCQPETA

SEQ ID NO: 89199 - protein, 77 aa, Homo sapiens
  MOD_RES (1)..(1): Any amino acid
XLTEAREKNRPEFLQGWQTAVTKCIPQQKNDSDCGVFVLQYCKCLALEQPFQFSQEDMPRVRKRIYKELCGWREEGR

SEQ ID NO: 89200 - protein, 1019 aa, Homo sapiens
MCICGTAHPVLDEGPVRCRAGPRDLLEARRPRAHECLGEALRVMHQIISKYPLLNTVETLTAAGTLIAKVKAFHYESNNDLEKQEFEKALETIAVAFSSTVSEFLMGEVDSSTLLAVPPGDSSQSMESLYGPGSEGTPPSLEDCDAGCLPAEEVDVLLQRCEGGVDAALLYAKNMAKYMKDLISYLEKRTTLEMEFAKGLQKIAHNCRQSVMQEPHMPLLSIYSLALEQDLEFGHSMVQAVGTLQTQTFMQPLTLRRLEHEKRRKEIKEAWHRAQRKLQEAESNLRKAKQGYVQRCEDHDKARFLVAKAEEEQAGSAPGAGSTATKTLDKRRRLEEEAKNKAEEAMATYRTCVADAKTQKQELEDTKVTALRQIQEVIRQSDQTIKSATISYYQMMHMQTAPLPVHFQMLCESSKLYDPGQQYASHVRQLQRDQEPDVHYDFEPHVSANAWSPVMRARKSSFNVSDVARPEAAGSPPEEGGCTEGTPAKDHRAGRGHQVHKSWPLSISDSDSGLDPGPGAGDFKKFERTSSSGTMSSTEELVDPDGGAGASAFEQADLNGMTPELPVAVPSGPFRHEGLSKAARTHRLRKLRTPAKCRECNSYVYFQGAECEECCLACHKKCLETLAIQCGHKKLQGRLQLFGQDFSHAARSAPDGVPFIVKKCVCEIERRALRTKGIYRVNGVKTRVEKLCQAFENGKELVELSQASPHDISNVLKLYLRQLPEPLISFRLYHELVGLAKDSLKAEAEAKAASRGRQDGSESEAVAVALAGRLRELLRDLPPENRASLQYLLRHLRRIVEVEQDNKMTPGNLGIVFGPTLLRPRPTEATVSLSSLVDYPHQARVIETLIVHYGLVFEEEPEETPGGQDESSNQRAEVVVQVPYLEAGEAVVYPLQEAAADGCRESRVVSNDSDSDLEEASELLSSSEASALGHLSFLEQQQSEASLEVASGSHSGSEEQLEATAREDGDGDEDGPAQQLSGFNTNQSNNVLQAPLPPMRLRGGRMTLGSCRERQPEFV

SEQ ID NO: 89201 - protein, 585 aa, Homo sapiens
MFKKLKQKISEEQQQLQQALAPAQASSNSSTPTRMRSRTSSFTEQLDEGTPNRENASTHASKSPDSVNGSEPSIPQEKSQSEYLKISQEKEQQESLALEELELQKKAILTESENKLRDLQQEAETYRTRILELESSLEKSLQENKNQSKDLAVHLEAEKNKHNKEITVMVEKHKTELESLKHQQDALWTEKLQVLKQQYQTEMEKLREKCEQEKETLLKDKEIIFQAHIEEMNEKTLEKLDVKQTELESLSSELSEVLKARHKLEEELSVLKDQTDKMKQELEAKMDEQKNHHQQQVDSIIKEHEVSIQRTEKALKDQINQLELLLKERDKHLKEHQAHVENLEADIKRSEGELQQASAKLDVFQSYQSATHEQTKAYEEQLAQLQQKLLDLETERILLTKQVAEVEAQKKDVCTELDAHKIQVQDLMQQLEKQNSEMEQKVKSLTQVYESKLEDGNKEQEQTKQILVEKENMILQMREGQKKEIEILTQKLSAKEDSIHILNEEYETKFKNQEKKMEKVKQKAKEMQETLKKKLLDQEAKLKKELENTALELSQKEKQFNAKMLEMAQANSAGISDAVSRLETN

SEQ ID NO: 89202 - protein, 153 aa, Homo sapiens
  MOD_RES (1)..(1): Any amino acid
XDWFSKSFVGCFVMVLLLLSLDFWSVKNVTGRLLVGLRWWNQIDEDGKSHWIFEARKVSPNSIAATEAEARIFWLGLIICPMIWIVFFFSTLFSLKLKWLALVVAGISLQAANLYGYILCKMGGNSDIGKVTASFLSQTVFQTAFLSSQAEMA

SEQ ID NO: 89203 - protein, 77 aa, Homo sapiens
MFTLPQKDFRAPTTCLGPTCMQDLGSSHGEDLEGECSRKLDQKLPELRGVGDPAMISSDTSYLSSRGRMIKWFWDSA

SEQ ID NO: 89204 - protein, 130 aa, Homo sapiens
MKVHMHTKFCLICLLTFIFHHCNHCHEEHDHGPEALHRQHRGMTELEPSKFSKQAAENEKKYYIEKLFERYGENGRLSFFGLEKLLTNLGLGERKVVEINHEDLGHDHVSHLDILAVQEGKHFHSHNHQH

SEQ ID NO: 89205 - protein, 433 aa, Homo sapiens
MGRKKIQITRIMDERNRQVTFTKRKFGLMKKAYELSVLCDCEIALIIFNSTNKLFQYASTDMDKVLLKYTEYNEPHESRTNSDIVETLRKKGLNGCDSPDPDADDSVGHSPESEDKYRKINEDIDLMISRQRLCAVPPPNFEMPVSIPVSSHNSLVYSNPVSSLGNPNLLPLAHPSLQRNSMSPGVTHRPPSAGNTGGLMGGDLTSGAGTSAGNGYGNPRNSPGLLVSPGNLNKNMQAKSPPPMNLGMNNRKPDLRVLIPPGSKNTMPSVNQRINNSQSAQSLATPVVSVATPTLPGQGMGGYPSAISTTYGTEYSLSSADLSSLSGFNTASALHLGSVTGWQQQHLHNMPPSALSQLGDRTTTPSRYPQHTRHEAGRSPVDSLSSCSSSYDGSDREDHRNEFHSPIGLTRPSPDERESPSVKRMRLSEGWAT

SEQ ID NO: 89206 - protein, 271 aa, Homo sapiens
MNLEKLSKPELLTLFSILEGELEARDLVIEALKAQHRDTFIEERYGKYNISDPLMALQRDFETLKEKNDGEKQPVCTNPLSILKVVMKQCKNMQERMLSQLAAAESRHRKVILDLEEERQRHAQDTAEGDDVTYMLEKERERLTQQLEFEKSQVKKFEKEQKKLSSQLEEERSRHKQLSSMLVLECKKATNKAAEEGQKAGELSLKLEKEKSRVSKLEEELAAERKRGLQTEAQVEKQLSEFDIEREQLRAKLNREENRTKTLKEEMESLK

SEQ ID NO: 89207 - protein, 3995 aa, Homo sapiens
MTTMLQKSDSNASFLRAARAGNLDKVVEYLKGGIDINTCNQNGLNALHLAAKEGHVGLVQELLGRGSSVDSATKKGNTALHIASLAGQAEVVKVLVKEGANINAQSQNGFTPLYMAAQENHIDVVKYLLENGANQSTATEDGFTPLAVALQQGHNQAVAILLENDTKGKVRLPALHIAARKDDTKSAALLLQNDHNADVQSKMMVNRTTESGFTPLHIAAHYGNVNVATLLLNRGAAVDFTARNGITPLHVASKRGNTNMVKLLLDRGGQIDAKTRDGLTPLHCAARSGHDQVVELLLERGAPLLARTKNGLSPLHMAAQGDHVECVKHLLQHKAPVDDVTLDYLTALHVAAHCGHYRVTKLLLDKRANPNARALNGFTPLHIACKKNRIKVMELLVKYGASIQAITESGLTPIHVAAFMGHLNIVLLLLQNGASPDVTNIRGETALHMAARAGQVEVVRCLLRNGALVDARAREEQTPLHIASRLGKTEIVQLLLQHMAHPDAATTNGYTPLHISAREGQVDVASVLLEAGAAHSLATKKGFTPLHVAAKYGSLDVAKLLLQRRAAADSAGKNGLTPLHVAAHYDNQKVALLLLEKGASPHATAKNGYTPLHIAAKKNQMQIASTLLNYGAETNIVTKQGVTPLHLASQEGHTDMVTLLLDKGANIHMSTKSGLTSLHLAAQEDKVNVADILTKHGADQDAHTKLGYTPLIVACHYGNVKMVNFLLKQGANVNAKTKNGYTPLHQAAQQGHTHIINVLLQHGAKPNATTANGNTALAIAKRLGYISVVDTLKVVTEEVTTTTTTITEKHKLNVPETMTEVLDVSDEEGDDTMTGDGGEYLRPEDLKELGDDSLPSSQFLDGMNYLRYSLEGGRSDSLRSFSSDRSHTLSHASYLRDSAVMDDSVVIPSHQVSTLAKEAERNSYRLSWGTENLDNVALSSSPIHSGFLVSFMVDARGGAMRGCRHNGLRIIIPPRKCTAPTRVTCRLVKRHRLATMPPMVEGEGLASRLIEVGPSGAQFLGPVIVEIPHFAALRGKERELVVLRSENGDSWKEHFCDYTEDELNEILNGMDEVLDSPEDLEKKRICRIITRDFPQYFAVVSRIKQDSNLIGPEGGVLSSTVVPQVQAVFPEGALTKRIRVGLQAQPMHSELVKKILGNKATFSPIVTLEPRRRKFHKPITMTIPVPKASSDVMLNGFGGDAPTLRLLCSITGGTTPAQWEDITGTTPLTFVNECVSFTTNVSARFWLIDCRQIQESVTFASQVYREIICVPYMAKFVVFAKSHDPIEARLRCFCMTDDKVDKTLEQQENFAEVARSRDVEVLEGKPIYVDCFGNLVPLTKSGQHHIFSFFAFKENRLPLFVKVRDTTQEPCGRLSFMKEPKSTRGLVHQAICNLNITLPIYTKESESDQEQEEEIDMTSEKNDETESTETSVLKSHLVNEVPVLASPDLLSEVSEMKQDLIKMTAILTTDVSDKAGSIKVKELVKAAEEEPGEPFEIVERVKEDLEKVNEILRSGTCTRDESSVQSSRSERGLVEEEWVIVSDEEIEEARQKAPLEITEYPCVEVRIDKEIKGKVEKDSTGLVNYLTDDLNTCVPLPKEQLQTVQDKAGKKCEALAVGRSSEKEGKDIPPDETQSTQKQHKPSLGIKKPVRRKLKEKQKQKEEGLQASAEKAELKKGSSEESLGEDPGLAPEPLPTVKATSPLIEETPIGSIKDKVKALQKRVEDEQKGRSKLPIRVKGKEDVPKKTTHRPHPAASPSLKSERHAPGSPSPKTERHSTLSSSAKTERHPPVSPSSKTEKHSPVSPSAKTERHSPASSSSKTEKHSPVSPSTKTERHSPVSSTKTERHPPVSPSGKTDKRPPVSPSGRTEKHPPVSPGRTEKRLPVSPSGRTDKHQPVSTAGKTEKHLPVSPSGKTEKQPPVSPTSKTERIEETMSVRELMKAFQSGQDPSKHKTGLFEHKSAKQKQPQEKGKVRVEKEKGPILTQREAQKTENQTIKRGQRLPVTGTAESKRGVRVSSIGVKKEDAAGGKEKVLSHKIPEPVQSVPEEESHRESEVPKEKMADEQGDMDLQISPDRKTSTDFSEVIKQELEDNDKYQQFRLSEETEKAQLHLDQVLTSPFNTTFPLDYMKDEFLPALSLQSGALDGSSESLKNEGVAGSPCGSLMEGTPQISSEESYKHEGLAETPETSPESLSFSPKKSEEQTGETKESTKTETTTEIRSEKEHPTTKDITGGSEERGATVTEDSETSTESFQKEATLGSPKDTSPKRQDDCTGSCSVALAKETPTGLTEEAACDEGQRTFGSSAHKTQTDSEVQESTATSDETKALPLPEASVKTDTGTESKPQGVIRSPQGLELALPSRDSEVLSAVADDSLAVSHKDSLEASPVLEDNSSHKTPDSLEPSPLKESPCRDSLESSPVEPKMKAGIFPSHFPLPAAVAKTELLTEVASVRSRLLRDPDGSAEDDSLEQTSLMESSGKSPLSPDTPSSEEVSYEVTPKTTDVSTPKPAVIHECAEEDDSENGEKKRFTPEEEMFKMVTKIKMFDELEQEAKQKRDYKKEPKQEESSSSSDPDADCSVDVDEPKHTGSGEDESGVPVLVTSESRKVSSSSESEPELAQLKKGADSGLLPEPVIRVQPPSPLPSSMDSNSSPEEVQFQPVVSKQYTFKMNEDTQEEPGKSEEEKDSESHLAEDRHAVSTEAEDRSYDKLNRDTDQPKICDGHGCEAMSPSSSAAPVSSGLQSPTGDDVDEQPVIYKESLALQGTHEKDTEGEELDVSRAESPQADCPSESFSSSSSLPHCLVSEGKELDEDISATSSIQKTEVTKTDETFENLPKDCPSQDSSITTQTDRFSMDVPVSDLAENDEIYDPQITSPYENVPSQSFFSSEESKTQTDANHTTSFHSSEVYSVTITSPVEDVVVASSSSGTVLSKESNFEGQDIKMESQQESTLWEMQSDSVSSSFEPTMSATTTVVGEQISKVIITKTDVDSDSWSEIREDDEAFEARVKEEEQKIFGLMVDRQSQGTTPDTTPARTPTEEGTPTSEQNPFLFQEGKLFEMTRSGAIDMTKRSYADESFHFFQIGQESREETLSEDVKEGATGADPLPLETSAESLALSESKETVDDEADLLPDDVSEEVEEIPASDAQLNSQMGISASTETPTKEAVSVGTKDLPTVQTGDIPPLSGVKQISCPDSSEPAVQVQLDFSTLTRSVYSDRGDDSPDSSPEEQKSVIEIPTAPMENVPFTESKSKIPVRTMPTSTPAPPSAEYESSVSEDFLSSVDEENKADEAKPKSKLPVKVPLQRVEQQLSDLDTSVQKTVAPQGQDMASIAPDNRSKSESDASSLDSKTKCPVKTRSYTETETESRERAEELELESEEGATRPKILTSRLPVKSRSTTSSCRGGTSPTKESKEHFFDLYRNSIEFFEEISDEASKLVDRLTQSEREQEIVSDDESSSALEVSVIENLPPVETEHSVPEDIFDTRPIWDESIETLIERIPDENGHDHAEDPQDEQERIEERLAYIADHLGFSWTELARELDFTEEQIHQIRIENPNSLQDQSHALLKYWLERDGKHATDTNLVECLTKINRMDIVHLMETNTEPLQERISHSYAEIEQTITLDHSEGFSVLQEELCTAQHKQKEEQAVSKESETCDHPPIVSEEDISVGYSTFQDGVPKTEGDSSATALFPQTHKEQVQQDFSGKMQDLPEESSLEYQQEYFVTTPGTETSETQKAMIVPSSPSKTPEEVSTPAEEEKLYLQTPTSSERGGSPIIQEPEEPSEHREESSPRKTSLVIVESADNQPETCERLDEDAAFEKELTEELGELEASSDEEAMVTTRVVRRRVIIQGDDMPEIPPETVTEEEYIDEHGHTVVKKVTRKIIRRYVSSEGTEKEEIMVQGMPQEPVNIEEGDGYSKVIKRVVLKSDTEQSEVTLCEPSILSSTSQFQAEPVEGRRVSKVVKTTVVLGERMEKHLGDSSLATDLPSAKDDFEEDNNE

SEQ ID NO: 89208 - protein, 1444 aa, Homo sapiens
MKSCAVSLTTAAVAFGDEAKKMAEGKASRESEEESVSLTVEEREALGGMDSRLFGFVRLHEDGARTKTLLGKAVRCYESLILKAEGKVESDFFCQLGHFNLLLEDYSKALSAYQRYYSLQADYWKNAAFLYGLGLVYFYYNAFHWAIKAFQDVLYVDPSFCRAKEIHLRLGLMFKVNTDYKSSLKHFQLALIDCNPCTLSNAEIQFHIAHLYETQRKYHSAKEAYEQLLQTENLPAQVKATVLQQLGWMHHNMDLVGDKATKESYAIQYLQKSLEADPNSGQSWYFLGRCYSSIGKVQDAFISYRQSIDKSEASADTWCSIGVLYQQQNQPMDALQAYICAVQLDHGHAAAWMDLGTLYESCNQPQDAIKCYLNAARSKRCSNTSTLAARIKFLQAQLCNLPQSSLQNKTKLLPSIEEAWSLPIPAELTSRQGAMNTAQQAYRAHDPNTEHVLNHSQTPILQQSLSLHMITSSQVEGLSSPAKKKRTSSPTKNGSDNWNGGQSLSHHPVQQVYSLCLTPQKLQHLEQLRANRDNLNPAQKHQLEQLESQFVLMQQMRHKEVAQVRTTGIHNGAITDSSLPTNSVSNRQPHGALTRVSSVSQPGVRPACVEKLLSSGAFSAGCIPCGTSKILGSTDTILLGSNCIAGSESNGNVPYLQQNTHTLPHNHTDLNSSTEEPWRKQLSNSAQGLHKSQSSCLSGPNEEQPLFSTGSAQYHQATSTGIKKANEHLTLPSNSVPQGDADSHLSCHTATSGGQQGIMFTKESKPSKNRSLVPETSRHTGDTSNGCADVKGLSNHVHQLIADAVSSPNHGDSPNLLIADNPQLSALLIGKANGNVGTGTCDKVNNIHPAVHTKTDHSVASSPSSAISTATPSPKSTEQRSINSVTSLNSPHSGLHTVNGEGLGKSQSSTKVDLPLASHRSTSQILPSMSVSICPSSTEVLKACRNPGKNGLSNSCILLDKCPPPRPPTSPYPPLPKDKLNPPTPSIYLENKRDAFFPPLHQFCTNPKNPVTVIRGLAGALKLDLGLFSTKTLVEANNEHMVEVRTQLLQPADENWDPTGTKKIWRCESNRSHTTIAKYAQYQASSFQESLREENEKRTQHKDHSDNESTSSENSGRRRKGPFKTIKFGTNIDLSDNKKWKLQLHELTKLPAFARVVSAGNLLTHVGHTILGMNTVQLYMKVPGSRTPGHQENNNFCSVNINIGPGDCEWFVVPEDYWGVLNDFCEKNNLNFLMSSWWPNLEDLYEANVPVYRFIQRPGDLVWINAGTVHWVQAVGWCNNIAWNVGPLTACQYKLAVERYEWNKLKSVKSPVPMVHLSWNMARNIKVSDPKLFEMIKYCLLKILKQYQTLREALVAAGKEVIWHGRTNDEPAHYCSICEVEVFNLLFVTNESNTQKTYIVHCHDCARKTSKSLENFVVLEQYKMEDLIQVYDQFTLALSLSSSS

SEQ ID NO: 89209 - protein, 52 aa, Homo sapiens
MPFTLHLRSRLPSAIRSLILQKKPNIRNTSSMAGELRPASLVVLPRSLAPAF

SEQ ID NO: 89210 - protein, 165 aa, Homo sapiens
MGVNQSVGFPPVTGPHLVGCGDVMEGQNLQGSFFRLFYPCQKAEETMEQPLWIPRYEYCTGLAEYLQFNKRCGGLLFNLAVGSCRLPVSWNGPFKTKDSGYPLIIFSHGLGAFRTLYSAFCMELASRGFVVAVPEHRDRSAATTYFCKQAPEENQPTNESLQEEW

SEQ ID NO: 89211 - protein, 144 aa, Homo sapiens
MEICADELKKVLNTVVNKHKDLKTHGFTLESCRSMIALMDTDGSGKLNLQEFHHLWNKIKAWQKIFKHYDTDQSGTINSYEMRNAVNDAGFHLNNQLYDIITMRYADKHMNIDFDSFICCFVRLEGMFRAFHAFDKDGDGIIKL

SEQ ID NO: 89212 - protein, 106 aa, Homo sapiens
MSYKPIAPAPSSTPGSSTPGPGTPVPTGSVPSPSGSVPGAGAPFRPLFNDFGPPSMGYVQAMKPPGAQGSQSTYTDLLSVIEEMGKEIRPTYAGSKSAMERLKRGK

SEQ ID NO: 89213 - protein, 122 aa, Homo sapiens
METEVIESLGIIIYKALDYGLKENEERELSPPLEQLIDHMANTVEADGSNDEGYEAAEEGLGDEDEKRKISAIRSYRDVMKLCAAHLPTESDAPNHYQAVCRALFAETMELHTFLTKIKSAK

SEQ ID NO: 89214 - protein, 135 aa, Homo sapiens
MALAPERAAPRVLFGEWLLGEISSGCYEGLQWLDEARTCFRVPWKHFARKDLSEADARIFKVGTPAPPRPGWESPPRTPRARHTCSVPLFRPGLWPAAGGRLAAGEVARPPRLRLRSAPAGKPTSAAHCAARVAS

SEQ ID NO: 89215 - protein, 173 aa, Homo sapiens
MSRFPAVAGRAPRRQEEGERSRDLQEERLSAVCIADRGFSQHGMIGVTQPRKVAAISVAQRVAEEMKCTLGSKVGYQVRFDDCSSKETAIKYMTDGCLLKHILGDPNLTKFSVIILDEAHERTLTTDILFGLLKKLFQEKSPNRKEHLKVVVMSATMELAKLSAFFGNCPIFD

SEQ ID NO: 89216 - protein, 87 aa, Homo sapiens
MRKSSSPSLSNCNSVLANKIFGIPLDELQQGGHPDNEVPFIVRHVVDYIEEHGGLEQQGLFQVNGNAETVEWLRQRYDSGEEVDLVK

SEQ ID NO: 89217 - protein, 45 aa, Homo sapiens
MVASARVQKLVRRYKLAIATALAILLLQGLKGRQRKPRPLDPGEG

SEQ ID NO: 89218 - protein, 82 aa, Homo sapiens
MTANHESYLLMASTQNDMEDWVKSIRRVIWGPFGGGIFGQKLEDTVRYEKRYGNRLAPMLVEQCVDFIRQRGLKEEGLFRLP

SEQ ID NO: 89219 - protein, 126 aa, Homo sapiens
MAVLLLLLRALRRGPGPGPRPLWGPGPAWSPGFPARPGRGRPYMASRPPGDLAEAGGRALQSLQLRLLTPTFEGINGLLLKQHLVQNPVRLWQLLGGTFYFNTSRLKQKNKEKDKSKGKAPEEDEG

SEQ ID NO: 89220 - protein, 291 aa, Homo sapiens
MTGTRSRPQPAQNATTANTSRPLKSSGTRYENELALRQGVEADINGLRRVLDELTLARTDLEMQIEGLNEELAYLKKNHEEEMKEFSSQLAGQVNVEMDAAPGVDLTRVLAEMREQYEAMAEKNRRDVEAWFFSKTEELNKEVASNTEMIQTSKTEITDLRRTMQELEIELQSQLSMKAGLENSLAETECRYATQLQQIQGLIGGLEAQLSELRCEMEAQNQEYKMLLDIKTRLEQEIATYRSLLEGQDAKMAGIAIREASSGGGGSSSNFHINVEESVDGQVVSSHKREI

SEQ ID NO: 89221 - protein, 358 aa, Homo sapiens
MRLPGCTLAASEAAPLLNPLVDDYVASEGAVQRVLVPAYAKQLSPATQLAIQRATPETGPENGTKLPPPRPEDMLNAAAALDSALEESGPGSTGELRHSLGLTVSPCRTRGSGQKNSRRKRDLVLSKLVHNVHNHITNDKRFNGSESIKSSWNISVVKFLLEKLKQELVTSPHNYTDKELKGACVAYFLTKRREYRNSLNPFKGLKEKEEKKLRSRRYRLFANRSSIMRHFGPEDQRLWNDVTEELMSDEEDSLNEPGVWVARPPRFRAQRLTELCYHLDANSKHGTKANRVYGPPSDRLPSAEAQLLPPELYNPNFQEEEDEGGDENAPGSPSFDQPHKTCCPDLNSFIEIKVEKDE

SEQ ID NO: 89222 - protein, 369 aa, Homo sapiens
MLCCIQCLCLVSPFPTLTPCQGGPHCLIPIHLCLTFSLFGRSVNNFLITGPKAYLTYTTSVALGAQSGIEECKFQFAWERWNCPENALQLSTHNRLRSATRETSFIHAISSAGVMYIITKNCSMGDFENCGCDGSNNGKTGGHGWIWGGCSDNVEFGERISKLFVDSLEKGKDARALMNLHNNRAGRLAVRATMKRTCKCHGISGSCSIQTCWLQLAEFREMGDYLKAKYDQALKIEMDKRQLRAGNSAEGHWVPAEAFLPSAEAELIFLEESPDYCTCNSSLGIYGTEGRECLQNSHNTSRWERRSCGRLCTECGLQVEERKTEVISSCNCKFQWCCTVKCDQCRHVVSKYYCARSPGSAQSLGKGSA

SEQ ID NO: 89223 - protein, 486 aa, Homo sapiens
MQEGDYTYQLTVTDTIGQQATAQVTVIVQPENNKPPQADAGPDKELTLPVDSTTLDGSKSSDDQKIISYLWEKTQGPDGVQLENANSSVATVTGLQVGTYVFTLTVKDERNLQSQSSVNVIVKEEINKPPIAKITGNVVITLPTSTAELDGSKSSDDKGIVSYLWTRDEGSPAAGEVLNHSDHHPILFLSNLVEGTYTFHLKVTDAKGESDTDRTTVEVKPDPRKNNLVEIILDINVSQLTERLKGMFIRQIGVLLGVLDSDIIVQKIQPYTEQSTKMVFFVQNEPPHQIFKGHEVAAMLKSELRKQKADFLIFRALEVNTVTCQLNCSDHGHCDSFTKRCICDPFWMENFIKVQLRDGDSNCEWSVLYVIIATFVIVVALGILSWTVICCCKRQKGKPKRKSKYKILDATDQESLELKPTSRAGIKQKGLLLSSSLMHSESELDSDDAIFTWPDREKGKLLHGQNGSVPNGQTPLKARSPREEIL

SEQ ID NO: 89224 - protein, 2504 aa, Homo sapiens
MSGSTQPVAQTWRATEPRYPPHSLSYPVQIARTHTDVGLLEYQHHSRDYASHLSPGSIIQPQRRRPSLLSEFQPGNERSQELHLRPESHSYLPELGKSEMEFIESKRPRLELLPDPLLRPSPLLATGQPAGSEDLTKDRSLTGKLEPVSPPSPPHTDPELELVPPRLSKEELIQNMDRVDREITMVEQQISKLKKKQQQLEEEAAKPPEPEKPVSPPPIESKHRSLVQIIYDENRKKAEAAHRILEGLGPQVELPLYNQPSDTRQYHENIKINQAMRKKLILYFKRRNHARKQWEQKFCQRYDQLMEAWEKKVERIENNPRRRAKESKVREYYEKQFPEIRKQRELQERMQRVGQRGSGLSMSAARSEHEVSEIIDGLSEQENLEKQMRQLAVIPPMLYDADQQRIKFINMNGLMADPMKVYKDRQVMNMWSEQEKETFREKFMQHPKNFGLIASFLERKTVAECVLYYYLTKKNENYKSLVRRSYRRRGKSQQQQQQQQQQQQQQQQQPMPRSSQEEKDEKEKEKEAEKEEEKPEVENDKEDLLKEKTDDTSGEDNDEKEAVASKGRKTANSQGRRKGRITRSMANEANSEEAITPQQSAELASMELNESSRWTEEEMETAKKGLLEHGRNWSAIARMVGSKTVSQCKNFYFNYKKRQNLDEILQQHKLKMEKERNARRKKKKAPAAASEEAAFPPVVEDEEMEASGVSGNEEEMVEEAEATVNNSSDTESIPSPHTEAAKDTGQNGPKPPATLGADGPPPGPPTPPPEDIPAPTEPTPASEATGAPTPPPAPPSPSAPPPVVPKEEKEEETAAAPPVEEGEEQKPPAAEELAVDTGKAEEPVKSECTEEAEEGPAKGKDAEAAEATAEGALKAEKKEGGSGRATTAKSSGAPQDSDSSATCSADEVDEAEGGDKNRLLSPRPSLLTPTGDPRANASPQKPLDLKQLKQRAAAIPPIQVTKVHEPPREDAAPTKPAPPAPPPPQNLQPESDAPQQPGSSPRGKSRSPAPPADKEAEKPVFFPAFAAEAQKLPGDPPCWTSGLPFPVPPREVIKASPHAPDPSAFSYAPPGHPLPLGLHDTARPVLPRPPTISNPPPLISSAKHPSVLERQIGAISQGMSVQLHVPYSEHAKAPVGPVTMGLPLPMDPKKLAPFSGVKQEQLSPRGQAGPPESLGVPTAQEASVLRGTALGSVPGGSITKGIPSTRVPSDSAITYRGSITHGTPADVLYKGTITRIIGEDSPSRLDRGREDSLPKGHVIYEGKKGHVLSYEGGMSVTQCSKEDGRSSSGPPHETAAPKRTYDMMEGRVGRAISSASIEGLMGRAIPPERHSPHHLKEQHHIRGSITQGIPRSYVEAQEDYLRREAKLLKREGTPPPPPPSRDLTEAYKTQALGPLKLKPAHEGLVATVKEAGRSIHEIPREELRHTPELPLAPRPLKEGSITQGTPLKYDTGASTTGSKKHDVRSLIGSPGRTFPPVHPLDVMADARALERACYEESLKSRPGTASSSGGSIARGAPVIVPELGKPRQSPLTYEDHGAPFAGHLPRGSPVTTREPTPRLQEGSLSSSKASQDRKLTSTPREIAKSPHSTVPEHHPHPISPYEHLLRGVSGVDLYRSHIPLAFDPTSIPRGIPLDAAAAYYLPRHLAPNPTYPHLYPPYLIRGYPDTAALENRQTIINDYITSQQMHHNAATAMAQRADMLRGLSPRESSLALNYAAGPRGIIDLSQVPHLPVLVPPTPGTPATAMDRLAYLPTAPQPFSSRHSSSPLSPGGPTHLTKPTTTSSSERERDRDRERDRDREREKSILTSTTTVEHAPIWRPGTEQSSGSSGGGGGSSSRPASHSHAHQHSPISPRTQDALQQRPSVLHNTGMKGIITAVEPSTPTVLRSTSTSSPVRPAATFPPATHCPLGGTLDGVYPTLMEPVLLPKEAPRVARPERPRADTGHAFLAKPPARSGLEPASSPSKGSEPRPLVPPVSGHATIARTPAKNLAPHHASPDPPAPPASASDPHREKTQSKPFSIQELELRSLGYHGSSYSPEGVEPVSPVSSPSLTHDKGLPKHLEELDKSHLEGELRPKQPGPVKLGGEAAHLPHLRPLPESQPSSSPLLQTAPGVKGHQRVVTLAQHISEVITQDYTRHHPQQLSAPLPAPLYSFPGASCPVLDLRRPPSDLYLPPPDHGAPARGSPHSEGGKRSPEPNKTSVLGGGEDGIEPVSPPEGMTEPGHSRSAVYPLLYRDGEQTEPSRMGSKSPGNTSQPPAFFSKLTESNSAMVKSKKQEINKKLNTHNRNEPEYNISQPGTEIFNMPAITGTGLMTYRSQAVQEHASTNMGLEAIIRKALMGKYDQWEESPPLSANAFNPLNASASLPAAMPITAADGRSDHTLTSPGGGGKAKVSGRPSSRKAKSPAPGLASGDRPPSVSSVHSEGDCNRRTPLTNRVWEDRPSSAGSTPFPYNPLIMRLQAGVMASPPPPGLPAGSGPLAGPHHAWDEEPKPLLCSQYETLSDSE

SEQ ID NO: 89225 - protein, 40 aa, Homo sapiens
  MOD_RES (1)..(1): Any amino acid
XNLGSAVKVLNSQSESSALTNQQPQNNGEVQNSKNQSVNK

SEQ ID NO: 89226 - protein, 52 aa, Homo sapiens
MEQAMTSSEMANSLGLPALKDRKWQIFKTSATKGTGLDEAMEWLVETLKSRQ

SEQ ID NO: 89227 - protein, 59 aa, Homo sapiens
MTAWILLPVSLSAFSITGIWTVYAMAVMNHHVCPVENWYEGLCRQPCSKASFISVPSWA

SEQ ID NO: 89228 - protein, 60 aa, Homo sapiens
MPFNGEKQCVGEDQPSDSDSSRFSESMASLSDYECSRQSFASDSSSKSSSPALLYEHLTA

SEQ ID NO: 89229 - protein, 90 aa, Homo sapiens
  MOD_RES (1)..(1): Any amino acid
XLGLLRNLLSTRPHIDKIMSTHGKQIMQAVTLILEGEHNIEVKEQTLCILANIADGTTAKDLIMTNDDILQKIKYYMGAQTGHLLKSVGS

SEQ ID NO: 89230 - protein, 1363 aa, Homo sapiens
MAALLRSARWLLRAGAAPRLPLSLRLLPGGPGRLHAASYLPAARAGPVAGGLLSPARLYAIAAKEKDIQEESTFSSRKISNQFDWALMRLDLSVRRTGRIPKKLLQKVFNDTCRSGGLGGSHALLLLRSCGSLLPELKLEERTEFAHRIWDTLQKLGAVYDVSHYNALLKVYLQNEYKFSPTDFLAKMEEANIQPNRVTYQRLIASYCNVGDIEGASKILGFMKTKDLPVTEAVFSALVTGHARAGDMENAENILTVMRDAGIEPGPDTYLALLNAYAEKGDIDHVKQTLEKVEKSELHLMDRDLLQIIFSFSKAGYPQYVSEILEKVTCERRYIPDAMNLILLLVTEKLEDVALQILLACPVSKEDGPSVFGSFFLQHCVTMNTPVEKLTDYCKKLKEVQMHSFPLQFTLHCALLANKTDLAKALMKAVKEEGFPIRPHYFWPLLVGRRKEKNVQGIIEILKGMQELGVHPDQETYTDYVIPCFDSVNSARAILQENGCLSDSDMFSQAGLRSEAANGNLDFVLSFLKSNTLPISLQSIRSSLLLGFRRSMNINLWSEITELLYKDGRYCQEPRGPTEAVGYFLYNLIDSMSDSEVQAKEEHLRQYFHQLEKMNVKIPENIYRGIRNLLESYHVPELIKDAHLLVESKNLDFQKTVQLTSSELESTLETLKAENQPIRDVLKQLILVLCSEENMQKALELKAKYESDMVTGGYAALINLCCRHDKVEDALNLKEEFDRLDSSAVLDTGKYVGLVRVLAKHGKLQALRGEIETVKQLHEAIVTLGLAEPSTNISFPLVTVHLEKGDLSTALEVAIDCYEKYKVLPRIHDVLCKLVEKGETDLIQKAMDFVSQEQGEMVMLYDLFFAFLQTGNYKEAKKIIETPGIRARSARLQWFCDRCVANNQVETLEKLVELTQKLFECDRDQMYYNLLKLYKINGDWQRADAVWNKIQEENVIPREKTLRLLAEILREGNQEVPFDVPELWYEDEKHSLNSSSASTTEPDFQKDILIACRLNQKKGAYDIFLNAKEQNIVFNAETYSNLIKLLMSEDYFTQAMEVKAFAETHIKGFTLNDAANSRLIITQVRRDYLKEAVTTLKTVLDQQQTPSRLAVTRVIQALAMKGDVENIEVVQKMLNGLEDSIGLSKMVFINNIALAQIKNNNIDAAIENIENMLTSENKVIEPQYFGLAYLFRKVIEEQLEPAVEKISIMAERLANQFAIYKPVTDFFLQLVDAGKVDDARALLQRCGAIAEQTPILLLFLLRNSRKQGKASTVKSVLELIPELNEKEEAYNSLMKSYVSEKDVTSAKALYEHLTAKNTKLDDLFLKRYASLLKYAGEPVPFIEPPESFEFYAQQLRKLRENSS

SEQ ID NO: 89231 - protein, 67 aa, Homo sapiens
MADPQSCFMTRQKPGNTFASEGSLNTAGRPGVGKRQVAPVAGVARKGRRIWGCGKGRTRVGADFCLW

SEQ ID NO: 89232 - protein, 122 aa, Homo sapiens
MAVVIRLLGLPFIAGPVDIRHFFTGLTIPDGGVHIIGGEIGEAFIIFATDEDARRAISRSGGFIKDSSVELFLSSKAEMQKTIEMKRTDRVGRGRPGSGTSGVDSLSNFIESVKEEASNSGY

SEQ ID NO: 89233 - protein, 291 aa, Homo sapiens
MARKKRRGIIEKRRRDRINNSLSELRRLVPTAFEKQGSAKLEKAEILQMTVDHLKMLQATGGKGYFDAHALAMDFMSIGFRECLTEVARYLSSVEGLDSSDPLRVRLVSHLSTCATQREAAAMTSSMAHHHHPLHPHHWAAAFHHLPAALLQPNGLHASESTPCRLSTTSEVPPAHGSALLTATFAHADSALRMPSTGSVAPCVPPLSTSLLSLSATVHAAAAAATAAAHSFPLSFAGAFPMLPPNAAAAVAAATAISPPLSVSATSSPQQTSSGTNNKPYRPWGTEVGAF

SEQ ID NO: 89234 - protein, 450 aa, Homo sapiens
MADVLSVLRQYNIQKKEIVVKGDEVIFGEFSWPKNVKTNYVVWGTGKEGQPREYYTLDSILFLLNNVHLSHPVYVRRAATENIPVVRRPDRKDLLGYLNGEASTSASIDRSAPLEIGLQRSTQVKRAADEVLAEAKKPRIEDEECVRLDKERLAARLEGHKEGIVQTEQIRSLSEAMSVEKIAAIKAKIMAKKRSTIKTDLDDDITALKQRSFVDAEVDVTRDIVSRERVWRTRTTILQSTGKEGASARKTQTPAAQPVPRPVSQARPPPNQKKGSRTPIIIIPAATTSLITMLNAKDLLQDLKFVPSDEKKKQGCQRENETLIQRRKDQMQPGGTAISVTVPYRVVDQPLKLMPQDWDRVVAVFVQGPAWQFKGWPWLLPDGSPVDIFAKIKAFHLKYDEVRLDPNVQKWDVTVLELSYHKRHLDRPVFLRFWETLDRYMVKHKSHLRF

SEQ ID NO: 89235 - protein, 77 aa, Homo sapiens
MVVSAGHWSSEKAEMNILEINETLRPQLPENKQQLRNLKEKCFLTQLAGFLANRQKKYKYEECKDLIKFMLRNERQF

SEQ ID NO: 89236 - protein, 64 aa, Homo sapiens
MGKWKRSQAYADYIGFILTLNEGVKGKKLTFEYRVSEAIEKLVALLNTLDRWIDETPPVDQPSR

SEQ ID NO: 89237 - protein, 99 aa, Homo sapiens
MEAPLQTEMVELVPNGKHSEGLLPVITPMAGNQRVEDPARSCMEGKSFLQKSPSKEPHFTDFEGKTSFGMSVFNLSNAIMGSGILGLAYAMANTGIILF

SEQ ID NO: 89238 - protein, 259 aa, Homo sapiens
MPALLERPKLSNAMARALHRHIMMERERKRQEEEEVDKMMEQKMKEEQERRKKKEMEERMSLEETKEQILKLEEKLLALQEEKHQLFLQLKKVLHEEEKRRRKEQSDLTTLTSAAYQQSLTVHTGTHLLSMQGSPGGHNRPGTLMAADRAKQMFGPQVLTTRHYVGSAAAFAGTPEHGQFQGSPGGAYGTAQPPPHYGPTQPAYSPSQQLRAPSAFPAVQYLSQPQPQPYAVHGHFQPTQTGFLQPGGALSLQKQMEHA

SEQ ID NO: 89239 - protein, 289 aa, Homo sapiens
MAAGVDCGDGVGARQHVFLVSEYLKDASKKMKNGLMFVKLVNPCSGEGAIYLFNMCLQQLFEVKVFKEKHHSWFINQSVQSGGLLHFATPVDPLFLLLHYLIKADKEGKFQPLDQVVVDNVFPNCILLLKLPGLEKLLHHVTEEKGNPEIDNKKYYKYSKEKTLKWLEKKVNQTVAALKTNNVNVSSRVQSTAFFSGDQASTDKEEDYIRYAHGLISDYIPKELSDDLSKYLKLPEPSASLPNPPSKKIKLSDEPVEAKEDYTKFNTKDLKTEKSEQRTDRKDNQLGLC

SEQ ID NO: 89240 - protein, 57 aa, Homo sapiens
MKKNTSKTTMRINKQDALCTPHSHDPRDLQNMLDGGEYAPFVSPPMLESNFIQKLLS

SEQ ID NO: 89241 - protein, 59 aa, Homo sapiens
MAILFAVVARGTTILAKHAWCGGNFLEVTEQILAKIPSENNKLTYSHGKILNVPEPLIF

SEQ ID NO: 89242 - protein, 78 aa, Homo sapiens
MSFSATILFSPPSGSEARCCCCACKSETNGGNTGSQGGNPPPSTPITVTGHGLAVQSSEQLLHVIYQRVDKAVGLAEA

SEQ ID NO: 89243 - protein, 788 aa, Homo sapiens
MASYPSGSGKPKAKYPFKKRASLQASTAAPEARGGLGAPPLQSARSLPGPAPCLKHFPLDLRTSMDGKCKEIAEELFTRSLAESELRSAPYEFPEESPIEQLEERRQRLERQISQDVKLEPDILLRAKQDFLKTDSDSDLQLYKEQGEGQGDRSLRERDVLEREFQRVTISGEEKCGVPFTDLLDAAKSVVRALFIREKYMALSLQSFCPTTRRYLQQLAEKPLETRTYEQGPDTPVSADAPVHPPALEQHPYEHCEPSTMPGDLGLGLRMVRGVVHVYTRREPDEHCSEVELPYPDLQEFVADVNVLMALIINGPIKSFCYRRLQYLSSKFQMHVLLNEMKELAAQKKVPHRDFYNIRKVDTHIHASSCMNQKHLLRFIKRAMKRHLEEIVHVEQGREQTLREVFESMNLTAYDLSVDTLDVHADRNTFHRFDKFNAKYNPIGESVLREIFIKTDNRVSGKYFAHIIKEVMSDLEESKYQNAELRLSIYGRSRDEWDKLARWAVMHRVHSPNVRWLVQVPRLFDVYRTKGQLANFQEMLENIFLPLFEATVHPASHPELHLFLEHVDGFDSVDDESKPENHVFNLESPLPEAWVEEDNPPYAYYLYYTFANMAMLNHLRRQRGFHTFVLRPHCGEAGPIHHLVSAFMLAENISHGLLLRKAPVLQYLYYLAQIGIAMSPLSNNSLFLSYHRNPLPEYLSRGLMVSLSTDDPLQFHFTKVKSHWLGPNYTKEGPEGNDIRRTNVPDIRVGYRYETLCQELALITQAVQSEMLETIPEEAGITMSPGPQ

SEQ ID NO: 89244 - protein, 93 aa, Homo sapiens
MNISPEELKMELPERQPRFVVYSYKYVHDDGRVSYPLCFIFSSPVGCKPEQQMMYAGSKNRLVQTAELTKVFEIRTTDDLTEAWLQEKLSFFR

SEQ ID NO: 89245 - protein, 76 aa, Homo sapiens
  MOD_RES (1)..(1): Any amino acid
XSDNLYSAFTSDGAISVPSLSAPGQGKMVKKVCPCNQLCRTSSTNTVGATVNSQAAQAQPPAMTSSRKGTFTDDLH

SEQ ID NO: 89246 - protein, 188 aa, Homo sapiens
MATRVRTASIWVPPLQERNSSWDRIRKLQGQESILGQGTPGLQPLPGTPRQKQKSRRIEKVLEWLFISQEQPKITKSWGPLSFMDVFVDFTWEEWQLLDPAQKCLYRSVMLENYSNLVSLGYQHTKPDIIFKLEQGEELCMVQAQVPNQTCPILKAGKSKAKVLAGLVSGEGLLCASKMTPCCCILWR

SEQ ID NO: 89247 - protein, 292 aa, Homo sapiens
  MOD_RES (1)..(1): Any amino acid
XLCHQKSSSLPGTACLEQLLEPPPPPAEPARSPAESRAPETGEEHGSSQKIINTAGTSNAEVPLADPGMYQLDITLRRGQSLAARDRGGTSDPYVKFKIGGKEVFRSKIIHKNLNPVWEEKACILVDHLREPLYIKVFDYDFGLQDDFMGSAFLDLTQLELNRPTDVTLTLKDPHYPDHDLGIILLSVILTPKEGESRDVTMLMRKSWKRSSKFQTQSLRLSDLHRKSHLWRGIVSITLIEGRDLKAMDSNGLSDPYVKFRLGHQKYKSKIMPKTLNPQWREQFDFHLYEER

SEQ ID NO: 89248 - protein, 605 aa, Homo sapiens
MQWSSERGERLLTPGACSSEVPSAVPSRSGGSPGHTVFSSERSLLVRPRSHPEPKGEHYVTGSPTPENQRTSAAMSKPHSEAGTAFIQTQQLHAAMADTFLEHMCRLDIDSPPITARNTGIICTIGPASRSVETLKEMIKSGMNVARLNFSHGTHEYHAETIKNVRTATESFASDPILYRPVAVALDTKGPEIRTGLIKGSGTAEVELKKGATLKITLDNAYMEKCDENILWLDYKNICKVVEVGSKIYVDDGLISLQVKQKGADFLVTEVENGGSLGSKKGVNLPGAAVDLPAVSEKDIQDLKFGVEQDVDMVFASFIRKASDVHEVRKVLGEKGKNIKIISKIENHEGVRRFDEILEASDGIMVARGDLGIEIPAEKVFLAQKMMIGRCNRAGKPVICATQMLESMIKKPRPTRAEGSDVANAVLDGADCIMLSGETAKGDYPLEAVRMQHLIAREAEAAMFHRKLFEELVRASSHSTDLMEAMAMGSVEASYKCLAAALIVLTESGRSAHQVARYRPRAPIIAVTRNPQTARQAHLYRGIFPVLCKDPVQEAWAEDVDLRVNFAMNVGKARGFFKKGDVVIVLTGWRPGSGFTNTMRVVPVP

SEQ ID NO: 89249 - protein, 23 aa, Homo sapiens
ASTEAEPEVDNLLVSDATPDGFR

SEQ ID NO: 89250 - protein, 114 aa, Homo sapiens
MAEMDPTQGRVVFEDVAIYFSQEEWGHLDEAQRLLYRDVMLENLALLSSLGSWHGAEDEEAPSQQGFSVGVSEVTASKPCLSSQKVHPSETCGPPLKDILCLVEHNGIHPEQHI

SEQ ID NO: 89251 - protein, 135 aa, Homo sapiens
LSRPGPLTSALFLFLHSMKETEKGPLSPKVLFNQLCQKAPRFKDFQQQDSQELLHYLLDAVRTEETKISTVKDPFIDISLPIIEERVSKPLLWGRMNKYRSLRETDHDRYSGNVTIENIHQPRAAKKHSSSKDKR

SEQ ID NO: 89252 - protein, 373 aa, Homo sapiens
MPKKEKMAKTPLSDEKQLLLFQQKLLAEEEMAKKKERLLSQFLKDKLAKEEHNSALNLNKINTQWRTVLREVKTRELHKDIEILSQTFERVVDCKDNVIKNLEEKHFLRLHLENRVEDLWRKFQDVLKNYTDATEDRKAAFETLQVKDEKSSKEIEVQMKKIQKLQDAITISKGKIMIHSRESEDENRYIRNDKELVLVQLRKLKAQRTQARAASQKNLVRLTLESNATLKALRKIVDKGEKILKLAEICRKFETEEEKVLPFYSSVLTPKEQEGIQKNNLEELTEELTKVMVDYIGMENFWKRYNKVKLEQLSLQHRRAQLLDINGKLREMLKQYLDGISVSDEVLSQLNPLFIVNYQSNLLQPLSIRIAHP

SEQ ID NO: 89253 - protein, 136 aa, Homo sapiens
MCESSKEALAENNLNLPKMAEKDGCFQSGFNEETCLVKIITGLLEFEVYLEYLQNRFESSEEQARAVQMSTKVLIQFLQKKAKNLDAITTPDPTTNASLLTKLQAQNQWLQDMTTHLILRSFKEFLQSSLRALRQM

SEQ ID NO: 89254 - protein, 307 aa, Homo sapiens
MGVFPEAATKPLLSMGWCGKSLSACGSAGAPVLEDTCRRQDFNPCEYDLKFQRSVLDLSLQWRFANLPNNAKLEMVPASRSREGPENMVRIALQLDDGSRLQDSFCSGQTLWELLSHFPQIRECLQHPGGATPVCVYTRDEVTGEAALRGTTLQSLGLTGGSATIRFVMKCYDPVGKTPGSLGSSASAGQAAASAPLPLESGELSRGDLSRPEDADTSGPCCEHTQEKQSTRAPAAAPFVPFSGGGQRLGGPPGPTRPLTSSSAKLPKSLSSPGGPSKPKKSKSGQDPQQEQEQERERDPQQEQERE

SEQ ID NO: 89255 - protein, 879 aa, Homo sapiens
MALAPGPDAHAHLPPLIELKFQMANSMNGRNPGGRGGNPRKGRILGIIDAIQDAVGPPKQAAADRRTVEKTWKLMDKVVRLCQNPKLQLKNSPPYILDILPDTYQHLRLILSKYDDNQKLAQLSENEYFKIYIDSLMKKSKRAIRLFKEGKERMYEEQSQDRRNLTKLSLIFSHMLAEIKAIFPNGQFQGDNFRITKADAAEFWRKFFGDKTIVPWKVFRQCLHEVHQISSGLEAMALKSTIDLTCNDYISVFEFDIFTRLFQPWGSILRNWNFLAVTHPGYMAFLTYDEVKARLQKYSTKPGSYIFRLSCTRLGQWAIGYVTGDGNILQTIPHNKPLFQALIDGSREGFYLYPDGRSYNPDLTGLCEPTPHDHIKVTQEQYELYCEMGSTFQLCKICAENDKDVKIEPCGHLMCTSCLTAWQESDGQGCPFCRCEIKGTEPIIVDPFDPRDEGSRCCSIIDPFGMPMLDLDDDDDREESLMMNRLANVRKCTDRQNSPVTSPGSSPLAQRRKPQPDPLQIPHLSLPPVPPRLDLIQKGIVRSPCGSPTGSPKSSPCMVRKQDKPLPAPPPPLRDPPPPPPERPPPIPPDNRLSRHIHHVESVPSRDPPMPLEAWCPRDVFGTNQLVGCRLLGEGSPKPGITASSNVNGRHSRVGSDPVLMRKHRRHDLPLEGAKVFSNGHLGSEEYDVPPRLSPPPPVTTLLPSIKCTGPLANSLSEKTRDPVEEDDDEYKIPSSHPVSLNSQPSHCHNVKPPVRSCDNGHCMLNGTHGPSSEKKSNIPDLSIYLKGDVFDSASDPVPLPPARPPTRDNPKHGSSLNRTPSDYDLLIPPLGEDAFDALPPSLPPPPPPARHSLIEHSKPPGSSSRPSSGQDLFLLPSA

SEQ ID NO: 89256 - protein, 136 aa, Homo sapiens
MTTSALRRQVKNIVHNYSEAEIKVREATSNDPWGPPSSLMSEIADLTFNTVAFTEVMGMLWRRLNDSGKNWRHVYKALTLLDYLLKTGSERVAHQCRENLYTIQTLKDFQYIDRDGKDQGVNVREKVKQVMALLKD

SEQ ID NO: 89257 - protein, 200 aa, Homo sapiens
MTSSYGHVLERQPALGGRLDSPGNLDTLQAKKNFSVSHLLDLEEAGDMVAAQADENVGEAGRSLLESPGLTSGSDTPQQDNDQLNSEEKKKRKQRRNRTTFNSSQLQALERVFERTHYPDAFVREDLARRVNLTEARVQVWFQNRRAKFRRNERAMLANKNASLLKSYSGDVTAVEQPIVPRPAPRPTDYLSWGTASPYR

SEQ ID NO: 89258 - protein, 300 aa, Homo sapiens
MLGRNTWKTSAFSFLVEQMWAPLWSRSMRPGRWCSQRSCAWQTSNNTLHPLWTVPVSVPGGTRQSPINIQWRDSVYDPQLKPLRVSYEAASCLYIWNTGYLFQVEFDDATEASGISGGPLENHYRLKQFHFHWGAVNEGGSEHTVDGHAYPAELHLVHWNSVKYQNYKEAVVGENGLAVIGVFLKLGAHHQTLQRLVDILPEIKHKDARAAMRPFDPSTLLPTCWDYWTYAGSLTTPPLTESVTWIIQKEPVEVAPSQGALCTHQHLCLLKNGLCQLFLKTGANPETRRYSREAIRAWTH

SEQ ID NO: 89259 - protein, 40 aa, Homo sapiens
MIAAPEIPTDFNLLQESETHFSSDTDFEDIEGKNQKQGKG

SEQ ID NO: 89260 - protein, 58 aa, Homo sapiens
MREAVQEMKDHMVSPTAVAFLERNNREILAGKPAAQKSPSDLLDASAVSATSRYIEEQ

SEQ ID NO: 89261 - protein, 281 aa, Homo sapiens
  MOD_RES (1)..(1): Any amino acid
XLMKKQELLRDREAALWEMEEHQLQERHQLVKQQLKDQYFLQRHELLRKHEKEREQMQRYNQRMIEQLKVRQQQEKARLPKIQRSEGKTRMAMYKKSLHINGGGSAAEQREKIKQFSQQEEKRQKSERLQQQQKHENQMRDMLAQCESNMSELQQLQNEKCHLLVEHETQKLKALDESHNQNLKEWRDKLRPRKKMESRTVAQVGVQWRNLNSGSGRGSEPEEAGAGDVLQAERGGGVPKPLHPKQGRQVLPLQFCGCFLTTARGCGWQLGGPQGLLLHSL

SEQ ID NO: 89262 - protein, 139 aa, Homo sapiens
MESRVADAGTGETARAAGGSPAVGCTTRGPVVSAPLGAARWKLLRQVLKQKHLDDCLRHVSVRRFESFNLFSVTEGKERETEEEVGAWVQYTSIFCPEYSISLRHNSGSLNVEDVLTSFDNTGNVYTGSHSVAQAGVQW

SEQ ID NO: 89263 - protein, 273 aa, Homo sapiens
MEKRLGVKPNPASWILSGYYWQTSAKWLRSLYLFYTCFCFSVLWLSTDASESRCQQGKTQFGVGLRSGGENHLWLLEGTPSLQSCWAACCQDSACHVFWWLEGMCIQADCSRPQSCRAFRTHSSNSMLVFLKKFQTADDLGFLPEDDVPHLLGLGWNWASWRQSPPRAALRPAVSSSDQQSLIRKLQKRGSPSDVVTPIVTQHSKVNDSNELGGLTTSGSAEVHKAITISSPLTTDLTAELSGGPKNVSVQPEISEGLATTPSTQQVKSSEKT

SEQ ID NO: 89264 - protein, 139 aa, Homo sapiens
  MOD_RES (1)..(1): Any amino acid
XAVEFLHSKGLMHRDLKPSNIFFTMDDVVKVGDFGLVTAMDQDEEEQTVLTPMPAYARHTGQVGTKLYMSPEQYVMVQDMLSPSPMERPEAINIIENAVFEDLDFPGKTVLRQRSRSLSSSGTKHSRQSNNSHSPLPSN

SEQ ID NO: 89265 - protein, 225 aa, Homo sapiens
SAGHPSPRTQWVPSTSWDLICLQPQPQSPAPGGPQPRIYTCPLSSSASPERYGGSSGRPPSRACWWRGPAPRGLEIKSGENAANIASELARHTRGSIYAGDVSSSVKLMEQLLDILDAQLQALRPIERESAGKNYNKMHKRERTCKDYIKAVVETVDNLLRPEALESWKDMNATEQVHTATMLLDVLEEGAFLLADNVREPARFLAAKENVVLEVTVLNTEGQVQ

SEQ ID NO: 89266 - protein, 195 aa, Homo sapiens
MGWSCLVTGAGGLLGQRIVRLLVEEKELKEIRALDKAFRPELREEFSKLQNRTKLTVLEGDILDEPFLKRACQDVSVVIHTACIIDVFGVTHRESIMNVNVKGTQLLLEACVQASVPVFIYTSSIEVAGPNSYKEIIQNGHEEEPLENTWPTPYPYSKKLAEKAVLAANGWNLKNGDTLYTCALRPTYIYGEGGP

SEQ ID NO: 89267 - protein, 132 aa, Homo sapiens
MCTGDKDVVNEGRKSFPSGHSSFAFAGLAFASFYLAGKLHCFTPQGRGKSWRFCAFLSPLLFAAVIALSRTCDYKHHWQDVLVGSMIGMTFAYVCYRQYYPPLTDAECHKPFQDKLVLSTAQKPGDSYCFDI

SEQ ID NO: 89268 - protein, 410 aa, Homo sapiens
MQLPRWWELGDPCAWTGQGRGTRRMSPATTGTFLLTGEISNDPITFNTNLMGYPDRPGWLRYIQRTPYSDGVLYGSPTAENVGKPTIIEITAYNRRTFETARHNLIINIMSAEDFPLPYQAEFFIKNMNVEEMLASEVLGDFLGAVKNVWQPERLNAINITSALDRGGRVPLPINDLKEGVYVMVGADVPFSSCLREVENPQNQLRCSQEMEPVITCDKKFRTQFYIDWCKISLVDKTKQVSTYQEVIRGEGILPDGGEYKPPSDSLKSRDYYTDFLITLAVPSAVALVLFLILAYIMCCRREGVIQLVHHSAIQKSTKELRDMSKNREIAWPLSTLPVFHPVTGEIIPPLHTDNYDSTNMPLMQTQQNLPHQTQIPQQQTTGDFRLTTFQRFEVNGIPEERKLTEAMNL

SEQ ID NO: 89269 - protein, 60 aa, Homo sapiens
MLQCYRCRQWFHEACTQCLNEPMMFGDRFYLFFCSVCNQGPEYIERLPLRWVDVVHLALY

SEQ ID NO: 89270 - protein, 52 aa, Homo sapiens
MARSLTWRCCPWCLTEDEKAAARVDQEINRILLEQKKQDRGELKLLLLVPGS

SEQ ID NO: 89271 - protein, 226 aa, Homo sapiens
  MOD_RES (1)..(1): Any amino acid
XNPERRLGSSERDAEDVKKQPFFRPGSRSVAQAGVQWLNLGSLQPPPPRFMQFSCLSLPSTWDYRRAPLHHTRLIFVFLVETGFRHVGQAGPELLASSDPPASASRSAGITGLSHHAGPPLFLIRLLHQALADSGLGSPVGPAPATALCAHAVRPHRRQQLRRGVHRGGPHTEPAPRRAAPHSRGAGSLPGLRLRGRGLLAPSPAPAPAPARELLVFKKAFGICRI

SEQ ID NO: 89272 - protein, 577 aa, Homo sapiens [sequence omitted]

SEQ ID NO: 89273 - protein, 72 aa, Homo sapiens
MRVNVDKVLERDQKLSELDDRADALQAGASQFETSAAKLKRKYWWKNCKMWAIGITVLVIFIIIIIVWVVSS

SEQ ID NO: 89274 - protein, 85 aa, Homo sapiens
MDPNCSCEAGGSCACAGSCKCKKCKCTSCKKSECGAISRNLGLWLRLGGNPRLALSACFLCPPRPSLPFQSSALSRAPVGLGSLS

SEQ ID NO: 89275 - protein, 1245 aa, Homo sapiens
MMNRTTPDQELAPASEPVWERPWSVEEIRRSSQSWSLAADAGLLQFLQEFSQQTISRTHEIKKQVDGLIRETKATDCRLHNVFNDFLMLSNTQFIENRVYDEEVEEPVLKAEAEKTEQEKTREQKEVDLIPKVQEAVNYGLQVLDSAFEQLDIKAGNSDSEEDDANGRVELILEPKDLYIDRPLPYLIGSKLFMEQEDVGLGELSSEEGSVGSDRGSIVDTEEEKEEEESDEDFAHHSDNEQNRHTTQMSDEEEDDDGCDLFADSEKEEEDIEDIEENTRPKRSRPTSFADELAARIKGDAVGRVDEEPTNEEDNLFAPPKLTDEDFSPFGSGGGLFSGGKGLFDDEDEESDLFTEAPQDRQAGASVKEESSSSKPGKKIPAGAVSVFLGDTDVFGAASVPSMKEPQKPEQPTPRKSPYGPPPTGLFDDDDGDDDDDFFSAPHSKPSKTGKVQSTADIFGDEEGDLFKEKAVASPEATVSQTDENKARAEKKVTLSSSKNLKPSSETKTQKGLFSDEEDSEDLFSSQSASKLKGASLLPGKLPTLVSLFDDEDEEDNLFGGTAAKKQTLCLQAQREEKAKASELSKKKASALLFSSDEEDQWNIPASQTHLASDSRSKGEPRDSGTLQSQEAKAVKKTSLFEEDEEDDLFAIAKDSQKKTQRVSLLFEDDVDSGGSLFGSPPTSVPPATKEGLLTRSAQETVKHSDLFSSSSPWDKGTKPRTKTVLSLFDEEEDKMEDQNIIQAPQKEVGKGRDPDAHPKSTGVFQDEELLFSHKLQKDNDPDVDLFAGTKKTKLLEPSVGSLFGDDEDDDLFSSAKSQPLVQEKKRVVKKDHSVDSFKNQKHPESIQGSKEKGIWKPETPQANLAINPAALLPTAASQISEVKPVLPELAFPSSEHRRSHGLESVPVLPGSGEAGVSFDLPAQADTLHSANKSRVKMRGKRRPQTRAARRLAAQESSETEDMSVPRGPIAQWADGAISPNGHRPQLRAASGEDSTEEALAAAAAPWEGGPVPGVDRSPFAKSLGHSRGEADLFDSGDIFSTGTGSQSVERTKPKAKIAENPANPPVGGKAKSPMFPALGEASSDDDLFQSAKPKPAKKTNPFPLLEDEDDLFTDQKVKKNETKSNSQQDVILTTQDIFEDDIFATEAIKPSQKTREKEKTLESNLFDDNIDIFADLTVKPKEKSKKKVEAKSIFDDDMDDIFSSGIQAKTTKPKSRSAQAAPEPRFEHKVSNIFDDPLNAFGGQ

SEQ ID NO: 89276 - protein, 121 aa, Homo sapiens
  MOD_RES (1)..(1): Any amino acid
XLCAVDESNDHMLSVWDWAKETKVVDVKVPEDFGPVRTVAEGHGDTLYVGTTRNSILQGSVHTGFSLLVQGHVEELWGLATHPSRAQFVTCGQDKLVHLWSSDSHQPLWSRIIEDPARSAG

SEQ ID NO: 89277 - protein, 1406 aa, Homo sapiens
MAAVGSGGYARNDAGEKLPSVMAGVPARRGQSSPPPAPPICLRRRTRLSTASEETVQNRVSLEKVLGITAQNSSGLTCDPGTGHVAYLAGCVVVILDPKENKQQHIFNTARKSLSALAFSPDGKYIVTGENGHRPAVRIWDVEEKNQVAEMLGHKYGVACVAFSPNMKHIVSMGYQHDMVLNVWDWKKDIVVASNKVSCRVIALSFSEDSSYFVTVGNRHVRFWFLEVSTETKVTSTVPLVGRSGILGELHNNIFCGVACGRGRMAGSTFCVSYSGLLCQFNEKRVLEKWINLKVYPEFEDQRACLPSGSFLTCSSDNTIRFWNLDSSPDSHWQKNIFSNTLLKVVYVENDIQHLQDMSHFPDRGSENGTPMDVKAGVRVMQVSPDGQHLASGDRSGNLRIHELHFMDELVKVEAHDAEVLCLEYSKPETGLTLLASASRDRLIHVLNVEKNYNLEQTLDDHSSSITAIKFAGNRDIQMISCGADKSIYFRSAQQGSDGLHFVRTHHVAEKTTLYDMDIDITQKYVAVACQDRNVRVYNTVNGKQKKCYKGSQGDEGSLLKVHVDPSGTFLATSCSDKSISVIDFYSGECIAKMFGHSEIITSMKFTYDCHHLITVSGDSCVFIWHLGPEITNCMKQHLLEIDHRQQQQHTNDKKRSGHPRQDTYVSTPSEIHSLSPGEQTEDDLEEECEPEEMLKTPSKDSLDPDPRCLLTNGKLPLWAKRLLGDDDVADGLAFHAKRSYQPHGRWAERAGQEPLKTILDAQDLDCYFTPMKPESLENSILDSLEPQSLASLLSESESPQEAGRGHPSFLPQQKESSEASELILYSLEAEVTVTGTDSQYCRKEVEAGPGDQQGDSYLRVSSDSPKDQSPPEDSGESEADLECSFAAIHSPAPPPDPAPRFATSLPHFPGCAGPTEDELSLPEGPSVPSSSLPQTPEQEKFLRHHFETLTESPCRELFPAALGDVEASEAEDHFFNPRLSISTQFLSSLQKASRFTHTFPPRATQCLVKSPEVKLMDRGGSQPRAGTGYASPDRTHVLAAGKAEETLEAWRPPPPCLTSLASCVPASSVLPTDRNLPTPTSAPTPGLAQGVHAPSTCSYMEATASSRARISRSISLGDSEGPIVATLAQPLRRPSSVGELASLGQELQAITTATTPSLDSEGQEPALRSWGNHEARANLRLTLSSACDGLLQPPVDTQPGVTVPAVSFPAPSPVEESALRLHGSAFRPSLPAPESPGLPAHPSNPQLPEARPGIPGGTASLLEPTSGALGLLQGSPARWSEPWVPVEALPPSPLELSRVGNILHRLQTTFQEALDLYRVLVSSGQVDTGQQQARTELVSTFLWIHSQLEAECLVGTSVAPAQALPSPGPPSPPTLYPLASPDLQALLEHYSELLVQAVRRKARGH

SEQ ID NO: 89278 - protein, 68 aa, Homo sapiens
HKKPVNYSQFDHSDSDDDFVSATVPLNKKSRTAPKELKQDKPKPNLNNLRKEEIPVQEKTPKKSHRKK

SEQ ID NO: 89279 - protein, 727 aa, Homo sapiens
MAQWNQLQQLDTRYLEQLHQLYSDSFPMELRQFLAPWIESQDWAYAASKESHATLVFHNLLGEIDQQYSRFLQESNVLYQHNLRRIKQFLQSRYLEKPMEIARIVARCLWEESRLLQTAATAAQQGGQANHPTAAVVTEKQQMLEQHLQDVRKRVQDLEQKMKVVENLQDDFDFNYKTLKSQGDMQDLNGNNQSVTRQKMQQLEQMLTALDQMRRSIVSELAGLLSAMEYVQKTLTDEELADWKRRQQIACIGGPPNICLDRLENWITSLAESQLQTRQQIKKLEELQQKVSYKGDPIVQHRPMLEERIVELFRNLMKSAFVVERQPCMPMHPDRPLVIKTGVQFTTKVRLLVKFPELNYQLKIKVCIDNLCSYRDSGDVAALRGSRKFNILGTNTKVMNMEESNNGSLSAEFKHLTLREQRCGNGGRANCDASLIVTEELHLITFETEVYHQGLKIDLETHSLPVVVISNICQMPNAWASILWYNMLTNNPKNVNFFTKPPIGTWDQVAEVLSWQFSSTTKRGLSIEQLTTLAEKLLGPGVNYSGCQITWAKFCKENMAGKGFSFWVWLDNIIDLVKKYILALWNEGYIMGFISKERERAILSTKPPGTFLLRFSESSKEGGVTFTWVEKDISGKTQIQSVEPYTKQQLNNMSFAEIIMGYKIMDATNILVSPLVYLYPDIPKEEAFGKYCRPESQEHPEADPGSAAPYLKTKFICVTPFIDAVWK

SEQ ID NO: 89280 - protein, 124 aa, Homo sapiens
MATPAVPVSAPPATPTPVPAAAPASVPAPTPAPAAAPVPAAAPASSSDPAAAAAATAAPGQTPASAQAPAQTPAPALPGPALPGPFPGGRVVRLHPVILASIVDSYERRNEGAARVIGTLLGGC

SEQ ID NO: 89281 - protein, 140 aa, Homo sapiens
MARLTKRRQADTKAIQHLWAAIEIIRNQKQIANIDRITKYMSRVHGMHPKETTRQLSLAVKDGLIVETLTVGCKGSKAGIEQEGYWLPGDEISIKKKNTNKQEMGTYLRFIVSRMKERAIDLNKKGKDNKHPMYRRLVHS

SEQ ID NO: 89282 - protein, 169 aa, Homo sapiens
MAQFDTEYQRLEASYSDSPPGEEDLLVHVAEGSKSPWHHIENLDLFFSRVYNLHQKNGFTCMLIGEIFELMQFLFVVAFTTFLVSCVDYDILFANKMVNHSLHPTEPVKVTLPDAFLPAQVCSARIQENGSLITILVIAGVFWIHRLIKFIYNICCYWEIHSFYLHALR

SEQ ID NO: 89283 - protein, 122 aa, Homo sapiens
MAALTTLFKYIDENQDRYIKKLAKWVAIQSVSAWPEKRGEIRRMMEVAAADVKQLGGSVELVDIGKQKLPDGSEIPLPPILLGRLGSDPQKKTVCIYGHLDVQPAALEDGWDSEPFTLVERD

SEQ ID NO: 89284 - protein, 28 aa, Homo sapiens
MQVMNLNVPMRPGILVQRQSKEVLATPL

SEQ ID NO: 89285 - protein, 191 aa, Homo sapiens
MRAAGVGLVDCHCHLSAPDFDRDLDDVLEKAKKANVVALVAVAEHSGEFEKIMQLSERYNGFVLPCLGVHPVQGLPPEDQRSVTLKDLDVALPIIENYKDRLLAIGEVGLDFSPRFAGTGEQKEEQRQVLIRQIQLAKRLNLPVNVHSRSAGRPTINLLQEQAETCETIAFNFYMLRNRFTCTRTRKTGTE

SEQ ID NO: 89286 - protein, 165 aa, Homo sapiens
MSHGPKQPGAAAAPAGGKAPGQHGGFVVTVKQERGEGPRAGEKGSHEEEYARPPSQRRSPVLQPVKKRGWPKGKKRKKILPNGPKAPVTGYVRFLNERREQIRTRHPDLPFPEITKMLGAEWSKLQPTEKQRYLDEAEREKQQYMKELRAYQQSEAYKMCTEKIQ

SEQ ID NO: 89287 - protein, 219 aa, Homo sapiens
MPTDSLSVSTLPLPEVQCFVFNVEYMNCTWNSSSEPQPTNLTLHYWYKNSDNDKVQKCSHYLFSEEITSGCQLQKKEIHLYQTFVVQLQDPREPRRQATQMLKLQNLVIPWAPENLTLHKLSESQLELNWNNRFLNHCLEHLVQYRTDWDHSWTEQSVDYRHKFSLPSVDGQKRYTFRVRSRFNPLCGSAQHWSEWSHPIHWGSNTSKENPFLFALEAV

SEQ ID NO: 89288 - protein, 87 aa, Homo sapiens
VLDETEVANSSAPDFGEDGTDGLLDSFCDSKEYVAAQLRQLPAQPPEHAVDGEGFKNTLETSSLNFKVTPDIEESLLEPALLRKKKI

SEQ ID NO: 89289 - protein, 170 aa, Homo sapiens
MHRVVVVGRSLFTEPSEPLPEESKPVEMPFHHCHRDPLPPPGLTPERLHARRQLYAACAVCFVFMAGEVVGGYLAHSLAIMTDAAHLLADVGSMMGSLFSLWLSTRPATRTMTFGWHRSETLGALASVVSLWMVTGILLYLAFVRLLHSDYHIEGGAMLLTASIAVCANL

SEQ ID NO: 89290 - protein, 253 aa, Homo sapiens
MKFAVYLPPKAETGKCPALYWLSGLTCTEQNFISKSGYHQSASEHGLVVIAPDTSPRGCNIKGEDESWDFGTGAGFYVDATEDPWKTNYRMYSYVTEELPQLINANFPVDPQRMSIFGHSMGGHGALICALKNPGKYKSVSAFAPICNPVLCPWGKKAFSGYLGTDQSKWKAYDATHLVKSYPGSQLDILIDQGKDDQFLLDGQLLPDNFIAACTEKKIPVVFRLQEGYDHSYYFIATFITDHIRHHAKYLNA

SEQ ID NO: 89291 - protein, 148 aa, Homo sapiens
MADSELQLVEQRIRSFPDFPTPGVVFRDISPVLKDPASFRAAIGLLARHLKATHGGRIDYIAGLDSRGFLFGPSLAQELGLGCVLIRKRGKLPGPTLWASYSLEYGKLCFSHTEPNYTQRENAVNSFPTRAVSCPPVPQGREPQDNTR

SEQ ID NO: 89292 - protein, 56 aa, Homo sapiens
VYECERSDVQIHVPTFTFRVTVGDITCTGEGTSKKLAKHRAAEAAINILKANLCSS

SEQ ID NO: 89293 - protein, 777 aa, Homo sapiens
MQVLYGQHFPIEVRHYLAQWIESQPWDAIDLDNPQDRAQATQLLEGLVQELQKKAEHQVGEDGFLLKIKLGHYATQLQKTYDRCPLELVRCIRHILYNEQRLVREANNCSSPAGILVDAMSQKHLQINQTFEELRLVTQDTENELKKLQQTQEYFIIQYQESLRIQAQFAQLAQLSPQERLSRETALQQKQVSLEAWLQREAQTLQQYRVELAEKHQKTLQLLRKQQTIILDDELIQWKRRQQLAGNGGPPEGSLDVLQSWCEKLAEIIWQNRQQIRRAEHLCQQLPIPGPVEEMLAEVNATITDIISALVTSTFIIEKQPPQVLKTQTKFAATVRLLVGGKLNVHMNPPQVKATIISEQQAKSLLKNENTRNECSGEILNNCCVMEYHQATGTLSAHFRNMSLKRIKRADRRGAESVTEEKFTVLFESQFSVGSNELVFQVKTLSLPVVVIVHGSQDHNATATVLWDNAFAEPGRVPFAVPDKVLWPQLCEALNMKFKAEVQSNRGLTKENLVFLAQKLFNNSSSHLEDYSGLSVSWSQFNRENLPGWNYTFWQWFDGVMEVLKKHHKPHWNDGAILGFVNKQQAHDLLINKPDGTFLLRFSDSEIGGITIAWKFDSPERNLWNLKPFTTRDFSIRSLADRLGDLSYLIYVFPDRPKDEVFSKYYTPVLAKAVDGYVKPQIKQVVPEFVNASADAGGSSATYMDQAPSPAVCPQAPYNMYPQNPDHVLDQDGEFDLDETMDVARHVEELLRRPMDSLDSRLSPPAGLFTSARGSLS

SEQ ID NO: 89294 - protein, 151 aa, Homo sapiens
  MOD_RES (1)..(1): Any amino acid
XDSPVRWLQPAHPGQVHPEGPGQTLAQLLPQVCRLPDAAGGQVLLQGWERLLQGGLLQVSQNGASAQNARPASRVSPQPRWSARPRTLSTTCTALLASSATGSWPRGTNSTSWRTGGWCARKTTRQPSRTMTQRLELSGPGPPSQPSSWRH

SEQ ID NO: 89295 - protein, 257 aa, Homo sapiens
  MOD_RES (1)..(1): Any amino acid
XSSTHTQRRSDEACTSGQLVVASRESQYKVFHFHHGGLDKLSDVFQQWKYCTEMQLKDQVAPDKTCMQFSIRRPKLPSSETHPEESMYKRLGVSAWLNHLNELGQVEEEYKLRKVWPFLLRYYSHESTSEEREALRLQKRKEYSEIQQKRLSMTPEEHRAFWRNVQFTVDKDVVRTDRNNQFFRGEDNPNVESMRRILLNYAVYNPAVGYSQGMSDLVAPILAEVLDESDTFWCFVGLMQNTIFVSSPRDEDMEKQL

SEQ ID NO: 89296 - protein, 174 aa, Homo sapiens
MQPPPPGPLGDCLRDWEDLQQDFQNIQETHRLYRLKLEELTKLQNNCTSSITRQKKRLQELALALKKCKPSLPAEAEGAAQELENQMKERQGLFFDMEAYLPKKNGFAYKDEYEKFKLYLTIILILISFTCRFLLNSRVTDAAFNFLLVWYYCTLTIRESILINNGSRIKGWWV

SEQ ID NO: 89297 - protein, 173 aa, Homo sapiens
LLSHDYGDIVAQELLYRYKQNRSGRLTIKSLCLSNGGIFPETHRPLLLQKLLKDGGVLSPILTRLMNFFLWDMWAGIRNNDGNLVIDSLLQYINQRKKFRRRWVGALASVTIPIHFIYGPLDPVNPYPEFLELYRKTLPRSTVSILDDHISHYPQLEDPMGFLNAYMGFINSF

SEQ ID NO: 89298 - protein, 100 aa, Homo sapiens
MEGDGSDPEPPDAGEDSKSENGENAPIYCICRKPDINCFMIGCDNCNEWFHGDCIRITEKMAKAIREWYCRECREKDPKLEIRYRHKKSRERDGNERDSS

SEQ ID NO: 89299 - protein, 426 aa, Homo sapiens
MGKEKTHINIVVIGHVDSGKSTTTGHLIYKCGGIDKRTIEKFEKEAAEMGKGSFKYAWVLDKLKAERERGITIDISLWKFETSKYYVTIIDAPGHRDFIKNMITGTSQADCAVLIVAAGVGEFEAGISKNGQTREHALLAYTLGVKQLIVGVNKMDSTEPPYSQKRYEEIVKEVSTYIKKIGYNPDTVAFVPISGWNGDNMLEPSANMPWFKGWKVTRKDGNASGTTLLEALDCILPPTRPTDKPLRLPLQDVYKIGGIGTVPVPSGDWCSPGMVVTFAPVNVTTEVKSVEMHHEALSEALPGDNVGFNVKNVSVKDVRRGNVAGDSKNDPPMEAAGFTAQVIILNHPGQISAGYAPVLDCHTAHIACKFAELKEKIDRRSGKKLEDGPKFLKSGDAAIVDMVPGKPMCVESFSDYPPLGKSLCCS

SEQ ID NO: 89300 - protein, 353 aa, Homo sapiens
MDRNPSPPPPGRDKEEEEEVAGGDCIGSTVYSKHWLFGVLSGLIQIVSPENTKSSSDDEEQLTELDEEMENEICRVWDMSMDEDVALFLQEFNAPDIFMGVLAKSKCPRLREICVGILGNMACFQEICVSISSDKNLGQVLLHCLYDSDPPTLLETSRLLLTCLSQAEVASVWVERIQEHPAIYDSICFIMSSSTNVDLLVKVGEVVDKLFDLDEKLMLEWVRNGAAQPLDQPQEESEEQPVFRLVPCILEAAKQVRSENPEWLDVYMHILQLLTTVDDGIQAIVHCPDTGKDIWNLLFDLVCHEFCQSDDPPIILQEQKTVLASVFSVLSAIYASQTEQEYLKIEKGKSSSN

SEQ ID NO: 89301 - protein, 303 aa, Homo sapiens
MSASAPAAEGEGTPTQPASEKEPEMPGPREESEEEEDEDDEEEEEEEKEKSLIVEGKREKKKVERLTMQVSSLQREPFTIAQGKGQKLCEIERIHFFLSKKKTDELRNLHKLLYNRPGTPLPKSKKTCSKGSKKERNSSGMARKAKRTKCPEILSDESSSDEDEKKNKEESSDDEDKESEEEPPKKTAKREKPKQKATSKSKKSVKSANVKKADSSTTKKNQNSSKKESESEDSSDDEPLIKKLKKPPTDEELKETIKKLLASANLEEVTMKQICKKVYENYPTYDLTERKDFIKTTVKELIS

SEQ ID NO: 89302 - protein, 450 aa, Homo sapiens
ACRDFLELAEIHSRKWQRALQYEQEQRVHLEETIEQLAKQHNSLERAFHSAPGRPANPSKSFIEGSLLTPKGEDSEEDEDTEYFDAMEDSTSFITVITEAKEDSRKAEGSTGTSSVDWSSADNVLDGASLVPKGSSKVKRRVRIPNKPNYSLNLWSIMKNCIGRELSRIPMPVNFNEPLSMLQRLTEDLEYHHLLDKAVHCTSSVEQMCLVAAFSVSSYSTTVHRIAKPFNPMLGETFELDRLDDMGLRSLCEQVSHHPPSAAHYVFSKHGWSLWQEITISSKFRGKYISIMPLGAIHLEFQASGNHYVWRKSTSTVHNIIVGKLWIDQSGDIEIVNHKTNDRCQLKFLPYSYFSKEAARKGERGEHVLLLRAGPDPQRARGGRSANRQPPAARPAADGEGPLGRGQYREAAAGGEAAPVAAPAAGGLRAGQQLQLGGREGGGCLHATVV

SEQ ID NO: 89303 - protein, 241 aa, Homo sapiens
MAYHSGYGAHGSKHRARAAPDPPPLFDDTSGGYSSQPGGYPATGADVAFSVNHLLGDPMANVAMAYGSSIASHGKDMVHKELHRFVSVSKLKYFFAVDTAYVAKKLGLLVFPYTHQNWEVQYSRDAPLPPRQDLNAPDLYIPTMAFITYVLLAGMALGIQKRMILSVLTGLLFGSDGYYVALAWTSSALMYFIVRSLRTAALGPDSMGGPVPRQRLQLYLTLGAAAFQPLIIYWLTFHLVR

SEQ ID NO: 89304 - protein, 42 aa, Homo sapiens
TSFEDISPQGVSDDSSTGSRVHAKVIYKVCLHSLQSFKTSQP

SEQ ID NO: 89305 - protein, 369 aa, Homo sapiens
MSVKWTSVILLIQLSFCFSSGNCGKVLVWAAEYSHWMNIKTILDELIQRGHEVTVLASSASILFDPNNSSALKIEIYPTSLTKTELENFIMQQIKRWSDLPKDTFWLYFSQVQEIMSIFGDITRKFCKDVVSNKKFMKKVQESRFDVIFADAIFPCSELLAELFNIPFVYSLSFSPGYTFEKHSGGFIFPPSYVPVVMSELTDQMTFMERVKNMIYVLYFDFWFEIFDMKKWDQFYSEVLGRPTTLSETMGKADVWLIRNSWNFQFPYPLLPNVDFVGGLHCKPAKPLPKEMEDFVQSSGENGVVVFSLGSMVSNMTEERANVIASALAQIPQKVLWRFDGNKPDTLGLNTRLYKWIPQNDLLDIKRML

SEQ ID NO: 89306 - protein, 84 aa, Homo sapiens
MGPLQFRDVAIEFSLEEWHCLDTAQRNLYRNVMLENYSNLVFLGIVVSKPDLIAHLEQGKKPLTMKRHEMVANPSDGVNLCHPG

SEQ ID NO: 89307 - protein, 48 aa, Homo sapiens
VGTNLTDIVAQRKITIRELGGCMGPIWSSYYGNCRSLLACAADTSMEN

SEQ ID NO: 89308 - protein, 97 aa, Homo sapiens
MAAAALRDPAQQGYVTFEDVAVYFSQEEWRLLDDAQRLLYRNVMLENFTLLASLGLASSKTHEITQLESWEEPFMPAWEVVTSAIPRGSWWVELREV

SEQ ID NO: 89309 - protein, 368 aa, Homo sapiens
MTTSGALFPSLVPGSRGASNKYLVEFRAGKMSLKGTTVTPDKRKGLVYIQQTDDSLIHFCWKDRTSGNVEDEPKTDQDEEHCRKVNEYLNNPPMPGALGASGSSGHELSALGGEGGLQSLLGNMSHSQLMQLIGPAGLGGLGGLGALTGPGLASLLGSSGPPGSSSSSSSRSQSAAVTPSSTTSSTRATPAPSAPAAASATSPSPAPSSGNGASTAASPTQPIQLSDLQSILATMNVPAGPAGGQQVDLASVLTPEIMAPILANADVQERLLPYLPSGESLPQTADEIQNTLTSPQFQQALGMFSAALASGQLGPLMCQFGLPAEAVEAANKGDVEAFAKAMQNNAKPEQKEGDTKDKKDEEEDMSLD

SEQ ID NO: 89310 - protein, 71 aa, Homo sapiens
LQEDARIRGMSNCSMTPMTSAPRTGSIRPPDSLMTPKLRRLQFSSGEQPSGGRIHNLKTQLFSQSAYYPGP

SEQ ID NO: 89311 - protein, 171 aa, Homo sapiens
MAAPSAGSWSTFQHKELMAADRGRRILGVCGMHPHHQETLKKNRVVLAKQLLLSELLEHLLEKDIITLEMRELIQAKVGSFSQNVELLNLLPKRGPQAFDAFCEALRETKQGHLEDMLLTTLSGLQHVLPPLSCDYDLSLPFPVCESCPLYKKLRLSTEIGSCSVTQAGMQ

SEQ ID NO: 89312 - protein, 1087 aa, Homo sapiens
MASAPAEAETRQRLLRTVKKEVKQIMEEAVTRKFVHEDSSHIISFCAAVEACVLHGLRRRAAGFLRSNKIAALFMKVGKNFPPAEDLSRKVQDLEQLIESARNQIQGLQENVRKLPKLPNLSPLAIKHLWIRTALFEKVLDKIVHYLVENSSKYYEKEALLMDPVDGPILASLLVGPCALEYTKMKTADHFWTDPSADELVQRHRIHSSHVRQDSPTKRPALCIQKRHSSGSMDDRPSLSARDYVESLHQNSRATLLYGKNNVLVQPRDDMEAVPGYLSLHQTADVMTLKWTPNQLMNGSVGDLDYEKSVYWDYAMTIRLEEIVYLHCHQQVDSGGTVVLVSQDGIQRPPFRFPKGGHLLQFLSCLENGLLPHGQLDPPLWSQRGKGKVFPKLRKRSPQGSAESTSSDKDDDEATDYVFRIIYPGMQSEFVAPDFLGSTSSVSVGPAWMMVPAGRSMLVVARGSQWEPARWDTTLPTPSPKEQPPMPQDLMDVSVSNLPSLWQPSPRKSSCSSCSQSGSADGSSTNGCNHERAPLKLLCDNMKYQILSRAFYGWLAYCRHLSTVRTHLSALVNHMIVSPDLPCDAGQGLTARIWEQYLHDSTSYEEQELLRLIYYGGIQPEIRKAVWPFLLGHYQFGMTETERKESSQSCSSGRQNIRLHSDSSSSTQVFESVDEVEQVEAEGRLEEKQPKIPNGNLVNGTCSPDSGHPSSHNFSSGLSEHSEPSLSTEDSVLDAQRNTPTVLRPRDGSVDDRQSSEATTSQDEAPREELAVQDSLESDLLANESMDEFMSITGSLDMALPEKDDVVMEGWRSSETEKHGQADSEDNLSEEPEMESLFPALASLAVTTSANEVSPVSSSGVTYSPELLDLYTVNLHRIEKDVQRCDRNYWYFTPANLEKLRNIMCSYIWQHIEIGYVQGMCDLLAPLLVILDDEALAFSCFTELMKRMNQNFPHGGAMDTHFANMRSLIQILDSELFELMHQNGDYTHFYFCYRWFLLDFKRELVYDDVFLVWETIWAAKHVSSAHYVLFIALALVEVYRDIILENNMDFTDIIKFFNEMAERHNTKQVLKLARDLVYKVQTLIENK

SEQ ID NO: 89313 - protein, 57 aa, Homo sapiens
MTMTANKNSSITHGAGGTKAPRGTLSRSQSVSPPPVLSPPRSPIYPLSDSETSACRY

SEQ ID NO: 89314 - protein, 483 aa, Homo sapiens
MQEGDYTFQLKVTDSSRQQSTAVVTVIVQPENNRPPVAVAGPDKELIFPVESATLDGSSSSDDHGIVFYHWEHVRGPSAVEMENIDKAIATVTGLQVGTYHFRLTVKDQQGLSSTSTLTVAVKKENNSPPRARAGGRHVLVLPNNSITLDGSRSTDDQRIVSYLWIRDGQSPAAGDVIDGSDHSVALQLTNLVEGVYTFHLRVTDSQGASDTDTATVEVQPDPRKSGLVELTLQVGVGQLTEQRKDTLVRQLAVLLNVLDSDIKVQKIRAHSDLSTVIVFYVQSRPPFKVLKAAEVARNLHMRLSKEKADFLLFKVLRVDTAGCLLKCSGHGHCDPLTKRCICSHLWMENLIQRYIWDGESNCEWSIFYVTVLAFTLIVLTGGFTWLCICCCKRQKRTKIRKKTKYTILDNMDEQERMELRPKYGIKHRSTEHNSSLMVSESEFDSDQDTIFSREKMERGNPKVSMNGSIRNGASFSYCSKDR

SEQ ID NO: 89315 - protein, 42 aa, Homo sapiens
MLFSALLLEVIWILAADGGQHWTYEAPPFWISSCLEFHIYGS

SEQ ID NO: 89316 - protein, 39 aa, Homo sapiens
MRLFLSLPVLVVVLSIVLEGSPRLSPAGAKSAQESTSNR

SEQ ID NO: 89317 - protein, 310 aa, Homo sapiens
MRAEEPCAPGAPSALGAQRTPGPELRLSSQLLPELCTFVVRVLFYLGPVYLAGYLGLSITWLLLGALLWMWWRRNRRGKLGRLAAAFEFLDNEREFISRELRGQHLPAWIHFPDVERVEWANKIISQTWPYLSMIMESKFREKLEPKIREKSIHLRTFTFTKLYFGQKCPRVNGVKAHTNTCNRRRVTVDLQICYIGDCEISVELQKIQAGVNGIQLQGTLRVILEPLLVDKPFVGAVTVFFLQKPHLQINWTGLTNLLDAPGINDVSDSLLEDLIATHLVLPNRVTVPVKKGLDLTNLRFPLPCVSTQY

SEQ ID NO: 89318 - protein, 160 aa, Homo sapiens
MLGCICQMGVQEGGPGQLIARHGPQAHVCVHSCLGGACRPCSDAELLLAACTSDFVIHGIIHGVTHDVELQESVITVVAARVLRQTPPLFQAGRSGDQGLTSIRTPLRCGVHPGPGTFLFMGWSRFGEARLGCAPRFQEFRRAYEAARAAHLHPCEVALH

SEQ ID NO: 89319 - protein, 122 aa, Homo sapiens
CPTCNDFHGLVQKIMELQDILAKTSAKLSRAEQRMNRLDQCYCERTCTMKGTTYREFESWIDGCKNCTCLNGTIQCETLICPNPDCPLKSALAYVDGKCCKECKCEHNFYDEYFLWKNKALY

SEQ ID NO: 89320 - protein, 95 aa, Homo sapiens
MSLADLTKTNIDEHFFGVALENNRRSAACKRSPGTGDFSRNSNASNKSVDYSRSQCSCGSLSSQYDYSEDFLCDCSEKAINRNYLKQPVVKEKEK

SEQ ID NO: 89321 - protein, 148 aa, Homo sapiens
MNRSRAIVQRGRVLPPPAPLDTTNLAGRRTLQGRAKMASVPVYCLCRLPYDVTRFMIECDMCQDWFHGSCVGVEEEKAADIDLYHCPNCEVLHGPSIMKKRRGSSKGHDTHKGKPVKTGSPTFVRELRSRTFDSSDEVILKPTGNQLT

SEQ ID NO: 89322 - protein, 172 aa, Homo sapiens
SDARVEAAATWYYSLEHSTDDYASFSRALENATRDYFIICPIIDMASAWAKRARGNVFMYHAPENYGHGRNPNYPYEFSRKVPTFATPWPDFVPRAGGENYKEFSELLPNRQGLKKADCSFWSKYISSLKTSADGAKGGQSAESEEEELTAGSGLREDLLSLQEPGSKTYSK

SEQ ID NO: 89323 - protein, 571 aa, Homo sapiens
MNEAIPSGKETSIELDVHHPPTVTLSIEPQTVQEGERVVFTCQATANPEILGYRWAKGGFLIEDAHESRYETNVDYSFFTEPVSCEVHNKVGSTNVSTLVNVHFAPRIVVDPKPTTTDIGSDVTLTCVWVGNPPLTLTWTKKDSNMGPRPPGSPPEAALSAQVLSNSNQLLLKSVTQADAGTYTCRAIVPRIGVAEREVPLYVNGPPIISSEAVQYAVRGDGGKVECFIGSTPPPDRIAWAWKENFLEVGTLERYTVERTNSGSGVLSTLTINNVMEADFQTHYNCTAWNSFGPGTAIIQLEEREVLPVGIIAGATIGASILLIFFFIALVFFLYRRRKGSRKDVTLRKLDIKVETVNREPLTMHSDREDDTASVSTATRVMKAIYSSFKDDVDLKQDLRCDTIDTREEYEMKDPTNGYYNVRAHEDRPSSRAVLYADYRAPGPARFDGRPSSRLSHSSGYAQLNTYSRGPASDYGPEPTPPGPAAPAGTDTTSQLSYENYEKFNSHPFPGAAGYPTYRLGYPQAPPSGLERTPYEAYDPIGKYATATRFSYTSQHSDYGQRFQQRMQTHV

SEQ ID NO: 89324 - protein, 149 aa, Homo sapiens
MTPDHFPSLFCKEMSVGYANGIRVMSMTHTGEPGFMLYIPIEYALHVYNEVMSVGQKYGIRNAGYYALRSLRIEKFFAFWGQDINNLTTPLECGRESRVKLEKGMDFIGRDALLQQKQNGVYKRLTMFILDDHDSDLDLWPWWGEPIYR

SEQ ID NO: 89325 - protein, 867 aa, Homo sapiens
MAADVVGDVYVLVEHPFEYTGKDGRRVAIRPNERYRLLRRSTEHWWHVRREPGGRPFYLPAQYVRELPALGNPAAAAPPGPHPSPAAPEPLAYDYRFVSAAATAGPDGAPEESGGRTSSLCGPAQRGAATQRSSLAPGLPACLYLRPAAPVRPAQSLNDLACAAVSPPAGLLGSSGSFKACSVAGSWVCPRPLARSDSENVYEVIQDLHVPPREESAEQVDDPPEPVYANIERQPRATSPGAAAAPLPSPVWETHTDAGTGRPYYYNPDTGVTTWESPFEAAEGAASPATSPASVDSHVSLETEWGQYWDEESRRVFFYNPLTGETAWEDEAENEPEEELEMQPGLSPGSPGDPRPPTPETDYPESLTSYPEEDYSPVGSFGEPGPTSPLTTPPGWSCHVSQDKQMLYTNHFTQEQWVRLEDPHGKPYFYNPEDSSVRWELPQVPVPAPRSIHKSSQDGDTPAQASPPEEKTKTLDKAGVLHRTKTADKGKRLRKKHWSASWTVLEGGVLTFFKDSKTSAAGGLRQPSKFSTPEYTVELRGATLSWAPKDKSSRKNVLELRSRDGSEYLIQHDSEAIISTWHKAIAQGIQELSAELPPEESESSRVDFGSSERLGSWQEKEEDARPNAAAPALGPVGLESDLSKVRHKLRKFLQRRPTLQSLREKGYIKDQVFGCALAALCERERSRVPRFVQQCIRAVEARGLDIDGLYRISGNLATIQKLRYKVDHDERLDLDDGRWEDVHVITGALKLFFRELPEPLFPFSHFRQFIAAIKLQDQARRSRCVRDLVRSLPAPNHDTLRMLFQHLCRVIEHGEQNRMSVQSVAIVFGPTLLRPEVEETSMPMTMVFQNQVVELILQQCADIFPPH

SEQ ID NO: 89326 - protein, 280 aa, Homo sapiens
MWFLTTLLLWVPVDGQVDTTKAVITLQPPWVSVFQEETITLHCEVLHLPGSSSTQWFLNGTATQTSTPSYRITSASVNDSGEYRCQRGLSGRSDPIQLEIHRGWLLLQVSSRVFMEGEPLALRCHAWKDKLVYNVLYYRNGKAFKFFHWNSNLTILKTNISHNGTYHCSGMGKHRYTSAGISQYTVKGLQLPTPVWFHVLFYLAVGIMFLVNTVLWVTIRKELKRKKKWNLEISLDSGHEKKVISSLQEDRHLEEELKCQEQKEEQLQEGVHRKEPQGAT

SEQ ID NO: 89327 - protein, 80 aa, Homo sapiens
MAVLAPLIALVYSVPRLSRWLAQPYYLLSALLSAAFLLVRKLPPLCHGLPTQREDGNPCDFDWLSPSCFLLAVVAGMLLP

SEQ ID NO: 89328 - protein, 48 aa, Homo sapiens
MSRSLDSARSFLERLEARGGREGAVLAGEFSEGRGCSRAKRNTEAVAW

SEQ ID NO: 89329 - protein, 138 aa, Homo sapiens
MFLNTLTPKFYVALTGTSSLISGLILIFEWWYFRKYGTSFIEQVSVSHLRPLLGGVDNNSSNNSNSSNGDSDSNRQSVSECKVWRNPLNLFRGAEYNRYTWVTGREPLTYYDMNLSAQDHQTFFTCDSDHLRPADAIM

SEQ ID NO: 89330 - protein, 203 aa, Homo sapiens
MSQTSLKQKKNEPGMRSSKESLEAEKRKESDKTGVRLSNQGSQESSLRKTDSRGYLVRSQWSRISRSPSTKAPSIDEPRSRNTSAKVELPSSPRSSHPRRPSCPGRWTRGLPRPQSPILAPGAAPKCKRIRRPGPKASCGKSARPGTRSRWNIRARPPPSGSPPASAGGSTPPPPSWTATLCPSSSSSSGRTRTTTRLPTGHP

SEQ ID NO: 89331 - protein, 393 aa, Homo sapiens
MALRLLKLAATSASARVVAAGAQRVRGIHSSVQCKLRYGMWHFLLGDKASKRLTERSRVITVDGNICTGKGKLAKEIAEKLGFKHFPEAGIHYPDSTTGDGKPLATDYNGNCSLEKFYDDPRSNDGNSYRLQSWLYSSRLLQYSDALEHLLTTGQGVVLERSIFSDFVFLEAMYNQGFIRKQCVDHYNEVKSVTICDYLPPHLVIYIDVPVPEVQRRIQKKGDPHEMKITSAYLQDIENAYKKTFLPEMSEKCEVLQYSAREAQDSKKVVEDIEYLKFDKGPWLKQDNRTLYHLRLLVQDKFEVLNYTSIPIFLPEVTIGAHQTDRVLHQFREDPSDGLGPTQITQMISQSPAAEALLPAAGPQVQPWVQHRGGRQVDLAEVNGPPSAPAASQ

SEQ ID NO: 89332 - protein, 70 aa, Homo sapiens
MFEACSQGPLNICEEMTILHGGFLLAEQLFHPKALAELTKSDWERVGRPIVEALREISSAAAHSQPFAWK

SEQ ID NO: 89333 - protein, 277 aa, Homo sapiens
MGAGALAICQSKAAVRLKEDMKKIVAVPLNEQKDFTYQKLFGVSLQELERQGLTENGIPAVVWNIVEYLTQHGLTQEGLFRVNGNVKVVEQLRLKFESGVPVELGKDGDVCSAASLLKLFLRELPDSLITSALQPRFIQLFQDGRNDVQESSLRDLIKELPDTHYCLLKYLCQFLTKVAKHHVQNRMNVHNLATVFGPNCFHVPPGLEGMKEQDLCNKIMAKILENYNTLFEVEYTENDHLRCENLARLIIVKVSNLVFNFQYCYNFGQKILFNSFS

SEQ ID NO: 89334 - protein, 171 aa, Homo sapiens
  MOD_RES (1)..(1): Any amino acid
XFTRFEAGKCSVPKAFNTTKTRCCCSKRPGEGWGDPCELCPQEGSDVNECAENPGVCTNGVCVNTDGSFRCECPFGYSLDFTGINCVDTDECSVGHPCGQGTCTNVIGGFECACADGFEPGLMMTCEDIDECSLNPLLCAFRCHNTEGSYLCTCPAGYTLREDGAMCRDVD

SEQ ID NO: 89335 - protein, 20 aa, Homo sapiens
  MOD_RES (1)..(1): Any amino acid
XSFQEFLKCLNPSFNPPEKK

SEQ ID NO: 89336 - protein, 80 aa, Homo sapiens
MTSIIKLTTLSGVQEESALCYLLQVDEFRFLLDCGWDEHFSMDIIDSLRKHVHQIDAVLLSHPDPLHLGALPYAVGKLGL

SEQ ID NO: 89337 - protein, 202 aa, Homo sapiens
MFSPPVSSGKNGPTSLASGHFTGSSKTERGSYSSYGRESNLQGCHQQSLLGGDMDMGNPGTLSPTKPGSQYYQYSSNNPRRRPLHSSAMEVQTKKVRKVPPGLPSSVYAPSASTADYNRDSPGYPSSKPATSTFPSSFFMQDGHHSSDPWSSSSGMNQPGYAGMLGNSSHIPQSSSYCSLHPHERLSYPSHSSADINSSLPP

SEQ ID NO: 89338 - protein, 101 aa, Homo sapiens
MGNTLTCCVSPNASPKLGRRAGSAELYCASDIYEAVSGDAVAVAPAVVEPAELDFGEGEGHHLQHISDREMPEEKESHCVDQAGLELLAWAQAVLPPQPPE

SEQ ID NO: 89339 - protein, 100 aa, Homo sapiens
MGLLVFVRNLLLALCLFLVLGFLYYSAWKLHLLQWEEDSSKYSHSSSPQEKPVADSVVLSFDSAGQTLGSGTVTADWNLWWFITMKKGSGSLTTEMPVAC

SEQ ID NO: 89340 - protein, 375 aa, Homo sapiens; identical to SEQ ID NO: 28371

SEQ ID NO: 89341 - protein, 221 aa, Homo sapiens
MSEEQFGGDGAAAAATAAVGGSAGEQEGAMVAATQGAAAAAGSGAGTGGGTASGGTEGGSAESEGAKIDASKNEEDEGHSNSSPRHSEAATAQREEWKMFIGGLSWDTTKKDLKDYFSKFGEVVDCTLKLDPITGRSRGFGFVLFKESESVDKVMDQKEHKLNGKVIDPKRAKAMKTKEPVKKIFVGGLSPDTPEEKIREYFGGFGEVESIELPMDNKTNK

SEQ ID NO: 89342 - protein, 264 aa, Homo sapiens
MVSKSRWKLLAMLALVLVVMVWYSISREDRYIELFYFPIPEKKEPCLQGEAESKASKLFGNYSRDQPIFLRLEDYFWVKTPSAYELPYGTKGSEDLLLRVLAITSSSIPKNIQSLRCRRCVVVGNGHRLRNSSLGDAINKYDVVIRLNNAPVAGYEGDVGSKTTMRLFYPESAHFDPKVENNPDTLLVLVAFKAMDFHWIETILSDKKRVRKGFWKQPPLIWDVNPKQIRILNPFFMEIAADKLLSLPMQQPRKIKQVMMGSQA

SEQ ID NO: 89343 - protein, 109 aa, Homo sapiens
MIIVAHVLLILLGATEILQADLLPDEKISLLPPVNFTIKVTGLAQVLLQWKPNPDQEQRNVNLEYQVKINAPKEDDYETRITESKCVTILHKGFSASVRTILQNDHSLL

SEQ ID NO: 89344 - protein, 160 aa, Homo sapiens
MTTPAGSGSGFGSVSWWGLSPALDLQAESPPVDPDSQADTVHSNPELDVLLLGSVDGRHLLRTLSRAKFWPRRRFNFFVLENNLEAVARHMLIFSLALEEPEKMGLQERSETFLEVWGNALLRPPVAAFVRAQADLLAHLVPEPDRLEEQLPWLSLRALK

SEQ ID NO: 89345 - protein, 70 aa, Homo sapiens
VLFDHMGCLKKYETVQDILKEFFDLRLSYYGLRKEWLVGMLGAESTKLNNQARFILEKIQGKITIGSRRG

SEQ ID NO: 89346 - protein, 87 aa, Homo sapiens
MEVSSPSPAQRLRRKKRPMVQGPAGCQVFQPSPSGGTAGDPGGLSDPFYPPRSGSLALGDPSSDPACSQSGPMEAEEDSLPEQPEDS

SEQ ID NO: 89347 - protein, 33 aa, Homo sapiens
MSCGNEFVETLKKIGYPKADNLNGEDFDWLFEG

SEQ ID NO: 89348 - protein, 641 aa, Homo sapiens
IEKLLHHTERLYQNAESNNQELRTQVEELSKILQRGRNEDNKKSDVEVQTENHAPWSISDYFYQTYYNDVSLPNKVTELSDQQDQAIETSILNSKDHLQVENDAYPGTDRTENVKYRQVDHFASNSQEPASALATEDTSLEGSSLAESLRAAAEAAVSQTGFSYDENTGLYFDHSTGFYYDSENQLYYDPSTGIYYYCDVESGRYQFHSRVDLQPYPTSSTKQSKDKKLKKKRKDPDSSATNEEKDLNSEDQKAFSVEHTSCNEEENFANMKKKAKIGIHHKNSPPKVTVPTSGNTIESPLHENISNSTSFKDEKIMETDSEPEEGEITDSQTEDSYDEAITSEGNVTAEDSEDEDEDKIWPPCIRVIVIRSPVLQIGSLFIITAVNPATIGREKDMEHTLRIPEVGVSKFHAEIYFDHDLQSYVLVDQGSQNGTIVNGKQILQPKTKCDPYVLEHGDEVKIGETVLSFHIHPGSDTCDGCEPGQVRAHLRLDKKDESFVGPTLSKEEKELERRKELKKIRVKYGLQNTEYEDEKTLKNPKYKDRAGKRREQVGSEGTFQRDDAPASVHSEITDSNKGRKMLEKMGWKKGEGLGKDGGGMKTPENTDPGAEHEDRAGRRRKWKEGSFSLSLILLGLDAGES

SEQ ID NO: 89349 - protein, 198 aa, Homo sapiens
MPELAVQKVVVHPLVLLSVVDHFNRIGKVGNQKRVVGVLLGSWQKKVLDVSNSFAVPFDEDDKDDSVWFLDHDYLENMYGMFKKVNARERIVGWYHTGPKLHKNDIAINELMKRYCPNSVLVIIDVKPKDLGLPTEAYISVEEVHDDGTPTSKTFEHVTSEIGAEEAEEVGVEHLLRCRTSSTCCQMSACRSSSRPFT

SEQ ID NO: 89350 - protein, 247 aa, Homo sapiens
MKTLLLLLLVLLELGEAQGSLHRVPLRRHPSLKKKLRARSQLSEFWKSHNLDMIQFTESCSMDQSAKEPLINYLDMEYFGTISIGSPPQNFTVIFDTGSSNLWVPSVYCTSPACKTHSRFQPSQSSTYSQPGQSFSIQYGTGSLSGIIGADQVSVEGLTVVGQQFGESVTEPGQTFVDAEFDGILGLGYPSLAVGGVTPVFDNMMAQNLVDLPMFSVYMSRTSFSRRLGKVGCNGEYQGLAVRLAWI

SEQ ID NO: 89351 - protein, 103 aa, Homo sapiens
MVGALCGCWFRLGGARPLIPLGPLTTRSAMTSKGPEEEHPSVTLFRQYLRIRTVQPKPDYGGTWLCGDRVDLARHQPYTLLHLAQLPHGCGACLQGTLESRPL

SEQ ID NO: 89352 - protein, 110 aa, Homo sapiens
MDDDANGDVDVEESDEFLREDLNYHDPTVKHSTFHGEDKLISVEDLWKAWKSSEVYNWTVDEVVQWLITYVELPQYEETFRKLQLSGHAMPRLAVTNTTMTGTVLKMTDR

SEQ ID NO: 89353 - protein, 67 aa, Homo sapiens
  MOD_RES (1)..(1): Any amino acid
XNNPNANLMLASGSFDKCVHIWNTQTGALVHSYRGTGGIFEVCWNAAGDKVGASASDGSVCVLDLRK

SEQ ID NO: 89354 - protein, 104 aa, Homo sapiens
MSLWGLVSKMPPEKVQRLYVDFPQHLRHLLGDWLESQPWEFLVGSDAFCCNLASALLSDTVQHLQASVGEQGEGSTILQHISTLESIYQRDPLKLVATFRQILQ

SEQ ID NO: 89355 - protein, 64 aa, Homo sapiens
MSAIQAAWPSGTECIAKYNFHGTAEQDLPFCKGDVLTIVAVTKDPNWYKAKNKVGREGIIPANY

SEQ ID NO: 89356 - protein, 60 aa, Homo sapiens
MLQSYISEIGRSAKSYCEHTARTQPTLSDIVVTLVEMGFNVDTLPAYAKRSQRMVITARK

SEQ ID NO: 89357 - protein, 7 aa, Homo sapiens
MVKLANP

SEQ ID NO: 89358 - protein, 662 aa, Homo sapiens
MMEELHSLDPRRQELLEARFTGVGVSKGPLNSESSNQSLCSVGSLSDKEVETPEKKQNDQRNRKRKAEPYETSQGKGTPRGHKISDYFEAQQNSPSSTGSGNTEHSCSSQKQISIQHRQTQSDLTIEKISALENSKNSDLEKKEGRIDDLLRANCDLRRQIDEQQKMLEKYKERLNRCVTMSKKLLIEKSKQEKMACRDKSMQDRLRLGHFTTVRHGASFTEQWTDGYAFQNLIKQQERINSQREEIERQRKMLAKRKPPAMGQAPPATNEQKQRKSKTNGAENETLTLAEYHEQEEIFKLRLGHLKKEEAEIQAELERLERVRNLHIRELKRIHNEDNSQFKDHPTLNDRYLLLHLLGRGGFSEVYKAFDLTEQRYVAVKIHQLNKNWRDEKKENYHKHACREYRIHKELDHPRIVKLYDYFSLDTDSFCTVLEYCEGNDLDFYLKQHKLMSEKEARSIIMQIVNALKYLNEIKPPIIHYDLKPGNILLVNGTACGEIKITDFGLSKIMDDDSYNSVDGMELTSQGAGTYWYLPPECFVVGKEPPKISNKVDVWSVGVIFYQCLYGRKPFGHNQSQQDILQENTILKATEVQFPPKPVVTPEAKAFIRRCLAYRKEDRIDVQQLACDPYLLPHIRKSVSTSSPAGAAIASTSGASNNSSSN

SEQ ID NO: 89359 - protein, 540 aa, Homo sapiens
MEEEAMNGDRTESDWQGLVSEYLVCKRKLESKKEALLILSKELDTCQQERDQYKLMANQLRERHQSLKKKYRELIDGDPSLPPEKRKQANLAQLLRDSQDRNKHLGEEIKELQQRLGEVQGDNKLLRMTIAKQRLGDEAIGVRHFAAHEREDLVQQLERAKEQIESLEHDLQASVDELQDVKEERSSYQDKVERLNQELNHILSGHENRIIDVDALCMENRYLQERLKQLHEEVNLLKSNIAKYKNALERRKNSKGQGKSSSSALTGVLSAKQVQDLLSEDHGCSLPATPQSISDLKSLATALLETIHEKNMVIQHQRQTNKILGNRVAELEKKLRTLEVSGLWSLPGLSYNVSVGFGRGKDTILFSDPTLPSGQRSRSPLLKFVEQPTENKADPKDGEAQKQEEDESCAAAEALTAPEDAGRPAVNSPANQSRGNQCKLFHPSLPQLPSEEEVNSLGREIIKLTKEQAAAELEEVRRESPIEGQRSETGPAPPGLAIQGELPKSHLDSFEASRPAAKASTPEDGKGIPEGGGMRSTVKT

SEQ ID NO: 89360 - protein, 115 aa, Homo sapiens
MAEDKASVKAQVTSLLGELQESQSRLEAATKECQALEGRARAASEQARQLESEREALQQQHSVQVDQLRMQGQSVEAALRMERQAASEEKRKLAQLQVAYHQLFQEYDNHIKSSV

SEQ ID NO: 89361 - protein, 136 aa, Homo sapiens
MWRLPRALCVHAAKTSKLSGPWSRPAAFMSTLLINQPQYAWLKELGLREENEGVYNGSWGGRGEVITTYCPANNEPIARVRQASVADYEETVKKAREAWKIWADIPAPKRGEIVRQIGDALREKIQVLGSLDLAMH

SEQ ID NO: 89362 - protein, 84 aa, Homo sapiens
MVSPPPGAMEQKFLQDITDAEKYFIGLIYHREEKRWRWINNSVFNGNVTNQNQNFNCATIGLTKTFDAASCDISYRRICEKNAK

SEQ ID NO: 89363 - protein, 24 aa, Homo sapiens
  MOD_RES (1)..(1): Any amino acid
XHVKSVTCPCEYLRKVDGRMATWM

SEQ ID NO: 89364 - protein, 137 aa, Homo sapiens
MGSRNSSSAGSGSGDPSEGLPRRGAGLRRSEEEEEEDEDVDLAQVLAYLLRRPSWTQRKRMTELGMVVLGIDTTHLWMLPLTPGSWNSMRSRHKWNWPQGSWGLGGPPRSTAFLECCTRENGASAIGEASPLENSLE

SEQ ID NO: 89365 - protein, 880 aa, Homo sapiens
DDGDDDDDDRGSDGLSIHKCMSCSSYRESQEKVMNDSDTHENSLMDQNNPISYSLSENSEEDNRVTSVSSDSQTGMDRSPGKSPSANGLSQKHNDGKEENDIQTGSALLPLSPESKAWAVLTSDEESGSGQGTSDSLNENETSTDFSFADTNEKDADGILAAGDSEITPGFPQSPTSSVTSENSEVFHVSEAEASNSSHESRIGLAEGLESEKKAVIPLVIVSALTFICLVVLVGILIYWRKCFQTAHFYLEDSTSPRVISTPPTPIFPISDDVGAIPIKHFPKHVADLHASSGFTEEFEEVQSCTVDLGITADSSNHPDNKHKNRYINIVAYDHSRVKLAQLAEKDGKLTDYINANYVDRKCDQYWPADGSEEYGNFLVTQKSVQVLAYYTVRNFTLRNTKIKKGSQKGRPSGRVVTQYHYTQWPDMGVPEYSLPVLTFVRKAAYAKRHAVGPVVVHCSAGVGRTGTYIVLDSMLQQIQHEGTVNIFGFLKHIRSQRNYLVQTEEQYVFIHDTLVEAILSKETEVLDSHIHAYVNALLIPGPAGKTKLEKQFQGLTLSPRLECRGTISAHCNLPLPGLTDPPTSASRVARTILLSQSNIQQSDYSAALKQCNREKNRTSSIIPVERSRVGISSLSGEGTDYINASYIMGYYQSNEFIITQHPLLHTIKDFWRMIWDHNAQLVVMIPDGQNMAEDEFVYWPNKDEPINCESFKVTLMAEEHKCLSNEEKLIIQDFILEATQDDYVLEVRHFQCPKWPNPDSPISKTFELISVIKEEAANRDGPMIVHDEHGGVTAGTFCALTTLMHQLEKENSVDVYQVAKMINLMRPGVFADIEQYQFLYKVILSLVSTRQEENPSTSLDSNGAALPDGNIAESLESLV

SEQ ID NO: 89366 - protein, 138 aa, Homo sapiens
  MOD_RES (1)..(1): Any amino acid
XSVTNDSGPRLVSIAGTRPSVRNGQLLVSTGLPALDQLLGGGLAVGTVLLIEEDKYNIYSPLLFKYFLAEGIVNGHTLLVASAKEDPANILQGLALSPRLECSGTVLAHCSPCLQDSRDLPTSASQVAETVGTSSTIT

SEQ ID NO: 89367 - protein, 92 aa, Homo sapiens
  MOD_RES (1)..(1): Any amino acid
XTKSNKDGGNQEVEIARCHKGQYFGELALVTNKPRAASAYAVGDVKCLVMDVQAFERLLGPCMDIMKRNISHYEEQLVKMFGSSVDLGNLGQ

SEQ ID NO: 89368 - protein, 277 aa, Homo sapiens
MLSEEDGQYFLKVLIPSYAAGSIIGKGGQTIVQLQKETGATIKLSKSKDFYPGTTERVCLIQGTVEALNAVHGFIAEKIREMPQNVAKTEPVSILQPQTTVNPDRIKQTLPSSPTTTKSSPSDPMTTSRANQVKIIVPNSTAGLIIGKGGATVKAVMEQSGAWVQLSQKPDGINLQERVVTVSGEPEQNRKAVELIIQKIQEDPQSGSCLNISYANVTGPVANSNPTGSPYANTAEVLPTAAAAAGLLGHANLAGVAAFPAVLSGFTGNDLVAITSA

SEQ ID NO: 89369 - protein, 160 aa, Homo sapiens
MAVKWTGGHSSPVLCLNASKEGLLASGAEGGDLTAWGEDGTPLGHTRFQGADDVTSVLFSPSCPTKLYASHGETISVLDVRSLKDSLDHFHVNEEEINCLSLNQTENLLASADDSGAIKILDLENKKVIRSLKRHSNICSSVAFRPQRPQSLVSCGLDMQ

SEQ ID NO: 89370 - protein, 882 aa, Homo sapiens
SYLTLDEPMNNITTSLGQTAELHCKVSGNPPPTIRWFKNDAPVVQEPRRLSFRSTIYGSRLRIRNLDTTDTGYFQCVATNGKEVVSSTGVLFVKFGPPPTASPGYSDEYEEDGFCQPYRGIACARFIGNRTVYMESLHMQGEIENQITAAFTMIGTSSHLSDKCSQFAIPSLCHYAFPYCDETSSVPKPRDLCRDECEILENVLCQTEYIFARSNPMILMRLKLPNCEDLPQPESPEAANCIRIGIPMADPINKNHKCYNSTGVDYRGTVSVTKSGRQCQPWNSQYPHTHTFTALRFPELNGGHSYCRNPGNQKEAPWCFTLDENFKSDLCDIPACDSKDSKEKNKMEILYILVPSVAIPLAIALLFFFICVCRNNQKSSSAPVQRQPKHVRGQNVEMSMLNAYKPKSKAKELPLSAVRFMEELGECAFGKIYKGHLYLPGMDHAQLVAIKTLKDYNNPQQWTEFQQEASLMAELHHPNIVCLLGAVTQEQPVCMLFEYINQGDLHEFLIMRSPHSDVGCSSDEDGTVKSSLDHGDFLHIAIQIAAGMEYLSSHFFVHKDLAARNILIGEQLHVKISDLGLSREIYSADYYRVQSKSLLPIRWMPPEAIMYGKFSSDSDIWSFGVVLWEIFSFGLQPYYGFSNQEVIEMVRKRQLLPCSEDCPPRMYSLMTECWNEIPSRRPRFKDIHVRLRSWEGLSSHTSSTTPSGGNATTQTTSLSASPVSNLSNPRYPNYMFPSQGITPQGQIAGFIGPPIPQNQRFIPINGYPIPPGYAAFPAAHYQPTGPPRVIQHCPPPKSRSPSSASGSTSTGHVTSLPSSGSNQEANIPLLPHMSIPNHPGGMGITVFGNKSQKPYKIDSKQASLLGDANIHGHTESMISAEL

SEQ ID NO: 89371 - protein, 294 aa, Homo sapiens
IATFWNKAFLTIIILLIVLFLDAVREVRKYSSVHTIEKSSTSRPDAYEHTQMKLFRSQRNLYISGFSLFFWLVLRRLVTLITQLAKELSNKGVLKTQAENTNKAAKKFMEENEKLKRILKSHGKDEECVLEAENKKLVEDQEKLKTELRKTSDALSKAQNDVMEMKMQSERLSKEYDQLLKEHSELQKQREILPHRRGESTVTTEAEIGVMEPQQRNADSHQKLEEAKNRFFPRASSSRSMALQIPIKLILDFLASRTMGINLLFQAIKFVIICYCCHSKLIQEHAGQICNGLN

SEQ ID NO: 89372 - protein, 305 aa, Homo sapiens
MEDSMDMDMSPLRPQNYLFGCELKADKDYHFKVDNDENEHQLSLRTVSLGAGAKDELHIVEAEAMNYEGSPIKVTLATLKMSVQPTVSLGGFEITPPVVLRLKCGSGPVHISGQHLVAVEEDAESEDEEEEDVKLLSISGKRSAPGGGSKVPQKKVKLAADEDDDDDDEEDDDEDDDDDDFDDEEAEEKAPVKKSIRDTPAKNAQKSNQNGKDSKPSSTPRSKGQESFKKQEKTPKTPKGPSSVEDIKAKMQASIEKFLACIHNLKEMGGSLPKVEAKFINYVKNCFRMTDQEAIQDLWQWRKSL

SEQ ID NO: 89373 - protein, 172 aa, Homo sapiens
MPLFLLSLPTPPSASGHERRQRPEAKTSGSEKKYLRAMQANRSQLHSPPGTGSSEDASTPQCVHTRLTGEGSCPHSGDVHIQINSIPKECAENASSRNIRSGVHSCAHGCVHSRLRGHSHSEARLTDDTAAESGDHGSSSFSEFRYLFKWLQKSLPYILILSVKLVMQHITA

SEQ ID NO: 89374 - protein, 37 aa, Homo sapiens
MATRGHVQDPNDRRLRPIYVEMGFHRVSQDGLDLLTS

SEQ ID NO: 89375 - protein, 220 aa, Homo sapiens
  MOD_RES (1)..(1): Any amino acid
XSAVAATSTINTPFGAMVYSPRTGIILNNELLDLCERCPRGSGTTPSPVSGDRVGGAPGRCWPPVPGERSPSSMVPSILINKAQGSKLVIGGAGGELIISAVAQAIMSKLWLGFDLRAAIAAPILHVNSKGCVEYEPNFSQKQDLAALPRLVSNSWPQVILLPQPPKLLALQEVQRGLQDRGQNQTQRPFFLNVVQAVSQEGACVYAVSDLRKSGEAAGY

SEQ ID NO: 89376 - protein, 46 aa, Homo sapiens
MTCWLRGVTATFGRPAEWPGYLSHLCGRSAAMDLGPMRKSYRGDRE

SEQ ID NO: 89377 - protein, 944 aa, Homo sapiens
MSLTIRAPSVDYRNTLGLCGTFDENPENDFHDKNGMQIDQNFNNYVAFINEWRILPGKSMSDTLPVSMTSPGKPSYCSCSLDTAAYPSSEDLDSVSRSEIALGCKDLNHVSLSSLIPELDVTSEYINSDTLVREINKHTSPEEYNLNLFLQEKKHINLTKLGLNVQKHPGNEKEDSLQYLANKKYTQGRGSHSQEMRYNRQNRWKRQNFHEFPPLFAFPSLSQTDLEELTYFFPEDHAEDVQQEFFPSWPTPSGLTEYSTLTLCQETLANSSIGRLCLAFLGKRLDSVIEMCVKDVLLKDDLSWAEAGVALLENECEKRIVEEGKYNTEEYGTSIEDILSVLKCPNLCSGNGQCMEWGCACSPSFSSYDCSDSYDKAPEITELGNAGFCDVQKYNCMMVRVFGKGFKELPSIKCEVTKLQYNSSEWMPGEPIYTQTVFHNSRAVDCQLPTDVQQFDTMDLVGGKPTGKWQLKVSNDGYKFSNPKITVIYDGACQVCGLYKNDSCTIKENVCIIDGLCYVEGDKNPTSPCLICRPKISRFTWSFLENNQPPVIQALQDKLQTFYGENFEYQFVAFDPEGSDIHFTLDSGPEGASVSSAGLFMWKTDLLTTQQITVRLNDDCDAETRVTIEVTVKSCDCLNGGSCVSDRNFSPGSGVYLCVCLPGFHGSLCEVDISGCQSNPCGLGSYISGFHSYSCDCPPELKVETQFVNQFTTQTVVLTRSDKSVNKEEDDKNAQGRKRHVKPTSGNAFTICKYPCGKSRECVAPNICKCKPGYIGSNCQTALCDPDCKNHGKCIKPNICQCLPGHGGATCDEEHCNPPCQHGGTCLAGNLCTCPYGFVGPRCETMVCNRHCENGGQCLTPDICQCKPGWYGPTCSTALCDPVCLNGGSCNKPNTCLCPNGFFGEHCQNAFCHPPCKNGGHCMRNNVCVCREGYTGRRFQKRHL

SEQ ID NO: 89378 - protein, 52 aa, Homo sapiens
MNKPSDGRPKYLVVNADEGEPGTCKDREILRHDPHKLLEGCLVGGRAMGARA

SEQ ID NO: 89379 - protein, 326 aa, Homo sapiens
MQGARAPRDQGQSPGRMSALGRSSVILLTYVLAATELTCLFMQFSIVPYLSRKLGLDSIAFGYLQTTFGVLQLLGGPVFGRIQCPAILAALATLLGAVLSFTCIPASTKGAKTDAQAPLPGGPRASVFDLKAIASLLRLPDVPRIFLVKVASNCPTGLFMVMFSIISMDFFQLEAAQAGYLMSFFGLLQMVTQGLVIGQLSSHFSEEVLLRASVLVFIVVGLAMAWMSSVFHFCLLVPGLVFSLCTLNVVTDSMLIKAVSTSDTGTMLGLCASVQPLLRTLGPTVGGLLYRSFGVPVFGHVQVAINTLVLLVLWRKPMPQRKDKVR

SEQ ID NO: 89380 - protein, 324 aa, Homo sapiens
MAFPHLQQPSFLLASLKADSINKPFAQQCQDLVKVIEDFPAKELHTIFPWLVESIFGSLDGVLVGWNLRCLQGRVNPVEYSIVMEFLDPGGPMMKLVYKLQAEDYKFDFPVSYLPGPVKASIQECILPDSPLYHNKVQFTPTGGLGLNLALNPFEYYIFFFALSLITQKPLPVSLHVRTSDCAYFILVDRYLSWFLPTEGSVPPPLSSSPGGTSPSPPPRTPAIPFASYGLHHTSLLKRHISHQTSVNADPASHEIWRSETLLQVFVEMWLHHYSLEMYQKMQSPHAKLEVLHYRLSVSSALYSPAQPSLQALHAYQVPGQQRK

SEQ ID NO: 89381 - protein, 183 aa, Homo sapiens
MWAITSEERTKHDRQFDNLKPSGGYITGDQARNFFLQSGLPAPVLAEIWALSDLNKDGKMDQQEFSIAMKLIKLKLQGQQLPVVLPPIMKQPPMFSPLISARFGMGSMPNLSIPQPLPPAAPITSLSSATSGTNLPPLMMPTPLVPSVSTSSLPNGTASLIQPLPIPYSSSTLPHGSSYSLMM

SEQ ID NO: 89382 - protein, 106 aa, Homo sapiens
  MOD_RES (1)..(1): Any amino acid
XTIVDTPGFGDAVNNTECWKPITDYVDQQFEQYFRDESGLNRKNIQDNRVHCCLYFISPFGHGEIRKLKERIREEIDKFGIHVYQFPECDSDEDEDFKQQDRELKV

SEQ ID NO: 89383 - protein, 332 aa, Homo sapiens
  MOD_RES (1)..(1): Any amino acid
XQLTLETYQEWCNDSAATHDPLSQLPAPQHPKIRLYNAEQVLSWEPVALSNSTRPVVYQVQFKYTDSKWFTADIMSIGVNCTQITATECDFTAASPSAGFPMDFNVTLRLRAELGALHSAWVTMPWFQHYRNVTVGPPENIEVTPGEGSLIIRFSSPFDIADTSTAFFCYYVHYWEKGGIQQVKGPFRSNSISLDNLKPSRVYCLQVQAQLLWNKSNIFRVGHLSNISCYETMADASTELQQVILISVGTFSLLSVLAGACFFLVLKYRGLIKYWFHTPPSIPLQIEEYLKDPTQPILEALDKDSSPKDDVWDSVSIISFPEKEQEDVLQTL

SEQ ID NO: 89384 - protein, 206 aa, Homo sapiens
MDQMGKMRPQPYGGTNPYSQQQGPPSGPQQGHGYPGQPYGSQTPQRYPMTMQGRAQSAMGGLSYTQQIPPYGQQGPSGYGQQGQTPYYNQQSPHPQQQQPPYSQQPPSQTPHAQPSYQQQPQSQPPQLQSSQPPYSQQPSQPPHQQSPAPYPSQQSTTQQHPQSQPPYSQPQAQSPYQQQQPQQPAPSTLSQQAAYPQPQSQQSQQ

SEQ ID NO: 89385 - protein, 38 aa, Homo sapiens
MAPFLRIAFNSYELGSLQAEDEANQPFCAVKMKEALST

SEQ ID NO: 89386 - protein, 104 aa, Homo sapiens
MPGHNTSRNSSCDPIVTPHLISLYFIVLIGGLVGVISILFLLVKMNTRSVTTMAVINLVVVHSVFLLTVPFRLTYLIKKTWMFGLPFCKFVSAMLHIHMYLTFL

SEQ ID NO: 89387 - protein, 227 aa, Homo sapiens
MKENKENSSPSVTSANLDHTKPCWYWDKKDLAHTPSQLEGLDPATEARYRREGARFIFDVGTRLGLHYDTLATGIIYFHRFYMFHSFKQFPRYVTGACCLFLAGKVEETPKKCKDIIKTARSLLNDVQFGQFGDDPKEEVMVLERILLQTIKFDLQVEHPYQFLLKYAKQLKGDKNKIQKLVQMAWTFVNDSLCTTLSLQWEPEIIAVAVMYLAGRLCKFEIQEWTS

SEQ ID NO: 89388 - protein, 665 aa, Homo sapiens
MVPWVRTMGQKLKQRLRLDVGREICRQYPLFCFLLLCLSAASLLLNRYIHILMIFWSFVAGVVTFYCSLGPDSLLPNIFFTIKYKPKQLGLQELFPQGHSCAVCGKVKCKRHRPSLLLENYQPWLDLKISSKVDASLSEVLELVLENFVYPWYRDVTDDESFVDELRITLRFFASVLIRRIHKVDIPSIITKKLLKAAMKHIEVIVKARQKVKNTEFLQQAALEEYGPELHVALRSRRDELHYLRKLTELLFPYILPPKATDCRSLTLLIREILSGSVFLPSLDFLADPDTVNHLLIIFIDDSPPEKATEPASPLVPFLQKFAEPRNKKPSVLKLELKQIREQQDLLFRFMNFLKQEGAVHVLQFCLTVEEFNDRILRPELSNDEMLSLHEELQKIYKTYCLDESIDKIRFDPFIVEEIQRRKIIKSVPGKLMKEKGQHLEPFIMNFINSCESPKPKPSRPELTILSPTSENNKKLFNDLFKNNANRAENTERKQNQNYFMEVMTVEGVYDYLMYVGRVVFQVPDWLHHLLMGTRILFKNTLEMYTDYYLQCKLEQLFQEHRLVSLITLLRDAIFCENTEPRSLQDKQKGAKQTFEEMMNYIPDLLVKCIGEETKYESIRLLFDGLQQPVLNKQLTYVLLDIVIQELFPELNKVQKEVTSVTSWM

SEQ ID NO: 89389 - protein, 116 aa, Homo sapiens
ARTRKTLNHPLLFPRGLRSRNPKRVLMDWPCPTTTVTSAWGTQRLTRRRDNPRSWCPVLTVAAQDQLLFCDDCDRGYHMYCLTPSMSEPPEGSWSCHLCLDLLKEKASIYQNQNSS

SEQ ID NO: 89390 - protein, 51 aa, Homo sapiens
MAEAVLRVARRQLSQRGGSGAPILLRQVRVAGPRRGLLGTRRQQGRNSGVS

SEQ ID NO: 89391 - protein, 70 aa, Homo sapiens
MAMDEYLWMVILGFIIAFILAFSVGANDVANSFGTAVGSGVVTLRQACILASIFETTGSVLLGAKVGETI

SEQ ID NO: 89392 - protein, 105 aa, Homo sapiens
  MOD_RES (1)..(1): Any amino acid
XTLRTGPALLSVRKFTEKHEWVTTENGIGTVGISNFAQEALGDVVYCSLPEVGTKLNKQDEFGALESVKAASELYSPLSGEVTEINEALAENPGLVNKSCYEDVS

SEQ ID NO: 89393 - protein, 319 aa, Homo sapiens
  MOD_RES (1)..(1): Any amino acid
XVLVGHLHLRILHLANNQLQTFPASKLNKLEQLEELNLSGNKLKTIPTTIANCKRLHTLVAHSNNISIFPEILQLPQIQFVDLSCNDLTEILIPEALPATLQDLDLTGNTNLVLEHKTLDIFSHITTLKIDQKPLPTTDSTVTSTFWSHGLAEMAGQRNKLCVSALAMDSFAEGVGAVYGMFDGDRNEELPRLLQCTMADVLLEEVQQSTNDTVFMANTFLVSHRKLGMAGQKLGSSALLCYIRPDTADPASSFSLTVANVGTCQAVLCRGGKPVPLSKVFSLEQDPEEAQRVKDQKAIITENWVLNQKHLQDFPGEDK

SEQ ID NO: 89394 - protein, 70 aa, Homo sapiens
MDCRVHMRPIGLTWVLQLTLAWILLEACGGSRPLQARSQQHHGLAADLGKGKLHLAEMDTTETSGPGNHP

SEQ ID NO: 89395 - protein, 77 aa, Homo sapiens
MKATIILLLLAQVSWAGPFQQRGLFDFMLEDEASGIGPEVPDDRDFEPSLGPVCPFRCQCHLRVVQCSDLGIDSCQQ

SEQ ID NO: 89396 - protein, 21 aa, Homo sapiens
MGFNLTFHLSYKFRLLLLLTL

SEQ ID NO: 89397 - protein, 202 aa, Homo sapiens
AGAGGGAAAVAAGGVVTTTASGKRIRKNHACEMCGKAFRDVYHLNRHKLSHSDEKPYQCPVCQQRFKRKDRMSYHVRSHDGAVHKPYNCSHCGKSFSRPDHLNSHVRQVHSTERPFKCEKCEAAFATKDRLRAHTVRHEEKVPCHVCGKMLSSAYISDHMKVHSQGPHHVCELCNKGTCRGLPGGPGAEGGRLARRLATDTG

SEQ ID NO: 89398 - protein, 43 aa, Homo sapiens
MRRTAFILGSGLLSFVAFWNSVTWCHPSALSLLLELQWASIGG

SEQ ID NO: 89399 - protein, 229 aa, Homo sapiens
MATNESVSIFSSASLAVEYVDSLLPENPLQEPFKNAWNYMLNNYTKFQIATWGSLIVHEALYFLFCLPGFLFQFIPYMKKYKIQKDKPETWENQWKCFKVLLFNHFCIQLPLICGTYYFTEYFNIPYDWERMPRWYFLLARCFGCAVIEDTWHYFLHRLLHHKRIYKYIHKVHHEFQAPFGMEAEYAHPLETLILGTGFFIGIVLLCDHVILLWAWVTIRLLETIDVHR

SEQ ID NO: 89400 - protein, 2168 aa, Homo sapiens
MLRAFVQPGTPAYQPLPSHLSANTEVKFKGTLVHEAQLNYFYISPGGSNYGSPRPAHANMNANAAAGLAPEHIPTPGAALSWQAAIDAARQAKLMGSAGNATISTVSSTQRKRQQYGKPKKQGSTTATRPPRALLCLTLKNPIRRACISIVEWKPFEIIILLTIFANCVALAIYIPFPEDDSNATNSNLERVEYLFLIIFTVEAFLKVIAYGLLFHPNAYLRNGWNLLDFIIVVVGLFSAILEQATKADGANALGGKGAGFDVKALRAFRVLRPLRLVSGVPSLQVVLNSIIKAMVPLLHIALLVLFVIIIYAIIGLELFMGKMHKTCYNQEGIADVPAEDDPSPCALETGHGRQCQNGTVCKPGWDGPKHGITNFDNFAFAMLTVFQCITMEGWTDVLYWMQDAMGYELPWVYFVSLVIFGSFFVLNLVLGVLSGEFSKEREKAKARGDFQKLREKQQLEEDLKGYLDWITQAEDIDPENEDEGMDEEKPRNMSMPTSETESVNTENVAGGDIEGENCGARLAHRISKSKFSRYWRRWNRFCRRKCRAAVKSNVFYWLVIFLVFLNTLTIASEHYNQPNWLTEVQDTANKALLALFTAEMLLKMYSLGLQAYFVSLFNRFDCFVVCGGILETILVETKIMSPLGISVLRCVRLLRIFKITRYWNSLSNLVASLLNSVRSIASLLLLLFLFIIIFSLLGMQLFGGKFNFDEMQTRRSTFDNFPQSLLTVFQILTGEDWNSVMYDGIMAYGGPSFPGMLVCIYFIILFICGNYILLNVFLAIAVDNLADAESLTSAQKEEEEEKERKKLARTASPEKKQELVEKPAVGESKEEKIELKSITADGESPPATKINMDDLQPNENEDKSPYPNPETTGEEDEEEPEMPVGPRPRPLSELHLKEKAVPMPEASAFFIFSSNNRFRLQCHRIVNDTIFTNLILFFILLSSISLAAEDPVQHTSFRNHILFYFDIVFTTIFTIEIALKMTAYGAFLHKGSFCRNYFNILDLLVVSVSLISFGIQSSAINVVKILRVLRVLRPLRAINRAKGLKHVVQCVFVAIRTIGNIVIVTTLLQFMFACIGVQLFKGKLYTCSDSSKQTEAECKGNYITYKDGEVDHPIIQPRSWENSKFDFDNVLAAMMALFTVSTFEGWPELLYRSIDSHTEDKGPIYNYRVEISIFFIIYIIIIAFFMMNIFVGFVIVTFQEQGEQEYKNCELDKNQRQCVEYALKARPLRRYIPKNQHQYKVWYVVNSTYFEYLMFVLILLNTICLAMQHYGQSCLFKIAMNILNMLFTGLFTVEMILKLIAFKPKGYFSDPWNVFDFLIVIGSIIDVILSETNPAEHTQCSPSMNAEENSRISITFFRLFRVMRLVKLLSRGEGIRTLLWTFIKSFQALPYVALLIVMLFFIYAVIGMQVFGKIALNDTTEINRNNNFQTFPQAVLLLFRCATGEAWQDIMLACMPGKKCAPESEPSNSTEGETPCGSSFAVFYFISFYMLCAFLIINLFVAVIMDNFDYLTRDWSILGPHHLDEFKRIWAEYDPEAKGRIKHLDVVTLLRRIQPPLGFGKLCPHRVACKRLVSMNMPLNSDGTVMFNATLFALVRTALRIKTEGNLEQANEELRAIIKKIWKRTSMKLLDQVVPPAGDDEVTVGKFYATFLIQEYFRKFKKRKEQGLVGKPSQRNALSLQAGLRTLHDIGPEIRRAISGDLTAEEELDKAMKEAVSAASEDDIFRRAGGLFGNHVSYYQSDGRSAFPQTFTTQRPLHINKAGSSQGDTESPSHEKLVDSTFTPSSYSSTGSNANINNANNTALGRLPRPAGYPSTVSTVEGHGPPLSPAIRVQEVAWKLSSNRCHSRESQAAMAGQEETSQDETYEVKMNHDTEACSEPSLLSTEMLSYQDDENRQLTLPEEDKRDIRQSPKRGFLRSASLGRRASFHLECLKRQKDRGGDISQKTVLPLHLVHHQALAVAGLSPLLQRSHSPASFPRPFATPPATPGSRGWPPQPVPTLRLEGVESSEKLNSSFPSIHCGSWAETTPGGGGSSAARRVRPVSLMVPSQAGAPGRQFHGSASSLVEAVLISEGLGQFAQDPKFIEVTTQELADACDMTIEEMESAADNILSGGAPQSPNGALLPFVNCRDAGQDRAGGEEDAGCVRARGRPSEEELQDSRVYVSSL

SEQ ID NO: 89401 - protein, 74 aa, Homo sapiens
MGTTEATLRMENVDVKEEWQDEDLPSQELLCTILGTTKSKIHRAGWKLSGHSQKRRGWNCLAARWKTHPLLPTR

SEQ ID NO: 89402 - protein, 353 aa, Homo sapiens
MKHSRDPNAVTVSWPSARSLLDGYIISISSESLMREEILPSTKRTFTFNSLSPGTDFLISIMTNKGLKRSHPTVLMVSTYPDPSDLLIWGQEENTICLSWKLSEGGFEKFQISYCMPSRQEKLIKVIVYGNKAKVKKLTLGMDYMFQVKKVKGKGYSVSVMKKVPIKPSRICGLILKAVNISSNLMWNTTEINFTHYKIYISNRTFAKDCLIWEVVTEHTVTDVTPGVIYNIMVHRIRGNLGGCGMFTRVVAEPEQPEKLRAFNISTHSFSLHWSLPSGHVERYQVDLVPDSGFVTIRDLGGGEYQVDVSNVVPGTRYDITISSISTTYTSPVTRIVTTNVTKPGPPVFLAGE

SEQ ID NO: 89403 - protein, 260 aa, Homo sapiens
MGLRYVLPLRPPGKTFTAWCNSHLRKAGTQIENIEEDFRDGLKLMLLLEVISGERLAKPERGKMRVHKISNVNKALDFIASKGVKLVSIGAEEIVDGNVKMTLGMIWTIILRFAIQDISVEETSAKEGLLLWCQRKTAPYKNVNIQNFHISWKDGLGFCALIHRHRPELIDYGKLRKDDPLTNLNTAFDVAEKYLDIPKMLDAEDIVGTARPDEKAIMTYVSSFYHAFSGAQKAETAANRICKVLAVNQENEQLMEDYEK

SEQ ID NO: 89404 - protein, 152 aa, Homo sapiens
MAEQLMTLAYDNGINLFDTAEVYAAGKAEVVLGNIIKKKGWRRSSLVITTKIFWGGKAETERGLSRKHIIEGLKASLERLQLEYVDVVFANRPDPNTPMEETVRAMTHVINQGMAMYWGTSRWSSMEIMEAYSVARQFNLTPPICEQAEYHM

SEQ ID NO: 89405 - protein, 192 aa, Homo sapiens
MAAASSSDSDACGAESNEANSKWLDAHYDPMANIHTFSACLALADLHGDGEYKDRIDPLTLKEMLESIRETAEEPLSIQSLRFLQLELSEMEAFVNQHKSNSIKRQTVITTMTTLKKNLADEDAVSCLVLGTENKELLVLDPEAFTILAKMSLPSVPVFLEVSGQFDVEFRLAAACRNGNIYILRRDSKHPK

SEQ ID NO: 89406 - protein, 141 aa, Homo sapiens
VSTSQRHRPLLSSCGLPPSTASAVRRLCSRGVLKGSNERRDMESFWKLNRSPGSDRYLESRDASRLSGRDPSSWTVEDVMQFVREADPQLGPHADLFRKHEIDGKALLLLRSDMMMKYMGLKLGPALKLSYHIDRLKQGKF

SEQ ID NO: 89407 - protein, 84 aa, Homo sapiens
MQEITKHFVVCHVDAPGQQVGASQFPQGYQFPSMEQLAAMLPSVVQHFGFKYVIGIGVGAGAYVLAKFALIFPDLVEGLVLVNI

SEQ ID NO: 89408 - protein, 139 aa, Homo sapiens
MTEEACRTRSQKRALERDPTEDDVESKKIKMERGLLASDLNTDGDMRVTPEPGAGPTQGLLRATEATAMAMGRGEGLVGDGPVDMRTSHSDMKSERRPPSPDVIVLSDNEQPSSPRVNGLTTVALKETSTEALMKSSPE

SEQ ID NO: 89409 - protein, 96 aa, Homo sapiens
MPSFICLYLCSKSLLGFGEQSTMTTESGSDSESKPDQEAEPQEAAGAQGRAGAPVPEPPKEEQQQALEQFAAAAAHSTPVRREVTDKEQEFAARAA

SEQ ID NO: 89410 - protein, 1777 aa, Homo sapiens
MRPRTKARSPGRALRNPWRGFLPLTLALFVGAGHAQRDPVGRYEPAGGDANRLRRPGGSYPAAAAAKVYSLFREQDAPVAGLQPVERAQPGWGSPRRPTEAEARRPSRAQQSRRVQPPAQTRRSTPLGQQQPAPRTRAAPALPRLGTPQRSGAAPPTPPRGRLTGRNVCGGQCCPGWTTANSTNHCIKPVCEPPCQNRGSCSRPQLCVCRSGFRGARCEEVIPDEEFDPQNSRLAPRRWAERSPNLRRSSAAGEGTLARAQPPAPQSPPAPQSPPAGTLSGLSQTHPSQQHVGLSRTVRLHPTATASSQLSSNALPPGPGLEQRDGTQQAVPLEHPSSPWGLNLTEKIKKIKIVFTPTICKQTCARGHCANSCERGDTTTLYSQGGHGHDPKSGFRIYFCQIPCLNGGRCIGRDECWCPANSTGKFCHLPIPQPDREPPGRGSRPRALLEAPLKQSTFTLPLSNQLASVNPSLVKVHIHHPPEASVQIHQVAQVRGGVEEALVENSVETRPPPWLPASPGHSLWDSNNIPARSGEPPRPLPPAAPRPRGLLGRCYLNTVNGQCANPLLELTTQEDCCGSVGAFWGVTLCAPCPPRPASPVIENGQLECPQGYKRLNLTHCQDINECLTLGLCKDAECVNTRGSYLCTCRPGLMLDPSRSRCVSDKAISMLQGLCYRSLGPGTCTLPLAQRITKQICCCSRVGKAWGSECEKCPLPGTEAFREICPAGHGYTYASSDIRLSMRKAEEEELARPPREQGQRSSGALPGPAERQPLRVVTDTWLEAGTIPDKGDSQAGQVTTSVTHAPAWVTGNATTPPMPEQGIAEIQEEQVTPSTDVLVTLSTPGIDRCAAGATNVCGPGTCVNLPDGYRCVCSPGYQLHPSQAYCTDDNECLRDPCKGKGRCINRVGSYSCFCYPGYTLATSGATQECQDINECEQPGVCSGGQCTNTEGSYHCECDQGYIMVRKGHCQDINECRHPGTCPDGRCVNSPGSYTCLACEEGYRGQSGSCVDVNECLTPGVCAHGKCTNLEGSFRCSCEQGYEVTSDEKGCQDVDECASRASCPTGLCLNTEGSFACSACENGYWVNEDGTACEDLDECAFPGVCPSGVCTNTAGSFSCKDCDGGYRPSPLGDSCEDVDECEDPQSSCLGGECKNTVGSYQCLCPQGFQLANGTVCEDVNECMGEEHCAPHGECLNSHGSFFCLCAPGFVSAEGGTSCQDVDECATTDPCVGGHCVNTEGSFNCLCETGFQPSPESGECVDIDECANDTMCGSHGFCDNTDGSFRCLCDQGFEISPSGWDCVDVNECELMLAVCGAALCENVEGSFLCLCASDLEEYDAQEGHCRPRGAGGQSMSEAPTGDHAPAPTRMDCYSGQKGHAPCSSVLGRNTTQAECCCTQGASWGDACDLCPSEDSAEFSEICPSGKGYIPVEGAWTFGQTMYTDADECVIFGPGLCPNGRCLNTVPGYVCLCNPGFHYDASHKKCEDHDECQDLACENGECVNTEGSFHCFCSPPLTLDLSQQRCMNSTSSTEDLPDHDIHMDICWKKVTNDVCSEPLRGHRTTYTECCCQDGEAWSQQCALCPPRSSEVYAQLCNVARIEAEREAGVHFRPGYEYGPGPDDLHYSIYGPDGAPFYNYLGPEDTVPEPAFPNTAGHSADRTPILESPLQPSELQPHYVASHPEPPAGFEGLQAEECGILNGCENGRCVRVREGYTCDCFEGFQLDAAHMACVDVNECDDLNGPAVLCVHGYCENTEGSYRCHCSPGYVAEAGPPHCTAKE

SEQ ID NO: 89411 - protein, 197 aa, Homo sapiens
MLVLRSGLTKALASRTLAPQVCSSFATGPRQYDGTFYEFRTYYLKPSNMNAFMENLKKNIHLRTSYSELVGFWSVEFGGRTNKVFHIWKYDNFAHRAEVRKALANCKEWQEQSIIPNLARIDKQETEITYLIPWSKLEKPPKEVHVLWWNESADSRAAGRHKSHEDPRVVAAVRESVNYLVSQQNMLLIPASFSPLK

SEQ ID NO: 89412 - protein, 33 aa, Homo sapiens
  MOD_RES (1)..(1): Any amino acid
XALTGVQPARQKVMVKGGTLKDFHEITFFKNRE

SEQ ID NO: 89413 - protein, 119 aa, Homo sapiens
MEKAADLQDTASLTLKFKFNPKLGIDNPVLSLAEDHDPYDPWSLERPRFCLLSKEEGKSFGFHLQQELGRAGHVVCRVDPGTSAQRQGLQEGDRILAVNNDVVEHEDYAVAIRVLSGWC

SEQ ID NO: 89414 - protein, 35 aa, Homo sapiens
MFHKRGKKNGKFSVRYIVLFLEIKMNQSKIDFLFV

SEQ ID NO: 89415 - protein, 689 aa, Homo sapiens
MSTRTPLPTVNERDTENVAIKIIDKTQLNPTSLQKLFREVRIMKILNHPNIVKLFEVIETEKTLYLIMEYASGGEVFDYLVAHGRMKEKEARSKFRQIVSAVQYCHQKRIVHRDLKAENLLLDADMNIKIADFGFSNEFTVGGKLDTFCGSPPYAAPELFQGKKYDGPEVDVWSLGVILYTLVSGSLPFDGQNLKELRERVLRGKYRIPFYMSTDCENLLKRFLVLNPIKRGTLEQIMKDRWINAGHEEDELKPFVEPELDISDQKRIDIMVGMGYSQEEIQESLSKMKYDEITATYLLLGRKSSELDASDSSSSSNLSLAKVRPSSDLNNSTGQSPHHKVQRSVSSSQKQRRYSDHAGPAIPSVVAYPKRSQTSTADSDLKEDGISSRKSSGSAVGGKGIAPASPMLGNASNPNKADIPERKKSSTVPSSNTASGGMTRRNTYVCSERTTADRHSVIQNGKENSTIPDQRTPVASTHSISSAATPDRIRFPRGTASRSTFHGQPRERRTATYNGPPASPSLSHEATPLSQTRSRGSTNLFSKLTSKLTRRNMSFRFIKRLPTEYERNGRYEGSSRNVSAEQKDENKEAKPRSLRFTWSMKTTSSMDPGDMMREIRKVLDANNCDYEQRERFLLFCVHGDGHAENLVQWEMEVCKLPRLSLNGVRFKRISGTSIAFKNIASKIANELKL

SEQ ID NO: 89416 - protein, 234 aa, Homo sapiens
MPFNGEKQCVGEDQPSDSDSSRFSESMASLSDYECSRQSFASDSSSKSSSPASTSPPRVVTFDEVMATARNLSNLTLAHEIAVNENFQLKQEALPEKSLAGRVKHIVHQAFWDVLDSELNADPPEFEHAIKLFEEIREILLSFLTPGGNRLRNQICEVLDTDLIRQQAEHSAVDIQGLANYVISTMGKLCAPVRDNDIRELKATGNIVEVLRQIFHVLDLMQMDMANFTIMSLR

SEQ ID NO: 89417 - protein, 545 aa, Homo sapiens
MSSSGYPPNQGAFSTEQSRYPPHSVQYTFPNTRHQQEFAVPDYRSSHLEVSQASQLLQQQQQQQLRRRPSLLSEFHPGSDRPQERRTSYEPFHPGPSPVDHDSLESKRPRLEQVSDSHFQRVSAAVLPLVHPLPEGLRASADAKKDPAFGGKHEAPSSPISGQPCGDDQNASPSKLSKEELIQSMDRVDREIAKVEQQILKLKKKQQQLEEEAAKPPEPEKPVSPPPVEQKHRSIVQIIYDENRKKAEEAHKIFEGLGPKVELPLYNQPSDTKVYHENIKTNQVMRKKLILFFKRRNHARKQREQKICQRYDQLMEAWEKKVDRIENNPRRKAKESKTREYYEKQFPEIRKQREQQERFQRVGQRGAGLSATIARSEHEISEIIDGLSEQENNEKQMRQLSVIPPMMFDAEQRRVKFINMNGLMEDPMKVYKDRQFMNVWTDHEKEIFKDKFIQHPKNFGLIASYLERKSVPDCVLYYYLTKKNENYKALVRRNYGKRRGRNQQQIARPSQEEKVEEKEEDKAEKTEKKEEEKKDEEEKDEKEDS

SEQ ID NO: 89418 - protein, 92 aa, Homo sapiens
GITTCNGKEQVKRKKSSKSEAKGTVSKVTGKKITKIISLGKKKPSTDEQTSSAEEDVPTCGKTALPGDEQRAPKWVSFSPAVVSVPSSSKAR

SEQ ID NO: 89419 - protein, 229 aa, Homo sapiens
  MOD_RES (1)..(1): Any amino acid
XGQTDVDHPLCEECTDTLLDQLDTQLNVTENECQNYKRCLEILEQMNEDDSEQLQMELKELALEEERLIQELEDVEKNRKIVAENLEKVQAEAERLDQEEAQYQREYSEFKRQQLELDDELKSVENQMRYAQTQLDKLKKTNVFNATFHIWHSGQFGTINNFRLGRLPSVPVEWNEINAAWGQTVLLLHALANKMGLKFQRYRLVPYGNHSYLESLTDKSKDGCGERQD

SEQ ID NO: 89420 - protein, 97 aa, Homo sapiens
  MOD_RES (1)..(1): Any amino acid
XKPEGNHIIKVGIYLLEAGLAKLDFLSDANSRMKKFNQLMKKVMEKLHNSIIPDVASLVRTADSELSAIGHLGRVWMAWCSSSTLLEKQPKFSKFCS

SEQ ID NO: 89421 - protein, 43 aa, Homo sapiens
MELEALRSIYEGDESFRELSPVSFQYRIGENGDPKAFLIEISW

SEQ ID NO: 89422 - protein, 51 aa, Homo sapiens
  MOD_RES (1)..(1): Any amino acid
XLTWDGFPLHYSERHGWGYLVPGRRDNLAKLPTGTTLESAGVVCPYRGSSS

SEQ ID NO: 89423 - protein, 870 aa, Homo sapiens
MGRLNKAILRYLKNDGKVHLVVFNNLQLADGRRHRILLRLSNLQRGAGSLELYLDCIQVDSVHNLPRAFAGPSQKPETIELRTFQRKPQDFLEELKLVVRGSLFQVASLQDCFLQQSEPLAATGTGDFNRQFLGQMTQLNQLLGEVKDLLRQQVKETSFLRNTIAECQACGPLKFQSPTPSTVVPPAPPAPPTRPPRRCDSNPCFRGVQCTDSRDGFQCGPCPEGYTGNGITCIDVDECKYHPCYPGVHCINLSPGFRCDACPVGFTGPMVQGVGISFAKSNKQVCTDIDECRNGACVPNSICVNTLGSYRCGPCKPGYTGDQIRGCKAERNCRNPELNPCSVNAQCIEERQGDVTCVCGVGWAGDGYICGKDVDIDSYPDEELPCSARNCKKDNCKYVPNSGQEDADRDGIGDACDEDADGDGILNEQDNCVLIHNVDQRNSDKDIFGDACDNCLSVLNNDQKDTDGDGRGDACDDDMDGDGIKNILDNCPKFPNRDQRDKDGDGVGDACDSCPDVSNPNQSDVDNDLVGDSCDTNQDSDGDGHQDSTDNCPTVINSAQLDTDKDGIGDECDDDDDNDGIPDLVPPGPDNCRLVPNPAQEDSNSDGVGDICESDFDQDQVIDRIDVCPENAEVTLTDFRAYQTVVLDPEGDAQIDPNWVVLNQGMEIVQTMNSDPGLAVGYTAFNGVDFEGTFHVNTQTDDDYAGFIFGYQDSSSFYVVMWKQTEQTYWQATPFRAVAEPGIQLKAVKSKTGPGEHLRNSLWHTGDTSDQVRLLWKDSRNVGWKDKVSYRWFLQHRPQVGYIRVRFYEGSELVADSGVTIDTTMRGGRLGVFCFSQENIIWSNLKYRCNDTIPEDFQEFQTQNFDRFDN

SEQ ID NO: 89424 - protein, 181 aa, Homo sapiens
MESISMMGSPKSLSETFLPNGINGIKDARKVTVGVIGSGDFAKSLTIRLIRCGYHVVIGSRNPKFASEFFPHVVDVTHHEDALTKTNIIFVAIHREHYTSLWDLRHLLVGKILIDVSNNMRINQYPESNAEYLASLFPDSLIVKGFNVVSAWALQLGPKDASRQVYICSNNIQARQQVIEL

SEQ ID NO: 89425 - protein, 533 aa, Homo sapiens
IRKRHCFGTEVHNLDAKVDSGKTVKLNSPLEKINSFSPQKPPGHCSRCCCSTKQGNSQESSNTIKKDHTGKSKIPKIYFGTRTHKQIAQITRELRRTAYSGVPMTILSSRDHTCVHPEVVGNFNRNEKCMELLDGKNGKSCYFYHGVHKISDQHTLQTFQGMCKAWDIEELVSLGKKLKACPYYTARELIQDADIIFCPYNYLLDAQIRESMDLNLKEQVVILDEAHNIEDCARESASYSVTEVQLRFARDELDSMVNNNIRKKDHEPLRAVCCSLINWLEANAEYLVERDYESACKIWSGNEMLLTLHKMGITTATFPILQGHFSAVLQKEEKISPIYGKEEAREVPVISASTQIMLKGLFMVLDYLFRQNSRFADDYKIAIQQTYSWTNQIDISDKNGLLVLPKNKKRSRQKTAVHVLNFWCLNPAVAFSDINGKVQTIVLTSGTLSPMKSFSSELGVTFTIQLEANHIIKNSQVWVGTIGSGPKGRNLCATFQNTETFEFQDEVGALLLSVCQTVSQGILCFLPSYKYLT

SEQ ID NO: 89426 - protein, 38 aa, Homo sapiens
MKMKQDEMDCAHFLMGAGMCWCPVQSGCWQNGRVPYSQ

SEQ ID NO: 89427 - protein, 42 aa, Homo sapiens
MGDAPSPEEKLHLITRNLQRVHTRCVQTLLRGHTARFQEGWS

SEQ ID NO: 89428 - protein, 225 aa, Homo sapiens; identical to SEQ ID NO: 75317
  MOD_RES (1)..(1): Any amino acid

SEQ ID NO: 89429 - protein, 47 aa, Homo sapiens
  MOD_RES (1)..(1): Any amino acid
XNMFPPNLVEACFKQHHSHSCQYWGSWNSSGGPGHYGHCADICRPAH

SEQ ID NO: 89430 - protein, 235 aa, Homo sapiens; identical to SEQ ID NO: 61959
  MOD_RES (1)..(1): Any amino acid

SEQ ID NO: 89431 - protein, 498 aa, Homo sapiens
MPDVKESVPPKYPGDSEGRSCKPETSGPPQEDKSGSEDPPPCLTETVNEVSKLSNKIGMNCDYYMEEKVLPPSSLEGKVKETVHNAFWDHLKEQLSATPPDFSCALELLKEIKEILLSLLLPRQNRLRIEIEEALDMDLLKQEAEHGALKVLYLSKYVLNMMALLCAPVRDEAVQKLENITDPVWLLRGIFQVLGRMKMDMVNYTIQSLQPHLQEHSIQYERAKFQELLNKQPSLLNHTTKWLTQAAGDLTMSPPTCPDTSDSSSVAGPSPNEAANNPEPLSPTMVLCQGFLNLLLWDLENEEFPETLLMDRTRLQELKSQLHQLTVMASVLLVASSFSGSVLFGSPQFVDKLKRITKSLLEDFHSRPEEAILTVSEQVSQEIHQSLKNMGLVALSSDNTASLMGQLQNIAKKENCVCSVIDQRIHLFLKCCLVLGVQRSLLDLPGGLTLIEAELAELGQKFVNLTHHNQQVFGPYYTEILKTLISPAQALETKVESV

SEQ ID NO: 89432 - protein, 480 aa, Homo sapiens
  MOD_RES (1)..(1): Any amino acid
XLALAFHDGSVHIVHRLSLQTMAVFYSSAAPRPVDEPAMKRPRTAGPAVHLKAMQLSWTSLALVGIDSHGKLSVLRLSPSMGHPLEVGLALRHLLFLLEYCMVTGYDWWDILLHVQPSMVQSLVEKLHEEYTRQTAALQQVLSTRILAMKASLCKLSPCTVTRVCDYHTKLFLIAISSTLKSLLRPHFLNTPDKSPGDRLTEICTKITDVDIDKVMINLKTEEFVLDMNTLQALQQLLQWVGDFVLYLLASLPNQGSLLRPGHSFLRDGTSLGMLRELMVVIRIWGLLKPSCLPVYTATSDTQDSMSLLFRLLTKLWICFPSTGPCSVWVLLGWQPLPGRDEGPASEPDEALVDECCLLPSQLLIPSLDWLPASDGLVSRLQPKQPLRLQFGRAPTLPGSAATLQLDGLARAPGQPKIDHLRRLHLGACPTEECKACTRCGCVTMLKSPNRTTAVKQWEQRWIKNCLCGGLWWRVPLSYP

SEQ ID NO: 89433 - protein, 128 aa, Homo sapiens
MGTSSIFLCVLFLCGALGLTMSPARGRLRCYICGFTKPCHPVPTECRDDEACGISIGTSVKKLPLKGPVPSARLCHLLAALLHSVAPLLRAGPVQHSRFPTAAHQPPRLPAPLCGQLRWERTPPPLAS

SEQ ID NO: 89434 - protein, 49 aa, Homo sapiens
MNLQPIFWIGLISSVCCVFAQTDENRCLKANAKSCGECIQAGPNCGWCT

SEQ ID NO: 89435 - protein, 50 aa, Homo sapiens
  MOD_RES (1)..(1): Any amino acid
XRRTQEAQGAGGDPQVSAARTPRKGVSPADSCAAPRAGLLLGGSACTQAA

SEQ ID NO: 89436 - protein, 155 aa, Homo sapiens
MMKLRHKNKKPGEGSKGHKKISWPYPQPAKQNGKKATSKVPSAPHFVHPNDHANREAELKKKWVEEMREKQQAAREQERQKRRTIESYCQDVLRRQEEFEHKEEVLQELNMFPQLDDEATRKAYYKEFRKACITATLSFSCPHLLVLCPAGGGIL

SEQ ID NO: 89437 - protein, 112 aa, Homo sapiens
  MOD_RES (1)..(1): Any amino acid
XVTSIADRLNVDFALIHKERKKANEVDRMVLVGDVKDRVAILVDDMADTCGTICHAADKHGLTLLPRLECSSTITAHCSLEILGSRNPPVSDSRVAGTTDFSQLAPPEFMPS

SEQ ID NO: 89438 - protein, 47 aa, Homo sapiens
VLFPLLTKLLENISPADVGGMEETRMRASTLLSKAPATYCQRRSLSL

SEQ ID NO: 89439 - protein, 226 aa, Homo sapiens
GEKEQPVFAMTGLRWGSFRDAGVKVSKYWYLGPLKIKAAHFFSTLKEWPQTHQASISYTGPTERPPNEPEETPVQRPSLYRRILRRLASYWAQPQDALSQEVSPEVWKDVQLSTIELSITTRNNQLDPTSKEDFLNICIEPDTISKGDFITIGSRKVRNPKLHVEGTECLQASQCTLLIPEGAGGSFSIDSEEYEAMPVEVKLLPRKLQFFCDPRKREQMLTSPTQ

SEQ ID NO: 89440 - protein, 144 aa, Homo sapiens
  MOD_RES (1)..(1): Any amino acid
XGGYFVPAVPQAQGRPPYYTPNQLAQMRPNPRWQQGGRPQGFQGMPSAIRQSGPRPTLRHLAPTGSECPDRLAMDFGGAGAAQQGLTDSCQSGGVPTAVQNLAPRAAVAAAAPRAVAPYKYASSVRSPHPAIQPLQVRFTRQNA

SEQ ID NO: 89441 - protein, 145 aa, Homo sapiens
MSNDGRSRNRDRRYDEVPSDLPYQDTTIRTHPILHDSERAVSADPLPPPPLPLQPPFGPDFYSSDTEEPAIAPDLKPVRRFVPDSWKNFFRGKKKDPEWDKPVSDIRYISDGVECSPPASPARPNHRSPLNSCKDPYGGSEGTFS

SEQ ID NO: 89442 - protein, 43 aa, Homo sapiens
MQSTPFCGFCSLGKMITAKPGKTPIQVKVQVRSWRNIELQRLP

SEQ ID NO: 89443 - protein, 132 aa, Homo sapiens
MGNILTCRVHPSVSLEFDQQQGSVCPSESETYEAGARDRMAGAPMAAAVQPAEVTVEVGEDLHMHHVRDREMPEALEFNLSANPESSTIFQRNSQTEALEFNPSANPEASTIFQRNSQTDVVEIRRSNCTNH

SEQ ID NO: 89444 - protein, 23 aa, Homo sapiens
  MOD_RES (1)..(1): Any amino acid
XNIWLDSLLAIDARMLVLRTTRT

SEQ ID NO: 89445 - protein, 59 aa, Homo sapiens
MESSTFALVPVFAHLSILQSLVPAAGAASPVAISAQHLCYSHVTPGDPGAGAGQGPAPS

SEQ ID NO: 89446 - protein, 66 aa, Homo sapiens
MPHKIGFVVVSSSGHEDGFSARELMIHAPTVSGWRSPSGSRLQSQLLRMLRQEDPLSPEVQGCHEL

SEQ ID NO: 89447 - protein, 4418 aa, Homo sapiens
  MOD_RES (1)..(1): Any amino acid
XTTEDTLITGSKTAAPVTSTGSTTATLEGQSTAASSRTSNQDISASSQNHQTKSTETTSKAQTDTLTQMMTSTLFSSPSVHNVMETAPPDEMTTSFPSSVTNTLMMTSKTITMTTSTDSTLGNTEETSTAGTESSTPVTSAVSITAGQEGQSRTTSWRTSIQDTSASSQNHWTRSTQTTRESQTSTLTHRTTSTPSFSPSVHNVTGTVSQKTSPSGETATSSLCSVTNTSMMTSEKITVTTSTGSTLGNPGETSSVPVTGSLMPVTSAALVTFDPEGQSPATFSRTSTQDTTAFSKNHQTQSVETTRVSQINTLNTLTPVTTSTVLSSPSGFNPSGTVSQETFPSGETTTSSPSSVSNTFLVTSKVFRMPTSRDSTLGNTEETSLSVSGTISAITSKVSTIWWSDTLSTALSPSSLPPKISTAFHTQQSEGAETTGRPHERSSFSPGVSQEIFTLHETTTWPSSFSSKGHTTWSQTELPSTSTGAATRLVTGNPSTGTAGTIPRVPSKVSAIGEPGEPTTYSSHSTTLPKTTGAGAQTQWTQETGTTGEALLSSPSYSVTQMIKTATSPSSSPMLDRHTSQQITTAPSTNHSTIHSTSTSPQESPAVSQRGHTQAPQTTQESQTTRSVSPMTDTKTVTTPGSSFTASGHSPSEIVPQDAPTISAATTFAPAPTGDGHTTQAPTTALQAAPSSHDATLGPSGGTSLSKTGALTLANSVVSTPGGPEGQWTSASASTSPDTAAAMTHTHQAESTEASGQTQTSEPASSGSRTTSAGTATPSSSGASGTTPSGSEGISTSGETTRFSSNPSRDSHTTQSTTELLSASASHGAIPVSTGMASSIVPGTFHPTLSEASTAGRPTGQSSPTSPSASPQETAAISRMAQTQRTRTSRGSDTISLASQATDTFSTVPPTPPSITSTGLTSPQTETHTLSPSGSGKTFTTALISNATPLPVTYASSASTGHTTPLHVTDASSVSTGHATPLPVTSPSSVSTGHTTPLPVTDTSSESTGHVTPLPVTSFSSASTGDSTPLPVTDTSSASTGHVTPLPVTSLSSASTGDTTPLPVTDTSSASTGHATSLPVTDTSSVSTGHTTPLPVTDTSSASTGHATSLPVTDTSSVSTGHTTPLHVTDASSASTGQATPLPVTSLSSVSTGDTTPLPVTSPSSASTGHATPLLVTDTSSASTGHATPLPVTDASSVSTDHATSLPVTIPSAASTGHTTPLPVTDTSSASTGQATSLLVTDTSSVSTGDTTPLPVTSTSSASTGHVTPLHVTSPSSASTGHATPLPVTSLSSASTGDTMPLPVTSPSSASTGDTTPLPVTDASSVSTGHTTPLHVTDASSASTGQATPLPVTSLSSVSTGDTTPLPVTSPSSASTGHATPLLVTDTSSASTGHATPLPVTDASSVSTDHATSLPVTIPSAASTGHTTPLPVTDTSSASTGQATSLLVTDTSSVSTGDTTPLPVTSTSSASTGHVTPLHVTSPSSASTGHATPLPVTSLSSASTGDTMPLPVTSPSSASTGDTTPLPVTDASSVSTGHTTPLPVTSPSSASTGHTTPLPVTDTSSASKGDTTPLPVTSPSSASTGHTTPLPVTDTSSASTGDTTPLPVTNASSLSTGHATPLHVTSPSSASTGHATPLPVTSTSSASTGHATPLPVTGLSSATTDDTTRLPVTDVSSASTGQATPLPVTSLSSVSTGDTTPLPVTSPSSASTGHASPLLVTDASSASTGQATPLPVTDTSSVSTAHATPLPVTGLSSASTDDTTRLPVTDVSSASTGQAIPLPVTSPSSASTGDTTPLPVTDASSASTGDTTSLPVTIPSSASSGHTTSLPVTDASSVSTGHATSLLVTDASSVSTGDTTPLPVTDTNSASTGDTTPLHVTDASSVSTGHATSLPVTSLSSASTGDTTPLPVTSPSSASSGHTTPLPVTDASSVPTGHATSLPVTDASSVSTGHATPLPVTDASSVSTGHATPLPVTDTSSVSTGQATPLPVTSLSSASTGDTTPLPVTDTSSASTGHAPHLPVTGLSSASTGDTTRLPVTNVSSASTGHATPLPVTSTSSASTGDTTPLPGTDTSSVSTGHTTPLLVTDASSVSTGDTTRLPVTSPSSASTGHTTPLHVTDASSVSTGHTTPLPVTDTSSASTGQATSLLVTDTSSVSTGDTTPLPVTSTSSASTGHVTPLHVTSPSSASTGHATPLPVTSLSSASTGDTTPLPVTDTSSVSTGHTTPLPVTSPSSASTGHTTPLPVTDTSSASKGDTTPLPVTSPSSASTGHTTPLPVTDTSSASTGDTTPLPVTNASSLSTGHATPLHVTSPSSASTGHATPLPVTSTSSASTGHATPLPVTSTSSASTGHATPLPVTDNSSVSTGHATPLPVTGLSSATTDDTTRLPVTDVSSASTGQATPLPVTSLSSVSTGDTTPLPVTSPSSASTGHASPLLVTDASSASTGQATPLPVTDTSSVSTAHATPLPVTGLSSASTDDTTRLPVTDVSSASTGQAIPLPVTSPSSASTGDTTPLPVTDASSASTGDTTSLPVTIPSSASSGHTTSLPVTDASSVSTGHATSLLVTDASSVSTGDTTPLPVTDTNSASTGDTTPLHVTDASSVSTGHATSLPVTSLSSASTGDTTPLPVTSPSSASSGHTTSLPVTDASSVSTGHATSLPVTIPSSASSGHTTPLPVTDASSVPTGHATSLPVTDASSVSTGHATPLPVTDASSVSTGHATPLPVTDTSSVSTGQATPLPVTSLSSASSTGDTTPLPVTDTSSASTGQDTPLPVTSLFSVSTGDTTPLPVTSPSSASTGHATHLLVTDASSVSTGHATSLLVTDASSVSTGHATALHVTDASSLSTGDTTPLPVTSPSSASTGDTTPLPVTDTSSVSTGHATSLPVTDTSSASTGHATSLPVTDTSSASTGQATPLPVTSPSSASTGHAIPLLVTDTSSASTGQATPLPVTSLSSASTGDTTPLPVTDASSVSTGHATSLPVTSLSSVSTGDTTPLPVTSPSSASTGHATPLHVTSPSSASTGHATPLPVTSLSSASTGDTTPLPVTSPSSASTGHATPLHVTDASSVSTGDTTPLPVTSPSSASSGHTTPLPVTDASSASTGDTTPLPVTDTSSASTGHATHLPVTGLSSASTGDTTRLPVTDVSSASTGHATPLPVTSTSSASTGDTTPLPGTDTSSVSTGHTTPLLVTDASSVSTGDTTRLPVTSPSSASTGHTTPLPVTDTPSASTGDTTPLPVTNASSLSTRHATSLHVTSPSSASTGHATPLPVTDTSAASTGHATPLPVTSTSSASTGDTTPLPVTDTSSASTGHATPLPVTNTSSVSTGHATPLHVTSPSSASTGHTTPLPVTDASSVSTGHATSLPVTDASSVSTGHATPLPVTDASSVSTGHATPLPLTSLSSVSTGDTTPLPVTDTSSASTGQATPLPVTSLSSVSTGDTTPLPVTDTSSASTGHATSLPVTDTSSASTGHATPLHVTSPSSASTGHATPLPVTDTSSASTGHATPLPVTSLSSVSTGDTTPLPVTSPSSASTGHATPLLVTDASSASTGQATPLPVTSLSSVSTGDTTPLPVTSPSSASTGHATSLPVTDTSSASTGDTTSLPVTDTSSAYTGDTTSLPVTDTSSSSTGDTTPLLVTETSSASTGDTTPVPVTDTSSVSTGHATPLPVTGLSSASTGDTTRLPVTDISSASTGQATPLPVTNTSSVSTGDTMPLPVTSPSSASTGHATPLPVTSTSSASTGHATPVPVTSTSSASTGHTTPLPVTSPSSASTGHTTPLPVTDTSSASTGDTTPLPVTNASSLSTGHTTPLHVTIPSSASTGDTSTLPVTGASSASTGHATPLPVTDTSSVSTGHATPLPVTSFSSVSTGDTTPLPVTDASSASTGHATPLPVTDTSSASTGDTTPLPVTDASSASTGQATPLPVTSLSSVSTGDTTPLPVTIPSSASSGHTTSLPVSDTSSASTGQATPLPVTSLSSVSTGDTTPLLVTDASSVSTGHATPLPVTDTSSASTGDTTRLPVTDTSSASTGQATPLPVTSLSSVSTGDTTPLLVTNTSSVSTGHATSLPVTIPSSSSSGHTTPLPVTSTSSVSTGHVTPLHVTSPSSSSTGQATPLPVTSTSSSSTGQATPLPVTSTSSASTGHATPLPVTDASSVSTGHATPLPVTDTSSASTGDTTPLPVTDTSSASTGQATPLPVTSLSSVSTGHATPLAVSSATSASTVSSDSPLKMETSGMTTPSLKTDGGRRTATSPPPTTSQTIISTIPSTAMHTRSTAAPIPILPERGVSLFPYGADAGDLEFVRRTVDFTSPLFKPATGFPLGSSLRDSLYASQAGTLWPWWLRSGTMLTSPLVGGPHFIRATPTKPSSPRTGAGPMPCFSTRAVGCSGTWPSAQWRWLFRKQPTDVPASVGEVSP

SEQ ID NO: 89448 - protein, 35 aa, Homo sapiens
  MOD_RES (1)..(1): Any amino acid
XRRDLEIERPMPGTHTVTLQWSATQNWTQQRPLSS

SEQ ID NO: 89449 - protein, 131 aa, Homo sapiens
MEANDHFNFTGLPPAPAASGLKPSPSSGEGLYTNGSPMNFPQQGKSLNGDVNVNGLSTVSHTTTSGILNSAPHSSSTSHLHHPSVAYDCLWNYSQYPSANPGSNLKDPPLLSQFSGGQYPLNGILGGSRQP

SEQ ID NO: 89450 - protein, 22 aa, Homo sapiens
MPEGPELHLASQFVNEACRALV

SEQ ID NO: 89451 - protein, 399 aa, Homo sapiens
MLKAVILIGGPQKGTRFRPLSFEVPKPLFPVAGVPMIQHHIEACAQVPGMQEILLIGFYQPDEPLTQFLEAAQQEFNLPVRYLQEFAPLGTGGGLYHFRDQILAGSPEAFFVLNADVCSDFPLSAMLEAHRRQRHPFLLLGTTANRTQSLNYGCIVENPQTHEVLHYVEKPSTFISDIINCGIYLFSPEALKPLRDVFQRNQQDGQLEDSPGLWPGAGTIRLEQDVFSALAGQGQIYVHLTDGIWSQIKSAGSALYASRLYLSRYQDTHPERLAKHTPGGPWIRGNVYIHPTAKVAPSAVLGPNVSIGKGVTVGEGVRLRESIVLHGATLQEHTCVLHSIVGWGSTVGRWARVEVPPVTLTPTIPEPAWTVRASSRTGSCCLLSPSWAAESGSLPRCSS

SEQ ID NO: 89452 - protein, 329 aa, Homo sapiens
MARTVVLITGCSSGIGLHLAVRLASDPSQSFKVYATLRDLKTQGRLWEAARALACPPGSLETLQLDVRDSKSVAAARERVTEGRVDVLVCNAGLGLLGPLEALGEDAVASVLDVNVVGTVRMLQAFLPDMKRRGSGRVLVTGSVGGLMGLPFNDVYCASKFALEGLCESLAVLLLPFGVHSLSLIECGPVHTAFMEKVLGSPEEVLDRTDIHTFHRFYQYLAHSKQVFREAAQNPEEVAEVFLTALRAPKPTLRYFTTERFLPLLRMRLDDPSGSNYVTAMHREVFGDVPAKAEAGAEAGGGAGPGAEDEAGRGAVGDPELGDPPAAPQ

SEQ ID NO: 89453 - protein, 189 aa, Homo sapiens
MSDEEKQKRREESTRLKEEGNEQFKKGDYIEAESSYSRALEMCPSCFQKERSILFSNRAAARMKQDKKEMAINDCSKAIQLNPSYIRAILRRAELYEKTDKLDEALEDYKSILEKDPSIHQAREACMRLPKQIEERNERLKEEMLGKLKDLGNLVLRPFGLSTENFQIKQDSSTGSYSINFVQNPNNNR

SEQ ID NO: 89454 - protein, 470 aa, Homo sapiens
MDPRGILKAFPKRQKIHADASSKVLAKIPRREEGEEAEEWLSSLRAHVVRTGIGRARAELFEKQIVQHGGQLCPAQGPGVTHIVVDEGMDYERALRLLRLPQLPPGAQLVKSAWLSLCLQERRLVDVAGFSIFIPSRYLDHPQPSKAEQDASIPPGTHEALLQTALSPPPPPTRPVSPPQKAKEAPNTQAQPISDDEASDGEETQEACSIPGIGKRMAEKIIEILESGHLRKLDHISESVPVLELFSNIWGAGTKTAQMWYQQGFRSLEDIRSQASLTTQQAIGLKHYSDFLERMPREEATEIEQTVQKAAQAFNSGLLCVACGSYRRGKATCGDVDVLITHPDGRSHRGIFSRLLDSLRQEAVPSVGPGFLTDDLVSQEENGQQQKYLGVCRLPGPGRRHRRLDIIVVPYSEFACALLYFTGSAHFNRSMRALAKTKGMSLSEHALSTAVVRNTHGCKVGPGRVLPTPT

SEQ ID NO: 89455 - protein, 118 aa, Homo sapiens
FGILMWEVMSYGERPYWDMSEQEVLNAIEQEFRLPPPPGCPPGLHLLMLDTWQKDRARRPHFDQLVAAFDKMIRKPDTLQAGGDPGERPGFQPLDWSATRTTSPSLASVPSVMWLSSA

SEQ ID NO: 89456 - protein, 67 aa, Homo sapiens
MRLPFMKKLNIEEFEFSQSYLFFWDKVERCYFFLSAFVDTAQRKEPEDGRLVQFLLMNPANDGGQWD

SEQ ID NO: 89457 - protein, 125 aa, Homo sapiens
MPFHHVTAGLLYKGNYLNRSLSAGSDSEQLANISVEELDEIREAFRVLDRDGNGFISKQELGMAMRSLGYMPSEVELAIIMQRLDMDGDGQVDFDEFMTILGPKLVSSEGRDGFLGNTIDSIFWQ

SEQ ID NO: 89458 - protein, 835 aa, Homo sapiens
MEPSSPQDEGLRKKQPKKPVPEILPRPPRALFCLTLENPLRKACISIVEWKPFETIILLTIFANCVALAVYLPMPEDDNNSLNLGLEKLEYFFLIVFSIEAAMKIIAYGFLFHQDAYLRSGWNVLDFTIVFLGVFTVILEQVNVIQSHTAPMSSKGAGLDVKALRAFRVLRPLRLVSGVPSLQVVLNSIFKAMLPLFHIALLVLFMVIIYAIIGLELFKGKMHKTCYFIGTDIVATVENEEPSPCARTGSGRRCTINGSECRGGWPGPNHGITHFDNFGFSMLTVYQCITMEGWTDVLYWVNDAIGNEWPWIYFVTLILLGSFFILNLVLGVLSGEFTKEREKAKSRGTFQKLREKQQLDEDLRGYMSWITQGEVMDVEDFREGKLSLDEGGSDTESLYEIAGLNKIIQFIRHWRQWNRIFRWKCHDIVKSKVFYWLVILIVALNTLSIASEHHNQPLWLTRLQDIANRVLLSLFTTEMLMKMYGLGLRQYFMSIFNRFDCFVVCSGILEILLVESGAMTPLGISVLRCIRLLRIFKITKYWTSLSNLVASLLNSIRSIASLLLLLFLFIVIFALLGMQLFGGRYDFEDTEVRRSNFDNFPQALISVFQVLTGEDWTSMMYNGIMAYGGPSYPGMLVCIYFIILFVCGNYILLNVFLAIAVDNLAEAESLTSAQKAKAEEKKRRKMSKGLPDKSEEEKSTMAKKLEQKPKGEGIPTTAKLKIDEFESNVNEVKDPYPSADFPGDDEEDEPEIPLSPRPRPLAELQLKEKAVPIPEASSFFIFSPTNKWVPLGCCGGSVSCVTASSMPPGLPTSSCSSSCSAALHWLRKTPSGLIP

SEQ ID NO: 89459 - protein, 294 aa, Homo sapiens
  MOD_RES (1)..(1): Any amino acid
XEFSILKSPGSVVFRNGNWPIPGERIPDVAALSMGFSVKEDLSWPGLAVGNLFHRPRATVMVMVKGVNKLALPPGSVISYPLENAVPFSLDSVANSIHSLFSEETPVVLQLAPSEERVYMVGKANSVFEDLSVTLRQLRNRLFQENSVLSSLPLNSLSRNNEVDLLFLSELQVLHDISSLLSRHKHLAKDHSPDLYSLELAGLDEIGKRYGEDSEQFRDASKILVDALQKKNPASPYNLAYKYNFEYSVVFNMVLWIMIALALAVIITSYNIWNMDPGYDSIIYRMTNQKIRMD

SEQ ID NO: 89460 - protein, 141 aa, Homo sapiens
  MOD_RES (1)..(1): Any amino acid
XKYISAEDDDLAVEMHEPYTFLNGLTVADMEDLLEDIQVYMELEQGKNADFWRDMTTITEDEISKLRKLEASGKGPGERREGVNASVSSDVQSVFKGKTYNQLQVIFQGIEGKIRAGGPNLDMGYWESLLQQLRAHMARAR

SEQ ID NO: 89461 - protein, 1527 aa, Homo sapiens
MGISTVILEMCLLWGQVLSTGGWIPRTTDYASLIPSEVPLDPTVAEGSPFPSESTLESTVAEGSPISLESTLESTVAEGSLIPSESTLESTVAEGSDSGLALRLVNGDGRCQGRVEILYRGSWGTVCDDSWDTNDANVVCRQLGCGWAMSAPGNAWFGQGSGPIALDDVRCSGHESYLWSCPHNGWLSHNCGHGEDAGVICSAAQPQSTLRPESWPVRISPPVPTEGSESSLALRLVNGGDRCRGRVEVLYRGSWGTVCDDYWDTNDANVVCRQLGCGWAMSAPGNAQFGQGSGPIVLDDVRCSGHESYLWSCPHNGWLTHNCGHSEDAGVICSAPQSRPTPSPDTWPTSHASTAGPESSLALRLVNGGDRCQGRVEVLYRGSWGTVCDDSWDTSDANVVCRQLGCGWATSAPGNARFGQGSGPIVLDDVRCSGYESYLWSCPHNGWLSHNCQHSEDAGVICSAAHSWSTPSPDTLPTITLPASTVGSESSLALRLVNGGDRCQGRVEVLYRGSWGTVCDDYWDTNDANVVCRQLGCGWATSAPGNARFGQGSGPIVLDDVRCSGHESYLWSCPHNGWLSHNCGHHEDAGVICSASQSQPTPSPDTWPTSRASTAGSESTLALRLVNGGDRCRGRVEVLYQGSWGTVCDDYWDTNDANVVCRQLGCGWAMSAPGNAQFGQGSGPIVLDDVRCSGHESYLWSCPHNGWLSHNCGHHEDAGVICSAAQSQSTPRPDTWLTTNLPALTVGSESSLALRLVNGGDRCRGRVEVLYRGSWGTVCDDSWDTNDANVVCRQLGCGWAMSAPGNARFGQGSGPIVLDDVRCSGNESYLWSCPHKGWLTHNCGHHEDAGVICSATQINSTTTDWWHPTTTTTARPSSNCGGFLFYASGTFSSPSYPAYYPNNAKCVWEIEVNSGYRINLGFSNLKLEAHHNCSFDYVEIFDGSLNSSLLLGKICNDTRQIFTSSYNRMTIHFRSDISFQNTGFLAWYNSFPSDATLRLVNLNSSYGLCAGRVEIYHGGTWGTVCDDSWTIQEAEVVCRQLGCGRAVSALGNAYFGSGSGPITLDDVECSGTESTLWQCRNRGWFSHNCNHREDAGVICSGNHLSTPAPFLNITRPNTDYSCGGFLSQPSGDFSSPFYPGNYPNNAKCVWDIEVQNNYRVTVIFRDVQLEGGCNYDYIEVFDGPYRSSPLIARVCDGARGSFTSSSNFMSIRFISDHSITRRGFRAEYYSSPSNDSTNLLCLPNHMQASVSRSYLQSLGFSASDLVISTWNGYYECRPQITPNLVIFTIPYSGCGTFKQADNDTIDYSNFLTAAVSGGIIKRRTDLRIHVSCRMLQNTWVDTMYIANDTIHVANNTIQVEEVQYGNFDVNISFYTSSSFLYPVTSRPYYVDLNQDLYVQAEILHSDAVLTLFVDTCVASPYSNDFTSLTYDLIRSGCVRDDTYGPYSSPSLRIARFRFRAFHFLNRFPSVYLRCKMVVCRAYDPSSRCYRGCVLRSKRDVGSYQEKVDVVLGPIQLQTPPRREEEPR

SEQ ID NO: 89462 - protein, 95 aa, Homo sapiens
MKLFGFGSRRGQTAQGSIDHVYTGSGYRIRDSELQKIHRAAVKGDAAEVERCLARRSGDLDALDKQHREFFQIKSSNTLKVGKVPFSRSTSYLYT

SEQ ID NO: 89463 - protein, 136 aa, Homo sapiens
MAFWTQLMLLLWKNFMYRRRQPLLVELLWPLFLFFILVAVRHSHPPLEHHECHFPNKPLPSAGTVPWLQGLICNVNNTCFPQLTPGEEPGRLSNFNDSLVSRLLADARTVLGGASAHRTLAGLGKLIATLRAARST

SEQ ID NO: 89464 - protein, 126 aa, Homo sapiens
MEEIPAQEAAGSPRVQFQSLETQSECLSPEPQFVQDTDMEQGLTGVPRASEFLPFFISESPPLAYIGSGATCDADVRGQGHEGILLGHSPSLNLPRLPDYTGGLHLSLLGATDKRGVPRSLFQWPI

SEQ ID NO: 89465 - protein, 733 aa, Homo sapiens
MWSWKCLLFWAVLVTATLCTARPSPTLPEQDALPSSEDDDDDDDSSSEEKETDNTKPNPVAPYWTSPEKMEKKLHAVPAAKTVKFKCPSSGTPNPTLRWLKNGKEFKPDHRIGGYKVRYATWSIIMDSVVPSDKGNYTCIVENEYGSINHTYQLDVVERSPHRPILQAGLPANKTVALGSNVEFMCKVYSDPQPHIQWLKHIEVNGSKIGPDNLPYVQILKHSGINSSDAEVLTLFNVTEAQSGEYVCKVSNYIGEANQSAWLTVTRPVAKALEERPAVMTSPLYLEIIIYCTGAFLISCMVGSVIVYKMKSGTKKSDFHSQMAVHKLAKSIPLRRQVTVSADSSASMNSGVLLVRPSRLSSSGTPMLAGVSEYELPEDPRWELPRDRLVLGKPLGEGCFGQVVLAEAIGLDKDKPNRVTKVAVKMLKSDATEKDLSDLISEMEMMKMIGKHKNIINLLGACTQDGPLYVIVEYASKGNLREYLQARRPPGLEYCYNPSHNPEEQLSSKDLVSCAYQVARGMEYLASKKCIHRDLAARNVLVTEDNVMKIADFGLARDIHHIDYYKKTTNGRLPVKWMAPEALFDRIYTHQSDVWSFGVLLWEIFTLGGSPYPGVPVEELFKLLKEGHRMDKPSNCTNELYMMMRDCWHAVPSQRPTFKQLVEDLDRIVALTSNQEYLDLSMPLDQYSPSFPDTRSSTCSSGEDSVFSHEPLPEEPCLPRHPAQLANGGLKRR

SEQ ID NO: 89466 - protein, 129 aa, Homo sapiens
KTNSSEGKVFINICHSPSIPPPADVTEEELLQMLEEDQAGFRIPMSLGEPHAELDAKGQGCTAYDVAVNSDFYRRMQNSDFLRELVITIAREGLEDKYNLQLNPAEHPLGAASSDPGAGGPVHARPRES

SEQ ID NO: 89467 - protein, 116 aa, Homo sapiens
MAFYSYNSVLAIARTRFPSHFVHPTCSSYSPSCAFLHLPDSHLNKTCMKNYESKKYSDPSQPGNTVLHPGTRLIQKLHTSTCWLQEVPGKPQLEQATKHPQVTSPQATKETGMEIK

SEQ ID NO: 89468 - protein, 139 aa, Homo sapiens
MPAVLERLSRYNSTSQAFAEVLRLPKQQLRKLLYPLQEVERFLAPYGRQDLHLRIFDPSPEDIARADNIFTATERNRIDYVSSAVRIDHAPDLPRPEVCFIGRSNVGKSSLIKALFSLAPEVEVRVSKKPLEENIFISG

SEQ ID NO: 89469 - protein, 72 aa, Homo sapiens
MALSLGWKAHRNHCGLLLQALRSSGLLLFPCGQCPWRGAGSFLDPEIKAFLEENTEVTSSGSLTPEIQLRLL

SEQ ID NO: 89470 - protein, 170 aa, Homo sapiens
MDEQPRLMHSHAGVGMAGHPGLSQHLQDGAGGTEGEGGRKQDIGDILQQIMTITDQSLDEAQARKHALNCHRMKPALFNVLCEIKEKTVLSIRGAQEEEPTDPQLMRLDNMLLAEGVAGPEKGGGSAAAAAAAAASGGAGSDNSVEHSDYRAKLSQIRQIYHTELEKYEQ

SEQ ID NO: 89471 - protein, 206 aa, Homo sapiens
MGNAQERPSETIDRERKRLVETLQADSGLLLDALLARGVLTGPEYEALDALPDAERRVRRLLLLVQGKGEAACQELLRCAQRTAGAPDPAWDWQHVGPGYRDRSYDPPCPGHWTPEAPGSGTTCPGLPRASDPDEAGGPEGSEAVQSGTPEEPEPELEAEASKEAEPEPEPEPELEPEAEAEPEPELEPEPDPEPEPDFEERDESE

SEQ ID NO: 89472 - protein, 64 aa, Homo sapiens
SSGLYIFRNEREEEKEAAKYVEAQQKRLEALFTKIQEEFEEHEVTSSTEVLNPPKSSMRVGINF

SEQ ID NO: 89473 - protein, 251 aa, Homo sapiens
MAKQLQARRLDGIDYNPWVEFVKLASEHDVVNLGQGFPDFPPPDFAVEAFQHAVSGDFMLNQYTKTFGYPPLTKILASFFGELLGQEIDPLRNVLVTVGGYGALFTAFQALVDEGDEVIIIEPFFDCYEPMTMMAGGRPVFVSLKPGPIQNGELGSSSNWQLDPMELAGKFTSRTKALVLNTPNNPLGKVFSREELELVASLCQQHDVVCITDEVYQWMVYDGHQHISIASLPGMWERTLTIGSAGKTFSA

SEQ ID NO: 89474 - protein, 186 aa, Homo sapiens
MKSAKPQVNHSQHGESQRALSPLQSTLSSAASPSQAYETYIENGLICLKHKIRNIEKKKLKLEDYKDRLKSGEHLNPDQLEAVEKYEEVLHNLEFAKELQKTFSGLSLDLLKAQKKAQRREHMLKLEAEKKKLRTILQVQYVLQNLTQEHVQKDFKGGLNGAVYLPSKELDYLIKFSKLTCPERNE

SEQ ID NO: 89475 - protein, 78 aa, Homo sapiens
MVILWRKKKSPSRSPEMLWVHLSLLQGTSMPLTLIFKRLRWDFAVLARLVQTLGLKWSARLPKCWYYWREPLHPTPVC

SEQ ID NO: 89476 - protein, 193 aa, Homo sapiens
MAEQEPTAEQLAQIAAENEEDEHSVNYKPPAQKSIQEIQELDKDDESLRKYKEALLGRVAVSADPNVPNVVVTGLTLVCSSAPGPLELDLTGDLESFKKQSFVLKEGVEYRIKISFRVNREIVSGMKYIQHTYRKGVKIDKTDYMVGSYGPRAEEYEFLTPVEEAPKGSISPSHPRPGFRRERSSHSPGPVVA

SEQ ID NO: 89477 - protein, 58 aa, Homo sapiens
MNPLTKVKLINELNEREVQLGVADKVSWHSEYKDSAWIFLGGLPYELTEGDIICVFSQ

SEQ ID NO: 89478 - protein, 211 aa, Homo sapiens
AESLISLERKKEKNINRDITSRKDLPSRTSNVERKASQQQWGRGNFTEGKVPHIRIENGAAIEAGSSAVKLLEREVNILKSVKHEHIIHLEQVFETPKKMYLVMELCEDGELKEILDRKGHFSENETRWIIQSLASAIAYLHNNDIVHRDLKLENIMVKSSLIDDNNEINLNIKVTDFGLAVKKQSRSEAMLQATCGTPIYMAPEVISAHD

SEQ ID NO: 89479 - protein, 771 aa, Homo sapiens
MSSGLWSQEKVTSPYWEERIFYLLLQECSVTDKQTQKLLKVPKGSIGQYIQDRSVGHSRIPSAKGKKNQIGLKILEQPHAVLFVDEKDVVEINEKFTELLLAITNCEERFSLFKNRNRLSKGLQIDVGCPVKVQLRSGEEKFPGVVRFRGPLLAERTVSGIFFGVELLEEGRGQGFTDGVYQGKQLFQCDEDCGVFVALDKLELIEDDDTALESDYAGPGDTMQVELPPLEINSRVSLKVGETIESGTVIFCDVLPGKESLGYFVGVDMDNPIGNWDGRFDGVQLCSFACVESTILLHINDIIPESVTQERRPPKLAFMSRGVGDKGSSSHNKPKATGSTSDPGNRNRSELFYTLNGSSVDSQPQSKSKNTWYIDEAFGGYLSEVVEENTPPKMEKEGLEIMIGKKKGIQGHYNSCYLDSTLFCLFAFSSVLDTVLLRPKEKNDVEYYSETQELLRTEIVNPLRIYGYVCATKIMKLRKILEKVEAASGFTSEEKDPEEFLNILFHHILRVEPLLKIRSAGQKVQDCYFYQIFMEKNEKVGVPTIQQLLEWSFINSNLKFAEAPSCLIIQMPRFGKDFKLFKKIFPSLELNITDLLEDTPRQCRICGGLAMYECRECYDDPDISAGKIKQFCKTCNTQVHLHPKRLNHKYNPVSLPKDLPDWDWRHGCIPCQNMELFAVLCIETSHYVAFVKYGKDDSAWLFFDSMADRDGGQNGFNIPQVTPCPEVGEYLKMSLEDLHSLDSRRIQGCARRLLCDAYMCMYQSPTMSLYK

SEQ ID NO: 89480 - protein, 29 aa, Homo sapiens
PREADPMTKVQAELDETKIILVLFHPLGQ

SEQ ID NO: 89481 - protein, 62 aa, Homo sapiens
MAWKSGGASHSELIHNLRKNGIIKTDKVFEVMLATDRSHYAKCNPYMDSPQSIESPVFNSFS

SEQ ID NO: 89482 - protein, 1600 aa, Homo sapiens
MVDKNIYIIQGEINIVVGAIKRNARWSTHTPLDEERDPLLHSFGHLKEVLNSITELSEIEPNVFLRPFLEVIRSEDTTGPITGLALTSVNKFLSYALIDPTHEGTAEGMENMADAVTHARFVGTDPASDEVVLMKILQVLRTLLLTPVGAHLTNESVCEIMQSCFRICFEMRLSELLRKSAEHTLVDMVQLLFTRLPQFKEEPKNYVGTNMKKLKMRAGGMSDSSKWKKQKRSPRPPRHMTKVTPGSELPTPNGTTLSSNLTGGMPFIDVPTPISSASSEAASAVVSPSTDSGLEFSSQTTSKEDLTDLEQPGSPGYSTATEPGSSELGVPEQPDLQEGTHVEKSQSASVESIPEVLEECTSPADHSDSASVHDMDYVNPRGVRFTQSSQKEGTALVPYGLPCIRELFRFLISLTNPHDRHNSEVMIHMGLHLLTVALESAPVAQCQTLLGLIKDEMCRHLFQLLSIERLNLYAASLRVCFLLFESMREHLKFQMEMYIKKLMEIITVENPKMPYEMKEMALEAIVQLWRIPSFVTELYINYDCDYYCSNLFEELTKLLSKNAFPVSGQLYTTHLLSLDALLTVIDSTEAHCQAKVLNSLTQQEKKETARPSCEIVDGTREASNTERTASDGKAVGMASDIPGLHLPGGGRLPPEHGKSGCSDLEEAVDSGADKKFARKPPRFSCLLPDPRELIEIKNKKKLLITGTEQFNQKPKKGIQFLQEKGLLTIPMDNTEVAQWLRENPRLDKKMIGEFVSDRKNIDLLESFVSTFSFQGLRLDEALRLYLEAFRLPGEAPVIQRLLEAFTERWMNCNGSPFANSDACFSLAYAVIMLNTDQHNHNVRKQNAPMTLEEFRKNLKGVNGGKDFEQDILEDMYHAIKNEEIVMPEEQTGLVRENYVWNVLLHRGATPEGIFLRVPTASYDLDLFTMTWGPTIAALSYVFDKSLEETIIQKAISGFRKCAMISAHYGLSDVFDNLIISLCKFTALSSESIENLPSVFGSNPKAHIAAKTVFHLAHRHGDILREGWKNIMEAMLQLFRAQLLPKAMIEVEDFVDPNGKISLQREETPSNRGESTVLSFVSWLTLSGPEQSSVRGPSTENQEAKRVALECIKQCDPEKMITESKFLQLESLQELMKALVSVTPDEETYDEEDAAFCLEMLLRIVLENRDRVGCVWQTVRDHLYHLCVQAQDFCFLVERAVVGLLRLAIRLLRREEISAQVLLSLRILLLMKPSVLSRVSHQVAYGLHELLKTNAANIHSGDDWATLFTLLECIGSGVKPPAALQATARADAPDAGAQSDSELPSYHQNDVSLDRGYTSDSEVYTDHGRPGKIHRSATDADVVNSGWLVVGKDDVDNSKPGPSRPGPSPLINQYSLTVGLDLGPHDTKSLLKCVESLSFIVRDAAHITPDNFELCVKTLRIFVEASLNGGCKSQEKRGKSHKYDSKGNRFKKKSKEGSMLRRPRTSSQHASRGGQSDDDEDEGVPASYHTVSLQLLDLMHTLHTRAASIYSSWAEEQRHLETGGQKIEADSRTLWAHCWCPLLQGIACLCCDARRQVRMQALTYLQRALLVHDLQKLDALEWESCFNKVGLPTGLKIKFKS

SEQ ID NO: 89483 - protein, 110 aa, Homo sapiens
MSRRSQRLTRYSQGDDDGSSSSGGSSVAGSQSTLFKDSPLRTLKRKSSNMKRLSPAPQLGPSSDAHTSYYSESLVHESWFPPRSSLEELHGDANWGEDLRVRRRRGTGGS

SEQ ID NO: 89484 - protein, 307 aa, Homo sapiens
MVAGKVLMAKQEIVECVASAAMISPGKLPGETHSQRIAEEALGGLDNSKKQKGNAAGNKISQLPSQDRHFSLATFNRRIPTEHSVLESHESEGSFSMNSNDITQQSVDTREKLYECFDCGKAFCQSSKLIRHQRIHTGERPYACKECGKAFSLSSDLVRHQRIHSGEKPYECCECGKAFRGSSELIRHRRIHTGEKPYECGECGKAFSRSSALIQHKKIHTGDKSYECIACGKAFGRSSILIEHQRIHTGEKPYECNECGKSFNQSSALTQHQRIHTGEKPYECSECRKTFRHRSGLMQHQRTHTRV

SEQ ID NO: 89485 - protein, 425 aa, Homo sapiens
LESLKRWNEERGLWCEKGVQVLLTTVGAFAAFGLMTIAISTDYWLYTRALICNTTNLTAGGDDGTPHRGGGGASEKKDPGGLTHSGLWRICCLEGLKRGVCVKINHFPEDTDYDHDSAEYLLRVVRASSIFPILSAILLLLGGVCVAASRVYKSKRNIILGAGILFVAAGLSNIIGVIVYISANAGEPGPKRDEEKKNHYSYGWSFYFGGLSFILAEVIGVLAVNIYIERSREAHCQSRSDLLKAGGGAGGSGGSGPSAILRLPSYRFRYRRRSRSSSRSSEPSPSRDASPGGPGGPGFASTDISMYTLSRDPSKGSVAAGLAGAGGGGGGAVGAFGGAAGGAGGGGGGGGGAGAERDRGGASGFLTLHNAFPKEAGGGVTVTVTGPPAPPAPAPPAPSAPAPGTLAKEAAASNTNTLNRKTTPV

SEQ ID NO: 89486 - protein, 135 aa, Homo sapiens
MIKFFLMVNKQGQTRLSKYYEHVDINKRTLLETEVIKSCLSRSNEQCSFIEYKDFKLIYRQYAALFIVVGVNDTENEMAIYEFIHNFVEVLDEYFSRVSELDVSFFNTVFHSTWQMHSGPYQVLVLALEDDPTSV

SEQ ID NO: 89487 - protein, 63 aa, Homo sapiens
DIHHKVLSLNFSECHTKIRHVDAHATLSDGVVVQVMGLLSNSGQPERKFMQTFVLAPENQKMK

SEQ ID NO: 89488 - protein, 133 aa, Homo sapiens
MGGSHSQTPRGREPAGERHPRPTETASGCKVKKHETQSLALDACSRDEGAVISQISDISNRDGHATDEEKLASTSCGQKSAGAEVKGEPEEDLEYFECSNVPVSTINHAFSSSEAGIEKETCQKMEEDGSTVL

SEQ ID NO: 89489 - protein, 126 aa, Homo sapiens
MAAAAAEQQQFYLLLGNLLSPDNVVRKQAEETYENIPGQSKITFLLQAIRNTTAAEEARQMAAVLLRRLLSSAFDEVYPALPSDVQTAIKSELLMIIQMETQSSMRKKVCDIAAELARNLIASSLG

SEQ ID NO: 89490 - protein, 56 aa, Homo sapiens
MAAQRIRAANSNGLPRCKSEGTLIDLSEGFSETSFNDIKVPSPSALLVDNPTPFGN

SEQ ID NO: 89491 - protein, 223 aa, Homo sapiens
MTQEPFREELAYDRMPTLERGRQDPASYAPDAKPSDLQLSKRLPPCFSHKTWVFSVLMGCIPSAIVSFTVSRRNANVIPNFQILFVSTFAVTTTCLIWFGCKLVLNPSAININFNLILLLLLELLMAATVIIAARSSEEDCKKKKGSMSDSANILDEVPFPARVLKSYSVVEVIAGISAVLGGIIALNVDDSVSGPHLSVTFFWILVACFPSAIASHVAAECP

SEQ ID NO: 89492 - protein, 187 aa, Homo sapiens
MAEAVAAPISPWTMAATIQAMERKIESQAARLLSLEGRTGMAEKKLADCEKTAVEFGNQLEGKWAVLGTLLQEYGLLQRRLENVENLLRNRNFWILRLPPGSKGESPKEWGKLEDWQKELYKHVMRGNYETLVSLDYAISKPEVLSQIEQGKEPCNWRRPGPKIPDVPVDPSPDISVSDFPGASQHL

SEQ ID NO: 89493 - protein, 73 aa, Homo sapiens
MRRRVHQINGHKFMATYLRQPTYCSHCREFIWGVFGKQGYQCQVCTCVVHKRCHHLIVTACTCQNNINKVDSK

SEQ ID NO: 89494 - protein, 177 aa, Homo sapiens
MEPEPEPAAVEVPAGRVLSARELFAARSRSQKLPQRSHGPKDFLPDGSAAQAERLRRCREELWQLLAEQRVERLGSLVAAEWRPEEGFVELKSPAGKFWQTMGFSEQGRQRLHPEEALYLLECGSIHLFHQDLPLSIQEAYQLLLTDHTVTFLQYQVFSHLKRLGYVVRRFQPRSPG

SEQ ID NO: 89495 - protein, 646 aa, Homo sapiens
MLPHVVLTFRRLGCALASCRLAPARHRGSGLLHTAPVARSDRSAPVFTRALAFGDRIALVDQHGRHTYRELYSRSLRLSQEICRLCGCVGGDLREERVSFLCANDASYVVAQWASWMSGGVAVPLYRKHPAAQLEYVICDSQSSVVLASQEYLELLSPVVRKLGVPLLPLTPAIYTGAVEEPAEVPVPEQGWRNKGAMIIYTSGTTGRPKGVLSTHQNIRAVVTGLVHKWAWTKDDVILHVLPLHHVHGVVNALLCPLWVGATCVMMPEFSPQQVWEKFLSSETPRINVFMAVPTIYTKLMEYYDRHFTQPHAQDFLRAVCEEKIRLMVSGSAALPLPVLEKWKNITGHTLLERYGMTEIGMALSGPLTTAVRLPVGCAGFVQCHRPQSPRNMDGMSKARLAEAAGCSIALWASSLLIFSKQPLRWGHILHSHTRTHEPAHGHAAGSVGTPLPGVQVRIVSENPQREACSYTIHAEGDERGTKVTPGFEEKEGELLVRGPSVFREYWNKPEETKSAFTLDGWFKTGDTVVFKDGQYWIRGRTSVDIIKTGGYKVSALEVEWHLLAHPSITDVAVIGVPDMTWGQRVTAVVTLREGHSLSHRELKEWARNVLAPYAVPSELVLVEEIPRNQMGKIDKKALIRHFHPS

SEQ ID NO: 89496 - protein, 87 aa, Homo sapiens
MTHFEDIEPACCRSRAPSPCELPSDPLLSMKQPIMADGPRCKRRKQANPRRKNALESEMSTRSGRCPAAACHRCGPFVTCKVCCFCP

SEQ ID NO: 89497 - protein, 138 aa, Homo sapiens
MLYDYVERKRKENSGAQLHVTYLVSGSLIQNGHSCHKVAVVREDKLEAVKSKLAVTASIHVYSIQKAMLKDSGPLFNTDYDILKSNLQNCSKFSAIQCAAAVPRAPAESSSSSKKFEQSHLHMSSETQANNELTTNGH

SEQ ID NO: 89498 - protein, 38 aa, Homo sapiens
MVPLVAVVSGPRAQLFACLLRLGTQQVGPLQLHTGASH

SEQ ID NO: 89499 - protein, 153 aa, Homo sapiens
MTPQSLLQTTLFLLSLLFLVQGAHGRGHREDFRFCSQRNQTHRSSLHYKPTPDLRISIENSEEALTVHAPFPAAHPASRSFPDPRGLYHFCLYWNRHAGRLHLLYGKRDFLLSDKASSLLCFQHQEESLAQGPPLLATSVTSWWSPQNISLPS

SEQ ID NO: 89500 - protein, 194 aa, Homo sapiens
MDVVARGTTTRRSRLKRSDGSTTSTSFILRQGSADSYTSRPSDSDVSLEEDREAIRQEREQQAAIQLERAKSKPVAFAVKTNVSYCGALDEDVPVPSTAISFDAKDFLHIKEKYNNDWWIGRLVKEGCEIGFIPSPLRLENIRIQQEQKRGRFHGGKSSGNSSSSLGEMVSGTFRATPTSTEFTYFDMALVIVF

SEQ ID NO: 89501 - protein, 126 aa, Homo sapiens
MANKENELACAGHLPEKLHHDSRTYLVNSSDSGSSQTESPSSKYSGFFSEVSQDHETMAQVLFSRNMRLNVALTFWRKRSISELVAYLLRIEDLGVVVDCLPVLTNCLQEEKQYISLGCCVDLLPL

SEQ ID NO: 89502 - protein, 30 aa, Homo sapiens
MKPDCKSSPITRICAQEYHPKSPVSRSDLI

SEQ ID NO: 89503 - protein, 128 aa, Homo sapiens
MNGHISNHPSSFGMYPSQMNGYGSSPTFSQTDREHGSKTSAKALYEQRKNYARDSVSSVSDISQYRVEHLTTFVLDRKDAMITVDDGIRKLKLLDAKGKVWTQDMILQVDDRAVSLIDLESKNELENF

SEQ ID NO: 89504 - protein, 220 aa, Homo sapiens
MDSGTRPVGSCCSSPAGLSREYKLVMLGAGGVGKSAMTMQFISHRFPEDHDPTIEDAYKIRIRIDDEPANLDILDTAGQQAEFTAMRDQYMRAGEGFIICYSITDRRSFHEVREFKQLIYRVRRTDDTPVVLVGNKSDLKQLRQVTKEEGLALAREFSCPFFETSAAYRYYIDDVFHALVREIRRKEKEAVLAMEKKSKPKNSVWKRLKSPFRKKKDSVT

SEQ ID NO: 89505 - protein, 355 aa, Homo sapiens
  MOD_RES (1)..(1): Any amino acid
XSKVRRCRKPGPRDRQLTRVDKSPEMWCIVLFSLLAWVYAEPTMYGEILSPNYPQAYPSEVEKSWDIEVPEGYGIHLYFTHLDIELSENCAYDSVQIISGDTEEGRLCGQRSSNNPHSPIVEEFQVPYNKLQVIFKSDFSNEERFTGFAAYYVATDINECTDFVDVPCSHFCNNFIGGYFCSCPPEYFLHDDMKNCGVNCSGDVFTALIGEIASPNYPKPYPENSRCEYQIRLEKGFQVVVTLRREDFDVEAADSAGNCLDSLVFVAGDRQFGPYCGHGFPGPLNIETKSNALDIIFQTDLTGQKKGWKLRYHGDPMPCPKEDTPNSVWEPAKAKYVFRDVVQITCLDGFEVVEK

SEQ ID NO: 89506 - protein, 699 aa, Homo sapiens
MASLGEETLASASSSSDSDTGGASPPPRKKPRASAAEGVGEPGASAGRAGLSPPSSSSSSSSSSSSSVVVVVGLPPAAAPPAAAAVPHRSSGHSLVSGSIMQANGAGGGGGGGGGGGGGGGGGGGQGQTPELACLSAQNGESSPSSSSSAGDLAHANGLLPSAPSAASNNSNSLNVNNGVPGGAAAASSATVAAASATTAASSSLATPELGSSLKKKKRLSQSDEDVIRLIGQHLNGLGLNQTVDLLMQESGCRLEHPSATKFRNHVMEGDWDKAENDLNELKPLVHSPHAIVVRGALEISQTLLGIIVRMKFLLLQQKYLEYLEDGKVLEALQVLRCELTPLKYNTERIHVLSGYLMCSHAEDLRAKAEWEGKGTASRSKLLDKLQTYLPPSVMLPPRRLQTLLRQAVELQRDRCLYHNTKLDNNLDSVSLLIDHVCSRRQFPCYTQQILTEHCNEVWFCKFSNDGTKLATGSKDTTVIIWQVDPDTHLLKLLKTLEGHAYGVSYIAWSPDDNYLVACGPDDCSELWLWNVQTGELRTKMSQSHEDSLTSVAWNPDGKRFVTGGQRGQFYQCDLDGNLLDSWEGVRVQCLWCLSDGKTVLASDTHQRIRGYNFEDLTDRNIVQEDHPIMSFTISKNGRLALLNVATQGVHLWDLQDRVLVRKYQGVTQGFYTIHSCFGGHNEDFIASGSEEECSSMDS

SEQ ID NO: 89507 - protein, 67 aa, Homo sapiens
  MOD_RES (1)..(1): Any amino acid
XSDVVIFPSSDSQAHPPELLFSASLPALGFSTYSVAQVPRWKPQARAPQPIPRRSWSPALTIENEGC

SEQ ID NO: 89508 - protein, 69 aa, Homo sapiens
MDPLGPAKPQWSWRCCLTTLLFQLLMAVCFFSYLRVSQDDPTVYPNGSRFPDSTGTPAHSIPLILLWTW

SEQ ID NO: 89509 - protein, 349 aa, Homo sapiens
MSLMVVSMACVGLFLVQRAGPHMGNHRKPSLLAHPGPLVKSGERVILQCWSDIMFEHFFLHKEGISKDPSRLVGQIHDGVSKANFSIGPMMLALAGTYRCYGSVTHTTYQLSAPSDPLDIVVTGPYEKPSLSAQPGPKVQAGESVTLSCSSRSSYDMYHLSREGGAHERRLPAVRKVNRTFQADFPLGPATHGGTYRCFGSFRHSPYELSDPSDPLLVSVTGNPSSSWPSPTEPSSKSGNPRHLHILIGTSVVIILFILLLFFLLHLWCSNKKNAAVMDQEPAGNRTANSEDSDEQDPEEVTYAQLDHCVFTQRKITRPSQRPKTPPTDTILYTELPNAKPRSKVVSCP

SEQ ID NO: 89510 - protein, 148 aa, Homo sapiens
  MOD_RES (1)..(1): Any amino acid
XEFVEREVIDFARRNPGVVIYVNSRPCCVPRVVAEYLNGAVREESIHCKSVEEISTLVQKLADQSGLDVIRIRKPFHTDNPSIQGQWHPFTNKPTTFRGLRPREVQDPAPAQDTGLRLSAVAPQILLPGWPDPLEDKLSFDPAGRRET

SEQ ID NO: 89511 - protein, 116 aa, Homo sapiens
MNNFILLEEQLIKKSQQKRRTSPSNFKVRFFVLTKASLAYFEDRHGKKRTLKGSIELSRIKCVEIVKSDISIPCHYKYPFQVVHDNYLLYVFAPDRESRQRWVLALKEEKGSRYVA

SEQ ID NO: 89512 - protein, 355 aa, Homo sapiens
MEQRPGAQPCRAPQERKAEAQPQAPAQSVEGHGQVLLISGLWKQDEDGLSLQSFPGDTAADQLPRPSSARAMSGHTSASNCTARRSKRWGDSSMNCDDCPATKSKRFTKKSRRSEPKAEDPREAPGAPPGTPTSAAEDTASARGAPQHPPERGAQLLLVLCRASALLTQLLRLQLLLQQQHARDRRPPAALVGIVVQPQQEEEAEARRRMEALLSRVLAPHSPAVEVHTAVFCPGRPEGTLDFQARRQQVHRVSLMDRETQTDGPLIRAGPHSCSCATCPCSSACWRRLGLCHSRIFDVLLPRDWQMAPGRGLPNLLTFYRKSSRKPSSHRNACPPSPRNCGCGSGGSRSCLLHH

SEQ ID NO: 89513 - protein, 1014 aa, Homo sapiens
MTVSQKGGPQPTPSPAGPGTQLGPITGEMDEADSAFLKFKQTADDSLSLTSPNTESIFVEDPYTASLRSEIESDGHEFEAESWSLAVDAAYAKKQKREVVKRQDVLYELMQTEVHHVRTLKIMLKVYSRALQEELQFSSKAIGRLFPCADDLLETHSHFLARLKERRQESLEEGSDRNYVIQKIGDLLVQQFSGENGERMKEKYGVFCSGHNEAVSHYKLLLQQNKKFQNLIKKIGNFSIVRRLGVQECILLVTQRITKYPVLVERIIQNTEAGTEDYEDLTQALNLIKDIISQVDAKVSECEKGQRLREIAGKMDLKSSSKLKNGLTFRKEDMLQRQLHLEGMLCWKTTSGRLKDILAILLTDVLLLLQEKDQKYVFASVDSKPPVISLQKLIVREVANEEKAMFLISASLQGPEMYEIYTSSKEDRNAWMAHIQRAVESCPDEEEGPFSLPEEERKVVEARATRLRDFQERLSMKDQLIAQSLLEKQQIYLEMAEMGGLEDLPQPRGLFRGGDPSETLQGELILKSAMSEIEGIQSLICRQLGSANGQAEDGGSSTGPPRRAETFAGYDCTNSPTKNGSFKKKVSSTDPRPRDWRGPPNSPDLKLSDSDIPGSSEESPQVEAPGTESDPRLPTVLESELVQRIQTLSQLLLNLQAVIAHQDSYVETQRAAIQEREKQFRLQSTRGNLLLEQERQRNFEKQREERAALEKLQSQLRHEQQRWERERQWQHQELERAGARLQEREGEARQLRERLEQERAELERQRQAYQHDLERLREAQRAVERERERLELLRRLKKQNTAPGALPPDTLAEAQPPSHPPSFNGEGLEGPRVSMLPSGVGPEYAERPEVARRDSAPTENRLAKSDVPIQLLSATNQFQRQAAVQQQIPTKLAASTKGGKDKGGKSRGSQRWESSASFDLKQQLLLNKLMGKDESTSRNRRSLSPILPGRHSPAPPPDPGFPAPSPPPADSPSEGFSLKAGGTALLPGPPAPSPLPATPLSAKEDASKEDVIFF

SEQ ID NO: 89514 - protein, 342 aa, Homo sapiens
MAHRFPALTQEQKKELSEIAQSIVANGKGILAADESVGTMGNRLQRIKVENTEENRRQFREILFSVDSSINQSIGGVILFHETLYQKDSQGKLFRNILKEKGIVVGIKLDQGGAPLAGTNKETTIQGLDGLSERCAQYKKDGVDFGKWRAVLRIADQCPSSLAIQENANALARYASICQQNGLVPIVEPEVIPDGDHDLEHCQYVTEKVLAAVYKALNDHHVYLEGTLLKPNMVTAGHACTKKYTPEQVAMATVTALHRTVPAAVPGICFLSGGMSEEDATLNLNAINLCPLPKPWKLSFSYGRALQASALAAWGGKAANKEATQEAFMKRAMVRCCHLLST

SEQ ID NO: 89515 - protein, 73 aa, Homo sapiens
MVRTKTWTLKKHFVGYPTNSDFELKTAELPPLKNGEVLLEALFLTVDPYMRVAAKRLKEGDTMMGQQVANQLL

SEQ ID NO: 89516 - protein, 22 aa, Homo sapiens
MRQPPGESDMAVSDALLPSFST

SEQ ID NO: 89517 - protein, 343 aa, Homo sapiens
  MOD_RES (1)..(1): Any amino acid
XACRNGHLQSESGAVPKRKDPLTHTSNSLPRSKTVMKTGSAGLSGHHRAPSYSGLSMVSGVKQGSGPAPTTHKGTPKTNRTNKPSTPTTATRKKKDLKNFRNVDSNLANLIMNEIVDNGTAVKFDDIAGQDLAKQALQEIVILPSLRPELFTGLRAPARGLLLFGPPGNGKTMLAKAVAAESNATFFNISAASLTSKYVQSAGDDRVLVMGATNRPQELDEAVLRRFIKRVYVSLPNEETRLLLLKNLLCKQGSPLTQKELAQLARMTDGYSGSDLTALAKDAALGPIRELKPEQVKNMSASEMRNIRLSDFTESLKKIKRSVSPQTLEAYIRWNKDFGDTTV

SEQ ID NO: 89518 - protein, 30 aa, Homo sapiens
  MOD_RES (1)..(1): Any amino acid
XGVKGQKDVEQHPSLYTSDARSTPTPAVVT

SEQ ID NO: 89519 - protein, 302 aa, Homo sapiens
MDLSGVKKKSLLGVKENNKKSSTRAPSPTKRKDRSDEKSKDRSKDKGATKESSEKDRGRDKTRKRRSASSGSSSTRSRSSSTSSSGSSTSTGSSSGSSSSSASSRSGSSSTSRSSSSSSSSGSPSPSRRRHDNRRRSRSKSKPPKRDEKERKRRSPSPKPTKVHIGRLTRNVTKDHIMEIFSTYGKIKMIDMPVERMHPHLSKGYAYVEFENPDEAEKALKHMDGGQIDGQEITATAVLAPWPRPPPRRFSPPRRMLPPPPMWRRSPPRMRRRSRSPRRRSPVRRRSRSPGRRRHRSRSSSN

SEQ ID NO: 89520 - protein, 171 aa, Homo sapiens
MVIRSTVWLGFPNFVDSVSDMNHTEIWPAAFCVGSAMWIQLLYSACFWWLFCYAVDAYLVIRRSAGLSTILLYHIMAWGLATLLCVEGAAMLYYPSVSRCERGLDHAIPHYVTMYLPLLLVLVANPILFQKTVTAVASLLKGRQGIYTENERRMGAVIKIRFFKIMLVLII

SEQ ID NO: 89521 - protein, 240 aa, Homo sapiens
AIGSFHCGCEPGYQLKGRKCMDVNECRQNVCRPDQHCKNTRGGYKCIDLCPNGMTKAENGTCIDIDECKDGTHQCRYNQICENTRGSYRCVCPRGYRSQGVGRPCMDIDECENTDACQHECKNTFGSYQCICPPGYQLTHNGKTCQDIDECLEQNVHCGPNRMCFNMRGSYQCIDTPCPPNYQRDPVSGFCLKNCPPNDLECALSPYALEYKLVSLPFGIATNQDLIRLVAYTQDGVMHP

SEQ ID NO: 89522 - protein, 223 aa, Homo sapiens
MPVIPAFWEAEAARSPEEIRKVVQSLEQTAREILTLLQGVHQGAGFQDIPKRCLKAREHFGTVKTHLTSLKTKFPAEQYYRFHEHWRFVLQRLVFLAAFVVYLETETLVTREAVTEILGIEPDREKGFHLDVEDYLSGVLILASELSRLSVNSVTAGDYSRPLHISTFINELDSGFRLLNLKNDSLRKRYDGLKYDVKKVEEVVYDLSIRGFNKETAAACVEK

SEQ ID NO: 89523 - protein, 152 aa, Homo sapiens
MTLIEGVGDEVTVLFSVLACLLVLALAWVSTHTAEGGDPLPQPSGTPTPSQPSAAMAATDSMRGEAPGAETPSLRHRGQAAQPEPSTGFTATPPAPDSPQEPLVLRLKFLNDSEQVARAWPHDTIGSLKRTQFPGREQQVRLIYQGQLLGDD

SEQ ID NO: 89524 - protein, 175 aa, Homo sapiens
MGAYKYIQELWRKKQSDVMRFLLRVRCWQYRQLSALHRAPRPTRPDKARRLGYKAKQGYVIYRIRVRRGGRKRPVPKGATYGKPVHHGVNQLKFARSLQSVAEVNAGRHCGALRVLNSYWVGEDSTYKFFEVILIDPFHKAIRRNPDTQWITKPVHKHREMRGLTSAGRKSRGLG

SEQ ID NO: 89525 - protein, 145 aa, Homo sapiens
MDFRGLPGNYHKEENQEHQLGNNTLSSHLQIDKMTDNKTGEVLISENVVASIQPAEGSFEGDLKVPRMEEKEALVPIQKATDSFHTELHPRVAFWIIKLPRRRSHQDALEGGHWLSEKRHRLQAIRDGLRKGTHKDVLEEGTESS

SEQ ID NO: 89526 - protein, 913 aa, Homo sapiens
MEVGSEEEKWEKLDAEFDHFVVDMKPFVLKLPHRTERQRCALWIRKLCEPSGTGAGIMGRKNRNLYAKLLLHMLKRGALEGPFTHRPEPGTLKILPSYMSIYFDEPNPARAKGSSPEGLPAWVLGELETSEHKLNESWKLSSGEDNTLVQSPTDVYSREQYTGKLRVRSHSLSPTHREDGQNITPKICEVYSKKSPVSLDDSDIEARLNSWNLGLDMKTKMMEAKFHEEKLKLQQKHDADVQKILERKNNEIEELKTLYRSKQHETEETIRKLEKKVQTLIRDCQVIRETKEDQIAELKKICEQSTESLNNDWEKKLHNAVAEMEQEKFDLQKQHTENIQELLEDTNVRLNKMESEYMAQTQSTNHMIKELEARVQQLTGEAENSNLQRQKLIQEKAELERCYQITCSELQEVKARRNTLHKEKDHLVNDYEQNMKLLQTKYDADINLLKQEHALSASKASSMIEELEQNVCQLKQQLQESELQRKQQLRDQENKFQMEKSHLKHIYEKKAHDLQSELDKGKEDTQKKIHKFEEALKEKEEQLTRVTEVQRLQAQQADAALEEFKRQVELNSEKVYAEMKEQMEKVEADLTRSKSLREKQSKEFLWQLEDIRQRYEQQIVELKLEHEQEKTHLLQQHNAEKDSLVRDHEREIENLEKQLRAANMEHENQIQEFKKRDAQVIADMEAQVHKLREELINVNSQRKQQLVELGLLREEEKQRATREHEIVVNKLKAESEKMKIELKKTHAAETEMTLEKANSKLKQIEKEYTQKLAKSSQIIAELQTTISSLKEENSQQQLAAERRLQDVRQKFEDEKKQLIRDNDQAIKVLQDELENRSNQVRCAEKKLQHKELESQEQITYIRQEYETKLKGLMPASLRQELEDTISSLKSQVNFLQKRASILQEELTTYQGRR

SEQ ID NO: 89527 - protein, 181 aa, Homo sapiens
MRRLLPSRCGRASCAWPGLLPNGGASERQFEEESEEEPECLEIDFKSRTLSVRRFGLQIEKPRCQKMKDWSKIRKLGLYQLAMDIIIMIRVCKMFRQGLRGFREYQIIETAHWKHPIFSFWDKKMQSRVTFDTMDFIAEEGHFPPKAIQIMQKKPSWRTEDEIQAVCNILQVLDSYRNYAE

SEQ ID NO: 89528 - protein, 117 aa, Homo sapiens
MTRDEALPDSHSAQDFYENYEPKEILGRMKRGELFDYLTEKVTLSEKETRKIMRALLEVICTLHKLNIVHRDLKPENILLDDNMNIKLTDFGFSCQLEPGERLRGLPIPGGATPEPL

SEQ ID NO: 89529 - protein, 401 aa, Homo sapiens
MCPKNASYYGNRAATLMMLGRFREALGDAQQSVRLDDSFVRGHLREGKCHLSLGNAMAACRSFQRALELDHKNAQAQQEFKNANAVMEYEKIAETDFEKRDFRKVVFCMDRALEFAPACHRFKILKAECLAMLGRYPEAQSVASDILRMDSTNADALYVRGLCLYYEDCIEKAVQFFVQALRMAPDHEKACIACRNAKALKAKKEDGNKAFKEGNYKLAYELYTEALGIDPNNIKTNAKLYCNRGTVNSKYEEAVRDYEKVYQTEKTKEHKQLLKNAQLELKKSKRKDYYKILGVDKNASEDEIKKAYRKRALMHHPDRHSGASAEVQKEEEKKFKEVGEAFTILSDPKKKTRYDSGQDLDEEGMNMGDFDPNNIFKAFFGGPGGFSFEASGPGNFFFQFG

SEQ ID NO: 89530 - protein, 47 aa, Homo sapiens
MEDEVVRFAKKMDKMVQKKNAAGALDLLKELKNIPMTLELLQMAIDP

SEQ ID NO: 89531 - protein, 50 aa, Homo sapiens
VNCAYVKWGTRVQDTFTYAKVVALIAIIVMGLVKLCQEICPWPLGFLCQL

SEQ ID NO: 89532 - protein, 145 aa, Homo sapiens
MAGLQELRFPEEKPLLRGQDATELEHDIETPYGLLHVVIRGSPKGNRPAILTYHDVGLNHKLCFNTFFNFEDMQEITKHFVVCHVDAPGQQVGASQFPQGYQFPSMEQLAAMLPSVVQHFGFKYVIGIGVGAGAYVLAKFAVSLP

SEQ ID NO: 89533 - protein, 170 aa, Homo sapiens
MQTCPLAFPGHVSQALGTLLFLAASLSAQNEGWDSPICTEGVVSVSWGENTVMSCNISNAFSHVNIKLRAHGQESAIFNEVAPGYFSRDGWQLQVQGGVAQLVIKGARDSHAGLYMWHLVGHQRNNRQVTLEVSEPRGLKDRASAQLLGPGTSRGAEPQSAPDTGFWPVP

SEQ ID NO: 89534 - protein, 105 aa, Homo sapiens
MMPEFSPQQVWEKFLSSETPRINVFMAVPTIYTKLMEYYDRHFTQPHAQDFLRAVCEEKIRLMVSGSAALPLPVLEKWKNITGHTLLERYGMTEIGMALSGPLTT

SEQ ID NO: 89535 - protein, 212 aa, Homo sapiens
MMLGTEGGEGFVVKVRGLPWSCSADEVQRFFSDCKIQNGAQGIRFIYTREGRPSGEAFVELESEDEVKLALKKDRETMGHRYVEVFKSNNVEMDWVLKHTGPNSPDTANDGFVRLRGLPFGCSKEEIVQFFSGLEIVPNGITLPVDFQGRSTGEAFVQFASQEIAEKALKKHKERIGHRYIEIFKSSRAEVRTHYDPPRKLMAMQRPGPYDR

SEQ ID NO: 89536 - protein, 262 aa, Homo sapiens
METPAAAAPAGSLFPSFLLLACGTLVAALLGAAHRLGLFYQLLHKVDKASVRHGGENVAAVLRAHGVRFIFTLVGGHISPLLVACEKLGIRVVDTRHEVTAVFAADAMARLSGTVGVAAVTAGPGLTNTVTAVKNAQMAQSPILLLGGAASTLLQNRGALQAVDQLSLFRPLCKFCVSVRRVRDIVPTLRAAMAAAQSGTPGPVFVELPVDVLYPYFMVQKEMVPAKPPKGLVGRVVSWYLENYLANLFAGAWEPQPEGPLP

SEQ ID NO: 89537 - protein, 20 aa, Homo sapiens
ACQIRPRKGGPHRDRGDAGA

SEQ ID NO: 89538 - protein, 399 aa, Homo sapiens
  MOD_RES (1)..(1): Any amino acid
XGQELKNPQEETLQAFDSHYDYTICGDSEDMVCTPKSDEFNPCEDIMGYKFLRIVVWFVSLLALLGNVFVLLILLTSHYKLNVPRFLMCNLAFADFCMGMYLLLIASVDLYTHSEYYNHAIDWQTGPGCNTAGFFTVFASELSVYTLTVITLERWYAITFAMRLDRKIRLRHACAIMVGGWVCCFLLALLPLVGISSYAKVSICLPMDTETPLALAYIVFVLTLNIVAFVIVCCCYVKIYITVRNPQYNPGDKDTKIAKRMAVLIFTDFICMAPISFYALSAILNKPLITVSNSKILLVLFYPLNSCANPFLYAIFTKAFQRDVFILLSKFGICKRQAQAYRGQRVPPKNSTDIQVQKVTHEMRQGLHNMEDVYELIENSHLTPKKQGQISEEYMQTVL

SEQ ID NO: 89539 - protein, 581 aa, Homo sapiens
MEKSSSCESLGSQPAAARPPSVDSLSSASTSHSENSVHTKSASVVSSDSISTSADNFSPDLRVLRESNKLAEMEEPPLLPGENIKDMAKDVTYICPFTGAVRGTLTVTNYRLYFKSMERDPPFVLDASLGVINRVEKIGGASSRGENSYGLETVCKGIPNESWRITKINERYELCDTYPALLVVPANIPDEELKRVASFRSRGRIPVLSWIHPESQATITRCSQPMVGVSGKRSKEDEKYLQAIMDSNAQSHKIFIFDARPSVNAVANKAKGGGYESEDAYQNAELVFLDIHNIHVMRESLRKLKEIVYPNIEETHWLSNLESTHWLEHIKLILAGALRIADKVESGKTSVVVHCSDGWDRTAQLTSLAMLMLDGYYRTIRGFEVLVEKEWLSFGHRFQLRVGHGDKNHADADRSPVFLQFIDCVWQMTRQFPTAFEFNEYFLITILDHLYSCLFGTFLCNSEQQRGKENLPKRTVSLWSYINSQLEDFTNPLYGSYSNHVLYPVASMRHLELWVGYYIRWNPRMKPQEPIHNRYKELLAKRAELQKKVEELQREISNRSTSSSERASSPAQCVTPVQTVV

SEQ ID NO: 89540 - protein, 138 aa, Homo sapiens
MSSSRVGLRLAACLLNVSEAGRKYIVENIAKAALLDKNGKKHPQVSVLNIFSDQDYKRSVITIATSVDKLGLAEDLVLHVPGCSVFLFGEADLPEKRSLVQRRKQLGWFTRRDFSALQPDLGAAPSQRCGLTACFRAL

SEQ ID NO: 89541 - protein, 135 aa, Homo sapiens
MDQREILQKFLDEAQSKKITKEEFANEFLKLKRQSTKYKADKTYPTTVAEKPKNIKKNRYKDILPYDYSRVELSLITSDEDSSYINANFIKGVYGPKAYIATQGPLSTTLLDFWRMIWEYSVLCWLWKDWCYLCY

SEQ ID NO: 89542 - protein, 87 aa, Homo sapiens
MWRPAGVQCLNLGSLQSPPTKIKRFSCLSLPTTWDYRCSSVISTLLCCTAGRSPGRPLLCSSGETSGAFLQGSPAPHPCGGRCSPPR

SEQ ID NO: 89543 - protein, 126 aa, Homo sapiens
MVSPATRKSLPKVKAMDFITSTAILPLLFGCLGVFGLFRLLQWVRGKAYLRNAVVVITGATSGLGKECAKVFYAAGAKLVLCGRNGGALEELIRELTASHATKVQTHKPYLVTFDLTDSGAIVAAA

SEQ ID NO: 89544 - protein, 296 aa, Homo sapiens
MSGSSGTPYLGSKISLISKAQIRYEGILYTIDTDNSTVALAKVRSFGTEDRPTDRPAPPREEIYEYIIFRGSDIKDITVCEPPKAQHTLPQDPAIVQLNKRPDEGVRGDGMAFAVLTRCLVVQSSLGSASASPFQPHVPYSPFRGMAPYGPLAASSLLSQQYAASLGLGAGFPSIPVGKSPMVEQAVQTGSADNLNAKKLLPGKGTTGTQLNGRQAQPSSKTASDVVQPAAVQAQGQVNDENRRPQRRRSGNRRTRNRSRGQNRPTNVKENTIKFEGDFDFESANAQFNREELDKE

SEQ ID NO: 89545 - protein, 1280 aa, Homo sapiens
MDPSDFPSPFDPLTLPEKPLAGDLPVDMEFGEDLLESQTAPTRGWAPPGPSPSSGALDLLDTPAGLEKDPGVLDGATELLGLGGLLYKAPSPPEVDHGPEGTLAWDAGDQTLEPGPGGQTPEVVPPDPGAGANSCSPEGLLEPLAPDSPITLQSPHIEEEETTSIATARRGSPGQEEELPQGQPQSPNAPPSPSVGETLGDGINSSQTKPGGSSPPAHPSLPGDGLTAKASEKPPERVQKRSERVRRAEPPKPEVVDSTESIPVSDEDSDAMVDDPNDEDFVPFRPRRSPRMSLRSSVSQRAGRSAVGTKMTCAHCRTPLQKGQTAYQRKGLPQLFCSSSCLTTFSKKPSGKKTCTFCKKEIWNTKDSVVAQTGSGGSFHEFCTSVCLSLYEAQQQRPIPQSGDPADATRCSICQKTGEVLHEVSNGSVVHRLCSDSCFSKFRANKGLKTNCCDQCGAYIYTKTGSPGPELLFHEGQQKRFCNTTCLGAYKKKNTRVYPCVWCKTLCKNFEMLSHVDRNGKTSLFCSLCCTTSYKVKQAGLTGPPRPCSFCRRSLSDPCYYNKVDRTVYQFCSPSCWTKFQRTSPEGGIHLSCHYCHSLFSGKPEVLDWQDQVFQFCCRDCCEDFKRLRGVVSQCEHCRQEKLLHEKLRFSGVEKSFCSEGCVLLYKQDFTKKLGLCCITCTYCSQTCQRGVTEQLDGSTWDFCSEDCKSKYLLWYCKAARCHACKRQGKLLETIHWRGQIRHFCNQQCLLRFYSQQNQPNLDTQSGPESLLNSQSPESKPQTPSQTKVENSNTVRTPEENGNLGKIPVKTRSAPTAPTPPPPPPPATPRKNKAAMCKPLMQNRGVSCKVEMKSKGSQTEEWKPQVIVLPIPVPIFVPVPMHLYCQKVPVPFSMPIPVPVPMFLPTTLESTDKIVETIEELKVKIPSNPLEADILAMAEMIAEAEELDKASSDLCDLVSNQSAEGLLEDCDLFGPARDDVLAMAVKMANVLDEPGQDLEADFPKNPLDINPSVDFLFDCGLVGPEDVSTEQDLPRTMRKGQKRLVLSESCSRDSMSSQPSCTGLNYSYGVNAWKCWVQSKYANGETSKAKPMRIKEDILACSAAELNYGLAQFVREITRPNGERYEPDSIYYLCLGIQQYLLENNRMVNIFTDLYYLTFVQELNKSLSTWQPTLLPNNTGPGKRKREDEAPILEQRENRMNPLRCPVKFYEFYLSKCPESLRTRNDVFYLQPERSCIAESPLWYSVIPMDRSMLESMLNRILAVREIYEELGRPGEEDLD

SEQ ID NO: 89546 - protein, 158 aa, Homo sapiens
MPMLLPHPHQHFLKGLLRAPFRCYHFIFHSSTHLGSGIPCAQPFNSLGLHCTKWMLLSDGLKRKLCVQTTLKDHTEGLSDKEQRFVDKLYTGLIQGQRACLAEAITLVESTHSRKKELAQVLLQKVLLYHREQEQSNKGKPLAFRDCLGPLVLENQHL

SEQ ID NO: 89547 - protein, 394 aa, Homo sapiens
MNIMDFNVKKLAADAGTFLSRAVQFTEEKLGQAEKTELDAHLENLLSKAECTKIWTEKIMKQTEVLLQPNPNARIEEFVYEKLDRKAPSRINNPELLGQYMIDAGTEFGPGTAYGNALIKCGETQKRIGTADRELIQTSALNFLTPLRNFIEGDYKTIAKERKLLQNKRLDLDAAKTRLKKAKAAETRNSQLNSARLEGDNIMVNFSYMLNFLHVKWLKSEQELRITQSEFDRQAEITRLLLEGISSTHAHHLRCLNDFVEAQMTYYAQCYQYMLDLQKQLGSFPSNYLSNNNQTSVTPVPSVLPNAIGSSAMASTSGLVITSPSNLSDLKECSGSRKARVLYDYDAANSTELSLLADEVITVFSVVGMDSDWLMGERGNQKGKVPITYLELLN

SEQ ID NO: 89548 - protein, 141 aa, Homo sapiens
MNDYSALMKAAQSLPTVNLQPLEWAYGSSESPSTSSEGQAGLPSAPSLSFVKGRCMLISRAYFEADISYSQDLIALFKQMDSRRYDVKTRKWSFLLEEHSKLIAKVRCLPQVQLDPLPTTLTLAFASQLKKTSLSLTPDVP

SEQ ID NO: 89549 - protein, 77 aa, Homo sapiens
MGFVTNKSAFKAGDSLYLRRAFVNNLGEERRTRIQIQSIQKALDIQIREIDREKAALKRFLVKLHKTTGYFPQKPLW

SEQ ID NO: 89550 - protein, 102 aa, Homo sapiens
MNPSMKQKQEEIKENIKNSSVPRRTLKMIQPSASGSLVGRENELSAGLSKRKHRNDHLTSTTSSPGVIVPESSENKNLGGVTQESFDLMIKENPSSQYWKEV

SEQ ID NO: 89551 - protein, 396 aa, Homo sapiens [sequence omitted]

SEQ ID NO: 89552 - protein, 218 aa, Homo sapiens
  MOD_RES (1)..(1): Any amino acid
XVEEENTKKQLPEVQLTEEEEVIKSSLMENEPLPPEILEVILSEWWLKEPIRSTGFILDGFPRYPEEAQFLGDRGFFPDAAVFIQVDDQDIFDRLLPAQIEKWKLKQKKKLERKKLIKDMKAKIRVDTIAKRRAELILERDKKRREPNKEKRKRGISENTTCYKCNHMSPWCEYAGLPYRGLLILYSATATATAGTKHCRSGAKVIVALSKQNIHNQK

SEQ ID NO: 89553 - protein, 54 aa, Homo sapiens
MRWPQPGAAARLPPESPGPPESPGPPEREAAAARRWTGAEPQDCAPGSGRPEGK

SEQ ID NO: 89554 - protein, 273 aa, Homo sapiens
MRALPGLLEARARTPRLLLLQCLLAAARPSSADGSAPDSPFTSPPLREEIMANNFSLESHNISLTGSTLYTQYRFTIINSKQMGSYSCFFREEKEQRGTFNFKVPELHGKNKPLISYVGDSTVLTCKCQNCFPLNWTWYSSNGSVKVPVGVQMNKYVINGTYANETKLKITQLLEEDGESYWCRALFQLGESEEHIELVVLSYLVPLKPFLVIVAEVILLVATILLCEKYTQKKKKHSDEGKEFEQIEQLKSDDSNGIENNVPRHRKNESLGQ

SEQ ID NO: 89555 - protein, 253 aa, Homo sapiens
MKKTPVFLESLVTNMLRLRAICPFSWRVFQFRPISCEPLIIQMNKCTDEEQMFGFIERNKAILSEKQVGCAFDMLWKLQKQKTSLLKNAEYVRDHPQFLTLHNLATNKFKLMNDDTLVNVLYVTQQFDIKLLSEFSSCLADQHLYFSPLMGKIADIVHRNLETTQDLSSLSVLMVNISSLISRHFQQQLVNKTELLFDTIDSSEVNVAKSIAKFLRNVRYRYQPLLERCNNVFLSNVDHLDLDSISKILSVYK

SEQ ID NO: 89556 - protein, 70 aa, Homo sapiens
LQQQAEGRKPSGVSQEALRRQGSASGKAPALSPQALKHVWVRTALIEKVLDKVVQYLAENCSGTLCLGIH

SEQ ID NO: 89557 - protein, 165 aa, Homo sapiens
MSACGRKALTLLSSVFAVCGLGLLGIAVSTDYWLYLEEGVIVPQNQSTEIKMSLHSGLWRVCFLAGEERGRCFTIEYVMPMNTQLTSESTVNVLKMIRSATPFPLVSLFFMFIGFILNNIGHIRPHRTILAFVSGIFFILSGKLWIFLTVVSPWWNLATLLFWIN

SEQ ID NO: 89558 - protein, 96 aa, Homo sapiens
MNYVGQLAGQVFVTVKELYKGLNPATLSGCIDIIVIRQPNGNLQCSPFHVRFGKMGVLRSREKVVDIEINGESVDLHMKLGDNGEAFFVQETDNDQ

SEQ ID NO: 89559 - protein, 1114 aa, Homo sapiens
  MOD_RES (1)..(1): Any amino acid
XFYEDNSTWDVHQQFLWGPGLLITPVLDEGAEKVMAYVPDAVWYDYETGSQVRWRKQKVEMELPGDKIGLHLRGGYIFPTQQPNTTTLASRKNPLGLIIALDENKEAKGELFWDNGETKDTVANKVYLLCEFSVTQNRLEVNISQSTYKDPNNLAFNEIKILGTEEPSNVTVKHNGVPSQTSPTVTYDSNLKVAIITDIDLLLGEAYTVEWSIKIRDEEKIDCYPDENGASAENCTARGCIWEASNSSGVPFCYFVNDLYSVSDVQYNSHGATADISLKSSVYANAFPSTPVNPLRLDVTYHKNEMLQFKIYDPNKNRYEVPVPLNIPSMPSSTPEGQLYDVLIKKNPFGIEIRRKSTGTIIWDSQLLGFTFSDMFIRISTRLPSKYLYGFGETEHRSYRRDLEWHTWGMFSRDQPPGYKKNSYGVHPYYMGLEEDGSAHGVLLLNSNAMDVTFQPLPALTYRTTGGVLDFYVFLGPTPELVTQQYTELIGRPVMVPYWSLGFQLCRYGYQNDSEIASLYDEMVAAQIPYDVQYSDIDYMERQLDFTLSPKFAGFPALINRMKADGMRVILILDPAISGNETQPYPAFTRGVEDDVFIKYPNDGDIVWGKVWPDFPDVVVNGSLDWDSQVELYRAYVAFPDFFRNSTAKWWKREIEELYNNPQNPERSLKFDGMWIDMNEPSSFVNGAVSPGCRDASLNHPPYMPHLESRDRGLSSKTLCMESQQILPDGSLVQHYNVHNLYGWSQTRPTYEAVQEVTGQRGVVITRSTFPSSGRWAGHWLGDNTAAWDQLKKSIIGMMEFSLFGISYTGADICGFFQDAEYEMCVRWMQLGAFYPFSRNHNTIGTRRQDPVSWDVAFVNISRTVLQTRYTLLPYLYTLMHKAHTEGVTVVRPLLHEFVSDQVTWDIDSQFLLGPAFLVSPVLERNARNVTAYFPRARWYDYYTGVDINARGEWKTLPAPLDHINLHVRGGYILPWQEPALNTHLSRQKFMGFKIALDDEGTAGGWLFWDDGQSIDTYGKGLYYLASFSASQNTMQSHIIFNNYITGTNPLKLGYIEIWGVGSVPVTSVSISVSGMVITPSFNNDPTTQVLSIDVTDRNISLHNFTSLTWISTL

SEQ ID NO: 89560 - protein, 864 aa, Homo sapiens
MPTAAAPIISSVQKLVLYETRARYFLVGSNNAETKYRVLKIDRTEPKDLVIIDDRHVYTQQEVRELLGRLDLGNRTKMGQKGSSGLFRAVSAFGVVGFVRFLEGYYIVLITKRRKMADIGGHAIYKVEDTNMIYIPNDSVRVTHPDEARYLRIFQNVDLSSNFYFSYSYDLSHSLQYNLTVLRMPLEMLKSEMTQNRQESFDIFEDEGLITQGGSGVFGICSEPYMKYVWNGELLDIIKSTVHRDWLLYIIHGFCGQSKLLIYGRPVYVTLIARRSSKFAGTRFLKRGANCEGDVANEVETEQILCDASVMSFTAGSYSSYVQVRGSVPLYWSQDISTMMPKPPITLDQADPFAHVAALHFDQMFQRFGSPIIILNLVKEREKRKHERILSEELVAAVTYLNQFLPPEHTIVYIPWDMAKYTKSKLCNVLDRLNVIAESVVKKTGFFVNRPDSYCSILRPDEKWNELGGCVIPTGRLQTGILRTNCVDCLDRTNTAQFMVGKCALAYQLYSLGLIDKPNLQFDTDAVRLFEELYEDHGDTLSLQYGGSQLVHRVKTYRKIAPWTQHSKDIMQTLSRYYSNAFSDADRQDSINLFLGVFHPTEGKPHLWELPTDFYLHHKNTMRLLPTRRSYTYWWTPEVIKHLPLPYDEVICAVNLKKLIVKKFHKYEEEIDIHNEFFRPYELSSFDDTFCLAMTSSARDFMPKTVGIDPSPFTVRKPDETGKSVLGNKSNREEAVLQRKTAASAPPPPSEEAVSSSSEDDSGTDREEEGSVSQRSTPVKMTDAGDSAKVTENVVQPMKELYGINLSDGLSEEDFSIYSRFVQLGQSQHKQDKNSQQPCSRCSDGVIKLHCEEPVSLAVQLQGH

SEQ ID NO: 89561 - protein, 10 aa, Homo sapiens
MPGAPGSLEM

SEQ ID NO: 89562 - protein, 930 aa, Homo sapiens
  MOD_RES (1)..(1): Any amino acid
XSDVIMYIQECEGLIRQLQVDLQILRDENYYQLEELAFRVMRLQDELVTLRLECTNLYRKGHFTSLELVPPSTLTTTHLKAEPLTKATHSSSTSWFRKPMTRAELVAISSSEDEGNLRFVYELLSWVEEMQMKLERAEWGNDLPSVELQLETQQHIHTSVEELGSSVKEARLYEGKMSQNFHTSYAETLGKLETQYCKLKETSSFRMRHLQSLHKFVSRATAELIWLNEKEEEELAYDWSDNNSNISAKRNYFSELTMELEEKQDVFRSLQDTAELLSLENHPAKQTVEAYSAAVQSQLQWMKQLCLCVEQHVKENTAYFQFFSDARELESFLRNLQDSIKRKYSCDHNTSLSRLEDLLQDSMAQDEKEQLIQSKSSVASLVGRSKTIVQLKPRSPDHVLKNTISVKAVCDYRQIEITICKNDECVLEDNSQRTKWKVISPTGNEAMVPSVCFLIPPPNKDAIEMASRVEQSYQKVMALWHQLHVNTKSLISWNYLRKDLDLVQTWNLEKLRSSAPGECHQIMKNLQAHYEDFLQDSRDSVLFSVADRLRLEEEVEACKARFQHLMKSMENEDKEETVAKMYISELKNIRLRLEEYEQRVVKRIQSLASSRTDRDAWQDNALRIAEQEHTQEDLQQLRSDLDAVSMKCDSFLHQSPSSSSVPTLRSELNLLVEKMDHVYGLSTVYLNKLKTVDVIVRSIQDAELLVKGYEIKLSQEEVVLADLSALEAHWSTLRHWLSDVKDKNSVFSVLDEEIAKAKVVAEQMSRLTPERNLDLERYQEKGSQLQERWHRVIAQLEIRQSELESIQEVLGDYRACHGTLIKWIEETTAQQEMMKPGQAEDSRVLSEQLSQQTALFAEIERNQTKLDQCQKFSQQYSTIVKDYELQLMTYKAFVESQQKSPGKRRRMLSSSDAITQEFMDLRTRYTALVT

SEQ ID NO: 89563 - protein, 98 aa, Homo sapiens
MFRCGGLAAGALKQKLVPLVRTVCVRSPRQRNRLPGNLFQRWHVPLELQMTRQMASSGASGGKIDNSVLVLIVGLSTVGAGAYEQQSLGQEFIMPTRL

SEQ ID NO: 89564 - protein, 78 aa, Homo sapiens
LGRLNHVAIAVPDLEKAAAFYKNILGAQVDNINAAVMDLKKKKIRSLSEEVKIGAHGKPVIFLHPKDCGGVLVELEQA

SEQ ID NO: 89565 - protein, 241 aa, Homo sapiens
  MOD_RES (1)..(1): Any amino acid
XPDGRLLRGYDQDAYDGKDYIALNEDLSSWTAADTAAQITQRKWEAARVAEQDRAYLEGLCVESLRRYLENGKETLQRADPPKTHVTHHPISDHEVTLRCWALGFYPAEITLTWQRDGEDQTQDTELVETRPAGDRTFQKWAAVVVPSGEEQRYTCHVQHEGLPKPLTLRWEPSSQSTVPIVGIVAGLAVLAVVVIGAVVAAVMCRRKSSGHFLPTGGKGGSYSQAACSDSAQGSDVSLTA

SEQ ID NO: 89566 - protein, 1767 aa, Homo sapiens
MLKRKQSSRVEAQPVTDFGPDESLSDNADILWINKPWVHSLLRICAIISVISVCMNTPMTFEHYPPLQYVTFTLDTLLMFLYTAEMIAKMHIRGIVKGDSSYVKDRWCVFDGFMVFCLWVSLVLQVFEIADIVDQMSPWGMLRIPRPLIMIRAFRIYFRFELPRTRITNILKRSGEQIWSVSIFLLFFLLLYGILGVQMFGTFTYHCVVNDTKPGNVTWNSLAIPDTHCSPELEEGYQCPPGFKCMDLEDLGLSRQELGYSGFNEIGTSIFTVYEAASQEGWVFLMYRAIDSFPRWRSYFYFITLIFFLAWLVKNVFIAVIIETFAEIRVQFQQMWGSRSSTTSTATTQMFHEDAAGGWQLVAVDVNKPQGRAPACLQKMMRSSVFHMFILSMVTVDVIVAASNYYKGENFRRQYDEFYLAEVAFTVLFDLEALLKIWCLGFTGYISSSLHKFELLLVIGTTLHVYPDLYHSQFTYFQVLRVVRLIKISPALEDFVYKIFGPGKKLGSLVVFTASLLIVMSAISLQMFCFVEELDRFTTFPRAFMSMFQILTQEGWVDVMDQTLNAVGHMWAPVVAIYFILYHLFATLILLSLFVAVILDNLELDEDLKKLKQLKQSEANADTKEKLPLRLRIFEKFPNRPQMVKISKLPSDFTVPKIRESFMKQFIDRQQQDTCCLLRSLPTTSSSSCDHSKRSAIEDNKYIDQKLRKSVFSIRARNLLEKETAVTKILSKRPLPTSSPISIRCCLYLGRSHCHSSGVRACTRQRMLSGSFEGQPAKERSILSVQHHIRQERRSLRHGSNSQRISRGKSLETLTQDHSNTVRYRNAQREDSEIKMIQEKKEQAEMKRKVQEEELRENHPYFDKPLFIVGREHRFRNFCRVVVRARFNASKTDPVTGAVKNTKYHQLYDLLGLVTYLDWVMIIVTICSCISMMFESPFRRVMHAPTLQIAEYVFVIFMSIELNLKIMADGLFFTPTAVIRDFGGVMDIFIYLVSLIFLCWMPQNVPAESGAQLLMVLRCLRPLRIFKLVPQMRKVVRELFSGFKEIFLVSILLLTLMLVFASFGVQLFAGKLAKCNDPNIIRREDCNGIFRINVSVSKNLNLKLRPGEKKPGFWVPRVWANPRNFNFDNVGNAMLALFEVLSLKGWVEVRDVIIHRVGPIHGIYIHVFVFLGCMIGLTLFVGVVIANFNENKGTALLTVDQRRWEDLKSRLKIAQPLHLPPRPDNDGFRAKMYDITQHPFFKRTIALLVLAQSVLLSVKWDVEDPVTVPLATMSVVFTFIFVLEVTMKIIAMSPAGFWQSRRNRYDLLVTSLGVVWVVLHFALLNAYTYMMGACVIVFRFFSICGKHVTLKMLLLTVVVSMYKSFFIIVGMFLLLLCYAFAGVVLFGTVKYGENINRHANFSSAGKAITVLFRIVTGEDWNKIMHDCMVQPPFCTPDEFTYWATDCGNYAGALMYFCSFYVIIAYIMLNLLVAIIVENFSLFYSTEEDQLLSYNDLRHFQIIWNMVDDKREGVIPTFRVKFLLRLLRGRLEVDLDKDKLLFKHMCYEMERLHNGGDVTFHDVLSMLSYRSVDIRKSLQLEELLAREQLEYTIEEEVAKQTIRMWLKKCLKRIRAKQQQSCSIIHSLRESQQQELSRFLNPPSIETTQPSEDTNANSQDNSMQPETSSQQQLLSPTLSDRGGSRQDAADAGKPQRKFGQWRLPSAPKPISHSVSSVNLRFGGRTTMKSVVCKMNPMTDAASCGSEVKKWWTRQLTVESDESGDDLLDI

SEQ ID NO: 89567 - protein, 51 aa, Homo sapiens
RQKSTYTSYPKAEPMPSASSAPPASSLYSSPVMPFSPQNSSAPLAEDIDPE

SEQ ID NO: 89568 - protein, 44 aa, Homo sapiens
  MOD_RES (1)..(1): Any amino acid
XGLQVLLTPVLANILEADQEKCWGFDQFFAETSDILHRMCYYIS

SEQ ID NO: 89569 - protein, 174 aa, Homo sapiens
  MOD_RES (1)..(1): Any amino acid
XGKEVSGRLLYAGRAQKRVERQNELKRRFEQMKQDRLRRYQGVNLYVKNLDDSIDDDKLRKEFSPYGVITSAKVMTEGGHSKGFGFVCFSSPEEATKAVTEMNGRIVGTKPLYVALAQRKEERKAILTNQYMQRLSTMRTLSNPLLGSFQQPSSYFLPAMPQPTLVLRPQDPVG

SEQ ID NO: 89570 - protein, 96 aa, Homo sapiens
  MOD_RES (1)..(1): Any amino acid
XFIHRHDEAFSTEPLKNTGRGPPLGFYHVQNLRVLKGQLSHAAPVRPGERARGTHSRIAVEVTKSFIEYIKSQPIVFEVFGHYQQHPFPPLCKDVL

SEQ ID NO: 89571 - protein, 1444 aa, Homo sapiens
MDDRCYPVIFPDERNFRPFTSDSLAAIEKRIAIQKEKKKSKDQTGEVPQPRPQLDLKASRKLPKLYGDIPRELIGKPLEDLDPFYRNHKTFMVLNRKRTIYRFSAKHALFIFGPFNSIRSLAIRVSVHSLFSMFIIGTVIINCVFMATGPAKNSNSNNTDIAECVFTGIYIFEALIKILARGFILDEFSFLRDPWNWLDSIVIGIAIVSYIPGITIKLLPLRTFRVFRALKAISVVSRLKVIVGALLRSVKKLVNVIILTFFCLSIFALVGQQLFMGSLNLKCISRDCKNISNPEAYDHCFEKKENSPEFKMCGIWMGNSACSIQYECKHTKINPDYNYTNFDNFGWSFLAMFRLMTQDSWEKLYQQTLRTTGLYSVFFFIVVIFLGSFYLINLTLAVVTMAYEEQNKNVAAEIEAKEKMFQEAQQLLKEEKEALVAMGIDRSSLTSLETSYFTPKKRKLFGNKKRKSFFLRESGKDQPPGSDSDEDCQKKPQLLEQTKRLSQNLSLDHFDEHGDPLQRQRALSAVSILTITMKEQEKSQEPCLPCGENLASKYLVWNCCPQWLCVKKVLRTVMTDPFTELAITICIIINTVFLAMEHHKMEASFEKMLNIGNLVFTSIFIAEMCLKIIALDPYHYFRRGWNIFDSIVALLSFADVMNCVLQKRSWPFLRSFRVLRVFKLAKSWPTLNTLIKIIGNSVGALGSLTVVLVIVIFIFSVVGMQLFGRSFNSQKSPKLCNPTGPTVSCLRHWHMGDFWHSFLVVFRILCGEWIENMWECMQEANASSSLCVIVFILITVIGKLVVLNLFIALLLNSFSNEERNGNLEGEARKTKVQLALDRFRRAFCFVRHTLEHFCHKWCRKQNLPQQKEVAGGCAAQSKDIIPLVMEMKRGSETQEELGILTSVPKTLGVRHDWTWLAPLAEEEDDVEFSGEDNAQRITQPEPEQQAYELHQENKKPTSQRVQSVEIDMFSEDEPHLTIQDPRKKSDVTSILSECSTIDLQDGFGWLPEMVPKKQPERCLPKGFGCCFPCCSVDKRKPPWVIWWNLRKTCYQIVKHSWFESFIIFVILLSSGALIFEDVHLENQPKIQELLNCTDIIFTHIFILEMVLKWVAFGFGKYFTSAWCCLDFIIVIVSVTTLINLMELKSFRTLRALRPLRALSQFEGMKVVVNALIGAIPAILNVLLVCLIFWLVFCILGVYFFSGKFGKCINGTDSVINYTIITNKSQCESGNFSWINQKVNFDNVGNAYLALLQVATFKGWMDIIYAAVDSTEKEQQPEFESNSLGYIYFVVFIIFGSFFTLNLFIGVIIDNFNQQQKKLGGQDIFMTEEQKKYYNAMKKLGSKKPQKPIPRPLNKCQGLVFDIVTSQIFDIIIISLIILNMISMMAESYNQPKAMKSILDHLNWVFVVIFTLECLIKIFALRQYYFTNGWNLFDCVVVLLSIVTF

SEQ ID NO: 89572 - protein, 104 aa, Homo sapiens
MADNLDEFIEEQKARLAEDKAELESDPPYMEMKGKLSAKLSENSKILISMAKENIPPNSQQTRGSLGIDYGLSLPLGEDYERKKHKLKEELRQDYRRYLTQVET

SEQ ID NO: 89573 - protein, 78 aa, Homo sapiens
MKVSAAPRTSPGRAVGTSSPNSPNGPKAGETGPGTPLRRKPQGHPLTDTVEGSSGTAGCCCACHHHHRARGSAEQRHR

SEQ ID NO: 89574 - protein, 61 aa, Homo sapiens
  MOD_RES (1)..(1): Any amino acid
XNERISGLGLTPEQKQKKAALSVAKNHLRLQEDSSSLFCCFQLQKERKFLKTRRQVMFLSC

SEQ ID NO: 89575 - protein, 103 aa, Homo sapiens
SAEMEPEDSGGIHSQKQKISFLENNLEQLTKLVRDNADLRCELPKLEKRLRATAERVKALEGALKEAKEGAMKDKRRYQQEVDRIKEAVRYKSSGKRGHSAQI

SEQ ID NO: 89576 - protein, 175 aa, Homo sapiens; identical to SEQ ID NO: 45445

SEQ ID NO: 89577 - protein, 63 aa, Homo sapiens
PRVEAKPEVQSQPPRVREQRPRERPGFPPRGPRPADYVSRGSTFKCGREKNKSCKRARNQRWW

SEQ ID NO: 89578 - protein, 375 aa, Homo sapiens
  MOD_RES (1)..(1): Any amino acid
XRKLIETQMERFKVVERETKTKAYSKEGLGLAQKVDPAQKEKEEVGQWLTNTIDTLNMQVDQFESEVESLSVQTRKKKGDKDQKQDRIEGLKRHIEKHRYHVRMLETILRMLDNDSILVDAIRKIKDDVEYYVDSSQDPDFEENEFLYDDLDLEDIPQALVATSPPSHSHMEDEIFNQSSSTPTSTTSSSPIPPSPANCTTENSEDDKKRGRSTDSEVSQSPAKNGSKPVHSNQHPQSPAVPPTYPSGPPPAASALSTTPGNNGVPAPAAPPSALGPKASPAPSHNSGTPAPYAQAVAPPAPSGPSTTQPRPPSVQPSGGGGGGSGGGGSSSSSNSSAGGGAGKQNGATSYSSVVADSPAEVALSSSGGNNASSQ

SEQ ID NO: 89579 - protein, 46 aa, Homo sapiens
LPPKRDETALQEEEELQLALALSQSEAEEKERLNSSAPLAEDIDPE

SEQ ID NO: 89580 - protein, 167 aa, Homo sapiens
  MOD_RES (1)..(1): Any amino acid
XLTEEFLNAPLPSIKEIKTDAHYSILSLLLCLSDSPSNSSYVETPRNKEVEKKDDFDWGKYLMEDEEMDIGPYMDTPNWSEESEEENDQQPLSREDSGIQVDRTPLEEQDQNRKLDPCISWKDDRSWLEHHVVHQYWTARPSHFPHSLHLHSNLAAVWDQHLYSSDP

SEQ ID NO: 89581 - protein, 31 aa, Homo sapiens
  MOD_RES (1)..(1): Any amino acid
XELIAYELTRREAEANRRPLPELNISLCFIP

SEQ ID NO: 89582 - protein, 360 aa, Homo sapiens
  MOD_RES (1)..(1): Any amino acid
XPHSLRYNLMVLSQDGSVQSGFLAEGHLDGQPFLRYDRQKRRAKPQGQWAEDVLGAKTWDTETEDLTENGQDLRRTLTHIKDQKGGLHSLQEIRVCEIHEDSSTRGSRHFYYDGELFLSQNLETQESTVPQSSRAQTLAMNVTNFWKEDAMKTKTHYRAMQADCLQKLQRYLKSGVAIRRTVPPMVNVTCSEVSEGNITVTCRASSFYPRNITLTWRQDGVSLSHNTQQWGDVLPDGNGTYQTWVATRIRQGEEQRFTCYMEHSGNHGTHPVPSGKALVLQSQRTDFPYVSAAMPCFVIIIILCVPCCKKKTSAAEGPELVSLQVLDQHPVGTGDHRDAAQLGFQPLMSATGSTGSTEGA

SEQ ID NO: 89583 - protein, 54 aa, Homo sapiens
MHRGLIHPQSRAVGGDAMTPIVTVLICLGLSLGPRTHVQTGTIPKPTLWAEPDS

SEQ ID NO: 89584 - protein, 138 aa, Homo sapiens
MLFPTSAQESSRGLPDANDLCLGLQSLSLTGWDRPWSTQDSDSSAQSSTHSVKPSHFSTSALPVSVRGWSQRPFKDGGRVSDGPRASCSCCSHSLPNQCFKEMARSFCVAVLGPPRSSQRPLQHRERGQAAPTSCSCE

SEQ ID NO: 89585 - protein, 172 aa, Homo sapiens
VSDERRVSSSGGLQNAQFGIRRDGTLVTGYLSEEEVLDTENPFVQLLSGVVWLIRNGSIYINESQATECDETQETGSFSKFVNVISARTAIGHDRKGQLVLFHADGQTEQRGINLWEMAEFLLKQDVVNAINLDGGGSATFVLNGTLASYPSDHCCSGGSGGRIAIPHLKNR

SEQ ID NO: 89586 - protein, 180 aa, Homo sapiens
MEKRKRQTEIEGKRQQLDEQILLLQHSKSKVLREKWLLQGIPAGTAEEEEARRRQSEEDEFRVKQLEDNIQRLEQEIQTLESEESQISAKEQIILEKLKETEKSFKDFQKGFSSTDGDAVNYISSQLPDLPILCSRTAEPSPGQDGTSRAAAVYAMEINVEKDKQTGETKILSTSTIGPE

SEQ ID NO: 89587 - protein, 133 aa, Homo sapiens
MPGAWMLLLLLLAPLFLRPPGAGGAQTPNATSEGCQIIHPPWEGGIRYRGLTRDQVKAINFLPVDYEIEYVCRGEREVVGPKVRKCLANGSWTDMDTPSRCVRICSKSYLTLENGKVFLTGGDLPALDGARVD

SEQ ID NO: 89588 - protein, 113 aa, Homo sapiens
MPANWTSPQKSSALAPEDHGSSYEGSVSFRDVAIDFSREEWRHLDPSQRNLYRDVMLETYSHLLSVGYQVPEAEVVMLEQGKEPWALQGERPRQSCPAPCLVNSHHLQESFRG

SEQ ID NO: 89589 - protein, 125 aa, Homo sapiens
MAPFLRIAFNSYELGSLQAEDEANQPFCAVKMKEALSTERGKTLVQKKPTMYPEWKSTFDAHIYEGRVIQIVLMRAAEEPVSEVTVGVSVLAERCKKNNGKAEFWLDLQPQAKVLMSVQYFLEDV

SEQ ID NO: 89590 - protein, 366 aa, Homo sapiens
MSAANPETPNSTISREASTQSSSAAASQGWVLPEGKIVPNTVFVGGIDARMDETEIGSCFGRYGSVKEVKIITNRTGVSKGYGFVSFVNDVDVQKIVGSQIHFHGKKLKLGPAIRKQKLCARHVQPRPLVVNPPPPPQFQNVWRNPNTETYLQPQITPNPVTQHVQAYSAYPHSPGQVITGCQLLVYNYQEYPTYPDSAFQVTTGYQLPVYNYQPFPAYPRSPFQVTAGYQLPVYNYQAFPAYPNSPVQVTTGYQLPVYNYQAFPAYPNSPVQVTTGYQLPVYNYQAFPAYPNSPVQVTTGYQLPVYNYQAFPAYPNSAVQVTTGYQFHVYNYQMPPQCPVGEQRRNLWTEAYKWWYLVCLIQRRD

SEQ ID NO: 89591 - protein, 149 aa, Homo sapiens
MAEPASVRRAGGGCRLCRNSGPCRSWIGVTVTFDDVALYFSEQEWEILEKWQKQMYKQEMKTNYETLDSLGYAFSKPDLITWMEQGRMLLISEQGCLDKTRRTTSPPTDEQLNMKNTGKLLCFDDEGTPRTKEEDCRLNGPQKQDLCAA

SEQ ID NO: 89592 - protein, 316 aa, Homo sapiens
MEENNLQCSSVVDGNFEEVPRETAIQFKPPLYRQRYQFVKNLVDQHEPKKVADLGCGDTSLLRLLKVNPCIELLVGVDINEDKLRWRGDSLAPFLGDFLKPRDLNLTITLYHGSVVERDSRLLGFDLITCIELIEHLDSGDLARFPEVVFGYLSPSMIVISTPNSEFNPLFPSVTLRDSDHKFEWTRMEFQTWALYVANRYDYSVEFTGVGEPPAGAENVGYCTQIGIFRKNGGKATESCLSEQHDQHVYKAVFTTSYPSLQQERFFKLVLVNEVSQQVESLRVSHLPRRKEQAGERGDKPKDIGGSKAPVPCFGP

SEQ ID NO: 89593 - protein, 91 aa, Homo sapiens
  MOD_RES (1)..(1): Any amino acid
XLGTEGPLEEEEDGEELIGDGMERDYRAIPELDAYEAEGLALDDEDVEELTASQREAAERAMRQRDREAGRGLGRMRRGLLYGVSCLPRQR

SEQ ID NO: 89594 - protein, 218 aa, Homo sapiens
  MOD_RES (1)..(1): Any amino acid
XPGPLRRREAAAEARKSHSPVKRPRKAQRLRVAYEGSDSEKGEGAEPLKVPVWEPQDWQQQLVNIRAMRNKKDAPVDHLGTEHCYDSSAPPKVRRYQVLLSLMLSSQTKDQVTAGAMQRLRARGLTVDSILQTDDATLGKLIYPVGFWRSKVKYIKQTSAILQQHYGGDIPASVAELVALPGVGPKMAHLAMAVAWGTVSGIGVCGPDHLQGDPRAAS

SEQ ID NO: 89595 - protein, 66 aa, Homo sapiens
MTTFKEAMTFKDVAVVFTEEELGLLDLAQRKLYRDVMLENFRNLLSVGHQAFHRDTFHFLREEKIW

SEQ ID NO: 89596 - protein, 165 aa, Homo sapiens
  MOD_RES (1)..(1): Any amino acid
XHEYFPEMQILAVSGNYCTDKKPAAINWIEGRGKSVVCEAVIPAKVVREVLKTTTEAMIEVNINKNLVGSAMAGSIGGYNAHAANIVTAIYIACGQMLGVQGACKDNPGENARQLARIVCGTVMAGELSLMAALAAGHLVKSHMIHNRSKINLQDLQGACTKKTA

SEQ ID NO: 89597 - protein, 205 aa, Homo sapiens
MENFSTMSKSAVKISLDLLSNPLCEQDQDLLNMVTALDTAMKRMDAFNQEKVNQIQKTVIEPLKKFGSVFPSLNMAVKRREQALQDYRRLQAKVEKYEEKEKTGPVLAKLHQAREELRPVREDFEAKNRQLLEEMPRFYGSRLDYFQPSFESLIRAQVVYYSEMHKIFGDLSHQLDQPGHSDEQRERENEAKLSELRALSIVADD

SEQ ID NO: 89598 - protein, 616 aa, Homo sapiens
MLNFNVPHIKNSTGEPVWKVLIYDRFGQDIISPLLSVKELRDMGITLHLLLHSDRDPIPDVPAVYFVMPTEENIDRMCQDLRNQLYESYYLNFISAISRSKLEDIANAALAASAVTQVAKVFDQYLNFITLEDDMFVLCNQNKELVSYRAINRPDITDTEMETVMDTIVDSLFCFFVTLGAVPIIRCSRGTAAEMVAVKLDKKLRENLRDARNSLFTGDTLGAGQFSFQRPLLVLVDRNIDLATPLHHTWTYQALVHDVLDFHLNRVNLEESSGVENSPAGARPKRKNKKSYDLTPVDKFWQKHKGSPFPEVAESVQQELESYRAQEDEVKRLKSIMGLEGEDEGAISMLSDNTAKLTSAVSSLPELLEKKRLIDLHTNVATAVLEHIKARKLDVYFEYEEKIMSKTTLDKSLLDIISDPDGTPEDKMRLFLIYYISTQQAPSEADLEQYKKALTDAGCNLNPLQYIKQWKAFTKMASAPASYGSTTTKPMGLLSRVMNTGSQFVMEGVKNLVLKQQNLPVTRILDNLMEMKSNPETDDYRYFDPKMLRGNDSSVPRNKNPFQEAIVFVVGGGNYIEYQNLVDYIKGKQGKHILYGCSELFNATQFIKQLSQLGQK

SEQ ID NO: 89599 - protein, 161 aa, Homo sapiens
MNNQKQQKPTLSGQRFKTRKRDEKERFDPTQFQDCIIQGLTETGTDLEAVAKFLDASGAKLDYRRYAETLFDILVAGGMLAPGGTLADDMMRTDVCVFAAQEDLETMQAFAQVFNKLIRRYKYLEKGFEDEVKKLLLFLKGFSESERNKLAMLTGVLLANG

SEQ ID NO: 89600 - protein, 62 aa, Homo sapiens
AQPGGSSWRRIALLILAITIHNVPEGLAVGVGFGAIEKTASATFESARVLNLVSCPGLNLPS

SEQ ID NO: 89601 - protein, 1001 aa, Homo sapiens
MKVTVCFGRTRVVVPCGDGHMKVFSLIQQAVTRYRKAIAKDPNYWIQVHRLEHGDGGILDLDDILCDVADDKDRLVAVFDEQDPHHGGDGTSASSTGTQSPEIFGSELGTNNVSAFQPYQATSEIEVTPSVLRANMPLHVRRSSDPALIGLSTSVSDSNFSSEEPSRKNPTRWSTTAGFLKQNTAGSPKTCDRKKDENYRSLPRDTSNWSNQFQRDNARSSLSASHPMVGKWLEKQEQDEDGTEEDNSRVEPVGHADTGLEHIPNFSLDDMVKLVEVPNDGGPLGIHVVPFSARGGRTLGLLVKRLEKGGKAEHENLFRENDCIVRINDGDLRNRRFEQAQHMFRQAMRTPIIWFHVVPAANKEQYEQLSQSEKNNYYSSRFSPDSQYIDNRSVNSAGLHTVQRAPRLNHPPEQIDSHSRLPHSAHPSGKPPSAPASAPQNVFSTTVSSGYNTKKIGKRLNIQLKKGTEGLGFSITSRDVTIGGSAPIYVKNILPRGAAIQDGRLKAGDRLIEVNGVDLVGKSQEEVVSLLRSTKMEGTVSLLVFRQEDAFHPRELNAEPSQMQIPKETKAEDEDIVLTPDGTREFLTFEVPLNDSGSAGLGVSVKGNRSKENHADLGIFVKSIINGGAASKDGRLRVNDQLIAVNGESLLGKTNQDAMETLRRSMSTEGNKRGMIQLIVARRISKCNELKSPGSPPGPELPIETALDDRERRISHSLYSGIEGLDESPSRNAALSRIMGKYQLSPTVNMPQDDTVIIEDDRLPVLPPHLSDQSSSSSHDDVGFVTADAGTWAKAAISDSADCSLSPDVDPVLAFQREGFGRQIADETKLNTVDDQKAGSPSRDVGPSLGLKKSSSLESLQTAVAEVTLNGDIPFHRPRPRIIRGRGCNESFRAAIDKSYDKPAVDDDDEGMETLEEDTEESSRSGRESVSTASDQPSHSLERQMNGNQEKGDKTDRKKDKTGKEKKKDRDKEKDKMKAKKGMLKGLGDMFSLAKLKPEKR

SEQ ID NO: 89602 - protein, 84 aa, Homo sapiens
  MOD_RES (1)..(1): Any amino acid
XKDMKVLYTNRAQAYMKLEDYEKALVDCEWALKCDEKCTKAYFHMGKANLALKNYSVSRECYKKILEINPKLQTQVFSLHSQAF

SEQ ID NO: 89603 - protein, 291 aa, Homo sapiens
MEQAPNMAEPRGPVDHGVQIRFITEPVSGAEMGTLRRGGRRPAKDARASTYGVAVRVQGIAGQPFVVLNSGEKGGDSFGVQIKGANDQGASGALSSDLELPENPYSQVKGFPAPSQSSTSDEEPGAYWNGKLLRSHSQASLAGPGPVDPSNRSNSMLELAPKVASPGSTIDTAPLSSVDSLINKFDSQLGGQARGRTGRRTRMLPPEQRKRSKSLDSRLPRDTFEERERQSTNHWTSSTKYDNHVGTSKQPAQSQNLSPLSGFSRSRQTQDWVLQSFEEPRRSAQDPTMLQ

SEQ ID NO: 89604 - protein, 150 aa, Homo sapiens
  MOD_RES (1)..(1): Any amino acid
XLLLFCLCAFLSLSWYAALSGQKGDVVDVYQREFLALRDRLHAAEQESLKRSKELNLVLDEIKRAVSERQALRDGDGNRTWGRLTGPPIEAVERLTPARAAPAHRLPSPATPAGQGEQSAARGARGPGPHRSVGGDGHPERAARGALVPD

SEQ ID NO: 89605 - protein, 852 aa, Homo sapiens
MSSMWSEYTIGGVKIYFPYKAYPSQLAMMNSILRGLNSKQHCLLESPTGSGKSLALLCSALAWQQSLSGKPADEGVSEKAEVQLSCCCACHSKDFTNNDMNQGTSRHFNYPSTPPSERNGTSSTCQDSPEKTTLAAKLSAKKQASIYRDENDDFQVEKKRIRPLETTQQIRKRHCFGTEVHNLDAKVDSGKTVKLNSPLEKINSFSPQKPPGHCSRCCCSTKQGNSQESSNTIKKDHTGKSKIPKIYFGTRTHKQIAQITRELRRTAYSGVPMTILSSRDHTCVHPEVVGNFNRNEKCMELLDGKNGKSCYFYHGVHKISDQHTLQTFQGMCKAWDIEELVSLGKKLKACPYYTARELIQDADIIFCPYNYLLDAQIRESMDLNLKEQVVILDEAHNIEDCARESASYSVTEVQLRFARDELDSMVNNNIRKKDHEPLRAVCCSLINWLEANAEYLVERDYESACKIWSGNEMLLTLHKMGITTATFPILQGHFSAVLQKEEKISPIYGKEEAREVPVISASTQIMLKGLFMVLDYLFRQNSRFADDYKIAIQQTYSWTNQIDISDKNGLLVLPKNKKRSRQKTAVHVLNFWCLNPAVAFSDINGKVQTIVLTSGTLSPMKSFSSELGVTFTIQLEANHIIKNSQVWVGTIGSGPKGRNLCATFQNTETFEFQDEVGALLLSVCQTVSQGILCFLPSYKLLEKLKERWLSTGLWHNLELVKTVIVEPQGGEKTNFDELLQVYYDAIKYKGEKDGALLVAVCRGKVSEGLDFSDDNARAVITIGIPFPNVKDLQLTSATAEGTNGYAQSWVSYSKMADAALTTATDETVDIYPRNLLSPSTALVLHSTEVECY

SEQ ID NO: 89606 - protein, 165 aa, Homo sapiens
MEFFISMSETIKYNDDDHKTLFLKTLNEQRLEGEFCDIAIVVEDVKFRAHRCVLAACSTYFKKLFKKLEVDSSSVIEIDFLRSDIFEEVLNYMYTAKISVKKEDVNLMMSSGQILGIRFLDKLCSQKRDVSSPDENNGQSKSKYCLKINRPIGDAADTQDDDVEE

SEQ ID NO: 89607 - protein, 109 aa, Homo sapiens
  MOD_RES (1)..(1): Any amino acid
XFERLYVWLQCFEKYILYPALILNALTIDAFLISNHRRLGTHWDIFLMIIAGMKLLRTSFCNPVYQFINLSFTVIFFHFDYKDISESFLLDFFMVSILFSKDGTHTQRG

SEQ ID NO: 89608 - protein, 157 aa, Homo sapiens
MLLGDSKDVLGPSTVVANSDESQLLTPGKMSQRQGKEAYPTPTKDLHQPSLSPASPHSQGFERGKEDISQNKDESSLSMSKSKSESKLYNGSEKDSSTSSKLTKKESLKVQKKNYREEKKRATKELLSTITDPSVIVMADWLKIRGTLKSWTKLWCV

SEQ ID NO: 89609 - protein, 96 aa, Homo sapiens
MACNIPNQRQRTLSTTGEALYEILGLHKGASNEEIKKTYRKLALKHHPDKNPDDPAATEKFKEINNAHAILTDISKRSIYDKYGSLGLYVAEQFGD

SEQ ID NO: 89610 - protein, 99 aa, Homo sapiens
MARAGSCGGAAAGAGRPEPWELSLEEVLKAYEQPLNEEQAWAVCFQGCRGLRGSPGRRLRDTGDLLLRGDGSVGAREPEAAEPATMVVPLASSEAQLHR

SEQ ID NO: 89611 - protein, 167 aa, Homo sapiens
MDSDEGYNYEFDEDEECSEEDSGAEEEEDEDDDEPDDDTLDLGEVELVEPGLGVGGERDGLLCGETGGGGGSALGPGGGGGGGGGGGGGGPGHEQEEDYRYEVLTAEQILQHMVECIREVNEVIQNPATITRILLSHFNWDKEKLMESISLALNVDISFVCSAGVNI

SEQ ID NO: 89612 - protein, 449 aa, Homo sapiens
MWKSVVGHDVSVSVETQGDDWDTDPDFVNDISEKEQRWGAKTIEGSGRTEHINIHQLRNKVSEEHDVLRKKEMESGPKASHGYGGRFGVERDRMDKSAVGHEYVAEVEKHSSQTDAAKGFGGKYGVERDRADKSAVGFDYKGEVEKHTSQKDYAKGFGGQYGIQKDRVDKSAVGFNEMEAPTTAYKKTTPIEAASSGTRGLKAKFESMAEEKRKREEEEKAQQVARRQQERKAVTKRSPEAPQPVIAMEEPAVPAPLPKKISSEAWPPVGTPPSSESEPVRTSREHPVPLLPIRQTLPEDNEEPPALPPRTLEGLQVEEEPVYEAEPEPEPEPEPEPENDYEDVEEMDRHEQEDEPEGDYEEVLEPEDSSFSSALAGSSGCPAGAGAGAVALGISAVAVYDYQGEGSDELSFDPDDVITDIEMVDEGWWRGRCHGHFGLFPANYVKLLE

SEQ ID NO: 89613 - protein, 173 aa, Homo sapiens
  MOD_RES (1)..(1): Any amino acid
XQDFQENYAGIFHFQFWQYGEWVEVVIDDRLPTKNGQLLFLHSEQGNEFWSALLEKAYAKLNGCYEALAGGSTVEGFEDFTGGISEFYDLKKPPANLYQIIRKALCAGSLLGCSIDVSSAAEAEAITSQKLVKSHAYSVTGVEEVNFQGHPEKLIRLRNPWGEVEWSGAWSDE

SEQ ID NO: 89614 - protein, 405 aa, Homo sapiens
  MOD_RES (1)..(1): Any amino acid
XQVPPAPVNKDDFALVQRPGPGLSQEAARRYGELTKLIRQQHEMCLNHSNQFTQLGNITETTKFEKLAEDCKRSMDILKQAFVRGLPTPTARFEQRTFSVIKIFPDLSSNDMLLFIVKGINLPTPPGLSPGDLDVFVRFDFPYPNVEEAQKDKTSVIKNTDSPEFKEQFKLCINRSHRGFRRAIQTKGIKFEVVHKGGLFKTDRVLGTAQLKLDALEIACEVREILEVLDGRRPTGGRLEVMVRIREPLTAQQLETTTERWLVIDPVPAAVPTVAGPKGKAPPVPAPARESGNRSARPLHSLSVLAFDQERLERKILALRQARRPVPPEVAQQYQDIMQRSQWQRAQLEQGGVGIRREYAAQLERQLQFYTEAARRLGNDGSRDAAKEALYRRNLVESELQRLRR

SEQ ID NO: 89615 - protein, 165 aa, Homo sapiens
MMEIFSETKDVFQLKDLEKIAPKEKGITAMSVKEVLQSLVDDGMVDCERIGTSNYYWAFPSKALHARKHKLEVLESQLSEGSQKHASLQKSIEKAKIGRCETEERTRLAKELSSLRDQREQLKAEVEKYKDCDPQVVEEIRQANKVAKEAANRWTGMYYNNADKL

SEQ ID NO: 89616 - protein, 112 aa, Homo sapiens
  MOD_RES (1)..(1): Any amino acid
XFDKAGPVPKGREDVKRLLKLHKDRFRGDLRWILFCADLPSLIQEGPQCGLVALWMAGTLLSPPSGVPLERLIRVATERGYTAQGEMFSAPATTRTSTMSRVRGRATRHTGR

SEQ ID NO: 89617 - protein, 630 aa, Homo sapiens
GSTFICNTHIIPVKNQEGVAMMFIINFEYVTDNENAATPERVNPILPIKTVNRKFFGFKFPGLRVLTYRKQSLPQEDPDVVVIDSSKHSDDSVAMKHFKSPTKESCSPSEADDTKALIQPSKCSPLVNISGPLDHSSPKRQWDRLYPDMLQSSSQLSHSRSRESLCSIRRASSVHDIEGFGVHPKNIFRDRHASEGPFNHIKSSLLGSTSDSNLNKYSTINKIPQLTLNFSEVKTEKKNSSPPSSDKTIIAPKVKDRTHNVTEKVTQVLSLGADVLPEYKLQTPRINKFTILHYSPFKAVWDWLILLLVIYTAIFTPYSAAFLLNDREEQKRRECGYSCSPLNVVDLIVDIMFIIDILINFRTTYVNQNEEVVSDPAKIAIHYFKGWFLIDMVAAIPFDLLIFGSGSDETTTLIGLLKTARLLRLVRVARKLDRYSEYGAAVLMLLMCIFALIAHWLACIWYAIGNVERPYLTDKIGWLDSLGQQIGKRYNDSDSSSGPSIKDKYVTALYFTFSSLTSVGFGNVSPNTNSEKIFSICVMLIGSLMYASIFGNVSAIIQRLYSGTARYHMQMLRVKEFIRFHQIPNPLRQRLEEYFQHAWTYTNGIDMNMVCMSVFQNESAAGIIVIAKME

SEQ ID NO: 89618 - protein, 409 aa, Homo sapiens
MMCYSILGPFFPKEAEKKGASNTIIGMIFGCFALFELLASLVFGNYLVHIGAKFMFVAGMFVSGGVTILFGVLDRVPDGPVFIAMCFLVRVMDAVSFAAAMTASSSILAKAFPNNVATVLGSLETFSGLGLILGPPVGGFLYQSFGYEVPFIVLGCVVLLMVPLNMYILPNYESDPGEHSFWKLIALPKVGLIAFVINSLSSCFGFLDPTLSLFVLEKFNLPAGYVGLVFLGMALSYAISSPLFGLLSDKRPPLRKWLLVFGNLITAGCYMLLGPVPILHIKSQLWLLVLILVVSGLSAGMSIIPTFPEILSCAHENGFEEGLSTLGLVSGLFSAMWSIGAFMGPTLGGFLYEKIGFEWAAAIQGLWALISGLAMGLFYLLEYSRRKRSKSQNILSTEEERTTLLPNET

SEQ ID NO: 89619 - protein, 179 aa, Homo sapiens
MKATIILLLLAQVSWAGPFQQRGLFDFMLEDEASGIGPEVPDDRDFEPSLGPVCPFRCQCHLRVVQCSDLGLDKVPKDLPPDTTLLDLQNNKITEIKDGDFKNLKNLHALILVNNKISKVSPGAFTPLVKLERLYLSKNQLKELPEKMPKTLQELRAHENEITKVRKVTFNGLNQMIVI

SEQ ID NO: 89620 - protein, 163 aa, Homo sapiens
MRPLQIVPSRLISQLYCGLKPPASTRNQICLKMARPSSSMADFRKFFAKAKHIVIISGAGVSAESGVPTFRGAGGYWRKWQAQDLATPLAFAHNPSRVWEFYHYRREVMGSKEPNAGHRAIAECETRLGKQGRRVVVITQNIDELHRKAGTKNLLEIHALLTL

SEQ ID NO: 89621 - protein, 246 aa, Homo sapiens
MPSRGTRPEDSSVLIPTDNSTPHKEDLSSKIKEQKIVVDELSNLKKNRKVYRQQQNSNIFFLADRTEMLSESKTFIAEEKTMPTTFNREGNKQKNKCEIPSEEFSKDVAAAAADSPNKHVSVPDRITGRAGLKELQAVSPSRIWNFVEINVSMEELQKLRRTRICHLIRPLDTVLDDSIGCAVWFASRGIGWLVAQEGVKSYQSNAKVVLTGIGADEQLAGYSRHRVRFQSHGLEGLNKEIMMELG

SEQ ID NO: 89622 - protein, 59 aa, Homo sapiens
MYGKIIFVLLLSGIVSISASSTTGVAMHTSTSSSVTKSYISSQTNGCVIGNIICSDKSK

SEQ ID NO: 89623 - protein, 63 aa, Homo sapiens
  MOD_RES (1)..(1): Any amino acid
XLGSIAEIDLGVPPPVMKTFKEFLLSLDDSVDETEAVKRYNDYKLDFRRQQMQDFFLAHKDEE

SEQ ID NO: 89624 - protein, 95 aa, Homo sapiens
MSELKDCPLQFHDFKSVDHLKVCPRYTAVLARSEDDGIGIEELDTLQLELETLLSSASRRLRVLEAETQILTDWQDKKGDRRFLKLGRDHELGAP

SEQ ID NO: 89625 - protein, 132 aa, Homo sapiens
MTEQETLALLEVKRDPGVRAEPVMLFCPSALWGATAGGGDPPAICGPVGPALYSLLLQPGRAFHLPAPGYPQTAPSAHWSLCRLPADLLADLCRGPLLPRLRLRPDVSATAVDADVEPLLHVRGGAGAHAHC

SEQ ID NO: 89626 - protein, 304 aa, Homo sapiens
  MOD_RES (1)..(1): Any amino acid
XSAWKLHLLQWEEDSKYDRLGFLLNLDSKLFSKPAPMFLDDSFRKWARIREFVPPFGIKGQDNLIKAILSVTKEYRLTPALDSLRCRRCIIVGNGGVLANKSLGSRIDDYDIVVRLNSAPVKGFEKDVGSKTTLRITYPEGAMQRPEQYERDSLFVLAGFKWQDFKWLKYIVYKERVSASDGFWKSVATRVPKEPPEIRILNPYFIQEAAFTLIGLPFNNGLMGRGNIPTLGSVAVTMALHGCDEVAVAGFGYDMSTPNAPLHYYETVRMAAIKESWTHNIQREKEFLRKLVKARVITDLSSGI

SEQ ID NO: 89627 - protein, 104 aa, Homo sapiens
MSEQGDLNQAIAEEGGTEQETATPENGIVKSESLDEEEKLELQRRLEAQNQERRKSKSGAGKGKLTRSLAVCEESSARPGGESLQDQESIHLQLSSFSSLQEED

SEQ ID NO: 89628 - protein, 157 aa, Homo sapiens
  MOD_RES (1)..(1): Any amino acid
XAAYGHEVGKRPWITGDESIVGLMKDIVGANEKEIALMNALTVNLHLLMLSFFKPTPKRYKILLEAKAFPSDHYAIESQLQLHGLNIEESMRMIKPREGEETLRIEDILEVIEKEGDSIAVILFSGVHFYTGQHFNIPAITKAGQAKVATLGSSSVP

SEQ ID NO: 89629 - protein, 1565 aa, Homo sapiens
  MOD_RES (1)..(1): Any amino acid
XFRDIQEQALQTCAVVVMCKQLYWNWISTFTSGIRLEEQRAADGKTLKQQTVPQQKVGVTGPPDPQVRCPSVIEFGKYEIHTWYSSPYPQEYSRLPKLYLCEFCLKYMKSRTILQQHMKKCGWFHPPANEIYRKNNISVFEVDGNVSTIYCQNLCLLAKLFLDHKTLYYDVEPFLFYVLTQNDVKGCHLVGYFSKEKHCQQKYNVSCIMILPQYQRKGYGRFLIDFSYLLSKREGQAGSPEKPLSDLGRLSYMAYWKSVILECLYHQNDKQISIKKLSKLTGICPQDITSTLHHLRMLDFRSDQFVIIRREKLIQDHMAKLQLNLRPVDVDPECLRWTPVIVSNSVVSEEEEEEAEEGENEEPQCQERELEISVGKSVSHENKEQDSYSVESEKKPEVMAPVSSTRLSKQVLPHDSLPANSQPSRRGRWGRKNRKTQERFGDKDSKLLLEETSSAPQEQYGECGEKSEATQEQYTESEEQLVASEEQPSQDGKPDLPKRRLSEGVEPWRGQLKKSPEALKCRLTEGSERLPRRYSEGDRAVLRGFSESSEEEEEPESPRSSSPPILTKPTLKRKKPFLHRRRRVRKRKHHNSSVVTETISETTEVLDEPFEDSDSERPMPRLEPTFEIDEEEEEEDENELFPREYFRRLSSQDVLRCQSSSKRKSKDEEEDEESDDADDTPILKPVSLLRKRDVKNSPLEPDTSTPLKKKKGWPKGKSRKPIHWKKRPGRKPGFKLSREIMPVSTQACVIEPIVSIPKAGRKPKIQESEETVEPKEDMPLPEERKEEEEMQAEAEEAEEGEEEDAASSEVPAASPADSSNSPETETKEPEVEEEEEKPRVSEEQRQSEEEQQELEEPEPEEEEDAAAETAQNDDHDADDEDDGHLESTKKKELEEQPTREDVKEEPGVQESFLDANMQKSREKIKDKEETELDSEEEQPSHDTSVVSEQMAGSEDDHEEDSHTKEELIELKEEEEIPHSELDLETVQAVQSLTQEESSEHEGAYQDCEETLAACQTLQSYTQADEDPQMSMVEDCHASEHNSPISSVQSHPSQSVRSVSSPNVPALESGYTQISPEQGSLSAPSMQNMETSPMMDVPSVSDHSQQVVDSGFSDLGSIESTTENYENPSSYDSTMGGSICGNSSSQSSCSYGGLSSSSSLTQSSCVVTQQMASMGSSCSMMQQSSVQPAANCSIKSPQSCVVERPPSNQQQQPPPPPPQQPQPPPPQPQPAPQPPPPQQQPQQQPQPQPQQPPPPPPPQQQPPLSQCSMNNSFTPAPMIMEIPESGSTGNISIYERIPGDFGAGSYSQPSATFSLAKLQQLTNTIMDPHAMPYSHSPAVTSYATSVSLSNTGLAQLAPSHPLAGTPQAQATMTPPPNLASTTMNLTSPLLQCNMSATNIGIPHTQRLQGQMPVKGHISIRSKSAPLPSAAAHQQQLYGRSPSAVAMQAGPRALAVQRGMNMGVNLMPTPAYNVNSMNMNTLNAMNSYRMTQPMMNSSYHSNPAYMNQTAQYPMQMQMGMMGSQAYTQQPMQPNPHGNMMYTGPSHHSYMNAAGVPKQSLNGPYMRR

SEQ ID NO: 89630 - protein, 130 aa, Homo sapiens
MIVRVTNRDIICQIAYARIEGDMIVCAAYAHELPKYGVKVGLTNYAAAYCTGLLLARRLLNRFGMDKIYEGQVEVTGDEYNVESIDGQPGAFTCYLDAGLARTTTGNKVFGALKGAVDGGLSIPHSTKRF

SEQ ID NO: 89631 - protein, 271 aa, Homo sapiens
ISPPPVPSSPPSFGGPVTLNVGGTLYSTTLETLTRFPDSMLGAMFRAGTPMPPNLNSQGGGHYFIDRDGKAFRHILNFLRLGRLDLPRGYGETALLRAEADFYQIRPLLDALRELEASQGTPAPTAALLHADVDVSPRLVHFSARRGPHHYELSSVQVDTFRANLFCTDSECLGALRARFGVASGDRAEGSPHFHLEWAPRPVELPEVEYGRLGLQPLWTGGPGERREVVGTPSFLEEVLRVALEHGFRLDSVFPDPEDLLNSRSLRFVRH

SEQ ID NO: 89632 - protein, 151 aa, Homo sapiens
  MOD_RES (1)..(1): Any amino acid
XKNESSFASHKWYAICLSDVGDYEGIKAKIANAYIIKEHFEKAIELNPKDATSIHLMGIWCYTFAEMPWYQRRIAKMLFATPPSSTYEKALGYFHRAEQVDPNFYSKNLLLLGKTYLKLHNKKLAAFWLMKAKDYPAHTEEDKQVKRNRSS

SEQ ID NO: 89633 - protein, 186 aa, Homo sapiens
  MOD_RES (1)..(1): Any amino acid
XMISIISNIIVLGIFIKYKELRTPTNAIIINLAVTDIGVSSIGYPMSAASDLYGSWKFGYAGCQVYAGLNIFFGMASIGLLTVVAVDRYLTICLPDVGRRMTTNTYIGLILGAWINGLFWALMPIIGWASYAPDPTGATCTINWRKNDRFRRAMLAMFKCQTHQTMPVTSILPMDVSQNPLASGRI

SEQ ID NO: 89634 - protein, 257 aa, Homo sapiens
MSPEKQHREEDEVDSVLLSASKILNSSEGVKESGCSDTEYGCIAESENQIQPQSALKVLQQQLESFQALRMQTLQNVSMVQSEISEILNKSIIEVENPQFSSEKNLVFGTRIEKDLEKWTIRDENKETPVLKTLKDPTENQEENLSMEKSHHFEDSKTLHSVEEKLSGDSVNSLPQSVNVPSQIHSEDTLTLRTSTDNLSSNIIIHPSENSDILKNYNNFYRFLPTAPPNVMSQADTVILDKSKITVPFLKHGFCEN

SEQ ID NO: 89635 - protein, 153 aa, Homo sapiens
MASPRTRKVLKEVRVKEGKIFDDVSSGVSQLASKVQGVGSKGWRDVTTFFSGKAEGPLDSPSEGHSYQNSGLDHFQNSNIDQSFWETFGSAEPTKTRKSPSSDSWTCADTSTERRSSDSWEVWGSASTNRNSNSDGGEGGEGTKKAVPPAVPT

SEQ ID NO: 89636 - protein, 121 aa, Homo sapiens
MAASQCLCCSKFLFQRQNLACFLTNPHCGSLVNADGHGEVWTDWNNMSKFFQYGWRCTTNENTYSNRTLMGNWNQERYDLRNIVQPKPLPSQDLSESLTGSQDINLNWILPDTNAQKSQLT

SEQ ID NO: 89637 - protein, 407 aa, Homo sapiens
MDSELMHSIVGSYHKPPERVFVPSFTQNEPSQNCHPANLEVTSPKILHSPNSQALILALKTLQEKIHRLELERTQAEDNLNILSREAAQYKKALENETNERNLAHQELIKQKKDISIQLSSAQSRCTLLEKQLEYTKRMVLNVEREKNMILEQQAQLQREKEQDQMKLYAKLEKLDVLEKECFRLTTTQKTAEDKIKHLEEKLKEEEHQRKLFQDKASEKTKCIKRRPPWQICSKFGALPFVAEKPSRTTSWCKAIPPDSEKSISICDNLSELLMAMQDELDQMSMEHQELLKQMKETESHSVCDDIECELECLLKKMEIKGEQISKLKKHQDSVCKLQQKVQNSKMSEASGIQQEDSYPKGSKNIKNSPRKCLTDTNLFQKNSSFHPIRVHNLQMKLRRDDIMWEQ

SEQ ID NO: 89638 - protein, 240 aa, Homo sapiens
MEYEGHALSLLKECELQGFDGVVCVGGDGSASEVAHALLLRAQKNAGMETDRILTPVRAQLPLGLIPAGSTNVLAHSLHGVPHVITATLHIIMGHVQLVDVCTFSTAGKLLRFGFSAMFGFGGRTLALAEKYRWMSPNQRRDFAVVKALAKLKAEDCEISFLPFNSSDDVQERRAQGSPKSDCNDQWQMIQGQFLNVSIMAIPCLCSVAPRGLAPNTRLNNGSMALIIARNTSRPEFIKH

SEQ ID NO: 89639 - protein, 88 aa, Homo sapiens
MPWRNKEASSPSSANPPLEALQSPSFRGNMADKLKDPSTLGFLEAAVKISHTSPDIPAEVQMSVKEHIMRHTRLQRQTTEPASSTRHT

SEQ ID NO: 89640 - protein, 179 aa, Homo sapiens
MATELEYESVLCVKPDVSVYRIPPRASNRGYRWVKQESEISKESQEMDARPKLDLGFKEGQTIKLCIGNITNKKGGASKPRTARGGGLSLLPPPPGGKVTIPPPSSSVAISNHVTPPPIPKSNHGGSDADILLDLDSPAPVTTPAPTPVSVSNDLWGDFSTASSSVPNQAPQPSNWVQF

SEQ ID NO: 89641 - protein, 130 aa, Homo sapiens
MEERGDSEPTPGCSGLGPGGVRGFGDGGGAPSWAPEDAWMGTHPKYLEMMELDIGDATQVYVAFLVYLDLMESKSWHEVNCVGLPELQLICLVGTEIEGEGLQTVVPTPITASLSHNRSGPGREDLLHCC

SEQ ID NO: 89642 - protein, 1031 aa, Homo sapiens
MDFSSVVCLPPSVIAVNGLDGGGAGENDDEPVLVSLSAAPSPQSEAVANELQELSLQPELTLGLHPGRNPNLPPLSERKNVLQLKLQQRRTREELVSQGIMPPLKSPAAFHEQRRSLERARTEDYLKRKIRSRPERSELVRMHILEETSAEPSLQAKQLKLKRARLADDLNEKIAQRPGPMELVEKNILPVESSLKEAIIVGQVNYPKVADSSSFDEDSSDALSPEQPASHESQGSVPSPLEARVSEPLLSATSASPTQVVSQLPMGRDSREMLFLAEQPPLPPPPLLPPSLTNGTTIPTAKSTPTLIKQSQPKSASEKSQRSKKAKELKPKVKKLKYHQYIPPDQKQDRGAPPMDSSYAKILQQQQLFLQLQILNQQQQQHHNYQAILPAPPKSAGEALGSSGTPPVRSLSTTNSSSSSGAPGPCGLARQNSTSLTGKPGALPANLDDMKVAELKQELKLRSLPVSGTKTELIERLRAYQDQISPVPGAPKAPAATSILHKAGEVVVAFPAARLSTGPALVAAGLAPAEVVVATVASSGVVKFGSTGSTPPVSPTPSERSLLSTGDENSTPGDTFGEMVTSPLTQLTLQASPLQILVKEEGPRAGSCCLSPGGRAELEGRDKDQMLQEKDKQIEALTRMLRQKQQLVERLKLQLEQEKRAQQPAPAPAPLGTPVKQENSFSSCQLSQQPLGPAHPFNPSLAAPATNHIDPCAVAPGPPSVVVKQEALQPEPEPVPAPQLLLGPQGPSLIKGVAPPTLITDSTGTHLVLTVTNKNADSPGLSSGSPQQPSSQPGSPAPAPSAQMDLEHPLQPLFGTPTSLLKKEPPGYEEAMSQQPKQQENGSSSQQMDDLFDILIQSGEISADFKEPPSLPGKEKPSPKTVCGSPLAAQPSPSAELPQAAPPPPGSPSLPGRLEDFLESSTGLPLLTSGHDGPEPLSLIDDLHSQMLSSTAILDHPPSPMDTSELHFVPEPSSTMGLDLADGHLDSMDWLELSSGGPVLSLAPLSTTAPSLFSTDFLDGHDLQLHWDSCL

SEQ ID NO: 89643 - protein, 28 aa, Homo sapiens
MSQIGNQDGKTRNYQQRRIFMMKIHPNQ

SEQ ID NO: 89644 - protein, 66 aa, Homo sapiens
  MOD_RES (1)..(1): Any amino acid
XFRHHSYKDMRQLMKVVNEECPTITRTYSLGKSSRGLKIYAMEISDNPGEHELGEGLWGPAAGLCC

SEQ ID NO: 89645 - protein, 66 aa, Homo sapiens
MAGRPHPYDGNSSDPENWDRKLHSRPRKLYKHSSTSSRIAKGGVDHTKMSLHGASGGHERSRDRRR

SEQ ID NO: 89646 - protein, 193 aa, Homo sapiens
VAAIAETDESAESEGVIDSHKRREILSRRPSYRKILNELSSDVPGVPKIEEERSEEEGTPPSIATMAVPTSIYQTSTGQYNEETELAPSHMAAATGDMPTYQIRAPTAALPQGVVMAASPGSLHSPQQLAEEATRKRELRLMKNREAAKECRRRKKEYVKCLESRVAVLEVQNKKLIEELETLKDICSPKTDY

SEQ ID NO: 89647 - protein, 39 aa, Homo sapiens
MAEDKTKPSELDQGKYDADDNVKIICLGDSAVGKSKHNN

SEQ ID NO: 89648 - protein, 169 aa, Homo sapiens
  MOD_RES (1)..(1): Any amino acid
XKEKEDLCLLKKEEKEEPVAPELATTVPESAEPEAEADGEELDGSDMSAIIYEIPKEPEKRRRSKRSRVMDADGLLEMFHCPYEGCSQVYVALSSFQNHVNLVHRKGKTKVCPHPGCGKKFYLSNHLRRHMIIHSGVREFTCETCGKSFKRKNHLEVHRRTHTGETPLQ

SEQ ID NO: 89649 - protein, 95 aa, Homo sapiens
MSREMQDVDLAEVKPLVEKGETITGLLQEFDVQTKPATTPSSTTRTCRRSPSTLPSATWTPLASRTAQPPSPQGTCTPPWISWLKCFLESFNSLG

SEQ ID NO: 89650 - protein, 81 aa, Homo sapiens
MVAMAEAEAGVAVEVRGLPPAVPDELLTLYFENRRRSGGGPVLSWQRLGCGGVLTFREPADAERVLAQADHELHGAQLSLR

SEQ ID NO: 89651 - protein, 114 aa, Homo sapiens
  MOD_RES (1)..(1): Any amino acid
XYEEKIKNNENKMLLKRMQALEDFHFFPQPYPANESSKLVSEKVDDYEHAAKYMKNSQVRLPLGTLSKSEWEATRLTVTIMREAWLSTVGPGRAPVAASSVKWGTPRPAMQFIL

SEQ ID NO: 89652 - protein, 259 aa, Homo sapiens
MAPTLQQAYRRRWWMACTAVLENLFFSAVLLGWGSLLIILKNEGFYSSTCPAESSTNTTQDEQRRWPGCDQQDEMLNLGFTIGSFVLSATTLPLGILMDRFGPRPVRLVGSACFTASCTLMALASRDVEALSPLIFLALSLNGFGGICLTFTSLTLIYDAGVAFVVIMFTWSGLACLIFLNCTLNWPIEAFPAPEEVNYTKKIKLSGLALDHKVTGDLFYTHVTTMGQRLSQKAPSLEDGSDAFMSPQDVRGTSENLPE

SEQ ID NO: 89653 - protein, 603 aa, Homo sapiens
MSLPVVLPGSCCPVAGLSGGPQAGGPGAAAAAAQEPPLPPLRPRWPRGALQPPSRPRCAATAAAGVLAAPPALSSRRAVAAAAAAAPGSALLPARPLLSLGLLQLILGCCMVALSFGALSLSSSPQVKNSCPFWAGSSVILSGIIGLTTWKRPMILLVNLFVLLSVVCVLLNLAGFILGCQGAQFVSSVPRCDLVDLGEGKICFCCEEFQPAKCTDKENALKLFPVQPCSAVHLLLKKVLFALCALNALTTTVCLVAAALRYLQIFATRRSCIDESQISAEEAEDHGRIPDPDDFVPPVPPPSYFATFYSCTPRMNRRMVGPDVIPLPHIYGARIKGVEVFCPLDPPPPYEAVVSQMDQEQGSSFQMSEGSEAAVIPLDLGCTQVTQDGDIPNIPAEENASTSTPSSTLVRPIRSRRALPPLRTRSKSDPVLHPSEERAAPVLSCEAATQTERRLDLAAVTLRRGLRSRASRCRPRSLIDYKSYMDTKLLVARFLEQSSCTMTPDIHELVENIKSVLKSDEEHMEEAITSASFLEQIMAPLQPSTSRAHKLPSRRQPGLLHLQSCGDLHTFTPAGRPRAERRPRRVEAERPHSLIGVIRETVL

SEQ ID NO: 89654 - protein, 68 aa, Homo sapiens
MLFKLLQRQTYTCLSHRYGLYVCFLGVVVTIVSAFQFGEVVLEWSRDQYHVLFDSYRDNIAGKSFQNR

SEQ ID NO: 89655 - protein, 764 aa, Homo sapiens
SADVLSPLSSPKEASLPPVQTWIKTPEIMKVDEEEVKFPGTNFDEIIDVIQEEEKCDEIPDSEPILEFNRSVKADSTKYNGPPFPPVASTFQPTADILDKVIERKETLENSLIQWVEQEIMSRIISGLFPVQQQIAPSISVSVSETSEPLTSDIVEGTSSGALQLFVDAGVPVNSNVIKHFVNEALAETIAVMLGDREAKKQGPVATGVSGDASTNETYLPARVCTPLPTPQPTPPCSPSSPAKECVLVKTPDSSPCDSDHDMAFPVKEICAEKGDDMPAIMLVNTPTVTPTTTPPPAAAVFTPTLSDISIDKLKVSSPELPKPWGDGDLPLEEENPNSPQEELHPRAIVMSVAKDEEPESMDFPAQPPPPEPVPFMPFPAGTKAPSPSQMPGSDSSTLESTLSVTVTETETLDKPISEGEILFSCGQKLAPKILEDIGLYLTNLNDSLSSTLHDAVEMEDDPPSEGQVIRMSHKKFHADAILSFAKQNQESAVSQQAVYHSEDLENSVGELSEGQRPQLTAAAENILMGHSLYMQPPVTNTQSLDQQCDPKPLSRQFDTVSGSIYEDSCASHGPMSLGELELEPNSKLVLPTTLLTAQENDVNLPVAAEDFSQYQLKQNQDVKQVEHKPSQSYLRVRNKSDIAPSQQQETRSHSVVQAGLELLGSSSLPTSASQSAGITSVSHRTWQHNVFKVHPYCSRWESSATLRFTDAPCQDVSDAAVSEPRGLLSVSESQHNAGGHGVFGGRYLLNGKRQPAQCLCHWF

SEQ ID NO: 89656 - protein, 183 aa, Homo sapiens
QAQGHPGIQTPQRSAPSQASSFTPPASGGPRLPSMTGPLLPGQSFGGPSVSQPNHVSSPPQALPPGTQMTGPLGPLPPMHSPQQPGYQPQQNGSFGPARGPQSNYGGPYPAAPTFGSQPGPPQPLPPKRLDPDAIPSPQLSELPPQQKTRHRIDPDAIPSPIQVIEDDRNNRGTEPFVTGVRG

SEQ ID NO: 89657 - protein, 395 aa, Homo sapiens
MAATLILEPAGRCCWDEPVRIAVRGLAPEQPVTLRASLRDEKGALFQAHARYRADTLGELDLERAPALGGSFAGLEPMGLLWALEPEKPLVRLVKRDVRTPLAVELEVLDGHDPDPGRLLCRVRHERYFLPPGVRREPVRAGRVRGTLFLPPEPGPFPGIVDMFGTGGGLLEYRASLLAGKGFAVMALAYYNYEDLPKTMETLHLEYFEEAVNYLLSHPEGITAAVVINGSVANVGGTLRYKGETLPPVGVNRNRIKVTKDGYADIVDVLNSPLEGPDQKSFIPVERAESTFLFLVGQDDHNWKSEFYANEACKRLQAHGRRKPQIICYPETGHYIEPPYFPLCRASLHALVGSPIIWGGEPRAHAMAQVDAWKQLQTFFHKHLGGHEGTIPSKV

SEQ ID NO: 89658 - protein, 41 aa, Homo sapiens
MSATSVDQRPKGQGNKGAVKPVSEENSFSTKRFDSSKRCCK

SEQ ID NO: 89659 - protein, 56 aa, Homo sapiens
MEHKDDDDDDVSFAKWMSSFWGHSWREEDQRGLRERHRLQATSHRKTSLPCPNSII

SEQ ID NO: 89660 - protein, 304 aa, Homo sapiens
MNFSEVFKLSSLLCKFSPDGKYLASCVQYRLVVRDVNTLQILQLYTCLDQIQHIEWSADSLFILCAMYKRGLVQVWSLEQPEWHCKIDEGSAGLVASCWSPDGRHILNTTEFHLRITVWSLCTKSVSYIKYPKACLQGITFTRDGRYMALAERRDCKDYVSIFVCSDWQLLRHFDTDTQDLTGIEWAPNGCVLAVWDTCLEVRILNHVTWKMITEFGHPAAINDPKIVVYKEAEKSPQLGLGCLSFPPPRAGAGPLPSSESKYEIASVPVSLQTLKPVTDRANPKIGIGMLAFSPDSYFLATRN

SEQ ID NO: 89661 - protein, 438 aa, Homo sapiens
MSLTVVSMACVGFFLLQGAWPLMGGQDKPFLSARPSTVVPRGGHVALQCHYRRGFNNFMLYKEDRSHVPIFHGRIFQESFIMGPVTPAHAGTYRCRGSRPHSLTGWSAPSNPVVIMVTGNHRKPSLLAHPGPLLKSGETVILQCWSDVMFEHFFLHREGISEDPSRLVGQIHDGVSKANFSIGPLMPVLAGTYRCYGSVPHSPYQLSAPSDPLDIVITGLYEKPSLSAQPGPTVQAGENVTLSCSSWSSYDIYHLSREGEAHERRLRAVPKVNRTFQADFPLGPATHGGTYRCFGSFRALPCVWSNSSDPLLVSVTGICRHLHVLIGTSVVIFLFILLLFFLLYRWCSNKKNAAVMDQEPAGDRTVNRQDSDEQDPQEVMYAQLDHCVFIQRKISRPSQRPKTPLTDTSVYTELPNAEPRSKVVSCPRAPQSGLEGVF

SEQ ID NO: 89662 - protein, 69 aa, Homo sapiens
MKSRQKGKKKGSAKERVFGCDLQEHLQHSGQEVPQVLKSCAEFVEEYGVVDGIYRLSGVSSNIQKLRRL

SEQ ID NO: 89663 - protein, 100 aa, Homo sapiens
MACAEFSFHVPSLEELAGVMQKGLKDNFADVQVSVVDCPDLTKEPFTFPVKGICGKTRIAEVGGVPYLLPLVNQKKVYDLNKIAKEIKLPGAFILGAGAG

SEQ ID NO: 89664 - protein, 117 aa, Homo sapiens
MDAFVNSQEWTLSRSVPELKVGIVGNLASGKSALVHRYLTGTYVQEESPEGGRFKKEIVVDGQSYLLLIRDEGGPPEAQFAMWVDAVIFVFSLEDEISFQTVYHYYSRMANYRNTSE

SEQ ID NO: 89665 - protein, 416 aa, Homo sapiens
MLLILLSVALLALSSAQNLNEDVSQEESPSLIAGNPQGAPPQGGNKPQGPPSPPGKPQGPPPQGGNQPQGPPPPPGKPQGPPPQGGNKPQGPPPPGKPQGPPPQGDKSRSPRSPPGKPQGPPPQGGNQPQGPPPPPGKPQGPPPQGGNKPQGPPPPGKPQGPPPQGDNKSRSSRSPPGKPQGPPPQGGNQPQGPPPPPGKPQGPPPQGGNKPQGPPPPGKPQGPPPQGDNKSRSARSPPGKPQGPPPQGGNQPQGPPPPPGKPQGPPPQGGNKPQGPPPPGKPQGPPPQGGSKSRSSRSPPGKPQGPPPQGGNQPQGPPPPPGKPQGPPPQGGNKPQGPPPPGKPQGPPPQGGSKSRSARSPPGKPQGPPQQEGNNPQGPPPPAGGNPQQPQAPPAGQPQGPPRPPQGGRPSRPPQ

SEQ ID NO: 89666 - protein, 222 aa, Homo sapiens
MIMTESREVIDLDPPAETSQEQEDLFIVKVEEEDCTWMQEYNPPTFETFYQRFRHFQYHEASGPREALSQLRVLCCEWLRPELHTKEQILELLVLEQFLTILPEEFQPWVREHHPESGEEAVAVIENIQRELEERRQQIVACPDVLPRKMATPGAVQESCSPHPLTVDTQPEQAPQKPRLLEENALPVLQVPSLPLKDSQELTASLLSTGSQVMSPGTIWSS

SEQ ID NO: 89667 - protein, 154 aa, Homo sapiens
MKEESAAQLGCCHRPMALGGTGGSLSPSLDFQLFRGDQPAPLGTDLQGLQEDALSMKHEPPGLQASSTDDKKFTVKYPQNKDKLGKQPERAGEGAPCPAFSSHNSSSPPPLQNRKSPSPLAFCPCPPVNSISKELPFLLHAFYPGYPLLLPPPH

SEQ ID NO: 89668 - protein, 38 aa, Homo sapiens
PAQGEGVGHSKAPEGLGELTAKQTVGPTDCRVPLPQRP

SEQ ID NO: 89669 - protein, 59 aa, Homo sapiens
MTMETVESQHDGSITASLTESKSAHVQTQTGQNSIPALAQCTMCKESLGIKQPWHAIGD

SEQ ID NO: 89670 - protein, 157 aa, Homo sapiens
MLAGNEFQVSLSSSMSVSELKAQITQKIGVHAFQQRLAVHPSGVALQDRVPLASQGLGPGSTVLLVVDKCDEPLSILVRNNKGRSSTYEVRLTQTVAHLKQQVSGLEGVQDDLFWLTFEGKPLEDQLPLGEYGLKPLSTVFMNLRLRGGGTEPGGRS

SEQ ID NO: 89671 - protein, 94 aa, Homo sapiens
  MOD_RES (1)..(1): Any amino acid
XGRLTGDPDVLEYYKNDHAKKPIRIIDLNLCQQVDAGLTFNKKEFENSYIFDINTIDRIFYLVADSEEEMNKWVRCICDICGFNPTEEGSHFVV

SEQ ID NO: 89672 - protein, 232 aa, Homo sapiens
MPGAAAAAAAAAAAMLPAQEAAKLYHTNYVRNSRAIGVLWAIFTICFAIVNVVCFIQPYWIGDGVDTPQAGYFGLFHYCIGNGFSRELTCRGSFTDFSTLPSGAFKAASFFIGLSMMLIIACIICFTLFFFCNTATVYKICAWMQLTSAACLVLGCMIFPDGWDSDEVKRMCGEKTDKYTLGACSVRWAYILAIIGILDALILSFLAFVLGNRQDSLMAEELKAENKDDGNA

SEQ ID NO: 89673 - protein, 74 aa, Homo sapiens
  MOD_RES (1)..(1): Any amino acid
XSPQDPSEDVSSVDPLKLFDDPDLGGAIPLGDSLLLPAACESGGPTPSLSHRDASKELFRWDHLVAGKQAQGSH

SEQ ID NO: 89674 - protein, 193 aa, Homo sapiens
MATRVRTASIWVPPLQERNSSWDRIRKLQGQESILGQGTPGLQPLPGTPRQKQKSRRIEKVLEWLFISQEQPKITKSWGPLSFMDVFVDFTWEEWQLLDPAQKCLYRSVMLENYSNLVSLGYQHTKPDIIFKLEQGEELCMVQAQVPNQTCPILKAGKSKAKVLAGLVSGEGLLCASKMTPCCCILWRHSLEN

SEQ ID NO: 89675 - protein, 42 aa, Homo sapiens
MDEDTHYDKVEDVVGSHIEDAVTFWAQSINRNKDIMKIGCSL

SEQ ID NO: 89676 - protein, 134 aa, Homo sapiens
MKVTLSALDTSESSFTPLVVIELAQDVKEETKEWLKNRIIAKKKDGGAQLLFRPLLNKYEQETLENQNLYLVGASKIRMLLGAEAVGLVKECNDNTMRAFTYRTRQNFKGFDDNNDDFLTMAECQFIIKHELEN

SEQ ID NO: 89677 - protein, 969 aa, Homo sapiens
MKVNRETKRLYVGGLSQDISEADLQNQFSRFGEVSDVEIITRKDDQGNPQKVFAYINISVAEADLKKCMSVLNKTKWKGGTLQIQLAKESFLHRLAQEREAAKAKKEESTTGNANLLEKTGGVDFHMKAVPGTEVPGHKNWVVSKFGRVLPVLHLKNQHKRKIIKYDPSKYCHNLKKIGEDFSNTIPISSLTWELEGGNDPMSKKRRGEFSDFHGPPKKIIKVQKDESSTGSLAMSTRPRRVIERPPLTQQQAAQKRTCDSITPSKSSPVPVSDTQKLKNLPFKTSGLETAKKRNSISDDDTDSEDELRMMIAKEENLQRTTQPSINESESDPFEVVRDDFKSGVHKLHSLIGLGIKNRVSCHDSDDDIMRNDREYDSGDTDEIIAMKKNVAKVKNSTEFSQMEKSTKKTSFKNRENCELSDHCIKLQKRKSNVESALSHGLKSLNRKSPSHSSSSEDADSASELADSEGGEEYNAMMKNCLRVNLTLADLEQLAGSDLKVPNEDTKSDGPETTTQCKFDRGSKSPKTPTGLRRGRQCIRPAEIVASLLEGEENTCGKQKPKENNLKPKFQAFKGVGCLYEKESMKKSLKDSVASNNKDQNSMKHEDPSIISMEDGSPYVNGSLGEVTPCQHAKKANGPNYIQPQKRQTTFESQDRKAVSPSSSEKRSKNPISRPLEGKKSLSLSAKTHNIGFDKDSCHSTTKTEASQEERSDSSGLTSLKKSPKVSSKDTREIKTDFSLSISNSSDVSAKDKHAEDNEKRLAALEARQKAKEVQKKLVHNALANLDGHPEDKPTHIIFGSDSECETEETSTQEQSHPGEEWVKESMGKTSGKLFDSSDDDESDSEDDSNRFKIKPQFEGRAGQKLMDLQSHFGTDDRFRMDSRFLETDSEEEQEEVNEKKTAEEEELAEEKKKALNVVQSVLQINLSNSTNRGSVAAKKFKDIIHYDPTKQDHATYERKRDDKPKESK

SEQ ID NO: 89678 - protein, 69 aa, Homo sapiens
MNRPAPVEISYENMRFLITHNPTNATLNKFTEELKKYGVTTLVRVCDATYDKAPVEKEGIHVLVHFREY

SEQ ID NO: 89679 - protein, 739 aa, Homo sapiens
MSCVSSYAGFDLSDPEKEKVGILAIQLKERNVVHSEIIITLLSNAVAQFKKYKCPRMKSHLMVQMGEEYYYAKDYTKALKLLDYVMCDYRSEGWWTLLTSVLTTALKCSYLMAQLKDYITYSLELLGRASTLKDDQKSRIEKNLINVLMNESPDPEPDCDILAVKTAQKLWADRISLAGSNIFTIGVQDFVPFVQCKAKFHAPSFHVDVPVQFDIYLKADCPHPIRFSKLCVSFNNQEYNQFCVIEEASKANEVLENLTQGKMCLVPGKTRKLLFKFVAKTEDVGKKIEITSVDLALGNETGRCVVLNWQGGGGDAASSQEALQAARSFKRRPKLPDNEVHWDSIIIQASTMIISRVPNISVHLLHEPPALTNEMYCLVVTVQSHEKTQIRDVKLTAGLKPGQDANLTQKTHVTLHGTELCDESYPALLTDIPVGDLHPGEQLEKMLYVRCGTVGSRMFLVYVSYLINTTVEEKEIVCKCHKDETVTIETVFPFDVAVKFVSTKFEHLERVYADIPFLLMTDLLSASPWALTIVSSELQLAPSMTTVDQLESQVDNVILQTGESASECFCLQCPSLGNIEGGVATGHYIISWKRTSAMENIPIITTVITLPHVIVENIPLHVNADLPSFGRVRESLPVKYHLQNKTDLVQDVEISVEPSDAFMFSGLKQIRLRILPGTEQEMLYNFYPLMAGYQQLPSLNINLLRFPNFTNQLLRRFIPTSIFVKPQGRLMDDTSIAAA

SEQ ID NO: 89680 - protein, 1964 aa, Homo sapiens
MAADDDNGDGTSLFDVFSASPLKNNDEGSLDIYAGLDSAVSDSASKSCVPSRNCLDLYEEILTEEGTAKEATYNDLQVEYGKCQLQMKELMKKFKEIQTQNFSLINENQSLKKNISALIKTARVEINRKDEEISNLHQRLSEFPHFRNNHKTARTFDTVKTKDLKSRSPHLDDCSKTDHRAKSDVSKDVHHSTSLPNLEKEGKPHSDKRSTSHLPTSVEKHCTNGVWSRSHYQVGEGSSNEDSRRGRKDIRHSQFNRGTERVRKDLSTGCGDGEPRILEASQRLQGHPEKYGKGEPKTESKSSKFKSNSDSDYKGERINSSWEKETPGERSHSRVDSQSDKKLERQSERSQNINRKEVKSQDKEERKVDQKPKSVVKDQDHWRRSERASLPHSKNEITFSHNSSKYHLEERRGWEDCKRDKSVNSHSFQDGRCPSSLSNSRTHKNIDSKEVDAMHQWENTPLKAERHRTEDKRKREQESKEENRHIRNEKRVPTEHLQKTNKETKKTTTDLKKQNEPKTDKGEVLDNGVSEGADNKELAMKAESGPNETKNKDLKLSFMKKLNLTLSPAKKQPVSQDNQHKITDIPKSSGVCDSESSMQVKTVAYVPSISEHILGEAAVSEHTMGETKSTLLEPKVALLAVTEPRIGISETNKEDENSLLVRSVDNTMHCEEPICGTETSFPSPMEIQQTESLFPSTGMKQTINNGRAAAPVVMDVLQTDVSQNFGLELDTKRNDNSDYCGISEGMEMKVALSTTVSETTESILQPSIEEADILPIMLSEDNNPKFEPSVIVTPLVESKSCHLEPCLPKETLDSSLQQTELMDHRMATGETNSVYHDDDNSVLSIDLNHLRPIPEAISPLNSPVRPVAKVLRNESPPQVPVYNNSHKDVFLPNSAHSTSKSQSDLNKENQKPIYKSDKCTEADTCKNSPLDELEEGEIRSDSETSKPQESFEKNSKRRVSADVRKSKTIPRRGKSTVCLDKDSRKTHVRIHQTNNKWNKRPDKSSRSSKTEKKDKVMSTSSLEKIVPIIAVPSSEQEIMHMLRMIRKHVRKNYMKFKAKFSLIQFHRIIESAILSFTSLIKHLNLHKISKSVTTLQKNLCDIIESKLKQVKKNGIVDRLFEQQLPDMKKKLWKFVDDQLDYLFAKLKKILVCDSKSFGRDSDEGKLEKTSKQNAQYSNSQKRSVDNSNRELLKEKLSKSEDPVHYKSLVGCKKSEENYQDQNNSSINTVKHDIKKNFNICFDNIKNSQSEERSLEVHCPSTPKSEKNEGSSIEDAQTSQHATLKPERSFEILTEQQASSLTFNLVSDAQMGEIFKSLLQGSDLLDSSVNCTEKSEWELKTPEKQLLETLKCESIPACTTEELVSGVASPCPKMISDDNWSLLSSEKGPSLSSGLSLPVHPDVLDESCMFEVSTNLPLSKDNVCSVEKSKPCVSSILLEDLAVSLTVPSPLKSDGHLSFLKPDMSSSSTPEEVISAHFSEDALLEEEDASEQDIHLALESDNSSSKSSCSSSWTSRSVAPGFQYHPNLPMHAVIMEKSNDHFIVKIRRATPSTSSGLKQSMMPDELLTSLPRHGKEADEGPEKEYISCQNTVFKSVEELENSNKNVDGSKSTHEEQSSMIQTQVPDIYEFLKDASDKMGHSDEVADECFKLHQVWETKVPESIEELPSMEEISHSVGEHLPNTYVDLTKDPVTETKNLGEFIEVTVLHIDQLGCSGGNLNQSAQILDNSLQADTVGAFIDLTQDASSEAKSEGNHPALAVEDLGCGVIQVDEDNCKEEKAQVANRPLKCIVEETYIDLTTESPSSCEVKKDELKSEPGSNCDNSELPGTLHNSHKKRRNISDLNHPHKKQRKETDLTNKEKTKKPTQDSCENTEAHQKKASKKKAPPVTKDPSSLKATPGIKDSSAALATSTSLSAKNVIKKKGEIIILWTRNDDREILLECQKRGPSFKTFAYLAAKLDKNPNQ

SEQ ID NO: 89681 - protein, 244 aa, Homo sapiens
  MOD_RES (1)..(1): Any amino acid
XRGLVCCAYPPGAFVSVSRDRTTRLWAPDRSFTEMHCMSGHSNFVSCVCIIPSSDIYPHGLIATGGNDHNICIFSLDSPMPLYILKGHKNTVCSLSSGKFGTLLSGSWDTTAKVWLNDKCMMTLQGHTAAVWAVKILPEQGLMLTGSADKTVKLWKAGRCERTFSGHEDCVRGLAILSETEFLSCANDASIRRWQITGECLEVYYGHTNYIYSISVFPNCRDFVTTAEDRSLRIWKHGECAQTI

SEQ ID NO: 89682 - protein, 137 aa, Homo sapiens
MEIPVPVQPSWLRRASAPLPGLSAPGRLFDQRFGEGLLEAELAALCPTTLAPYYLRAPSVALPVAQVPTDPGHFSVLLDVKHFSPEEIAVKVVGEHVEVHARHEERPVSRGVGRGWSGYARRRAGGAGPLKPPSPPG

SEQ ID NO: 89683 - protein, 67 aa, Homo sapiens
MDGKKCSVWMFLPLVFTLFTSAGLWIVYFIAVEDDKILPLNSAERKPGVKHAPYISIAGDDPPASCV

SEQ ID NO: 89684 - protein, 204 aa, Homo sapiens
MEFRFCRPGWSAMVRSRFTITSTSRVQAILLPQPPRFHGMISREAADQLLIVAEGSYLIRESQRQPGTYTLALRFGSQTRNFRLYYDGKHFVGEKRFESIHDLVTDGLITLYIETKAAEYIAKMTINPIYEHVGYTTLNREPAYKKHMPVLKETHDERDSTGQDGVSEKRLTSLVRRATLKENEQIPKYEKIHNFKVHTFRGPH

SEQ ID NO: 89685 - protein, 142 aa, Homo sapiens
MVDVPGHGKVMVDIAYGGAFYAFVTAEKLGLDICSAKTRDLVDAASAVTEAVKAQFKINHPDSEDLAFLYGTILTDGKDAYTKEPTTNICVFADEQVDRSPTGSGVTARIALQYHKGLLELNQMRAFKSSATGSVFTGKAVR

SEQ ID NO: 89686 - protein, 49 aa, Homo sapiens
MPSDKTIGGGDDSFNTFFSETGAGKHVPRAVFVDLEPTVIDEVRTGTYR

SEQ ID NO: 89687 - protein, 171 aa, Homo sapiens
  MOD_RES (1)..(1): Any amino acid
XNLGPLSPLLARQPPPHRIPQAKLVAMLQTRDPPRASARPRCLPRATLSAGCCQWGMGPVLGWEPEPPGLGRASGTSKWPHPLLLRPQKPSHSRRRGTCCGCLRHSGKQLPRTRACGPSSVPHRPVIPRMPPLPKPSSSRTCRQLQAGPSPGSVLWRWRRRRGACGRPARC

SEQ ID NO: 89688 - protein, 1635 aa, Homo sapiens
MTSAQCPALACVMSPLRFWGPWPLLMWQLLWLLVKEAQPLEWVKDPLQLTSNPLGPPEPWSSHSSHFPRESPHAPTLPADPWDFDHLGPSASSEMPAPPQESTENLVPFLDTWDSAGELPLEPEQFLASQQDLKDKLSPQERLPVSPKKLKKDPAQRWSLAEIIGIIRQLSTPQSQKQTLQNEYSSTDTPYPGSLPPELRVKSDEPPGPSEQVGPSQFHLEPETQNPETLEDIQSSSLQQEAPAQLPQLLEEEPSSMQQEAPALPPESSMESLTLPNHEVSVQPPGEDQAYYHLPNITVKPADVEVTITSEPTNETESSQAQQETPIQFPEEVEPSATQQEAPIEPPVPPMEHELSISEQQQPVQPSESPREVESSPTQQETPGQPPEHHEVTVSPPGHHQTHHLASPSVSVKPPDVQLTIAAEPSAEVGTSLVHQEATTRLSGSGNDVEPPAIQHGGPPLLPESSEEAGPLAVQQETSFQSPEPINNENPSPTQQEAAAEHPQTAEEGESSLTHQEAPAQTPEFPNVVVAQPPEHSHLTQATVQPLDLGFTITPESKTEVELSPTMKETPTQPPKKVVPQLRVYQGVTNPTPGQDQAQHPVSPSVTVQLLDLGLTITPEPTTEVGHSTPPKRTIVSPKHPEVTLPHPDQVQTQHSHLTRATVQPLDLGFTITPKSMTEVEPSTALMTTAPPPGHPEVTLPPSDKGQAQHSHLTQATVQPLDLELTITTKPTTEVKPSPTTEETSTQPPDLGLAIIPEPTTETGHSTALEKTTAPRPDRVQTLHRSLTEVTGPPTELEPAQDSLVQSESYTQNKALTAPEEHKASTSTNICELCTCGDEMLSCIDLNPEQRLRQVPVPEPNTHNGTFTILNFQGNYISYIDGNVWKAYSWTEKLILRENNLTELHKDSFEGLLSLQYLDLSCNKIQSIERHTFEPLPFLKFINLSCNVITELSFGTFQAWHGMQFLHKLILNHNPLTTVEDPYLFKLPALKYLDMGTTLVPLTTLKNILMMTVELEKLILPSHMACCLCQFKNSIEAVCKTVKLHCNSACLTNTTHCPEEASVGNPEGAFMKVLQARKNYTSTELIVEPEEPSDSSGINLSGFGSEQLDTNDESDFISTLRYILPYFSAVNLDVKSLLLPLIKLPTTGNSLAKIQTVGQNRQRVKRVLMGPRSIQKRHFKEVGRQSIRREQGAQASVENAAEEKRLGSPAPREVEQPHTQQGPEKLAGNAVYTKPSFTQEHKAAVSVLKPFSKGAPSTSSPAKALPQVRDRWKDLTHAISTLESAKARVTNTKTSKPIVHARKKYRFHKTRSHVTHRTPKVKKSPKVRKKSYLSRLMLANRLPFSAAKSLINSPSQGAFSSLGDLSPQENPFLEVSAPSEHFIEKNNTKHTTARNAFEENDFMENTNMPEGTISENTNYNHPPEADSAGTAFNLGPTVKQTETKWEYNNVGTDLSPEPKSFNYPLLSSPGDQFEIQLTQQLQSLIPNNNVRRLIAHVIRTLKMDCSGAHVQVTCAKLISRTGHLMKLLSGQQEVKASKIEWDTDQWKIENYINESTEAQSEQKEKSLELKKEVPGYGYTDKLILALIVTGILTILIILFCLIVICCHRRSLQEDEEGFSRDSEAPTEEEESEALP

SEQ ID NO: 89689 - protein, 1094 aa, Homo sapiens
MDPPAGAARRLLCPALLLLLLLLPPPLLPPPPPPANARLAAAADPPGGPLGHGAERILAVPVRTDAQGRLVSHVVSAATSRAGVRARRAAPVRTPSFPGGNEEEPGSHLFYNVTVFGRDLHLRLRPNARLVAPGATMEWQGEKGTTRVEPLLGSCLYVGDVAGLAEASSVALSNCDGLAGLIRMEEEEFFIEPLEKGLAAQEAEQGRVHVVYRRPPTSPPLGGPQALDTGASLDSLDSLSRALGVLEEHANSSRRRARRHAADDDYNIEVLLGVDDSVVQFHGKEHVQKYLLTLMNIVNEIYHDESLGAHINVVLVRIILLSYGKSMSLIEIGNPSQSLENVCRWAYLQQKPDTGHDEYHDHAIFLTRQDFGPSGMQGYAPVTGMCHPVRSCTLNHEDGFSSAFVVAHETGHVLGMEHDGQGNRCGDEVRLGSIMAPLVQAAFHRFHWSRCSQQELSRYLHSYDCLLDDPFAHDWPALPQLPGLHYSMNEQCRFDFGLGYMMCTAFRTFDPCKQLWCSHPDNPYFCKTKKGPPLDGTMCAPGKHCFKGHCIWLTPDILKRDGSWGAWSPFGSCSRTCGTGVKFRTRQCDNPHPANGGRTCSGLAYDFQLCSRQDCPDSLADFREEQCRQWDLYFEHGDAQHHWLPHEHRDAKERCHLYCESRETGEVVSMKRMVHDGTRCSYKDAFSLCVRGDCRKVGCDGVIGSSKQEDKCGVCGGDNSHCKVVKGTFTRSPKKHGYIKMFEIPAGARHLLIQEVDATSHHLAVKNLETGKFILNEENDVDASSKTFIAMGVEWEYRDEDGRETLQTMGPLHGTITVLVIPVGDTRVSLTYKYMIHEDSLNVDDNNVLEEDSVVYEWALKKWSPCSKPCGGGSQFTKYGCRRRLDHKMVHRGFCAALSKPKAIRRACNPQECSQPVWVTGEWEPCSQTCGRTGMQVRSVRCIQPLHDNTTRSVHAKHCNDARPESRRACSRELCPGRWRAGPWSQCSVTCGNGTQERPVLCRTADDSFGICQEERPETARTCRLGPCPRNISDPSKKSYVVQWLSRPDPDSPIRKISSSNRPVYNSASALQCMPCALWSLPWAPLLSVYGKLP

SEQ ID NO: 89690 - protein, 456 aa, Homo sapiens
MLESVNVRLEDLITVITQTESHRQRLLQEAAANWHSWLIKVQKMKAVYHILNMCNIDVTQQCVIAEIWFPVADATRIKRALEQGMELSGSSMAPIMTTVQSKTAPPTFNRTNKFTAGFQNIVDAYGVGSYREINPAPYTIITFPFLFAVMFGDCGHGTVMLLAALWMILNERRLLSQKTDNEIWNTFFHGRYLILLMGIFSIYTGLIYNDCFSKSLNIFGSSWSVQPMFRNGTWNTHVMEESLYLQLDPAIPGVYFGNPYPFGIDPIWNLASNKLTFLNSYKMKMSVILGIVQMVFGVILSLFNHIYFRRTLNIILQFIPEMIFILCLFGYLVFMIIFKWCCFDVHVSQHAPSILIHFINMFLFNYSDSSNAPLYKHQQEVQSFFVVMALISVPWMLLIKPFILRASHRKSQLQASRIQEDATENIEGDSSSPSSRSGQRTSADTHGALDDHGEEG

SEQ ID NO: 89691 - protein, 21 aa, Homo sapiens
  MOD_RES (1)..(1): Any amino acid
XDIFERIAGGVAETSQQAHLH

SEQ ID NO: 89692 - protein, 228 aa, Homo sapiens
MGLLLPFSDCFREPCNQNAQTNAASFDQDQLYTWAAVSQPTHSLDYSEGQFPRRVPSMGPPSKPPDEEHRLEDAETEDDGESQSAVSETPQKRSDAVQKEVVDMKSEGQATVIQQLEQTIEDLRTKIAELERQYPALDTEVASGHQGLENGVTASGDVCLEALRLEEKEVRHHRILEAKSIQTSPTEEGGVLTLPPVDGLPGRPPCPPGAESGPQTKFCSEISLIVSP

SEQ ID NO: 89693 - protein, 8 aa, Homo sapiens
MSSLGGGS

SEQ ID NO: 89694 - protein, 114 aa, Homo sapiens
MGPGLLCWALLCLLGAGSVDAGVTQSPTHLIKTRGQQVTLRCSSQSGHNTVSWYQQALGQGPQFIFQYYREEENGRGNFPPRFSGLQFPNDSSELNVNALELDDSALYLCASSL

SEQ ID NO: 89695 - protein, 793 aa, Homo sapiens
MNLQPIFWIGLISSVCCVFAQTDENRCLKANAKSCGECIQAGPNCGWCTNSTFLQEGMPTSARCDDLEALKKKGCPPDDIENPRGSKDIKKNKNVTNRSKGTAEKLKPEDITQIQPQQLVLRLRSGEPQTFTLKFKRAEDYPIDLYYLMDLSYSMKDDLENVKSLGTDLMNEMRRITSDFRIGFGSFVEKTVMPYISTTPAKLRNPCTSEQNCTSPFSYKNVLSLTNKGEVFNELVGKQRISGNLDSPEGGFDAIMQVAVCGSLIGWRNVTRLLVFSTDAGFHFAGDGKLGGIVLPNDGQCHLENNMYTMSHYYDYPSIAHLVQKLSENNIQTIFAVTEEFQPVYKELKNLIPKSAVGTLSANSSNVIQLIIDAYNSLSSEVILENGKLSEGVTISYKSYCKNGVNGTGENGRKCSNISIGDEVQFEISITSNKCPKKDSDSFKIRPLGFTEEVEVILQYICECECQSEGIPESPKCHEGNGTFECGACRCNEGRVGRHCECSTDEVNSEDMDAYCRKENSSEICSNNGECVCGQCVCRKRDNTNEIYSGKFCECDNFNCDRSNGLICGGNGVCKCRVCECNPNYTGSACDCSLDTSTCEASNGQICNGRGICECGVCKCTDPKFQGQTCEMCQTCLGVCAEHKECVQCRAFNKGEKKDTCTQECSYFNITKVESRDKLPQPVQPDPVSHCKEKDVDDCWFYFTYSVNGNNEVMVHVVENPECPTGPDIIPIVAGVVAGIVLIGLALLLIWKLLMIIHDRREFAKFEKEKMNAKWDTRKPCSELWTFIPGCLI

SEQ ID NO: 89696 - protein, 480 aa, Homo sapiens
MPAVASVPKELYLSSSLKDLNKKTEVKPEKISTKSYVHSALKIFKTAEECRLDRDEERAYVLYMKYVTVYNLIKKRPDFKQQQDYFHSILGPGNIKKAVEEAERLSESLKLRYEEAEVRKKLEEKDRQEEAQRLQQKRQETGREDGGTLAKGSLENVLDSKDKTQKSNGEKNEKCETKEKGAITAKELYTMMTDKNISLIIMDARRMQDYQDSCILHSLSVPEEAISPGVTASWIEAHLPDDSKDTWKKRGNVEYVVLLDWFSSAKDLQIGTTLRSLKDALFKWESKTVLRNEPLVLEGGYENWLLCYPQYTTNAKVTPPPRRQNEEVSISLDFTYPSLEESIPSKPAAQTPPASIEVDENIELISGQNERMGPLNISTPVEPVAASKSDVSPIIQPVPSIKNVPQIDRTKKPAVKLPEEHRIKSESTNHEQQSPQSGKVIPDRSTKPVVFSPTLMLTDEEKARIHAETALLMEKNKQEK

SEQ ID NO: 89697 - protein, 1024 aa, Homo sapiens
MLVTGPCLLAGLESPSHALRADAPPHASSAATICVTLAEGHHCDRALEILLHPSEPHQPHLMLEGGSLSSAEYEARVRARRDFQRLQRRDSDGDRQVWFLQRRFHKDILLNPVLALSFCPDLSSKPGHLGTATRELLFLLDSSSVAHKDAIVLAVKSLPPQTLINLAVFGTLVQPLFPESRPCSDDAVQLICESIETLQVPSGPPDVLAALDWAVGQPQHRAYPRQLFLLTAASPMAATTHRTLELMRWHRGTARCFSFGLGPTCHQLLQGLSALSRGQAYFLRPGQRLQPMLVQALRKALEPALSDISVDWFVPDTVEALLTPREIPALYPGDQLLGYCSLFRVDGFRSRPPGGQEPGWQSSGGSVFPSPEEAPSAASPGTEPTGTSEPLGTGTVSAELSSPWAARDSEQTGTDALTDPVTDPGPNPSDTAIWRRIFQSSYIREQYVLTHCSASPEPGPGSTGSSESPGSQGPGSPEGSAPLEPPSQQGCRSLAWGEPAGSRSCPLPAPTPAPFKVGALSTEVLGRQHRAALAGRSLSSPPGRANQVPGRPRKPSLGAILDGPSPEPGQQLGQGLDDSGNLLSPAPMDWDMLMEPPFLFTAVPPSGELAPPAVPPQAPRCHVVIRGLCGEQPMCWEVGVGLETLWGPGDGSQPPSPPVREAAWDQALHRLTAASVVRDNEQLALRGGAETTADRGHARRCWLRALQTSKVSSAPSCFTCPVAVDATTREVLPGALQVCSSEPAEPPGTPPASHSHLDAAPLPTVVYSKGLQRGSPAGAWDSDQNGNSKRALGDPATPTEGPRRPPPRPPCRLSMGRRHKLCSPDPGQANNSEGSDHDYLPLVRLQEAPGSFRLDAPFCAAVRISQERLCRASPFAVHRASLSPTSASLPWALLGPGVGQGDSATASCSPSPSSGSEGPGQVDSGRGSDTEASEGAEGLGGTDLRGRTWATAVALAWLEHRCAAAFDEWELTAAKADCWLRAQHLPDGLDLAALKAAARGLFLLLRHWDQNLQLHLLCYSPANV

SEQ ID NO: 89698 - protein, 217 aa, Homo sapiens
  MOD_RES (1)..(1): Any amino acid
XRLRQEEPQSLQAAVRTDGFDEFKVRLQDLSSCITQGKDAAVSKKASPEAASTPRDPIDVDLPEEAERVKAQVQALGLAEAQPMAVVQSVPGAHPVPVYAFSIKGPSYGEDVSNTTTAQKRKCSQTQCPRKVIKMESEEGKEARLARSSPEQPRPSTSKAVSPPHLDGPPSPRSPVIGSEVFLPNSNHVASGAGEAEERVVVISSSEDSDAENSPSV

SEQ ID NO: 89699 - protein, 766 aa, Homo sapiens
MTTEKSLVTEAENSQHQQKEEGEEAINSGQQEPQQEESCQTAAEGDNWCEQKLKASNGDTPTHEDLTKNKERTSESRGLSRLFSSFLKRPKSQVSEEEGKEVESDKEKGEGGQKEIEFGTSLDEEIILKAPIAAPEPELKTDPSLDLHSLSSAETQPAQEELREDPDFEIKEGEGLEECSKIEVKEESPQSKAETELKASQKPIRKHRNMHCKVSLLDDTVYECVVEKHAKGQDLLKRVCEHLNLLEEDYFGLAIWDNATSKTWLDSAKEIKKQVRGVPWNFTFNVKFYPPDPAQLTEDITRYYLCLQLRQDIVAGRLPCSFATLALLGSYTIQSELGDYDPELHGVDYVSDFKLAPNQTKELEEKVMELHKSYRSMTPAQADLEFLENAKKLSMYGVDLHKAKDLEGVDIILGVCSSGLLVYKDKLRINRFPWPKVLKISYKRSSFFIKIRPGEQEQYESTIGFKLPSYRAAKKLWKVCVEHHTFFRLTSTDTIPKSKFLALGSKFRYSGRTQAQTRQASALIDRPAPHFERTASKRASRSLDGAAAVDSADRSPRPTSAPAITQGQVAEGGVLDASAKKTVVPKAQKETVKAEVKKEDEPPEQAEPEPTEAWKVEKTHIEVTVPTSNGDQTQKLAEKTEDLIRMRKDLDKSQEEIKKHHASISELKKNFMESVPEPRPSEWDKRLSTHSPFRTLNINGQIPTGEGVKKTSVLPSERKVGGPESPSYFLPDTYHLGVCKEPVLNFQTDQRRLAQLRELRAKFFLS

SEQ ID NO: 89700 - protein, 283 aa, Homo sapiens
MAEASPHPGRYFCHCCSVEIVPRLPDYICPRCESGFIEELPEETRSTENGSAPSTAPTDQSRPPLEHVDQHLFTLPQGYGQFAFGIFDDSFEIPTFPPGAQADDGRDPESRRERDHPSRHRIIQQLVNGIITPATIPSLGPWGVLHSNPMDYAWGANGLDAIITQLLNQFENTGPPPADKEKIQALPTVPVTEEHVGSGLECPVCKDDYALGERVRQLPCNHLFHDGCIVPWLEQHDSCPVCRKSLTGQNTATNPPGLTGVSFSSSSSSSSSSSPSNENATSN

SEQ ID NO: 89701 - protein, 88 aa, Homo sapiens
MEPDGTYEPGFVGIRFCQECNNMLYPKEDKENRILLYACRNCDYQQEADNSCIYVNKITHEVDELTQIIADVSQDPTLPRTEDHPCQK

SEQ ID NO: 89702 - protein, 103 aa, Homo sapiens
PENGLLETKVYFAGFPRKVESELIKPINPRLDGCIRSWNLMKQGASGIKEIIQEKQNKHCLVTVEKGSYYPGSGIAQFHIDYNRVSLCHPGWSAVVQSWLTVT

SEQ ID NO: 89703 - protein, 145 aa, Homo sapiens
MLYQTINSLKTKFHPMVDSSTSRLEFINSIILFLRNHNFDGLDVSWIYPDQKENTHFTVLIHELAEAFQKDFTKSTKERLLLTAGVSAGRQMIDNSYQVEKLAKDLDFINLLSFDFHGSWEKPLITGHNSPLSKGWQDRGPSSYY

SEQ ID NO: 89704 - protein, 334 aa, Homo sapiens
  MOD_RES (1)..(1): Any amino acid
XERCRDDSFFGETSHNYHKFDSEYERMGRGPGPLQERSLFEKKRGAPPSSNIEDFHGLLPKGYPHLCSICDLPVHSNKEWSQHINGASHSRRCQLLLEMGDPFMLQQSTNPAPGILGPPPPSFHLGGPAVGPRGNLGAGNGNLQGPRHMQKGRVETSRVVHIMDFQRGKNLRYQLLQLVEPFGVISNHLILNKINEAFIEMATTEDAQAAVDYYTTTPALVFGKPVRVHLSQKYKRIKKPEGKPDQKFDQKQELGRVIHLSNLPHSGYSDSAVLKLAEPYGKIKNYILMRMKSQAFIEMETREDAMAMVDHCLKKALWFQGRCVKVDLSEKYKK

SEQ ID NO: 89705 - protein, 220 aa, Homo sapiens
MFQQFQASCLVLFFLVGFAQQTLKPQNRKVDCNKGVTGTIYEYGALTLNGEEYIQFKQFAGKHVLFVNVAAYGLAAQYPELNALQEELKNFGVIVLAFPCNQFGKQEPGTNSEILLGLKYVCPGSGFVPSFQLFEKGDVNGEKEQKVFTFLKNSCPPTSDLLGSSSQLFWEPMKVHDIRWNFEKFLVGPDGVPVMHWFHQAPVSTVKSDILEYLKQFNTH

SEQ ID NO: 89706 - protein, 709 aa, Homo sapiens
MASNERDAISWYQKKIGAYDQQIWEKSIEQTQIKGLKNKPKKMGHIKPDLIDVDLIRVIAIVLYLMMPIVNISEVLGPLCLMLLMGTVHCQIVSTQITRPSGNNGNRRRRKLRKTVNGDGSRENGNNSSDKVRGIETLESVPIIGGFWETIFGNRIKRVKLISNKGTETDNDPSCVHPIIKRRQCRPEIRMWQTREKAKFSDGEKCRREAFRRLGNGVSDDLSSEEDGEARTQMILLRRSVEGASSDNGCEVKNRKSILSRHLNSQVKKTTTRWCHIVRDSDSLAESEFESAAFSQGSRSGVSGGSRSLNMSRRDSESTRHDSETEDMLWDDLLHGPECRSSVTSDSEGAHVNTLHSGTKRDPKEDVFQQNHLFWLQNSSPSSDRVSAIIWEGNECKKMDMSVLEISGIIMSRVNAYQQGVGYQMLGNVVTIGLAFFPFLHRLFREKSLDQLKSISAEEILTLFCGAPPVTPIIVLSIINFFERLCLTWMFFFMMCVAERTYKQRFLFAKLFSHITSARKARKYEIPHFRLKKVENIKIWLSLRSYLKRRGPQRSVDVVVSSVFLLTLSIAFICCAQVLQGHKTFLNDAYNWEFLIWETALLLFLLRLASLGSETNKKYSNVSILLTEQINLYLKMEKKPNKKEQLTLVNNVLKLSTKLLKELDTPFRLYGLTMNPLIYNITRVVILSAVSGVISDLLGFNIRLWKIKS

SEQ ID NO: 89707 - protein, 101 aa, Homo sapiens
MAGPGSTGGQIGAAALAGGARSKVAPSVDFDHSCSDSVEYLTLNFGPFETVHRWRRLPPCDEFVGARYGAASTQWWPIKMPFMYLVETMGRPCSMTSCGSM

SEQ ID NO: 89708 - protein, 153 aa, Homo sapiens
MKVLGHRLELLTGLLLHDVTMAGLQELRFPEEKPLLRGQDATELESSDAFLLAADTDWKRSQERRLPRVSSTVSPLQEHDIETPYGLLHVVIRGSPKGNRPAILTYHDVGLNHKLCFNTFFNFEDMQEITKHFVVCHVDAPGQQVGASQFPQG

SEQ ID NO: 89709 - protein, 145 aa, Homo sapiens
MAEVARQAQTSQEPYHDKAREHPDDGKHPDGGLYNKGPSYSSYSGYIMMPNMNNDPYMSNGSLSPPIPRTSNKVPVVQPSHAVHPLTPLITYSDEHFSPGSHPSHIPSDVNSKQGMSRHPPAPDIPTFYPLSPGGVGQITPPLGW

SEQ ID NO: 89710 - protein, 940 aa, Homo sapiens
MDDSEVESTASILASVKEQEAQFEKLTRALEEERRHVSAQLERVRVSPQDANPLMANGTLTRRHQNGRFVGDADLERQKFSDLKLNGPQDHSHLLYSTIPRMQEPGQIVETYTEEDPEGAMSVVSVETSDDGTTRRTETTVKKVVKTVTTRTVQPVAMGPDGLPVDASSVSNNYIQTLGRDFRKNGNGGPGPYVGQAGTATLPRNFHYPPDGYSRHYEDGYPGGSDNYGSLSRVTRIEERYRPSMEGYRAPSRQDVYGPQPQVRVGGSSVDLHRFHPEPYGLEDDQRSMGYDDLDYGMMSDYGTARRTGTPSDPRRRLRSYEDMIGEEVPSDQYYWAPLAQHERGSLASLDSLRKGGPPPPNWRQPELPEVIAMLGFRLDAVKSNAAAYLQHLCYRNDKVKTDVRKLKGIPVLVGLLDHPKKEVHLGACGALKNISFGRDQDNKIAIKNCDGVPALVRLLRKARDMDLTEVITGTLWNLSSHDSIKMEIVDHALHALTDEVIIPHSGWEREPNEDCKPRHIEWESVLTNTAGCLRNVSSERSEARRKLRECDGLVDALIFIVQAEIGQKDSDSKLVENCVCLLRNLSYQVHREIPQAERYQEAAPNVANNTGPHAASCFGAKKGKGKKPIEDPANDTVDFPKRTSPARGYELLFQPEVVRIYISLLKESKTPAILEASAGAIQNLCAGRWTYGRYIRSALRQEKALSAIADLLTNEHERVVKAASGALRNLAVDARNKELIGKHAIPNLVKNLPGGQQNSSWNFSEDTVISILNTINEVIAENLEAAKKLRETQGIEKLVLINKSGNRSEKEVRAAALVLQTIWGYKELRKPLEKEGWKKSDFQVNLNNASRSQSSHSYDDSTLPLIDRNQKSDKKPDREEIQMSNMGSNTKSLDNNYSTPNERGDHNRTLDRSGDLGDMEPLKGTTPLMVNSLYILLSV

SEQ ID NO: 89711 - protein, 97 aa, Homo sapiens
MSGAGRALAALLLAASVLSAALLAPGGSSGRDAQAAPPRDLDKKRHAELKMDQALLLIHNELLWTNLTVYWKSECCYHVGIQIWRIWKLFSLGKEHP

SEQ ID NO: 89712 - protein, 883 aa, Homo sapiens
MYMCFLFCSRYCTSITNFLVMGGFQLLAKPAIDFLNKNQELLQDLSEVNDENTQLMEILNTLFFLPIRRLHNYAKVLLKLATCFEVASPEYQKLQDSSSCYECLALHLGRKRKEAEYTLGFWKTFPGKMTDSLRKPERRLLCESSNRALSLQHAGRFSVNWFILFNDALVHAQFSTHHVFPLATLWAEPLSEEAGGVNGLKITTPEEQFTLISSTPQEKTKWLRAISQAVDQALRGMSDLPPYGSGSSVQRQEPPISRSAKYTFYKDPRLKDATYDGRWLSGKPHGRGVLKWPDGKMYSGMFRNGLEDGYGEYRIPNKAMNKEDHYVGHWKEGKMCGQGVYSYASGEVFEGCFQDNMRHGHGLLRSGKLTSSSPSMFIGQWVMDKKAGYGVFDDITRGEKYMGMWQDDVCQGNGVVVTQFGLYYEGNFHLNKMMGNGVLLSEDDTIYEGEFSDDWTLSGKGTLTMPNGDYIEGYFSGEWGSGIKITGTYFKPSLYESDKDRPKVFRKLGNLAVPADEKWKAVFDECWRQLGCEGPGQGEVWKAWDNIAVALTTSRRQHRDSPEILSRSQTQTLESLEFIPQHVGAFSVEKYDDIRKYLIKACDTPLHPLGRLVETLVAVYRMTYVGVGANRRLLQEAVKEIKSYLKRIFQLVRFLFPELPEEGSTIPLSAPLPTERKSFCTGKSDSRSESPEPGYVVTSSGLLLPVLLPRLYPPLFMLYALDNDREEDIYWECVLRLNKQPDIALLGFLGVQRKFWPATLSILGESKKVLPTTKDACFASAVECLQQISTTFTPSDKLKVIQQTFEEISQSVLASLHEDFLWSMDDLFPVFLYVVLRARIRNLGSEVHLIEDLMDPYLQHGEQGIMFTTLKACYYQIQREKLN

SEQ ID NO: 89713 - protein, 1700 aa, Homo sapiens
MTSAQCPALACVMSPLRFWGPWPLLMWQLLWLLVKEAQPLEWVKDPLQLTSNPLGPPEPWSSHSSHFPRESPHAPTLPADPWDFDHLGPSASSEMPAPPQESTENLVPFLDTWDSAGELPLEPEQFLASQQDLKDKLSPQERLPVSPKKLKKDPAQRWSLAEIIGIIRQLSTPQSQKQTLQNEYSSTDTPYPGSLPPELRVKSDEPPGPSEQVGPSQFHLEPETQNPETLEDIQSSSLQQEAPAQLPQLLEEEPSSMQQEAPALPPESSMESLTLPNHEVSVQPPGEDQAYYHLPNITVKPADVEVTITSEATNETESSQAQQETPIQFPEEVEPSATQQEAPIEPPVPPMEHELSISEQQQPVQPSETSREVESSPTQQETPGQPPEHHEVTVSPPGDHQTHHLDSPSVSVKPPDVQLTIAAEPSAEVGTSLVQQEATTRLSGSGNDIEPPAIQHGGPPLLSESSEEAGPLAVQQETSFQSPEPINNENPSPTQQEAAAEHPQTAEEGESSLTHQEAPAQTPEFPNVVVAQPPEHSHLTQATVQPLDLGFTITPESMTEVELSPTMKETPTQPPKKVVPQLRVYQGVTNPTPGQDQAQHPVSPSVTVQLLDLGLTITPEPTTEVGHSTPPKRTIVSPKHPEVTLPHPDQVQTQHSHLTRATVQPLDLGFTITPKSMTEVEPSTALMTTAPPPGHPEVTLPPSDKGQAQHSHLTQATVQPLDLELTITTKPTTEVKPSPTTEETSTQPPDLGLAIIPEPTTETGHSTALEKTTAPRPDRVQTLHRSLTEVTGPPTELEPAQDSLVQSESYTQNKALTAPEEHKASTSTNICELCTCGDEMLSCIDLNPEQRLRQVPVPEPNTHNGTFTILNFQGNYISYIDGNVWKAYSWTEKLILRENNLTELHKDSFEGLLSLQYLDLSCNKIQSIERHTFEPLPFLKFINLSCNVITELSFGTFQAWHGMQFLHKLILNHNPLTTVEDPYLFKLPALKYLDMGTTLVPLTTLKNILMMTVELEKLILPSHMACCLCQFKNSIEAVCKTVKLHCNSACLTNTTHCPEEASVGNPEGAFMKVLQARKNYTSTELIVEPEEPSDSSGINLSGFGSEQLDTNDESDFISTLSYILPYFSAVNLDVKSLLLPLIKLPTTGNSLAKIQTVGQNRQRVKRVLMGPRSIQKRHFKEVGRQSIRREQGAQASVENAAEEKRLGSPAPREVEQPHTQQGPEKLAGNAVYTKPSFTQEHKAAVSVLKPFSKGAPSTSSPAKALPQVRDRWKDLTHAISILESAKARVTNTKTSKPIVHARKKYRFHKTRSHVTHRTPKVKKSPKVRKKSYLSRLMLANRLPFSAAKSLINSPSQGAFSSLGDLSPQENPFLEVSAPSEHFIEKNNTKHTTARNAFEENDFMENTNMPEGTISENTNYNHPPEADSAGTAFNLGPTVKQTETKWEYNNVGTDLSPEPKSFNYPLLSSPGDQFEIQLTQQLQSLIPNNNVRRLIAHVIRTLKMDCSGAHVQVTCAKLISRTGHLMKLLSGQQEVKASEIEWDTDQWKIENYINESTEAQSEQKEKSLELKKEVPGYGYTDKLILALIVTGILTILIILFCLIVICCHRRSLQEDEEGFSRGIFRFLPRRGCSSRRESQDGLSSFGQPLWFKDMYKPLSATRINNHAWKLHKKSSNEDKILNRDPGDSEAPTEEEESEALP

SEQ ID NO: 89714 - protein, 71 aa, Homo sapiens
  MOD_RES (1)..(1): Any amino acid
XRHGDRCSRLHNKPTFSQPCPLSSGPAPFKFCADHSAAQPVPESTEHSPNCRRITLRCSQNCRRSMGRLKR

SEQ ID NO: 89715 - protein, 374 aa, Homo sapiens
MDPLGPAKPQWLWRRCLAGLLFQLLVAVCFFSYLRVSRDDATGSPRPGLMAVEPVTGAPNGSRCQDSMATPAHPTLLILLWTWPFNTPVALPRCSEMVPGAADCNITADSSVYPQADAVIVHHWDIMYNPSANLPPPTRPQGQRWIWFSMESPSNCRHLEALDGYFNLTMSYRSDSDIFTPYGWLEPWSGQPAHPPLNLSAKTELVAWAVSNWKPDSARVRYYQSLQAHLKVDVYGRSHKPLPKGTMMETLSRYKFYLAFENSLHPDYITEKLWRNALEAWAVPVVLGPSRSNYERFLPPDAFIHVDDFQSPKDLARYLQELDKDHARYLSYFHWRETLRPRSFSWALAFCKACWKLQQESRYQTVRSIAAWFT

SEQ ID NO: 89716 - protein, 712 aa, Homo sapiens
MGSPLRFDGRVVLVTGAGAGLGRAYALAFAERGALVVVNDLGGDFKGVGKGSLAADKVVEEIRRRGGKAVANYDSVEEGEKVVKTALDAFGRIDVVVNNAGILRDRSFARISDEDWDIIHRVHLRGSFQVTRAAWEHMKKQKYGRIIMTSSASGIYGNFGQANYSAAKLGLLGLANSLAIEGRKSNIHCNTIAPNAGSRMTQTVMPEDLVEALKPEYVAPLVLWLCHESCEENGGLFEVGAGWIGKLRWERTLGAIVRQKNHPMTPEAVKANWKKICDFENASKPQSIQESTGSIIEVLSKIDSEGGVSANHTSRATSTATSGFAGAIGQKLPPFSYAYTELEAIMYALGVGASIKDPKDLKFIYEGSSDFSCLPTFGVIIGQKSMMGGGLAEIPGLSINFAKVLHGEQYLELYKPLPRAVYSYSEKELICHNQFSLFLVGSGGFGGKRTSDKVKVAVAIPNRPPDAVLTDTTSLNQAALYRLSGDWNPLHIDPNFASLAGFDKPILHGLCTFGFSARRVLQQFADNDVSRFKAIKARFAKPVYPGQTLQTEMWKEGNRIHFQTKVQETGDIVISNAYVDLAPTSGTSAKTPSEGGKLQSTFVFEEIGRRLKDIGPEVVKKVNAVFEWHITKGGNIGAKWTIDLKSGSGKVYQGPAKGAADTTIILSDEDFMEVVLGKLDPQKAFFSGRLKARGNIMLSQKLQMILKDYAKL

SEQ ID NO: 89717 - protein, 191 aa, Homo sapiens
QKIINTAGTSNAEVPLADPGMYQLDITLRRGQSLAARDRGGTSDPYVKFKIGGKEVFRSKIIHKNLNPVWEEKACILVDHLREPLYIKVFDYDFGLQDDFMGSAFLDLTQLELNRPTDVTLTLKDPHYPDHDLGIILLSVILTPKEGESRDVFQTQSLRLSDLHRKSHLWRGIVSITLIEGRDLKAMDSNG

SEQ ID NO: 89718 - protein, 359 aa, Homo sapiens
MPMISVLGKMFLWQREGPGGRWTCQTSRRVSSDPAWAVEWIELPRGLSLSSLGSARTLRGWSRSSRPSSVDSQDLPEVNVGDTVAMLPKSRRALTIQEIAALARSSLHGISQVVKDHVTKPTAMAQGRVAHLIEWKGWSKPSDSPAALESAFSSYSDLSEGEQEARFAAGVAEQFAIAEAKLRAWSSVDGEDSTDDSYDEDFAGGMDTDMAGQLPLGPHLQDLFTGHRFSRPVRQGSVEPESDCSQTVSPDTLCSSLCSLEDGLLGSPARLASQLLGDELLLAKLPPSRESAFRSLGPLEAQDSLYNSPLTESCLSPAEEEPAPCKDCQPLCPPLTGSWERQRQASDLGLAPALPEPMG

SEQ ID NO: 89719 - protein, 529 aa, Homo sapiens
MSVALAAPHASARSRSLITGDSIVSAEAVWDHVTMANRELAFKAGDVIKVLDASNKDWWWGQIDDEEGWFPASFVRLWVNQEDEVEEGPSDVQNGHLDPNSDCLCLGRPLQNRDQMRANVINEIMSTERHYIKHLKDICEGYLKQCRKRRDMFSDEQLKVIFGNIEDIYRFQMGFVRDLEKQYNNDDPHLSEIGPCFLEHQDGFWIYSEYCNNHLDACMELSKLMKDSRYQHFFEACRLLQQMIDIAIDGFLLTPVQKICKYPLQLAELLKYTAQDHSDYRYVAAALAVMRNVTQQINERKRRLENIDKIAQWQASVLDWEGEDILDRSSELIYTGEMAWIYQPYGRNQQRVFFLFDHQMVLCKKDLIRRDILYYKGRIDMDKYEVVDIEDGRDDDFNVSMKNAFKLHNKETEEIHLFFAKKLEEKIRWLRAFREERKMVQEDEKIGFEISENQKRQAAMTVRKVPKQKGVNSARSVPPSYPPPQDPLNHGQYLVPDGIAQSQVFEFTEPKRSQSPFWQNFSRLTPFKK

SEQ ID NO: 89720 - protein, 127 aa, Homo sapiens
MNMFKEAVTFKDVAVAFTEEELGLLGPAQRKLYRDVMVENFRNLLSVGHPPFKQDVSPIERNEQLWIMTTATRRQGNLGEKNQSKLITVQDRESEEELSCWQIWQQIANDLTRCQDSMINNSQCHKQ

SEQ ID NO: 89721 - protein, 79 aa, Homo sapiens
MECNFVAVEDISSSRTNPYSYAMSTEEARFLTYHMWPLTFLSPSELARAGFYYIGPGDRVACFACGGKLSNWEPKDDAM

SEQ ID NO: 89722 - protein, 280 aa, Homo sapiens
MKGGEGDAGEQAPLNPEGESPAGSATYREFVHRGYLDLMGASQHSLRALSWRRLYLSRAKLKASSRTSALLSGFAMVAMVEVQLESDHEYPPGLLVAFSACTTVLVAVHLFALMVSTCLLPHIEAVSNIHNLNSVHQSPHQRLHRYVELAWGFSTALGTFLFLAEVVLVGWVKFVPIGAPLDTPTPMVPTSRVPGTLAPVATSLSPASNLPRSSASAAPSQAEPACPPRQACGGGGAHGPGWQAAMASTAIMGFSPSVCPLGFASYSAPGLASVEGSCSR

SEQ ID NO: 89723 - protein, 62 aa, Homo sapiens
MAPTVFLSMTPLKGIKSVILPQVFLCAYMAAFNSINGNRSYTCKPLERSLLMAGAVASSTFL

SEQ ID NO: 89724 - protein, 28 aa, Homo sapiens
FDKANKHHFLHSLALLGVPHCRKPLWAA

SEQ ID NO: 89725 - protein, 149 aa, Homo sapiens
HVEWCKQLIAATISSQISGSVTSENVSRDYKVFRRPDLRNIHKARQRLEIQEEHNGYPSEAEADQALRDGNKLAQMEEAPLFPGESIKAIVKDVMYICPFMGAVSGTLTVTDFKLYFKNVERDPHFILDVPLGVISRVEKIGAQSHGDN

SEQ ID NO: 89726 - protein, 843 aa, Homo sapiens
MVIIGPRGPGSQRLLLSLLLLAAWEVGSGQLHYSVYEEAKHGTFVGRIAQDLGLELAELVPRLFRVASKRHGDLLEVNLQNGILFVNSRIDREKLCGRSAECSIHLEVIVDRPLQVFHVDVEVKDINDNPPVFREREQKVPVSESAPLDSHFPLEGASDADIGVNSLLTYALSLNENFELKIKTKKDKSILPELVLRKLLDREQTPKLNLLLMVIDGGKPELTGSVQIQITVLDVNDNGPAFDKPSYKVVLSENVQNDTRVIQLNASDPDEGLNGEISYGIKMILPVSEKCMFSINPDTGEIRIYGELDFEENNAYEIQVNAIDKGIPSMAGHSMVLVEVLDVNDNVPEVMVTSLSLPVQEDAQVGTVIALISVSDRDSGANGQVICSLTPHVPFKLVSTYKNYYSLVLDSALDRESVSAYELVVTARDGGSPSLWATARVSVEVADVNDNAPAFAQPEYTVFVKENNPPGCHIFTVSAWDADAQKNALVSYSLVERRVGEHALSSYVSVHAESGKVYALQPLDHEELELLQFQVSARDAGVPPLGSNVTLQVFVLDENDNAPALLATPAGSAGGAVSELVPRSVGAGHVVAKVRAVDADSGYNAWLSYELQPAAVGAHIPFHVGLYTGEISTTRILDEADAPRHRLLVLVKDHGEPALTSTATVLVSLVENGQAPKTSSRASVGAVDPEAALVDINVYLIIAICAVSSLLVLTLLLYTALRCSAPPTVSRCAPGKPTLVCSSAVGSWSYSQQRRQRVCSAESPPKTDLMAFSPSLQLSREDCLNPPSEPRQPNPDWRYSASLRAGMHSSVHLEEAGILRAGPGGPDQQWPTVSSATPVPTME

SEQ ID NO: 89727 - protein, 95 aa, Homo sapiens
MERPLCSHLCSCLAMLALLSPLSLAQYDSWPHYPEYFQQPAPEYHQPQAPANVAKIQLRLAGQKRKHSEGRVEVYYDGQWGTVCDDDFSIHAAHV

SEQ ID NO: 89728 - protein, 60 aa, Homo sapiens
METDLAEMPEKGALSSQDSPHFQEKSTEEGEVAALRLTARSQNCLFVEHRKRRKFAFPMS

SEQ ID NO: 89729 - protein, 113 aa, Homo sapiens
MSGSFYFVIVGHHDNPVFEMEFLPAGKAESKDDHRHLNQFIAHAALDLVDENMWLSNNMYLKTVDKFNEWFVSAFVTAGHMRFIMLHDIRQEDGIKNFFTDVYDLYIKVWYVL

SEQ ID NO: 89730 - protein, 35 aa, Homo sapiens
MAARWSSENVVVEFRDSQATAMSVDCLGQHAVLSG

SEQ ID NO: 89731 - protein, 470 aa, Homo sapiens
MAERAALEELVKLQGERVRGLKQQKASAELIEEEVAKLLKLKAQLGPDESKQKFVLKTPKGTRDYSPRQMAVREKVFDVIIRCFKRHGAEVIDTPVFELKETLMGKYGEDSKLIYDLKDQGGELLSLRYDLTVPFARYLAMNKLTNIKRYHIAKVYRRDNPAMTRGRYREFYQCDFDIAGNFDPMIPDAECLKIMCEILSSLQIGDFLVKVNDRRILDGMFAICGVSDSKFRTICSSVDKLDKVSWEEVKNEMVGEKGLAPEVADRIGDYVQQHGGVSLVEQLLQDPKLSQNKQALEGLGDLKLLFEYLTLFGIDDKISFDLSLARGLDYYTGVIYEAVLLQTPAQAGEEPLGVGSVAAGGRYDGLVGMFDPKGRKVPCVGLSIGVERIFSIVEQRLEAELLYKKNPKLLNQLQYCEEAGIPLVAIIGEQELKDGVIKLRSVTSREEVDVRREDLVEEIKRRTGQPLCIC

SEQ ID NO: 89732 - protein, 472 aa, Homo sapiens
MMLGTEGGEGFVVKVRGLPWSCSADEVQRFFSDCKIQNGAQGIRFIYTREGRPSGEAFVELESEDEVKLALKKDRETMGHRYVEVFKSNNVEMDWVLKHTGPNSPDTANDGFVRLRGLPFGCSKEEIVQFFSGLEIVPNGITLPVDFQGRSTGEAFVQFASQEIAEKALKKHKERIGHRYIEIFKSSRAEVRTHYDPPRKLMAMQRPGPYDRPGAGRGYNSIGRGAGFERMRRGAYGGGYGGYDDYNGYNDGYGFGSDRFGRDLNYCFSGMSDHRYGDGGSTFQSTTGHCVHMRGLPYRATENDIYNFFSPLNPVRVHIEIGPDGRVTGEADVEFATHEDAVAAMSKDKANMQHRYVELFLNSTAGASGGAYEHRYVELFLNSTAGASGGAYGSQMMGGMGLSNQSSYGGPASQQLSGGYGGGYGGQSSMSGYGNQGAVNSSYYSSGSRASMGVNGMGGLSSMSSMSGGWGM

SEQ ID NO: 89733 - protein, 192 aa, Homo sapiens
MTEEVDFLGQDSDGGSEEVVLTPAELIERLEQAWMNEKFAPELLESKPEIVECVMEQLEHMEENLRRAKREDLKVSIHQMEMERIRYVLSSYLRCRLMKIEKFFPHVLEKEKTRPEGEPSSLSPEELAFAREFMANTESYLKNVALKHMPPNLQKVDLFRAVPKPDLDSYVFLRVRERQENILVEPDTDEQR

SEQ ID NO: 89734 - protein, 86 aa, Homo sapiens
MQRNKQVAMGRKKFNMDPKKGIQFLIENDLLKNTCEDIAQFLYKGEGLNKTAIGDYLGERDEFNIQVLHAFVELHEFTDLNLVQAL

SEQ ID NO: 89735 - protein, 290 aa, Homo sapiens
MATPLVAGPAALRFAAAASWQVVRGRCVEHFPRVLEFLRSLRAVAPGLVRYRHHERLCMGLKAKVVVELILQGRPWAQVLKALNHHFPESGPIVRDPKATKQDLRKILEAQETFYQQVKQLSEAPVDLASKLQLQDVLSWMQPGVSITSSLAWRQYGVDMGWLLPECSVTDSVNLAEPMEQNPPQQQRLALHNPLPKAKPGTHLPQGPSSRTHPEPLAGRHFNLAPLGRRRVQSQWASTRGGHKERPTVMLFPFRNLGSPTQVISKPESKEEHAIYTADLAMGTRAASTG

SEQ ID NO: 89736 - protein, 1301 aa, Homo sapiens
MYKEDPVQGKSNGELSLSRESEGQKNVSSIPGKTGKRRGRPPKRKKLQEEILLSEKQEENSLASEPQTRHGSQGPGQGTWWLLCQTEEEWRQVTESFRERTSLRERQLYKLLSEDFLPEICNMIAQKGKRPQRTKAELHPRWMSDHLSIKPVKQEETPVLTRIEKQKRKEEEEERQILLAVQKKEQEQMLKEERKRELEEKVKAVEDRAKRRKLREERAWLLAQGKELPPELSHLDPNSPMREEKKTKDLFELDDDFTAMYKVLDVVKAHKDSWPFLEPVDESYAPNYYQIIKAPMDISSMEKKLNGGLYCTKEEFVNDMKTMFRNCRKYNGESSEYTKMSDNLERCFHRAMMKHFPGEDGDTDEEFWIREDEKREKRRSRAGRSGGSHVWTRSRDPEGSSRKQQPMENGGKSLPPTRRAPSSGDDQSSSSTQPPREVGTSNGRGFSHPLHCGGTPSQAPFLNQMRPAVPGTFGPLRGSDPATLYGSSGVPEPHPGEPVQQRQPFTMQPPVGINSLRGPRLGTPEEKQMCGGLTHLSNMGPHPGSLQLGQISGPSQDGSMYAPAQFQPGFIPPRHGGAPARPPDFPESSEIPPSHMYRSYKYLNRVHSAVWNGNHGATNQGPLGPDEKPHLGPGPSHQPRTLGHVMDSRVMRPPVPPNQWTEQSGFLPHGVPSSGYMRPPCKSAGHRLQPPPVPAPSSLFGAPAQALRGVQGGDSMMDSPEMIAMQQLSSRVCPPGVPYHPHQPAHPRLPGPFPQVAHPMSVTVSAPKPALGNPGRAPENSEAQEPENDQAEPLPGLEEKPPGVGTSEGVYLTQLPHPTPPLQTDCTRQSSPQERETVGPELKSSSSESADNCKAMKGKNPWPSDSSYPGPAAQGCVRDLSTVADRGALSENGVIGEASPCGSEGKGLGSSGSEKLLCPRGRTLQETMPCTGQNAATPPSTDPGLTGGTVSQFPPLYMPGLEYPNSAAHYHISPGLQGVGPVMGGKSPASHPQHFPPRGFQSNHPHSGGFPRYRPPQGMRYSYHPPPQPSYHHYQRTPYYACPQSFSDWQRPLHPQGSPSGPPASQPPPPRSLFSDKNAMASLQGCETLNAALTSPTRMDAVAAKVPNDGQNPGPEEEKLDESMERPESPKEFLDLDNHNAATKRQSSLSASEYLYGTPPPLSSGMGFGSSAFPPHSVMLQTGPPYTPQRPASHFQPRAYSSPVAALPPHHPGATQPNGLSQEGPIYRCQEEGLGHFQAVMMEQIGTRSGIRGPFQEMYRPSGMQMHPVQSQASFPKTPTAATSQEEVPPHKPPTLPLDQS

SEQ ID NO: 89737 - protein, 106 aa, Homo sapiens
DGETAAGGRLLHLMEILNVKNVMVVVSRWYGGILLGPDRFKHINNCARNILVEKNYTNSPEESSKALGKNKKMGIAEAASKVCFEVYIVKQSLSEENYIKLITTKK

SEQ ID NO: 89738 - protein, 259 aa, Homo sapiens
  MOD_RES (1)..(1): Any amino acid
XFTAQIRGAVDLSLYPREGGVSSRELVKKVSDVIWNSLSRSYFKDRAHIQSLFSFITGTKLDSSGVAFAVVGACQALGLRDVHLALSEDHAWVVFGPNGEQTAEVTWHGKGNEDRRGQTVNAGVAERSWLYLKGSYMRCDRKMEVAFMVCAINPSIDLHTDSLELLQLQQKLLWLLYDLGHLERYPMALGNLADLEELEPTPGRPDPLTLYHKGIASAKTYYRDEHIYPYMYLAGYHCRNRNVREALQAWADTATVIQE

SEQ ID NO: 89739 - protein, 877 aa, Homo sapiens
MSSEFLAELHWEDGFAIPVANEENKLLEDQLSKLKDERASLQDELREYEERINSMTSHFKNVKQELSITQSLCKARERETESEEHFKAIAQRELGRVKDEIQRLENEMASILEKKSDKENGIFKATQKLDGLKCQMNWDQQALEAWLEESAHKDSDALTLQKYAQQDDNKIRALTLQLERLTLECNQKRKILDNELTETISAQLELDKAAQDFRKIHNERQELIKQWENTIEQMQKRDGDIDNCALLDSLKATVNRTSSDLEALRKNISKIKKDIHEETARLQKTKNHNEIIQTKLKEITEKTMSVEEKATNLEDMLKEEEKDVKEVDVQLNLIKGVLFKKAQELQTETMKEKAVLSEIEGTRSSLKHLNHQLQKLDFETLKQQEIMYSQDFHIQQVERRMSRLKGEINSEEKQALEAKIVELRKSLEEKKSTCGLLETQIKKLHNDLYFIKKAHSKNSDEKQSLMTKINELNLFIDRSEKELDKAKGFKQDLMIEDNLLKLEVKRTREMLHSKAEEVLSLEKRKQQLYTAMEERTEEIKVHKTMLASQIRYVDQERENISTEFRERLSKIEKLKNRYEILTVVMLPPEGEEEKTQAYYVIKAAQEKEELQREGDCLDAKINKAEKEIYALENTLQVLNSCNNNYKQSFKKVTPSSDEYELKIQLEEQKRAVDEKYRYKQRQIRELQEDIQSMENTLDVIEHLANNVKEKLSEKQAYSFQLSKETEEQKPKLERVTKQCAKLTKEIRLLKDTKDETMEEQDIKLREMKQFHKVIDEMLVDIIEENTEIRIILQTYFQQSGLELPTASTKGSRQSSRSPSHTSLSARSSRSTSTSTSQSSIKVLELKFPASSSLVGSPSRPSSASSSSSNVKSKKSSK

SEQ ID NO: 89740 - protein, 137 aa, Homo sapiens
  MOD_RES (1)..(1): Any amino acid
XSCREFCLSCPRLSLRSLTAVTCTVWLAAYGLFTLCENSMILSAAIFITLLGLLGYLHFVKIDQETLLIIDSLGIQMTSSYASGKESTTFIEMGKVKDIVINEAIYMSAKPRLDCLIEVYRSCQEILAHQKATSTSP

SEQ ID NO: 89741 - protein, 87 aa, Homo sapiens
MDASSSPWNPTPAPVSSPPLLLPIPAIVFIAVGIYLLLLGLVLLTRNCLLDWAPRCPRCCPLCDCACTCQLPDCQSLNCLCFEIKLR

SEQ ID NO: 89742 - protein, 341 aa, Homo sapiens
MIPPSSPREDGVDGLPKEAVGAEQPPSPASTSSQESKLQKLKRSLSFKTKSLRSKSADNFFQRTNSEDMKLQAHMVAEISPSSSPLPAPGSLTSTPARAGLHPGGKAHAFQEYIFKKPTFCDVCNHMIVACGNKVDPVYETLRFGTSLAQRTKKGSSGSGSDSPHRTSTSDLVEVPEEANGPGGGYDLRKRSNSVFTYPENGTDDFRDPAKNINHQGSLSKDPLQMNTYVALYKFVPQENEDLEMRPGDIITLLEDSNEDWWKGKIQDRIGFFPANFVQRLQQNEKIFRCVRTFIGCKEQGQITLKENQICVSSEEEQDGFIRVLSGKKKGLIPLDVLENI

SEQ ID NO: 89743 - protein, 168 aa, Homo sapiens
MGHFTEEDKATITSLWGKVNVEDAGGETLGRLLVVYPWTQRFFDSFGNLSSASAIMGNPKVKAHGKKVLTSLGDAIKHLDDLKGTFAQLSELHCDKLHVDPENFKLLGNVLVTVLAIHFGKEFTPELLGNVLVTVLAIHFGKEFTPEVQASWQKMVTAVASALSSRYH

SEQ ID NO: 89744 - protein, 122 aa, Homo sapiens
MFTVLTRQPCEQAGLKALYRTPTIIALVVLLVSIVVLVSITVIQIHKQEVLPPGLKARALFTASHFSLTLSSEWRSQMEGRDWPQIREHFLLCTGWKVWYCAGCRVFKNHSLRVSMASRKRE

SEQ ID NO: 89745 - protein, 451 aa, Homo sapiens
  MOD_RES (1)..(1): Any amino acid
XRLDNDTNATKADVEKAKQQLNLRTHMADENKNEYAAQLQNFNGEQHKHFYVVIPQIYKQLQEMDERRTIKLSECYRGFADSERKVIPIISKCLEGMILAAKSVDERRDSQMVVDSFKSGFEPPGDFPFEDYSQHIYRTISDGTISASKQESGKMDAKTTVGKAKGKLWLFGKKPKPQSPPLTPTSLFTSSTPNGSQFLTFSIEPVHYCMNEIKTGKPRIPSFRSLKRGWSVKMGPALEDFSHLPPEQRRKKLQQRIDELNRELQKESDQKDALNKMKDVYEKNPQMGDPGSLQPKLAETMNNIDRLRMEIHKNEAWLSEVEGKTGGRGDRRHSSDINHLVTQGRESPEGSYTDDANQEVRGPPQQHGHHNEFDDEFEDDDPLPAIGHCKAIYPFDGHNEGTLAMKEGEVLYIIEEDKGDGWTRARRQNGEEGYVPTSYIDVTLEKNSKGS

SEQ ID NO: 89746 - protein, 127 aa, Homo sapiens
MDNKISPEAQVAELELDAVIGFNGHVPTGLKCHPDQEHMIYPLGCTVLIQAINTKEQNFLQGHGNNVSCLAISRSGEYIASGQVTFMGFKTSFCGIIRTESCLLGCPFTKAKLKLWPFLQMICTWYH

SEQ ID NO: 89747 - protein, 108 aa, Homo sapiens
MAVRASFENNCEIGCFAKLTNTYCLVAIGGSENFYSVFEGELSDTIPVVHASIAGCRIIGRMCVGDRRNSGRCAQGGSLQTDSGRPGASRKLLCLQQSGRAGASQDFN

SEQ ID NO: 89748 - protein, 49 aa, Homo sapiens
MMERRMECGAVIMNGCIYVTGGYSYSKGTYLQSIEKYDPDLNKWEIVGN

SEQ ID NO: 89749 - protein, 664 aa, Homo sapiens
MFPLIGKTIIFDNFPDPSDTWEITETIGKGTYGKVFKVLNKKNGQKAAVKILDPIHDIDEEIEAEYNILKALSDHPNVVRFYGIYFKKDKVNGDKLWLVLELCSGGSVTDLVKGFLKRGERMSEPLIAYILHEALMGLQHLHNNKTIHRDVKGNNILLTTEGGVKLVDFGVSAQLTSTRHRRNTSVGTPFWMAPEVIACEQQLDTTYDARCDTWSLGITAIELGDGDPPLADLHPMRALFKIPRNPPPKLRQPELWSAEFNDFISKCLTKDYEKRPTVSELLQHKFITQIEGKDVMLQKQLTEFIGIHQCMGGTEKARRERIHTKKGNFNRPLISNLKDVDDLATLEILDENTVSEQLEKCYSRDQIYVYVGDILIALNPFQSLGLYSTKHSKLYIGSKRTASPPHIFAMADLGYQSMITYNSDQCIVISGESGAGKTENAHLLVQQLTVLGKANNRTLQEKILQVNNLVEAFGNACTIINDNSSRFGKYLEMKFTSSGAVVGAQISEYLLEKSRVIHQAIGEKNFHIFYYIYAGLAEKKKLAHYKLPENKPPRYLQNDHLRTVQDIMNNSFYKSQYELIEQCFKVIGFTMEVLGGGEPREGGGERASSQPLRLQEAPAQNLPAPAPRPAVLTVQRGSHRRRKALEPAGQQGPSRHSGAGTSRH

SEQ ID NO: 89750 - protein, 155 aa, Homo sapiens
MNWHMIISGLIVVVLKVVGMTLFLLYFPQIFNKSNDGFTTTRSYGTVCPKDWEFYQARCFFLSTSESSWNESRDFCKGKGSTLAIVNTPEKLKFLQDITDAEKYFIGLIYHREEKRWRWINNSVFNGKYVNMPQFPGDLGLLQKTKPEIAGFTLE

SEQ ID NO: 89751 - protein, 307 aa, Homo sapiens
MALLRDVSLQDPRDRFELLQRVGAGTYGDVYKARDTVTSELAAVKIVKLDPGDDISSLQQEITILRECRHPNVVAYIGSYLRNDRLWICMEFCGGGSLQEIYHATGPLEERQIAYVCREALKGLHHLHSQGKIHRDIKGANLLLTLQGDVKLADFGVSGELTASVAKRRSFIGTPYWALMLMSKSSFQPPKLRDKTRWTQNFHHFLKLALTKNPKKRPTAEKLLQHPFTTQQLPRALLTQLLDKASDPHLGTPSPEDCELETYDMFPDTIHSRGQHGPAERTPSEIQFHQVKFGAPRRKETDPLNEP

SEQ ID NO: 89752 - protein, 407 aa, Homo sapiens
MAALRALCGFRGVAAQVLRPGAGVRLPIQPSRGVRQWQPDVEWAQQFGGAVMYPSKETAHWKPPPWNDVDPPKDTIVKNITLNFGPQHPAAHGVLRLVMELSGEMVRKCDPHIGLLHRGTEKLIEYKTYLQALPYFDRLDYVSMMCNEQAYSLAVEKLLNIRPPPRAQWIRVLFGEITRLLNHIMAVTTHALDLGAMTPFFWLFEEREKMFEFYERVSGARMHAAYIRPGGVHQDLPLGLMDDIYQFSKNFSLRLDELEELLTNNRIWRNRTIDIGVVTAEEALNYGFSGVMLRGSGIQWDLRKTQPYDVYDQVEFDVPVGSRGDCYDRYLCRVEEMRQSLRIIAQCLNKMPPGEIKVDDAKVSPPKRAEMKSFTLIAQTGVQSRLTATSASQRRGFTLLARLVLNT

SEQ ID NO: 89753 - protein, 189 aa, Homo sapiens
MPQNEYIELHRKRYGYRLDYHEKKRKKESREAHERSKKAKKMIGLKAKLYHKQRHAEKIQMKKTIKMHEKRNTKQKNDEKTPQGAVPAYLLDREGQSRAKVLSNMIKQKRKEKAGKWEVPLPKVRAQGETEVLKVIRTGKRKKKAWKRMVTKVCFVGDGFTRKPPKYERFIRPMENMPRLPTILKMMDV

SEQ ID NO: 89754 - protein, 180 aa, Homo sapiens
MNSEKSMHRKSTELVNEITCENTEWPGQRSTNFQIISSYPDDESVYCTTEKYNVMEHRHNDMHYECMTPCQVTSDSDKEKTIAFLLKELDILRTSNKKLQQKLAKEDKEQRKLKFKLELQEKETEAKIAEKTAGKVVIYATSQRNCSSTVQKTGRGNPDPSSLLQFTQIFISRRKSEGSV

SEQ ID NO: 89755 - protein, 189 aa, Homo sapiens
MGRARRRYFDEGAWLLAAPRALAEILSVKDISGRKLFYVHYIDFNKRLDEWVTHERLDLKKIQFPKKEAKTPTKNGLPGSRPGSPEREVKRKVEVVSPATPVPSETAPASVFPQNGAARRAVAAQPGRKRKSNCLGTDEDSQDSSDGIPSAPRMTGSLVSDRSHDDIVTRMKNIECIELGRHRLKPWYF

SEQ ID NO: 89756 - protein, 680 aa, Homo sapiens
MTTEKSLVTEAENSQHQQKEEGEEAINSGQQEPQQEESCQTAAEGDNWCEQKLKASNGDTPTHEDLTKNKERTSESRGLSRLFSSFLKRPKSQVSEEEGKEVESDKEKGEGGQKEIEFGTSLDEEIILKAPIAAPEPELKTDPSLDLHSLSSAETQPAQEELREDPDFEIKEGEGLEECSKIEVKEESPQSKAETELKASQKPIRKHRNMHCKVSLLDDTVYECVVEKHAKGQDLLKRVCEHLNLLEEDYFGLAIWDNATSKTWLDSAKEIKKQVRGVPWNFTFNVKFYPPDPAQLTEDITRYYLCLQLRQDIVAGRLPCSFATLALLGSYTIQSELGDYDPELHGVDYVSDFKLAPNQTKELEEKVMELHKSYRSMTPAQADLEFLENAKKLSMYGVDLHKAKDLEGVDIILGVCSSGLLVYKDKLRINRFPWPKVLKISYKRSSFFIKIRPGEQEQYESTIGFKLPSYRAAKKLWKVCVEHHTFFRLTSTDTIPKSKFLALGSKFRYSGRTQAQTRQASALIDRPAPHFERTASKRASRSLDGAAAVDSADRSPRPTSAPAITQGQVAEGGVLDASAKKTVVPKAQKETVKAEVKKEDEPPEQAEPEPTEAWKDLDKSQEEIKKHHASISELKKNFMESVPEPRPSEWDKRLSTHSPFRTLNINGQIPTGEGVSTLST

SEQ ID NO: 89757 - protein, 169 aa, Homo sapiens
  MOD_RES (1)..(1): Any amino acid
XGRRVFLAAFAAALGPLSFGFALGYSSPAIPSLQRAAPPAPRLDDAAASWFGVYISEIAYPAVRGLLGSCVQLMVVVGILLAYLAGWVLEWRWLAVLGCVPPSLMLLLMCFMPETPRFLLTQHRRQEAMAALRFLWGSEQGWEDPPIGAEQQLSGVNAVMFYAETIFEE

SEQ ID NO: 89758 - protein, 177 aa, Homo sapiens
  MOD_RES (1)..(1): Any amino acid
XEPKTNRLHIGNHCANKLTAFKPTSSKSSSEATLSISPPRPTTLSLDLTKNTTEKLQPSSPKVYLYIQMQLCRKENLKDWMNGRCTIEERERSVCLHIFLQIAEAVEFLHSKGLMHRDLKPSNIFFTMDDVVKVGDFGLVTAMDQDEEEQTVLTPMPAYARHTGQVGTKLYMSPEQA

SEQ ID NO: 89759 - protein, 520 aa, Homo sapiens
MLQITEWRFLARDEGESAVAEDPTWGEDEEPSACTTDSWAQGSVPVLHASTSEGLENFQGEVHSSGASPDSSAIAPALPFPTSHCPSAFPQDPGGVDRIPLGRSWMGRGSQEQMESWEPSPQLRVTSAPPPTSELFQEAGPGGPVEEADGQSRGLSSAGSLSASFQLSVEEAPADDADPSLDPYLVASPQASTGRGHPLGFHLSLEDLYCCMPQLDAAGDRLELRSEGVPCIASGVLVSYPSVGGATRPSASCQQQRAGHSDVRLSAHHHRMRRKAAVKRLDPARLPCHWVRPLAEVLVPDSQTRPLEAYRGRQRGEKTKARAEPQALGPGTRVSPAAFFPLRPGIPFRDLDSGPALLFPTLNLGLSSPSLESKLPLPNSRIRFLTTHPVLPDVARSRSPKLWPSVRWPSGWEGKAELLGELWAGRTRVPPQGLELADREGQDPGRWPRTTPPVLEATSQVMWKPVLLPEALKLAPGVSMWNRSTQVLLSSGVPEQEDKEGSTFPPVEQHPIQTGAPKPR

SEQ ID NO: 89760 - protein, 40 aa, Homo sapiens
MGWAAFNLSNVTGNSRILCSVYCNGSQITGSSNITVYRLP

SEQ ID NO: 89761 - protein, 148 aa, Homo sapiens
MAAMASLGALALLLLSSLSRCSAEACLEPQITPSYYTTSDAVISTETVFIVEISLTCKNRVQVSWSLDHKSAHAGTYEVRFFDEESYSLLRKAQRNNEDISIIPPLFTVSVDHRGTWNGPWVSTEVLAAAIGLVIYYLAFSAKSHIQA

SEQ ID NO: 89762 - protein, 81 aa, Homo sapiens
  MOD_RES (1)..(1): Any amino acid
XENKPVVKPPVADSLANPLQLTPMNSLATSVFSIAIPVDGDEDRNPSTAFYQAFHLNTLKESKSLWDRIFFRIQHRRRNVT

SEQ ID NO: 89763 - protein, 879 aa, Homo sapiens
MQPGATTCTEDRIQHALERCLHGLSLSRRSTSWSAGLCLNCWSLQELVSRDPGHFLILLEQILQKTREVQEKGTYDLLTPLALLFYSTVLCTPHFPPDSDLLLKAASTYHRFLTWPVPYCSICQELLTFIDAELKAPGISYQRLVRAEQGLPIRSHRSSTVTVLLLNPVEVQAEFLAVANKLSTPGHSPHSAYTTLLLHAFQATFGAHCDVPGLHCRLQAKTLAELEDIFTETAEAQELASGIGDAAEARRWLRTKLQAVGEKAGFPGVLDTAKPGKLHTIPIPVARCYTYSWSQDSFDILQEILLKEQELLQPGILGDDEEEEEEEEEVEEDLETDGHCAERDSLLSTSSLASHDSTLSLASSQASGPALSRHLLTSFVSGLSDGMDSGYVEDSEESSSEWPWRRGSQERRGHRRPGQKFIRIYKLFKSTSQLVLRRDSRSLEGSSDTALPLRRAGSLCSPLDEPVSPPSRAQRSRSLPQPKLGTQLPSWLLAPASRPQRRRPFLSGDEDPKASTLRVVVFGSDRISGKVARAYSNLRRLENNRPLLTRFFKLQFFYVPVKRSHGTSPGACPPPRSQTPSPPTDSPRHASPGELGTTPWEESTNDISHYLGMLDPWYERNVLGLMHLPPEVLCQSLKAEAQALEGSPTQLPILADMLLYYCRFAARPVLLQVYQTELTFITGEKTTEIFIHSLELGHSAATRAIKASGPGSKRLGIDGDREAVPLTLQIIYSKGAISGRSRWSNLEKVCTSVNLNKACRKQEELDSSMEALTLNLTEVVKRQNSKSKKGFNQISTSQIKVDKVQIIGSNSCPFAVCLDQDERKILQSVVRCEVSPCYKPEKSDLSSPPQTPPDLPAQAAPDLCSLLCLPIMTFSGALP

SEQ ID NO: 89764 - protein, 441 aa, Homo sapiens
MVPALRYLVGACGRARGLFAGGSPGACGFASGRPRPLCGGSRSASTSSFDIVIVGGGIVGLASARALILRHPSLSIGVLEKEKDLAVHQTGHNSGVIHSGIYYKPESLKAKLCVQGAALLYEYCQQKGISYKQCGKLIVAVEQEEIPRLQALYEKGLQNGVPGLRLIQQEDIKKKEPYCRGLMAIDCPHTGIVDYRQVALSFAQDFQEAGGSVLTNFEVKGIEMAKESPSRSIDGMQYPIVIKNTKGEEIRCQYVVTCAGLYSDRISELSGCTPDPRIVPFRGDYLLLKPEKCYLVKGNIYPVPDSRFPFLGVHFTPRMDGSIWLGPNAVLAFKREGYRPFDFSATDVMDIIINSGLIKLASQNFSYGVTEMYKACFLGATVKYLQKFIPEITISDILRQVAVRGPSWLWQQPMKVSDNNIYCFLWRCFALLLTGSACSFK

SEQ ID NO: 89765 - protein, 208 aa, Homo sapiens
KVWDMLLEKWLCPSTKPGEKPSELFELQEDEALRRVQYLLLSRPIDYSSRMLFVFATSTTTTLGMHQLTFAHRTRALQCLFYLADKETIESLFKKPIEEVNSPKEGMIKGLWKNHSHESMAVRLVTELCLEYKIYDLQLWNGLLQKLLGFNMIPYLRKVLKAISSIHSLWQVPYFSKAWQRVIQIPLLSASCPLSPDQLSDCSESLIA

SEQ ID NO: 89766 - protein, 111 aa, Homo sapiens
METNLWLRHIWNDYKLRWDPMEYDGIETLRVPADKIWKPDIVLYNNAVGDFQVEGKTKALLKYNGMITWTPPAIFKSSCPMDITFFPFDHQNCSLKFGSWTYDKAEIDLLI

SEQ ID NO: 89767 - protein, 985 aa, Homo sapiens
MDKRKLGRRPSSSEIITEGKRKKSSSDLSEIRKMLNAKPEDVHVQSPLSKFRSSERWTLPLQWERSLRNKVISLDHKNKKHIRGCPVTSKSSPERQLKVMLTNVLWTDLGRKFRKTLPRNDANLCDANKVQSDSLPSTSVDSLETCQKLEPLRQSLNLSERGSQRSKTVDDNSAKQTAHNKEKRRKDDGISLLISDTQPEDLNSGSRGCDHLEQESRNKDVKYSDSKVELTLISRKTKRRLRNNLPDSQYCTSLDKSTEQTKKQEDDSTISTEFEKPSENYHQDPKLPEEITTKPTKSDFTKLSSLNSQELTLSNATKSASAGSTTETVENSNSIDIVGISSLVEKDENELNTIEKPILRGHNEGNQSLISAEPIVVSSDEEGPVEHKSSEILKLQSKQDRETTNENESTSESALLELPLITCESVQMSSELCPYNPVMENISSIMPSNEMDLQLDFIFTSVYIGKIKGASKGCVTITKKYIKIPFQVSLNEISLLVDTTHLKRFGLWKSKDDNHSKRSHAILFFWVSSDYLQEIQTQLEHSVLSQQSKSSEFIFLELHNPVSQREELKLKDIMTEISIISGELELSYPLSWVQAFPLFQNLSSKESSFIHYYCVSTCSFPAGVAVAEEMKLKSVSQPSNTDAAKPTYTFLQKQSSGCYSLSITSNPDEEWREVRHTGLVQKLIVYPPPPTKGGLGVTNEDLECLEEGEFLNDVIIDFYLKYLILEKASDELVERSHIFSSFFYKCLTRKENNLTEDNPNLSMAQRRHKRVRTWTRHINIFNKDYIFVPVNESSHWYLAVICFPWLEEAVYEDFPQTVSQQSQAQQSQNDNKTIDNDLRTTSTLSLSAEDSQSTESNMSVPKKMCKRPCILILDSLKAASVQNTVQNLREYLEVEWEVKLKTHRQFSKTNMVDLCPKVPKQDNSSDCGVYLLQYVESFFKDPIVNFELPIHLEKWFPRHVIKTKREDIRELILKLHLQQQKGSSS

SEQ ID NO: 89768 - protein, 589 aa, Homo sapiens
MTVVGNPRSWSCQWLPILILLLGTGHGPGVEGVTHYKAGDPVILYVNKVGPYHNPQETYHYYQLPVCCPEKIRHKSLSLGEVLDGDRMAESLYEIRFRENVEKRILCHMQLSSAQVEQLRQAIEELYYFEFVVDDLPIRGFVGYMEESGFLPHSHKIGLWTHLDFHLEFHGDRIIFANVSVRDVKPHSLDGLRPDEFLGLTHTYSVRWSETSVERRSDRRRGDDGGFFPRTLEIHWLSIINSMVLVFLLVGFVAVILMRVLRNDLARYNLDEETTSAGSGDDFDQGDNGWKIIHTDVFRFPPYRGLLCAVLGVGAQFLALGTGIIVMALLGMFNVHRHGAINSAAILLYALTCCISGYVSSHFYRQIGGERWVWNIILTTSLFSVPFFLTWSVVNSVHWANGSTQALPATTILLLLTVWLLVGFPLTVIGGIFGKNNASPFDAPCRTKNIAREIPPQPCAISVELYYIFATVWGREQYTLYGILFFVFAILLSVGACISIALTYFQLSGEDYRWWWRSVLSVGSTGLFIFLYSVFYYARRSNMSGAVQTVEFFGYSLLTGYVFFLMLGTISFFSSLKFIRYIYVNLKMD

SEQ ID NO: 89769 - protein, 92 aa, Homo sapiens
ALLAAGGRGVPGPPPQLRVPTPSASRSLRVSEPRGLGVRALPCAAPPDCQRRGLGDAPLPHGQLRSSSPPRPGDLFQNRIPPPLKHTVLPQS

SEQ ID NO: 89770 - protein, 146 aa, Homo sapiens
  MOD_RES (1)..(1): Any amino acid
XSWLFDLRGENPTLFVHFYRRYFWLVVAAFFNVSKIPERIQPGLFDIIGHSHQLFHIFTFLSIYDQVYYVEEGLRQFLQAPPAAPTFSGTVGYMLLLVVCLGLVIRKFLNSSEFCSKKFCQGDKSRKIGLEQKAAEGSSSEGSHFL

SEQ ID NO: 89771 - protein, 128 aa, Homo sapiens
MSSAPAPGPAPASLTLWDEEDFQGRRCRLLSDCANVCERGGLPRVRSVKVENGVWVAFEYPDFQGQQFILEKGDYPRWSAWSGSSSHNSNQLLSFRPVLCANHNDSRVTLFEGDNFQGCKFDLVDDYP

SEQ ID NO: 89772 - protein, 49 aa, Homo sapiens
VQLQKETGATIKLSKSKDFYPGADSCRRNCTWCCTEGISPLCHLQSETD

SEQ ID NO: 89773 - protein, 60 aa, Homo sapiens
MKDKFLKHLTGPLYFSPKCSKHFHRLYHNTRDCTIPAYYKRCARLLTRLAVSPVCMEDKQ

SEQ ID NO: 89774 - protein, 130 aa, Homo sapiens
MATGTDQVVGLGLVAVSLIIFTYYTAWVILLPFIDSQHVIHKYFLPRAYAVAIPLAAGLLLLLFVGKSSPPPLDPGQGFGKTPPLNMLPHFGGAGSCLPRTHPWGFPVHPSRLPVSNLWVSWCPRLFGLQ

SEQ ID NO: 89775 - protein, 970 aa, Homo sapiens
MQHKIVTSLDWRCCPGYSGPKCQLRAQEQQSLIHTNQAESHTAVGRGVAEQQQQQGCGDPEVMQKMTDQVNYQAMKLTLLQKKIDNISLTVNDVRNTYSSLEGKVSEDKSREFQSLLKGLKSKSINVLIRDIVREQFKIFQNDMQETVAQLFKTVSSLSEDLESTRQIIQKVNESVVSIAAQQKFVLVQENRPTLTDIVELRNHIVNVRQEMTLTCEKPIKELEVKQTHLEGALEQEHSRSILYYESLNKTLSKLKEVHEQLLSTEQVSDQKNAPAAESVSNNVTEYMSTLHENIKKQSLMMLQMFEDLHIQESKINNLTVSLEMEKESLRGECEDMLSKCRNDFKFQLKDTEENLHVLNQTLAEVLFPMDNKMDKMSEQLNDLTYDMEILQPLLEQGASLRQTMTYEQPKEAIVIRKKIENLTSAVNSLNFIIKELTKRHNLLRNEVQGRDDALERRINEYALEMEDGLNKTMTIINNAIDFIQDNYALKETLSTIKDNSEIHHKCTSDMETILTFIPQFHRLNDSIQTLVNDNQRYNFVLQVAKTLAGIPRDEKLNQSNFQKMYQMFNETTSQVRKYQQNMSHLEEKLLLTTKISKNFETRLQDIESKVTQTLIPYYISVKKGSVVTNERDQALQLQVLNSRFKALEAKSIHLSINFFSLNKTLHEVLTMCHNASTSVSELNATIPKWIKHSLPDIQLLQKGLTEFVEPIIQIKTQAALSNLTCCIDRSLPGSLANVVKSQKQVKSLPKKINALKKPTVNLTTVLIGRTQRNTDNIIYPEEYSSCSRHPCQNGGTCINGRTSFTCACRHPFTGDNCTIKLVEENALAPDFSKGSYRYAPMVAFFASHTYGMTIPGPILFNNLDVNYGASYTPRTGKFRIPYLGVYVFKYTIESFSAHISGFLVVDGIDKLAFESENINSEIHCDRVLTGDALLELNYGQEVWLRLAKGTIPAKFPPVTTFSGYLLYRT

SEQ ID NO: 89776 - protein, 55 aa, Homo sapiens
MASPADSCIQFTRHASDVLLNLNRLRSRDILTDVVIVVSREQFRAHKTVLMACRS

SEQ ID NO: 89777 - protein, 177 aa, Homo sapiens
FYDKLRTKGYDGVKRWTKNVDIFNKELLLIPIHLEVHWSLISVDVRRRTITYFDSQRTLNRRCPKHIAKYLQAEAVKKDRLDFHQGWKGYFKMNVARQNNDSDCGAFVLQYCKHLALSQPFSFTQQDMPKLRRQIYKELCHCKLTVGVWPCGLGGAVILPLPRAGSRKSVLGVVGGQ

SEQ ID NO: 89778 - protein, 96 aa, Homo sapiens
MEAPLQTEMVELVPNGKHSEGLLPVITPMAGNQRVEDPARSCMEGKSFLQKSPSKEPHFTDFEGKTSFGMSVFNLSNAIMGSGILGLAYAMANTGI

SEQ ID NO: 89779 - protein, 234 aa, Homo sapiens
MASSAKSAEMPTISKTVNPTPDPHQEYLDPRITIALFEIGSHSPSSWGSLPFLKNSSHQVTEQQTAQKFNNLLKEIKDILKNMAGFEEKITEAKELFEETNITEDVSAHKENIRGLDKINEMLSTNLPVSLAPEKEDNEKKQEMILETNITEDVSAHKENIRGLDKINEMLSTNLPVSLAPEKEDNEKKQQMIMENQNSENTAQVFARDLVNRLEEKKVLNETQQSQEKAKNRL

SEQ ID NO: 89780 - protein, 168 aa, Homo sapiens
MGRVRKGKQKPGGAVGSFKAERTPVPSLFPALGVVLGRGGGAMGHMLLPFRLGLGGPIGSGHQFFPWIHIGDLAGILTHALEANHVHGVLNGVAPSSATNAEFAQTLGAALGRRAFIPLPSAVVQAVFGRQRAIMLLEGQKVIPQRTLATGYQYSFPELGAALKEIVA

SEQ ID NO: 89781 - protein, 264 aa, Homo sapiens
  MOD_RES (1)..(1): Any amino acid
XYRPTWDLALDPLVSCKLCLGEYPVEQMTTIAQCQCIFCTLCLKQYVELLIKEGLETAISCPDAACPKQGHLQENEIECMVAAEIMQRYKKLQFEREVLFDPCRTWCPASTCQAVCQLQDVGLQTPQPVQCKACRMEFCSTCKASWHPGQGCPETMPITFLPGETSAAFKMEEDDAPIKRCPKCKVYIERDEGCAQMMCKNCKHAFCWYCLESLDDDFLLIHYDKGPCRNKLGHSRASVIWHRTQGDAILEKCILHNTESECHL

SEQ ID NO: 89782 - protein, 731 aa, Homo sapiens
MDEDALSRDDVIGKVCLTRDTIASHPKGFSGWAHLTEVDPDEEVQGEIHLRLEVWPGARACRLRCSVLEARDLAPKDRNGTSDPFVRVRYKGRTRETSIVKKSCYPRWNETFEFELQEGAMEALCVEAWDWDLVSRNDFLGKVVIDVQRLRVVQQEEGWFRLQPDQSKSRRHDEGNLGSLQLEVRLRDETVLPSSYYQPLVHLLCHEVKLGMQGPGQLIPLIEETTSTECRQDVATNLLKLFLGQGLAKDFLDLLFQLELSRTSETNTLFRSNSLASKSVESFLKVAGMQYLHGVLGPIINKVFEEKKYVELDPSKVEVKDVGCSGLHRPQTEAEVLEQSAQTLRAHLGALLSALSRSVRACPAVVRATFRQLFRRVRERFPGAQHENVPFIAVTSFLCLRFFSPAIMSPKLFHLRERHADARTSRTLLLLAKAVQNVGNMDTPASRAKEAWMEPLQPTVHQGVAQLKDFITKLVDIEEKDELDLQRTLSLQAPPVKEGPLFIHRTKGKGPLMSSSFKKLYFSLTTEALSFAKTPSSKKSALIKLANIRAAEKVEEKSFGGSHVMQVIYTDDAGRPQTAYLQCKCVNELNQWLSALRKVSINNTGLLGSYHPGVFRGDKWSCCHQKEKTGQGCDKTRSRVTLQEWNDPLDHDLEAQLIYRHLLGVEAMLWERHRELSGGAEAGTVPTSPGKVPEDSLARLLRVLQDLREAHSSSPAGSPPSEPNCLLELQT

SEQ ID NO: 89783 - protein, 120 aa, Homo sapiens
MGRRKSKRKPPPKKKMTGTLETQFTCPFCNHEKSCDVKMDRARNTGVISCTVCLEEFQTPITCILGNLGFFQRVGRGLESGPCSSGPLCALVQGQSRPEEQVPPSDFCGVRRCRAGFQCQ

SEQ ID NO: 89784 - protein, 45 aa, Homo sapiens
MESGSTAASEEARSLRECELYVQKHNIQALLKDSIVQLCTARPER

SEQ ID NO: 89785 - protein, 74 aa, Homo sapiens
MGRVSGLVPSRFLTLLAHLVVVITLFWSRDSNIQACLPLTFTPEEYDKQDIHALPAVTEMALFVTVFGLKKKPF

SEQ ID NO: 89786 - protein, 643 aa, Homo sapiens
MSGCGLFLRTTAAARACRGLVVSTANRRLLRTSPPVRAFAKELFLGKIKKKEVFPFPEVSQDELNEINQFLGPVEKFFTEEVDSRKIDQEGKIPDETLEKLKSLGLFGLQVPEEYGGLGFSNTMYSRLGEIISMDGSITVTLAAHQAIGLKGIILAGTEEQKAKYLPKLASGEHIAAFCLTEPASGSDAASIRSRATLSEDKKHYILNGSKVWITNGGLANIFTVFAKTEVVDSDGSVKDKITAFIVERDFGGVTNGKPEDKLGIRGSNTCEVHFENTKIPVENILGEVGDGFKVAMNILNSGRFSMGSVVAGLLKRLIEMTAEYACTRKQFNKRLSEFGLIQEKFALMAQKAYVMESMTYLTAGMLDQPGFPDCSIEAAMVKVFSSEAAWQCVSEALQILGGLGYTRDYPYERILRDTRILLIFEGTNEILRMYIALTGLQHAGRILTTRIHELKQAKVSTVMDTVGRRLRDSLGRTVDLGLTGNHGVVHPSLADSANKFEENTYCFGRTVETLLLRFGKTIMEEQLVLKRVANILINLYGMTAVLSRASRSIRIGLRNHDHEQGTDPAHCPLCWREAGAVSEDPLYTRISACTFQSTCRYQDCDICLSEETGFSWPTPSAWKLTCRISSASLSWTSMLQKT

SEQ ID NO: 89787 - protein, 108 aa, Homo sapiens
MTWTSGQLQREKQARPGSGAVLAFPDDKDLRVYGPAESQSAVFGDVCPLLTSLLDGYNVCVMAYGQTGSGKSYTMLGRHSDDGPVLPLDPQSDLGIIPRVAEELFRAQ

SEQ ID NO: 89788 - protein, 133 aa, Homo sapiens
MTRSLLGVFEEDATAISNYMNQLYQAMHRIYDAQNELSAATHLTSKLLKEYEKQRFPLGGDDEVMSSTLQQFSKVIDELSSCHAVLSTQLADAMMFPITQFKERDLKEILTLKEVFQIASNDHDAAINRYSRL

SEQ ID NO: 89789 - protein, 61 aa, Homo sapiens
IYLNVESVCTHRERSEGLSLFPRLECGGAVTAHCSLNLLGSSDPPASASRVAETTGCKEGT

SEQ ID NO: 89790 - protein, 864 aa, Homo sapiens
MPPLLAPLLCLALLPALAARGPRCSQPGETCLNGGKCEAANGTEACVCGGAFVGPRCQDPNPCLSTPCKNAGTCHVVDRRGVADYACSCALGFSGPLCLTPLDNACLTNPCRNGGTCDLLTLTEYKCRCPPGWSGKSCQQADPCASNPCANGGQCLPFEASYICHCPPSFHGPTCRQDVNECGQKPGLCRHGGTCHNEVGSYRCVCRATHTGPNCERPYVPCSPSPCQNGGTCRPTGDVTHECACLPGFTGQNCEENIDDCPGNNCKNGGACVDGVNTYNCRCPPEWTGQYCTEDVDECQLMPNACQNGGTCHNTHGGYNCVCVNGWTGEDCSENIDDCASAACFHGATCHDRVASFYCECPHGRTGLLCHLNDACISNPCNEGSNCDTNPVNGKAICTCPSGYTGPACSQDVDECSLGANPCEHAGKCINTLGSFECQCLQGYTGPRCEIDVNECVSNPCQNDATCLDQIGEFQCICMPGYEGVHCEVNTDECASSPCLHNGRCLDKINEFQCECPTGFTGHLCQYDVDECASTPCKNGAKCLDGPNTYTCVCTEGYTGTHCEVDIDECDPDPCHYGSCKDGVATFTCLCRPGYTGHHCETNINECSSQPCRHGGTCQDRDNAYLCFCLKGTTGPNCEINLDDCASSPCDSGTCLDKIDGYECACEPGYTGSMCNINIDECAGNPCHNGGTCEDGINGFTCRCPEGYHDPTCLSEVNECNSNPCVHGACRDSLNGYKCDCDPGWSGTNCDINNNECESNPCVNGGTCKDMTSGYVCTCREGFSGPNCQTNINECASNPCLNQGTCIDDVAGYKCNCLLPYTGATCEVVLAPCAPSPCRNGGECRQSEDYESFSCVCPTGWQDL

SEQ ID NO: 89791 - protein, 138 aa, Homo sapiens
  MOD_RES (1)..(1): Any amino acid
XTALVPYGLPCIRELFRFLISLTNPHDRHNSEVMIHMGLHLLTVALESAPVAQCQTLLGLIKDEMCRHLFQLLITGTEQFNQKPKKGIQFLQEKGLLTIPMDNTEVAQWLRENPRLDKKMIGEFVSDRKNIDLLESFV

SEQ ID NO: 89792 - protein, 141 aa, Homo sapiens
MEVDDRVSALEQRLQLQEDELAVLKAALADALRRLRACEEQGAALRARGTPKGRAPPRLGTTASVCQLLKGLPTRTPLNGSGPPRRVGGYATSPSSPKKEATSGRSSVRRYLSPERLASVRREDPRSRTTSSSSNCSAKKE

SEQ ID NO: 89793 - protein, 144 aa, Homo sapiens
MSSQQFPRLGAPSTGLSQAPSQIANSGSAGLINPAATVNDESGRDSEVSAREHMSSSSSLQSREEKQEPVVVRPYPQVQMLSTHHAVASATPVAVTAPPAHLTPAVPLSFSEGLMKVPGQVTVTMESSIPQASAIPVATISGQQ

SEQ ID NO: 89794 - protein, 368 aa, Homo sapiens
MWAVLRLALRPCARASPAGPRAYHGDSVASLGTQPDLGSALYQENYKQMKALVNQLHERVEHIKLGGGEKARALHISRGKLLPRERIDNLIDPGSPFLELSQFAGYQLYDNEEVPGGGIITGIGRVSGVECMIIANDATVKGGAYYPVTVKKQLRAQEIAMQNRLPCIYLVDSGGAYLPRQADVFPDRDHFGRTFYNQAIMSSKNIAQIAVVMGSCTAGGAYVPAMADENIIVRKQGTIFLAGPPLVKAATGEEVSAEDLGGADLHCRKSGVSDHWALDDHHALHLTRKVVRNLNYQKKLDVTIEPSEEPLFPADELYGIVGANLKRSFDVREVIARIVDGSRFTEFKAFYGDTLVTALGKAQDINLL

SEQ ID NO: 89795 - protein, 116 aa, Homo sapiens
MASALEQFVNSVRQLSAQGQMTQLCELINKSGELLAKNLSHLDTVLGALDVQEHSLGVLAVLFVKFSMPSVPDFETLFSQVQLFISTCNGEHIRYATDTFAGLCHQLTNALVERKQ

SEQ ID NO: 89796 - protein, 79 aa, Homo sapiens
YSVHRPVKQCIHQLCFTSLRRMYIVNKEICSRLVCKEHEAMKDELCRQMAGLPPRRLRRSNYFRLPPCENVDLQRPNGL

SEQ ID NO: 89797 - protein, 428 aa, Homo sapiens
MWLSYLQPWRYAPDKQAPGSDSQPRCVSEKWAPFVQENLLMYTKLFVGFLNRALRTDLVSPKHALMVFRVAKVFAQPNLAEMIQKGEQLFLEPELVIPHRQHRLFTAPTFTGSFLSPWPPAVTDASFKVKSHVYSLEGQDCKYTPMFGPEARTLVLRLAQLITQAKHTAKSISDQCAESPAGHSFLSWLGFSSMDTNGSYTANDLDEMGQDSVRKTDEYLEKALEYLRQIFRLSEAQLRQFTLALGTTQDENGKKQLPDCIVGEDGLILTPLGRYQIINGLRRFEIEYQGDPELQPIRSYEIASLVRTLFRLSSAINHRFAGQMAALCSRDDFLGSFCRYHLTEPGLASRHLLSPVGRRQVAGHTRGPRLSLRFLGSYRTLVSLLLAFFVASLFCVGPLPCTLLLTLGYVLYASAMTLLTERGKLHQP

SEQ ID NO: 89798 - protein, 120 aa, Homo sapiens
MPKLVKNLLGEMPLWVCQSCRKSMEEDERQTGREHAVAISLSHTSCKSQSCGDDSHSSSSSSSSSSSSSSSSCPGNSGDWDPSSFLSAHKLSGLWNSPHSSGAMPGSSLGSPPTIPACRS

SEQ ID NO: 89799 - protein, 244 aa, Homo sapiens
MSGTNLDGNDEFDEQLRMQELYGDGKDGDTQTDAGGEPDSLGQQPTDTPYEWDLDKKAWFPKITEDFIATYQANYGFSNDGASSSTANVEDVHARTAEEPPQEKAPEPTDARKKGEKRKAESGWFHVEEDRNTNVYVSGLPPDITVDEFIQLMSKFGIIMRDPQTEEFKVKLYKDNQGNLKGDGLCCYLKRESVELALKLLDEDEIRGYKLHVEVAKFQLKGEYDASKKKKKCKDYKKKLSMQQ

SEQ ID NO: 89800 - protein, 52 aa, Homo sapiens
MSHPSWLPPKSTGEPLGHVPARMETTHSFGNPSISVSTQQPPKKFAPVVAPK

SEQ ID NO: 89801 - protein, 78 aa, Homo sapiens
MMMMALSKTFGQKPVKFQLEDDGEFYMIGSEGTEGQEEQPVGTHPAQQLPPLRCRAMLHNHQQEPHGPRQEENLPPLL

SEQ ID NO: 89802 - protein, 161 aa, Homo sapiens
MESTLSASNMQDPSSSPLEKCLGSANGNGDLDSEEGSSLEETGFNWGEYLEETGASAAPHTSFKHVEISIQSNFQPGMKLEVANKNNPDTYWVATIITTCGQLLLLRYCGYGEDRRADFWCDVVIADLHPVGWCTQNNKVLMPPDDSKLHGVNPLVCVHQL

SEQ ID NO: 89803 - protein, 70 aa, Homo sapiens
MKFQYKEDHPFEYRKKEGEKIRKKYPDRVPVIVEKAPKARVPDLDKRKYLVPSDLTVGQFYFLIRKRIHL

SEQ ID NO: 89804 - protein, 79 aa, Homo sapiens
MKVGWPGESCWQVGLAVEDSPALGAPRVGALPDVVPEGTLLNMVLRRMHRPRSCSYQLLLEHQRPSCIQGLRWPRSAHG

SEQ ID NO: 89805 - protein, 69 aa, Homo sapiens
MKDEVALLAAVTLLGVLLQGDLGAQGLPRVAAAHHRPTRVRARLPSPGELQRVLPAVPRHALGRRHLLS

SEQ ID NO: 89806 - protein, 230 aa, Homo sapiens
MEEPEEPADSGQSLVPVYIYSPEYVSMCDSLAKIPKRASMVHSLIEAYALHKQMRIVKPKVASMEEMATFHTDAYLQHLQKVSQEGDDDHPDSIEYGLGYDCPATEGIFDYAAAIGGATITAAQCLIDGMCKVAINWSGGWHHAKKDEASGFCYLNDAVLGILRLRRKFERILYVDLDLHHGDGTGDVSDVGLGKGRYYSVNVPIQDGIQDEKYYQICERYEPPAPNPGL

SEQ ID NO: 89807 - protein, 711 aa, Homo sapiens
MSDYSTGGPPPGPPPPAGGGGGAGGAGGGPPPGPPGAGDRGGGGPGGGGPGGGSAGGPSQPPGGGGPGIRKDAFADAVQRARQIAAKIGGDAATTVNNSTPDFGFGGQKRQLEDGDQPESKKLASQGDSISSQLGPIHPPPRTSMTEEYRVPDGMVGLIIGRGGEQINKIQQDSGCKVQISPDSGGLPERSVSLTGAPESVQKAKMMLDDIVSRGRGGPPGQFHDNANGGQNGTVQEIMIPAGKAGLVIGKGGETIKQLQERAGVKMILIQDGSQNTNVDKPLRIIGDPYKVQQACEMVMDILRERDQGGFGDRNEYGSRIGGGIDVPVPRHSVGVVIGRSGEMIKKIQNDAGVRIQFKQDDGTGPEKIAHIMGPPDRCEHAARIINDLLQSLRSGPPGPPGGPGMPPGGRGRGRGQGNWGPPGGEMTFSIPTHKCGLVIGRGGENVKAINQQTGAFVEISRQLPPNGDPNFKLFIIRGSPQQIDHAKQLIEEKIEGPLCPVGPGPGGPGPAGPMGPFNPGPFNQGPPGAPPHAGGPPPHQYPPQGWGNTYPQWQPPAPHDPSKAAAAAADPNAAWAAYYSHYYQQPPGPVPGPAPAPAAPPAQGEPPQPPPTGQSDYTKAWEEYYKKIGQQPQQPGAPPQQDYTKAWEEYYKKQAQVATGGGPGAPPGSQDPFPQQPSPLLPPALAQLPRPRPSPLPGLVCCLFICSRGD

SEQ ID NO: 89808 - protein, 124 aa, Homo sapiens
  MOD_RES (1)..(1): Any amino acid
XLLLRRAVLACLRQLVQREAAEVSEHAVMLAKDSREELTPDANIREVGLEGALLILLDKETDERLCHDIKETLNYMLTSMAVEKLSLWLKLCKDVLAASAGKYWTLSVKIIKLKFETLHKIVYH

SEQ ID NO: 89809 - protein, 708 aa, Homo sapiens
MAGGPGPGEPAAPGAQHFLYEVPPWVMCRFYKVMDALEPADWCQFGGWRRAAGGREARGLLAPTPDAPRPAAALIVRDQTELRLCERSGQRTASVLWPWINRNARVADLVHILTHLQLLRARDIITAWHPPAPLPSPGTTAPRPSSIPAPAEAEAWSPRKLPSSASTFLSPAFPGSQTHSGPELGLVPSPASLWPPPPSPAPSSTKPGPESSVSLLQGARPFPFCWPLCEISRGTHNFSEELKIGEGGFGCVYRAVMRNTVYAVKRLKENADLEWTAVKQSFLTEVEQLSRFRHPNIVDFAGYCAQNGFYCLVYGFLPNGSLEDRLHCQTQACPPLSWPQRLDILLGTARAIQFLHQDSPSLIHGDIKSSNVLLDERLTPKLGDFGLARFSRFAGSSPSQSSMVARTQTVRGTLAYLPEEYIKTGRLAVDTDTFSFGVVVLETLAGQRAVKTHGARTKYLKDLVEEEAEEAGVALRSTQSTLQAGLAADAWAAPIAMQIYKKHLDPRPGPCPPELGLGLGQLACCCLHRRAKRRPPMTQENSYVSSTGRAHSGAAPWQPLAAPSGASAQAAEQLQRGPNQPVESDESLGGLSAALRSWHLTPSCPLDPAPLREAGCPQGDTAGESSWGSGPGSRPTAVEGLALGSSASSSSEPPQIIINPARQKMVQKLALYEDGALDSLQLLSSSSLPGLGLEQDRQGPEESDEFQS

SEQ ID NO: 89810 - protein, 169 aa, Homo sapiens
MSRSKRDNNFYSVEIGDSTFTVLKRYQNLKPIGSGAQGIVCAAYDAILERNVAIKKLSRPFQNQTHAKRAYRELVLMKCVNHKNIIGLLNVFTPQKSLEEFQDVYIVMELMDANLCQVIQMELDHERMSYLLYQMLCGIKHLHSAGIIHRVSRRNYRHTLCFLIEVKFM

SEQ ID NO: 89811 - protein, 336 aa, Homo sapiens
LAALTAAPRGTWAQVRTSLKTQAAEALEAVEGAAFFVSLDAEPAGLTREDPAASLDAYAHALLAGRGHDRWFDKSFTLIVFSNGKLGLSVEHSWADCPISGHMWEFTLATECFQLGYSTDGHCKGHPDPTLPQPQRLQWDLPDQIHSSISLALRGAKILSENVDCHVVPFSLFGKSFIRRCHLSSDSFIQIALQLAHFRDRGQFCLTYESAMTRLFLEGRTETVRSCTREACNFVRAMEDKEKTADDHGYGVSYIFMGDGMITFHISSKKSSTKTDSHRLGQHIEDALLDVASLFQAGQHFKRRFRGSGKENSRHRCGFLSRQTGASKASMTSTDF

SEQ ID NO: 89812 - protein, 57 aa, Homo sapiens
MKLRSSHNASKTLNANNMETLIECQSEGDIKEHPLLASCESEDSICQLIGHSHYSMP

SEQ ID NO: 89813 - protein, 55 aa, Homo sapiens
MATLVELPDSVLLEIFSYLPGLSPLEEAGGRPVAVATCRPDALHGPMMPSREIQQ

SEQ ID NO: 89814 - protein, 97 aa, Homo sapiens
MSEASSEDLVPPLEAGAAPYREEEEAAKKKKEKKKKSKGLANVFCVFTKGKKKKGQPSSAEPEDAAGSRQGLDGPPPTGQCEGVDGPSSGARGTALG

SEQ ID NO: 89815 - protein, 75 aa, Homo sapiens
MWKSVVGHDVSVSVETQGDDWDTDPDFVNDISEKEQRWGAKTIEGSGRTEHINIPWLWRSVWSRKRPNGQECSGP

SEQ ID NO: 89816 - protein, 236 aa, Homo sapiens
MVSLTAPYVSGFLAFREVPFLLELVQQLREKEPGLMPQVLLVDGNGVLHHRGFGVACHLGVLTDLPCVGVAKKLLQVDGLENNALHKEKIRLLQTRGDSFPLLGDSGTVLGMPTGQPSPSLSQALRSHDRSTRPLYISVGHRMSLEAAVRLTCCCCRFRIPEPVRQADICSREHIRKSLGLPGPPTPRSPKAQRPVACPKGDSGESSGGAPSPQRQADRTTPGGRRSTAQHQVGQR

SEQ ID NO: 89817 - protein, 286 aa, Homo sapiens
MENVCEKVTNSVSSELQPYFQTLPVMTKIDSVAGINYGLVAPPATTAETLDVQMKGEFYSENHHNPPPFAPPVMEFPAAHDRMVYLGLSDYFFNTAGLVYQEAGVLKMTLRDDMIPKESKFRLTTKFFGTFLPEVAKKFPNMKIQIHVSASTPPHLSVQPTGLTFYPAVDVQAFAVLPNSSLASLFLIGMHTTGSMEVSAESNRLVGELKLDRLLLELKHSNIGPFPVELLQDIMNYIVPILVLPRVNEKLQKGFPLPTPARVQLYNVVLQPHQNFLLFGADVVYK

SEQ ID NO: 89818 - protein, 225 aa, Homo sapiens
MLKAREYHSSSVLDGLLYVVAADSTERYDHTTDSWEALQPMTYPMDNCSTTACRGRLYAIGSLAGKETMVMQCYDPDTDLWSLVDCGQLPPWSFAPKTATLNGLMYFVRDDSAEVDVYNPTRNEWDKIPSMNQVHVGGSLAVLGGKLYVSGGYDNTFELSDVVEAYDPETRAWSVVGRLPEPTFWHGSVSIFRQFMPQTFSGGRGFELDSGSDDMDPGRPRPPRD

SEQ ID NO: 89819 - protein, 301 aa, Homo sapiens
MGLVHGPNHPLVLLAKWYEKFFGRLSHLNLCVTNAMREDLADNWHIRAVTVYDKPASFFKETPLDLQHRLFMKLGSMHSPFRARSEPEDPVTERSAFTERDAGSGLVTRLRERPALLVSSTSWTEDEDFSILLAALEKFEQLTLDGHNLPSLVCVITGKGPLREYYSRLIHQKHFQHIQVCTPWLEAEDYPLLLGSADLGVCLHTSSSGLDLPMKVVDMFGCCLPVCAVNFKCLHELVKHEENGLVFEDSEELAAQLQMLFSNFPDPAGKLNQFRKNLRESQQLRWDESWVQTVLPLVMDT

SEQ ID NO: 89820 - protein, 136 aa, Homo sapiens
MAELQEVQITEEKPLLPGQTPEAAKEAELAARILLDQGQTHSVETPYGSVTFTVYGTPKPKRPAILTYHDVGLNYKSCFQPLFQFEDMQEIIQNFVRVHVDAPGMEEGAPVFPLGYQYPSLDQLADMIPCVLQYLK

SEQ ID NO: 89821 - protein, 231 aa, Homo sapiens
MALVPCQVLRMAILLSYCSILCNYKAIEMPSHQTYGGSWKFLTFIDLVIQAVFFGICVLTDLSSLLTRGSGNQEQERQLKKLISLRDWMLAVLAFPVGVFVVAVFWIIYAYDREMIYPKLLDNFIPGWLNHGMHTTVLPFILIEMRTSHHQYPSRSSGLTAICTFSVGYILWVCWVHHVTGMWVYPFLEHIGPGARIIFFGSTTILMNFLYLLGEVLNNYIWDTQKTAKLK

SEQ ID NO: 89822 - protein, 76 aa, Homo sapiens
MAGPRYPVSVQGAALVQIKRLQTFAFSVRWSDGSDTFVRRSWDEFRQLKKTLKETFPVEAGLLRRSDRVLPKLLDA

SEQ ID NO: 89823 - protein, 1604 aa, Homo sapiens
MENEIFTPLLEQFMTSPLVTWVKTFGPLAAGNGTNLDEYVALVDGVFLNQVMLQMEEKTEQLLDCKQELEQMEIELKRLQQENMNLLSDARSARMYRDELDALREKAVRVDKLESEVSRYKERLHDIEFYKARVEELKEDNQVLLETKTMLEDQLEGTRARSDKLHELEKENLQLKAKLHDMEMERDMDRKKIEELMEENMTLEMAQKQSMDESLHLGWELEQISRTSELSEAPQKSLGHEVNELTSSRLLKLEMENQSLTKTVEELRTTVDSVEGNASKILKMEKENQRLSKKVEILENEIVQEKQSLQNCQNLSKDLMKEKAQLEKTIETLRENSERQIKILEQENEHLNQTVSSLRQRSQISAEARVKDIEKENKILHESIKETSSKLSKIEFEKRQIKKELEHYKEKGERAEELENELHHLEKENELLQKKITNLKITCEKIEALEQENSELERENRKLKKTLDSFKNLTFQLESLEKENSQLDEENLELRRNVESLKCASMKMAQLQLENKELESEKEQLKKGLELLKASFKKTERLEVSYQGLDIENQRLQKTLENSNKKIQQLESELQDLEMENQTLQKNLEELKISSKRLEQLEKENKSLEQETSQLEKDKKQLEKENKRLRQQAEIKDTTLEENNVKIGNLEKENKTLSKEIGIYKESCVRLKELEKENKELVKRATIDIKTLVTLREDLVSEKLKTQQMNNDLEKLTHELEKIGLNKERLLHDEQSTDDSRYKLLESKLESTLKKSLEIKEEKIAALEARLEESTNYNQQLRQELKTVKKNYEALKQRQDEERMVQSSPPISGEDNKWERESQETTRELLKVKDRLIEVERNNATLQAEKQALKTQLKQLETQNNNLQAQILALQRQTVSLQEQNTTLQTQNAKLQVENSTLNSQSTSLMNQNAQLLIQQSSLENENESVIKEREDLKSLYDSLIKDHEKLELLHERQASEYESLISKHGTLKSAHKNLEVEHRDLEDRYNQLLKQKGQLEDLEKMLKVEQEKMLLENKNHETVAAEYKKLCGENDRLNHTYSQLLKETEVLQTDHKNLKSLLNNSKLEQTRLEAEFSKLKEQYQQLDITSTKLNNQCELLSQLKGNLEEENRHLLDQIQTLMLQNRTLLEQNMESKDLFHVEQRQYIDKLNELRRQKEKLEEKIMDQYKFYDPSPPRRRGNWITLKMRKLIKSKKDINRERQKSLTLTPTRSDSSEGFLQLPHQDSQDSSSVGSNSLEDGQTLGTKKSSTMNDLVQSMVLAGQWTGSTENLEVPDDISTGKRRKELGAMAFSTTAINFSTVNSSAGFRSKQLVNNKDTTSFEDISPQGVSDDSSTGSRVHAGAVNNQSRPQSHSSGEFSLLHDHEAWSSSGSSPIQYLKRQTRSSPVLQHKISETLESRHHKIKTGSPGSEVVTLQQFLEESNKLTSVQIKSSSQENLLDEVMKSLSVSSDFLGKDKPVSCGLARSVSGKTPGDFYDRRTTKPEFLRPGPRKTEDTYFISSAGKPTPGTQGKIKLVKESSLSRQSKDSNPYATLPRASSVISTAEGTTRRTSIHDFLTKDSRLPISVDSPPAAADSNTTAASNVDKVQESRNSKSRSREQQSS

SEQ ID NO: 89824 - protein, 256 aa, Homo sapiens [sequence omitted]

SEQ ID NO: 89825 - protein, 473 aa, Homo sapiens
MAPAGVSLRATILCLLAWAGLAAGDRVYIHPFHLVIHNESTCEQLAKANAGKPKDPTFIPAPIQAKTSPVDEKALQDQLVLVAAKLDTEDKLRAAMVGMLANFLGFRIYGMHSELWGVVHGATVLSPTAVFGTLASLYLGALDHTADRLQAILGVPWKDKNCTSRLDAHKVLSALQAVQGLLVAQGRADSQAQLLLSTVVGVFTAPGLHLKQPFVQGLALYTPVVLPRSLDFTELDVAAEKIDRFMQAVTGWKTGCSLMGASVDSTLAFNTYVHFQGKMKGFSLLAEPQEFWVDNSTSVSVPMLSGMGTFQHWSDIQDNFSVTQVPFTESACLLLIQPHYASDLDKVEGLTFQQNSLNWMKKLSPRTIHLTMPQLVLQGSYDLQDLLAQAELPAILHTELNLQKLSNDRIRVLNSIFFELEADEREPTESTQQLNKPEVLEVTLNRPFLFAVYDQSATALHFLGRVANPLSTA

SEQ ID NO: 89826 - protein, 44 aa, Homo sapiens
  MOD_RES (1)..(1): Any amino acid
XSLRRARTVELPEELRGGPGPRTPLARRSHPGRDEVSLCSPGWS

SEQ ID NO: 89827 - protein, 86 aa, Homo sapiens
MDAFTGSGLKRKFDDVDVGSSVSNSDDEISSSDSADSCDSLNPPTTASFTPTSILKRQKQLRRKNVRFDQVTVYYFARRQGFTSVP

SEQ ID NO: 89828 - protein, 257 aa, Homo sapiens
MAAVDIRDNLLGISWVDSSWIPILNSGSVLDYFSERSNPFYDRTCNNEVVKMQRLTLEHLNQMVGIEYILLHAQEPILFIIRKQQRQSPAQVIPLADYYIIAGVIYQAPDLGSVINSRVLTAVHGIQSAFDEAMSYCRYHPSKGYWWHFKDHEEQDKVRPKAKRKEEPSSIFQRQRVDALLLDLRQKFPPKFVQLKPGEKPVPVDQTKKEAEPIPETVKPEEKETTKNVQQTVSAKGPPEKRMRLHYIILSIKINSC

SEQ ID NO: 89829 - protein, 30 aa, Homo sapiens
  MOD_RES (1)..(1): Any amino acid
XLLRAASRCERKREEANSRQMNKLRSREVK

SEQ ID NO: 89830 - protein, 231 aa, Homo sapiens
  MOD_RES (1)..(1): Any amino acid
XDKELYGPDNHLVEWHRMPTTQETDGFQVKRPGDLNVKCTLLLMLDHQPPQYKLDPRLARLLGVHTQTRAAIMQALWLYIKHNQLQDGHEREYINCNRYFRQIFSCGRLRFSEIPMKLAGLLQHPDPIVINHVISVDPNDQKKTACYDIDVEVDDPLKAQMSNFLASTTNQQEIASLDVKIITDVIGNPEEERRAAFYHQPWAQEAVGRHIFAKVQQRRQELEQVLGIRLT

SEQ ID NO: 89831 - protein, 73 aa, Homo sapiens
MSPERSQEESPEGDTERTERKPMVSEPLDQLSCVTEGRPSNSRWMTQKIPMKNGHLGSKTEFRSCHPGWSAMA

SEQ ID NO: 89832 - protein, 134 aa, Homo sapiens
  MOD_RES (1)..(1): Any amino acid
XKVLEAPSGALSLLDLFSTLCNDLVNSAQGFVSSTWTYYLQTDNGKVVVFQTQPIVESLGFQGGRLQRVEVTWRGSHPEALEVHVDPVGPLDKVRKAKIRVKTSSKAKALGSASLDPGLLPLPLRAGDAVAELL

SEQ ID NO: 89833 - protein, 108 aa, Homo sapiens
MASQKRPSQRHGSKYLATASTMDHARHGFLPRHRDTGILDSIGRFFGGDRGAPKRGSGKDSHHPARTAHYGSLPQKHTAAETERTWAAERTVDIQASFVFFSCPSLTS

SEQ ID NO: 89834 - protein, 305 aa, Homo sapiens
MSDKSELKAELERKKQRLAQIREEKKRKEEERKKKETDQKKEAVAPVQEESDLEKKRREAEALLQSMGLTPESPIVPPPMSPSSKSVSTPSEAGSQDSGDGAVGSRRGPIKLGMAKITQVDFPPREIVTYTKETQTPVMAQPKEDEEEDDDVVAPKPPIEPEEEKTLKKDEENDSKAPPHELTEEEKQQILHSEEFLSFFDHSTRIVERALSEQINIFFDYSGRDLEDKEGEIQAGAKLSLNRQFFDERWSKHRVVSCLDWSSQYPELLVASYNNNEDAPHEPDGVALVWNMKYKKTTPEYVFHC

SEQ ID NO: 89835 - protein, 189 aa, Homo sapiens
  MOD_RES (1)..(1): Any amino acid
XSSPAPGTPAFWVSGWLGPQQYLSYNSLRGEAEPCGAWVWENQVSWYWEKETTDLRIKEKLFLEAFKALGGKGPYTLQGLLGCELGPDNTSVPTAKFALNGEEFMNFDLKQGTWGGDWPEALAISQRWQQQDKAANKELTFLLFSCPHRLREHLERGRGNLEWKAPSPSTLRSCNFGSCGMGWPLAPAR

SEQ ID NO: 89836 - protein, 161 aa, Homo sapiens
MALVLILQLLTLWPLCHTDITPSAGRILSGGGDSSPRGKLPLLLPKARLGAGCLVPAQRCPGAAGDRGAAAAVAGGAARAGGGSWRQREPALRGPPAEHELRAVPRGRGGPAAVPPLRAALGRLHAAGRPRPRHLQLLLSHALRALRAVAAQRGAGHQLGR

SEQ ID NO: 89837 - protein, 115 aa, Homo sapiens
MASHVECRPLGVFECELCTLTAPYSYVGQKPPNTQSMVLLEESYVMKDPFTSDKDRFLVLGSCCSLCSRLVCVGPVDVLGGISRRRDCPFMSTCCVPGPVLGTCFTAEASFSPAP

SEQ ID NO: 89838 - protein, 8 aa, Homo sapiens
MAAQCVTK

SEQ ID NO: 89839 - protein, 900 aa, Homo sapiens
  MOD_RES (1)..(1): Any amino acid
XGVFRCTFSVASWPCSTDAETIVQAEALASTVTLTAIAESPVIEVETEKKDVLDFGDLTYGGWKALPLKLINRTHATVPIRLIINANAVAWRCFTFSKESVRAPVEVAPCADVVTRLAGPSVVNHMMPASYDGQDPEFLMIWVLFHSPKKQISSSDILDSAEEFSAKVDIEVDSPNPTPVLRSVSLRARAGIARIHAPRDLQTMHFLAKVASSRKQHLPLKNAGNIEVYLDIKVPEQGSHFSVDPKNLLLKPGEEHEVIVSFTPKDPEACEERILKIFVQPFGPQYEVVLKGEVISSGSKPLSPGPCLDIPSILSNKQFLAWGGVPLGRTQLQKLALRNNSASTTQHLRLLIRGQDQDCFQLQNTFGSEQRLTSNCEIRIHPKEDIFISVLFAPTRLSCMLARLEIKQLGNRSQPGIKFTIPLSGYGGTSNLILEGVKKLSDSYMVTVNGLVPGKESKIVFSVRNTGSRAAFVKAVGFKDSQKKVLLDPKVLRIFPDKFVLKERTQENVTLIYNPSDRGINNKTATELSTVYLFGGDEISRQQYRRALLHKPEMIKQILPEHSVLQNINFVEAFQDELLVTEVYDLPQRPNDVQLFYGSMCKIILSVIGEFRDCISSREFLQPSSKASLESTSDLGASGKHGGNVSLDVLPVKGPQGSPLLSRAARPPLDQLASEEPWTVLPEHLILVAPSPCDMAKTGRFQIVNNSVRLLRFELCWPAHCLTVTPQHGCVAPESKLQILVSPNSSLSTKQSMFPWSGLIYIHCDDGQKKIVKVQIREDLTQVELLTRLTSKPFGILSPVSEPSVSHLVKPMTKPPSTKVEIRNKSITFPTTEPGETSESCLELENHGTTDVKWHLSSLAPPYVKGVDESGDVFRATYAAFRCSPISGLLESHGIQKQAA

SEQ ID NO: 89840 - protein, 206 aa, Homo sapiens
MQIFVKTLTGKTITLEVEPSDTIENVKAKIQDKEGIPPDQQRLIFAGKQLEDGRTLSDYNIQKESTLHLVLRLRGGMQIFVKTLTGKTITLEVEPSDTIENVKAKIQDKEGIPPDQQRLIFAGKQLEDGRTLSDYNIQKESTLHLVLRLRGGMQIFVKTLTGKTITLEVEPSDTIENVKAKIQDKEGIPPDQQRLIFAGKQLEDGR

SEQ ID NO: 89841 - protein, 107 aa, Homo sapiens
  MOD_RES (1)..(1): Any amino acid
XQQSEEKLQPHKKLNVPQPPVAKLWTSQEQPQPSQQQPSVQPPSQPPPQPSTLPQAQVWPGPQPPQPQPPPQPTQPSAQARCTQHTSKCNLQDSQRPGHQPTSAGIY

SEQ ID NO: 89842 - protein, 196 aa, Homo sapiens
MEERGDSEPTPGCSGLGPGGVRGFGDGGGAPSWAPEDAWMGTHPKYLEMMELDIGDATQVYVAFLVYLDLMESKSWHEVNCVGLPELQLICLVGTEIEGEGLQTVVPTPITASLSHNRRNNPYIFIKDINKKQLSPSCESDPNPLTSSLIQLYTEESPYEDTARRWLSSSQEERPHQRWNVPALRSGFLVSRTVRK

SEQ ID NO: 89843 - protein, 34 aa, Homo sapiens
MSYREVKYFSFPGELLMRMLQMLVLPLIISSLVT

SEQ ID NO: 89844 - protein, 185 aa, Homo sapiens
MSSEDREAQEDELLALASIYDGDEFRKAESVQGGETRIYLDLPQNFKIFVSGNSNECLQNSGFEYTICFLPPLVLNFELPPDYPSSSPPSFTLSGKWLSPTQLSALCKHLDNLWEEHRGSVVLFAWMQFLKEETLAYLNIVSPFELKIGSQKKVQRRTAQASPNTELDFGGAAGSDVDQEEIVDE

SEQ ID NO: 89845 - protein, 106 aa, Homo sapiens
MTIMVEDIMKLLCSLSGERKMKAAVKHSGKGALVTGAMAFVGGLVGGPPGLAVGGAVGGLLGAWMTSGQFKPVPQILMELPPAEQQRLFNEAAAIIRHLEWTDAVQ

SEQ ID NO: 89846 - protein, 1342 aa, Homo sapiens
MKPAAREARLPPRSPGLRWALPLLLLLLRLGQILCAGGTPSPIPDPSVATVATGENGITQISSTAESFHKQNGTGTPQVETNTSEDGESSGANDSLRTPEQGSNGTDGASQKTPSSTGPSPVFDIKAVSISPTNVILTWKSNDTAASEYKYVVKHKMENEKTITVVHQPWCNITGLRPATSYVFSITPGIGNETWGDPRVIKVITEPIPVSDLRVALTGVRKAALSWSNGNGTASCRVLLESIGSHEELTQDSRLQVNISGLKPGVQYNINPYLLQSNKTKGDPLGTEGGLDASNTERSRAGSPTAPVHDESLVGPVDPSSGQQSRDTEVLLVGLEPGTRYNATVYSQAANGTEGQPQAIEFRTNAIQVFDVTAVNISATSLTLIWKVSDNESSSNYTYKIHVAGETDSSNLNVSEPRAVIPGLRSSTFYNITVCPVLGDIEGTPGFLQVHTPPVPVSDFRVTVVSTTEIGLAWSSHDAESFQMHITQEGAGNSRVEITTNQSIIIGGLFPGTKYCFEIVPKGPNGTEGASRTVCNRTVPSAVFDIHVVYVTTTEMWLDWKSPDGASEYVYHLVIESKHGSNHTSTYDKAITLQGLIPGTLYNITISPEVDHVWGDPNSTAQYTRPSNVSNIDVSTNTTAATLSWQNFDDASPTYSYCLLIEKAGNSSNATQVVTDIGITDATVTELIPGSSYTVEIFAQVGDGIKSLEPGRKSFCTDPASMASFDCEVVPKEPALVLKWTCPPGANAGFELEVSSGAWNNATHLESCSSENGTEYRTEVTYLNFSTSYNISITTVSCGKMAAPTRNTCTTGITDPPPPDGSPNITSVSHNSVKVKFSGFEASHGPIKAYAVILTTGEAGHPSADVLKYTYEDFKKGASDTYVTYLIRTEEKGRSQSLSEVLKYEIDVGNESTTLGYYNGKLEPLGSYRCLLRACVAGFTNITFHPQNKGLIDGAESYVSFSRYSDAVSLPQDPGVICGAVFGCIFGALVIVTVGGFIFWRKKRKDAKNNEVSFSQIKSLKRSKLIRVENFEAYFKKQQADSNCGFAEEYEDLKLVGISQPKYAAELAENRGKNRYNNVLPYDISRVKLSVQTHSTDDYINANYMPGYHSKKDFIATQGPLPNTLKDFWRMVWEKNVYAIIMLTKCVEQGRTKCEEYWPSKQAQDYGDITVAMTSEIVLPEWTIRDFTVKNIQTSESHPLRQFHFTSWPDHGVPDTTDLLINFRYLVRDYMKQSPPESPILVHCSAGVGRTGTFIAIDRLIYQIENENTVDVYGIVYDLRMHRPLMVQTEDQYVFLNQCVLDIVRSQKDSKVDLIYQNTTAMTIYENLAPVTTFGKTNGYIA

SEQ ID NO: 89847 - protein, 212 aa, Homo sapiens
MAPWGKRLAGVRGVLLDISGVLYDSGAGGGTAIAGSVEAVARLKRSRLKVRFCTNESQKSRAELVGQLQRLGFDISEQEVTAPAPAACQILKEQGLRPYLLIHDGVRSEFDQIDTSNPNCVVIADAGESFSYQNMNNAFQVLMELEKPVLISLGKGRYYKETSGLMLDVGPYMKALEYACGIKAEVVGKPSPEFFKSALQAIGVEAHQLLSV

SEQ ID NO: 89848 - protein, 224 aa, Homo sapiens
MKFKNPPVNSLSLEFLTELVISLEKLENDKSFRGVILTSDRPGVFSAGLDLTEMCGRSPAHYAGYWKAVQELWLRLYQSNLVLVSAINGACPAGGCLVALTCDYRILADNPRYCIGLNETQLGIIAPFWLKDTLENTIGHRAAERALQLGLLFPPAEALQVGIVDQVVPEEQVQSTALSAIAQWMAIPDHARQLTKAMMRKATASRLVTQRDADVQNFVSFISK

SEQ ID NO: 89849 - protein, 51 aa, Homo sapiens
MEYEEITLERGNSGLGFSIAGGTDNPHIGDDPSIFITKIIPGGAAAQDGRL

SEQ ID NO: 89850 - protein, 459 aa, Homo sapiens
MFDENGEQYLDCINNVAHVGHCHPGVVKAALKQMELLNTNSRFLHDNIVEYAKRLSATLPEKLSVCYFTNSGSEANDLALRLARQFRGHQDVITLDHAYHGHLSSLIEISPYKFQKGKDVKKEFVHVAPTPDTYRGKYREDHADSASAYADEVKKIIEDAHNSGRKIAAFIAESMQSCGGQIIPPAGYFQKVAEYVHGAGGVFIADEVQVGFGRVGKHFWSFQMYGEDFVPDIVTMGKPMGNGHPVACVVTTKEIAEAFSSSGMEYFNTYGGNPVSCAVGLAVLDIIENEDLQGNAKRVGNYLTELLKKQKAKHTLIGDIRGIGLFIGIDLVKDHLKRTPATAEAQHIIYKMKEKRVLLSADGPHRNVLKIKPPMCFTEEDAKFMVDQLDRILTVLEEAMGTKTESVTSENTPCKTKMLKEAHIELLRDSTTDSKENPSRKRNGMCTDTHSLLSKRLKT

SEQ ID NO: 89851 - protein, 34 aa, Homo sapiens
MKPHLKQWRQRMLFGIFAWGLLFLLIFIYFTDSN

SEQ ID NO: 89852 - protein, 79 aa, Homo sapiens
MECPHLSSSVCIAPDSAKFPNGSPSSWCCSGAINSRTPMNSCATFWTTYTWNFRAVSTVFPAQQFCRRILLCLQVTSVA

SEQ ID NO: 89853 - protein, 48 aa, Homo sapiens
MESGAVLLESKSSPFNLLHEMHELRLLGHLCDVTVSVEYQGVRKDFMA

SEQ ID NO: 89854 - protein, 85 aa, Homo sapiens
MATYSLANERLRALEDIEREIGAILQNAGTVILELSKEKTNERLLDRQAAAFTASVQHVEAELSAQIRYLTQLPDGLTNSNSGKK

SEQ ID NO: 89855 - protein, 136 aa, Homo sapiens
MAILSLRAPGPWQAMQAHLNPFNKQSGPRQHEQGPGEEVPDVTPEEALPELPPGEPEFRCPERVMDLGLSEDHFSRPVGLFLASDVQQLRQAIEECKQVILELPEQSEKQKDAVVRLIHLRLKLQELKDPNEDEPN

SEQ ID NO: 89856 - protein, 479 aa, Homo sapiens
MSSSSYAKNGTADGPHSPTSQVARGTTTRRSRLKRSDGSTTSTSFILRQGSADSYTSRPSDSDVSLEEDREAIRQEREQQAAIQLERAKKYNNDWWIGRLVKEGCEIGFIPSPLRLENIRIQQEQKRGRFHGGKSSGNSSSSLGEMVSGTFRATPTSTAKQKQKVTEHIPPYDVVPSMRPVVLVGPSLKGYEVTDMMQKALFDFLKHRFDGRISITRVTADISLAKRSVLNNPSKRAIIERSNTRSSLAEVQSEIERIFELARSLQLVVLDADTINHPAQLIKTSLAPIIVHVKVSSPKVLQRLIKSRGKSQSKHLNVQLVAADKLAQCPPEMFDVILDENQLEDACEHLGEYLEAYWRATHTTSSTPMTPLLGRNLGSTALSPYPTAISGLQSQRMRHSNHSTENSPIERRSLMTSDENYHNERARKSRNRLSSSSQHSRDHYPLVEEDYPDSYQDTYKPHRNRGSPGGYSHDSRHRL

SEQ ID NO: 89857 - protein, 223 aa, Homo sapiens
MFAQQMQLMLQNAQMSSLGSFPMTPSIPANPPMAFNPYIPHPGMGLVPAELVPNTPVLIPGNPPLAMPGAVGPKLMRSDKLEVCREFQRGNCTRGENDCRYAHPTDASMIEASDNTVTICMDYIKGRCSREKCKYFHPPAHLQARLKAAHHQMNHSAASAMALQPGTLQLIPKRSALEKPNGATPVFNPTVFHCQQALTNLQLPQPAFIPAGPILCMAPASNI

SEQ ID NO: 89858 - protein, 369 aa, Homo sapiens
MSAEEMVQIRLEDRCYPVSKRKLIEQSDYFRALYRSGMREALSQEAGGPEVQQLRGLSAPGLRLVLDFINAGGAREGWLLGPRGEKGGGVDEDEEMDEVSLLSELVEAASFLQVTSLLQLLLSQVRLNNCLEMYRLAQVYGLPDLQEACLRFMVVHFHEVLCKPQFHLLGSPPQAPGDVSLKQRLREARMTGTPVLVALGDFLGGPLAPHPYQGEPPSMLRYEEMTERWFPLANNLPPDLVNVRGYGSAILDNYLFIVGGYRITSQEISAAHSYNPSTNEWLQVASMNQKRSNFKLVAVNSKLYAIGGQAVSNVECYNPEQDAWNFVAPLPNPLAEFSACECKGKIYVIGGYTTRDSLWRSCVATCHVS

SEQ ID NO: 89859 - protein, 101 aa, Homo sapiens
MATAAGATYFQRGSLFWFTVITLSFGYYTPQQRSETLSKKKERKKIEAKNGDPNDCSEFLRGLSSGLRVSLIRTLGPWAPSLSTWWTTITPSCAMGIGLPG

SEQ ID NO: 89860 - protein, 39 aa, Homo sapiens
MKNGLMFVKLVNPCSGEGAIYLFNMCLQQLFEVKVFKEK

SEQ ID NO: 89861 - protein, 605 aa, Homo sapiens
MASVAWAVLKVLLLLPTQTWSPVGAGNPPDCDSPLASALPRSSFSSSSELSSSHGPGFSRLNRRDGAGGWTPLVSNKYQWLQIDLGERMEVTAVATQGGYGSSDWVTSYLLMFSDGGRNWKQYRREESIWGFPGNTNADSVVHYRLQPPFEARFLRFLPLAWNPRGRIGMRIEVYGCAYKSEVVYFDGQSALLYTLDKKPLKPIRDVISLKFKAMQSNGILLHREGQHGNHITLELIKGKLVFFLNSGNAKLPSTIAPVTLTLGSLLDDQHWHSVLIELLDTQVNFTVDKHTHHFQAKGDSSNLDLNFEISFGGILSPGRSRAFTRKSFHGCLENLYYNGVDVTELAKKHKPQILMMGNVSFSCPQPQTVPVTFLSSRSYLALPGNSGEDKVSVTFQFRTWNRAGHLLFGELQRGSGSFVLFLKDGKLKLSLFQAGQSPRNVTAGAGLNDGQWHSVSFSAKWSHMNVVVDDDTAVQPLVAVLIDSGDTYYFGALYEQSCEAHKHRGNPSGLYYIDADGSGPLGPFLVYCNMTADSAWTVVRHGGPDAVTLRGAPSGHPLSAVSFAYAAGAGQLRAAVNLAERCEQRLALRCGTARRPDSRGLVTQ

SEQ ID NO: 89862 - protein, 89 aa, Homo sapiens
MATLKDQLIYNLLKEEQTPQNKITVVGVGAVGMACAISILMKDLADELALVDVIEDKLKGEMMDLQHGSLFLRTPKIVSGKDSAPRFRD

SEQ ID NO: 89863 - protein, 197 aa, Homo sapiens
MAITQFRLFKFCTCLATVFSFLKRLICRSGRGRKLSGDQITLPTTVDYSSVPKQTDVEEWTSWDEDAPTSVKIEGGNGNVATQQNSLEQLEPDYFKDMTPTIRKTQKIVIKKREPLNFGIPDGSTGFSSRLAATQDLPFIHQSSELGDLDTWQENTNAWEEEEDAAWQAEEVLRQQKLADREKRAAEQQRKKMEKEA

SEQ ID NO: 89864 - protein, 143 aa, Homo sapiens
MSGARTASTPTPPQTGGGLEPQANGETPQVAVIVRPDDRSQGAIIADRPGLPGPEHSPSESQPSSPSPTPSPSPVLEPGSEPNLAVLSIPGDTMTTIQMSVEESTPISRETGEPYRLSPEPTPLAEPILEVEVTLSKPVPESE

SEQ ID NO: 89865 - protein, 69 aa, Homo sapiens
METLQSETKTRVLPSWLTAQVATKNVAPMKAPKRMRMAAVPVAAARCDSSGQKTPANLANSLRQGLCTA

SEQ ID NO: 89866 - protein, 13 aa, Homo sapiens
MAGTLDLDKGCTV

SEQ ID NO: 89867 - protein, 207 aa, Homo sapiens
MTGAKRKKKSMLWSKMHTPQCEDIIQWCRRRLPILDWAPHYNLKENLLPDTVSGIMLAVQQVTQGLAFAVLSSVHPVFGLYGSLFPAIIYAIFGMGHHVATGTFALTSLISANAVERIVPQNMQNLTTQSNTSVLGLSDFEMQRIHVAAAVSFLGGVIQVAMFVLQLGSATFVVTEPVISAMTTGAATHVVTSQVKYLLGMKMPYIS

SEQ ID NO: 89868 - protein, 245 aa, Homo sapiens
MEVRASLQKVSGSSDSVATMNSEEFVLVPQYADDNSTKHEEKPQLKIVSNGDEQLEKAMEEILRDSEKRPSSLLVDCQSSSEISDHSFGDIPASQTNKPSLQLILDPSNTEISTPRPSSPGGLPEEDSVLFNKLTYLGCMKVSSPRNEVEALRAMATMKSSSQYPFPVTLYVPNVPEGSVRIIDQSSNVEIASFPIYKVLFCARGHDGTTESNCFAFTESSHGSEEFQIHVFSCEIKEARWGSRW

SEQ ID NO: 89869 - protein, 121 aa, Homo sapiens
MSLSHLYRDGEGRIDDDDDERENFEITDWDLQNEFNPNRQRHWQTKEEATYGVWAERDSDDERPSFGGKRARDYSAPVNFISAGLKKGAAEEAELEDSDDEEKPVKQDDFPKDFGPRKLKT

SEQ ID NO: 89870 - protein, 199 aa, Homo sapiens
  MOD_RES (1)..(1): Any amino acid
XLFEVMFSEECIMDVIGCLEYDPALSQPRKHREFLTKTAKFKEVIPISDPELKQKIHQTYRVQYIQDMVLPTPSVFEENMLSTLHSFIFFNKVEIVGMLQEDEKFLTDLFAQLTDEATDEEKRQELPQNRDAFFKTLSNMGILPALEVILGMDDTQVRSAATDIFSYLVEYNPSMVREFVMQEAQQNDDVSKKLTEQKI

SEQ ID NO: 89871 - protein, 75 aa, Homo sapiens
MAKQPSDVSSECDREGRQLQPAERPPQLRPGAPTSLQTEPQVSLCHPGWSALVRSWLTATSNSQVQAVLLPQPPK

SEQ ID NO: 89872 - protein, 768 aa, Homo sapiens
MLSSVCVSSFRGRQGASKQQPAPPPQPPESPPPPPLPPQQQQPAQPGPAASPAGPPAPRGPGDRRAEPCPGLPAAAMGRHGGGGGDSGKIVINVGGVRHETYRSTLRTLPGTRLAGLTEPEAAARFDYDPGADEFFFDRHPGVFAYVLNYYRTGKLHCPADVCGPLFEEELGFWGIDETDVEACCWMTYRQHRDAEEALDSFEAPDPAGAANAANAAGAHDGGLDDEAGAGGGGLDGAGGELKRLCFQDAGGGAGGPPGGAGGAGGTWWRRWQPRVWALFEDPYSSRAARYVAFASLFFILISITTFCLETHEGFIHISNKTVTQASPIPGAPPENITNVEVETEPFLTYVEGVCVVWFTFEFLMRITFCPDKVEFLKSSLNIIDCVAILPFYLEVGLSGLSSKAAKDVLGFLRVVRFVRILRIFKLTRHFVGLRVLGHTLRASTNEFLLLIIFLALGVLIFATMIYYAERIGADPDDILGSNHTYFKNIPIGFWWAVVTMTTLGYGDMYPKTWSGMLVGALCALAGVLTIAMPVPVIVNNFGMYYSLAMAKQKLPKKKNKHIPRPPQPGSPNYCKPDPPPPPPPHPHHGSGGISPPPPITPPSMGVTVAGAYPAGPHTHPGLLRGGAGGLGIMGLPPLPAPGEPCPLAQEEVIEINRADPRPNGDPAAAALAHEDCPAIDQPAMSPEDKSPITPGSRGRYSRDRACFLLTDYAPSPDGSIRKGYEKSRSLSSIAGLSGVSLRLAPLATPPGSPRAARRAPPTLPSIL

SEQ ID NO: 89873 - protein, 101 aa, Homo sapiens
MRLPLSHSPEHVEMALLSNILAAYSFVSENPERAALYFVSGVCIGLVLTLAALVIRISCHTDCRRRPGKKFLQDRESSSDSSDSEDGSEDTVSDLSVRRHR

SEQ ID NO: 89874 - protein, 145 aa, Homo sapiens
  MOD_RES (1)..(1): Any amino acid
XKDRLGCKEDYACPQCESSFTSEDILAEHLQTLHQKPTEEKEFKCKNCGKKFPVKQALQRHVLQCTAKSSLKESSRSFQCSVCNSSFSSASSFEQHQETCRGDARFVCKADSCGKRLKSKDALKRHQENVHTVLVHGKVKGLFYI

SEQ ID NO: 89875 - protein, 108 aa, Homo sapiens
MIRRPPAVVCYICGREYGTKSISIHEPQCLKKWHNENNLLPKELRRPVPKKPEVRTITAKGFYDLDALNEAAWTSAHSQLVPCNVCGRTFLPDRLIVHQRSCKPKAAK

SEQ ID NO: 89876 - protein, 162 aa, Homo sapiens
MVQARTGFCKKQQELWQRRKEAAEALGTRKVSVLLATSHSGARPAVSTMDSSAAPTNASNCTDALAYSSCSPAPSPGSWVNLSHLDGNLSDPCGPNRTDLGGRDSLCPPTGSPSMITAITIMALYSIVCVVGLFGNFLVMYVIVRYTKMKTATNIYIFNLAL

SEQ ID NO: 89877 - protein, 139 aa, Homo sapiens
MDLSGVKKKSLLGVKENNKKSSTRAPSPTKRKDRSDEKSKDRSKDKGATKESSEKDRGRDKTRKRRSASSGSSSTRSRSSSTSSSGSSTSTGSSSGSSSSSASSRSGSSSTSRSSSSSSSSGSPSPSRRRHDNRRRSRS

SEQ ID NO: 89878 - protein, 74 aa, Homo sapiens
PRPESKPESQIPPQRPQRDQRVREQRINIPPQRGPRPSYGNVVELRINSGGKLPNFGFVVFDDSEPVQKVLSNR

SEQ ID NO: 89879 - protein, 83 aa, Homo sapiens
MRFHKLQNVQIALDYLRHRQVKLVNIRNDDIADGNPKLTLGLIWTIILHFQISDIQVSGQSEDMTAKEKLLLWSQRMVEGYQG

SEQ ID NO: 89880 - protein, 120 aa, Homo sapiens
MVAPVLETSHVFCCPNRVRGVLNWSSGPRGLLAFGTSCSVVLYDPLKRVVVTNLNGHTARVNCIQWICKQDGSPSTELVSGGSDNQVIHWEIEDNQAMKDLFMRCMLFTRGGHQILHYVH

SEQ ID NO: 89881 - protein, 70 aa, Homo sapiens
MDQEGGGDGQKAPSFQWRNYKLIVDPALDPALRRPSQKVYRYDGVHFSVNDSKYIPVEDLQDPRCHVRSK

SEQ ID NO: 89882 - protein, 59 aa, Homo sapiens
  MOD_RES (1)..(1): Any amino acid
XRKKPNYELLEKEVEKRKVALQEAKLKAKGLNPDGTPALSTLGGFSPASKPCKMYLELK

SEQ ID NO: 89883 - protein, 120 aa, Homo sapiens
MEAALLGLCNWSTLGVCAALKLPQISAVLAARSARGLSLPSLLLELAGFLVFLRYQCYYGYPPLTYLEYPILIAQDVILLLCIFHFNGNVKQATPYIAVLVSSWFILALQKWIIDLAMQE

SEQ ID NO: 89884 - protein, 132 aa, Homo sapiens
MCSHIAEDLCPERDIKYFFQKVILRRYDKCEHENLQLRKGCKSVDECKVCKGGYNGLNQCLITTQSKMYQCDKYVKVFYKFSNSDRHKIRHTEKKTCKCKECGKSFCMLSQLTRHKRIHIRENSHKCEECGK

SEQ ID NO: 89885 - protein, 498 aa, Homo sapiens
MAPWLQLLSLLGLLPGAVAAPAQPRAASFQAWGPPSPELLAPTRFALEMFNRGRAAGTRAVLGLVRGRVRRAGQGSLYSLEATLEEPPCNDPMVCRLPVSKKTLLCSFQVLDELGRHVLLRKDCGPVDTKVPGAGEPKSAFTQGSAMISSLSQNHPDNRNETFSSVISLLNEDPLSQWVSLVSLKTGLPIQDLPVKMASIFKNFVITYNRTYESKEEARWRLSVFVNNMVRAQKIQALDRGTAQYGVTKFSDLTEEEFRTIYLNTLLRKEPGNKMKQAKSVGDLAPPEWDWRSKGAVTKVKDQGMCGSCWAFSVTGNVEGQWFLNQGTLLSLSEQELLDCDKMDKACMGGLPSNAYSAIKNLGGLETEDDYSYQGHMQSCNFSAEKAKVYINDSVELSQNEQKLAAWLAKRGPISVAINAFGMQFYRHGISRPLRPLCSPWLIDHAVLLVGYGNRSDVPFWAIKNSWGTDWGEKGYYYLHRGSGACGVNTMASSAVVD

SEQ ID NO: 89886 - protein, 630 aa, Homo sapiens
MGDILAHESELLGLVKEYLDFAEFEDTLKTFSKECKIKGKPLCKTVGGSFRDSKSLTIQKDLVAAFDNGDQKVFFDLWEEHISSSIRDGDSFAQKLEFYLHIHFAIYLLKYSVGRPDKEELDEKISYFKTYLETKGAALSQTTEFLPFYALPFVPNPMVHPSFKELFQDSWTPELKLKLIKFLALISKASNTPKLLTIYKENGQSNKEILQQLHQQLVEAERRSVTYLKRYNKIQADYHNLIGVTAELVDSLEATVSGKMITPEYLQSVCVRLFSNQMRQSLAHSVDFTRPGTASTMLRASLAPVKLKDVPLLPSLDYEKLKKDLILGSDRLKAFLLQALRWRLTTSHPGEQRETVLQAYISNDLLDCYSHNQRSVLQLLHSTSDVVRQYMARLINAFASLAEGRLYLAQNTKVLQMLEGRLKEEDKDIITRENVLGALQKFSLRRPLQTAMIQDGLIFWLVDVLKDPDCLSDYTLEYSVALLMNLCLRSTGKNMCAKVAGLVLKVLSDLLGHENHEIQPYVNGALYSILSVPSIREEARAMGMEDILRCFIKEGNAEMIRQIEFIIKQLNSEELPDGVLESDDDEDEDDEIMTNTGKTRRKGLANVQWSGDEPLQRPVTPGGHRNGYPV

SEQ ID NO: 89887 - protein, 74 aa, Homo sapiens
MAYQLYRNTTLGNSLQESLDELIQGSLNTYRFCDNVWTFVLNDVEFREVTELIKVDKVKIVACDGKNTGSNTTE

SEQ ID NO: 89888 - protein, 82 aa, Homo sapiens
MPNFSGNWKIIRSENFEELLKVLGVNVMLRKIAVAAASKPAVEIKQEGDTFYIKTSTTVRTTEINFKVGEEFEEQTVDGRPC

SEQ ID NO: 89889 - protein, 322 aa, Homo sapiens
MEVLRPQLIRIDGRNYRKNPVQEQTYQHEEDEEDFYQGSMECADEPCDAYEVEQTPQGFRSTLRAPSLLYKHIVGKRGDTRKKIEMETKTSISIPKPGQDGEIVITGQHRNGVISARTRIDVLLDTFRRKQPFTHFLAFFLNEVEVQEGFLRFQEEVLAKCSMDHGVDSSIFQNPKKLHLTIGMLVLLSEEEIQQTCEMLQQCKEEFINDISGGKPLEVEMAGIEYMNDDPGMVDVLYAKVHMKDGSNRLQELVDRVLERFQASGLIVKEWNSVKLHATVMNTLFRKDPNVKASLVPSASDQESHIQAICSSSFQDSWFKIH

SEQ ID NO: 89890 - protein, 11 aa, Homo sapiens
VFGGGTQLIIL

SEQ ID NO: 89891 - protein, 132 aa, Homo sapiens
MPRGSRARGSKRKRSWNTECPSFPGERPLQVRRAGLRTAGAAASLSEAWLRCGEGFQNTSGNPSLTAEEKTITEKHLELCPRPKQETTTSKSTSGLTDITWSSSGSDLSDEDKTLSQLQRAKFYRNFRVFIR

SEQ ID NO: 89892 - protein, 327 aa, Homo sapiens
MAQRKNAKSSGNSSSSGSGSGSTSAGSSSPGARRETKHGGHKNGRKGGLSGTSFFTWFMVIALLGVWTSVAVVWFDLVDYEEVLAKAKDFRYNLSEVLQGKLGIYDADGDGDFDVDDAKVLLGLKERSTSEPAVPPEEAEPHTEPEEQVPVEAEPQNIEDEAKEQIQSLLHEMVHAEHVEGEDLQQEDGPTGEPQQEDDEFLMATDVDDRFETLEPEVSHEETEHSYHVEETVSQDCNQDMEEMMSEQENPDSSEPVVEDERLHHDTDDVTYQVYEEQVYEPLENEGIEITEVTAPPEDNPVEDSQVIVEEVSIFPVEEQQEVPPDT

SEQ ID NO: 89893 - protein, 234 aa, Homo sapiens
  MOD_RES (1)..(1): Any amino acid
XTLAGPRLPGIREKSRSPGSSQLRLLELRHSTLLKKVQGAAHFGPVWLASFGTVRTVYVAAPALVEELLRQEGPRPERCSFSPWTEHRRCRQRACGLLTAEGEEWQRLRSLLAPLLLRPQAAARYAGTLNNVVCDLVRRLRRQRGRGTGPPALVRDVAGEFYKFGLEGIAAVLLGSRLGCLEAQVPPDTETFIRAVGSVFVSTLLTMAMPHWLRHLVPGPWGRLCRDWDQMFAF

SEQ ID NO: 89894 - protein, 110 aa, Homo sapiens
MFKSPLKVPALIQCLGMYDSSLAAKYLLHSLVFGSAVYSSGSERHLTYIQKIFRMEIFGCFALTELSHGSNTKAIRTTAHYDPATEEFIIHSPDFEAAKFWVGNMGKTAT

SEQ ID NO: 89895 - protein, 78 aa, Homo sapiens
MAFIAKSFYDLSAISLDGEKVDFNTFRGRAVLIENVASLCGTTTRDFTQLNELQCRFPRRLVVLGFPCNQFGHQNCSG

SEQ ID NO: 89896 - protein, 82 aa, Homo sapiens
MPGLLNWITGAALPLTASDVTSCVSGYALGLTASLTYGNLEAQPFQGLFVYPLDECTTVIGFEAVIADRVVTVQIKDKAKLE

SEQ ID NO: 89897 - protein, 82 aa, Homo sapiens
MPEGPELHLASQFVNEACRALVFGGCVEKSSVSRNPEVPFESSAYRISASARGKELRLILSPLPGAQPQQEPLALVFRFGMS

SEQ ID NO: 89898 - protein, 407 aa, Homo sapiens [sequence omitted]

SEQ ID NO: 89899 - protein, 246 aa, Homo sapiens
MASAGRSEGTAGGGAGPEEPRREEGRAGLSPSSPPGSHSMRYFDTAMSRPGRGEPRFISVGYVDDTQFVRFDSDAASPREEPRAPWIEQEGPEYWDRNTQIFKTNTQTDRESLRNLRGYYNQSEAGSHTLQSMYGCDVGPDGRLLRGHNQYAYDGKDYIALNEDLRSWTAADTAAQITQRKWEAARVAEQDRAYLEGTCVEWLRRYLENGKDTLERADPPKTHVTHHPISDHEATLRCWALGFYPA

SEQ ID NO: 89900 - protein, 51 aa, Homo sapiens
MELQTLQEALKVEIQVHQKLVAQMKQDPQNADLKKQLHELQAKITALSEKQ

SEQ ID NO: 89901 - protein, 138 aa, Homo sapiens
KAKFHQTEGDHLTLLAVYNSWKNNKFSNPWCYENFIQARSLRRAQDIRKQMLGIMDRHKLDVVSCGKSTVRVQKAICSGFFRNAAKKDPQEGYRTLIDQQVVYIHPSSALFNRQPEWDLYSRFSEWKSGTNCSSLSGT

SEQ ID NO: 89902 - protein, 186 aa, Homo sapiens
  MOD_RES (1)..(1): Any amino acid
XASSEIVCQLFQASQAVSKQQVFSVQKGLNDTMRYILIDWLVEVATMKDFTSLCLHLTVECVDRYLRRRLVPRYRLQLLGIACMVICTRFISKEILTIREAVWLTDNTYKYEDLVRMMGEIVSALEGKIRPWSRRPRLHHVAICAGALRVQHRREHHPGQTLRWACMRHCTKEPPSAESPHPVPAV

SEQ ID NO: 89903 - protein, 660 aa, Homo sapiens
MFCGRLNMHMNVQNGKWDSDPSGTKTCIDTKEGILQYCQEVYPELQITNVVEANQPVTIQNWCKRGRKQCKTHPHFVIPYRCLVGEFVSDALLVPDKCKFLHQERMDVCETHLHWHTVAKETCSEKSTNLHDYGMLLPCGIDKFRGVEFVCCPLAEESDNVDSADAEEDDSDVWWGGADTDYADGSEDKVVEVAEEEEVAEVEEEEADDDEDDEDGDEVEEEAEEPYEEATERTTSIATTTTTTTESVEEVVRVPTTAASTPDAVDKYLETPGDENEHAHFQKAKERLEAKHRERMSQVMREWEEAERQAKNLPKADKKAVIQHFQEKVESLEQEAANERQQLVETHMARVEAMLNDRRRLALENYITALQAVPPRPRHVFNMLKKYVRAEQKDRQHTLKHFEHVRMVDPKKAAQIRSQVMTHLRVIYERMNQSLSLLYNVPAVAEEIQDEVDELLQKEQNYSDDVLANMISEPRISYGNDALMPSLTETKTTVELLPVNGEFSLDDLQPWHSFGADSVPANTENEVEPVDARPAADRGLTTRPGSGLTNIKTEEISEVKMDAEFRHDSGYEVHHQKLVFFAEDVGSNKGAIIGLMVGGVVIATVIVITLVMLKKKQYTSIHHGVVEVDAAVTPEERHLSKMQQNGYENPTYKFFEQMQN

SEQ ID NO: 89904 - protein, 68 aa, Homo sapiens
MEDEQLKVWDVIGRSLIIDEGEDDLGRGGHPLSKITGNSGERLACGIIARSAGLFQNPKQICSCDGLT

SEQ ID NO: 89905 - protein, 125 aa, Homo sapiens
MEKYVAAMVLSAAGDALGYYNGKWEFLQDGEKIHRQLAQLGGLDALDVGRWRVSDDTVMHLATAEALVEAGKAPKLTQLYYLLAKHYQDCMEDMDGRAPGGASVHNAMQLKPGKPNGWRIPFNSH

SEQ ID NO: 89906 - protein, 96 aa, Homo sapiens
MSAQSVEEDSILIIPTPDEEEKILRVKLEEDPDGEEGSSIPWNHLPDPEIFRQRFRQFGYQDSPGPREAVSQLRELCRLWLRPETHTKEQILELVV

SEQ ID NO: 89907 - protein, 130 aa, Homo sapiens
  MOD_RES (1)..(1): Any amino acid
XNRGTVIVERWWKVPLAGEGRKPRLHRRHRVYKLVEDTKHRPKENLELILTQSVENVGVRGDLVSVKKSLGRNRLLPQGLAVYASPENKKLFEEEKLLRQEGKLEKIQTKAGEATQEWEKGEVLWLPHKT

SEQ ID NO: 89908 - protein, 168 aa, Homo sapiens
MLQHPKVKGPSIALLGFSKGGDLCLSMASFLKGITATVLINACVANTVAPLHYKDMIIPKLVDDLGKVKITKSGFLTFMDTWSNPLEEHNHQSLVPLEKAQVPFLFIVGMDDQSWKSEFYAQIASERLQAHGKERPQIICYPETGHCIDPPYFPPSRASVHAVLGEAI

SEQ ID NO: 89909 - protein, 481 aa, Homo sapiens
SPLHSPLDSSRSTRHHGLVERVQRDPRRMVSPLRRYTRHIDSSPYSPAYLSPPPESSWRRTMAWGNFPAEKGQLFRLPSALNRTSSDSALHTSVMNPSPQDTYPGPTPPSILPSRRGGILDGEMDPKVFLFQVPAIEENLLDDKHLLKPWDAKKLSSSSSRPRSCEVPGINIFPSPDQPANVPVLPPAMNTGGSLPDLTNLHFPPPLPTPLDPEETAYPSLSGGNSTSNLTHTMTHLGISRGMGLGPGYDAPGLHSPLSHPSLQSSLSNPNLQASLSSPQPQLQGSHSHPSLPASSLARHVLPTTSLGHPSLSAPALSSSSSSSSTSSPVLGAPSYPASTPGASPHHRRVPLSPLSLLAGPADARRSQQQLPKQFSPTMSPTLSSITQGVPLDTSKLSTDQRLPPYPYSSPSLVLPTQPHTPKSLQQPGLPSQSCSVQSSGGQPPGRQSHYGTPYPPGPSGHGQQSYHRPMSDFNLGNLAL

SEQ ID NO: 89910 - protein, 64 aa, Homo sapiens
KRNSLKELWLVIHGRVYDVTRFLNEDPSKNDTCKSCWAYWILPIIGAVLLGFLYRYYTSESKSS

SEQ ID NO: 89911 - protein, 146 aa, Homo sapiens
  MOD_RES (1)..(1): Any amino acid
XYAPVGILFLIAGKIVEMEDMGVIGGQLAMYTVTVIVGLLIHAVIVLPLLYFLVTRKNPWVFIGGLLQALITALGTSSRDRLRTTTNVLGDSLGAGIVEHLSRHELKNRDVEMGNSVIEENEMKKPYQLIAQDNETEKPIDSETKM

SEQ ID NO: 89912 - protein, 691 aa, Homo sapiens
MEPSTPDTPKESPIVQLVQEEEEEASPSTVTLLGSGEQEDESSPWFESETQIFCSELTTICCISSFSEYIYKWCSVRVALYRQRSRTALSKGKDYLVLAQPPLLLPAESVDVSVLQPLSGELENTNIEREAETVVLGDLSSSMHQDDLVNHTVDAVELEPSHSQTLSQSLLLDITPEINPLPKIEVSESVEYEAGHIPSPVIPQESSVEIDNETEQKSESFSSIEKPSITYETNKVNELMDNIIKEDVNSMQIFTKLSETIVPPINTATVPDNEDGEAKMNIADTAKQTLISVVDSSSLPEVKEEEQSPEDALLRGLQRTATDFYAELQNSTDLGYANGNLVHGSNQKESVFMRLNNRIKALEVNMSLSGRYLEELSQRYRKQMEEMQKAFNKTIVKLQNTSRIAEEQDQRQTEAIQLLQAQLTNMTQLVSNLSATVAELKREVSDRQSYLVISLVLCVVLGLMLCMQRCRNTSQFDGDYISKLPKSNQYPSPKRCFSSYDDMNLKRRTSFPLMRSKSLQLTGKEVDPNDLYIVEPLKFSPEKKKKRCKYKIEKIETIKPEEPLHPIANGDIKGRKPFTNQRDFSNMGEVYHSSYKGPPSEGSSETSSQSEESYFCGISACTSLCNGQSQKTKTEKRALKRRRSKVQDQGKLIKTLIQTKSGSLPSLHDIIKGNKEITVGTFGVTAVSGHI

SEQ ID NO: 89913 - protein, 148 aa, Homo sapiens
MAASALRGLPVAGGGESSESEDDGWEIGYLDRTSQKLKRLLPIEEKKEKFKKAMTIGDVSLVQELLDSGISVDSNFQYGWTPLMYAASVANAELVRVLLDRGANASFEKDKQSILITACSAHGSEEQILKCVELLLSRNADPNVACRL

SEQ ID NO: 89914 - protein, 43 aa, Homo sapiens
MSGPIDNAIDWNPDWRRLPRELKIRVRKLQKERITILLPKRPP

SEQ ID NO: 89915 - protein, 31 aa, Homo sapiens
MDVIARQNFTEPTAIQAQGWPVALSGLDMVG

SEQ ID NO: 89916 - protein, 44 aa, Homo sapiens
MIRNGRGAAGGAEQPGPGGRRAVRVWCDGCHRAEIWSHGLPASP

SEQ ID NO: 89917 - protein, 228 aa, Homo sapiens
MAKPCGVRLSGEARKQAEEFLYRFLPQKIIYLNQLLQEDSLNVADLTSLRAPLDIPIPDPPPKDDEMETDKQEKKEVHKCGFLPGNEKVLSLLALVKPEVWTLKEKCILVITWIQHLIPKIEDGNDFGVAIQEKVLERVNAVKTKVEAFQTTISKYFSERGDAVAKASKETHVMDYRALVHERDEAAYGELRAMVLDLRAFYAELYHIISSNLEKIVNPKGEEKPSMY

SEQ ID NO: 89918 - protein, 49 aa, Homo sapiens
MMLGTEGGEGFVVKVRGLPWSCSADEVQRFFSDCKIQNGAQGIRFIYTR

SEQ ID NO: 89919 - protein, 167 aa, Homo sapiens
MASCAEPSEPSAPLPAGVPPLEDFEVLDGVEDAEGEEEEEEEEEEEDDLSELPPLEDMGQPPAEEAEQPGALAREFLAAMEPEPAPAPAPEEWLDILGNGLLRKKTLVPGPPGSSRPVKGQVVTVHLQTSLENGTRVQEEPELVFTLGDCDVIQALDLSVPLMDVGE

SEQ ID NO: 89920 - protein, 639 aa, Homo sapiens
MGDYGFGVLVQSNTGNKSAFPVRFHPHLQPPHHHQNATPSPAAFINNNTAANGSSAGSAWLFPAPATHNIQDEILGSEKAKSQQQEQQDPLEKQQLSPSPGQEAGILPETEKAKSEENQGDNSSENGNGKEKIRIESPVLTGFDYQEATGLGTSTQPLTSSASSLTGFSNWSAAIAPSSSTIINEDASFFHQGGVPAASANNGALLFQNFPHHVSPGFGGSFSPQIGPLSQHHPHHPHFQHHHSQHQQQRRSPASPHPPPFTHRNAAFNQLPHLANNLNKPPSPWSSYQSPSPTPSSSWSPGGGGYGGWGGSQGRDHRRGLNGGITPLNSISPLKKNFASNHIQLQKYARPSSAFAPKSWMEDSLNRADNIFPFPDRPRTFDMHSLESSLIDIMRAENDTIKGQSSLFPMEDGFLDDGRGDQPLHSGLGSPHCFSHQNGERVERYSRKVFVGGLPPDIDEDEITASFRRFGPLIVDWPHKAESKSYFPPKGYAFLLFQDESSVQALIDACIEEDGKLYLCVSSPTIKDKPVQIRPWNLSDSDFVMDGSQPLDPRKTIFVGGVPRPLRAVELAMIMDRLYGGVCYAGIDTDPELKYPKGAGRVAFSNQQSYIAAISARFVQLQHGEIDKRVSLILHFGKF

SEQ ID NO: 89921 - protein, 18 aa, Homo sapiens
  MOD_RES (1)..(1): Any amino acid
XERGYSFSLTTFSFLQMN

SEQ ID NO: 89922 - protein, 141 aa, Homo sapiens
MKTGLFFLCLLGTAAAIPTNARLLSDHSKPTAETVAPDNTAIPSLRAEAEENEKETAVSTEDDSHHKAEKSSVLKSKEESHEQSAEQGKSSSQELGLKDQEDSDGHLSVNLEYAPTEGTLDIKEDMSEPQEKKLSENTDFL

SEQ ID NO: 89923 - protein, 175 aa, Homo sapiens
MLSRQSAHALDPKAIKARFPLEDATVPVTVASSRVQASPLPLGAQQLPTPPSQPRARKRRDHGDDSSDEEDKERVALVVHPGTARLGSPDEEFFHKVRTIRQTIVKLGNKVQELEKQQVTILATPLPEESMKQELQNLRDEIKQLGREIRLQLKAIEPQKEEADENYNSVNTRMR

SEQ ID NO: 89924 - protein, 25 aa, Homo sapiens
MFNGGMATTSTEIELPDVEPAAFLA

SEQ ID NO: 89925 - protein, 136 aa, Homo sapiens
MEELSQALASSFSVSQDLNSTAAPHPRLSQYKSKYSSLEQSERRRRLLELQKSKRLDYVNHARRLAEDDWTGMESEEENKKDDEEMDIDTVKKLPKHYANQLMLSEWLIDVPSDLGQEWIVVVCPVGKRALIVASR

SEQ ID NO: 89926 - protein, 476 aa, Homo sapiens
MSGCGLFLRTTAAARACRGLVVSTANRRLLRTSPPVRAFAKELFLGKIKKKEVFPFPEVSQDELNEINQFLGPVEKFFTEEVDSRKIDQEGKIPDETLEKLKSLGLFGLQVPEEYGGLGFSNTMYSRLGEIISMDGSITVTLAAHQAIGLKGIILAGTEEQKAKYLPKLASGEHIAAFCLTEPASGSDAASIRSRATLSEDKKHYILNGSKVWITNGGLANIFTVFAKTEVVDSDGSVKDKITAFIVERDFGGVTNGKPEDKLGIRGSNTCEVHFENTKIPVENILGEVGDGFKVAMNILNSGRFSMGSVVAGLLKRLIEMTAEYACTRKQFNKRLSEFGLIQEKFALMAQKAYVMESMTYLTAGMLDQPGFPDCSIEAAMVKVFSSEAAWQCVSEALQILGGLGYTRDYPYERILRDTRILLIFEGTNEILRMYIALTGLQHAGRILTTRIHERQQRGLQSQDHGLSAVSLNRPK

SEQ ID NO: 89927 - protein, 99 aa, Homo sapiens
GCAVVEFKMEESMKKAAERPQQLPHGLGGIGMGLGPGGQPIDANHLNKGIGMGNIGPAGMGMEGIGFGINKMGGMEGPFGGGMENMGRFGSGMNMGRIN

SEQ ID NO: 89928 - protein, 82 aa, Homo sapiens
MSWVQATLLARGLCRAWGGTCGAALTGTSISQVPLPKDSTGAADPPQPHIVGSGRDAGGVEPLLPDAAGPGVCEEWLGQLRV

SEQ ID NO: 89929 - protein, 141 aa, Homo sapiens
MQGAGKALHELLLSAQRQGCLTAGVYESAKVLNVDPDNVTFCVLAAGEEDEGDIALQIHFTLIQAFCCENDIDIVRVGDVQRLAAIVGAGEEAGAPGDLHCILISNPNEDAWKDPALEKLSLFCEESRSVNDWVPSITLPE

SEQ ID NO: 89930 - protein, 304 aa, Homo sapiens
MAHCVTLVQLSISCDHLIDKDIGSKSDPLCVLLQDVGGGSWAELGRTERVRNCSSPEFSKTLQLEYRFETVQKLRFGIYDIDNKTPELRDDDFLGGAECSLGQIVSSQVLTLPLMLKPGKPAGRGTITVSAQELKDNRVVTMEVEARNLDKKDFLGKSDPFLEFFRQGDGKWHLVYRSEVIKNNLNPTWKRFSVPVQHFCGGNPSTPIQVQCSDYDSDGSHDLIGTFHTSLAQLQAVPAEFECIHPEKQQKKKSYKNSGTIRVKICRVETEYSFLDYVMGGCQINFTVGVDFTGSNGDPSSPDS

SEQ ID NO: 89931 - protein, 69 aa, Homo sapiens
  MOD_RES (1)..(1): Any amino acid
XSRQRAAARELAPMIDKDKEALMEEILKLKSLLSTKREQIATLRAVLKANKQAQCLLMKSVNAYEAPSI

SEQ ID NO: 89932 - protein, 633 aa, Homo sapiens
MSFVAGVIRRLDETVVNRIAAGEVIQRPANAIKEMIENCLDAKSTSIQVIVKEGGLKLIQIQDNGTGIRKEDLDIVCERFTTSKLQSFEDLASISTYGFRGEALASISHVAHVTITTKTADGKCAYRASYSDGKLKAPPKPCAGNQGTQITVEDLFYNIATRRKALKNPSEEYGKILEVVGRYSVHNAGISFSVKKQGETVADVRTLPNASTVDNIRSIFGNAVSRELIEIGCEDKTLAFKMNGYISNANYSVKKCIFLLFINHRLVESTSLRKAIETVYAAYLPKNTHPFLYLSLEISPQNVDVNVHPTKHEVHFLHEESILERVQQHIESKLLGSNSSRMYFTQTLLPGLAGPSGEMVKSTTSLTSSSTSGSSDKVYAHQMVRTDSREQKLDAFLQPLSKPLSSQPQAIVTEDKTDISSGRARQQDEEMLELPAPAEVAAKNQSLEGDTTKGTSEMSEKRGPTSSNPRKRHREDSDVEMVEDDSRKEMTAACTPRRRIINLTSVLSLQEEINEQGHEVLREMLHNHSFVGCVNPQWALAQHQTKLYLLNTTKLSEELFYQILIYDFANFGVLRLSEPAPLFDLAMLALDSPESGWTEEDGPKEGLAEYIVEFLKKKAEMLADYFSLEIDEV

SEQ ID NO: 89933 - protein, 73 aa, Homo sapiens
NGGTLLGLKKLSFYYLIMAKGGIVRTGTHGLLVKQEDMKGHFSISIPVKSDIAPVARFTTCYQKRTSLASLGL

SEQ ID NO: 89934 - protein, 207 aa, Homo sapiens
  MOD_RES (1)..(1): Any amino acid
XKEKAKGIQAKVTAAKEDWKNFHSNLHQKESALENLKIQMKDFEVSAEPIQDWLSKTEKMVHESSNRLYDLPAKRREQQKLQEKVSRLDRIVAEHNQFSLGIKELQDWMTDAIHMLDSYCHPTSDKSVLDSRTLKLEVCIFTQKYLQPTEFVFLKISRLHPPGVMMSHSLHDKSQMLCECNAVCLGCTCQRIPESSDPGCFPKNKIK

SEQ ID NO: 89935 - protein, 183 aa, Homo sapiens
MSESGHSQPGLYGIERRRRWKEPGSGGPQNLSGPGGRERDYIAPWERERRDASEETSTSVMQKTPIILSKPPAERSKQPPPPTAPAAPPAPAPLEKPIVLMKPREEGKGPVAVTGASTPEGTAPPPPAAPAPPKGEKEGQRPTQPVYQIQNRGMGTAAPAAMDPVVGQAKLLPPERMKHSIKL

SEQ ID NO: 89936 - protein, 71 aa, Homo sapiens
MPLQVSDYSWQQTKTAVFLSLPLKGVCVRDTDVFCTENYLKTMRAAKQRLGMTPLSSPCIKKKRPCGRPFL

SEQ ID NO: 89937 - protein, 189 aa, Homo sapiens
MAPLLLQLAVLGAALAAAALVLISIVAFTTATKMPALHRHEEEKFFLNAKGQKETLPSIWDSPTKQLSVVVPSYNEEKRLPVMMDEALSYLEKRQKRDPAFTYEVIVVDDGSKDQTSKVAFKYCQKYGSDKVRVITLVKNRGKGGAIRMGIFSSRGEKILMADADGATKFPDVEKLEKGLNDLQPWPGI

SEQ ID NO: 89938 - protein, 112 aa, Homo sapiens
MLENYSLLLSVDCCIDDDLMEKRQENQDQHLQKVDFVNNKTLTMDRNGVLGKTFSLDTNPILSRKIRGNCDSSGMNLNNISELIISNRSSFVRNPAECNVRGKFLLCMKREN

SEQ ID NO: 89939 - protein, 78 aa, Homo sapiens
MLSSAYISDHMKVHSQGPHHVCELCNKGFTTAAYLRIHAVKDHGLQAPRADRILCKLCSVHCKTPAQLAGHMQTHLGG

SEQ ID NO: 89940 - protein, 1260 aa, Homo sapiens
MAQILPVRFQEHFQLQNLGINPANIGFSTLTMESDKFICIREKVGEQAQVTIIDMSDPMAPIRRPISAESAIMNPASKVIALKAGKTLQIFNIEMKSKMKAHTMAEEVIFWKWVSVNTVALVTETAVYHWSMEGDSQPMKMFDRHTSLVGCQVIHYRTDEYQKWLLLVGISAQQNRVVGAMQLYSVDRKVSQPIEGHAAAFAEFKMEGNAKPATLFCFAVRNPTGGKLHIIEVGQPAAGNQPFVKKAVDVFFPPEAQNDFPVAMQIGAKHGVIYLITKYGYLHLYDLESGVCICMNRISADTIFVTAPHKPTSGIIGVNKKGQVLSVCVEEDNIVNYATNVLQNPDLGLRLAVRSNLAGAEKLFVRKFNTLFAQGSYAEAAKVAASAPKGILRTRETVQKFQSIPAQSGQASPLLQYFGILLDQGQLNKLESLELCHLVLQQGRKQLLEKWLKEDKLECSEELGDLVKTTDPMLALSVYLRANVPSKVIQCFAETGQFQKIVLYAKKVGYTPDWIFLLRGVMKISPEQGLQFSRMLVQDEEPLANISQIVDIFMENSLIQQCTSFLLDALKNNRPAEGLLQTWLLEMNLVHAPQVADAILGNKMFTHYDRAHIAQLCEKAGLLQQALEHYTDLYDIKRAVVHTHLLNPEWLVNFFGSLSVEDSVECLHAMLSANIRQNLQLCVQVASKYHEQLGTQALVELFESFKSYKGLFYFLGSIVNFSQDPDVHLKYIQAACKTGQIKEVERICRESSCYNPERVKNFLKEAKLTDQLPLIIVCDRFGFVHDLVLYLYRNNLQRYIEIYVQKVNPSRTPAVIGGLLDVDCSEEVIKHLIMAVRGQFSTDELVAEVEKRNRLKLLLPWLESQIQEGCEEPATHNALAKIYIDSNNSPECFLRENAYYDSSVVGRYCEKRDPHLACVAYERGQCDLELIKVCNENSLFKSEARYLVCRKDPELWAHVLEETNPSRRQLIDQVVQTALSETRDPEEISVTVKAFMTADLPNELIELLEKIVLDNSVFSEHRNLQNLLILTAIKADRTRVMEYISRLDNYDALDIASIAVSSALYEEAFTVFHKFDMNASAIQVLIEHIGNLDRAYEFAERCNEPAVWSQLAQAQLQKDLVKEAINSYIRGDDPSSYLEVVQSASRSNNWEDLVKFLQMARKKGRESYIETELIFALAKTSRVSELEDFINGPNNAHIQQVGDRCYEEGMYEAAKLLYSNVSNFARLASTLVHLGVLCLHGWTRVPLRTAVWSSHRHSCR

SEQ ID NO: 89941 - protein, 341 aa, Homo sapiens
MGSGHCLRSTRGSKMVSWSVIAKIQEILQRKMVREFLAEFMSTYVMMVFGLGSVAHMVLNKKYGSYLGVNLGFGFGVTMGVHVAGRISGAHMNAAVTFANCALGRVPWRKFPVYVLGQFLGSFLAAATIYSLFYTAILHFSGGQLMVTGPVATAGIFATYLPDHMTLWRGFLNEAWLTGMLQLCLFAITDQENNPALPGTEALVIGILVVIIGVSLGMNTGYAINPSRDLPPRIFTFIAGWGKQVFSNGENWWWVPVVAPLLGAYLGGIIYLVFIGSTIPREPLKLEDSVAYEDHGITVLPKMGSHEPTISPLTPVSVSPANRSSVHPAPPLHESMALEHF

SEQ ID NO: 89942 - protein, 313 aa, Homo sapiens
  MOD_RES (1)..(1): Any amino acid
XIHELHFMDELVKVEAHDAEVLCLEYSKPETGLTLLASASRDRLIHVLNVEKNYNLEQTLDDHSSSITAIKFAGNRDIQMISCGADKSIYFRSAQQGSDGLHFVRTHHVAEKTTLYDMDIDITQKYVAVACQDRNVSCVFIWHLGPEITNCMKQHLLEIDHRQQQQHTNDKKRSGHPRQDTYVSTPSEIHSLSPGEQTEDDLEEECEPEEMLKTPSKDSLDPDPRCLLTNGKLPLWAKRLLGDDDVADGLAFHAKRSYQPHGRWAERAGQEPLKTILDAQDLDCYFTPMKPESLENSILDSLEPQSLASLLSE

SEQ ID NO: 89943 - protein, 84 aa, Homo sapiens
MATPYVPVPMPIGNSASSFTTNRNQRSSSFGSVSTSSNSSKGQLEDSNMGNFKQTSVPDQMDNTSSVCSSPLIRTKFTGTASSI

SEQ ID NO: 89944 - protein, 82 aa, Homo sapiens
METVISSDSSPAVENEHPQETPESNNSVYTSFMKSHRCYDLIPTSSKLVVFDTSLQSCPCGFAFMIITVLATGEESFFCFGD

SEQ ID NO: 89945 - protein, 18 aa, Homo sapiens
MLFGLVRQGLKCDGCGLN

SEQ ID NO: 89946 - protein, 1308 aa, Homo sapiens
MWPSQLLIFMMLLAPIIHGGKHSERHPALAAPLRHAERSPGGALPPRHLLQQPAAERTAAHRGQGPRGATRGVRGPGAQGAQIAAQAFSRAPIPMAVVRRELSCESYPIELRCPGTDVIMIESANYGRTDDKICDSDPAQMENIRCYLPDAYKIMSQRCNNRTQCAVVAGPDVFPDPCPGTYKYLEVQYECVPYKVEQKVFLCPGLLKGVYQSEHLFESDHQSGAWCKDPLQASDKIYYMPWTPYRTDTLTEYSSKDDFIAGRPTTTYKLPHRVDGTGFVVYDGALFFNKERTRNIVKFDLRTRIKSGEAIIANANYHDTSPYRWGGKSDIDLAVDENGLWVIYATEQNNGKIVISQLNPYTLRIEGTWDTAYDKRSASNAFMICGILYVVKSVYEDDDNEATGNKIDYIYNTDQSKDSLVDVPFPNSYQYIAAVDYNPRDNLLYVWNNYHVVKYSLDFGPLDSRSGQAHHGQVSYISPPIHLDSELERPSVKDISTTGPLGMGSTTTSTTLRTTTLSPGRSTTPSVSGRRNRSTSTPSPAVEVLDDMTTHLPSASSQIPALEESCEAVEAREIMWFKTRQGQIAKQPCPAGTIGVSTYLCLAPDGIWDPQGPDLSNCSSPWVNHITQKLKSGETAANIARELAEQTRNHLNAGDITYSVRAMDQLVGLLDVQLRNLTPGGKDSAARSLNKLQKRERSCRAYVQAMVETVNNLLQPQALNAWRDLTTSDQLRAATMLLHTVEESAFVLADNLLKTDIVRENTDNIKLEVARLSTEGNLEDLKFPENMGHGSTIQLSANTLKQNGRNGEIRVAFVLYNNLGPYLSTENASMKLGTEALSTNHSVIVNSPVITAAINKEFSNKVYLADPVVFTVKHIKQSEENFNPNCSFWSYSKRTMTGYWSTQGCRLLTTNKTHTTCSCNHLTNFAVLMAHVEVKHSDAVHDLLLDVITWVGILLSLVCLLICIFTFCFFRGLQSDRNTIHKNLCISLFVAELLFLIGINRTDQPIACAVFAALLHFFFLAAFTWMFLEGVQLYIMLVEVFESEHSRRKYFYLVGYGMPALIVAVSAAVDYRSYGTDKVCWLRLDTYFIWSFIGPATLIIMLNVIFLGIALYKMFHHTAILKPESGCLDNINYEDNRPFIKSWVIGAIALLCLLGLTWAFGLMYINESTVIMAYLFTIFNSLQGMFIFIFHCVLQKKVRKEYGKCLRTHCCSGKSTESSIGSGKTSGSRTPGRYSTGSQSRIRRMWNDTVRKQSESSFITGDINSSASLNREPYRETSMGVKLNIAYQIGASEQCQGYKCHGYSTTEW

SEQ ID NO: 89947 - protein, 354 aa, Homo sapiens
LTDRQTDTAPSPSYHLLPGRRRTVDAAASRGQGPEPAPGGGVEGVGARGVALKLFVQLLGCSRFGGAVVRAGEAEPSGAARSASSGREEPQPEEGEEEEEKEEERGPQWRLGARKPGSWTGEAAVCADSAPAARAPQALARASGRGGRVARRGAEESGPPHSPSRRGSASRAGPGRASETMNFLLSWVHWSLALLLYLHHAKWSQAAPMAEGGGQNHHEVVKFMDVYQRSYCHPIETLVDIFQEYPDEIEYIFKPSCVPLMRCGGCCNDEGLECVPTEESNITMQIMRIKPHQGQHIGEMSFLQHNKCECRPKKDRARQENPCGPCSERRKHLFVQDPQTCKCSCKNTDSRCKM

SEQ ID NO: 89948 - protein, 502 aa, Homo sapiens
MTHLNSLDVQLAQELGDFTDDDLDVVFTPKECRTLQPSLPEEGVELDPHVRDCVQTYIREWLIVNRKNQGSPEICGFKKTGSRKDFHKTLPKQTFESETLECSEPAAQAGPRHLNVLCDVSGKGPVTACDFDLRSLQPDKRLENLLQQVSAEDFEKQNEEARRTNRQAELFALYPSVDEEDAVEIRPVPECPKEHLGNRILVKLLTLKFEIEIEPLFASIALYDVKERKKISENFHCDLNSDQFKGFLRAHTPSVAASSQARSAVFSVTYPSSDIYLVVKIEKVLQQGEIGDCAEPYTVIKESDGGKSKEKIEKLKLQAESFCQRLGKYRMPFAWAPISLSSFFNVSTLEREVTDVDSVVGRSSVGERRTLAQSRRLSERALSLEENGVGSNFKTSTLSVSSFFKQEGDRLSDEDLFKFLADYKRSSSLQRRVKSIPGLLRLEISTAPEIINCCLTPEMLPVKPFPENRTRPHKEILEFPTREVYVPHTVYREVFQVSAVAH

SEQ ID NO: 89949 - protein, 151 aa, Homo sapiens
MGAALGTGTRLAPWPGRACGALPRWTPTAPAQGCHSKPGPARPVPLKKRGYDVTRNPHLNKGMAFTLEERLQLGIHGLIPPCFLSQDVQLLRIMRYYERQQSDLDKYIILMTLQDRNEKLFYRVLTSDVEKFMPIVYTPTVGLACQHYGLT

SEQ ID NO: 89950 - protein, 69 aa, Homo sapiens
MKNPMLEVVSLLLEKLLLISNFTLFSSGAAGEDKGRNSFYETSSFHRGDVLEVPRTHLTHYGIYLGDNR

SEQ ID NO: 89951 - protein, 80 aa, Homo sapiens
MVKALKEKIESEKGKDAFPVAGQKLIYAGKILNDDTALKEYKIDEKNFVVVMVTKPKAVSTPAPATTQQSAPASTTAVTS

SEQ ID NO: 89952 - protein, 126 aa, Homo sapiens
MELFRIGGKSPDTNYLFMGDYVDRGYYSVETVTLLVALKVRYRERITILRGNHESRQITQVYGFYDECLRKYGNANVWKYFTDLFDYLPLTALVDGQIFCLHGGLSPSIDTLDHIRALDRLQEVPH

SEQ ID NO: 89953 - protein, 772 aa, Homo sapiens
MGDEKDSWKVKTLDEILQEKKRRKEQEEKAEIKRLKNSDDRDSKRDSLEEGELRDHRMEITIRNSPYRREDSMEDRTGKDAALGDKPRPCLKKKLETRRSKDFTARNRPIQQEDTAMIRHFEKRRQADHEVRRLRPSWLTCKLLFRGNDGVCLFRDRLEQLERKRERERKMREQQKEQREQKERERRAEERRKEREARREVSAHHRTMREDYSDKVKASHWSRSPPRPPRERFELGDGRKPVKEEKMEERDLLSDLQDISDSERKTSSAESSSAESGSGSEEEEEEEEEEEEEGSTSEESEEEEEEEEEEEEETGSNSEEASEQSAEEVSEEEMSEDEERENENHLLVVPESRFDRDSGESEEAEEEVGEGTPQSSALTEGDYVPDSPALSPIELKQELPKYLPALQGCRSVEEFQCLNRIEEGTYGVVYRAKDKKTDEIVALKRLKMEKEKEGFPITSLREINTILKAQHPNIVTVREIVVGSNMDKIYIVMNYVEHDLKSLMETMKQPFLPGEVKTLMIQLLRGVKHLHDNWILHRDLKTSNLLLSHAGILKVGDFGLAREYGSPLKAYTPVVVTLWYRAPELLLGAKEYSTAVDMWSVGCIFGELLTQKPLFPGKSEIDQINKVFKDLGTPSEKIWPGYSELPAVKKMTFSEHPYNNLRKRFGALLSDQGFDLMNKFLTYFPGRRISAEDGLKHEYFRETPLPIDPSMFPTWPAKSEQQRVKRGTSPRPPEGGLGYSQLGDDDLKETGFHLTTTNQGASAAGPGFSLKF

SEQ ID NO: 89954 - protein, 307 aa, Homo sapiens
MFANLKYVSLGILVFQTTSLVLTMRYSRTLKEEGPRYLSSTAVVVAELLKIMACILLVYKDSKCSLRALNRVLHDEILNKPMETLKLAIPSGIYTLQNNLLYVALSNLDAATYQVTYQLKILTTALFSVSMLSKKLGVYQWLSLVILMTGVAFVQWPSDSQLDSKELSAGSQFVGLMAVLTACFSSGFAGVYFEKILKETKQSVWIRNIQLGFFGSIFGLMGVYIYDGELVSKNGFFQGYNRLTWIVVVLQALGGLVIAAVIKYADNILKGFATSLSIILSTLISYFWLQDFVPTRWLYASSSSSCS

SEQ ID NO: 89955 - protein, 445 aa, Homo sapiens
  MOD_RES (1)..(1): Any amino acid
XVLMCELSREDAPVRWYKDGLEVEESEALVLERDGPRCRLVLPAAQPEDGGEFVCDAGDDSAFFTVTVTAPPERIVHPAARSLDLHFGAPGRVELRCEVAPAGSQVRWYKDGLEVEASDALQLGAEGPTRTLTLPHAQPEDAGEYVCETRHEAITFNVILAEPPVQFLALETTPSPLCVAPGEPVVLSCELSRAGAPVVWSHNGRPVQEGEGLELHAEGPRRVLCIQAAGPAHAGLYTCQSGAAPGAPSLSFTVQVAEPLLVKLVSELTPLTVHEGDDATFRCEVSPPDADVTWLRNGAVVTPGPQVEMAQNGSSRILTLRGCQLGDAGTVTLRAGSTATSARLHVRETELLFLRRLQDVRAEEGQDVCLEVETGRVGAAGAVRWVRGGQPLPHDSRLSMAQDGHIHRLFIHGVILADQGTYGCESHHDRTLARLSVRRECPVLS

SEQ ID NO: 89956 - protein, 2851 aa, Homo sapiens
MTLEGLYLARGPLARLLLAWSALLCMAGGQGRWDGALEAAGPGRVRRRGSPGILQGPNVCGSRFHAYCCPGWRTFPGRSQCVVPICRRACGEGFCSQPNLCTCADGTLAPSCGVSRGSGCSVSCMNGGTCRGASCLCQKGYTGTVCGQPICDRGCHNGGRCIGPNRCACVYGFMGPQCERDYRTGPCFGQVGPEGCQHQLTGLVCTKALCCATVGRAWGLPCELCPAQPHPCRRGFIPNIHTGACQDVDECQAVPGLCQGGSCVNMVGSFHCRCPVGHRLSDSSAACEDVNECLSLSGLCSGGDCTNTVGSYVCTCSQGFASSLDGTHCLNYRAGACFSVLFGGRCAGDLAGHYTRRQCCCDRGRCWAAGPVPELCPPRGSNEFQQLCAQRLPLLPGHPGLFPGLLGFGSNGMGPPLGPARLNPHGSDARGIPSLGPGNSNIGTATLNQTIDICRHFTNLCLNGRCLPTPSSYRCECNVGYTQDVRGECIDVDECTSSPCHHGDCVNIPGTYHCRCYPGFQATPTRQACVDVDECIVSGGLCHLGRCVNTEGSFQCVCNAGFELSPDGKNCVDHNECATSTMCVNGVCLNEDGSFSCLCKPGFLLAPGGHYCMDIDECQTPGICVNGHCTNTEGSFRCQCLGGLAVGTDGRVCVDTHVRSTCYGAIEKGSCARPFPGTVTKSECCCANPDHGFGEPCQLCPAKDSAEFQALCSSGLGITTDGRDINECALDPEVCANGVCENLRGSYRCVCNLGYEAGASGKDCTDVDECALNSLLCDNGWCQNSPGSYSCSCPPGFHFWQDTEICKDVDECLSSPCVSGVCRNLAGSYTCKCGPGSRLDPSGTFCLDSTKGTCWLKIQESRCEVNLQGASLRSECCATLGAAWGSPCERCEIDPACARGFARMTGVTCDDVNECESFPGVCPNGRCVNTAGSFRCECPEGLMLDASGRLCVDVRLEPCFLRWDEDECGVTLPGKYRMDVCCCSIGAVWGVECEACPDPESLEFASLCPRGLGFASRDFLSGRPFYKDVNECKVFPGLCTHGTCRNTVGSFHCACAGGFALDAQERNCTDIDECRISPDLCGQGTCVNTPGSFECECFPGYESGFMLMKNCMDVDECARDPLLCRGGTCTNTDGSYKCQCPPGHELTAKGTACEDIDECSLSDGLCPHGQCVNVIGAFQCSCHAGFQSTPDRQGCVDINECRVQNGGCDVHCINTEGSYRCSCGQGYSLMPDGRACADVDECEENPRVCDQGHCTNMPGGHRCLCYDGFMATPDMRTCVDVDECDLNPHICLHGDCENTKGSFVCHCQLGYMVRKGATGCSDVDECEVGGHNCDSHASCLNIPGSFSCRCLPGWVGDGFECHDLDECVSQEHRCSPRGDCLNVPGSYRCTCRQGFAGDGFFCEDRDECAENVDLCDNGQCLNAPGGYRCECEMGFDPTEDHRACQDVDECAQGNLCAFGSCENLPGMFRCICNGGYELDRGGGNCTDINECADPVNCINGVCINTPGSYLCSCPQDFELNPSGVGCVDTRAGNCFLETHDRGDSGISCSAEIGVGVTRASCCCSLGRAWGNPCELCPMANTTEYRTLCPGGEGFQPNRITVILEDIDECQELPGLCQGGDCVNTFGSFQCECPPGYHLSEHTRICEDIDECSTHSGICGPGTCYNTLGNYTCVCPAEYLQVNGGNNCMDMRKSVCFRHYNGTCQNELAFNVTRKMCCCSYNIGQAWNRPCEACPTPISPDYQILCGNQAPGFLTDIHTGKPLDIDECGEIPAICANGICINQIGSFRCECPAGFNYNSILLACEDVDECGSRESPCQQNADCINIPGSYRCKCTRGYKLSPGGACVGRNECREIPNVCSHGDCMDTEGSYMCLCHRGFQASADQTLCMDIDECDRQPCGNGTCKNIIGSYNCLCFPGFVVTHNGDCVDFDECTTLVGQVCRFGHCLNTAGSFHCLCQDGFELTADGKNCVDTNECLSLAGTCLPGTCQNLEGSFRCICPPGFQVQSDHCIDIDECSEEPNLCLFGTCTNSPGSFQCLCPPGFVLSDNGHRCFDTRQSFCFTRFEAGKCSVPKAFNTTKTRCCCSKRPGEGWGDPCELCPQEGSAAFQELCPFGHGAVPGPDDSREDVNECAENPGVCTNGVCVNTDGSFRCECPFGYSLDFTGINCVDTDECSVGHPCGQGTCTNVIGGFECACADGFEPGLMMTCEDIDECSLNPLLCAFRCHNTEGSYLCTCPAGYTLREDGAMCRDVDECADGQQDCHARGMECKNLIGTFACVCPPGMRPLPGSGEGCTDDNECHAQPDLCVNGRCVNTAGSFRCDCDEGFQPSPTLTECHDIRQGPCFAEVLQTMCRSLSSSSEAVTRAECCCGGGRGWGPRCELCPLPGTSAYRKLCPHGSGYTAEGRDVDECRMLAHLCAHGECINSLGSFRCHCQAGYTPDATATTCLDMDECSQVPKPCTFLCKNTKGSFLCSCPRGYLLEEDGRTCKDLDECTSRQHNCQFLCVNTVGAFTCRCPPGFTQHHQACFDNDECSAQPGPCGAHGHCHNTPGSFRCECHQGFTLVSSGHGCEDVNECDGPHRCQHGCQNQLGGYRCSCPQGFTQHSQWAQCVDENECALSPPTCGSASCRNTLGGFRCVCPSGFDFDQALGGCQEVDECAGRRGPCSYSCANTPGGFLCGCPQGYFRAGQGHCVSGLGFSPGPQDTPDKEELLSSEACYECKINGLSPRDRPRRSAHRDHQVNLATLDSEALLTLGLNLSHLGRAERILELRPALEGLEGRIRYVIVRGNEQGFFRMHHLRGVSSLQLGRRRPGPGTYRLEVVSHMAGPWGVQPEGQPGPWGQALRLKVQLQLL

SEQ ID NO: 89957 - protein, 45 aa, Homo sapiens
MATAVEPEDQDLWEEEGILMVKLEDDFTCRPESVLQRDDPVLETS

SEQ ID NO: 89958 - protein, 478 aa, Homo sapiens
MQLPRWWELGDPCAWTGQGRGTRRMSPATTGTFLLTVYSIFSKVHSDRNVYPSAGVLFVHVLEREYFKGEFPPYPKPGEISNDPITFNTNLMGYPDRPGWLRYIQRTPYSDGVLYGSPTAENVGKPTIIEITAYNRRTFETARHNLIINIMSAEDGVLLSSPRLECNGTISANCNLRLLGSDFPLPYQAEFFIKNMNVEEMLASEVLGDFLGAVKNVWQPERLNAINITSALDRGGRVPLPINDLKEGVYVMVGADVPFSSCLREVENPQNQLRCSQEMEPVITCDKKFRTQFYIDWCKISLVDKTKQVSTYQEVIRGEGILPDGGEYKPPSDSLKSRDYYTDFLITLAVPSAVALVLFLILAYIMCCRREGVIQLVHHSAIQKSTKELRDMSKNREIAWPLSTLPVFHPVTGEIIPPLHTDNYDSTNMPLMQTQQNLPHQTQIPQQQTTGDFRLTTFQRFEVNGIPEERKLTEAMNL

SEQ ID NO: 89959 - protein, 128 aa, Homo sapiens
MDKNIGEQLNKAYEAFRQACMDRDSAVKELQQKTENYEQRIREQQEQLSLQQTIIDKLKSQLLLVNSTQDNNYGCVPLLEDSETRKNNLTLDQPQDKVISGIAREKLPKLYPVLDFTITSFVSVYVDW

SEQ ID NO: 89960 - protein, 142 aa, Homo sapiens
MWTLVSWVALTAGLVAGTRCPDGQFCPVACCLDPGGASYSCCRPLLDKWPTTLSRHLGGPCQVDAHCSAGHSCIFTVSGTSSCCPFPEAVACGDGHHCCPRGFHCSADGRSCFQRSGNNSVGAIQCPDSQFECPDFSTCCVM

SEQ ID NO: 89961 - protein, 134 aa, Homo sapiens
GAEPGRVDTFWYKFLKREPGGELSWEGNGPHHDRCCTYNENNLVDGVYCLPIGHWIEATGHTNEMKHTTDFYFNIAGHQAMHYSRSRDQRPEFQLCLKMVLSLIFVAQDVHSTQESSSTAAIFGNTHILWPVYK

SEQ ID NO: 89962 - protein, 159 aa, Homo sapiens
MAACIRIKPDSKAGDTDDPPRITQNPVINGNVALSDGHNTAEEDMEDDTSWRSEATFQFTVERFSRLSESVLSPPCFVRNLPWKIMVMPRFYPDRPHQKSVGFFLQCNAESDSTSWSCHAQAVLKIINYRDDEKSFSRRISHLFFHKENDWGFSNFMAW

SEQ ID NO: 89963 - protein, 1051 aa, Homo sapiens
MTFKTFRPAAMLIERSSDFGKTWGVYRYFAYDCEASFPGISTGPMKKVDDIICDSRYSDIEPSTEGEVIFRALDPAFKIEDPYSPRIQNLLKITNLRIKFVKLHTLGDNLLDSRMEIREKYYYAVYDMVVRGNCFCYGHASECAPVDGFNEEVEGMVHGHCMCRHNTKGLNCELCMDFYHDLPWRPAEGRNSNACKKCNCNEHSISCHFDMAVYLATGNVSGGVCDDCQHNTMGRNCEQCKPFYYQHPERDIRDPNFCERCTCDPAGSQNEGICDSYTDFSTGLIAGQCRCKLNVEGEHCDVCKEGFYDLSSEDPFGCKSCACNPLGTIPGGNPCDSETGHCYCKRLVTGQHCDQCLPEHWGLSNDLDGCRPCDCDLGGALNNSCFAESGQCSCRPHMIGRQCNEVEPGYYFATLDHYLYEAEEANLGPGVSIVERQYIQDRIPSWTGAGFVRVPEGAYLEFFIDNIPYSMEYDILIRYEPQLPDHWEKAVITVQRPGRIPTSSRCGNTIPDDDNQVVSLSPGSRYVVLPRPVCFEKGTNYTVRLELPQYTSSDSDVESPYTLIDSLVLMPYCKSLDIFTVGGSGDGVVTNSAWETFQRYRCLENSRSVVKTPMTDVCRNIIFSISALLHQTGLACECDPQGSLSSVCDPNGGQCQCRPNVVGRTCNRCAPGTFGFGPSGCKPCECHLQGSVNAFCNPVTGQCHCFQGVYARQCDRCLPGHWGFPSCQPCQCNGHADDCDPVTGECLNCQDYTMGHNCERCLAGYYGDPIIGSGDHCRPCPCPDGPDSGRQFARSCYQDPVTLQLACVCDPGYIGSRCDDCASGYFGNPSEVGGSCQPCQCHNNIDTTDPEACDKETGRCLKCLYHTEGEHCQFCRFGYYGDALQQDCRKCVCNYLGTVQEHCNGSDCQCDKATGQCLCLPNVIGQNCDRCAPNTWQLASGTGCDPCNCNAAHSFGPSCNEFTGQCQCMPGFGGRTCSECQELFWGDPDVECRDVEDVTQFPDYPGSHNMCGEGRIYHLSPQFMLLTIMLYSSNLPLESLECRGRTKTIKR

SEQ ID NO: 89964 - protein, 698 aa, Homo sapiens
MSYTLDSLGNPSAYRRVTETRSSFSRVSGSPSSGFRSQSWSRGSPSTVSSSYKRSMLAPRLAYSSAMLSSAESSLDFSQSSSLLNGGSGPGGDYKLSRSNEKEQLQGLNDRFAGYIEKVHYLEQQNKEIEAEIQALRQKQASHAQLGDAYDQEIRELRATLEMVNHEKAQVQLDSDHLEEDIHRLKERFEEEARLRDDTEAAIRALRKDIEEASLVKVELDKKVQSLQDEVAFLRSNHEEEVADLLAQIQASHITVERKDYLKTDISTALKEIRSQLESHSDQNMHQAEEWFKCRYAKLTEAAEQNKEAIRSAKEEIAEYRRQLQSKSIELESVRGTKESLERQLSDIEERHNHDLSSYQDTIQQLENELRGTKWEMARHLREYQDLLNVKMALDIEIAAYRKLLEGEETRFSTFAGSITGPLYTHRPPITISSKIQKPKVEAPKLKVQHKFVEEIIEETKVEDEKSEMEEALTAITEELAVSMKEEKKEAAEEKEEEPEAEEEEVAAKKSPVKATAPEVKEEEGEKEEEEGQEEEEEEDEGAKSDQAEEGGSEKEGSSEKEEGEQEEGETEAEAEGEEAEAKEEKKVEGKEEVEQETKEKGSGREEEKGVVTNGLDLSPADEKKGGDKSEEKVVVTKTVEKITSEGGDGATKYITKSVTVTQKVEEHEETFEEKLVSTKKVEKVTSHAIVKEVTQSD

SEQ ID NO: 89965 - protein, 524 aa, Homo sapiens
YALRDRQGNAIGVTACDIDGDGREEIYFLNTNNAFSGVATYTDKLFKFRNNRWEDILSDEVNVARGVASLFAGRSVACVDRKGSGRYSIYIANYAYGNVGPDALIEMDPEASDLSRGILALRDVAAEAGVSKYTGGRGVSVGPILSSSASDIFCDNENGPNFLFHNRGDGTFVDAAASAGVDDPHQHGRGVALADFNRDGKVDIVYGNWNGPHRLYLQMSTHGKVRFRDIASPKFSMPSPVRTVITADFDNDQELEIFFNNIAYRSSSANRLFRVIRREHGDPLIEELNPGDALEPEGRGTGGVVTDFDGDGMLDLILSHGESMAQPLSVFRGNQGFNNNWLRVVPRTRFGAFARGAKVVLYTKKSGAHLRIIDGGSGYLCEMEPVAHFGLGKDEASSVEVTWPDGKMVSRNVASGEMNSVLEILYPRDEDTLQDPAPLETPMNASSSHSCALETSPYVSTPMEATGAGPTRSAVGATSPTRMAQPAWGLSASHRAPAPPPPPLLLPLPLLLPLLELPLLHRSS

SEQ ID NO: 89966 - protein, 93 aa, Homo sapiens
MGYMGEMEVQGPTRESGQSLPPQKKAYLSHLSTGSGHIEGDWAGRNRKLLKPRSIQKSWFVQFPWLIMNEEQTALFCSACREYPSIRDKRSRL

SEQ ID NO: 89967 - protein, 176 aa, Homo sapiens
MPGWRLLTQVGAQVLGRLGDGLGAALGPGNRTHIWLFVRGLHGKSGTWWDEHLSEENVPFIKQLVSDEDKAQLASKLCPLKDEPWPIHPWEPGSFRVGLIALKLGMMPLWTKDGQKHVVTLLQKATSILEFYRELGLPPKQTVKIFNITDNAAIKPGTPLYAAHFRPGQYVDVTAK

SEQ ID NO: 89968 - protein, 361 aa, Homo sapiens
  MOD_RES (1)..(1): Any amino acid
XNEKWLLNLIQNECSVPFVPVEFHYENMHASFFVENASIAYALKNVSGKIWDEDNEKISIFVNPAGIPHFVHRELKSEKVEQIKLAMNQQCDVSQEALDIQRLPFYPDMVNRDTKMASNPRKCMAASLDVHEENIPTVMSAGEMDKWKGIEPGEKCADRSPVCTTFSDTSSNINSILELFPKLLCLDGQQSPRATLCGTEAHKRLPTCKGSFFGSEMLKNLVLQFLQQYYLIYDSGDRQGLLSAYHDEACFSLSIPFNPEDSAPSSFCKFFKDSRNIKILKDPYLRGELLKHTKLDIVDSLSALPKTQHDLSSFLVDMWYQTEWMLCFSVNGVFKEVSGFCSRLHPDLHCYPWQQFQSVHR

SEQ ID NO: 89969 - protein, 97 aa, Homo sapiens
MADKQISLPAKLINGGIAGLIGVTCVFPIDLAKTRLQNQQNGQRVYTSMSDCLIKTVRSEGYFGMYRGAAVNLTLVTPEKAIKLAANDFFRHQLSKD

SEQ ID NO: 89970 - protein, 1620 aa, Homo sapiens
MDSKKRSSTEAEGSKERGLVHIWQAGSFPITPERLPGWGGKTVLQAALGVKHGVLLTEDGEVYSFGTLPWRSGPVEICPSSPILENALVGQYVITVATGSFHSGAVTDNGVAYMWGENSAGQCAVANQQYVPEPNPVSIADSEASPLLAVRILQLACGEEHTLALSISREIWAWGTGCQLGLITTAFPVTKPQKVEHLAGRVVLQVACGAFHSLALVQCLPSQDLKPVPERCNQCSQLLITMTDKEDHVIISDSHCCPLGVTLTESQAENHASTALSPSTETLDRQEEVFENTLVANDQSVATELNAVSAQITSSDAMSSQQNVMGTTEISSARNIPSYPDTQAVNEYLRKLSDHSVREDSEHGEKPVPSQPLLEEAIPNLHSPPTTSTSALNSLVVSCASAVGVRVAATYEAGALSLKKVMNFYSTTPCETGAQAGSSAIGPEGLKDSREEQVKQESMQGKKSSSLVDIREEETEGGSRRLSLPGLLSQVSPRLLRKAARVKTRTVVLTPTYSGEADALLPSLRTEVWTWGKGKEGQLGHGDVLPRLQPLCVKCLDGKEVIHLEAGGYHSLALTAKSQVYSWGSNTFGQLGHSDFPTTVPRLAKISSENGVWSIAAGRDYSLFLVDTEDFQPGLYYSGRQDPTEGDNLPENHSGSKTPVLLSCSKLGYISRVTAGKDSYLALVDKNIMGYIASLHELATTERRFYSKLSDIKSQILRPLLSLENLGTTTTVQLLQEVASRFSKLCYLIGQHGASLSSFLHGVKEARSLVILKHSSLFLDSYTEYCTSITNFLVMGGFQLLAKPAIDFLNKNQELLQDLSEVNDENTQLMEILNTLFFLPIRRLHNYAKVLLKLATCFEVASPEYQKLQDSSSCYECLALHLGRKRKEAEYTLGFWKTFPGKMTDSLRKPERRLLCESSNRALSLQHAGRFSVNWFILFNDALVHAQFSTHHVFPLATLWAEPLSEEAGGVNGLKITTPEEQFTLISSTPQEKTKWLRAISQAVDQALRGMSDLPPYGSGSSVQRQEPPISRSAKYTFYKDPRLKDATYDGRWLSGKPHGRGVLKWPDGKMYSGMFRNGLEDGYGEYRIPNKAMNKEDHYVGHWKEGKMCGQGVYSYASGEVFEGCFQDNMRHGHGLLRSGKLTSSSPSMFIGQWVMDKKAGYGVFDDITRGEKYMGMWQDDVCQGNGVVVTQFGLYYEGNFHLNKMMGNGVLLSEDDTIYEGEFSDDWTLSGKGTLTMPNGDYIEGYFSGEWGSGIKITGTYFKPSLYESDKDRPKVLKLGNLAVPADEKWKAVFDECWRQLGCEGPGQGEVWKAWDNIAVALTTSRRQHRDSPEILSRSQTQTLESLEFIPQHVGAFSVEKYDDIRKYLIKACDTPLHPLGRLVETLVAVYRMTYVGVGANRRLLQEAVKEIKSYLKRIFQLVRFLFPELPEEGSTIPLSAPLPTERKSFCTGKSDSRSESPEPGYVVTSSGLLLPVLLPRLYPPLFMLYALDNDREEDIYWECVLRLNKQPDIALLGFLGVQRKFWPATLSILGESKKVLPTTKDACFASAVECLQQISTTFTPSDKLKVIQQTFEEISQSVLASLHEDFLWSMDDLFPVFLYVVLRASIFFSLGQD

SEQ ID NO: 89971 - protein, 231 aa, Homo sapiens
MRWRTILLQYCFLLITCLLTALEAVPIDIDKTKVQNIHPVESAKIEPPDTGLYYDEYLKQVIDVLETDKHFREKLQKADIEEIKSGRLSKELDLVSHHVRTKLDELKRQEVGRLRMLIKAKLDSLQDIGMDHQALLKQFDHLNHLNPDKFESTDLDMLIKAATSDLEHYDKTRHEEFKKYEMMKEHERREYLKTLNEEKRKEEESKFEEMKKKHENHPKVNHPVHREAKIN

SEQ ID NO: 89972 - protein, 28 aa, Homo sapiens
MAVAAAAAAAGPAGAGGGRAQRSGLLEV

SEQ ID NO: 89973 - protein, 192 aa, Homo sapiens
MKMHSTESLLKKIERETWRESGVSLIATVTRLMERLLDYRDCMKMGEVDGKKIGCTVSLLNFYKTELNKEEMYIRYIHKLYDLHLKAQNFTEAAYTLLLYDELLEWSDRPLREFLTYPMQTEWQRKEHLHLTIIQNFDRGKCWENGIILCRKIAEQYESYYDYRNLSKMRMMEASLYDKIMDQQRLEPEFFR

SEQ ID NO: 89974 - protein, 129 aa, Homo sapiens
MTGTPKTQEGAKDLEVDMNKTEVTPRLWTTCRDGEVLLRLSKHGPGHETPMTIPEFFRESVNRFGTYPALASKNGKKWEILNFNQYYEACRKAAKSLIKLGLERFHGVGILGFNSAEWFITAVGAILAG

SEQ ID NO: 89975 - protein, 339 aa, Homo sapiens
MRVMAPRTLILLLSGALALTETWACSHSMRYFYTAVSRPGRGEPRFIAVGYVDDTQFVRFDSDAASPRGEPRAPWVEQEGPEYWDRETQKYKRQAQTDRVSLRNLRGYYNQSEAGSHTLQWMYGCDLGPDGRLLRGYDQSAYDGKDYIALNEDLRSWTAADTAAQITQRKWEAARAAEQQRAYLEGTCVEWLRRYLENGKETLQRAEHPKTHVTHHLVSDHEATLRCWALGFYPAEITLTWQRDGEDQTQDTELVETRPAGDGTFQKWAAVVVPSGEEQRYTCHVQHEGLPEPLTLRWEPSSQPTIPIVGIVAGLAVLAVLAVLGAVVAVVMCRRKSSA

SEQ ID NO: 89976 - protein, 242 aa, Homo sapiens
VLRVLSPDLVRRLLNLAVRAFQVPKGESLNFPESTPGYGHTVPLSDGGKAFCIIYSVIGIPFTLLFLTAVVQRITVHVTRRPVLYFHIRWGFSKQVVAIVHAVLLGFVTVSCFFFIPAAVFSVLEDDWNFLESFYFCFISLSTIGLGDYVPGEGYNQKFRELYKIGITCYLLLGLIAMLVVLETFCELHELKKFRKMFYVKKDKDEDQVHIIEHDQLSFSSITDQAAGMKEDQKQNEPFVAT

SEQ ID NO: 89977 - protein, 83 aa, Homo sapiens
MSLHTQYLESFLRSQFYMLRMDGPLPLPYRHYIAIMAAARHQCSYLINMHVDEFLKTGGIAEWLNGLEYVPQRLKNLNEINKL

SEQ ID NO: 89978 - protein, 63 aa, Homo sapiens
SVIHYDNEAIARLLDRNQDATEDTDVQNMNEYLSSFKVAQYVVREEDKVRLDFREKRRHRQYW

SEQ ID NO: 89979 - protein, 163 aa, Homo sapiens
RRPPAHISSVRQASTQVPRTVPHTQRVANIGTQTTGPSGVGCCTPGRPLLPCKCSSAAHSTYRVQEPAVHIPGQEPLTASMLAAAPLHEQKQMIGERLYPLIHDVHTQLAGKITGMLLEIDNSELLLMLESPESLHAKKRKSSLPWLPKGQCFWLSALRPCKL

SEQ ID NO: 89980 - protein, 158 aa, Homo sapiens
MQMEELKRLQNPLEQVNDGKYSFENIQRAWREYLQRQEPLGKRSPSPPSVSSEKLSSSVSMNTFSDSSTPDYREDGMDLGSDAGSSSSSSRASSQSNSTKVTPCSECKSSSSPGGSLDLVSALEDYEEPFPVYQKKVIDEWAPEEDGEEEEEEDERDQ

SEQ ID NO: 89981 - protein, 244 aa, Homo sapiens
  MOD_RES (1)..(1): Any amino acid
XRRRRRAGCGRPSPASCAGRSAWIRGRNAPRAREPERWRRRRGTAGSAGLTRSREGRPGHKLKSSQKDKVRQFMACTQAGERTAIYCLTQNEWRLDEATDSFFQNPDSLHRESMRNAVDKKKLERLYGRYKDPQDENKIGVDGIQQFCDDLSLDPASISVLVIAWKFRAATQCEFSRKEFLDGMTELGCDSMEKLKALLPRLEQELKDTAKFKDFYQFTFTFAKNPGQKGLGSPPFLNVKALHH

SEQ ID NO: 89982 - protein, 82 aa, Homo sapiens
MVKFLLEKGADVNASDNYQRTALILAVSGEPPCLVKLLLQQGVELCYEGIVDSQLRNMFISMVLLHRYPQFTASHGKKKHAK

SEQ ID NO: 89983 - protein, 310 aa, Homo sapiens
MLYSGTWRTVGIRCPRKKAQICQQQECCIERPPLRLRGFGAALTTTPRLHRPCPPTSGADFTSRNLFPPGIKDFLLLCGRILLLLALLTLTISVTTSWLNSFKSPQVYLKEEEEKNEKRQKLVRKKQQEAQGEKASRYIENVLKPHQEMKLRKLEERFYQMTGEAWKLSSGHKLGGDEGTSQTSFETSNREAAKSQNLPKPLTEFPSPAEQPTCKEIPDLPEEPSQTAEEVVTVALRCPSGNVLRRRFLKSYSSQVLFDWMTRIGYHISLYSLSTSFPRRPLAVEGGQSLEDIGITVDTVLILEEKEQTN

SEQ ID NO: 89984 - protein, 101 aa, Homo sapiens
  MOD_RES (1)..(1): Any amino acid
XGSDMKNQIEQLGKKYNINPVSMDICKQEEKLGFLVAKQDLVISLLPYVLHPLVAKACITNKVNMVTASYITPALKELEKSFPFSSFHLLQCGRCWHHNHW

SEQ ID NO: 89985 - protein, 1197 aa, Homo sapiens
  MOD_RES (1)..(1): Any amino acid
XPSGSNVDTLLRLRGRLLLDHEALSCLLVLLFVDEPKLNTSRLHRVLRNLCYHAQTRHWVIRSLLSILQRSSESELCIETPKLTTSEEKGKKSSKSCGSSSHENRPLDLLHKMESKSSNQLSWLSVSMDAALGCRTNIFQIQRSGGRKHTEKHASGGSTVHIHPQAAPVVCRHVLDTLIQLAKVFPSHFTQQRTKETNCESDRERGNKACSPCSSQSSSSGICTDFWDLLVKLDNMNVSRKGKNSVKSVPVSAGGEGETSPYSLEASPLGQLMNMLSHPVIRRSSLLTEKLLRLLSLISIALPENKVSEAQANSGSGASSTTTATSTTSTTTTTAASTTPTPPTAPTPVTSAPALVAATAISTIVVAASTTVTTPTTATTTVSISPTTKGSKSPAKVSDGGSSSTDFKMVSSGLTENQLQLSVEVLTSHSCSEEGLEDAANVLLQLSRGDSGTRDTVLKLLLNGARHLGYTLCKQIGTLLAELREYNLEQQRRAQCETLSPDGLPEEQPQTTKLKGKMQSRFDMAENVVIVASQKRPLGGRELQLPSMSMLTSKTSTQKFFLRVLQVIIQLRDDTRRANKKAKQTGRLGSSGLGSASSIQAAVRQLEAEADAIIQMSESSQSEASVRREESPMDVDQPSPSAQDTQSIASDGTPQGEKEKEERPPELPLLSEQLSLDELWDMLGECLKELEESHDQHAVLVLQPAVEAFFLVHATERESKPPVRDTRESQLAHIKDEPPPLSPAPLTPATPSSLDPFFSREPSSMHISSSLPPDTQKFLRFAETHRTVLNQILRQSTTHLADGPFAVLVDYIRVLDFDVKRKYFRQELERLDEGLRKEDMAVHVRRDHVFEDSYRELHRKSPEEMKNRLYIVFEGEEGQDAGGLLREWYMIISREMFNPMYALFRTSPGDRVTYTINPSSHCNPNHLSYFKFVGRIVAKAVYDNRLLECYFTRSFYKHILGKSVRYTDMESEDYHFYQGLVYLLENDVSTLGYDLTFSTEVQEFGVCEVRDLKPNGANILVTEENKKEYVHLVCQMRMTGAIRKQLAAFLEGFYEIIPKRLISIFTEQELELLISGLPTIDIDDLKSNTEYHKYQSNSIQIQWFWRALRSFDQADRAKFLQFVTGTSKVPLQGFAALEGMNGIQKFQIHRDDRSTDRLPSAHTCFNQLDLPAYESFEKLRHMLLLAIQECSEGFGLA

SEQ ID NO: 89986 - protein, 184 aa, Homo sapiens [sequence omitted]

SEQ ID NO: 89987 - protein, 265 aa, Homo sapiens
MFQLLIPLLLALKGHAQDNPENVQCGHRPAFPNSSWLPFHERLQVQNGECPWQVSIQMSRKHLCGGSILHWWWVLTAAHCFRRTLLDMAVVNVTVVMGTRTFSNIHSERKQVQKVIIHKDYKPPQLDSDLSLLLLATPVQFSNFKMPVCLQEEERTWDWCWMAQWVTTNGYDQYDDLNMHLEKLRVVQISRKECAKRINQLSRNMICAWNEPGTNGIFKGDSGAPLVCAIYGTQRLFQVGVFSGGIRSGSRGRPGMFVSVAQFIP

SEQ ID NO: 89988 - protein, 55 aa, Homo sapiens
VVVAVTAMETAARQEWSKKTIIGDMGIVWTSFVGIQVILTYLLRRPEIKPFASGM

SEQ ID NO: 89989 - protein, 730 aa, Homo sapiens [sequence omitted]

SEQ ID NO: 89990 - protein, 310 aa, Homo sapiens
MDGSFVQHSVRVLQELNKQREKGQYCDATLDVGGLVFKAHWSVLACCSHFFQSLYGDGSGGSVVLPAGFAEIFGLLLDFFYTGHLALTSGNRDQVLLAARELRVPEAVELCQSFKPKTSVGQAAGGQSGLGPPASQNVNSHVKEPAGLEEEEVSRTLGLVPRDQEPRGSHSPQRPQLHSPAQSEGPSSLCGKLKQALKPCPLEDKKPEDCKVPPRPLEAEGAQLQGGSNEWEVVVQVEDDGDGDYMSEPEAVLTRRKSNVIRKPCAAEPALSAGSLAAEPAENRKGTAVPVECPTCHKKFLSKYYLKVHN

SEQ ID NO: 89991 - protein, 91 aa, Homo sapiens
MLSLSLSPRLECSGPISAHCNLYLPGSSDSPAPTTRVAGITVYQVFESVAKKYDVMNDMMSLGIHRVWKDLLLWKMHPLPGTQLLDVAGGT

SEQ ID NO: 89992 - protein, 303 aa, Homo sapiens
MELLCHEVDPVRRAVRDRNLLRDDRVLQNLLTIEERYLPQCSYFKCVQKDIQPYMRRMVATWMLEVCEEQKCEEEVFPLAMNYLDRFLAGVPTPKSHLQLLGAVCMFLASKLKETSPLTAEKLCIYTDNSIKPQELLEWELVVLGKLKWNLAAVTPHDFIEHILRKLPQQREKLSLIRKHAQTFIALCATGGRISGSHQHLTSPDFKFAMYPPSMIATGSVGAAICGLQQDEEVSSLTCDALTELLAKITNTDVDCLKACQEQIEAVLLNSLQQYRQDQRDGSKSEDELDQASTPTDVRDIDL

SEQ ID NO: 89993 - protein, 69 aa, Homo sapiens
MLWSGCRRFGARLGCLPGGLRVLVQTGHRSLTSCIDRAVPSGCDAEGSPARLRRGLHTNRCGRVWAVTS

SEQ ID NO: 89994 - protein, 74 aa, Homo sapiens
  MOD_RES (1)..(1): Any amino acid
XLQSLCVAVTYVYFTNELKQMQDKYSKSGIACFLKEDDSYWDPNDEESMNSPCWQVKWQLRQLVRKKSNKIFLP

SEQ ID NO: 89995 - protein, 604 aa, Homo sapiens
MTASPDYLVVLFGITAGATGAKLGSDEKELILLFWKVVDLANKKVGQLHEVLVRPDQLELTEDCKEETKIDVESLSSASQLDQALRQFNQSVSNELNIGVGTSFCLCTDGQLHVRQILHPEASKKNVLLPECFYSFFDLRKEFKKCCPGSPDIDKLDVATMTEYLNFEKSSSVSRYGASQVEDMGNIILAMISEPYNHRFSDPERVNYKFESGTCSKMELIDDNTVVRARGLPWQSSDQDIARFFKGLNIAKGGAALCLNAQGRRNGEALVRFVSEEHRDLALQRHKHHMGTRYIEVYKATGEDFLKIAGGTSNEVAQFLSKENQVIVRMRGLPFTATAEEVVAFFGQHCPITGGKEGILFVTYPDGRPTGDAFVLFACEEYAQNALRKHKDLLGKRYIELFRSTAAEVQQVLNRFSSAPLIPLPTPPIIPVLPQQFVPPTNVRDCIRLRGLPYAATIEDILDFLGEFATDIRTHGVHMVLNHQGRPSGDAFIQMKSADRAFMAAQKCHKKNMKDRYVEVFQCSAEEMNFVLMGGTLNRNGLSPPPCLSPPSYTFPAPAAVIPTEAAIYQPSVILNPRALQPSTAYYPAGTQLFMNYTAYYPSV

SEQ ID NO: 89996 - protein, 307 aa, Homo sapiens
  MOD_RES (1)..(1): Any amino acid
XPKPKTTPHPEVPQTKLATKTSKRTRPPRPRPKTTPSPQAPETKPVPATVLEPVTLRPEASTTLASKTSQRTRRPRLRTKTTPRPEAPESKPVPTAELKPVTLRTETWVTTQAPKQTPRAPPKPKTSPRPRIPQTQPVPKVPQRVTAKPKTSPSPEVSYTTPAPKDVLLPHKPYPEVSQSEPAPLETRGIPFIPMISPSPSQEELQTTLEETDQSTQEPFTTKIPRTTELAKTTQAPHRFYTTVRPRTSDKPHIRPVLNRTTTRPTRPKPSGMPSGNGVGTGVKQAPRPSGADRNVSVDSTHPTKKP

SEQ ID NO: 89997 - protein, 37 aa, Homo sapiens
MVEADRPGKLFIGGLNTETNEKALEAVFGKYGRIVEG

SEQ ID NO: 89998 - protein, 42 aa, Homo sapiens
  MOD_RES (1)..(1): Any amino acid
XRLDMNHGFVHHIRRNQIARYRPALRRRRHHSWPGLARPDSP

SEQ ID NO: 89999 - protein, 467 aa, Homo sapiens
MVFMSLHFLYYCSEPTLDVKIAFCQGFDKQVDVSYIAKHYNMSKSKVDNQFYSVEVGDSTFTVLKRYQNLKPIGSGAQGIVCAAYDAVLDRNVAIKKLSRPFQNQTHAKRAYRELVLMKCVNHKNIISLLNVFTPQKTLEEFQDVYLVMELMDANLCQVIQMELDHERMSYLLYQMLCGIKHLHSAGIIHRDLKPSNIVVKSDCTLKILDFGLARTAGTSFMMTPYVVTRYYRAPEVILGMGYKENVDIWSVGCIMGEMVRHKILFPGRDYIDQWNKVIEQLGTPCPEFMKKLQPTVRNYVENRPKYAGLTFPKLFPDSLFPADSEHNKLKASQARDLLSKMLVIDPAKRISVDDALQHPYINVWYDPAEVEAPPPQIYDKQLDEREHTIEEWKELIYKEVMNSEEKTKNGVVKGQPSPSGAAVNSSESLPPSSSVNDISSMSTDQTLASDTDSSLEASAGPLGCCR

SEQ ID NO: 90000 - protein, 74 aa, Homo sapiens
MMAIRELKVCLLGDTGVGKSSIVCRFVQDHFDHNISPTIGASFMTKTVPCGNELHKFLIWDTAGQERGGSPEGC

SEQ ID NO: 90001 - protein, 99 aa, Homo sapiens
MPVPWFLLSLALGRSPVVLSLERLVGPQDATHCSPGLSCRLWDSDILCLPGDIVPAPGPVLAPTHLQTELVLRCQKETDCDLCLRVAVHLAVHGEQVIL

SEQ ID NO: 90002 - protein, 196 aa, Homo sapiens
  MOD_RES (1)..(1): Any amino acid
XLVDLAGSERVGKSGAEGSRLREAQHINKSLSALGDVIAALRSRQGHVPFRNSKLTYLLQDSLSGDSKTLMVVQGSRGHCLCDGCDPAGPEAGPSLACPCCSARTPGGRGESGGSSSAPSPLKDEKHVQKETVSLGCGSECKLHGRKGGGGCSSWQAWAISELGPVRRAGVWRRVGLSPRLSRPLSSACRAGQPPP

SEQ ID NO: 90003 - protein, 191 aa, Homo sapiens
  MOD_RES (1)..(1): Any amino acid
XVVIRGSPKGNRPAILTYHDVGLNHKLCFNTFFNFEDMQEITKHFVVCHVDAPGQQVGASQFPQGYQFPSMEQLAAMLPSVVQHFGFKYVIGIGVGAGAYVLAKFALIFPDLVEGLVLVNIDPNGKGWIDWAATKLSGLTSTLPDTVLSHLFSQELVNNTELVQSYRQQIGNVVNQANLQLFWNMYNSRRD

SEQ ID NO: 90004 - protein, 125 aa, Homo sapiens
  MOD_RES (1)..(1): Any amino acid
XGRASWCWALALLWLAVVPGWSRVSGIPSRRHWPVPYKRFDFRPKPDPYCQAKYTFCPTGSPIPVMEGDDDIEVFRLQAPVWEFKYGDLLGHLVTWTHGCVTVAFIHVLSLHRKLCMMPLDSEVH

SEQ ID NO: 90005 - protein, 150 aa, Homo sapiens
MEVPPPAPRSFLCRALCLFPRVFAAEAVTADSEVLEERQKRLPYVPEPYYPESGWDRLRELFGKDTVNTSLNVYRNKDALSHFVIAGAVTGSLFRINVGLRGLVAGGIIGALLGTPVGGLLMAFQKYSGETVQERKQKDRKALHELKLEE

SEQ ID NO: 90006 - protein, 84 aa, Homo sapiens
MFLFQGNNGTVLYTGDFRLAQGEAARMELLHSGGRVKDIQSVYLDTTFCDPRFYQIPSREECLSGVLELVRSWITRSPYHVVWL

SEQ ID NO: 90007 - protein, 210 aa, Homo sapiens
  MOD_RES (1)..(1): Any amino acid
XRTRSVGECVEYYYLWKKSERYDYFAQQTRLGRRKDADQDLDGSDPDGPGRPRPEQDTLTGMRTDPLSVDGTAGGLDEPGVASDGLPSSEPGPCSFQQLDESPAVPLSHRPPALADPASYQPAVTAPEPDASPRLAVDFALPKELPLISSHVDLSGDPEETVAPAQVALSVTEFGLIGIGDVNPFLAAHPTCPAPGLHSEPLSHCNVMTC

SEQ ID NO: 90008 - protein, 195 aa, Homo sapiens
MPGKMEKFLQIAPHSLAIVLGPAEAPAGERPGAARPAPPAQPRQLARHHIGYEIFADFKAENMQHFWNKKVTAAVAETFFLGWIDEQVLLIQGKEEHLEALREGWTRRALRPPSGFHIRCLGDVSPISMSPISQSQFIPLGEILCLAISAMNSARKPVTQEALMEHLTTCFPVLGRAWLPTHQALLKVTVVRTPL

SEQ ID NO: 90009 - protein, 190 aa, Homo sapiens
MGPLPRTVELFYDVLSPYSWLGFEILCRYQNIWNINLQLRPSLITGIMKDSGNKPPGLLPRKGLYMANDLKLLRHHLQIPIHFPKDFLSVMLEKGSLSAMRFLTAVNLEHPEMLEKASRELWMRVWSRNEDITEPQSILAAAEKAGMSAEQAQGLLEKIATPKVKNQLKETTEAACRYGERSGWALYLQP

SEQ ID NO: 90010 - protein, 198 aa, Homo sapiens
MDPSLLRERELFKKRALSTPVVEKRSASSESSSSSSKKKKTKVEHGGSSGSKQNSDHSNGSFNLKALSGSSGYKFGVLAKIVNYMKTRHQRGDTHPLTLDEILDETQHLDIGLKQKQWLMTEALVNNPKIEVIDGKYAFKPKYNVRDKKALLRLLDQHDQRGLGGILLEDIEEALPNSQKAVKALGDQILFVNRPDKK

SEQ ID NO: 90011 - protein, 57 aa, Homo sapiens
MATEEFIIRIPPYHYIHVLDQNSNVSRVEVGPKTYIRQDNERTSHPCRWFCPTLPSI

SEQ ID NO: 90012 - protein, 408 aa, Homo sapiens
MRLSFIVFSSQATIILPLTGDRGKISKGLEDLKRVSPVGETYIHEGLKLANEQIQKAGGLKTSSIIIALTDGKLDGLVPSYAEKEAKISRSLGASVYCVGVLDFEQAQLERIADSKEQVFPVKGGFQALKGIINSILAQSCTEILELQPSSVCVGEEFQIVLSGRGFMLGSRNGSVLCTYTVNETYTTSVKPVSVQLNSMLCPAPILNKAGETLDVSVSFNGGKSVISGSLIVTATECSNGIAAIIVILVLLLLLGIGLMWWFWPLCCKVVIKDPPPPPAPAPKEEEEEPLPTKKWPTVDASYYGGRGVGGIKRMEVRWGDKGSTEEGARLEKAKNAVVKIPEETEEPIRPRPPRPKPTHQPPQTKWYTPIKGRLDALWALLRRQYDRVSLMRPQEGDEVNLLWKRSE

SEQ ID NO: 90013 - protein, 39 aa, Homo sapiens
MWERMDEGCGETIYVIGQGSDGTEYGLSEADMEASYATV

SEQ ID NO: 90014 - protein, 88 aa, Homo sapiens
MYHDASRWGLTLQTYVQLTMLDRHTRPQVSSVRLMERSIHSARYIFVENLYRSGKMPEVDYVVLSEWFDWILRNMDVSVDLIVYLRTN

SEQ ID NO: 90015 - protein, 153 aa, Homo sapiens
DSRDGGGGKDATGSEDYENLPTSASVSTHMTAGAMAGILEHSVMYPVDSVKTRMQSLSPDPKAQYTSIYGALKKIMRTEGFWRPLRGVNVMIMGAGPAHAMYFACYENMKRTLNDVFHHQGNSHLANGIAGSMATLLHDAVMNPAEVHPLHHL

SEQ ID NO: 90016 - protein, 421 aa, Homo sapiens
MMYRTVGFGTRSRNLKPWMIAVLIVLSLTVVAVTIGLLVHFLVFDQKKEYYHGSFKILDPQINNNFGQSNTYQLKDLRETTENLVSQVDEIFIDSAWKKNYIKNQVVRLTPEEDGVKVDVIMVFQFPSTEQRAVREKKIQSILNQKIRNLRALPINASSVQVNAMSSSTGELTVQASCGKRVVPLNVNRIASGVIAPKAAWPWQASLQYDNIHQCGATLISNTWLVTAAHCFQKYKNPHQWTVSFGTKINPPLMKRNVRRFIIHEKYRSAAREYDIAVVQVSSRVTFSDDIRQICLPEASASFQPNLTVHITGFGALYYGGESQNDLREARVKIISDDVCKQPQVYGNDIKPGMFCAGYMEGIYDACRGDSGGPLVTRDLKDTWYLIGIVSWGDNCGQKDKPGVYTQVTYYRNWIASKTGI

SEQ ID NO: 90017 - protein, 347 aa, Homo sapiens
MKPILLQGHERSITQIKYNREGDLLFTVAKDPIVNVWYSVNGERLGTYMGHTGAVWCVDADWDTKHVLTGSADNSCRLWDCETGKQLALLKTNSAVRTCGFDFGGNIIMFSTDKQMGYQCFVSFFDLRDPSQIDNNEPYMKIPCNDSKITSAVWGPLGECIIAGHESGELNQYSAKSGEVLVNVKEHSRQINDIQLSRDMTMFVTASKDNTAKLFDSTTLEHQKTFRTERPVNSAALSPNYDHVVLGGGQEAMDVTTTSTRIGKFEARFFHLAFEEEFGRVKGHFGPINSVAFHPDGKRGRCQKRRHRRAQTAPTVALPQTPMTVGTGSPAATRSPGRGERDGVSPC

SEQ ID NO: 90018 - protein, 390 aa, Homo sapiens
MLSFSRDRLPSGRRVSGKCPPPPLGMAVGRGGSGCPEEGSGRKLELLESQLPAERAREEAGPSVRRPRDKLHKPKATQTEVKPSVRFNLRTSKDPEHEGCYLSVGHSQPLEDCSFNMTAKTFFIIHGWTMSGIFENWLHKLVSALHTREKDANVVVVDWLPLAHQLYTDAVNNTRVVGHSIARMLDWLQEKDDFSLGNVHLIGYSLGAHVAGYAGNFVKGTVGRITGLDPAGPMFEGADIHKRLSPDDADFVDVLHTYTRSFGLSIGIQMPVGHIDIYPNGGDFQPGCGLNDVLGSIAYGTITEVVKCEHERAVHLFVDSLVNQDKPSFAFQCTDSNRFKKGICLSCRKNRCNSIGYNAKKMRNKRNSKMYLKTRAGMPFRGNLQSLECP

SEQ ID NO: 90019 - protein, 34 aa, Homo sapiens
  MOD_RES (1)..(1): Any amino acid
XVWSAGCVLAELLLGQPIFPGDSGVDQLVEIIKG

SEQ ID NO: 90020 - protein, 184 aa, Homo sapiens
MSWPRRLLLRYLFPALLLHGLGEGSALLHPDSRSHPRSLEKSAWRAFKESQCHHMLKHLHNGARITVQMPPTIEGHWVSTGCEVRSGPEFITRSYRFYHNNTFKAYQFYYGSNRCTNPTYTLIIRGKIRLRQASWIIRGGTEADYQLHNVQGHGRHRVRVQSESHEGHPHGCGHSLTAQRLQRE

SEQ ID NO: 90021 - protein, 280 aa, Homo sapiens
MSTEKVDQKEEAGEKEVCGDQIKGPDKEEEPPAAASHGQGWRPGGRAARNARPEPGARHPALPAMVNDPPVPALLWAQEVGQVLAGRARRLLLQFGVLFCTILLLLWVSVFLYGSFYYSYMPTVSHLSPVHFYYRTDCDSSTTSLCSFPVANVSLTKGGRDRVLMYGQPYRVTLELELPESPVNQDLGMFLVTISCYTRGGRIISTSSRSIPAIQLPDDLRLHRCCQQLHLPQRHRALQLHAVGVGGHLAPTPLLFAGRKGQGPPFVPLIFVGGQGYVGD

SEQ ID NO: 90022 - protein, 154 aa, Homo sapiens
MVPSSPAVEKQVPVEPGPDPELRSWRHLVCYLCFYGFMAQIRPGESFITPYLLGPDKNFTREQVTNEITPVLSYSYLAVLVPVFLLTDYLRYTPVLLLQGLSFVSVWLLLLLGHSVAHMQLMELFYSVTMAARIAYSSYIFSLVRPARYQRVAG

SEQ ID NO: 90023 - protein, 687 aa, Homo sapiens
MMEELHSLDPRRQELLEARFTGVGVSKGPLNSESSNQSLCSVGSLSDKEVETPEKKQNDQRNRKRKAEPYETSQGKGTPRGHKISDYFEFAGGSAPGTSPGRSVPPVARSSPQHSLSNPLPRRVEQPLYGLDGSAAKEATEEQSALPTLMSVMLAKPRLDTEQLAQRGAGLCFTFVSANCDLRRQIDEQQKMLEKYKERLNRCVTMSKKLLIEKSKQEKMACRDKSMQDRLRLGHFTTVRHGASFTEQWTDGYAFQNLIKQQERINSQREEIERQRKMLAKRKPPAMGQAPPATNEQKQRKSKTNGAENETLTLAEYHEQEEIFKLRLGHLKKEEAEIQAELERLERVRNLHIRELKRIHNEDNSQFKDHPTLNDRYLLLHLLGRGGFSEVYKAFDLTEQRYVAVKIHQLNKNWRDEKKENYHKHACREYRIHKELDHPRIVKLYDYFSLDTDSFCTVLEYCEGNDLDFYLKQHKLMSEKEARSIIMQIVNALKYLNEIKPPIIHYDLKPGNILLVNGTACGEIKITDFGLSKIMDDDSYNSVDGMELTSQGAGTYWYLPPECFVVGKEPPKISNKVDVWSVGVIFYQCLYGRKPFGHNQSQQDILQENTILKATEVQFPPKPVVTPEAKAFIRRCLAYRKEDRIDVQQLACDPYLLPHIRKSVSTSSPAGAAIASTSGASNNSSSN

SEQ ID NO: 90024 - protein, 153 aa, Homo sapiens
  MOD_RES (1)..(1): Any amino acid
XMTHCGHLGSLGHPCWLCSILVPRHWNALVSRNEVQAHGCDVTEHVKSEVLWKVKPLNGSPGPKDGSQTEKTPSADQNQEQFEEHFVASSVGEMWQVVDMAQQEEDQSSKTAAVHKHSFHLSFCFSLASVMVFSGGPLRRTFPNIQLCFMLTH

SEQ ID NO: 90025 - protein, 90 aa, Homo sapiens
MEAHEIIEEPHITMDAEKHPPSKDPSAEDLQENHISESFLKPSTSETPLEPHTSESPLVPSPSQIPLEAHSPETHQEPSISETPSETPTY

SEQ ID NO: 90026 - protein, 119 aa, Homo sapiens
MKVRECISVHVGQAGVQMGNACWELYCLEHGIQPDGQMPSDKTIGGGDDSFTTFFCETGAGKHVPRAVFVDLEPTVIDEIRNGPYRQLFHPEQLITGKEDAANNYARGHYTIGKEIIDP

SEQ ID NO: 90027 - protein, 253 aa, Homo sapiens
VTCANLTNGGKSELLKSGSSKSTLKHIWTESSKDLSISRLLSQTFRGKENDTDLDLRYDTPEPYSEQDLWDWLRNSTDLQEPRPRAKRRPIVKTGKFKKMFGWGDFHSNIKTVKLNLLITGKIVDHGNGTFSVYFRHNSTGQGNVSVSLVPPTKIVEFDLAQQTVIDAKDSKSFNCRIEYEKVDKATKNTLCNYDPSKTCYQEQTQSHVSWLCSKPFKVICIYISFYSTDYKLVQKVCPDYNYHSDTPYFPSG

SEQ ID NO: 90028 - protein, 52 aa, Homo sapiens
MMCTPANTPATPPNFPDALTMFSRLKASESFHSGGSGSPMAATATSPPPHFP

SEQ ID NO: 90029 - protein, 468 aa, Homo sapiens
MQSNKTFNLEKQNHTPRKHHQHHHQQQHHQQQQQQPPPPPIPANGQQASSQNEGLTIDLKNFRKPGEKTFTQRSRLFVGNLPPDITEEEMRKLFEKYGKAGEVFIHKDKGFGFIRLETRTLAEIAKVELDNMPLRGKQLRVRFACHSASLTVRNLPQYVSNELLEEAFSVFGQVERAVVIVDDRGRPSGKGIVEFSGKPAARKALDRCSEGSFLLTTFPRPVTVEPMDQLDDEEGLPEKLVIKNQQFHKEREQPPRFAQPGSFEYEYAMRWKALIEMEKQQQDQVDRNIKEAREKLEMEMEAARHEHQVMLMRQDLMRRQEELRRMEELHNQEVQKRKQLELRQEEERRRREEEMRRQQEEMMRRQQEGFKGTFPDAEIRMGQMAMGGAMGINNRGAMPPAPVPAGTPAPPGPATMMPDGTLGLTPPTTERFGQAATMEGIGAIGGTPPAFNRAAPGAEFAPNKRRRY

SEQ ID NO: 90030 - protein, 29 aa, Homo sapiens
MREQLKGHETQTTCWDHPKMTELYQSLAQ

SEQ ID NO: 90031 - protein, 117 aa, Homo sapiens
MMLTQAPSSVVRSRNSRNHTVNSGGSCLSASTVAIPAINDSSAAMSACSTISAQPASSMDTQMHSPKKQERVNKRVIWGIEVAEELHWKGWELGKETTRNLVLKNRSLKLQKMKYRP

SEQ ID NO: 90032 - protein, 90 aa, Homo sapiens
MFCCLGYEWLSGGCKTWHSAWVINTLADHHHRGTDFGGSPWLHVIIAFPTSYKVVITLWIVYLWVSLLKTIFWSRNGHDGSTDVQQRAWR

SEQ ID NO: 90033 - protein, 70 aa, Homo sapiens
MPKAKGKTRRQKFGYSVNRKRLNRNARRKAAPRIECRVARLPRFFAEEEDGGGVTGLHHSCPRLRRPPDQ

SEQ ID NO: 90034 - protein, 755 aa, Homo sapiens
  MOD_RES (1)..(1): Any amino acid
XTPTASRRNSTIVLRTDSEKRSLAESGLSWFSESEEKAPKKLEYDSGSLKMEPGTSKWRRERPESCDDSSKGGELKKPISLGHPGSLKKGKTPPVAVTSPITHTAQSALKVAGKPEGKATDKGKLAVKNTGLQRSSSDAGRDRLSDAKKPPSGIARPSTSGSFGYKKPPPATGTATVMQTGGSATLSKIQKSSGIPVKPVNGRKTSLDVSNSAEPGFLAPGARSNIQYRSLPRPAKSSSMSVTGGRGGPRPVSSSIDPSLLSTKQGGLTPSRLKEPTKVASGRTTPAPVNQTDREKEKAKAKAVALDSDNISLKSIGSPESTPKNQASHPTATKLAELPPTPLRATAKSFVKPPSLANLDKVNSNSLDLPSSSDTTHASKVPDLHATSSASGGPLPSCFTPSPAPILNINSASFSQGLELMSGFSVPKETRMYPKLSGLHRSMESLQMPMSLPSAFPSSTPVPTPPAPPAAPTEEETEELTWSGSPRAGQLDSNQRDRNTLPKKGLRYQLQSQEETKERRHSHTIGGLPESDDQSELPSPPALPMSLSAKGQLTNIVSPTAATTPRITRSNSIPTHEAAFELYSGSQMGSTLSLAERPKGMIRSGSFRDPTDDVHGSVLSLASSASSTYSSQIRKLRRELESSQEKVATLTSQLSANANLVAAFEQSLVNMTSRLRHLAETAEEKDTELLDLRETIDFLKKKNSEAQAVIQGALNASETTPKELRIKRQNSSDSISSLNSITSHSSIGSSKDADA

SEQ ID NO: 90035 - protein, 128 aa, Homo sapiens; identical to SEQ ID NO: 44672
  MOD_RES (1)..(1): Any amino acid

SEQ ID NO: 90036 - protein, 2193 aa, Homo sapiens
MLRAFVQPGTPAYQPLPSHLSANTEVKFKGTLVHEAQLNYFYISPGGSNYGSPRPAHANMNANAAAGLAPEHIPTPGAALSWQAAIDAARQAKLMGSAGNATISTVSSTQRKRQQYGKPKKQGSTTATRPPRALLCLTLKNPIRRACISIVEWKPFEIIILLTIFANCVALAIYIPFPEDDSNATNSNLERVEYLFLIIFTVEAFLKVIAYGLLFHPNAYLRNGWNLLDFIIVVVGLFSAILEQATKADGANALGGKGAGFDVKALRAFRVLRPLRLVSGVPSLQVVLNSIIKAMVPLLHIALLVLFVIIIYAIIGLELFMGKMHKTCYNQEGIADVPAEDDPSPCALETGHGRQCQNGTVCKPGWDGPKHGITNFDNFAFAMLTVFQCITMEGWTDVLYWMQDAMGYELPWVYFVSLVIFGSFFVLNLVLGVLSGEFSKEREKAKARGDFQKLREKQQLEEDLKGYLDWITQAEDIDPENEDEGMDEEKPRNRGTPAGMLDQKKGKFAWFSHSTETHVSMPTSETESVNTENVAGGDIEGENCGARLAHRISKSKFSRYWRRWNRFCRRKCRAAVKSNVFYWLVIFLVFLNTLTIASEHYNQPNWLTEVQDTANKALLALFTAEMLLKMYSLGLQAYFVSLFNRFDCFVVCGGILETILVETKIMSPLGISVLRCVRLLRIFKITRYWNSLSNLVASLLNSVRSIASLLLLLFLFIIIFSLLGMQLFGGKFNFDEMQTRRSTFDNFPQSLLTVFQILTGEDWNSVMYDGIMAYGGPSFPGMLVCIYFIILFICGNYILLNVFLAIAVDNLADAESLTSAQKEEEEEKERKKLARTASPEKKQELVEKPAVGESKEEKIELKSITADGESPPATKINMDDLQPNENEDKSPYPNPETTGEEDEEEPEMPVGPRPRPLSELHLKEKAVPMPEASAFFIFSSNNRFRLQCHRIVNDTIFTNLILFFILLSSISLAAEDPVQHTSFRNHILFYFDIVFTTIFTIEIALKMTAYGAFLHKGSFCRNYFNILDLLVVSVSLISFGIQSSAINVVKILRVLRVLRPLRAINRAKGLKHVVQCVFVAIRTIGNIVIVTTLLQFMFACIGVQLFKGKLYTCSDSSKQTEAECKGNYITYKDGEVDHPIIQPRSWENSKFDFDNVLAAMMALFTVSTFEGWPELLYRSIDSHTEDKGPIYNYRVEISIFFIIYIIIIAFFMMNIFVGFVIVTFQEQGEQEYKNCELDKNQRQCVEYALKARPLRRYIPKNQHQYKVWYVVNSTYFEYLMFVLILLNTICLAMQHYGQSCLFKIAMNILNMLFTGLFTVEMILKLIAFKPKGYFSDPWNVFDFLIVIGSIIDVILSETNPAEHTQCSPSMNAEENSRISITFFRLFRVMRLVKLLSRGEGIRTLLWTFIKSFQALPYVALLIVMLFFIYAVIGMQVFGKIALNDTTEINRNNNFQTFPQAVLLLFRCATGEAWQDIMLACMPGKKCAPESEPSNSTEGETPCGSSFAVFYFISFYMLCAFLIINLFVAVIMDNFDYLTRDWSILGPHHLDEFKRIWAEYDPEAKGRIKHLDVVTLLRRIQPPLGFGKLCPHRVACKRLVSMNMPLNSDGTVMFNATLFALVRTALRIKTEGNLEQANEELRAIIKKIWKRTSMKLLDQVVPPAGDDEVTVGKFYATFLIQEYFRKFKKRKEQGLVGKPSQRNALSLQAGLRTLHDIGPEIRRAISGDLTAEEELDKAMKEAVSAASEDDIFRRAGGLFGNHVSYYQSDGRSAFPQTFTTQRPLHINKAGSSQGDTESPSHEKLVDSTFTPSSYSSTGSNANINNANNTALGRLPRPAGYPSTVSTVEGHGPPLSPAIRVQEVAWKLSSNRCHSRESQAAMAGQEETSQDETYEVKMNHDTEACSEPSLLSTEMLSYQDDENRQLTLPEEDKRDIRQSPKRGFLRSASLGRRASFHLECLKRQKDRGGDISQKTVLPLHLVHHQALAVAGLSPLLQRSHSPASFPRPFATPPATPGSRGWPPQPVPTLRLEGVESSEKLNSSFPSIHCGSWAETTPGGGGSSAARRVRPVSLMVPSQAGAPGRQFHGSASSLVEAVLISEGLGQFAQDPKFIEVTTQELADACDMTIEEMESAADNILSGGAPQSPNGALLPFVNCRDAGQDRAGGEEDAGCVRARGRPSEEELQDSRVYVSSL

SEQ ID NO: 90037 - protein, 599 aa, Homo sapiens
MELQPPEASIAVVSIPRQLPGSHSEAGVQGLSAGDDSETGSDCVTQAGLQLLASSDPPALASKNAEVTGTMSQDTEVDMKEVELNELEPEKQPMNAASGAAMSLAGAEKNGLVKIKVAEDEAEAAAAAKFTGLSKEELLKVAGSPGWVRTRWALLLLFWLGWLGMLAGAVVIIVRAPRCRELPAQKWWHTGALYRIGDLQAFQGHGAGNLAGLKGRLDYLSSLKVKGLVLGPIHKNQKDDVAQTDLLQIDPNFGSKEDFDSLLQSAKKKSIRVILDLTPNYRGENSWFSTQVDTVATKVKDALEFWLQAGVDGFQVRDIENLKDASSFLAEWQNITKGFSEDRLLIAGTNSSDLQQILSLLESNKDLLLTSSYLSDSGSTGEHTKSLVTQYLNATGNRWCSWSLSQARLLTSFLPAQLLRLYQLMLFTLPGTPVFSYGDEIGLDAAALPGQPMEAPVMLWDESSFPDIPGAVSANMTVKGQSEDPGSLLSLFRRLSDQRSKERSLLHGDFHAFSAGPGLFSYIRHWDQNERFLVVLNFGDVGLSAGLQASDLPASASLPAKADLLLSTQPGREEGSPLELERLKLEPHEGLLLRFPYAA

SEQ ID NO: 90038 - protein, 62 aa, Homo sapiens
MNEQHAKVYEQLDVTARELEETNQKLVADSKASQQKILSLTETIECLQTNIDHLQSQVEELK

SEQ ID NO: 90039 - protein, 258 aa, Homo sapiens
MGVFCLGPWGLGRKLRTPGKGPLQLLSRLCGDHLQAIPAKKAPAGQEEPGTPPSSPLSAEQLDRIQRNKAAALLRLAARNVPVGFGESWKKHLSGEFGKPYFIKLMGFVAEERKHYTVYPPPHQVFTWTQMCDIKDVKVVILGQDPYHGPNQAHGLCFSVQRPVPPPPSLENIYKELSTDIEDFVHPGHGDLSGWAKQGVLLLNAVLTVRAHQANSHKERGWEQFTDAVVSWLNQNSNGLVFLLWGSYAQKKGSAIDR

SEQ ID NO: 90040 - protein, 47 aa, Homo sapiens
MMSQSSGSGDGNDDEATTSKDGGLLNISHTAWFPILQILYFPFLLDC

SEQ ID NO: 90041 - protein, 149 aa, Homo sapiens
  MOD_RES (1)..(1): Any amino acid
XERKGSLTLRSHHKKYSKPVLVYSWHRDREAFPKGYDIEGPEKVKKLCNSTYRRLGTDESPIWTSETHEKLSQMCLNTEWVEMKSKALLNEETVSSGIIERVTGLPATGFGAVFPRHPPDWSKMLVVPKLLQLYKMFLDSEGLFAGAKV

SEQ ID NO: 90042 - protein, 140 aa, Homo sapiens
MSDHKPLLTAISPGRGYWRRQLDHISAHLRCYAQNNPEFRALIAEPRMGKLISATVHEDGCEVSIRLNYSQVSNKNLYLNKAVNFSDHLLSSAAEGDGGLCGSRSSWVSDYSQSTSDTIEKIKRIKNFKTKTFQEKKEQL

SEQ ID NO: 90043 - protein, 13 aa, Homo sapiens
MAEEKKLKLSNTV

SEQ ID NO: 90044 - protein, 56 aa, Homo sapiens
MSGELPPNINIKEPRWDQSTFIGRANHFFTVTDPRNILLTNEQLESARKIVHDYRK

SEQ ID NO: 90045 - protein, 788 aa, Homo sapiens
MSQSGAVSCCPGATNGSLGRSDGVAKMSPKDLFEQRKKYSNSNVIMHETSQYHVQHLATFIMDKSEAITSVDDAIRKLVQLSSKEKIWTQEMLLQVNDQSLRLLDIESQEELEDFPLPTVQRSQTVLNQLRYPSVLLLVCQDSEQSKPDVHFFHCDEVEAELVHEDIESALADCRLGKKMRPQTLKGHQEKIRQRQSILPPPQGPAPIPFQHRGGDSPEAKNRVGPQVPLSEPGFRRRESQEEPRAVLAQKIEKETQILNCALDDIEWFVARLQKAAEAFKQLNQRKKGKKKGKKAPAEGVLTLRARPPSEGEFIDCFQKIKLAINLLAKLQKHIQNPSAAELVHFLFGPLDLIVNTCSGPDIARSVSCPLLSRDAVDFLRGHLVPKEMSLWESLGESWMRPRSEWPREPQVPLYVPKFHSGWEPPVDVLQEAPWEVEGLASAPIEEVSPVSRQSIRNSQKHSPTSEPTPPGDALPPVSSPHTHRGYQPTPAMAKYVKILYDFTARNANELSVLKDEVLEVLEDGRQWWKLRSRSGQAGYVPCNILGEARPEDAGAPFEQAGQKYWGPASPTHKLPPSFPGNKDELMQHMDEVNDELIRKISNIRAQPQRHFRVERSQPVSQPLTYESGPDEVRAWLEAKAFSPRIVENLGILTGPQLFSLNKEELKKVCGEEGVRVYSQLTMQKAFLEGELELQAGQAEPRTHAEFCSLRGAREGLQQEAVGAIRGKVGERHTLHLQGPTTQGTPCRLQTLPAPTLTGPGLELSLAKFQANDPRMVLGVLVCLGAWT

SEQ ID NO: 90046 - protein, 134 aa, Homo sapiens
MNEVSVIKEGWLHKRGEYIKTWRPRYFLLKSDGSFIGYKERPEAPDQTLPPLNNFSVAECQLMKTERPRPNTFVIRCLQWTTVIERTFHVDSPDEREEWMRAIQMVANSLKQRAPGEDPMDYKCGSPSDSSTTE

SEQ ID NO: 90047 - protein, 133 aa, Homo sapiens
MLSRLFRMHGLFVASHPWEVIVGTVTLTICMMSMNMFTGNNKICGWNYECPKFEEDVLSSDIIILTITRCIAILYIYFQFQNLRQLGSKYILGIAGLFTIFSSFVFSTVVIHFLDKELTGLKWSFALVTQAGV

SEQ ID NO: 90048 - protein, 42 aa, Homo sapiens
  MOD_RES (1)..(1): Any amino acid
XPKKGQTCVVHYTASLVGMIKEAWKANSFPLLPARAIHGASF

SEQ ID NO: 90049 - protein, 104 aa, Homo sapiens
MATSGAASAELVIGWCIFGLLLLAILAFCWIYVRKYQSRRESEVVSTITAIFSLAIALITSALLPVDIFLVSYMKNQNGTFKDWANANVSRQIEDTVLYGYYTN

SEQ ID NO: 90050 - protein, 73 aa, Homo sapiens
MKLEEVVVTLQLGGDKEPTETIGDLSICLDGLQLESEVVTNGETTCSESASQNDDGSRSKDETRVSTNGSDDP

SEQ ID NO: 90051 - protein, 103 aa, Homo sapiens
MTPNSMTENGLTAWDKPKHCPDREHDWKLVGMSEACLHRKSHSERRSTLKNEQSSPHLIQTTWTSSIFHLDHDDVNDQSVSSAQTFQTEEKKCKGYIPSYLDK

SEQ ID NO: 90052 - protein, 226 aa, Homo sapiens
MSSPQAPEDGQGCGDRGDPPGDLRSVLVTTVLNLEPLDEDLFRGRHYWVPAKRLFGGQIVGQALVAAAKSVSEDVHVHSLHCYFVRAGDPKLPVLYQVERTRTGSSFSVRSVKAVQHGKPIFICQASFQQAQPSPMQHQFSMPTVPPPEELLDCETLIDQYLRDPNLQKRYPLALNRIAAQEVPIEIKPVNPSPLSQLQRMEPKQMFWVRARGYIGPELESPGAQG

SEQ ID NO: 90053 - protein, 49 aa, Homo sapiens
MEAMAASTSLPDPGDFDRNVPRICGVCGDRATGFHFNAMTCEGCKGFFR

SEQ ID NO: 90054 - protein, 131 aa, Homo sapiens
MCFSFIMPPAMADILDIWAVDSQIASDGSIPVDFLLPTGIYIQLEVPREATISYIKQMLWKQVHNYPMFNLLMDIDSYMFACVNQTAVYEELEDETRRLCDVRPFLPVLKLVTRSCDPGEKLDSKIGVLIG

SEQ ID NO: 90055 - protein, 314 aa, Homo sapiens
MMAQSNMFTVADVLSQDELRKKLYQTFKDRGILDTLKTQLRNQLIHELMHPVLSGELQPRSISVEGSSLLIGASNSLVADHLQRCGYEYSLSVFFPESGLAKEKVFTMQDLLQLIKINPTSSLYKSLVSGSDKENQKGFLMHFLKELAEYHQAKESCNMETQTSSTFNRDSLAEKLQLIDDQFADAYPQRIKFESLEIKLNEYKREIEEQLRAEMCQKLKFFKDTEIAKIKMEAKKKYEKELTMFQNDFEKACQAKSEALVLREKSTLERIHKHQEIETKEIYAQRQLLLKDMDLLRGREAELKQRVEAFEFLN

SEQ ID NO: 90056 - protein, 135 aa, Homo sapiens
DGSALEDSSTSGASCSKSRPHLAGTHTSLRLPQEGKGTCILVGGHEITSGLEVISSLRAIHGLQVEVCPLNGCDYIVSNRMVVERRSQSEMLNSVNKNKFIEQIQHLQSMFERICVIVEKDREKTVPAKKKPQIC

SEQ ID NO: 90057 - protein, 203 aa, Homo sapiens
  MOD_RES (1)..(1): Any amino acid
XLCLRTSGRWRPVWLEARGEGWGGPWSPVVDLLYWRDIKKTGVVFGASLFLLLSLTVFSIVSVTAYIALALLSVTISFRIYKGVIQAIQKSDEGHPFRAYLESEVAISEELVQKYSNSALGHVNCTIKELRRLFLVDDLVDSLKFAVLMWVFTYVGALFNGLTLLILALISLFSVPVIYERHQAQIDHYLGLANKNVKDAMAK

SEQ ID NO: 90058 - protein, 148 aa, Homo sapiens
MPLGHIMRLDLEKIALEYIVPCLHEVGFCYLDNFLGEVVGDCVLERVKQLHCTGALRDGQLAGPRAGVSKRHLRGDQITWIGGNEEGCEAISFLLSLIDRLVLYCGSRLGKYYVKERSKVGRARRPAAAAPAGTGGTRSPLYVDFPGP

SEQ ID NO: 90059 - protein, 21 aa, Homo sapiens
QRHNAEIAAFHLDREYGPAPL

SEQ ID NO: 90060 - protein, 144 aa, Homo sapiens
  MOD_RES (1)..(1): Any amino acid
XRKAVIVKVSASRDSASLHAGTRLAAAGRAGLEFKNIDDGTSDRPYSHALVAGIDRYPRKVTAAMGKKKIAKRSKIKSFVKVYNYNHLMPTRYSVDIPLDKTVVNKDVFRDPALKRKARREAKVKFEERYKTGKNKWFFQKLRF

SEQ ID NO: 90061 - protein, 199 aa, Homo sapiens
  MOD_RES (1)..(1): Any amino acid
XQCCLKVPVALAGHTGEFMCLVVVSDRRLYLLKVTGEMREPPASWLQLTLAVPLQDLSGIELGLAGQSLRLEWAAGAGRCVLLPRDARHCRAFLEELLDVLQSLPPAWRNCVSATEEEVTPQHRLWPLLEKDSSLEARQFFYLRAFLVEGEASVQLMLPWSLYPTLSQALAHAQHLYSALAATVSSWNLENLSLEGIAE

SEQ ID NO: 90062 - protein, 28 aa, Homo sapiens
MISTAPLYSGVHNWTSSDRIRMCGINEE

SEQ ID NO: 90063 - protein, 51 aa, Homo sapiens
MAAPLEAQDQAPGEGEGLLIVKVEDSSWEQESAQHEDGRDSEACRQRFRQF

SEQ ID NO: 90064 - protein, 35 aa, Homo sapiens
GACPGRRLRGPDTHRQSCYQCRCNRSTLGATDLPH

SEQ ID NO: 90065 - protein, 174 aa, Homo sapiens
MATSGAASAELVIGWCIFGLLLLAILAFCWIYVRKYQSRRESEVVSTITAIFSLAIALITSALLPVDIFLVSYMKNQNGTFKDWANANVSRQIEDTVLYGYYTLYSVILFCVFFWIPFVYFYYEEKDDDDTSKCTQIKTALKYTLGFVVICALLLLVGQVLLCPLDLLPLPQLH

SEQ ID NO: 90066 - protein, 63 aa, Homo sapiens
MGWLCSGLLFPVSCLVLLQVASSGNMKVLQEPTCVSDYMSISTCEWKMNGPTNCSTELRLLYQ

SEQ ID NO: 90067 - protein, 925 aa, Homo sapiens
MKGKERSPVKAKRSRGGEDSTSRGERSKKLGGSGGSNGSSSGKTDSGGGSRRSLHLDKSSSRGGSREYDTGGGSSSSRLHSYSSPSTKNSSGGGESRSSSRGGGGESRSSGAASSAPGGGDGAEYKTLKISELGSQLSDEAVEDGLFHEFKRFGDVSVKISHLSGSGSGDERVAFVNFRRPEDARAAKHARGRLVLYDRPLKIEAVYVSRRRSRSPLDKDTYPPSASVVGASVGGHRHPPGGGGGQRSLSPGGAALGYRDYRLQQLALGRLPPPPPPPLPRDLERERDYPFYERVRPAYSLEPRVGAGAGAAPFREVDEISPEDDQRANRTLFLGNLDITVTESDLRRAFDRFGVITEVDIKRPSRGQTSTYGFLKFENLDMSHRAKLAMSGKIIIRNPIKIGYGKATPTTRLWVGGLGPWVPLAALAREFDRFGTIRTIDYRKGDSWAYIQYESLDAAHAAWTHMRGFPLGGPDRRLRVDFADTEHRYQQQYLQPLPLTHYELVTDAFGHRAPDPLRGARDRTPPLLYRDRDRDLYPDSDWVPPPPPVRERSTRTAATSVPAYEPLDSLDRRRDGWSLDRDRGDRDLPSSRDQPRKRRLPEESGGRHLDRSPESDRPRKRHCAPSPDRSPELSSSRDRYNSDNDRSSRLLLERPSPIRDRRGSLEKSQGDKRDRKNSASAERDRKHRTTAPTEGKSPLKKEDRSDGSAPSTSTASSKLKSPSQKQDGGTAPVASASPKLCLAWQGMLLLKNSNFPSNMHLLQGDLQVASSLLVEGSTGGKVAQLKITQRLRLDQPKLDEVTRRIKVAGPNGYAILLAVPGSSDSRSSSSSAASDTATSTQRPLRNLVSYLKQKQAAGVISLPVGGNKDKENTGVLHAFPPCEFSQQFLDSPAKALAKSEEDYLVMIIVRAKLVEQRMKIWNSKL

SEQ ID NO: 90068 - protein, 121 aa, Homo sapiens
MEKEETTRELLLPNWQGSGSHGLTIAQRDDGVFVQEVTQNSPAARTGVVKEGDQIVGATIYFDNLQSGEVTQLLNTMGHHTVGLKLHRKGDRSPEPGQTWTREVFSSCSSEVVLNTPQPSA

SEQ ID NO: 90069 - protein, 77 aa, Homo sapiens
MLSRKKTKNEVSKPAEVQGKYVKKETSPLLRNASRCASCLQTLRVSLDCAASCANSGAEFLSPAAGCRLEKILCLHS

SEQ ID NO: 90070 - protein, 87 aa, Homo sapiens
MWLGTSGKSGLPGHCLENPLQECHPAQLEEWALKGISRPSVISQPEQKEEPWVLPLQNFEARKIPRESHTGPSRLCTSTFLHSIEIN

SEQ ID NO: 90071 - protein, 372 aa, Homo sapiens
MPRVKAAQAGRQSSAKRHLAEQFAVGEIITDMAKKEWKVGLPIGQGGFGCIYLADMNSSESVGSDAPCVVKVEPSDNGPLFTELKFYQRAAKPEQIQKWIRTRKLKYLGVPKYWGSGLHDKNGKSYRFMIMDRFGSDLQKIYEANAKRFSRKTVLQLSLRILDILEYIHEHEYVHGDIKASNLLLNYKNPDQVYLVDYGLAYRYCPEGVHKEYKEDPKRCHDGTIEFTSIDAHNGVAPSRRGDLEILGYCMIQWLTGHLPWEDNLKDPKYVRDSKIRYRENIASLMDKCFPEKNKPGEIAKYMETVKLLDYTEKPLYENLRDILLQGLKAIGSKDDGKLDLSVVENGGLKAKTITKSWLALIRPVHRQERCT

SEQ ID NO: 90072 - protein, 77 aa, Homo sapiens
MKKKTVCTLNMGDKKYEDMEGEENGDNTISTGLLYSEADRCPICLNCLLEKEVGFPESCNHVFCMTCILKWAEGLFT

SEQ ID NO: 90073 - protein, 372 aa, Homo sapiens
MLDNNTGSGNETGILSEDALLRISIPLDSNLRPEKCRRFVHPQWQLLHLNGTIHSTSEADTEPCVDGWVYDQSYFPSTIVTKWDLVCDYQSLKSVVQFLLLTGMLVGGIIGGHVSDRFGRRFILRWCLLQLAITDTCAAFAPTFPVYCVLRFLAGFSSMIIISNNSLPITEWIRPNSKALVVILSSGALSIGQIILGGLAYVFRDWQTLHVVASVPFFVFFLLSRWLVESARWLIITNKLDEGLKALRKVARTNGIKNAEETLNIEVVRSTMQEELDAAQTKTTVCDLFRNPSMRKRICILVFLRFANTIPFYGTMVNLQHVGSNIFLLQKCRPCVWLWHVWESAVLLLLFPVLLFTSLNSSPLFSGQELQE

SEQ ID NO: 90074 - protein, 289 aa, Homo sapiens
MAAGVDCGDGVGARQHVFLVSEYLKDASKKMKNGLMFVKLVNPCSGEGAIYLFNMCLQQLFEVKVFKEKHHSWFINQSVQSGGLLHFATPVDPLFLLLHYLIKADKEGKFQPLDQVVVDNVFPNCILLLKLPGLEKLLHHVTEEKGNPEIDNKKYYKYSKEKTLKWLEKKVNQTVAALKTNNVNVSSRVQSTAFFSGDQASTDKEEDYIRYAHGLISDYIPKELSDDLSKYLKLPEPSASLPNPPSKKIKLSDEPVEAKEDYTKFNTKDLKTEKVCGFRCSGVSFILSA

SEQ ID NO: 90075 - protein, 317 aa, Homo sapiens
MGLLLPLALCILVLCCGAMSPPQLALNPSALLSRGCNDSDVLAVAGFALRDINKDRKDGYVLRLNRVNDAQEYRRAISKKKIYMTCPDCPSSIPTDSSNHQVLEAATESLAKYNNENTSKQYSLFKVTRASSQWVVGPSYFVEYLIKESPCTKSQASSCSLQSSDSVPVGLCKGSLTRTHWEKFVSVTCDFFESQAPATGSENSAVNQKPTNLPKVEESQQKNTPPTDSPSKAGPRGSVQYLPDLDDKNSQEKGPQEAFPVHLDLTTNPQGETLDISFLFLEPMEEKLVVLPFPKEKARTAECPGPAQNASPLVLPP

SEQ ID NO: 90076 - protein, 57 aa, Homo sapiens
MGNSRSRVGRSFCSQFLPEEQAEIDQLFDALSSDKNSPNVSSKSFSLKALQKGTWSR

SEQ ID NO: 90077 - protein, 37 aa, Homo sapiens
MKPVSRRTLDWIYSVNSQEGWSCPFAMEMESQQTADA

SEQ ID NO: 90078 - protein, 90 aa, Homo sapiens
MASLQRSRVLRCCSCRLFQAHQVKKSVKWTCKACGEKQSFLQEKQPGWPRLTRMPTSGPVNWDWVSEERGWLTRLMVKALVLIVDAMSKS

SEQ ID NO: 90079 - protein, 905 aa, Homo sapiens
MTLTERLREKISRAFYNHGLLCASYPIPIILFGYFTLVPAIQEFCLFAVVGLVSDFFLQMLFFTTVLSIDIRRMELADLNKRLPPEACLPSAKPVGQPTRYERQLAVRPSTPHTITLQPSSFRNLRLPKRLRVVYFLARTRLAQRLIMAGTVVWIGILVYTDPAGLRNYLAAQVTEQSPLGEGALAPMPVPSGMLPPSHPDPAFSIFPPDAPKLPENQTSPGESPERGGPAEVVHDSPVPEVTWGPEDEELWRKLSFRHWPTLFSYYNITLAKRYISLLPVIPVTLRLNPREALEGRHPQDGRSAWPPPGPIPAGHWEAGPKGPGGVQAHGDVTLYKVAALGLATGIVLVLLLLCLYRVLCPRNYGQLGGGPGRRRRGELPCDDYGYAPPETEIVPLVLRGHLMDIECLASDGMLLVSCCLAGHVCVWDAQTGDCLTRIPRPGQRRDSGVGSGLEAQESWERLSDGGKAGPEEPGDSPPLRHRPRGPPPPSLFGDQPDLTCLIDTNFSAQPRSSQPTQPEPRHRAVCGRSRDSPGYDFSCLVQRVYQEEGLAAVCTPALRPPSPGPVLSQAPEDEGGSPEKGSPSLAWAPSAEGSIWSLELQGNLIVVGRSSGRLEVWDAIEGVLCCSSEEVSSGITALVFLDKRIVAARLNGSLDFFSLETHTALSPLQFRGTPGRGSSPASPVYSSSDTVACHLTHTVPCAHQKPITALKAAAGRLVTGSQDHTLRVFRLEDSCCLFTLQGHSGAITTVYIDQTMVLASGGQDGAICLWDVLTGSRVSHVFAHRGDVTSLTCTTSCVISSGLDDLISIWDRSTGIKFYSIQQDLGCGASLGVISDNLLVTGGQGCVSFWDLNYGDLLQTVYLGKNSEAQPARQILVLDNAAIVCNFGSELSLVYVPSVLEKLD

SEQ ID NO: 90080 - protein, 100 aa, Homo sapiens
LGINFLGRRLSLSITMGCTALFFLLLNICTSSAGLIGFLFMLRALVAANFNTVYIYTAEVLMSASILGALCLFSSVCVVCAISAFTLPIETKGRALQQIK

SEQ ID NO: 90081 - protein, 52 aa, Homo sapiens
MPTGDFDSKPSWADQVEEEGEDDKCVTSELLKGIPLATGDTSPEPELLPGGE

SEQ ID NO: 90082 - protein, 368 aa, Homo sapiens
  MOD_RES (1)..(1): Any amino acid
XGKITRQEFIDGILASKFPTTKLEMTAVADIFDRDGDGYIDYYEFVAALHPNKDAYRPTTDADKIEDEVTRQVAQCKCAKRFQVEQIGENKYRFGDSQQLRLVRILRSTVMVRVGGGWMALDEFLVKNDPCRARGRTNIELREKFILPEGASQGMTPFRSRGRRSKPSSRAASPTRSSSSASQSNHSCTSMPSSPATPASGTKTSLQFSRCYDKPWLVNSKAGTPIRDSHSPDLQLPTPEVIPSSGSKLKRPTPTFHSSRTSLAGDTSNSSSPASTGAKTNRADPKKSASRPGSRAGSRAGSRASSRRGSDASDFDLLETQSACSDTSESSAAGGQGNSRRGLNKPSKIPTMSKKTTTASPRTPGPKR

SEQ ID NO: 90083 - protein, 127 aa, Homo sapiens
MQMVPKFCFPFDVEREPPSPAVQHFTFALTDLAGNRRFGFCRLRAGTQSCLCILSHLPWFEVFYKLLNTVGDLLAQDQVTEAEELLQNLFQQSLSGPQASVGLELGSGVTVSSGQGIPPPTRGNSKP

SEQ ID NO: 90084 - protein, 258 aa, Homo sapiens
FFSLLATAILGAVSWQPTNGIFLSMFLIVLPLESMAHGLFHELGNCLGGTSVGYAIVIPTNFCSGHTHGTGEWALAGGDTLRLDTLIEWWREKNGSFCSRLIIVLDSENSTPWVKEVRKINDQYIAVQGAELIKTVDIEEADPPQLGDFTKDWVEYNCNSSNNICWTEKGRTVKAVYGVSKRWSDYTLHLPTGSDVAKHWMLHFPRITYPLVHLANWLCGLNLFWICKTCFRCLKRLKMSWFLPTVLDTGQGFKLVKS

SEQ ID NO: 90085 - protein, 238 aa, Homo sapiens
  MOD_RES (1)..(1): Any amino acid
XLLKEEKQRAKLQKMLPKLEEELKARIELWEQEHSKAFMVNGQKFMEYVAEQWEMHRLEKERAKQERQLKNKKQTETEMLYGSAPRTPSKRRGLAPNTPGKARKLNTTTMSNATANSSIRPIFGGTVYHSPVSRLPPSGSKPVAASTCSGKKTPRTGRHGANKENLELNGSILSGGYPGSAPLQRNFSINSVASTYSEFAKDPSLSDSSTVGLQDSLPPEENVFVCPKLRWPALLPKR

SEQ ID NO: 90086 - protein, 102 aa, Homo sapiens
MGTPKPRILPWLVSQLDLGQLEGVAWVNKSRTRFRIPWKHGLRQDAQQEDFGIFQAWAEATGAYVPGRDKPDLPTWKRNFRSALNRKEGLRLAEDRSKDPHD

SEQ ID NO: 90087 - protein, 130 aa, Homo sapiens
MQWVFKELSTEAGFPQTIITSTPDTPNFLSWMEDEAVLDRGASFLKHVCDEEEVEGHHTIYIGVHVPKSYRRRRRHKRKTGHKEKKEKERISENYSDKSDIENADESSSSILKPLISPAAERIRFILGEE

SEQ ID NO: 90088 - protein, 369 aa, Homo sapiens
MGLKKMKGLSYDEAFAMANDPLEGFHEVNLASPTSPDLLGVYESGTQEQTTSPSVIYRPHPSALSSVPIQANALDVSELPTQPVYSSPRRLNCAEISSISFHVTDPAPCSTSGVTAGLTKLTTRKDNYNAEREFLQGATITEACDGSDDIFGLSTDSLSRLRSPSVLEVREKGYERLKEELAKAQRELKLKDEECERLSKVRDQLGQELEELTASLFEEAHKMVREANIKQATAEKQLKEAQGKIDVLQAEVAALKTLVLSSSPTSPTQEPLPGGKTPFKKGHTRNKSTSSAMSGSHQDLSVIQPIVKDCKEADLSLYNEFRLWKDEPTMDRTCPFLDKIYQEDIFPCLTFSKIGFSCSGGCGKQYSKH

SEQ ID NO: 90089 - protein, 189 aa, Homo sapiens
MNNKFDALKDDDSGDHDQNEENSTQKDGEKEKTERDKNQSSSKRKVEQFWRFYSHMVRPGDLTGHSDFHLFKEGIKPMWEDDANKNGGKWIIRLRKGLASRCWENLILAMLGEQFMVGEEICGAVVSVRFQEDIISIWNKTASDQATTARIRDTLRRVLNLPPNTIMEYKTHTDSIKDNSSFRNTKITL

SEQ ID NO: 90090 - protein, 211 aa, Homo sapiens
  MOD_RES (1)..(1): Any amino acid
XLLSACLAPARPCSARGALSPPGIPFTASLSIGGVSKDPFPLGMAQPGVSVKSLVSSYETRVVGMAPGLPRKRGCASSPCSPRGASPIRGTSGPPPHRGLGGPGQRPSTRRGMDKTLLSLILYCHSGSGSLVGIDNKIEQAMDLVKSHLMFAVREEVEVLKEQIRELAERNAALEQENGLLRALASPEQLAQLPSSGVPRLGPPAPNGPSV

SEQ ID NO: 90091 - protein, 1019 aa, Homo sapiens
MRRFLRPGHDPVRERLKRDLFQFNKTVEHGFPHQPSALGYSPSLRILAIGTRSGAIKLYGAPGVEFMGLHQENNAVTQIHLLPGQCQLVTLLDDNSLHLWSLKVKGGASELQEDESFTLRGPPGAAPSATQITVVLPHSSCELLYLGTESGNVFVVQLPAFRALEDRTISSDAVLQRLPEEARHRRVFEMVEALQEHPRDPNQILIGYSRGLVVIWDLQGSRVLYHFLSSQQLENIWWQRDGRLLVSCHSDGSYCQWPVSSEAQQPEPLRSLVPYGPFPCKAITRILWLTTRQGLPFTIFQGGMPRASYGDRHCISVIHDGQQTAFDFTSRVIGFTVLTEADPAATFDDPYALVVLAEEELVVIDLQTAGWPPVQLPYLASLHCSAITCSHHVSNIPLKLWERIIAAGSRQNAHFSTMEWPIDGGTSLTPAPPQRDLLLTGHEDGTVRFWDASGVCLRLLYKLSTVRVFLTDTDPNENFSAQGEDEWPPLRKVGSFDPYSDDPRLGIQKIFLCKYSGYLAVAGTAGQVLVLELNDEAAEQAVEQVEADLLQDQEGYRWKGHERLAARSGPVRFEPGFQPFVLVQCQPPAVVTSLALHSEWRLVAFGTSHGFGLFDHQQRRQVFVKCTLHPSDQLALEGPLSRVKSLKKSLRQSFRRMRRSRVSSRKRHPAGPPGEAQEGSAKAERPGLQNMELAPVQRKIEARSAEDSFTGFVRTLYFADTYLKDSSRHCPSLWAGTNGGTIYAFSLRVPPAERRMDEPVRAEQAKEIQLMHRAPVVGILVLDGHSVPLPEPLEVAHDLSKSPDMQGSHQLLVVSEEQFKVFTLPKVSAKLKLKLTALEGSRVRRVSVAHFGSRRAEDYGEHHLAVLTNLGDIQVVSLPLLKPQVRYSCIRREDVSGIASCVFTKYGQGFYLISPSEFERFSLSTKWLVEPRCLVDSAETKNHRPGNGAGPKKAPSRARNSGTQSDGEEKQPGLVMERALLSDERVLKEIQSTLEGDRGSGNWRSHRAAVGCSLSNGGE

SEQ ID NO: 90092 - protein, 2347 aa, Homo sapiens
MRILKRFLACIQLLCVCRLDWANGYYRQQRKLVEEIGWSYTGALNQKNWGKKYPTCNSPKQSPINIDEDLTQVNVNLKKLKFQGWDKTSLENTFIHNTGKTVEINLTNDYRVSGGVSEMVFKASKITFHWGKCNMSSDGSEHSLEGQKFPLEMQIYCFDADRFSSFEEAVKGKGKLRALSILFEVGTEENLDFKAIIDGVESVSRFGKQAALDPFILLNLLPNSTDKYYIYNGSLTSPPCTDTVDWIVFKDTVSISESQLAVFCEVLTMQQSGYVMLMDYLQNNFREQQYKFSRQVFSSYTGKEEIHEAVCSSEPENVQADPENYTSLLVTWERPRVVYDTMIEKFAVLYQQLDGEDQTKHEFLTDGYQDLGAILNNLLPNMSYVLQIVAICTNGLYGKYSDQLIVDMPTDNPELDLFPELIGTEEIIKEEEEGKDIEEGAIVNPGRDSATNQIRKKEPQISTTTHYNRIGTKYNEAKTNRSPTRGSEFSGKGDVPNTSLNSTSQPVTKLATEKDISLTSQTVTELPPHTVEGTSASLNDGSKTVLRSPHMNLSGTAESLNTVSITEYEEESLLTSFKLDTGAEDSSGSSPATSAIPFISENISQGYIFSSENPETITYDVLIPESARNASEDSTSSGSEESLKDPSMEGNVWFPSSTDITAQPDVGSGRESFLQTNYTEIRVDESEKTTKSFSAGPVMSQGPSVTDLEMPHYSTFAYFPTEVTPHAFTPSSRQQDLVSTVNVVYSQTTQPVYNGETPLQPSYSSEVFPLVTPLLLDNQILNTTPAASSSDSALHATPVFPSVDVSFESILSSYDGAPLLPFSSASFSSELFRHLHTVSQILPQVTSATESDKVPLHASLPVAGGDLLLEPSLAQYSDVLSTTHAASETLEFGSESGVLYKTLMFSQVEPPSSDAMMHARSSGPEPSYALSDNEGSQHIFTVSYSSAIPVHDSVGVTYQGSLFSGPSHIPIPKSSLITPTASLLQPTHALSGDGEWSGASSDSEFLLPDTDGLTALNISSPVSVAEFTYTTSVFGDDNKALSKSEIIYGNETELQIPSFNEMVYPSESTVMPNMYDNVNKLNASLQETSVSISSTKGMFPGSLAHTTTKVFDHEISQVPENNFSVQPTHTVSQASGDTSLKPVLSANSEPASSDPASSEMLSPSTQLLFYETSASFSTEVLLQPSFQASDVDTLLKTVLPAVPSDPILVETPKVDKISSTMLHLIVSNSASSENMLHSTSVPVFDVSPTSHMHSASLQGLTISYASEKYEPVLLKSESSHQVVPSLYSNDELFQTANLEINQAHPPKGRHVFATPVLSIDEPLNTLINKLIHSDEILTSTKSSVTGKVFAGIPTVASDTFVSTDHSVPIGNGHVAITAVSPHRDGSVTSTKLLFPSKATSELSHSAKSDAGLVGGGEDGDTDDDGDDDDDDRGSDGLSIHKCMSCSSYRESQEKVMNDSDTHENSLMDQNNPISYSLSENSEEDNRVTSVSSDSQTGMDRSPGKSPSANGLSQKHNDGKEENDIQTGSALLPLSPESKAWAVLTSDEESGSGQGTSDSLNENETSTDFSFADTNEKDADGILAAGDSEITPGFPQSPTSSVTSENSEVFHVSEAEASNSSHESRIGLAEGLESEKKAVIPLVIVSALTFICLVVLVGILIYWRKCFQTAHFYLEDSTSPRVISTPPTPIFPISDDVGAIPIKHFPKHVADLHASSGFTEEFEEVQSCTVDLGITADSSNHPDNKHKNRYINIVAYDHSRVKLAQLAEKDGKLTDYINANYVDGYNRPKAYIAAQGPLKSTAEDFWRMIWEHNVEVIVMITNLVEKGRRKCDQYWPADGSEEYGNFLVTQKSVQVLAYYTVRNFTLRNTKIKKGSQKGRPSGRVVTQYHYTQWPDMGVPEYSLPVLTFVRKAAYAKRHAVGPVVVHCSAGVGRTGTYIVLDSMLQQIQHEGTVNIFGFLKHIRSQRNYLVQTEEQYVFIHDTLVEAILSKETEVLDSHIHAYVNALLIPGPAGKTKLEKQFQGLTLSPRLECRGTISAHCNLPLPGLTDPPTSASRVARTILLSQSNIQQSDYSAALKQCNREKNRTSSIIPVERSRVGISSLSGEGTDYINASYIMGYYQSNEFIITQHPLLHTIKDFWRMIWDHNAQLVVMIPDGQNMAEDEFVYWPNKDEPINCESFKVTLMAEEHKCLSNEEKLIIQDFILEATQDDYVLEVRHFQCPKWPNPDSPISKTFELISVIKEEAANRDGPMIVHDEHGGVTAGTFCALTTLMHQLEKENSVDVYQVAKMINLMRPGVFADIEQYQFLYKVILSLVSTRQEENPSTSLDSNGAALPDGNIAESLESLV

SEQ ID NO: 90093 - protein, 139 aa, Homo sapiens
MQLITDIPLLDITYEISVEAISTMVVFLSCQLFHKEVLRQSISHKYLMRGPCLPYTSKLVKTLLYNFIRQEKPPPPGAHVFPQQSDGGGLLYGLASGVATGLWTVFTLGGVGSKAAASPELSSPLANQSLLLLLVLANL

SEQ ID NO: 90094 - protein, 208 aa, Homo sapiens
MATTKRVLYVGGLAEEVDDKVLHAAFIPFGDITDIQIPLDYETEKHRGFAFVEFELAEDAAAAIDNMNESELFGRTIRVNLAKPMRIKEGSSRPVWSDDDWLKKFSGKTLEENKEEEGSEPPKAETQERISAACALMKRALALREAASTASSPSSCARAVISQTTMALGASPSMGRSSMMKTLSSSIRDQVYYPWPTLAQTPMALSSS

SEQ ID NO: 90095 - protein, 238 aa, Homo sapiens
VLRLQLESDRHDLLRSTSMHERVNRTERQFRSLPANQQKLLPQFLLHLDKIRKCIDHNQEILLTIVNDCIHMFENKEYGEDGNGKIMPASTFDMDKLKSTLKQFVRDWSETGKAERDACYQPIIKEILKNFPKERWDPSKVNILVPGAGLGRLAWEIAMLGYACQGNEWSFFMLFSSNFVLNRCSEINKYKLYPWIHQFSNNRRSADQIRPIFFPDVDPHSLPPGSNFSMTAGDFQEI

SEQ ID NO: 90096 - protein, 118 aa, Homo sapiens
MEKKWKYCAVYYIIQIHFVKGVWEKTVNTEENVYATLGSDVNLTCQTQTVGFFVQMQWSKVTNKIDLIAVYHPQYGFYCAYGRPCESLVTFTETPENGSKWTLHLRNMSCSVSGSYSR

SEQ ID NO: 90097 - protein, 66 aa, Homo sapiens
MQPLTKDAGMSLSSVTLASALQVRGEALSEEEIWSLLFLAAEQLLEDLRNAPAALRAPALHPADHV

SEQ ID NO: 90098 - protein, 738 aa, Homo sapiens
MQFLHKLILNHNPLTTVEDPYLFKLPALKYLDMGTTLVPLTTLKNILMMTVELEKLILPSHMACCLCQFKNSIEAVCKTVKLHCNSACLTNTTHCPEEASVGNPEGAFMKVLQARKNYTSTELIVEPEEPSDSSGINLSGFGSEQLDTNDESDFISTLRYILPYFSAVNLDVKSLLLPLIKLPTTGNSLAKIQTVGQNRQRVKRVLMGPRSIQKRHFKEVGRQSIRREQGAQASVENAAEEKRLGSPAPREVEQPHTQQGPEKLAGNAVYTKPSFTQEHKAAVSVLKPFSKGAPSTSSPAKALPQVRDRWKDLTHAISTLESAKARVTNTKTSKPIVHARKKYRFHKTRSHVTHRTPKVKKSPKVRKKSYLSRLMLANRLPFSAAKSLINSPSQGAFSSLGDLSPQENPFLEVSAPSEHFIEKNNTKHTTARNAFEENDFMENTNMPEGTISENTNYNHPPEADSAGTAFNLGPTVKQTETKWEYNNVGTDLSPEPKSFNYPLLSSPGDQFEIQLTQQLQSLIPNNNVRRLIAHVIRTLKMDCSGAHVQVTCAKLISRTGHLMKLLSGQQEVKASKIEWDTDQWKIENYINESTEAQSEQKEKSLELKKEVPGYGYTDKLILALIVTGILTILIILFCLIVICCHRRSLQEDEEGFSRGIFRFLPRRGCSSRRESQDGLSSFGQPLWFKDMYKPLSATRINNHAWKLHKKSSNEDKILNRDPGDSEAPTEEEESEALP

SEQ ID NO: 90099 - protein, 417 aa, Homo sapiens
MKQQKNLEGYVGFANLPNQVYRKSVKRGFEFTLMVVGESGLGKSTLINSLFLTDLYSPEYPGPSHRIKKTVQVEQSKVLIKEGGVQLLLTIVDTPGFGDAVDNSNCWQPVIDYIDSKFEDYLNAESRVNRRQMPDNRVQCCLYFIAPSGHGLKPLDIEFMKRLHEKVNIIPLIAKADTLTPEECQQFKKQIMKEIQEHKIKIYEFPETDDEEENKLVKKIKDRLPLAVVGSNTIIEVNGKRVRGRQYPWGVAEVENGEHCDFTILRNMLIRTHMQDLKDVTNNVHYENYRSRKLAAVTYNGVDNNKNKGQLTKSPLAQMEEERREHVAKMKKMEMEMEQVFEMKVKEKVQKLKDSEAELQRRHEQMKKNLEAQHKELEEKRRQFEDEKANWEAQQRILEQQNSSRTLEKNKKKGKIF

SEQ ID NO: 90100 - protein, 203 aa, Homo sapiens
MDPQRSPLLEVKGNIELKRPLIKAPSQLPLSGSRLKRRPDQMEDGLEPEKKRTRGLGATTKITTSHPRVPSLTTVPQTQGQTTGPSSHPLPWQCHHQPFLVTDPGGRSWGPGQKWHRLHLWCTSAQKVSKKTGPRCSTAIATGLKNQKPVPAVPVQKSGTSGVPPMAGGKKPSKRPAWDLKGQLCDLNAELKRCRERTQTLDQ

SEQ ID NO: 90101 - protein, 141 aa, Homo sapiens; identical to SEQ ID NO: 73871
  MOD_RES (1)..(1): Any amino acid

SEQ ID NO: 90102 - protein, 776 aa, Homo sapiens
MPTAAAPIISSVQKLVLYETRARYFLVGSNNAETKYRVLKIDRTEPKDLVIIDDRHVYTQQEVRELLGRLDLGNRTKMGQKGSSGLFRAVSAFGVVGFVRFLEGYYIVLITKRRKMADIGGHAIYKVEDTNMIYIPNDSVRVTHPDEARYLRIFQNVDLSSNFYFSYSYDLSHSLQYNLTVLRMPLEMLKSEMTQNRQESFDIFEDEGLITQGGSVDQADPFAHVAALHFDQMFQRFGSPIIILNLVKEREKRKHERILSEELVAAVTYLNQFLPPEHTIVYIPWDMAKYTKSKLCNVLDRLNVIAESVVKKTGFFVNRPDSYCSILRPDEKWNELGGCVIPTGRLQTGILRTNCVDCLDRTNTAQFMVGKCALAYQLYSLGLIDKPNLQFDTDAVRLFEELYEDHGDTLSLQYGGSQLVHRVKTYRKIAPWTQHSKDIMQTLSRYYSNAFSDADRQDSINLFLGVFHPTEGKPHLWELPTDFYLHHKNTMRLLPTRRSYTYWWTPEVIKHLPLPYDEVICAVNLKKLIVKKFHKYEEEIDIHNEFFRPYELSSFDDTFCLAMTSSARDFMPKTVGIDPSPFTVRKPDETGKSVLGNKSNREEAVLQRKTAASAPPPPSEEAVSSSSEDDSGTDREEEGSVSQRSTPVKMTDAGDSAKVTENVVQPMKELYGINLSDGLSEEDFSIYSRFVQLGQSQHKQDKNSQQPCSRCSDGVIKLTPISAFSQDNIYEVQPPRVDRKSTEIFQAHIQASQGIMQPLGKEDSSMYREYIRNRYL

SEQ ID NO: 90103 - protein, 58 aa, Homo sapiens
MEETKEAMSEMLRHPRISGKPILVNHVQQSRGMERKLTSPLKKAFIGCYMLLQETLMP

SEQ ID NO: 90104 - protein, 91 aa, Homo sapiens
VFLQHLSPLLSLSTFAALWLTILDFMDKYMHAGSSDLLMHGEAAPRPSGRSPGNALTVFSLTYEMNSSSRPSSRTPCPWSLKAKSLSPQPT

SEQ ID NO: 90105 - protein, 661 aa, Homo sapiens
MAAGGSGCTSSAGGGGRGVNPRRTGFESILEGLFGPALLKDLSLFKDCEPESISDWTFDENCLFCCLRRDKVKGHLVGLDEPASGAGQEALLKQEQAKIIRFERQAEEFLNAVFYRKDSPWVSDPNIPLVAREIMQRMIQQFAAEYTSKNSSTQDPSQPNSTKNQSLPKASPVTTSPTAATTQNPVLSKLLMADQDSPLDLTVRKSQSEPSEQDGVLDLSTKKSPCAGSTSLSHSPGCSSTQGNGENSTEAKAVDSNNQSKSPLEKFMVKLCTHHQKQFIRVLNDLYTESQPGTEDLQPSDSGAMDVSTCNAGCAQLSTKHKEKDALCLDMKSSASVDLFVDSSDSHSPLHLTEQTPKKPPPEINPVDGRENALTVVQKDSSELPTTKSNSINSSSVDSFTPGYLTASNCSSVNFHHIPKILEGQTTGQEQDTNVNICEDGKDHMQSSALVESLITVKMAAENSEEGNTCIIPQRNLFKALSEEAWNSGFMGNSSRTADKENTLQCPKTPLRQDLEANEQDARPKQENHLHSLGRNKVGYHLHPSDKGQFDHSKDGWLGPGPMPAVHKAANGHSRTKMISTSIKTARKSKRASGLRINDYDNQCDVVYISQPITECHFENQKSILSSRKTARKSTRGYFFNGDCCELPTVRTLARNLHSQE

SEQ ID NO: 90106 - protein, 31 aa, Homo sapiens
  MOD_RES (1)..(1): Any amino acid
XHETQTTCWDHPKMTELYQSLVTSSTEVLNP

SEQ ID NO: 90107 - protein, 420 aa, Homo sapiens
MWWRDLTRLRLWLKREAIPGEGRKAAKVNAGVGEKGIYTASSRGGPPSARSKAVTVVAEGAASRSWLSMDAPELGPGLVERLEQLATCPLCGGSFEDPVLLACEHSFCRACLARRWGTPPATGTEASPTACPCCGLPCPRRSLRSNVRLAVEVRISRELREKLAEPGARAGRRRGGRIPTMGCLDLPGEDMRKTWRRFEVPTPKSSNSEDDLPEDYPVVKKMLHRLTADLTLDPGTAHRRLLISTDRRSVQLAPPGTPAPPDGPKRFDQLPAVLGAQGFGAGRHCWEVETADAASCRDSSGEDEDDEESHYAVGAAGESVQRKGCVRLCPAGAVWAVEGRGGRLWALTAPEPTLLGGVEPPPRRIRVDLDWERGRVAFYDGRSLDLLYAFQAPGPLGERIFPLFCTCDPRAPLRIVPAES

SEQ ID NO: 90108 - protein, 25 aa, Homo sapiens
MNLPPDRPGLLSLSVRDSQPGVWET

SEQ ID NO: 90109 - protein, 24 aa, Homo sapiens
  MOD_RES (1)..(1): Any amino acid
XLTETPTSSDWQSTDATPTLTNSS

SEQ ID NO: 90110 - protein, 185 aa, Homo sapiens; identical to SEQ ID NO: 88787
  MOD_RES (1)..(1): Any amino acid

SEQ ID NO: 90111 - protein, 748 aa, Homo sapiens
MHLEGRDGRRYPGAPAVELLQTSVPSGLAELVAGKRRLPRGAGGADPSHSCPRGAAGQSSWAPAGQEFASFLTKGRSHSSLPQMSSSRSKDSCFTENTPLLRNSLQEKGSRCIPVYHPEFITAEESWEDSSADWERRYLLSREVSGLSASASSEKGDLLDSPHIRLRLSKLRRCVQWLKVMGLFAFVVLCSILFSLYPDQGKLWQLLALSPLENYSVNLSSHVDSTLLQVDLAGALVASGPSRPGREEHIVVELTQADALGSRWRRPQQVTHNWTVYLNPRRSEHSVMSRTFEVLTRETVSISIRASLQQTQAVPLLMAHQYLRGSVETQVTIATAILAGVYALIIFEIVHRTLAAMLGSLAALAALAVIGDRPSLTHVVEWIDFETLALLFGMMILVAIFSETGFFDYCAVKAYRLSRGRVWAMIIMLCLIAAVLSAFLDNVTTMLLFTPVTIRLCEVLNLDPRQVLIAEVIFTNIGGAATAIGDPPNVIIVSNQELRKMGLDFAGFTAHMFIGICLVLLVCFPLLRLLYWNRKLYNKEPSEIVELKHEIHVWRLTAQRISPASREETAVRRLLLGKVLALEHLLARRLHTFHRQISQEDKNWETNIQELQKKHRISDGILLAKCLTVLGFVIFMFFLNSFVPGIHLDLGWIAILGAIWLLILADIHDFEIILHRVEWATLLFFAALFVLMEALAHLHLIEYVGEQTALLIKMVPEEQRLIAAIVLVVWVSALASSLIDNIPFTATM

SEQ ID NO: 90112 - protein, 159 aa, Homo sapiens
MYCCSAQDSKMDYKRRFLLGGSKQKVQQHQQYPMPELGRALSAPLASTATTAPLGSLTAAGSCHHAMPHTTPIADIQQGISKYLDALNVFCRASTFLTDLFSTVFRNSHYSKAATQLKDVQEHVMEAASRLTSAIKPEIAKMLMELSAGAANFTDQKEF

SEQ ID NO: 90113 - protein, 328 aa, Homo sapiens; identical to SEQ ID NO: 78693
  MOD_RES (1)..(1): Any amino acid

SEQ ID NO: 90114 - protein, 98 aa, Homo sapiens
MDASLEKIADPTLAEMGKNLKEAVKMLEDSQRRTEEENGKKLISGDIPGPLQGRIQNIGEQGHMALLGHSLGAYISTLDKEKLRKLTTRILSDTTLWL

SEQ ID NO: 90115 - protein, 115 aa, Homo sapiens
MPTVLKLLRFKNVSMKPALELFWKTLTVEYVIQMNNFKKYSVADYNLKNYGSPQVNLLKYFKLYKSAVEVSTTQCGFSFRCDFYLNSDIRNHVLDLPCSSQSALHCCGYMEMLNK

SEQ ID NO: 90116 - protein, 228 aa, Homo sapiens
MLYFQLVIMAGTVLLAYYFECTDTFQVHIQGFFCQDGDLMKPYPGTEEESFITPLVLYCVLAATPTAIIFIGEISMYFIKSTRESLIAQEKTILTGECCYLNPLLRRIIRFTGVFAFGLFATDIFVNAGQVVTGHLTPYFLTVCKPNYTSADCQAHHQFINNGNICTGDLEVIEKARRSFPSKHAALSIYSALYATMYITSTIKTKSSRLAKPVLCLGTLCTAFLTGL

SEQ ID NO: 90117 - protein, 72 aa, Homo sapiens
MAAQALALLREVARLEAPLEELRALHSVLQAVPLNELRQQAAELRLGPLFSLLNENHRLEELLKILMLLLRF

SEQ ID NO: 90118 - protein, 309 aa, Homo sapiens
MAAGNHSTVTEFILKGLTKRADLQLPLFLLFLGIYLVTIVGNLGMITLICLNSQLHTPMYYFLSNLSLMDLCYSSVITPKMLVNFVSEKNIISYAGCMSQLYFFLVFVIAECYMLTVMAYDRYVAICHPLLYNIIMSHHTCLLLVAVVYAIGLIGSTIETGLMLKLPYCEHLISHYFCDILPLMKLSCSSTYDVEMTVFFSAGFNIIVTSLTVLVSYTFILSSILGISTTEGRSKAFSTCSSHLAAVGMFYGSTAFMYLKPSTISSLTQENVASVFYTTVIPMLNPLIYSLRNKEVKAAVQKTLRGKLF

SEQ ID NO: 90119 - protein, 10 aa, Homo sapiens
VLRFLEWLLY

SEQ ID NO: 90120 - protein, 238 aa, Homo sapiens
SSAEGAPPPGPAPPPATSHPRVIRISHQSVEPVVMMHMNIQGPLSLSPCPDSGTQPGGVPSAPTGPLGPPGHGQTLGQQVPGFPTAPTRVVIARPTPPQARPSHPGGPPVSGTLQGAGLGTNASLAQMVSGLVGQLLMQPVLVAQGTPGMAPPPAPATASASAGTTNTATTAGPAPGGPAQPPPTPQPSMADLQFSQLLGNLLGPAGPGAGGSGVASPTITVAMPGVPAFLQGMTDFL

SEQ ID NO: 90121 - protein, 124 aa, Homo sapiens
MSDSKCDSQFYSVQVADSTFTVLKRYQQLKPIGSGAQGIVWRHHCSALPFIGRMRPVSVIVTPWINQEGMLCEGLGWPSLPWCLTSTVCPAQNVRIVSLTLNVSLLHGKTVSRRSITGQLKCCI

SEQ ID NO: 90122 - protein, 35 aa, Homo sapiens
MLFPTSAQESSRGLPDANDLCLGLQSLSLTGWDRP

SEQ ID NO: 90123 - protein, 270 aa, Homo sapiens
MLRRALLCLAVAALVRADAPEEEDHVLVLRKSNFAEALAAHKYLLVEFYAPWCGHCKALAPEYAKAAGKLKAEGSEIRLAKVDATEESDLAQQYGVRGYPTIKFFRNGDTASPKEYTAGREADDIVNWLKKRTGPAATTLPDGAAAESLVESSEVAVIGFFKDVESDSAKQFLQAAEAIDDIPFGITSNSDVFSKYQLDKDGVVLFKKFDEGRNNFEGEVTKENLLDFIKHNQLPLVIEFTEQPRRFLEVKSRLTSCCSCPRVCLTMTAN

SEQ ID NO: 90124 - protein, 625 aa, Homo sapiens
MWGMLNRKAQVTGSTLNGRKEKIQAEEGDKEKWDFLQFAEAWTPNDSSEELRKEALFTHFEKEKQHDIRSFFVPQPKKRQLMTSCDESKRFREENTVVSSDPTKTAARDIIDYESDVEPETKRLKLAASEDHCSPSEETPSQSKQIRTPLVESVQEAKAQLTTPAFPVEGWQCSLCTYINNSELPYCEMCETPQGSAVMQIDSLNHIQDKNEKDDSQKDTSKKVQTISDCEKQALAQSEPGQLADSKEETPKIEKEDGLTSQPGNEQWKSSDTLPVYDTLMFCASRNTDRIHIYTKDGKQMSCNFIPLDIKLDLWEDLPASFQLKQYRSLILRFVREWSSLTAMKQRIIRKSGQLFCSPILALEEITKQQTKQNCTKRYITKEDVAVASMDKVKNVGGHVRLITKESRPRDPFTKKLLEDGACVPFLNPYTVQADLTVKPSTSKGYLQAVDNEGNPLCLRCQQPTCQTKQACKANSWDSRFCSLKCQEEFWIRSNNSYLRAKVFETEHGVCQLCNVNAQELFLRLRDAPKSQRKNLLYATWTSKLPLEQLNEMIRNPGEGHFWQVDHIKPVYGGGGQCSLDNLQTLCTVCHKERTARQAKERSQVRRQSLASKHGSDITRFLVKK

SEQ ID NO: 90125 - protein, 90 aa, Homo sapiens
MSLSFHLPSRRMKNPSIVGVLCTDSQGLNLGCRGTLSDEHAGVISVLAQQAAKLTSDPTDIPVVCLESDNGNIMIQKHDGITVAVHKMAS

SEQ ID NO: 90126 - protein, 63 aa, Homo sapiens
MYQVIQGIISPVNDTYGKKDLAASHHRVAMARLALQTSDWIRVDPWESEQAQWMETVKVLSCA

SEQ ID NO: 90127 - protein, 35 aa, Homo sapiens
MVYYPELFVWVSQEPFPNKDMEGRLPKLRKKNRIH

SEQ ID NO: 90128 - protein, 648 aa, Homo sapiens
MWPQARLPPHPAMAEETRQSKLAAAKRKLKEYWQRNSPGVPAGAKRNRKTNGSIHETATSGGCHSPGDSATGIHGESPTSSATLKDLESPCQELAVVPDSRSVKVSQLKNTIKSLKQQNKQVEHQLEEEKKANNEKQKAERELEVQIQRLNIQKGKLNTDLYHTKRSLRYFEEESKDLAVRLQHSLQRKGELERALSAVTATQKKKAERQFSSRSKARMEWKLEQSMREQALLKAQLTQLKESLKEVQLERDEYAEHLKGERARWQQRMRKMSQEVCSLKKEKKHDKYRVEKLERSLSKLKHQMAEPLPPEPPAVPSEVELQHLRKELERVAGELQAQVEYNQRISLLNEGQKERLREQEERLQEQQERLPEQEERLQQLAEPQNSFKELNNENKSVLQLEQQVKELQEKLGKERLEAASQQKQQLTAQLSLMALPGEGDGGGHLDSEGEEAPRPIPSIPQDLESREAMSGFMDHLEEKADLSELVEKEELGFFQYYRERCHQKVYHPITKPGGSAKDAAPGGGHHQAGPGQGGDEGEAAGAAGDGVAAGGDYKGHSKFLVTAQNPAHEPSPGAPAPQELGAAHKHGDLCEVSLTDSVEPVQGEAREGSPHDNPTAQPIVQDHQEHPGLGSNCCVPFFCWAWLPRRRR

SEQ ID NO: 90129 - protein, 100 aa, Homo sapiens
MGTSSIFLCVLFLCGALGLTMSPARGRLRCYICGFTKPCHPVPTECRDDEACGISIGTSGRTLVQWPFSRRLPTSIHPAFPVAPASACLFHPTDQSEITE

SEQ ID NO: 90130 - protein, 56 aa, Homo sapiens
MAFQKAVKGTILVGGGALATVLGLSQFAHYRRKQNIVLSGELRNEECILLRKCGKT

SEQ ID NO: 90131 - protein, 674 aa, Homo sapiens
MSSSSRGPGAGARRRRTRCRRCRACVRTECGDCHFCRDMKKFGGPGRMKQSCLLRQCTAPVLPHTAVCLLCGEAGKEDTVEGEEEKFGLSLMECTICNEIVHPGCLKMGKAEGVINAEIPNCWECPRCTQEGRTSKDSGEGPGRRRADNGEEGASLGSGWKLTEEPPLPPPPPRRKGPLPAGPPPEDVPGPPKRKEREAGNEPPTPRKKVKGGRERHLKKVGGDACLLRGSDPGGPGLLPPRVLNPSQAFSSCHPGLPPENWEKPKPPLASAEGPAVPSPSPQREKLERFKRMCQLLERVPDTSSSSSDSDSDSDSSGTSLSEDEAPGEARNGRRPARGSSGEKENRGGRRAVRPGSGGPLLSWPLGPAPPPRPPQLERHVVRPPPRSPEPDTLPLAAGSDHPLPRAAWLRVFQHLGPRELCICMRVCRTWSRWCYDKRLWPRMDLSRRKSLTPPMLSGVVRRQPRALDLSWTGVSKKQLMWLLNRLQGLQELVLSGCSWLSVSALGSAPLPALRLLDLRWIEDVKDSQLRELLLPPPDTKPGQTESRGRLQGVAELRLAGLELTDASLRLLLRHAPQLSALDLSHCAHVGDPSVHLLTAPTSPLRETLVHLNLAGCHRLTDHCLPLFRRCPRLRRLDLRSCRQLSPEACARLAAAGPPGPFRCPEEKLLLKDS

SEQ ID NO: 90132 - protein, 137 aa, Homo sapiens
MTKARKRRRRRRLMELAEPKINWQVLKDRCPRYPGQPKWQSPARGSSSCQSRRPQPPSWKSGTPCQNPSHMCQTITASFTWPGPKLSRTSAFLTEILAGRCWMSPRRWWPAPGSSPWPSPKCARASTRDTTGVPSPL

SEQ ID NO: 90133 - protein, 238 aa, Homo sapiens
  MOD_RES (1)..(1): Any amino acid
XPQFQSPPAKQTSTFSKQTPHHPFPSPATDLYQVPPGPGGPAQDIYQVPPSAGMGHDIYQVPPSMDTRSWEGTKPPAKVVVPTRVGQGYVYEAAQPEQDEYDIPRHLLAPGPQDIYDVPPVRGLLPSQYGQEVYDVPPSVSKDVPDGPLLREETYDVPPAFAKAKPFDPARTPLVLAAPPPDSPPAEDVYDVPPPAPDLYDVPPGLRRPGPGTLYDVPRERVLPPEVADGGVVDSGVY

SEQ ID NO: 90134 - protein, 221 aa, Homo sapiens
MKVKMLSRNPDNYVRETKLDLQRVPRNYDPALHPFEVPREYIRALNATKLERVFAKPFLASLDGHRDGVNCLAKHPEKLATVLSGACDGEVRIWNLTQRNCIRTIQAHEGFVRGICTRFCGTSFFTVGDDKTVKQWKMDGPGYGDEEEPLHTILGKTVYTGIDHHWKEAVFATCGQQVDIWDEQRTNPICSMTWGFDSISSVKFNPIEVMFFFKYVLLIMA

SEQ ID NO: 90135 - protein, 420 aa, Homo sapiens [sequence omitted]

SEQ ID NO: 90136 - protein, 136 aa, Homo sapiens
MSDSAGGRAGLRRYPKLPVWVVEDHQEVLPFIYRAIGSKHLPASNVSFLHFDSHPDLLIPVNMPADTVFDKETLFGELSIENWIMPAVYAGHFSHVIWFHPTWAQQIREGRHHFLVGKDTSTTTIRTGKGHSNTEK

SEQ ID NO: 90137 - protein, 42 aa, Homo sapiens
MEEDQELERKAIEELLKEAKRGKTRAETMGPMGCLLQGQDTN

SEQ ID NO: 90138 - protein, 55 aa, Homo sapiens
MDRAGADMWASTFTLAMAERKPQDVWVLLPEHSLVPGCLDGGGVQYLLVGLSRVP

SEQ ID NO: 90139 - protein, 468 aa, Homo sapiens
MWLFFGITGLLTAALSGHPSPAPPDQLNTSSAESELWEPGERLPVRLTNGSSSCSGTVEVRLEASWEPACGALWDSRAAEAVCRALGCGGAEAASQLAPPTPELPPPPAAGNTSVAANATLAGAPALLCSGAEWRLCEVVEHACRSDGRRARVTCAENRALRLVDGGGACAGRVEMLEHGEWGSVCDDTWDLEDAHVVCRQLGCGWAVQALPGLHFTPGRGPIHRDQVNCSGAEAYLWDCPGLPGQHYCGHKEDAGAVCSEHQSWRLTGGADRCEGQVEVHFRGVWNTVCDSEWYPSEAKVLCQSLGCGTAVERPKGLPHSLSGRMYYSCNGEELTLSNCSWRFNNSNLCSQSLAARVLCSASRSLHNLSTPEVPASVQTVTIESSVTVKIENKESRELMLLIPSIVLGILLLGSLIFIAFILLRIKGKYALPVMVNHQHLPTTIPAGSNSYQPVPITIPKEGPGPAP

SEQ ID NO: 90140 - protein, 370 aa, Homo sapiens
MAGAENWPGQQLELDEDEASCCRWGAQHAGARELAALYSPGKRLQEWCSVILCFSLIAHNLVHLLLLARWEDTPLVILGVVAGALIADFLSGLVHWGADTWGSVELPIVGKAFIRPFREHHIDPTAITRHDFIETNGDNCLVTLLPLLNMAYKFRTHSPEALEQLYPWECFVFCLIIFGTFTNQIHKWSHTYFGLPRWVTLLQDWHVILPRKHHRIHHVSPHETYFCITTGVKVPRNFRLLEELEEGQKGVGDGTVSWGLEDDEDMTLTRWTGMIIGPPRTIYENRIYSLKIECGPKYPEAPPFVRFVTKINMNGVNSSNGVVDPRAISVLAKWQNSYSIKVVLQELRRLMMSKENMKLPQPPEGQCYSN

SEQ ID NO: 90141 - protein, 568 aa, Homo sapiens
MAQFGGQKNPPWATQFTATAVSQPAALGVQQPSLLGASPTIYTQQTALAAAGLTTQTPANYQLTQTAALQQQAAAAAAALQQQYSQPQQALYSVQQQLQQPQQTLLTQPAVALPTSLSLSTPQPTAQITVSYPTPRSSQQQTQPQKQRVFTGVVTKLHDTFGFVDEDVFFQLSAVKGKTPQVGDRVLVEATYNPNMPFKWNAQRIQTLPNQNQSQTQPLLKTPPAVLQPIAPQTTFGVQTQPQPQSLLQAQISAASITPLLQTQPQPLLQQPQQKAGLLQPPVRIVSQPQPARRLDPPSRFSGRNDRGDQVPNRKDDRSRERERERRRSRERSPQRKRSRERSPRRERERSPRRVRRVVPRYTVQFSKFSLDCPSCDMMELRRRYQNLYIPSDFFDAQFTWVDAFPLSRPFQLGNYCNFYVMHREVESLEKNMAILDPPDADHLYSAKVMLMASPSMEDLYHKSCALAEDPQELRDGFQHPARLVKFLVGMKGKDEAMAIGGHWSPSLDGPDPEKDPSVLIKTAIRCCKALTGIDLSVCTQWMKKRRMMVKLKKFLHLPIGLNLIQRQ

SEQ ID NO: 90142 - protein, 370 aa, Homo sapiens
MESRSVAQAGVQWISLAHCSLHLLGSRDSPASASCVAGITGPEEREQQEPHPAAMSAEVETSEGVDESEKKNSGALEKENQMRMADLSELLKEGTKEAHDRAENTQFVKDFLKGNIKKELFKLATTALYFTYSALEEEMERNKDHPAFAPLYFPMELHRKEALTKDMEYFFGENWEEQVQCPKAAQKYVERIHYIGQNEPELLVAHAYTRYMGDLSGGQVLKKVAQRALKLPSTGEGTQFYLFENVDNAQQFKQLYRARMNALDLNMKTKERIVEEANKAFEYNMQIFNELDQAGSTLARETLEDGFPVHDGKGDMRKCPFYAAEQDKGALEGSSCPFRTAMAVLRKPSLQFILAAGVALAAGLLAWYYM

SEQ ID NO: 90143 - protein, 89 aa, Homo sapiens
MIFPVARYALRWLRRPEDRAFSRAAMEMALRGVRKVLCVAEKNDAAKGIADLLSNGRMRRREGLSKFNKIYEFDYHLYGQAELQPSCPL

SEQ ID NO: 90144 - protein, 302 aa, Homo sapiens
MPGVARLPLLLGLLLLPRPGRPLDLADYTYDLAEEDDSEPLNYKDPCKAAAFLGDIALDEEDLRAFQVQQAVDLRRHTARKSSIKAAVPGNTSTPSCQSTNGQPQRGACGRWRGRSRSRRAATSRPERVWPDGVIPFVIGGNFTGSQRAVFRQAMRHWEKHTCVTFLERTDEDSYIVFTYRPCGCCSYVGRRGGGPQAISIGKNCDKFGIVVHELGHVVGFWHEHTRPDRDRHVSIVRENIQPGVLHSSLLLLSCGSRNGASFPCSLESSIHQALCWTGLFLRPSPFPRLPLAAPRTLRAGV

SEQ ID NO: 90145 - protein, 102 aa, Homo sapiens
MESGKTASPKSMPKDAQMMAQILKDMGITEYEPRVINQMLEFAFRYVTTILDDAKIYSSHAKKATVDADDVRLAIQCRADQSFTSPPPRDFLLDIARQRNQT

SEQ ID NO: 90146 - protein, 314 aa, Homo sapiens
MNRSATHIVTEFILLGFPGCWKIQIFLFSLFLVIYVLTLLGNGAIIYAVRCNPLLHTPMYFLLGNFAFLEIWYVSSTIPNMLVNILSKTKAISFSGCFLQFYFFFSLGTTECLFLAVMAYDRYLAICHPLQYPAIMTVRFCGKLVSFCWLIGFLGYPIPIFYISQLPFCGPNIIDHFLCDMDPLMALSCAPAPITECIFYTQSSLVLFFTSMYILRSYILLLTAVFQVPSAAGRRKAFSTCGSHLVVVSLFYGTVMVMYVSPTYGIPTLLQKILTLVYSVTTPLFNPLIYTLRNKDMKLALRNVLFGMRIRQNS

SEQ ID NO: 90147 - protein, 299 aa, Homo sapiens
MMCFLLIISSILVVFAFVLGNVANGFIALVNVIDWVNTRKISSAEQILTALVVSRIGLLWVMLFLWYATVFNSALYGLEVRIVASNAWAVTNHFSMWLAASLSIFCLLKIANFSNLISLHLKKRIKSVVLVILLGPLVFLICNLAVITMDERVWTKEYEGNVTWKIKLRNAIHLSSLTVTTLANLIPFTLSLICFLLLICSLCKHLKKMRLHSKGSQDPSTKVHIKALQTVTSFLMLFAIYFLCIITSTWNLRTQQSKLVLLLCQTVAIMYPSFHSFILIMGSRKLKQTFLSVLWQMTC

SEQ ID NO: 90148 - protein, 109 aa, Homo sapiens
MCIIFFKFDPRPVSKNAYRLILAANRDEFYSRPSKLADFWGNNNEILSGLDMEEGKEGGTWLGISTRGKLAALTNYLQPQLDWQARGRAQQRETSFATMGTEGSLILSF

SEQ ID NO: 90149 - protein, 118 aa, Homo sapiens
MFHWQATIMGPNDSPYQGGVFFLTIHFPTDYPFKPPKVAFTTRIYHPNINSNGSICLDILRSQWSPALTISKVLLSICSLLCDPNPDDPLVPEIARIYKTDRDKYNRISREWTQKYAM

SEQ ID NO: 90150 - protein, 234 aa, Homo sapiens
MAFSGCQAPYLSPAVPFSGTIQGGLQDGFQITVNGAVLSCSGTRFAVDFQTGFSGNDIAFHFNPRFEDGGYVVCNTRQKGTWGPEERKMHMPFQKGMPFDLCFLVQSSDFKVMVNGSLFVQYFHRVPFHRVDTISVNGSVQLSYISFQTQTVIHTVQSASGQMFSTPAIPPMMYPHPAYPMPFITTIPGGLYPSKSIILSGTVLPSAQRCGSCVKLTASRWPWMVSTCLNTTIA

SEQ ID NO: 90151 - protein, 134 aa, Homo sapiens
MGKCRGLRTARKLRSHRRDQKWHDKQYKKAHLGTALKANPFGGASHAKGIVLEKVGVEAKQPNSAIRKCVRVQLIKNGKKITAFVPNDGCLNFIEENDEVLVAGFGRKGHAVGDIPGVRFKSFHGYSGMVEMKL

SEQ ID NO: 90152 - protein, 31 aa, Homo sapiens
MVMEKPSPLLVGREFVRQYYTLLNQAPDMLH

SEQ ID NO: 90153 - protein, 567 aa, Homo sapiens
MKIFCSRANPTTGSVEWLEEDEHYDYHQEIARSSYADMLHDKDRNVKYYQGIRAAVSRVKDRGQKALVLDIGTGTGLLSMMAVTAGADFCYAIEVFKPMADAAVKIVEKNGFSDKIKVINKHSTEVTVGPEGDMPCRANILVTELFDTELIGEGALPSYEHAHRHLVEENCEAVPHRATVYAQLVESGRMWSWNKLFPIHVQTSLGEQVIVPPVDVESCPGAPSVCDIQLNQVSPADFTVLSDVLPMFSIDFSKQVSSSAACHSRRFEPLTSGRAQVVLSWWDIEMDPEGKIKCTMAPFWAHSDPEEMQWRDHWMQCVYFLPQEEPVVQGSALYLVAHHDDYCVWYSLQRTSPEKNERVRQMRPVCDCQAHLLWNRPRFGEINDQDRTDRYVQALRTVLKPDSVCLCVSDGSLLSVLAHHLGVEQVFTVESSAASHKLLRKIFKANHLEDKINIIEKRPELLTNEDLQGRKVSLLLGEPFFTTSLLPWHNLYFWYVRTAVDQHLGPGAMVMPQAASLHAVVVEFRVCREQQDVPLVLAATLPCVLAGGCGRGCSFLTGPVADPEPLW

SEQ ID NO: 90154 - protein, 30 aa, Homo sapiens
MEEEASSPGLGCSKPHLEKLTLGITRILGL

SEQ ID NO: 90155 - protein, 690 aa, Homo sapiens
MPLFFRKRKPSEEARKRLEYQMCLAKEAGADDILDISKCELSEIPFGAFATCKVLQKKVLIVHTNHLTSLLPKSCSLLSLATIKVLDLHDNQLTALPDDLGQLTALQVLNVERNQLMQLPRSIGNLTQLQTLNVKDNKLKELPDTVGELRSLRTLNISGNEIQRLPQMLAHVRTLEMLSLDASAMVYPPREVCGAGTAAILQFLCKESGLEYYPPSQYLLPILEQDGIENSRDSPDGPTDRFSREELEWQNRFSDYEKRKEQKMLEKLEFERRLELGQREHTQLLQQSSSQKDEILQTVKEEQSRLEQGLSEHQRHLNAERQRLQEQLKQTEQNISSRIQKLLQDNQRQKKSSEILKSLENERIRMEQLMSITQEETESLRRRDVASAMQQMLTESCKNRLIQMAYESQRQNLVQQACSSMAEMDERFQQILSWQQMDQNKAISQILQESAMQKAAFEALQVKKDLMHRQIRSQIKLIETELLQLTQLELKRKSLDTESLQEMISEQRWALSSLLQQLLKEKQQREEELREILEEGMERQLVALLEELSAEHYLPIFAHHRLSLDLLSQMSPGDLAKVGVSEAGLQHEILRRVQELLDAARIQPELKPPMGEVVTPTAPQEPPESVRPSAPPAELEVQASECVVCLEREAQMIFLNCGHVCCCQQCCQPLRTCPLCRQDIAQRLRIYHSS

SEQ ID NO: 90156 - protein, 328 aa, Homo sapiens
MLWKLTDNIKYEDCEDRHDGTSNGTARLPQLGTVGQSPYTSAPPLSHTPNADFQPPYFPPPYQPIYPQSQDPYSHVNDPYSLNPLHAQPQPQHPGWPGQRQSQESGLLHTHRGLPHQLSGLDPRRDYRRHEDLLHGPHALSSGLGDLSIHSLPHAIEEVPHVEDPGINIPDQTVIKKGPVSLSKSNSNAVSAIPINKDNLFGGVVNPNEVFCSVPGRLSLLSSTSKYKVTVAEVQRRLSPPECLNASLLGGVLRRAKSKNGGRSLREKLDKIGLNLPAGRRKAANVTLLTSLVEDRYAKSSPTCWLRTDLPWGTHGPTPSWSPASRAA

SEQ ID NO: 90157 - protein, 79 aa, Homo sapiens
MASRIGLRMQLMREQAQQEEQRERMQQQAVMHYMQQQQQQQQQQLGGPPTPAINTPVHFQSPPPVPGEVLKVQSYLENP

SEQ ID NO: 90158 - protein, 505 aa, Homo sapiens
MVSNHYFLLCVNLPLREIHTPGAVQVSRRTISSNSFSPEVFVLPVDVEKENAHFYVADMIISAMEKMKCNILSQQQTESWSKEVSGLLGSDQPDSEMTFDTNIKQESGSSTSSYSGYEGCAVLQVSPVTETRTYHDVKEICKCDVDEFVILELGDFNDITETCSCSCSSSKSVTYEPDFNSAELLAKELYRVFQKCWILSVVNSQLAGSLSAAGSIVVNEECVRKDFESSMNVVQEIKFKSRIRGTEDWAPPRFQIIFNIHPPLKRDLVVAAQNFFCAGCGTPVEPKFVKRLRYCEYLGKYFCDCCHSYAESCIPARILMMWDFKKYYVSNFSKQLLDSIWHQPIFNLLSIGQSLYAKAKELDRVKEIQEQLFHIKKLLKTCRFANSALKEFEQVPGHLTDELHLFSLEDLVRIKKGLLAPLLKDILKASLAHVAGCELCQGKGFICEFCQNTTVIFPFQTATCRRCSACRACFHKQCFQSSECPRCARITARRKLLESVASAAT

SEQ ID NO: 90159 - protein, 700 aa, Homo sapiens
MDLWNLSWFLFLDALLVISGLATPENFDVDGGMDQDIFDINEGLGLDLFEGDIRLDRAQIRNSIIGEKYRWPHTIPYVLEDSLEMNAKGVILNAFERYRLKTCIDFKPWAGETNYISVFKGSGCWSSVGNRRVGKQELSIGANCDRIATVQHEFLHALGFWHEQSRSDRDDYVRIMWDRILSGREHNFNTYSDDISDSLNVPYDYTSVMHYSKTAFQNGTEPTIVTRISDFEDVIGQRMDFSDSDLLKLNQLYNCSSSLSFMDSCSFELENVCGMIQSSGDNADWQRVSQVPRGPESDHSNMGQCQGSGFFMHFDSSSVNVGATAVLESRTLYPKRGFQCLQFYLYNSGSESDQLNIYIREYSADNVDGNLTLVEEIKEIPTGSWQLYHVTLKVTKKFRVVFEGRKGSGASLGGLSIDDINLSETRCPHHIWHIRNFTQFIGSPNGTLYSPPFYSSKGYAFQIYLNLAHVTNAGIYFHLISGANDDQLQWPCPWQQATMTLLDQNPDIRQRMSNQRSITTDPFMTTDNGNYFWDRPSKVGTVALFSNGTQFRRGGGYGTSAFITHERLKSRDFIKGDDVYILLTVEDISHLNSTQIQLTPAPSVQDLCSKTTCKNDGVCTVRDGKAECRCQSGEDWWYMGERCEKRGSTRDTIVIAVSSTVAVFALMLIITLVSVYCTRKKYRERMSSNRPNLTPQNHAF

SEQ ID NO: 90160 - protein, 268 aa, Homo sapiens
MAALTRDPQFQKLQQWYREHRSELNLRRLFDANKDRFNHFSLTLNTNHGHILVDYSKNLVTEDVMRMLVDLAKSRGVEAARERMFNGEKINYTEGRAVLHVALRNRSNTPILVDGKDVMPEVNKVLDKMKSFCQRVRSGDWKGYTGKTITDVINIGIGGSDLGPLMVTEALKPYSSGGPRVWYVSNIDGTHIAKTLAQLNPESSLFIIASKTFTTQETITNAETAKEWFLQAAKDPSAVAKHFVALSTNTTKVKEFGIDPQNMFEFWD

SEQ ID NO: 90161 - protein, 84 aa, Homo sapiens
MCNTNMSVPTDGAVTTSQIPASEQETLVRPKPLLLKLLKSVGAQKDTYTMKEKKIQMNYLVNDKENATNLIVFPFPLMKAWLCV

SEQ ID NO: 90162 - protein, 113 aa, Homo sapiens
MKVSVAALSCLMLVAVLGSQAQFTNDAETELMMSKLPLENPVVLNSFHFAADCCTSYISQSIPCSLMKSYFETSSECSKPGVIFLTKKGRQVCAKPSGPGVQDCMKKLKPYSI

SEQ ID NO: 90163 - protein, 304 aa, Homo sapiens
MSSTLPALLCVGLCLSQRISAQQQTLPKPFIWAEPHFMVPKEKQVTICCQGNYGAVEYQLHFEGSLFAVDRPKPPERINKVQFYIPDMNSRMAGQYSCIYRVGELWSEPSNLLDLVVTEMYDTPTLSVHPGPEVISGEKVTFYCRLDTATSMFLLLKEGRSSHVQRGYGKVQAEFPLGPVTTAHRGTYRCFGSYNNHAWSFPSEPVKLLVTGDIENTSLAPEDPTFPADTWGTYLLTTETGLQKDHALWDHTAQNLLRMGLAFLVLVALVWFLVEDWLSRKRTRERASRASTWEGRRRLNTQTL

SEQ ID NO: 90164 - protein, 41 aa, Homo sapiens
MAAAGAAATHLAPPHGACHCRVYAGVSAPGRPGEAALHRCA

SEQ ID NO: 90165 - protein, 248 aa, Homo sapiens
MDTTAAAALPAFVALLLLSPWPLLGSAQGQFSAGGCTFDDGPGACDYHQDLYDDFEWVHVSAQEPHYLPPEMPQGSYMIVDSSDHDPGEKARLQLPTMKENDTHCIDFSYLLYSQKGLNPGTLNILVRVNKGPLANPIWNVTGFTGRDWLRAELAVSTFWPNEYQVIICTFLVYVLMSSVLTICVIHRCKYASHGNERLPSCLPHPHYWGSVIHRYTYASHGNERLPLFLPHPVDEEVFGDIGTKPSN

SEQ ID NO: 90166 - protein, 104 aa, Homo sapiens
MSTNNMSDPRRPNKVLRYKPPPSECNPALDDPTPDYMNLLGMIFSMCGLMLKWCAWVAVYCSFISFANSRSSEDTKQMMSSFMLSISAVVMSYLQNPQPMTPPW

SEQ ID NO: 90167 - protein, 23 aa, Homo sapiens
MASHRLLLLCLAGLVFVSEAGPT

SEQ ID NO: 90168 - protein, 518 aa, Homo sapiens
MDEKCSFCNLQREAVSDCIPSLDSSQSTPTEELSSQGQSNTDKIECQAENYLNALFRKKDLPQNCDPNIPLVAQELMKKMIRQFAIEYISKSGKTQENRNGSIGPSIVCKSIQMNQAENSLQEEQEGPLDLTVNRMQEQNTQQGDGVLDLSTKKTSIKSEESSICDPSSENSVAGRLHRNREDYVERSAEFADGLLSKALKDIQSGALDINKAGILYGIPQKTLLLHLEALPAGKPASFKNKTRDFHDSYSYKDSKETCAVLQKVALWARAQAERTEKSKLNLLETSEIKFPTASTYLHQLTLQKMVTQFKEKNESLQYETSNPTVQLKIPQLRVSSVSKSQPDGSGLLDVMYQVSKTSSVLEGSALQKLKNILPKQNKIECSGPVTHSSVDSYFLHGDLSPLCLNSKNGTVDGTSENTEDGLDRKDSKQPRKKRGRYRQYDHEIMEEAIAMVMSGKMSVSKAQGIYGVPHSTLEYKVKERSGTLKTPPKKKLRLPDTGLYNMTDSGTGSCKNSSKPV

SEQ ID NO: 90169 - protein, 61 aa, Homo sapiens
MDSVAFEDVAVNFTQEEWALLSPSQKNLYRDVTLETFRNLASESNGKTRTLRICTKTWGLS

SEQ ID NO: 90170 - protein, 253 aa, Homo sapiens
METDLEVIIKDNSLVLTPSHIKAYMLMTLQGLEYLHQHWILHRDLKPNNLLLDENGVLKLADFGLAKSFGSPNRAYTHQVVTRWYRAPELLFGARMYGVGVDMWAVGCILAELLLRVPFLPGDSDLDQLTRIFETLGTPTEEQWPDMCSLPDYVTFKSFPGIPLHHIFSAAGDDLLDLIQGLFLFNPCARITATQALKMKYFSNRPGPTPGCQLPRPNCPVETLKEQSNPALAIKRKRTEALEQGGLPKKLIF

SEQ ID NO: 90171 - protein, 134 aa, Homo sapiens
  MOD_RES (1)..(1): Any amino acid
XQFCTGEFRKDGVPIGYKGSTFHRVIKDFMIQGGDFVNGDGTGVASIYRGPFADENFKLRHSAPGLLSMANSGPSTNGCQFFITCSKCDWLDGKHVVFGKIIDGLLVMRKIENVPTGPNNKPKLPVVISQCGEM

SEQ ID NO: 90172 - protein, 423 aa, Homo sapiens
MMLSRAKPAVGRGVQHTDKRKKKGRKIPKLEELLSKRDFTGAITLLEFKRHVGEEEEDTNLWIGYCAFHLGDYKRALEEYENATKEENCNSEVWVNLACTYFFLGMYKQAEAAGFKASKSRLQNRLLFHLAHKVVFRGGEGALQVLPPLVDVIPEARLNLVIYYLRQDDVQEAYNLIKDLEPTTPQEYILKGVVNAALGQEMGSRDHMKIAQQFFQLVGGSASECDTIPGRQCMASCFFLLKQFDDVLIYLNSFKSYFYNDDIFNFNYAQAKAATGNTSEGEEAFLLIQSEKMKNDYIYLSWLARCYIMNKKPRLAWELYLKMETSGESFSLLQLIANDCYKMGQFYYSAKAFDVLERLDPNPEYWEGKRGACVGIFQMIIAGREPKETLREVLHLLRSTGNTQVEYMIRIMKKWAKENRVSI

SEQ ID NO: 90173 - protein, 118 aa, Homo sapiens
MPAALVENSQVICEVWASNLEEEMRKIREIVLSYSYIAMDTEFPGVVVRPIGEFRSSIDYQYQLLRCNVDLLKIIQLGLTFTNEKGEYPSGINTWQFNFKFNLTEDMYSQDSIDLLAN

SEQ ID NO: 90174 - protein, 173 aa, Homo sapiens
MCLLLGATGVGKTLLVKRLQEVSSRDGKGDLGEPPPTRPTVGTNLTDIVAQRKITIRELGGCMGPIWSSYYGNCRSLLFVMDASDPTQLSASCVQLLGLLSAEQLAEASVLILFNKIDLPCYMSTEEMKSLIRLPDIIACAKQNITTAEISAREGTGLAGVLAWLQATHRAND

SEQ ID NO: 90175 - protein, 416 aa, Homo sapiens
MTTAASEVPSFLVERMANVRRRRQDRRGMEGGILKSRIVTWEPSEEFVRNNHVINTPLQTMHIMADLGPYKKLGYKKYEHVLCTLKVDSNGVITVKPDFTGLKGPYRIETEGEKQELWKYTIDNVSPHAQPEEEERERRVFKDLYGRHKEYLSSLVGTDFEMTVPGALRLFVNGEVVSAQGYEYDNLYVHFFVELPTAHWSSPAFQQLSGVTQTCTTKSLAMDKVAHFSYPFTFEAFFLHEDESSDALPEWPVLYCEVLSLDFWQRYRVEGYGAVVLPATPGSHTLTVSTWRPVELGTVAELRRFFIGGSLELEDLSYVRIPGSFKGERLSRFGLRTETTGTVTFRLHCLQQSRAFMESSSLQKRMRSVLDRLEGFSQQSSIHNVLEAFRRARRRMQEARESLPQDLVSPSGTLVS

SEQ ID NO: 90176 - protein, 180 aa, Homo sapiens
MLGLWGQRLPAAWVLLLLPFLPLLLLAAPAPHRESYKPVIVVHGLFDSSYSFRHLLEYINETHPGTVVTVLDLFDGRESLRPLWEQVQGFREAVVPIMAKAPQGVHLICYSQGGLVCRALLSVMDDHNVDSFISLSSPQMGQYGDTDYLKWLFPTSMRSNLYRICYSPWGQEFSICNYWH

SEQ ID NO: 90177 - protein, 353 aa, Homo sapiens
MAKSKTKHRLCSQESSVSALLASCTLSGSNSSNSDGSFHYKDKLYRSASQALQAYIDDFDLGQIYPGASTGKINIDEDFTNMSQFCNYIYKPNNAFENLDHKKHSNFISCRRHTVNDIDSMSLTTDDLLRLPADGSFSYTYVGPSHRTSKKNKKCRGRLGSLDIEKNPHFQGPYTSMGDKIELLILKAKRNLEQCTEELPKSMKKDDSPCSLDKLEADRSWENIPVTFKSPVPVNSDDSPQQTSRAKSAKGVLEDFLNNDNQSCTLSGGKHHGPVEALKQMLFNLQAVQERFNQNKTTDPKEEIKQVSEDDFSKLQLKESMIPITRSLQKALHHLSRLRDLVDDTNGERSPKM

SEQ ID NO: 90178 - protein, 260 aa, Homo sapiens
DPMMYPEMELESDKENKEQSQPKPKHDGRRRIREDGLMKIYVLQLLARTVFEVGFLIGQYFLYGFQVHPFYVCSRLPCPHKIDCFISRPTEKTIFLLIMYGVTGLCLLLNIWEMLHLGFGTIRDSLNSKRRELEDPGAYNYPFTWNTPSAPPGYNIAVKPDQIQYTELSNAKIAYKQNKANTAQEQQYGSHEENLPADLEALQREIRMAQERLDLAVQAYSHQNNPHGPREKKAKVGSKAGSNKSTASSKSGDGKTSVWI

SEQ ID NO: 90179 - protein, 330 aa, Homo sapiens
MSLTVVSMACVGFFLLQGAWPHEGVHRKPSLLAHPGRLVKSEETVILQCWSDVMFEHFLLHREGMFNDTLRLIGEHHDGVSKANFSISRMKQDLAGTYRCYGSVTHSPYQLSAPSDPLDIVIIGLYEKPSLSAQPGPTVLAGENVTLSCSSRSSYDMYHLSREGEAHERRLPAGTKVNGTFQANFPLGPATHGGTYRCFGSFRDSPYEWSKSSDPLLVSVTGNPSNSWPSPTEPSSETERMFHHVGQACLKLPTSSDPTVSACQSNPRHLHILIGTSVVKIPFTILLFFLLHRWCSDKKNAAVMDQEPAGNRTVNSEDSDEQDHQEVSYA

SEQ ID NO: 90180 - protein, 76 aa, Homo sapiens
MNKSQGSVSFTDVTVDFTQEEWEQLDPSQRILYMDVMLENYSNLLSVGKDGFQKCGRLMTRWRETTETQTSRRGNF

SEQ ID NO: 90181 - protein, 82 aa, Homo sapiens
MQNPRQYKIPDWFLNRQKDVKDGKYSQVLANGLDNKLREDLERLKKIRAHRGLRHFWGLRVRGQHTKTTGRRGRTVGVSKKK

SEQ ID NO: 90182 - protein, 339 aa, Homo sapiens
MAQTPAFDKPKVELHVHLDGSIKPETILYYGRRRGIALPANTAEGLLNVIGMDKPLTLPDFLAKFDYYMPAIAGCREAIKRIAYEFVEMKAKEGVVYVEVRYSPHLLANSKVEPIPWNQAEGDLTPDEVVALVGQGLQEGERDFGVKARSILCCMRHQPNWSPKVVELCKKYQQQTVVAIDLAGDETIPGSSLLPGHVQAYQAVDILKTERLGHGYHTLEDQALYNRLRQENMHFEICPWSSYLTGAWKPDTEHAVIRLKNDQANYSLNTDDPLIFKSTLDTDYQMTKRDMGFTEEEFKRLNINAAKSSFLPEDEKRELLDLLYKAYGMPPSASAGQNL

SEQ ID NO: 90183 - protein, 295 aa, Homo sapiens
MSTTGQVIRCKAAILWKPGAPFSIEEVEVAPPKAKEVRIKVVATGLCGTEMKVLGSKHLDLLYPTILGHEGAGIVESIGEGVSTVKPGDKVITLFLPQCGECTSCLNSEGNFCIQFKQSKTQLMSDGTSRFTCKGKSIYHFGNTSTFCEYTVIKEISVAKIDAVAPLEKVCLISCGFSTGFGAAINTAKVTPGSTCAVFGLGGVGLSVVMGCKAAGAARIIGVDVNKEKFKKAQELGATECLNPQDLKKPIQEVLFDMTDAGIDFCFEAIGNLDVLAGRADSTSLNWLLIIWQRS

SEQ ID NO: 90184 - protein, 135 aa, Homo sapiens
MSEEKPKEGVKTENDHINLKVAGQDGSVVQFKIKRHTPLSKLMKAYCERQGLSMRQIRFRFDGQPINETDTPAQVRSWLRVVPGRLPICAGWRWRTRTPSTCSSSRREVCRRAAWQGTVSRGPVPSPGRPSSHCC

SEQ ID NO: 90185 - protein, 88 aa, Homo sapiens
MTAWFNGVEELGRDECFVCLELDPSNGSFLNAKLYISNWILIYFTRTLQLPAPFNTCTSSKSRGEPGCDSKCVNPALSLGFRTYKWSS

SEQ ID NO: 90186 - protein, 410 aa, Homo sapiens
MSLMVVSMACVGFFLLEGPWPHVGGQDKPFLSAWPGTVVSEGQHVTLQCRSRLGFKEFSLSKEDGMPVPELYNRIFRNSFLMGPVTPAHAGTYRCCSSHPHSPTGWSAPSNPVVIMVTGVHRKPSLLAHPGPLVKSGETVILQCWSDVSFERFLLHREGITEDPLRLVGQLHDAGSQVNYSMGPMTPALAGTYRCFGSVTHLPYELSAPSDPLDIVVVGLYGKPSLSAQPGPTVQAGENVTLSCSSRSLFDIYHLSREAEAGELRLTAVLRVNGTFQANFPLGPVTHGGTYRCFGSFRALPHAWSDPSDPLPVSVTGNSRHLHVLIGTSVVIIPFAILLFFLLHRWCANKKNAVVMDQEPAGNRTVNREDSDEQDPQEVTYAQLNHCVFTQRKITRPSQRPKTPPTDTSV

SEQ ID NO: 90187 - protein, 161 aa, Homo sapiens
MAGKQAVSASGKWLDGIRKWYYNAAGFNKLGLMRDDTIYEDEDVKEAIRRLPENLYNDRMFRIKRALDLNLKHQILPKEQWTKYEEVFAVPALHSASYLDEKISPLSVPPDPKKSFCEANSHPLNCIETRQRPVDIHFFFFPKRLPPHNLSKQLITPSPQI

SEQ ID NO: 90188 - protein, 145 aa, Homo sapiens
MLVEVAAAIAGYVFRDKVMSEFNNNFRQQMENYPKNNHTASILDRMQADFKCCGAANYTDWEKIPSMSKNRVPDSCCINVTVGCGINFNEKAIHKEGCVEKIGGWLRKNVLVVAAAALGIAFVEVLGIVFACCLVKSIRSGYEVM

SEQ ID NO: 90189 - protein, 475 aa, Homo sapiens
MSSEMEPLLLAWSYFRRRKFQLCADLCTQMLEKSPYDQAAWILKARALTEMVYIDEIDVDQEGIAEMMLDENAIAQVPRPGTSLKLPGTNQTGGPSQAVRPITQAGRPITGFLRPSTQSGRPGTMEQAIRTPRTAYTARPITSSSGRFVRLGTALFEYIFHHENDVKTALDLAALSTEHSQYKDWWWKVQIGKCYYRLGMYREAEKQFKSALKQQEMVDTFLYLAKVYVSLDQPVTALNLFKQGLDKFPGEVTLLCGIARIYEEMNNMSSAAEYYKEVLKQDNTHVEAIACIGSNHFYSDQPEIALRFYRRLLQMGIYNGQLFNNLGLCCFYAQQYDMTLTSFERALSLAENEEEAADVWYNLGHVAVGIGDTNLAHQCFRLALVNNNNHAEAYNNLAVLEMRKGHVEQARALLQTASSLAPHMYEPHFNFATISDKIGDLQRSYVAAQKSEAAFPDHVDTQHLIKQLRQHFAML

SEQ ID NO: 90190 - protein, 78 aa, Homo sapiens
MFHFFRKPPESKKPSVPETEADGFVLLGDTTDEQRMTARGKTSDIEANQPLELASREDFSSFRQTTFPRIHGTDYRSK

SEQ ID NO: 90191 - protein, 68 aa, Homo sapiens
PIMFRGEVRLNVEEKKTRAAREGDRRDNRLRGPGGPRGGLGGGMRGPPRGGMVQKPGFGVGRGLAPRQ

SEQ ID NO: 90192 - protein, 937 aa, Homo sapiens
MADKVRRQRPRRRVCWALVAVLLADLLALSDTLAVMSVDLGSESMKVAIVKPGVPMEIVLNKESRRKTPVIVTLKENERFFGDSAASMAIKNPKATLRYFQHLLGKQADNPHVALYQARFPEHELTFDPQRQTVHFQISSQLQFSPEEVLGMVLNYSRSLAEDFAEQPIKDAVITVPVFFNQAERRAVLQAARMAGLKVLQLINDNTATALSYGVFRRKDINTTAQNIMFYDMGSGSTVCTIVTYQMVKTKEAGMQPQLQIRGVGFDRTLGGLEMELRLRERLAGLFNEQRKGQRAKDVRENPRAMAKLLREANRLKTVLSANADHMAQIEGLMDDVDFKAKVTRVEFEELCADLFERVPGPVQQALQSAEMSLDEIEQVILVGGATRVPRVQEVLLKAVGKEELGKNINADEAAAMGAVYQAAALSKAFKVKPFVVRDAVVYPILVEFTREVEEEPGIHSLKHNKRVLFSRMGPYPQRKVITFNRYSHDFNFHINYGDLGFLGPEDLRVFGSQNLTTVKLKGVGDSFKKYPDYESKGIKAHFNLDESGVLSLDRVESVFETLVEDSAEEESTLTKLGNTISSLFGGGTTPDAKENGTDTVQKPSEKAEAGPEGVAPAPEGEKKQKPARKRRMVEEIGVELVVLDLPDLPEDKLAQSVQKLQDLTLRDLEKQEREKAANSLEAFIFETQDKLYQPEYQEVSTEEQREEISGKLSAASTWLEDEGVGATTVMLKEKLAELRKLCQGLFFRVEERKKWPERLSALDNLLNHSSMFLKGARLIPEMDQIFTEVEMTTLEKVINETWAWKNATLAEQAKLPATEKPVLLSKDIEAKMMALDREVQYLLNKAKFTKPRPRPKDKNGTRAEPPLNASASDQGEKVIPPAGQTEDAEPISEPEKVETGSEPGDTEPLELGGPGAEPEQKEQSTGQKRPLKNDEL

SEQ ID NO: 90193 - protein, 288 aa, Homo sapiens
MWGLKVLLLPVVSFALYPEEILDTHWELWKKTHRKQYNNKTSEEVVQKMTGLKVPLSHSRSNDTLYIPEWEGRAPDSVDYRKKGYVTPVKNQGQCGSCWAFSSVGALEGQLKKKTGKLLNLSPQNLVDCVSENDGCGGGYMTNAFQYVQKNRGIDSEDAYPYVGQEESCMYNPTGKAAKCRGYREIPEGNEKALKRAVARVGPVSVAIDASLTSFQFYSKGVYYDESCNSDNLNHAVLAVGYGIQKGNKHWIIKNSWGENWGNKGYILMARNKNNACGIANLASFPKM

SEQ ID NO: 90194 - protein, 118 aa, Homo sapiens
MRDLYMKNGQGFALVYSITAQSTFNDLQDLREQILRVKDTDDVPMILVGNKCDLEDERVVGKEQGQNLARQWNNCAFLESSAKSKINVNEIFYDLVRQINRKTPVPGKARKKSSCQLL

SEQ ID NO: 90195 - protein, 94 aa, Homo sapiens
MGPMGWMKCPLASTNKRFLINTIKNTLPSHKEQDHEQKEGDKEPAKSQAQKEENPKKHRSHPYKHSFRARGSASYSPPRKRSSQDKYEKRSNRR

SEQ ID NO: 90196 - protein, 235 aa, Homo sapiens
MTLAHIKDQKEGLHSLQEIRVCEIHEDNSTRSSQHFYYDGELFLSQNLETEEWTVPQSSRAQTLAMNVRNFLKEDAMKTKTHYHAMHADCLQELRRYLESGVVLRRTVPPMVNVTRSEASEGNITVTCRASSFYPRNIILTWRQDGVSLSHDTQQWGDVLPDGNGTYQTWVATRICRGEEQRFTCYMEHSGNHSTHPVPSGKVLVLQSHWQTFHVSAVAAGCCYFCYYYFLCPLL

SEQ ID NO: 90197 - protein, 85 aa, Homo sapiens
METDKQEKKEVHKCGFLPGNEKVLSLLALVKPEVWTLKEKCILVITWIQHLIPKIEDGNDFGVAIQEKVLERVNAVKTKVEAFQT

SEQ ID NO: 90198 - protein, 106 aa, Homo sapiens
MQLKIMPKKKRLSAGRVPLILFLCQMISALEVPLDLVQPPTITQQSPKDYIIDPRENIVIQCEAKGKPPPSFSWTRNGTHFDIDKDPLVTMKPGTGTLIINIMSEG

SEQ ID NO: 90199 - protein, 300 aa, Homo sapiens
MAAAMPLALLVLLLLGPGGWCLAEPPRDSLREELVITPLPSGDVAATFQFRTRWDSELQREGVSHYRLFPKALGQLISKYSLRELHLSFTQGFWRTRYWGPPFLQAPSGAELWVWFQDTVTDVDKSWKELSNVLSGIFCASLNFIDSTNTVTPTASFKPLGLANDTDHYFLRYAVLPREVVCTENLTPWKKLLPCSSKAGLSVLLKADRLFHTSYHSQAVHIRPVCRNARCTSISWELRQTLSVVFDAFITGQGKKDWSLFRMFSRTLTEPCPLASESRVYVDITTYNQPCLCVPRTTRH

SEQ ID NO: 90200 - protein, 476 aa, Homo sapiens
MAPAGVSLRATILCLLAWAGLAAGDRVYIHPFHLVIHNESTCEQLAKANAGKPKDPTFIPAPIQAKTSPVDEKALQDQLVLVAAKLDTEDKLRAAMVGMLANFLGFRIYGMHSELWGVVHGATVLSPTAVFGTLASLYLGALDHTADRLQAILGVPWKDKNCTSRLDAHKVLSALQAVQGLLVAQGRADSQAQLLLSTVVGVFTAPGLHLKQPFVQGLALYTPVVLPRSLDFTELDVAAEKIDRFMQAVTGWKTGCSLMGASVDSTLAFNTYVHFQGKMKGFSLLAEPQEFWVDNSTSVSVPMLSGMGTFQHWSDIQDNFSVTQVPFTESACLLLIQPHYASDLDKVEGLTFQQNSLNWMKKLSPRTIHLTMPQLVLQGSYDLQDLLAQAELPAILHTELNLQKLSNDRIRVGEVLNSIFFELEADEREPTESTQQLNKPEVLEVTLNRPFLFAVYDQSATALHFLGRVANPLSTA

SEQ ID NO: 90201 - protein, 343 aa, Homo sapiens
MEESKTLKSENHEPKKNVICEESKAVQVIGNQTLKARNDKSVKEIENSSPNRNSSKKNKQNDICIEKTEVKSCKVNAANLPGPKDLGLVLRDQSHCKAKKFPNSPVKAEKATISQAKSEKATSLQAKAEKSPKSPNSVKAEKASSYQMKSEKVPSSPAEAEKGPSLLLKDMRQKTELQQIGKKIPSSFTSVDKVNIEAVGGEKCALQNSPRSQKQQTCTDNTGDSDDSASGIEDVSDDLSKMKNDESNKENSSEMDYLENATVIDESALTPEQRLGLKQAEERLERDHIFRLEKRSPEYTNCRYLCKLCLIHIENIQGAHKHIKEKRHKKNILNVHLGCMAHL

SEQ ID NO: 90202 - protein, 315 aa, Homo sapiens
MPVLSEDSGLHETLALLTSQLRPDSNHKEEMGFLRDVFSEKSLSYLMKIHEKLRYYERQSPTPVLHSAVALAEDVMEELQAASVHSDERELLQLLSTPHLRAVLMVHDTVAQKNFDPVLPPLPDNIDEDFDEESVKIVRLVKNKEPLGATIRRDEHSGAVVVARIMRGGAADRSGLVHVGDELREVNGIAVLHKRPDEISQILAQSQGSITLKIIPATQEEDRLKESKVFMRALFHYNPREDRAIPCQEAGLPFQRRQVLEVVSQDDPTWWQAKRVGDTNLRAGLIPSKGFQERRLSYRRAAGTLPSPQSLRKPP

SEQ ID NO: 90203 - protein, 1136 aa, Homo sapiens
  MOD_RES (1)..(1): Any amino acid
XAWWEAVSGSQREGLILAIGLGFAGTTRSPREGEVPGVDYNFLTVKEFLDLEQSGTLLEVGTYEGNYYGTPKPPSQPVSGKVITTDALHSLQSGSKQSTPKRTKSYNDMQNAGIVHAENEEEDDVPEMNSSFTADSGEQEEHTLQETALPPVNSSIIAAPITDPSQKFPQYLPLSAEDNLGPLPENWEMAYTENGEVYFIDHNTKTTSWLDPRCLNKQQKPLEECEDDEGVHTEELDSELELPAGWEKIEDPVYGIYYVDHINRKTQYENPVLEAKRKKQLEQQQQQQQQQQQQQQQQQQQQTEEWTEDHSALVPPVIPNHPPSNPEPAREVPLQGKPFFTRNPSELKGKFIHTKLRKSSRGFGFTVVGGDEPDEFLQIKSLVLDGPAALDGKMETGDVIVSVNDTCVLGHTHAQVVKIFQSIPIGASVDLELCRGYPLPFDPDDPNTSLVTSVAILDKEPIIVNGQETYDSPASHSSKTGKVNGMKDARPSSPADVASNSSHGYPNDTVSLASSIATQPELITVHIVKGPMGFGFTIADSPGGGGQRVKQIVDSPRCRGLKEGDLIVEVNKKNVQALTHNQVVDMLVECPKGSEVTLLVQRGGLPVPKKSPKSQPLERKDSQNSSQHSVSSHRSLHTASPSHSTQVLPEFPPAEAQAPDQTDSSGQKKPDPFKIWAQSRSMYENRPMSPSPASGLSKGEREREINSTNFGECPIPDYQEQDIFLWRKETGFGFRILGGNEPGEPIYIGHIVPLGAADTDGRLRSGDELICVDGTPVIGKSHQLVVQLMQQAAKQGHVNLTVRRKVVFAVPKTENEVPSPASSHHSSNQPASLTEEKRTPQGSQNSLNTVSSGSGSTSGIGSGGGGGSGVVSTVVQPYDVEIRRGENEGFGFVIVSSVSRPEAGTTFGNACVAMPHKIGRIIEGSPADRCGKLKVGDRILAVNGCSITNKSHSDIVNLIKEAGNTVTLRIIPGDESSNATLLTNAEKIATITTTHTPSQQGTQETRNTTKPKQESQFEFKAPQATQEQDFYTVELERGAKGFGFSLRGGREYNMDLYVLRLAEDGPAERCGKMRIGDEILEINGETTKNMKHSRAIELIKNGGRRVRLFLKRGDGSVPEYGGSNYENIPSFPGMTP

SEQ ID NO: 90204 - protein, 128 aa, Homo sapiens
MEGDFSVCRNCKRHVVSANFTLHEAYCLRFLVLCPECEEPVPKETMEEHCKLEHQQAYGSGIGKRFWFQERLAVLLRSVKRGCEKGRSWKAVRWSPVSRLSMSIPPGAPDLSLWRYSSSGSRCQLRLV

SEQ ID NO: 90205 - protein, 128 aa, Homo sapiens
MWHREQMKSESREKKEAEDSLRREKNLEEAKKITIKNDPSLPEPKCVKIGALEGYRGQRVKVFGWVHRLRRQGKNLMFLVLRDGTGYLQCVLADELCQCYNGVLLSTESSVAVYGMLNLTPKGKQAPG

SEQ ID NO: 90206 - protein, 166 aa, Homo sapiens
MARNVVYPLYRLGGPQLRVFRTNFFIQLVRPGVAQPEDTVQFRIPMEMTRVDLRNYLEGIYNVPVAAVRTRVQHGSNKRRDHRNVRIKKPDYKVAYVQLPSQTPSKEQNGQGSTLCFRSSCSKGWSTWGTRDPRPAWSPVGGRIPRKAGSGGPANRIAQDGRLLLK

SEQ ID NO: 90207 - protein, 102 aa, Homo sapiens
MVQAHGGRSRAQPLTLSLGAAMTQPPPEKTPAKKHVRLQERRGSNVALMLDVRSLGAVEPICSVNTPREVTLHFLRTAGHPLTRWALQRQPPSPKQLEEEFL

SEQ ID NO: 90208 - protein, 41 aa, Homo sapiens
MVSKLSQLQTELLAALLESGLSKEASTSSPRTSSWPHFLGS

SEQ ID NO: 90209 - protein, 139 aa, Homo sapiens
  MOD_RES (1)..(1): Any amino acid
XILKTTPAICSTMKNTAPPTQSLGLAVHPSHAGTLTWRGTPAITSSMEAAGAIRTATALRRPACSAASASRRILPCPLAQRPWSPPPRSPVWGRATGEIPSSVPTKFRAGRRQGQVRVQSKDTTALPTPAAAPAIRTRM

SEQ ID NO: 90210 - protein, 117 aa, Homo sapiens
  MOD_RES (1)..(1): Any amino acid
XESAAMAGPGVPGAPAARWKRHIVRQLRLRDRTQKALFLELVPAYNHLLEKAELLDKFSKKLQPEPNSVTPTTHQGPWEESELDSDQVPSLVALRVKWQEEEEGLRLVCGEVSWEGV

SEQ ID NO: 90211 - protein, 46 aa, Homo sapiens
  MOD_RES (1)..(1): Any amino acid
XEDEIQFLRTYIPPDLCVCNFVLEQSLSVRALQEMLANTGENGGEG

SEQ ID NO: 90212 - protein, 195 aa, Homo sapiens
MSYGEIEGKFLGPREEVTSEPRCKKLKSTTESILLGQNRDGIVFSTDDYFHHQDGYRYNVNQLGDAHDWNQNRAKQAIDQGRSPVIIDNTNIQAWEMKPYVEVAIGKGYRVEFHEPETWWKFDPEELEKRNKHGVSRKKIAQMLDRYEYQMSISIVMNSVEPSHKSTQRPPPPQGRQRWGGSLGSHNRVCVTNNH

SEQ ID NO: 90213 - protein, 38 aa, Homo sapiens
MNPSAPSYPMASLYVGDLHPDVTEAMLYEKFSPAGPIL

SEQ ID NO: 90214 - protein, 383 aa, Homo sapiens
MPYVDRQNRICGFLDIEENENSGKFLRRYFILDTREDSFVWYMDNPQNLPSGSSRVGAIKLTYISKVSDATKLRPKAEFCFVMNAGMRKYFLQANDQQDLVEWVNVLNKAIKITVPKQSDSQPNSDNLSRHGECGKKQVSYRTDIVGGVPIITPTQKEEVNECGESIDRNNLKRSQSHLPYFTPKPPQDSAVIKAGYCVKQGAVMKNWKRRYFQLDENTIGYFKSELEKEPLRVIPLKEVHKVQECKQSDIMMRDNLFEIVTTSRTFYVQADSPEEMHSWIKAVSGAIVAQRGPGRSASSMRQARRLSNPCIQRSIPPVLQNPNTLSVLPTQPPPPHIPQPLAATLWSQPLPWRSEDFTSLLPRSSQGTSRSRLSLQENQLPK

SEQ ID NO: 90215 - protein, 226 aa, Homo sapiens
MNMIWRNSISCLRLGKVPHRYQSGYHPVAPLGSRILTDPAKVFEHNMWDHMQWSKEEEAAARKKVKENSAVRVLLEEQVKYEREASKYWDTFYKIHKNKFFKDRNWLLREFPEILPVDQKPEEKARESSWDHVKTSATNRFSRMHCPTVPDEKNHYEKSSGSSEGQSKTESDFSNLDSEKHKKGPMETGLFPGSNATFRILESHSSYRATQCFAFVHDVCDDGLPY

SEQ ID NO: 90216 - protein, 77 aa, Homo sapiens
MLETYNHLVSLEIPSSKPKLIAQLERGEAPWREERKCPLDLCPESKPEIQLSPSCPLIFSSQQALSQHVWLSHLSQL

SEQ ID NO: 90217 - protein, 590 aa, Homo sapiens
MAANMYRVGDYVYFENSSSNPYLIRRIEELNKTASGNVEAKVVCFYRRRDISNTLIMLADKHAKEIEEESETTVEADLTDKQKHQLKHRELFLSRQYESLPATHIRGKCSVALLNETESVLSYLDKEDTFFYSLVYDPSLKTLLADKGEIRVGPRYQADIPEMLLEGESDEREQSKLEVKVWDPNSPLTDRQIDQFLVVARAVGTFARALDCSSSVRQPSLHMSAAAASRDITLFHAMDTLYRHSYDLSSAISVLVPLGGPVLCRDEMEEWSASEASLFEEALEKYGKDFNDIRQDFLPWKSLTSIIEYYYMWKTTDRYVQQKRLKAAEAESKLKQVYIPTYKPNPNQISTSNGKPGAVNGAVGTTFQPQNPLLGRACESCYATQSHQWYSWGPPNMQCRLCAICWLYWKKYGGLKMPTQSEEEKLSPSPTTEDPRVRSHVSRQAMQGMPVRNTGSPKSAVKTRQAFFLHTTYFTKFARQVCKNTLRLRQAARRPFVAINYAAIRAEYADRHAELSGSPLKSKSTRKPLACIIGYLEIHPAKKPNVIRSTPSLQTPTTKRMLTTPNHTSLSILGKRNYSHHNGLDEKLMK

SEQ ID NO: 90218 - protein, 497 aa, Homo sapiens
MAAAAECDVVMAATEPELLDDQEAKREAETFKEQGNAYYAKKDYNEAYNYYTKAIDMCPKNASYYGNRAATLMMLGRFREALGDAQQSVRLDDSFVRGHLREGKCHLSLGNAMAACRSFQRALELDHKNAQAQQEFKNANAVMEYEKIAETDFEKRDFRKVVFCMDRALEFAPACHRFKILKAECLAMLGRYPEAQSVASDILRMDSTNADALYVRGLCLYYEDCIEKAVQFFVQALRMAPDHEKACIACRNAKALKAKKEDGNKAFKEGNYKLAYELYTEALGIDPNNIKTNAKLYCNRGTVNSKLRKLDDAIEDCTNAVKLDDTYIKAYLRRAQCYMDTEQYEEAVRDYEKVYQTEKTKEHKQLLKNAQLELKKSKRKDYYKILGVDKNASEDEIKKAYRKRALMHHPGRVDRHSGASAEVQKEEEKKFKEVGEAFTILSDPKKKTRYDSGQDLDEEGMNMGDFDPNNIFKAFFGGPGGFSFEASGPGNFFFQFG

SEQ ID NO: 90219 - protein, 222 aa, Homo sapiens
MSALGAVIALLLWGQLFAVDSGNDVTDIADDGCPKPPEIAHGYVEHSVRYQCKNYYKLRTEGDGVYTLNNEKQWINKAVGDKLPECEAGATLINEQWLLTTAKNLFLNHSENATAKDIAPTLTLYVGKKQLVEIEKVVLHPNYSQVDIGLIKLKQKVSVNERVMPICLPSKDYAEVGRVGYVSGWGRNANFKFTDHLKYVMLPVADQDQCIRHYEGSTVPEK

SEQ ID NO: 90220 - protein, 439 aa, Homo sapiens
MEDKDREHPQAHVDIYEKQPVPFGLVRFGVAPDHPEVKNVINTFTQTAHSGRCAFWGNVEVGRDVTVPELQEAYHAVVLSYGAEDHRALEIPGEELPGVCSARAFVGWYNGLPENQELEPDLSCDTAVILGQGNVALDVARILLTPPEHLERTDITKAALGVLRQSRVKTVWLVGRRGPLQVAFTIKELREMIQLPGARPILDPVDFLGLQDKIKEVPRPRKRLTELLLRTATEKPGPAEAARQASASRAWGLRFFRSPQQVLPSPDGRRAAGVRLAVTRLEGVDEATRAVPTGDMEDLPCGLVLSSIGYKSRPVDPSVPFDSKLGVIPNVEGRVMDVPGLYCSGWVKRGPTGVIATTMTDSFLTGQMLLQDLKAGLLPSGPRPGYAAIQALLSSRGVRPVSFSDWEKLDAEEVARGQGTGKPREKLVDPQEMLRLLGH

SEQ ID NO: 90221 - protein, 152 aa, Homo sapiens
MTPEFDEEVVFEDLGHTDFEICSSLSPKTEKCTTEGQQKPPTRVLPKQGILLKVAETIKSWIFFSQCNKKDDLLHKLDIGFRLDSLHTILQQEVLLQEDVELIELLDPSILSAGQSQQQENGHLPTLCSLATPNIWDLSMLFAFISLLVMLP

SEQ ID NO: 90222 - protein, 122 aa, Homo sapiens
  MOD_RES (1)..(1): Any amino acid
XGREWSLAECACVVAASGAPRILVDLLKLNVAPLAVFQMLKSMCAGQRLASEPQDPAAVSLPTSSVPETRGRNKGSAALGGALALAERSSREGSSQRMPRQPSATRLPKGGGPGKSPTRGST

SEQ ID NO: 90223 - protein, 55 aa, Homo sapiens
AWKLHLLQWEEDSNSVVLSFDSAGQTLGSEYDRLGFLLNLDSKLRSFILVAQAGV

SEQ ID NO: 90224 - protein, 214 aa, Homo sapiens
MDPLFQQTHKQVHEIQSCMGRLETADKQSVHIVENEIQASIDQIFSRLERLEILSSKEPPNKRQNARLRVDQLKYDVQHLQTALRNFQHRRHAREQQERQREELLSRTFTTNDSDTTIPMDESLQFNSSLQKVHNGMDDLILDGHNILDGLRTQRLTLKGTQKKILDIANMLGLSNTVMRLIEKRAFQDKYFMIEPPKFLSQQESNKDLKRLDI

SEQ ID NO: 90225 - protein, 119 aa, Homo sapiens
NALDKQEELTPLGVHLARLPVEPHIGKMILFGALFCCLDPVLTIAASLSFKDPFVIPLGKEKIADARRKELAKDTRSDHLTVVNAFEGWEEARRRGFRYEKDYCWEYFLSSNTLQIMRR

SEQ ID NO: 90226 - protein, 132 aa, Homo sapiens
MEGSLEREAPAGALAAVLKHSSTLPPESTQVRGYDFNRGVNYRALLEAFGTTGFQATNFGRAVQQVNAMIEKKLEPLSQDEDQHADLTQSRRPLTSCTIFLGYTSNLISSGIRETIRYLVQHNMDRKPAGAQ

SEQ ID NO: 90227 - protein, 36 aa, Homo sapiens
MHARNPHSPFQRQHMMDCYLSAQQDTGTMQAVIGQA

SEQ ID NO: 90228 - protein, 277 aa, Homo sapiens
EDEKLKKLVEQNGTDDWKVIANYLPNRTDVQCQHRWQKVLNPELIKGPWTKEEDQRVIELVQKYGPKRWSVIAKHLKGRIGKQCRERWHNHLNPEVKKTSWTEEEDRIIYQAHKRLGNRWAEIAKLLPGRTDNAIKNHWNSTMRRKVEQEGYLQESSKASQPAVATSFQKNSHLMGFAQAPPTAQLPATGQPTVNNDYSYYHISEAQNVSSHVPYPVALHVNIVNVPQPAAAAIQRHYNDEDPEKEKRIKELELLLMSTENELKGQQVLPVRLSSCA

SEQ ID NO: 90229 - protein, 65 aa, Homo sapiens
MQRWTLWAAAFLTLHSAQAFPQTDISISPVCFLSAPSPARAAPAFPVPPVLDGVQRPLLSILPSQ

SEQ ID NO: 90230 - protein, 75 aa, Homo sapiens
  MOD_RES (1)..(1): Any amino acid
XSDIDESSVMQLAEMGFPLEACRKAVYFTGNMGAEVAFNWIIVHMEEPVLFQDKKKKKKRKRLGCGYFSQILLSR

SEQ ID NO: 90231 - protein, 685 aa, Homo sapiens
MKILNHPNIVKLFEVIETEKTLYLVMEYASGGEVFDYLVAHGRMKEKEARAKFRQIVSAVQYCHQKYIVHRDLKAENLLLDGDMNIKIADFGFSNEFTVGNKLDTFCGSPPYAAPELFQGKKYDGPEVDVWSLGVILYTLVSGSLPFDGQNLKELRERVLRGKYRIPFYMSTDCENLLKKLLVLNPIKRGSLEQIMKDRWMNVGHEEEELKPYTEPDPDFNDTKRIDIMVTMGFARDEINDALINQKYDEVMATYILLGRKPPEFEGGESLSSGNLCQRSRPSSDLNNSTLQSPAHLKVQRSISANQKQRRFSDHAGPSIPPAVSYTKRPQANSVESEQKEEWDKDVARKLGSTTVGSKSEMTASPLVGPERKKSSTIPSNNVYSGGSMARRNTYVCERTTDRYVALQNGKDSSLTEMSVSSISSAGSSVASAVPSARPRHQKSMSTSGHPIKVTLPTIKDGSEAYRPGTTQRVPAASPSAHSISTATPDRTRFPRGSSSRSTFHGEQLRERRSVAYNGPPASPSHETGAFAHARRGTSTGIISKITSKFVRRDPSEGEASGRTDTSRSTSGEPKERDKEEGKDSKPRSLRFTWSMKTTSSMDPNDMMREIRKVLDANNCDYEQKERFLLFCVHGDARQDSLVQWEMEVCKLPRLSLNGVRFKRISGTSIAFKNIASKIANELKL

SEQ ID NO: 90232 - protein, 1662 aa, Homo sapiens
MKQRKGQGSGGSRGRKKRGLSDISPSTSLPPLVEGQLRCFLKLTVNRVIWKIAKPPTCVLVRVRWWGETSDGTLFCPRDALQTEPKAVRTTTRYAIRCGPKQFTSYLTDMAVLVLEVITKLDGLPIGRVQINGLAQLSPTHQINGFFTIVSSTSKKLGELQVSLALEPLSETYDSYHPLPTTDMTENVLLSKQGFRENTEPSSTQFQVPSRPRDIHTIKIDGKELAANSSRSTTPRGKDHVCFAENPDTIKDSSFGLQHSLNSGQSLESVTLKGRAPRKQMSLLNSSEFQPQIRTVAKSHSDSCILSSNNLPTKDLLSALLEQGNKLRNAMVISAMKSSPETSMLLDQVHPPINEDSLRASTQIRAFSRNRFKDHIEDHLLPSTENTFWRHDTKADTRAIQLLLGSAELSQGNFWDGLGSPPDSPSPGSDVYCISELNDPQYDQSLLENLFYTAPKSDTSISDFLSEEDDIVPSKKISQSTALARSSKVLESSDHKLKKRSAGKRNRNLVEQQMLSETPEDAQTMTLSVDRLALLGRTHSVRIIIETMGVPPDSPQMTPGKKSYAGPPPKVTTAKKRTFFVEYHFPVGFSESGLGKTALITEVVRLASSKITDGKVKFQQRFVFPVQFGGPMIEHWWNSNLTFQIYVKKTPQKKPEVIGSVSLSLRAVIQSELLSFSDQLPVQQENGQSPFGPLKVTMELITDNKDFTGINTKLSGNTHYTPLCAPTSPNKALPELNQDMTCTKNPQNLNQIHEETAKKAQNLVLPNRKSPSPVAPHPSTFVATPASHNLVNQTNGTTKESALLLHVLLMVPDGKDFISGESEKQSPCNVYLNCKLFSTEEVTRSVIAWGTTQPVFNFSQVIPVSLSSKYLERLKNNVMVIETWNKVRSPGQDKLLGLVKLPLHQFYMSFKDAKISRLLLDAQYPVVAVDSYMPVIDVFSGHQNGSLRVFLAMGSSNQIMALQRLKNEEGTLPPFSPRPAHFLDQPTAASVAMAEDRGNGLMEHCFEIHIEMVKGLAPLQATVWGEADCYVQYYFPVQHSQSSVLKGPEFLENGITLKPFRTATTLCVPDPIFNSEHHHSLLLPAEVPVQRLLLSAFSAQGLVPGGGVQFEIWCRYYYPNVRDQKVAKGTLPLSRICAMVTTQHREDVGIQTFNLPLTPRIENRKELRNQSSGLLDVGLRYRRSPRTAEGVLAARTVSISVQIIRACGLQAAAKALAEREPALQFSATVGVNASVTTHLSFLPQGEQRRTHPVACSFCPEFSHHVEFTCNLVTQHCSGEACFLAELLEFAEVIFAVYHENTKSASDIISIESCKEYLLGVVKVPTKELLIKRSGITGWYPIILPEDGGLPHGLELMQKIVGGLELSISFTHRGDRERVLEAAEHLGWSFENSLKDFVRMDEGEPATVTISTPRLWLPIHCVLLAGHNHIHKNTYCYLRYKFYDHEAFWTPLKKPKESVNKKQIMVTFKASKRAEVTRGPSLLWYFREERLEIQVWRAYGNDSVERPHQTDSWIGSAYVDLARLGERSARTLTVSGVYPLFGRNASNLSGAALRVHVVLSSLSSHLEPTHELDSMDCSSHSESEQLPRRNDEVQLSPPEVISCHQKSPASTQVPCSSTTAEVRLTQEGPADLDGTFAVSILVERAMHLSLKDQESNLTHLVQV

SEQ ID NO: 90233 - protein, 92 aa, Homo sapiens
MANEEDDPVVQEIDVYLAKSLAEKLYLFQYPVRPASMTYDDIPHLSAKIKPKQQKQRGADCAERGRGLRRRDQHVFLEADGQADLLLFPDHQ

SEQ ID NO: 90234 - protein, 155 aa, Homo sapiens
MSYFGEHFWGEKNHGFEVLYHSVKQGPISTKELADFIRERATIEETYSKAMAKLSKLASNGTPMGTFAPLWEVFRVSSDKLALCHLELTRKLQDLIKDVLRYGEEQLKTHKKCKEEVVSTLDAVQVLSGVSQLLPKSRENYLNRCMDQERLRRES

SEQ ID NO: 90235 - protein, 48 aa, Homo sapiens
MSQSNRELVVDFLSYKLSQKGYSWSQFSDVEENRTEAPEGTESEMETP

SEQ ID NO: 90236 - protein, 448 aa, Homo sapiens
MIPTFTALLCLGLSLGPRTHMQAGPLPKPTLWAEPGSVISWGNSVTIWCQGTLEAREYRLDKEESPAPWDRQNPLEPKNKARFSIPSMTEDYAGRYRCYYRSPVGWSQPSDPLELVMTGAYSKPTLSALPSPLVTSGKSVTLLCQSRSPMDTFLLIKERAAHPLLHLRSEHGAQQHQAEFPMSPVTSVHGGTYRCFSSHGFSHYLLSHPSDPLELIVSGSLEGPRPSPTRSVSTAAGPEDQPLMPTGSVPHSGLRRHWEVLIGVLVVSILLLSLLLFLLLQHWRQGKHRTLAQRQADFQRPPGAAEPEPKDGGLQRRSSPAADVQGENFSGAAVKDTQPEDGVEMDTRSPHDEDPQAVTYAKVKHSRPRREMASPPSPLSGEFLDTKDRQAEEDRQMDTEAAASEAPQDVTYAQLHSFTLRQKATEPPPSQEGASPAEPSVYATLAIH

SEQ ID NO: 90237 - protein, 129 aa, Homo sapiens
MVLEYCPGGELFDYIISQDRLSEEETRVVFRQIVSAVAYVHSQGYAHRDLKPENLLFDEYHKLKLIDFGLCAKPKGNKDYHLQTCCGSLAYAAPELIQGKSYLGSEMFGAWAYCYMFLCVDFYHLMMIM

SEQ ID NO: 90238 - protein, 41 aa, Homo sapiens
FSNGRAGYSQQHQHRHSGHEREEERGDQFNYMKWKGKWKEH

SEQ ID NO: 90239 - protein, 378 aa, Homo sapiens
  MOD_RES (1)..(1): Any amino acid
XYSGDYMEPEKPGAPLLPPPPQNSVPHYAEADIVTLQGVTGGNTYAVPALPPGAVGDGPPRVDFPRSRLRFKEKLGEGQFGEVHLCEVDSPQDLVSLDFPLNVRKGHPLLVAVKILRPDATKNASFSLFSRNDFLKEVKIMSRLKDPNIIRLLGVCVQDDPLCMITDYMENGDLNQFLSAHQLEDKAAEGAPGDGQAAQGPTISYPMLLHVAAQIASGMRYLATLNFVHRDLATRNCLVGENFTIKIADFGMSRNLYAGDYYRVQGRAVLPIRWMAWECILMGKFTTASDVWAFGVTLWEVLMLCRAQPFGQLTDEQVIENAGEFFRDQGRQVYLSRPPACPQGLYELMLRCWSRESEQRPPFSQLHRFLAEDALNTV

SEQ ID NO: 90240 - protein, 263 aa, Homo sapiens
MPPPALFLSSLYPRLEFQNDFYRSCIRRSSPQPPPNLAWRPESLYSGELAGGGYLSLSKVVPFSHYAGTLLLLLAGVACLRGIGRWTNPQYRQFITILEATHRNQSSENKRQLANYNFDFRSWPVDFHWEEPSSRKESRGGPSRRGVALLRPEPLHRGTADTLLNRVKKLPCQITSYLVAHTLGRRMLYPGSVYLLQKALMPVLLQGQARLVEECNGRRAKLLACDGNEIDTMFVDRRGTAEPQGQKLVICCEGNAGFYEVGC

SEQ ID NO: 90241 - protein, 520 aa, Homo sapiens
  MOD_RES (1)..(1): Any amino acid
XNAYSFGRTTIANLKSGNNLLWLHTSFAFLYLLLTVYSMRRHTSKMRYKEDDLVKRTLFINGISKYAESEKIKKHFEEAYPNCTVLEARPCYNVARLMFLDAERKKAERGKLYFTNLQSKENVPTMINPKPCGHLCCCVVRGCEQVEAIEYYTKLEQKLKEDYKREKEKVNEKPLGMAFVTFHNETITAIILKDFNVCKCQGCTCRGEPRPSSCSESLHISNWTVSYAPDPQNIYWEHLSIRGFIWWLRCLVINVVLFILLFFLTTPAIIITTMDKFNVTKPVEYLNNPIITQFFPTLLLWCFSALLPTIVYYSAFFEAHWTRSGENRTTMHKCYTFLIFMVLLLPSLGLSSLDLFFRWLFDKKFLAEAAIRFECVFLPDNGAFFVNYVIASAFIGNAMDLLRIPGLLMYMIRLCLARSAAERRNVKRHQAYEFQFGAAYAWMMCVFTVVMTYSITCPIIVPFGLMYMLLKHLVDRYNLYYAYLPAKLDKKIHSGAVNQVVAAPILCLFWLLFFSTMRTD

SEQ ID NO: 90242 - protein, 112 aa, Homo sapiens
  MOD_RES (1)..(1): Any amino acid
XCARTAGGCLGCLSGQCCCRLCPLTLPATRSLCPGRVVWARRRWWPSWLAWRCLWCTTRPPACMENTDAFLFLFSFTDRASFEDLPGQLARIAGEAPGVVRMVIGSKFDQYM

SEQ ID NO: 90243 - protein, 1179 aa, Homo sapiens
MPTAESEAKVKTKVRFEELLKTHSDLMREKKKLKKKLVRSEENISPDTIRSNLHYMKETTSDDPDTIRSNLPHIKETTSDDVSAANTNNLKKSTRVTKNKLRNTQLATENPNGDASVEEDKQGKPNKKVIKTVPQLTTQDLKPETPENKVDSTHQKTHTKPQPGVDHQKSEKANEGREETDLEEDEELMQAYQCHVTEEMAKEIKRKIRKKLKEQLTYFPSDTLFHDDKLSSEKRKKKKEVPVFSKAETSTLTISGDTVEGEQKKESSVRSVSSDSHQDDEISSMEQSTEDSMQDDTKPKPKKTKKKTKAVADNNEDVDGDGVHEITSRDSPVYPKCLLDDDLVLGVYIHRTDRLKSDFMISHPMVKIHVVDEHTGQYVKKDDSGRPVSSYYEKENVDYILPIMTQPYDFKQLKSRLPEWEEQIVFNENFPYLLRGSDESPKVILFFEILDFLSVDEIKNNSEVQNQECGFRKIAWAFLKLLGANGNANINSKLRLQLYYPPTKPRSPLSVVEAFEWWSKCPRNHYPSTLYVTVRGLKVPDCIKPSYRSMMALQEEKGKPVHCERHHESSSVDTEPGLEESKEVIKWKRLPGQACRIPNKHLFSLNAGERGCFCLDFSHNGRILAAACASRDGYPIILYEIPSGRFMRELCGHLNIIYDLSWSKDDHYILTSSSDGTARIWKNEINNTNTFRVLPHPSFVYTAKFHPAVRELVVTGCYDSMIRIWKVEMREDSAILVRQFDVHKSFINSLCFDTEGHHMYSGDCTGVIVVWNTYVKINDLEHSVHHWTINKEIKETEFKGIPISYLEIHPNGKRLLIHTKDSTLRIMDLRILVARKFVGAANYREKIHSTLTPCGTFLFAGSEDGIVYVWNPETGEQVAMYSDLPFKSPIRDISYHPFENMVAFCAFGQNEPILLYIYDFHVAQQEAEMFKRYNGTFPLPGIHQSQDALCTCPKLPHQGSFQIDEFVHTESSSTKMQLVKQRLETVTEVIRSCAAKVNKNLSFTSPPAVSSQQSKLKQSNMLTAQEILHQFGFTQTGIISIERKPCNHQVDTAPTVVALYDYTANRSDELTIHRGDIIRVFFKDNEDWWYGSIGKGQEGYFPANHVASETLYQELPPEIKERSPPLSPEEKTKIEKSPAPQKQSINKNKSQDFRLGSESMTQRELNEKAGGICIAREGL

SEQ ID NO: 90244 - protein, 533 aa, Homo sapiens
MASQPNSSAKKKEEKGKNIQVVVRCRPFNLAERKASAHSIVECDPVRKEVSVRTGGLADKSSRKTYTFDMVFGASTKQIDVYRSVVCPILDEVIMGYNCTIFAYGQTGTGKTFTMEGERSPNEEYTWEEDPLAGIIPRTLHQIFEKLTDNGTEFSVKVSLLEIYNEELFDLLNPSSDVSERLQMFDDPRNKRGVIIKGLEEITVHNKDEVYQILEKGAAKRTTAATLMNAYSSRSHSVFSVTIHMKETTIDGEELVKIGKLNLVDLAGSENIGRSGAVDKRAREAGNINQSLLTLGRVITALVERTPHVPYRESKLTRILQDSLGGRTRTSIIATISPASLNLEETLSTLEYAHRAKNILNKPEVNQKLTKKALIKEYTEEIERLKRDLAAAREKNGVYISEENFRVMSGKLTVQEEQIVELIEKIGAVEEELNRVTELFMDNKNELDQCKSDLQNKTQELETTQKHLQETKLQLVKEEYITSALESTEEKLHDAASKSLSLSPRLEWQWHNLWLTATSTSQVQAILLPQPLE

SEQ ID NO: 90245 - protein, 265 aa, Homo sapiens
KTEIPMGKNYNKLKNTLRNLNLHTVCEEARCPNIGECWGGGEYATATATIMLMGDTCTRGCRFCSVKTARNPPPLDASEPYNTAKAIAEWGLDYVVLTSVDRDDMPDGGAEHIAKTVSYLKESKVRDPRANFDQSLRVLKHAKKVQPDVISKTSIMLGLGENDEQVYATMKALREADVDCLTLGQYMQPTRRHLKVEEYITPEKFKYWEKVGNELGFHYTASGPLVRSSYKAGSCCITQAGVQWHKSAHCNLDLPSSSDPPTSAS

SEQ ID NO: 90246 - protein, 143 aa, Homo sapiens
MSDILRELLCVSEKAANIARACRQQEALFQLLIEEKKEGEKNKKFAVDFKTLADVLVQEVIKQNMENKFPGLEKNIFGEESNEFTNDWGEKITLRLCSTEEETAELLSKVLNGNKVASEALARVVHQDVAFTDPTLDSTEINV

SEQ ID NO: 90247 - protein, 994 aa, Homo sapiens
MQATPSEAEAGGESPQSCVSAAHSDWTAGKPVSLLAPLIPPRSAGQPLTFSPSGRQPLRSLLVGMCSGSGRRRSSLSPTMRPGTGAERGGLMMGHPGMHYAPMGMHPMGQRANMPPVPHGMMPQMMPPMGGPPMGQMPGMMSSVMPGMMMSHMSQASMQPALPPGVNSMDVAAGTASGAKSMWTEHKSPDGRTYYYNTETKQSTWEKPDDLKTPAEQLLSKCPWKEYKSDSGKPYYYNSQTKESRWAKPKELEDLEGYQNTIVAGSLITKSNLHAMIKAEESSKQEECTTTSTAPVPTTEIPTTMSTMAAAEAAAAVVAAAAAAAAAAAAANANASTSASNTVSGTVPVVPEPEVTSIVATVVDNENTVTISTEEQAQLTSTPAIQDQSVEVSSNTGEETSKQETVADFTPKKEEEESQPAKKTYTWNTKEEAKQAFKELLKEKRVPSNASWEQAMKMIINDPRYSALAKLSEKKQAFNAYKVQTEKEEKEEARSKYKEAKESFQRFLENHEKMTSTTRYKKAEQMFGEMEVWNAISERDRLEIYEDVLFFLSKKEKEQAKQLRKRNWEALKNILDNMANVTYSTTWSEAQQYLMDNPTFAEDEELQNMDKEDALICFEEHIRALEKEEEEEKQKSLLRERRRQRKNRESFQIFLDELHEHGQLHSMSSWMELYPTISSDIRFTNMLGQPGSTALDLFKFYVEDLKARYHDEKKIIKDILKDKGFVVEVNTTFEDFVAIISSTKRSTTLDAGNIKLAFNSLLEKAEAREREREKEEARKMKRKESAFKSMLKQAAPPIELDAVWEDIRERFVKEPAFEDITLESERKRIFKDFMHVLEHECQHHHSKNKKHSKKSKKHHRKRSRSRSGSDSDDDDSHSKKKRQRSESRSASEHSSSAESERSYKKSKKHKKKSKKRRHKSDSPESDAEREKDKKEKDRESEKDRTRQRSESKHKSPKKKTGKDSGNWDTSGSELSEGELEKRRRTLLEQLDDDQ

SEQ ID NO: 90248 - protein, 247 aa, Homo sapiens
MISFCPDCGKSIQAAFKFCPYCGNSLPVEEHVGSQTFVNPHVSSFQGSKRGLNSSFETSPKKVKWSSTVTSPRLSLFSDGDSSESEDTLSSSERSKGSGSRPPTPKSSPQKTRKSPQVTRGSPQKTSCSPQKTRQSPQTLKRSRVTTSLEALPTGTVLTDKSGRQWKLKSFQTRDNQGILYEAAPTSTLTCDSGPQKQKFSLKLVLGVTQPGEEPSVGPGCQPKACAVREVCAAGGLPAAGCPGVPP

SEQ ID NO: 90249 - protein, 152 aa, Homo sapiens
MTHCGHLGSLGHPCWLCSILVPRHWNALVSRNEVQAHGCDVTEHVKSEVLWKVKPLNGSPGPKDGSQTEKTPSADQNQEQFEEHFVASSVGEMWQVVDMAQQEEDQSSKTAAVHKHSFHLSFCFSLASVMVFSGGPLRRTFPNIQLCFMLTH

SEQ ID NO: 90250 - protein, 511 aa, Homo sapiens
MSTNENANTPAARLHRFKNKGKDSTEMRRRRIEVNVELRKAKKDDQMLKRRNVSSFPDDATSPLQENRNNQGTVNWSVDDIVKGINSSNVENQLQATQAARKLLSREKQPPIDNIIRAGLIPKFVSFLGRTDCSPIQFESAWALTNIASGTSEQTKAVVDGGAIPAFISLLASPHAHISEQAVWALGNIAGDGSVFRDLVIKYGAVDPLLALLAVPDMSSLACGYLRNLTWTLSNLCRNKNPAPPIDAVEQILPTLVRLLHHDDPEVLADTCWAISYLTDGPNERIGMVVKTGVVPQLVKLLGASELPIVTPALRAIGNIVTGTDEQTQVVIDAGALAVFPSLLTNPKTNIQKEATWTMSNITAGRQDQIQQVVNHGLVPFLVSVLSKADFKTQKEAVWAVTNYTSGGTVEQIVYLVHCGIIEPLMNLLTAKDTKIILVILDAISNIFQAAEKLGETEKLSIMIEECGGLDKIEALQNHENESVYKASLSLIEKYFSVEVRRSKRCTRNYL

SEQ ID NO: 90251 - protein, 102 aa, Homo sapiens
MSEGVDLIDIYADEEFNQDPEFNNTDQIDLYDDVLTATSQPSDDRSSSTEPPPPVRQEPSPKPNNKTPAILYTYSGLRNRRAAVYVGSFSWWTTDQQLIQVC

SEQ ID NO: 90252 - protein, 536 aa, Homo sapiens
MLCASFLGLGLSVAIVGPTFQDLATNVNRNISSLSFIFVGRALGYLSGSVIGGFLVDVMNYFLLLGISMSATTVGLYLVPFCKTAILLTVMMSIFGVSIGILDTESWLFRFLDVCFASVTYISGNVLILAIWGDKGAPHMQALHFSFALGAFLAPLLAKLALGPTASAENHTESDFHPALNQSSDADSEALFGVPNDKNLLWAYAVIGTYMFLVSVIFFCLFLKNSSKQEKARASAETFRRAKYHNALLCLLFLFFFFYVGAEVTYGSYVFSFATTHAGMKESEAAGLNSIFWGTFAACRGLAIFFATCLQPGTMIVLSNIGSLTSSLFLVLFDKNPICLWIATSVYGASMATTFPSGVSWIEQYTTIHGKSAAFFVIGASLGEMAIPAVIGILQGKYPDLPVVLYTSLGASIATGILFPVLYKLATSPLDRQRKEDRKSEDQKALLSSSGLNEYEEENEEEDAEKWNEMDFEMIETNDTMRHSIIETSRSSLTEPTAEVYNQYPSNALVFESSPFNTGSAHVKHLPETRTKGTNV

SEQ ID NO: 90253 - protein, 59 aa, Homo sapiens
MPPRKKRRQPSQKAPLLFHQQPLEGPKHSCASTQLPITHTRQVPSKPIDHSTITSWAFC

SEQ ID NO: 90254 - protein, 104 aa, Homo sapiens
MLLLHRAVVLRLQQACRLKSIPSRICIQACSTNDSFQPQRPSLTFSGDNSSTQGWRVMGTLLGLGAVLAYQDHRCRAAQESTHIYTKEEVRDHSHSAVCRQPTL

SEQ ID NO: 90255 - protein, 632 aa, Homo sapiens
MAAAAPRRPTQGTVTFEDVAVKFTQEEWNLLSEAQRCLYRDVTLENLALMSSLGCWCGVEDEAAPSKQSIYIQRETQVRTPVTGVSPKKAHPCEMCGPILGDILHVADHQGTHHKQKLHRCEAWGNKLYDSGNFHQHQNEHIGEKPYRGSVEEALFVKRCKLHVSGESSVFSESGKDFLPRSGLLQQEASHTGEKSNSKTECVSPFQCGGAHYSHGDSMKHFSTKHILSQHQRLLPREECYVCCECGKSFSKYVSFSNHQRVHSGKRPYECGECEKSFSQKSSLIQHQQFHTGGKPYGCEECGKYFSLEGYLRRHQKVHAGKGPYECGECGKSFSSNVNLKSHQRIHTGERPYKCGECEKSFSRKPSLSYHQRIHTEVRPYKCGECGKSYISKGHLRIHQRMHTGERPYKCGDCGKSFNEKGHLRSHQRVHTTERPYKCGECGKCFSHKGNLILHQHGHTRKRPYMCWECGKLFKKKSHLLVHQRIHSGEKPYACEACQKFFRHKCHLTAHQRVHTGERPYECSDCGKSFTHSCAFIVHKRVHTGQKPYECSECGKSFAASSYLTSHRRVHTGQKPYECSECGKSFAGISSLTNHRRVHTGEKPYGCSECEKKFRKSSSLRYHQRVHERKAL

SEQ ID NO: 90256 - protein, 116 aa, Homo sapiens
MGTGLRSQSLREPRPSYGKLQEPWGRPQEGQLRRALSLRQGQEKSRSQGLERGTEGPDATAQERVPGSLGDTEQLIQAQRRGSRWWLRRYQQQVRRRWESFVAIFPSVTLSQPASP

SEQ ID NO: 90257 - protein, 156 aa, Homo sapiens
MTHEEHHAAKTLGIGKAIAVLTSGGDAQGMNAAVRAVVRVGIFTGARVFFVHEGYQGLVDGGDHIKEATWESVSMMLQLGGTVIGSARCKDFREREGRLRAAYNLVKRGITNLCVIGGDGSLTGADTFRSEWSDLLSDLQKADDDWEEHLCRRLSE

SEQ ID NO: 90258 - protein, 29 aa, Homo sapiens
MSNSNTTQETLEIMKESEKKLVEESVNKN

SEQ ID NO: 90259 - protein, 334 aa, Homo sapiens
MLKPSLPFTSLLFLQLPLLGVGLNTTILTPNGNEDTTADFFLTTMPTDSLSVSTLPLPEVQCFVFNVEYMNCTWNSSSEPQPTNLTLHYWYKNSDNDKVQKCSHYLFSEEITSGCQLQKKEIHLYQTFVVQLQDPREPRRQATQMLKLQNLVIPWAPENLTLHKLSESQLELNWNNRFLNHCLEHLVQYRTDWDHSWTEQSVDYRHKFSLPSVDGQKRYTFRVRSRFNPLCGSAQHWSEWSHPIHWGSNTSKENPFLFALEAVVISVGSMGLIISLLCVYFWLERTMPRIPTLKNLEDLVTEYHGNFSAWSGVSKGLAESLQPDYSERLCLGTL

SEQ ID NO: 90260 - protein, 132 aa, Homo sapiens
MASYYEILDVPRSASADDIKKAYRRKALQWHPDKNPDNKEFAEKKFKEVAEAYEVLSDKHKREIYDRYGREGLTGTGTGPSRAEAGSGGPGFTFTFRSPEEVFREFFGSGDPFAELFGEWTLEASEWLNFPL

SEQ ID NO: 90261 - protein, 244 aa, Homo sapiens
MLPAATEVQLRLQGQKDMVWKWMPLLLLLVCVATMCSAQDRTDLLNVCMDAKHHKTKPGPEDKLHDQCSPWKKNACCTASTSQELHKDTSRLYNFNWDHCGKMEPACSATSSRTPVSMSAHQPGALDPAGIRAGAKNASWMCPYAKRTVSAGGRIVTPPTRARATGTEDGTGPQELTSAQLGLSAAPLSPTSPLQLPFVKASGVTHTRSATTAEGAAAASRCGLIQPRATPTRKWRGSMLQPCM

SEQ ID NO: 90262 - protein, 92 aa, Homo sapiens
IDVTFKSTNPYGWPQIVLSVYGPDVFGNDVVRGYGAVHVPFSPGRHKRTIPMFVPESTSKLQKFTSWFMGRRPEYTDPKVVAQGEGREAQPG

SEQ ID NO: 90263 - protein, 5379 aa, Homo sapiens
MWPSYQDEHEFNAHLVCRMCCMDERDRVQKKTFTKWVNKHLMKVRKHINDLYEDLRDGHNLISLLEVLSGIKLPREKGRMRFHRLQNVQIALDFLKQRQVKLVNIRNDDITDGNPKLTLGLIWTIILHFQISDIYISGESGDMSAKEKLLLWTQKVTAGYTGIKCTNFSSCWSDGKMFNALIHRYRPDLVDMERVQIQSNRENLEQAFEVAERLGVTRLLDAEDVDVPSPDEKSVITYVSSIYDAFPKVPEGGEGISATEVDSRWQEYQSRVDSLIPWIKQHTILMSDKTFPQNPVELKALYNQYIHFKETEILAKEREKGRIEELYKLLEVWIEFGRIKLPQGYHPNDVEEEWGKLIIEMLEREKSLRPAVERLELLLQIANKIQNGALNCEEKLTLAKNTLQADAAHLESGQPVQCESDVIMYIQECEGLIRQLQVDLQILRDENYYQLEELAFRVMRLQDELVTLRLECTNLYRKGHFTSLELVPPSTLTTTHLKAEPLTKATHSSSTSWFRKPMTRAELVAISSSEDEGNLRFVYELLSWVEEMQMKLERAEWGNDLPSVELQLETQQHIHTSVEELGSSVKEARLYEGKMSQNFHTSYAETLGKLETQYCKLKETSSFRMRHLQSLHKFVSRATAELIWLNEKEEEELAYDWSDNNSNISAKRNYFSELTMELEEKQDVFRSLQDTAELLSLENHPAKQTVEAYSAAVQSQLQWMKQLCLCVEQHVKENTAYFQFFSDARELESFLRNLQDSIKRKYSCDHNTSLSRLEDLLQDSMDEKEQLIQSKSSVASLVGRSKTIVQLKPRSPDHVLKNTISVKAVCDYRQIEITICKNDECVLEDNSQRTKWKVISPTGNEAMVPSVCFLIPPPNKDAIEMASRVEQSYQKVMALWHQLHVNTKSLISWNYLRKDLDLVQTWNLEKLRSSAPGECHQIMKNLQAHYEDFLQDSRDSVLFSVADRLRLEEEVEACKARFQHLMKSMENEDKEETVAKMYISELKNIRLRLEEYEQRVVKRIQSLASSRTDRDAWQDNALRIAEQEHTQEDLQQLRSDLDAVSMKCDSFLHQSPSSSSVPTLRSELNLLVEKMDHVYGLSTVYLNKLKTVDVIVRSIQDAELLVKGYEIKLSQEEVVLADLSALEAHWSTLRHWLSDVKDKNSVFSVLDEEIAKAKVVAEQMSRLTPERNLDLERYQEKGSQLQERWHRVIAQLEIRQSELESIQEVLGDYRACHGTLIKWIEETTAQQEMMKPGQAEDSRVLSEQLSQQTALFAEIERNQTKLDQCQKFSQQYSTIVKDYELQLMTYKAFVESQQKSPGKRRRMLSSSDAITQEFMDLRTRYTALVTLTTQHVKYISDALRRLEEEEKVVEEEKQEHVEKVKELLGWVSTLARNTQGKATSSETKESTDIEKAILEQQVLSEELTTKKEQVSEAIKTSQIFLAKHGHKLSEKEKKQISEQLNALNKAYHDLCDGSANQLQQLQSQLAHQTEQKTLQKQQNTCHQQLEDLCSWVGQAERALAGHQGRTTQQDLSALQKNQSDLKDLQDDIQNRATSFATVVKDIEGFMEENQTKLSPRELTALREKLHQAKEQYEALQEETRVAQKELEEAVTSALQQETEKSKAAKELAENKKKIDALLDWVTSVGSSGGQLLTNLPGMEQLSGASLEKGALDTTDGYMGVNQAPEKLDKQCEMMKARHQELLSQQQNFILATQSAQAFLDQHGHNLTPEEQQMLQQKLGELKEQYSTSLAQSEAELKQVQTLQDELQKFLQDHKEFESWLERSEKELENMHKGGSSPETLPSLLKRQGSFSEDVISHKGDLRFVTISGQKVLDMENSFKEGKEPSEIGNLVKDKLKDATERYTALHSKCTRLGSHLNMLLGQYHQFQNSADSLQAWMQACEANVEKLLSDTVASDPGVLQEQLATTKQLQEELAEHQVPVEKLQKVARDIMEIEGEPAPDHRHVQETTDSILSHFQSLSYSLAERSSLLQKAIAQSQSVQESLESLLQSIGEVEQNLEGKQVSSLSSGVIQEALATNMKLKQDIARQKSSLEATREMVTRFMETADSTTAAVLQGKLAEVSQRFEQLCLQQQEKESSLKKLLPQAEMFEHLSGKLQQFMENKSRMLASGNQPDQDITHFFQQIQELNLEMEDQQENLDTLEHLVTELSSCGFALDLCQHQDRVQNLRKDFTELQKTVKEREKDASSCQEQLDEFRKLVRTFQKWLKETEGSIPPTETSMSAKELEKQIEHLKSLLDDWASKGTLVEEINCKGTSLENLIMEITAPDSQGKTGSILPSVGSSVGSVNGYHTCKDLTEIQCDMSDVNLKYEKLGGVLHERQESLQAILNRMEEVHKEANSVLQWLESKEEVLKSMDAMSSPTKTETVKAQAESNKAFLAELEQNSPKIQKVKEALAGLLVTYPNSQEAENWKKIQEELNSRWERATEVTVARQRQLEESASHLACFQAAESQLRPWLMEKELMMGVLGPLSIDPNMLNAQKQQVQFMLKEFEARRQQHEQLNEAAQGILTGPGDVSLSTSQVQKELQSINQKWVELTDKLNSRSSQIDQAIVKSTQYQELLQDLSEKVRAVGQRLSVQSAISTQPEAVKQQLEETSEIRSDLEQLDHEVKEAQTLCDELSVLIGEQYLKDELKKRLETVALPLQGLEDLAADRINRLQAALASTQQFQQMFDELRTWLDDKQSQQAKNCPISAKLERLQSQLQENEEFQKSLNQHSGSYEVIVAEGESLLLSVPPGEEKRTLQNQLVELKNHWEELSKKTADRQSRLKDCMQKAQKYQWHVEDLVPWIEDCKAKMSELRVTLDPVQLESSLLRSKAMLNEVEKRRSLLEILNSAADILINSSEADEDGIRDEKAGINQNMDAVTEELQAKTGSLEEMTQRLREFQESFKNIEKKVEGAKHQLEIFDALGSQACSNKNLEKLRAQQEVLQALEPQVDYLRNFTQGLVEDAPDGSDASQLLHQAEVAQQEFLEVKQRVNSGCVMMENKLEGIGQFHCRVREMFSQLADLDDELDGMGAIGRDTDSLQSQIEDVRLFLNKIHVLKLDIEASEAECRHMLEEEGTLDLLGLKRELEALNKQCGKLTERGKARQEQLELTLGRVEDFYRKLKGLNDATTAAEEAEALQWVVGTEVEIINQQLADFKMFQKEQVDPLQMKLQQVNGLGQGLIQSAGKDCDVQGLEHDMEEINARWNTLNKKVAQRIAQLQEALLHCGKFQDALEPLLSWLADTEELIANQKPPSAEYKVVKAQIQEQKLLQRLLDDRKATVDMLQAEGGRIAQSAELADREKITGQLESLESRWTELLSKAAARQKQLEDILVLAKQFHETAEPISDFLSVTEKKLANSEPVGTQTAKIQQQIIRHKALEEDIENHATDVHQAVKIGQSLSSLTSPAEQGVLSEKIDSLQARYSEIQDRCCRKAALLDQALSNARLFGEDEVEVLNWLAEVEDKLSSVFVKDFKQDVLHRQHADHLALNEEIVNRKKNVDQAIKNGQALLKQTTGEEVLLIQEKLDGIKTRYADITVTSSKALRTLEQARQLATKFQSTYEELTGWLREVEEELATSGGQSPTGEQIPQFQQRQKELKKEVMEHRLVLDTVNEVSRALLELVPWRAREGLDKLVSDANEQYKLVSDTIGQRVDEIDAAIQRSQQYEQAADAELAWVAETKRKLMALGPIRLEQDQTTAQLQVQKAFSIDIIRHKDSMDELFSHRSEIFGTCGEEQKTVLQEKTESLIQQYEAISLLNSERYARLERAQVLVNQFWETYEELSPWIEETRALIAQLPSPAIDHEQLRQQQEEMRQLRESIAEHKPHIDKLLKIGPQLKELNPEEGEMVEEKYQKAENMYAQIKEEVRQRALALDEAVSQSTQITEFHDKIEPMLETLENLSSRLRMPPLIPAEVDKIRECISDNKSATVELEKLQPSFEALKRRGEELIGRSQGADKDLAAKEIQDKLDQMVFFWEDIKARAEEREIKFLDVLELAEKFWYDMAALLTTIKDTQDIVHDLESPGIDPSIIKQQVEAAETIKEETDGLHEELEFIRILGADLIFACGETEKPEVRKSIDEMNNAWENLNKTWKERLEKLEDAMQAAVQYQDTLQAMFDWLDNTVIKLCTMPPVGTDLNTVKDQLNEMKEFKVEVYQQQIEMEKLNHQGELMLKKATDETDRDIIREPLTELKHLWENLGEKIAHRQHKLEGALLALGQFQHALEELMSWLTHTEELLDAQRPISGDPKVIEVELAKHHVLKNDVLAHQATVETVNKAGNELLESSAGDDASSLRSRLEAMNQCWESVLQKTEEREQQLQSTLQQAQGFHSEIEDFLLELTRMESQLSASKPTGGLPETAREQLDTHMELYSQLKAKEETYNQLLDKGRLMLLSRDDSGSGSKTEQSVALLEQKWHVVSSKMEERKSKLEEALNLATEFQNSLQEFINWLTLAEQSLNIASPPSLILNTVLSQIEEHKVFANEVNAHRDQIIELDQTGNQLKFLSQKQDVVLIKNLLVSVQSRWEKVVQRSIERGRSLDDARKRAKQFHEAWKKLIDWLEDAESHLDSELEISNDPDKIKLQLSKHKEFQKTLGGKQPVYDTTIRTGRALKEKTLLPEDSQKLDNFLGEVRDKWDTVCGKSVERQHKLEEALLFSGQFMDALQALVDWLYKVEPQLAEDQPVHGDLDLVMNLMDAHKVFQKELGKRTGTVQVLKRSGRELIENSRDDTTWVKGQLQELSTRWDTVCKLSVSKQSRLEQALKQAEVFRDTVHMLLEWLSEAEQTLRFRGALPDDTEALQSLIDTHKEFMKKVEEKRVDVNSAVAMGEVILAVCHPDCITTIKHWITIIRARFEEVLTWAKQHQQRLETALSELVANAELLEELLAWIQWAETTLIQRDQEPIPQNIDRVKALIAEHQTFMEEMTRKQPDVDRVTKTYKRKNIEPTHAPFIEKSRSGGRKSLSQPTPPPMPILSQSEAKNPRINQLSARWQQVWLLALERQRKLNDALDRLEELKEFANFDFDVWRKKYMRWMNHKKSRVMDFFRRIDKDQDGKITRQEFIDGILASKFPTTKLEMTAVADIFDRDGDGYIDYYEFVAALHPNKDAYRPTTDADKIEDEVTRQVAQCKCAKRFQVEQIGENKYRFGDSQQLRLVRILRSTVMVRVGGGWMALDEFLVKNDPCRARGRTNIELREKFILPEGASQGMTPFRSRGRRSKPSSRAASPTRSSSSASQSNHSCTSMPSSPATPASGTKVIPSSGSKLKRPTPTFHSSRTSLAGDTSNSSSPASTGAKTNRADPKKSASRPGSRAGSRAGSRASSRRGSDASDFDLLETQSACSDTSESSAAGGQGNSRRGLNKPSKIPTMSKKTTTASPRTPGPKR

SEQ ID NO: 90264 - protein, 708 aa, Homo sapiens
MDDWKSRLVIKSMLPHFAMVGNRQEPRKLQESGTVKRRQEEDHFQFPDMADGGYPNKIKRPCLEDVTLAMGPGAHPSTACAELQVPPLTINPSPAAMGVAGQSLLLENNPMNGNIMGSPFVVPQTTEVGLKGPTVPYYEKINSVPAVDQELQELLEELTKIQDPSPNELDLEKILGTKPEEPLVLDHPQATLSTTPKPSVQMSHLESLASSKEFASSCSQVTGMSLQIPSSSTGISYSIPSTSKQIVSPSSSMAQSKSQVQAMLPVALPPLPVPQWHHAHQLKALAASKQGSATKQQGPTPSWSGLPPPGLSPPYRPVPSPHPPPLPLPPPPPPFSPQSLMVSCMSSNTLSGSTLRGSPNALLSSMTSSSNAALGPAMPYAPEKLPSPALTQQPQFGPQSSILANLMSSTIKTPQGHLMSALPASNPGPSPPYRPEKLSSPGLPQQSFTPQCSLIRSLTPTSNLLSQQQQQQQQQQQANVIFKPISSNSSKTLSMIMQQGMASSSPGATEPFTFGNTKPLSHFVSEPGPQKMPSMPTTSRQPSLLHYLQQPTPTQASSATASSTATATLQLQQQQQQQQQQPDHSSFLLQQMMQQPQRFQRSVASDSMPALPRQTHVDKACKLGEARHPQVSLGRQPPSCQALGSESFLPGSSFAHELARVTSSYSTSEAAPWGSWDPKAWRQVPAPLLPSCDATARGTEIRSYGNDP

SEQ ID NO: 90265 - protein, 86 aa, Homo sapiens
MRDNTSPISVILVSSGSRGNKLLFRYPFQRSQEHPASQTSKPRSRYAASNTGDHADEQDGDSRQSFTLSPKAGVQWCDLGLLQPHL

SEQ ID NO: 90266 - protein, 552 aa, Homo sapiens
MVSNPVHGLPFLPGTSFKDSTKTAFHRSQTLSYRNGYAIVRRPTVGIGGDRLQFNQLSQAELDELASKAPVLTYGQPKQAPPADFIPAHVAFDKKVLKFDAYFQEDVPMSTEEQYRIRQVNIYYYLEDDSMSVIEPVVENSGILQGKLIKRQRLAKNDRGDHYHWKDLNRGINITIYGKTFRVVDCDQFTQVFLESQGIELNPPEKMALDPYTELRKQPLRKYVTPSDFDQLKQFLTFDKQVLRFYAIWDDTDSMYGECRTYIIHYYLMDDTVEIREVHERNDGRDPFPLLMNRQRVPKVLVENAKNFPQCVLEISDQEVLEWYTAKDFIVGKSLTILGRTFFIYDCDPFTRRYYKEKFGITDLPRIDVSKREPPPVKQELPPYNGFGLVEDSAQNCFALIPKAPKKDVIKMLVNDNKVLRYLAVLESPIPEDKDRRFVFSYFLATDMISIFEPPVRNSGIIGGKYLGRTKVVKPYSTVDNPVYYGPSDFFIGAVIEVFGHRFIILDTDEYVLKYMESNAAQYSPEALASIQNHVRKREAPAPEAERCVFDC

SEQ ID NO: 90267 - protein, 1397 aa, Homo sapiens
MQPLTKDAGMSLSSVTLASALQVRGEALSEEEIWSLLFLAAEQLLEDLRNDSSDYVVCPWSALLSAAGSLSFQGRVSHIEAAPFKAPELLQGQSEDEQPDASQMHVYSLGMTLYWSAGFHVPPHQPLQLCEPLHSILLTMCEDQPHRRCTLQSVLEACRVHEKEVSVYPAPAGLHIRRLVGLVLGTISEVEKRVVEESSSVQQNRSYLLRKRLRGTSSESPAAQAPECLHPCRVSERSTETQSSPEPHWSTLTHSHCSLLVNRALPGADPQDQQAGRRLSSGSVHSAADSSWPTTPSQRGFLQRRSKFSRPEFILLAGEAPMTLHLPGSVVTKKGKSYLALRDLCVVLLNGQHLEVKCDVESTVGAVFNAVTSFANLEELTYFGLAYMKSKEFFFLDSETRLCKIAPEGWREQPQKTSMNTFTLFLRIKFFVSHYGLLQHSLTRHQFYLQLRKDILEERLYCNEEILLQLGVLALQAEFGNYPKEQVESKPYFHVEDYIPASLIERMTALRVQVEVSEMHRLSSALWGEDAELKFLRVTQQLPEYGVLVHQVFSEKRRPEEEMALGICAKGVIVYEVKNNSRIAMLRFQWRETGKISTYQKKFTITSSVTGKKHTFVTDSAKTSKYLLDLCSAQHGFNAQMGSGQPSHVLFDHDKFVQMANLSPAHQARSKPLIWIQRLSCSENELFVSRLQGAAGGLLSTSMDNFNVDGSKEAGAEGIGRSPCTGREQLKSACVIQKPMTWDSLSGPPVQSMHAGSKNNRRKSFIAEPGREIVRVTLKRDPHRGFGFVINEGEYSGQADPGIFISSIIPGGPAEKAKTIKPGGQILALNHISLEGFTFNMAVRMIQNSPDNIELIISQSKGVGGNNPDEEKNSTANSGVSSTDILSFGYQGSLLSHTQDQDRNTEELDMAGVQSLVPRLRHQLSFLPLKGAGSSCPPSPPEISAGEIYFVELVKEDGTLGFSVTGGINTSVPYGGIYVKSIVPGGPAAKEGQILQGDRLLQVDGVILCGLTHKQAVQCLTGPGQVARLVLERRVPRSTQQCPSANDSMGDERTAVSLVTALPGRPSSCVSVTDGPKFEVKLKKNANGLGFSFVQMEKESCSHLKSDLVRIKRLFPGQPAEENGAIAAGDIILAVNGRSTEGLIFQEVLHLLRGAPQEVTLLLCRPPPGALPELEQEWQTPELSADKEFTRATCTDSCTSPILDQEDSWRDSASPDAGEGLGLRPESSQKAIREAQWGQNRERPWASSLTHSPESHPHLCKLHQERDESTLATSLEKDVRQNCYSVCDIMRLGSPELDGEDGEGDMYHPCGAPSPTSEDEEYLTINSTCQGQLPCEECLEADSGTIPLPQFCSWGTVPESLPPEESPESGSEWEDLEEPVALEYGALRSLSFGGLNV

SEQ ID NO: 90268 - protein, 167 aa, Homo sapiens
MTTMQGMEQTTPGAGPDVPQLGNIDVIHSYLCKGLQEKFFKRKPKVLGVVRILIALMSLSMGIIMMCVAFSSYEEHPIFVYVAYTIWGSVMFIISVSLSVAAGIRTTKGLGTDGMVLLLSVLEFCIAVALSAFGCKVLCCSPSEFVLITPSNSHMAEIASPTPLKTV

SEQ ID NO: 90269 - protein, 219 aa, Homo sapiens
MDAATLTYDTLRFAEFEDFPETSEPVWILGRKYSIFTEKDEILSDVASRLWFTYRKNFPAIGGTGPTSDTGWGCMLRCGQMIFAQALVCRHLGRDWRWTQRKRQPDSYFSVLNAFIDRKDSYYSIHQIGRLCRTSVPCAGATAFPADSDRHCNGFPAGAEVTNRPSPWRPLVLLIPLRLGLTDINEAYVETLKHCFMMPQSLGVIGGKPNSAHYFIGYV

SEQ ID NO: 90270 - protein, 109 aa, Homo sapiens
MNVGVAHSEVNPNTRVMNSRGMWLTYALGVGLLHIVLLSIPFFSVPVAWTLTNIIHNLGMYVFLHAVKGTPFETPDQGKARLLTHWEQLDYGVQFTSSRKFFTISPIIL

SEQ ID NO: 90271 - protein, 296 aa, Homo sapiens
MASEIHMTGPMCLIENTNGRLMANPEALKILSAITQPMVVVAIVGLYRTGKSYLMNKLAGKKKGFSLGSTVQSHTKGIWMWCVPHPKKPGHILVLLDTEGLGDVEKGDNQNDSWIFALAVLLSSTFVYNSIGTINQQAMDQLYYVTELTHRIRSKSSPDENENEVEDSADFVSFFPDFVWTLRDFSLDLEADGQPLTPDEYLTYSLKLKKGTSQKDETFNLPRLCIRKFFPKKKCFVFDRPVHRRKLAQLEKLQDEELDPEFVQQVADFCSYIFSNSKTKTLSGGIQVNGPRKSPS

SEQ ID NO: 90272 - protein, 215 aa, Homo sapiens
MKDYDELLKYYELHETIGTGGFAKVKLACHILTGEMVAIKIMDKNTLGSDLPRIKTEIEALKNLRHQHICQLYHVLETANKIFMVLEENLLFDEYHKLKLIDFGLCAKPKGNKDYHLQTCCGSLAYAAPELIQGKSYLGSEADVWSMGILLYVLMCGFLPFDDDNVMALYKKIMRGKYDVPKWLSPSSILLLQQMLQVDPKKRISMKNLLNHPWI

SEQ ID NO: 90273 - protein, 77 aa, Homo sapiens
MATALLAGEKLRELILPGAQDDKAGALAALLLQLKLELPFDRVVTIGTVLVPILLVTLVFTKNFAGWTLFSGSWDWL

SEQ ID NO: 90274 - protein, 499 aa, Homo sapiens
MWRLPRALCVHAAKTSKLSGPWSRPAAFMSTLLINQPQYAWLKELGLREENEGVYNGSWGGRGEIPAPKRGEIVRQIGDALREKIQVLGSLVSLEMGKILVEGVGEVQEYVDICDYAVGLSRMIGGPILPSERSGHALIEQWNPVGLVGIITAFNFPVAVYGWNNAIAMICGNVCLWKGAPTTSLISVAVTKIIAKVLEDNKLPGAICSLTCGGADIGTAMAKDERVNLLSFTGSTQVGKQVGLMVQERFGRSLLELGGNNAIIAFEDADLSLVVPSALFAAVGTAGQRCTTARRLFIHESIHDEVVNRLKKAYAQIRVGNPWDPNVLYGPLHTKQAVSMFLGAVEEAKKEGGTVVYGGKVMDRPGNYVEPTIVTGLGHDASIAHTETFAPILYVFKFKNEEEVFAWNNEVKQGLSSSIFTKDLGRIFRWLGPKGSDCGIVNVNIPTSGAEIGGAFGGEKHTGGGRESGSDAWKQYMRRSTCTINYSKDLPLAQGIKFQ

SEQ ID NO: 90275 - protein, 147 aa, Homo sapiens
VALAGLLMTLPHFISEPYRYDNTSPEDMPQDFKASLCLPTTSAPASAPSNGNCSSYTETQHLSVVGIMFVAQTLLGVGGVPIQPFGISYIDDFAHNSNSPLYLGILFAVTMMGPGLAFGLGSLMLRLYVDINQMPEGEPQEHMFARP

SEQ ID NO: 90276 - protein, 93 aa, Homo sapiens
MFLTKNCKQEQERVESAKMFLLAITCAFVSKTLSGSYMNSMLTQIERQFNIPTSLVGFINGSFEIDMNMNLQFQFQATCPQTVSCVWKMEPRF

SEQ ID NO: 90277 - protein, 205 aa, Homo sapiens
MSVEYDKFIESGRKWFCHVDDDNYVNARSLLHLLSSFSPSQDVYLGRPSLDHPIEATERVQGGRTVTTVKFWFATGGAGFCLSRGLALKMSPWASLGSFMSTAEQVRLPDDCTVGYIVEGLLGARLLHSPLFHSHLENLQRLPPDTLLQQVTLSHGGPENPHNVVNVAGGFSLHQDPTRFKSIHCLLYPDTDWCPRQKQGAPTSR

SEQ ID NO: 90278 - protein, 17 aa, Homo sapiens
MYVCWDYAAPNATARAS

SEQ ID NO: 90279 - protein, 306 aa, Homo sapiens
MLFGSEICKEGKCVNTQPGYECYCKQGFYYDGNLLECVDVDECLDESNCRNGVCENTRGGYRCACTPPAEYSPAQRQCLSPEEMDVDECQDPAACRPGRCVNLPGSYRCECRPPWVPGPSGRDCQLPESPAERAPERRDVCWSQRGEDGMCAGPLAGPALTFDDCCCRQGRGWGAQCRPCPPRGAGSHCPTSQSESNSFWDTSPLLLGKPPRDEDSSEEDSDECRCVSGRCVPRPGGAVCECPGGFQLDASRARCVDIDECRELNQRGLLCKSERCVNTSGSFRCVCKAGFARSRPHGACVPQRRR

SEQ ID NO: 90280 - protein, 223 aa, Homo sapiens
AERRPLQPRTEAAAAPAGRAMPSEYTYVKLRSDCSRPSLQWYTRAQSKMRRPSLLLKDILKCTLLVFGVWILYILKLNYTTEECDMKKMHYVDPDHVKRAQKYAQQVLQKECRPKFAKTSMALLFEHRYSVDLLPFVQKAPKDSEAESKYDPPFGFRKFSSKVQTLLELLPEHDLPEHLKAKTCRRCVVIGSGGILHGLELGHTLNQFDVVIRVLISTGFKQW

SEQ ID NO: 90281 - protein, 52 aa, Homo sapiens
MTMAVIVRNKEKKVIFEFSGQISGSSFRSHFPPLPYSILFVVHTFLSHLELS

SEQ ID NO: 90282 - protein, 312 aa, Homo sapiens
MANVPWAEVCEKFQAALALSRVELHKNPEKEPYKSKYSARALLEEVKALLGPAPEDEDERPEAEDGPGAGDHALGLPAEVVEPEGPVAQRAVRLAVIEFHLGVNHIDTEELSAGEEHLVKCLRLLRRYRLSHDCISLCIQAQNNLGILWSEREEIETAQAYLESSEALYNQYMKEVGSPPLDPTERFLPEEEKLTEQERSKRFEKVYTHNLYYLAQVYQHLEMFEKAAHYCHSTLKRQLEHNAYHPIEWAINAATLSQFYINKKNEEELQDKFQHLFSIFIHSCHGCAEDAQSGRPSAHPPRGPVHSCSGYA

SEQ ID NO: 90283 - protein, 175 aa, Homo sapiens
MPGRSCVALVLLAAAVSCAVAQHAPPWTEDCRKSTYPPSGPTYRGAVPWYTINLDLPPYKRWHELMLDKAPVLKVIVNSLKNMINTFVPSGKIMQVVDEKLPGLLGNFPGPFEEEMKGIAAVTDIPLGKVHLEALKKKVIKFFYKFPLRCDIHTAQVLYVLDIQHRCTGLRYTAQ

SEQ ID NO: 90284 - protein, 530 aa, Homo sapiens
MHHPAPAWPRCGWCASHTWQISLGPRSTSFILCPLSSCGPRGEVRSDGWRQLPERLGVGGAGRNMPLGRGLTLWRGSTPTVCLSWSQARCLPGLSQDVAPGAVGVPPLPGVMSVLRRVSFLKKAVDQRNKALTSLNEAMNVSCALLSSGTGPRPISCTTSTTWSRLQTQDVLMATCVLENSSSFSLDQGWTLCIQVLTSSCALDLDSACSAITYTIPVDQLGPGARREVTLPLGPGENGGLDLPVTVSCTLFYSLREVVGGALAPSDSEDPFLDECPSDVLPEQEGVCLPLSRHTVDMLQCLRFPGLAPPHTRAPSPLGPTRDPVATFLETCREPGSQPAGPASLRAEYLPPSVASIKVSAELLRAALKDGHSGVPLCCATLQWLLAENAAVDVVRARALSSIQGVAPDGANVHLIVREVAMTDLCPAGPIQAVEIQVESSSLADICRAHHAVVGRMQTMVTEQATQGSSAPDLRVQYLRQIHANHETLLREVQTLRDRLCTEDEASSCATAQRLLQVYRQLRHPSLILL

SEQ ID NO: 90285 - protein, 430 aa, Homo sapiens
MGKPWLRALQLLLLLGASWARAGAPRCTYTFVLPPQKFTGAVCWSGPASTRATPEAANASELAALRMRVGRHEELLRELQRLAAADGAVAGEVRALRKESRGLSARLGQLRAQLQHEAGPGAGPGADLGAEPAAALALLGERVLNASAEAQRAAARFHQLDVKFRELAQLVTQQSSLIARLERLCPGGAGGQQQVLPPPPLVPVVPVRLVGSTSDTSRMLDPAPEPQRDQTQRQQEPMASPMPAGHPAVPTKPVGPWQDCAEARQAGHEQSGVYELRAGFGRPDGEYWLGLEPVYQLTSRGDHELLVLLEDWGGRGARAHYDGFSLEPESDHYRLRLGQYHGDAGDSLSWHNDKPFSTVDRDRDSYSGNCALYQRGGWWYHACAHSNLNGVWHHGGHYRSRYQDGVYWAEFRGGAYSLRKAAMLIRPLKL

SEQ ID NO: 90286 - protein, 184 aa, Homo sapiens
MAENGDNEKMAALEAKICHQIEYYFGDFNLPRDKFLKEQIKLDEGWVPLEIMIKFNRLNRLTTDFNVIVEALSKSKAELMEISEDKTKIRRSPSKPLPEVTDEYKNDVKNRSVYIKGFPTDATLDDIKEWLEDKGQVLNIQMRRTLHKAFKGSIFVVFDSIESAKKFVETPGQKYKETDLLILF

SEQ ID NO: 90287 - protein, 232 aa, Homo sapiens
MGEMEQLRQEAEQLKKQIADARKACADVTLAELVSGLEVVGRVQMRTRRTLRGHLAKIYAMHWATDSKLLVSASQDGKLIVWDSYTTNKVHAIPLRSSWVMTCAYAPSGNFVACGGLDNMCSIYNLKSREGNVKVSRELSAHTGYLSCCRFLDDNNIVTSSGDTTCALWDIETGQQKTVFVGHTGDCMSLAVSPDFNLFISGACDASAKLWDVREGTCRQTFTGHESDINAI

SEQ ID NO: 90288 - protein, 381 aa, Homo sapiens [sequence omitted]

SEQ ID NO: 90289 - protein, 87 aa, Homo sapiens
MAQETNHSQVPMLCSTGCGFYGNPRTNGMCSVCYKEHLQRQNSSNGRISPPATSVSSLSESLPVQCTDGSVPEAQSALDSTSSSMQP

SEQ ID NO: 90290 - protein, 427 aa, Homo sapiens
MLLMVVSMACVGFFLVQRAGPHMGGQDKPFLSAWPSAVVPRGGHVTLRCHYRHRFNNFMLYKEDRIHVPIFHGRLFQESFNMSPVTTAHAGNYTCRGSHPHSPTGWSAPSNPVVIMVTGNHRKPSLLAHPGPLVKSGERVILQCWSDIMFEHFFLHKEGISKDPSRLVGQIHDGVSKANFSIGPMMLALAGTYRCYGSVTHTPYQLSAPSDPLDIVVTGPYEKPSLSAQPGPKVQAGESVTLSCSSRSSYDMYHLSREGGAHERRLPAVRKVNRTFQADFPLGPATHGGTYRCFGSFRHSPYEWSDPSDPLLVSVTGNPRHLHILIGTSVVIILFILLLFFLLHLWCSNKKNAAVMDQEPAGNRTANSEDSDEQDPEEVTYAQLDHCVFTQRKITRPSQRPKTPPTDTILYTELPNAKPRSKVVSCP

SEQ ID NO: 90291 - protein, 853 aa, Homo sapiens [sequence omitted]

SEQ ID NO: 90292 - protein, 175 aa, Homo sapiens
MTEQETLALLEVKRDPGVRAEPVMLFCPSALWGATAGGGDPPAICGPVGPALYSLLLQPGRAFHLPAPGYPQTAPSAHWSLCRLPADLLADLCRGPLLPRLRLRPDVSATAVDADVEPLLHVRGGAGAHAHCHREPPGLPGPRPLGLRLQAPPLGLSLSALALGVGGSGLGLTHL

SEQ ID NO: 90293 - protein, 252 aa, Homo sapiens
MKLLENSSFEAINSQLTVETGDAHIIGRIESYSCKMAGDDKHMFKQFCQEGQPHVLEALSPPQTSGLSPSRLSKSQGGEEEGPLSDKCSRKTLFYLIATLNESFRPDYDFSTARSHEFSREPSLSWVVNAVNCSLFSAVREDFKDLKPQLWNAVDEEICLAECDIYRWAGIPADGLQASRFVGHLAPHTTCHPILPSYNPDLDSDPFGEDGSLWSFNYFFYNKRLKRIVFFSCRSISGSTYTPSEAGNELDM

SEQ ID NO: 90294 - protein, 298 aa, Homo sapiens
MDGVVRNLSNDDSVTDSQMLTAISRMIDWVSWPLGKNIDKWIIALLKGLAAVKKFSILIEVSLTKIEKVFSKLLYPIVRGAALSVLKYMLLTFQHSHEAFHLLLPHIPPMVASLVKEDSNSGTSCLEQLAELVHCMVFRFPGFPDLYEPVMEAIKDLHVPNEDRIKQLLGQDAWTSQKSELAGFYPRLMAKSDTGKIGLINLGNTCYVNSILQALFMASDFRHCVLRLTENNSQPLMTKLQWLFGFLEHSQRPAISPENFLSASWTPWFSPGTQQDCSEYLKYLLDRLHEEEKTGTRI

SEQ ID NO: 90295 - protein, 128 aa, Homo sapiens
  MOD_RES (1)..(1): Any amino acid
XACVAVYKDGRAGVVANDAGDRVTPAVVAYSENEEIVGLAAKQSRIRNISNTVMKVKQILGRSSSDPQAQKYIAESKCLVIEKNGKLRYEIDTGEETKFVNPEDVARLIFSKMKGAYSPWSQSNSEDG

SEQ ID NO: 90296 - protein, 258 aa, Homo sapiens
  MOD_RES (1)..(1): Any amino acid
XSLETGVGDQCRKEFTDLMTEMTDLSSDLEGSGIPFLDYRTYAERAFFPGHGGCPLQPKPEGPGEDGHCATVRQGLTQLSNLLNSKLFLLTLIHTLEEQPSFSQRDRCHVASLLSLALHGKLEYLTDIMRTLLGDLAAHYVHRNPKLMLRRTETMVEKLLTNWLSICLYAFLREVAGEPLYMLFRAIQYQVDKGPVDAVTEWRSGLAGHLTLSDEDLTSVTQNHWKRLNTLQHYKVPDGATVGLVPQLHRGSTISQSL

SEQ ID NO: 90297 - protein, 359 aa, Homo sapiens
MALTAHPSCLLALLVAGLAQGIRGPLRAQDLGPQPLELKEAFKLFQIQFNRSYLSPEEHAHRLDIFAHNLAQAQRLQEEDLGTAEFGVTPFSDLTEEEFGQLYGYRRAAGGVPSMGREIRSEEPEESVPFSCDWRKVASAISPIKDQKNCNCCWAMAAAGNIETLWRISFWDFVDVSVQELLDCGRCGDGCHGGFVWDAFITVLNNSGLASEKDYPFQGKVRAHRCHPKKYQKVAWIQDFIMLQNNEHRIAQYLATYGPITVTINMKPLQLVDHSVLLVGFGSVKSEEGIWAETVSSQSQPQPPHPTPYWILKNSWGAQWGEKGYFRLHRGSNTCGITKFPLTARVQKPDMKPRVSCPP

SEQ ID NO: 90298 - protein, 139 aa, Homo sapiens
MVSGLRLASRSGEEGWLKPAVARLGPPRHRLRNLRTESPWRSRGSVLFCSGPGRAGRAAEPLHPVCTCGRHFRRPEPCREPLASPIQDSVAFEDVAVNFTQEEWALLDSSQKNLYREVMQETCRNLASVEIISYRDCVK

SEQ ID NO: 90299 - protein, 2412 aa, Homo sapiens
MGISTVILEMCLLWGQVLSTGGWIPRTTDYASLIPSEVPLDPTVAEGSPFPSESTLESTVAEGSPISLESTLESTVAEGSLIPSESTLESTVAEGSDSGLALRLVNGDGRCQGRVEILYRGSWGTVCDDSWDTNDANVVCRQLGCGWAMSAPGNAWFGQGSGPIALDDVRCSGHESYLWSCPHNGWLSHNCGHGEDAGVICSAAQPQSTLRPESWPVRISPPVPTEGSESSLALRLVNGGDRCRGRVEVLYRGSWGTVCDDYWDTNDANVVCRQLGCGWAMSAPGNAQFGQGSGPIVLDDVRCSGHESYLWSCPHNGWLTHNCGHSEDAGVICSAPQSRPTPSPDTWPTSHASTAGPESSLALRLVNGGDRCQGRVEVLYRGSWGTVCDDSWDTSDANVVCRQLGCGWATSAPGNARFGQGSGPIVLDDVRCSGYESYLWSCPHNGWLSHNCQHSEDAGVICSAAHSWSTPSPDTLPTITLPASTVGSESSLALRLVNGGDRCQGRVEVLYRGSWGTVCDDSWDTNDANVVCRQLGCGWAMLAPGNARFGQGSGPIVLDDVRCSGNESYLWSCPHNGWLSHNCGHSEDAGVICSGPESSLALRLVNGGDRCQGRVEVLYRGSWGTVCDDSWDTNDANVVCRQLGCGWATSAPGNARFGQGSGPIVLDDVRCSGHESYLWSCPNNGWLSHNCGHHEDAGVICSAAQSRSTPRPDTLSTITLPPSTVGSESSLTLRLVNGSDRCQGRVEVLYRGSWGTVCDDSWDTNDANVVCRQLGCGWATSAPGNARFGQGSGPIVLDDVRCSGHESYLWSCPHNGWLSHNCGHHEDAGVICSVSQSRPTPSPDTWPTSHASTAGPESSLALRLVNGGDRCQGRVEVLYRGSWGTVCDDSWDTSDANVVCRQLGCGWATSAPGNARFGQGSGPIVLDDVRCSGYESYLWSCPHNGWLSHNCQHSEDAGVICSAAHSWSTPSPDTLPTITLPASTVGSESSLALRLVNGGDRCQGRVEVLYQGSWGTVCDDSWDTNDANVVCRQLGCGWAMSAPGNARFGQGSGPIVLDDVRCSGHESYLWSCPHNGWLSHNCGHSEDAGVICSASQSRPTPSPDTWPTSHASTAGSESSLALRLVNGGDRCQGRVEVLYRGSWGTVCDDYWDTNDANVVCRQLGCGWAMSAPGNARFGQGSGPIVLDDVRCSGHESYLWSCPHNGWLSHNCGHHEDAGVICSASQSQPTPSPDTWPTSHASTAGSESSLALRLVNGGDRCQGRVEVLYRGSWGTVCDDYWDTNDANVVCRQLGCGWATSAPGNARFGQGSGPIVLDDVRCSGHESYLWSCPHNGWLSHNCGHHEDAGVICSASQSQPTPSPDTWPTSHASTAGSESSLALRLVNGGDRCQGRVEVLYRGSWGTVCDDYWDTNDANVVCRQLGCGWATSAPGNARFGQGSGPIVLDDVRCSGHESYLWSCPHNGWLSHNCGHHEDAGVICSASQSQPTPSPDTWPTSRASTAGSESTLALRLVNGGDRCRGRVEVLYQGSWGTVCDDYWDTNDANVVCRQLGCGWAMSAPGNAQFGQGSGPIVLDDVRCSGHESYLWSCPHNGWLSHNCGHHEDAGVICSAAQSQSTPRPDTWLTTNLPALTVGSESSLALRLVNGGDRCRGRVEVLYRGSWGTVCDDSWDTNDANVVCRQLGCGWAMSAPGNARFGQGSGPIVLDDVRCSGNESYLWSCPHKGWLTHNCGHHEDAGVICSATQINSTTTDWWHPTTTTTARPSSNCGGFLFYASGTFSSPSYPAYYPNNAKCVWEIEVNSGYRINLGFSNLKLEAHHNCSFDYVEIFDGSLNSSLLLGKICNDTRQIFTSSYNRMTIHFRSDISFQNTGFLAWYNSFPSDATLRLVNLNSSYGLCAGRVEIYHGGTWGTVCDDSWTIQEAEVVCRQLGCGRAVSALGNAYFGSGSGPITLDDVECSGTESTLWQCRNRGWFSHNCNHREDAGVICSGNHLSTPAPFLNITRPNNYSCGGFLSQPSGDFSSPFYPGNYPNNAKCVWDIEVQNNYRVTVIFRDVQLEGGCNYDYIEVFDGPYRSSPLIARVCDGARGSFTSSSNFMSIRFISDHSITRRGFRAEYYSSPSNDSTNLLCLPNHMQASVSRSYLQSLGFSASDLVISTWNGYYECRPQITPNLVIFTIPYSGCGTFKQADNDTIDYSNFLTAAVSGGIIKRRTDLRIHVSCRMLQNTWVDTMYIANDTIHVANNTIQVEEVQYGNFDVNISFYTSSSFLYPVTSRPYYVDLNQDLYVQAEILHSDAVLTLFVDTCVASPYSNDFTSLTYDLIRSGCVRDDTYGPYSSPSLRIARFRFRAFHFLNRFPSVYLRCKMVVCRAYDPSSRCYRGCVLRSKRDVGSYQEKVDVVLGPIQLQTPPRREEEPR

SEQ ID NO: 90300 - protein, 60 aa, Homo sapiens
MHSLPGVVAVGYINEAIDEGNPLRTLETLLLPTANISDVDPAHAQHYQDVLYHAKSQKLG

SEQ ID NO: 90301 - protein, 569 aa, Homo sapiens
MITDAARHKLLVLTGQCFENTGELILQSGSFSFQNFIEIFTDQEIGELLSTTHPANKASLTLFCPEEGDWKNSNLDRHNLQDFINIKLNSASILPEMEGLSEFTEYLSESVEVPSPFDILEPPTSGGFLKLSKPCCYIFPGGRGDSALFAVNGFNMLINGGSERKSCFWKLIRHLDRVDSILLTHIGDDNLPGINSMLQRKIAELEEEQSQGSTTNSDWMKNLISPDLGVVFLNVPENLKNPEPNIKMKRSIEEACFTLQYLNKLSMKPEPLFRSVGNTIDPVILFQKMGVGKLEMYVLNPVKSSKEMQYFMQQWTGTNKDKAEFILPNGQEVDLPISYLTSVSSLIVWHPANPAEKIIRVLFPGNSTQYNILEGLEKLKHLDFLKQPLATQKDLTGQVPTPVVKQTKLKQRADSRESLKPAAKPLPSKSVRKESKEETPEVTKVNHVEKPPKVESKEKVMVKKDKPIKTETKPSVTEKEVPSKEEPSPVKAEVAEKQATDVKPKAAKEKTVKKETKVKPEDKKEEKEKPKKEVAKKEDKTPIKKEEKPKKEEVKKEVKKEIKKEEKKE

SEQ ID NO: 90302 - protein, 33 aa, Homo sapiens
MGLRTRRLGTRGNSKYHYYGIRLKPDSPLNRLQ

SEQ ID NO: 90303 - protein, 101 aa, Homo sapiens
MMTAVSLTTRPQESVAFEDVAVYFTTKEWAIMVPAERALYRDVMLENYEAVAFVVPPTSKPALVSHLEQGKESCFTQPQGVLSRNDWRAGWIGVLAPEKAA

SEQ ID NO: 90304 - protein, 126 aa, Homo sapiens
MNEENMTELLSSGLKNDYNKETFTLKHKIDEQMFPCRFIKIVPLLSWGPSFNFSIWYVELSGIDDPDIVQPCLNWYSKYREQEAIRLCLKHFRQHNYTEAFESLQKKTKIALEHPMLTDIHDKLVL

SEQ ID NO: 90305 - protein, 157 aa, Homo sapiens
MSKKISGGSVVEMQGDEMTRIIWELIKEKLIFPYVELDLHSYDLGIENRDATNDQVTKDAAEAIKKHNVGVKCATITPDEKRVEEFKLKQMWKSPNGTIRNILGGTVFREAIICKNIPRLVSGWVKPIIIGRHAYGDQYRATDFVVPGPGKVEITYT

SEQ ID NO: 90306 - protein, 87 aa, Homo sapiens
MTTRQATKDPLLRGVSPTPSKIPVRSQKRTPFPTVTSCAVDQENQDPRRWVQKPPLNIQRPLVDSAGPRPKARHQAETSQRLRLQGP

SEQ ID NO: 90307 - protein, 175 aa, Homo sapiens
  MOD_RES (1)..(1): Any amino acid
XAVHPVKNWMDMKRRVGPYRRCYFFSHCSTPGEPLVVLHVALTGDISSNIQAIVKEHPPSETEEKNKITAAIFYSISLTQQGLQGVELGTFLIKRVVKELQFTHSKPLGSHRPGTVGWGSGDREAAAGEICSADKRFLLLSPHQSCFLPGTSPSPSPSPCWQMLRYPGLWLPGCA

SEQ ID NO: 90308 - protein, 183 aa, Homo sapiens
MGATEPGGDTSSVCVWTATLSVRVCDEFHPFIEALLPHVRAFSYTWFNLQARKRKYFKKHEKRMSKDEERAVKDELLGEKPEIKQKWASRLLAKLRKDIRPEFREDFVLTITGKKPPCCVLSNPDQKGKIRRIDCLRQADKVWRLDLVMVILFKGIPLESTDGERLYKSPQCSNPGLCVQPHH

SEQ ID NO: 90309 - protein, 95 aa, Homo sapiens
MTGSSVFDYIHPGDHSEVLEQLGLRTPTPGPPTPPSVSSSSSSSSSLADTPEIESATTWTWGPQSWWAAAATSLSTDRTPRGSARATWTCWTRVR

SEQ ID NO: 90310 - protein, 284 aa, Homo sapiens
MFRKKKKKRPEISAPQNFQHRVHTSFDPKEGKFVGLPPQWQNILDTLRRPKPVVDPSRITRVQLQPMKTVVRGSAMPVDGYISGLLNDIQKLSVISSNTLRGRSPTSRRRAQSLGLLGDEHWATDPDMYLQSPQSERTDPHGLYLSCNGGTPAGHKQMPWPEPQSPRVLPNGLAAKAQSLGPAEFQGASQRCLQLGACLQSSPPGASPPTGTNRHGMKAAKHGSEEARPQSCLVGSATGRPGGEGSPSPKTRESSLKRRLFRSMFLSTAATAPPSSSKPGPPPQ

SEQ ID NO: 90311 - protein, 190 aa, Homo sapiens
MADSQLFCVAEERSGHCAVVDGNFLYVWGGYVSIEDNEVYLPNDEIWTYDIDSGLWRMHLMEGELPASMSGSCGACINGKLYIFGGYDDKGYSNRLYFVNLRTRDETYIWEKITDFEGQPPTPRDKLSCWVYKDRKSRYSGDGIMMSTYLTQRHRLGFNQKLKVEFHHSHEPRIHVQFLEIRVISLADVF

SEQ ID NO: 90312 - protein, 51 aa, Homo sapiens
MDDEEETYRLWKIRKTIMQRSPRWASRPSRCTASACRRRTSHGLSSWCSRA

SEQ ID NO: 90313 - protein, 71 aa, Homo sapiens
MEESDQGHTGALATCAGHEDKAGCPPRPHPPPAPPARSRPYACSVCGKRFSLKHQMETHYRVHTGEKPFSC

SEQ ID NO: 90314 - protein, 216 aa, Homo sapiens
MNPASDGGTSESIFDLDYASWGIRSTLMVAGFVFYLGVFVVCHQLSSSLNATYRSLVAREKVFWDLAATRAVFGVQSTAAGLWALLGDPVLHADKARGQQNWCWFHITTATGFFCFENVAVHLSNLIFRTFDLFLVIHHLFAFLGFLGCLVNLQAGHYLAMTTLLLEMSTPFTCVSWMLLKETGSLERKNKHNKSLLPSGSRRAGPSLCFGSSTSG

SEQ ID NO: 90315 - protein, 145 aa, Homo sapiens
  MOD_RES (1)..(1): Any amino acid
XEVVDLGGLSILVSLLADCNDHQMRDQSGVQELVKQVLSTLRAIAGNDDVKDAIVRAGGTESIVAAMTQHLTSPQKQACMLIRNLVAHGQAFSKPILDLGAEALIMQARSAHRDCEDVAKAALRDLGCHVELRELWTGQRGNLAP

SEQ ID NO: 90316 - protein, 64 aa, Homo sapiens
MPIMGSSVYITVELAIAVLAILGNVLVCWAVWLNSNLQNVTNYFVVSLAAADIAVGVLAIPFAI

SEQ ID NO: 90317 - protein, 122 aa, Homo sapiens
MKLLLLHPAFQSCLLLTLLGLWRTTPEAHASSLGAPAISAASFLQDLIHRYGEGDSLTLQQLKALLNHLDVGVGRGNVTQHVQGHRNLSTCFSSGDLFTAHNFSEQSRIGSSELQEFCPTIL

SEQ ID NO: 90318 - protein, 199 aa, Homo sapiens
MAGLQELRFPEEKPLLRGQDATELESSDAFLLAADTDWKRSQERRLPRVSSTVSPLQEHDIETPYGLLHVVIRGSPKGNRPAILTYHDVGLNHKLCFNTFFNFEDMQEITKHFVVCHVDAPGQQVGASQFPQGYQFPSMEQLAAMLPSVVQHFGFKYVIGIGVGAGAYVLAKFALIFPDLVEGLVLVNIDPNGKGWIDW

SEQ ID NO: 90319 - protein, 87 aa, Homo sapiens
MWGLAGGRLFGIFSAPVLVAVVCCAQSVNDPGNMSFVKETVDKLLKGYDIRLRPDFGGPPVCVGMNIDIASIDMVSEVNMAMQELHS

SEQ ID NO: 90320 - protein, 192 aa, Homo sapiens
MLLPGRARQPPTPQPVQHPGLRRQVEPPGQLLRLFYCTVLVCSKEISALTDFSDELKNKTVCEDQELKLHCHESKFLNIYSATYGRRTQERDICSSKAERLPPFDCLSYSALQVLSRRCYGKQRCKIIVNNHHFGSPCLPGVKKYLTVTYACVPKNILTAIDPAIANLKPSLKQKDGEYGNFYGLLPAFLFK

SEQ ID NO: 90321 - protein, 154 aa, Homo sapiens
  MOD_RES (1)..(1): Any amino acid
XETVAGPGEGTVAPTALQGPSPGSPGQEQAAEGAPEHHRSRRCTCFTYKDKECVYYCHLDIIWINTPEQTVPYGLSNYRGSFRGKRSAGPLPGNLQLSHRPHLRCACVGRYDKACLHFCTQTLDVSSNSRTAEKTDKEEEGKVRGANRGLCQRR

SEQ ID NO: 90322 - protein, 102 aa, Homo sapiens
MANSRNYKSEEEFIHINNKLRRGDIIGVQGNPGKTKKGELSIIPYEITLLSPCLHMLPHLHFGLKDKETRYRQRYLDLILNDFVRQKFIIRSKIITYIRSFL

SEQ ID NO: 90323 - protein, 182 aa, Homo sapiens
MARSVRVLVDMDGVLADFEAGLLRGFRRRFPEEPHVPLEQRRGFLAREQYRALRPDLADKVASVYEAPGFFLDLEPIPGALDAVREMNDLPDTQVFICTSPLLKYHHCVGEKYRWVEQHLGPQFVERIILTRDKTVVLGDLLIDDKDTVRGGDPKLGAHLVHLLPQSAPGPAPDKETAALLE

SEQ ID NO: 90324 - protein, 423 aa, Homo sapiens
MALNSGSPPAIGPYYENHGYQPENPYPAQPTVVPTVYEVHPAQYYPSPVPQYAPRVLTQASNPVVCTQPKSPSGTVCTSIRLYGPNFILQVYSSQRKSWHPVCQDDWNENYGRAACRDMGYKNNFYSSQGIVDDSGSTSFMKLNTSAGNVDIYKKLYHSDACSSKAVVSLRCIACGVNLNSSRQSRIVGGESALPGAWPWQVSLHVQNVHVCGGSIITPEWIVTAAHCVEKPLNNPWHWTAFAGILRQSFMFYGAGYQVEKVISHPNYDSKTKNNDIALMKLQKPLTFNDLVKPVCLPNPGMMLQPEQLCWISGWGATEEKGKTSEVLNAAKVLLIETQRCNSRYVYDNLITPAMICAGFLQGNVDSCQGDSGGPLVTSKNNIWWLIGDTSWGSGCAKAYRPGVYGNVMVFTDWIYRQMRADG

SEQ ID NO: 90325 - protein, 172 aa, Homo sapiens
ASRKAGTRGKVAATKQAQRGSSNVFSMFEQAQIQEFKEAFSCIDQNRDGIICKADLRETYSQLAPVARMEGGRPGPSGGHPGSLCAPHAPPPPGKVSVPEEELDAMLQEGKGPINFTVFLTLFGEKLNGTDPEEAILSAFRMFDPSGKGVVNKDEFKQLLLTQADKFSPAEV

SEQ ID NO: 90326 - protein, 264 aa, Homo sapiens
SAAAAPSPVLGNIPPGDGMPVGPVPPGFFQPFMSPRYPGGPRPPLRIPNQALGGVPGSQPLLPSGMDPTRQQGHPNMGGPMQRMTPPRGMVPLGPQNYGGAMRPPLNALGGPGMPGMNMGPGGGRPWPNPTNANSIPYSSASPGNYVGPPGGGGPPGTPIMPSPADSTNSGDNMYTLMNAVPPGPNRPNFPMGPGSDGPMGGLGGMESHHMNGSLGKAFQFDNSPNNMSLSNQPGTPRDDGEMGGNFLNPFQSESYSPSMTMSV

SEQ ID NO: 90327 - protein, 358 aa, Homo sapiens
MGKCLSCCKEDQSFQRCSPEDQVSTDAQHRGASSISQPSISLGHKTSYSPVTHKVNAAKASRRLLSVSSPSFSERRYSLFVGFQKRNASPYWQQSRANFDSEEDTGFTDIKSSSDHCGSFISRRRRFSSRKLSIVSYYKSAIFFDPQASGQNVFNLNEIEIFSKTSSNTDAKKHITISAPEYNTKNFKNFETNTTSPAFGNTIDTASYQQSTSSFFSLASDISSPDQQNGIANDIQQRGQLCKDLKDFLHPRPESYSTDHSPIMIPQHPSQSGTFPFLHKAGFSSSYKNSGCFIPPQSELTSGLFEDEDFAVLFQDEDRSSPIEIPKIRSPQTLPSLRRAPQIVFPPVTFIACRIHFS

SEQ ID NO: 90328 - protein, 119 aa, Homo sapiens
MNRFDRPDRNVRQPQEGFWKRPPQRWSGQEHYHLSHPDHYHHHGKSDLSRGSPYRESPLGHFESYGGMPFFQAQKMFVDVPENTVILDEMTLRHMVQDCTAVKTQLLKLKRLLHQHDGS

SEQ ID NO: 90329 - protein, 41 aa, Homo sapiens
MTPTIRKTQKIVIKKREPLNFGIPDGSTGFSSRLAATQDLP

SEQ ID NO: 90330 - protein, 129 aa, Homo sapiens
MLRCLYHWHRPVLNRRWSRLCLPKQYLFTMKLQSPEFQSLFTEGLKSLTELFVKENHELRIAGGAVRDLLNGVKPQDIDFATTATPTQMKEMFQSAGIRMINNRGEKHGTITARVLMALYLTTLMVMKI

SEQ ID NO: 90331 - protein, 60 aa, Homo sapiens
MAKSKNHTTHNQSRKWHRNGIKKPRSQRYESLKGVSALNHMEVSFLGSRCTVKASHVVFL

SEQ ID NO: 90332 - protein, 168 aa, Homo sapiens
MEAKFSSIWHPGDCFSCKTIDCPPFILLNKLSREDLLHCALAGPIIVEPHVTAVWGKNVSLKCLIEVNETITQISWEKIHGKSSQTVAVHHPQYGFSVQGEYQGRVLFKNYSLNDATITLHNIGFSDSGKYICKAVTFPLGNAQSSTTVTVLVEPTVSLIKGPDSLID

SEQ ID NO: 90333 - protein, 48 aa, Homo sapiens
MDAANFEQFLQERIKVNGKAGNLGGGVVTIERSKSKITVTSEVPFSKR

SEQ ID NO: 90334 - protein, 106 aa, Homo sapiens
PLLAMEYCQGGDLRKYLNQFENCCGLREGAILTLLSDIASALRYLHENRIIHRDLKPENIVLQQGEQRLIHKIIDLGYAKELDQGSLCTSFVGTLQYLAFKSAAEE

SEQ ID NO: 90335 - protein, 173 aa, Homo sapiens
MASGRGASSRWFFTREQLENTPSRRCGVEADKELSCRQQAANLIQEMGQRLNVSQLTINTAIVYMHRFYMHHSFTKFNKNIISSTALFLAAKVEEQARKLEHVIKVAHACLHPLEPLLDTKCDAYLQQTQELVILETIMLQTLGFEITIEHPHTDVVKCTQLVRGECFIATFS

SEQ ID NO: 90336 - protein, 219 aa, Homo sapiens
GISLDPEAAIGVTKRPPPKWVDGVDEIQYDVGRIKQKMKELASLHDKHLNRPTLDDSSEEEHAIEITTQEITQLFHRCQRAVQALPSRARACSEQEGRLLGNVVASLAQALQELSTSFRHAQSGYLKRMKNREERSQHFFDTSVPLMDDGDDNTLYHRGTVLDRIDYNVEQSCIKTEDGLKQLHKAEQYQKKNRKMLVILILFVIIIVLIVVLVGVKSR

SEQ ID NO: 90337 - protein, 131 aa, Homo sapiens
MSEPPVYCNLVDLRRCPRSPPPGPACPLLQRLDAWEQHLDPNSGRCFYINSLTGCKSWKPPRRSRSETNPGSMEGTQTLKRNNDVLQPQAKGFRSDTGTPEPLDPQGSLSLSQRTSQLDPPALQAPRPLPQ

SEQ ID NO: 90338 - protein, 73 aa, Homo sapiens
FASRNDYSYWLSTPEPMPMSMQPLKGQSIQPFISRCAVCEAPAVVIAVHSQTIQIPHCPQGWDSLWIGYSFMM

SEQ ID NO: 90339 - protein, 50 aa, Homo sapiens
MEAPTVETPPDPSPPSAPAPALVPLRAPDVARLREEQEKVVTNCQERIQH

SEQ ID NO: 90340 - protein, 143 aa, Homo sapiens
  MOD_RES (1)..(1): Any amino acid
XLDKYIYGAQGVLLVYDITNYQSFENLEDWYTVVKKVSEESETQPLVALVGNKIDLEHMRTIKPEKHLRFCQENGFSSHFVSAKTGDSVFLCFQKVAAEILGIKLNKAEIEQSQRIVRAEIVKYPEEENQHTTSTQSRICSVQ

SEQ ID NO: 90341 - protein, 498 aa, Homo sapiens
ELLKIICAFQLDTGLEYANSYNFAKKENNSPEHLKDEVSIIQSMGYRNRAKRLLQSEPENPSLETSLSVQLSNLGTVRTLRTKQRIQPQKTSVYIELAACEFSETDVTNTEHHQPSNNDLNTTEKRAAERHPEKYQGEAASGCESETSVSEDCSGLSSQSDILTTQQRDTMQHNLIKLQQEMAELEAVLEQHGSQPSNSYPSIISDSSALEDLRNPEQSTSEKAVLTSQKSSEYPISQNPEGLSADKFEVSADSSTSKNKEPGVERSSPSKCPSLDDRWYMHSCSGSLQNRNYPSQEELIKVVDVEEQQLEESGPHDLTETSYLPRQDLEGTPYLESGISLFSDDPESDPSEDRAPESARVGNIPSSTSALKVPQLKVAESAQSPAAAHTTDTAGYNAMEESVSREKPELTASTERVNKRMSMVVSGLTPEEFMLVYKFARKHHITLTNLITEETTHVVMKTDAEFVCERTLKYFLGIAGGKWVVSYFWVTQSIKERK

SEQ ID NO: 90342 - protein, 162 aa, Homo sapiens
MVVPGVEFEPMLIPHHKGRKRMHLELREGLTRMSMDLKNNLLGSLRMAWKSFTRAPYPALQASETPEETEAEPESTSEKPSDVNTEETSVAVKEEVLPINVGMLNGGQRIDYVLQEKPIESFNEYLFALQSHLCYWESEDTVLLVLKEIYQTQGIFLDQPLQ

SEQ ID NO: 90343 - protein, 365 aa, Homo sapiens
MEEDTDYRIRFSSLCFFNDHVGFHGTIKSSPSDFIVIEIDEQGQLVNKTIDEPIFKISEIQLEPNNFPKKPKLDLQNLSLEDGRNQEVHTLIKYTDGDQNHQSGSEKEDTIVDGTSKCEEKADVLSSFLDEKTHELLNNFACDVREKWLSKTELIGLPPEFSIGRILDKNQRASLHSAIRQKFPFLVTVGKNSEIVVKPNLEYKELCHLVSEEEAFDFFKYLDAKKENSKFTFKPDTNKDHRKAVHHFVNKKFGNLVETKSFSKMNCSAGNPNVVVTVRFREKAHKRGKRPLSECQEGKVIYTAFTLRKENLEMFEAIGFLAIKLGVIPSDFSYAGLKDKKAITYQAMVVRKVTPERLKNIEKEI

SEQ ID NO: 90344 - protein, 38 aa, Homo sapiens
MRTLFNLLWLALACSPVHTTLSKSDAKKAASKTLLEKV

SEQ ID NO: 90345 - protein, 962 aa, Homo sapiens
MLGSMARKKPRNTSRLPLALNPLKSKDVLAVLAERNEAIVPVGAWVEPASPGSSEIPAYTSAYLIEEELKEQLRKKQEALKHFQKQVKYRVNQQIRLRKKQQLQKSYERAQKEGSIAMQSSATHLTSKRTSVFPNNLNVAIGSSRLPPSLMPGDGIEDEENQNELFQQQAQALSETMKQARHRLASFKTVIKKKGSVFPDDGRKSFLTREEVLSRKPASTGINTGIRGELPIKVHQGLLAAVPYQNYMENQELDYEEPDYEESSSLVTDEKGKEDLFGRGQQDQQAIHSEDKNKPFSRVQKVKFKNPLFVLMEEEEQKQLHFEGLQDILPEAQDYFLEAQGDLLETQGDLTGIQSVKPDTQAVEMKVQVTEPEGQAIEPEGQPIKTETQGIMLKAQSIELEEGSIVLKTQDFLPTNQALLTKNQDVLLKDHCVLPKDQSILLKYQDQDFLPRDQHVLHKDQDILPKYQDQNFLPKDQNFLSRDQHVLPKDQDILPKYQDQNFLPKDQNFLSRDQHVLPKDQNILPKYQGQDFLPKDQDFLSRDQHVLPKDWNILPKCQDQDFLPRDQGVLPKDQNILPICQDQDFLPRDQGYLPKDQNILPICQDRDFLPRDLHVLSNDQNILPKCQDQDFLPKYQKVHFKEPYSDMTDEKGREDFSLADYQCLPPKSQDQDDIKNQQPASFMREERVREELPLDYHQYVVPKIQDQDSPREQNKHIKLPSSFEKWEIARGNTPGVPLAYDRYQSGLSTEFQAPLAFQSDVDKEEDKKERQKQYLRHRRLFMDIEREQVKEQQRQKEQKKKIEKIKKKREQECYAAEQRILRMNFHEDPYSGEKLSEILAQLQLQEIKGTREKQQREKEYLSSLCLIILYLYRYVEALRAQIQEKMQLYNITLPPLCCCGPDFWDAHPDTCANNCIFYKNHRAYTRALHSFINSCDVPGGNSTLRVAIHNFASAHRRTLKNL

SEQ ID NO: 90346 - protein, 110 aa, Homo sapiens
MEPAAALHFSLPASLLLLLLLLLLSLCALVSGLGSKPLIEIKAQEDGSIWLECISGGWYPEPLTVWRDPYGEVVPALKEVSIADADGLFMVTTAVIIRDKYVRNVSCSVN

SEQ ID NO: 90347 - protein, 115 aa, Homo sapiens
MAWQGLVLAACLLMFPSTTADCLSRCSLCAVKTQDGPKPINPLICSLQCQAALLPSEEWERCQSFLSFFTPSTLGLNDKEDLGSKSVGEGPYSELAKLSGSFLKELEKSKFLPSI

SEQ ID NO: 90348 - protein, 44 aa, Homo sapiens
  MOD_RES (1)..(1): Any amino acid
XVKACLRRKVCEQEEKYEIPEGPRRSRLNREQLHLILKDDHDEQ

SEQ ID NO: 90349 - protein, 225 aa, Homo sapiens
  MOD_RES (1)..(1): Any amino acid
XSSTRSLGTLYSQVSRLAPLSSSRSRFHAFILGLLNTKQLELWFSSLQEDAGFFSLARGGCPSLSTELLLLLQPLSVLTFHLDLLFEHHHHLPLGPPQAPAPPGPPPALQQTMQAMLHFGGRLAQSLRGTSKEAASDPSDSPNLPTPGSWWEQLTQASRVYASGGTEGFPLSRWAPGRHGTAAEEGAQERPLPTDEMAPGRGLWLGRLFGVPGGPAENENGALKS

SEQ ID NO: 90350 - protein, 54 aa, Homo sapiens
MASFPPRVNEKEIGNMMKVLRGHQNWVYSCAFSPDSSMLCSVGASKAVVAAILV

SEQ ID NO: 90351 - protein, 273 aa, Homo sapiens
MSSAAADHWAWLLVLSFVFGCNVLRILLPSFSSFMSRVLQKDAEQESQMRAEIQDMKQELSTVNMMDEFARYARLERKINKMTDKLKTHVKARTAQLAKIKWVISVAFYVLQIRKKQQEVVGFLEANKIDFKELDIAGDEDNRRWMRENVPGEKKPQNGIPLPPQIFNEEQYCGDFDSFFSAKEENIIYSFLGLAPPPDSKGSEKAEEGGETEAQKEGSEDVGNLPEAQEKNEEEGETATEETEEIAMEGAEGEAEEEEETAEGEEPGEDEDS

SEQ ID NO: 90352 - protein, 97 aa, Homo sapiens
  MOD_RES (1)..(1): Any amino acid
XLTKFFTPSPDGRKARGEVVDYSEQYRIRKRGNRKSSTSDWPTDNQDGWDGKQENEERLFGSQEIMTEKDMELFRDIQEQALQILEYLHHMLSRRAS

SEQ ID NO: 90353 - protein, 165 aa, Homo sapiens
MRAAPLLLARAASLSLGFLFLLFFWLDRSVLAKELKFVTLVFRHGDRSPIDTFPTDPIKESSWPQGFGQLTQVYIRSTDVDRTLMSAMTNLAALFPPEGVSIWNPILLWQPIPVHTVPLSEDQLLYLPFRNCPRFQELESETLKSEEFQKRLHPYKDFIATLGKL

SEQ ID NO: 90354 - protein, 67 aa, Homo sapiens
  MOD_RES (1)..(1): Any amino acid
XGIDVKQVTIVVNFDLPVKQGEEPDYETYLHRIGRTGRFGKKGLAFNMIEVDELPSLMKIQDHFRKS

SEQ ID NO: 90355 - protein, 29 aa, Homo sapiens
  MOD_RES (1)..(1): Any amino acid
XPVVTNVTVKARVWNSTFIEHPAQDLTQK

SEQ ID NO: 90356 - protein, 619 aa, Homo sapiens
MARHRNVRGYNYDEDFEDDDLYGQSVEDDYCISPSTAAQFIYSRRDKPSVEPVEEYDYEDLKESSNSVSNHQLSGFDQGKPVDSQTSRSESEIVPKVAKMTVSGKKQTMGFEVPGVSSEENGHSFHTPQKGPPIEDAIASSDVLETASKSANPPHTIQASEEQSSTPAPVKKSGKLRQQIDVKAELEKRQGGKQLLNLVVIGHVDAGKSTLMGHMLYLLGNINKRTMHKYEQESKKAGKASFAYAWVLDETGEERERGVTMDVGMTKFETTTKVITLMDAPGHKDFIPNMITGAAQADVAVLVVDASRGEFEAGFETGGQTREHGLLVRSLGVTQLAVAVNKMDQVNWQQERFQEITGKLGHFLKQAGFKESDVGFIPTSGLSGENLITRSQSSELTKWYKGLCLLEQIDSFKPPQRSIDKPFRLCVSDVFKDQGSGFCITGKIEAGYIQTGDRLLAMPPNETCTVKGITLHDEPVDWAAAGDHVSLTLVGMDIIKINVGCIFCGPKVPIKACTRFRARILIFNIEIPITKGFPVLLHYQTVSEPAVIKRLISVLNKSTGEVTKKKPKFLTKGQNALVELQTQRPIALELYKDFKELGRFMLRYGGSTIAAGVVTEIKE

SEQ ID NO: 90357 - protein, 542 aa, Homo sapiens
  MOD_RES (1)..(1): Any amino acid
XISFLRPVDVQMREFEVLKKLNHKNIVKLFAIEEETTTRHKVLIMEFCPCGSLYTVLEEPSNAYGLPESEFLIVLRDVVGGMNHLRENGIVHRDIKPGNIMRVIGEDGQSVYKLTDFGAARELEDDEQFVSLYGTEEYLHPDMYERAVLRKDHQKKYGATVDLWSIGVTFYHAATGSLPFRPFEGPRRNKEVMYKIITGKPSGAISGVQKAENGPIDWSGDMPVSCSLSRGLQVLLTPVLANILEADQEKCWGFDQFFAETSDILHRMVIHVFSLQQMTAHKIYIHSYNTATIFHELVYKQTKIISSNQELIYEGRRLVLEPGRLAQHFPKTTEENPIFVVSREPLNTIGLIYEKISLPKVHPRYDLDGDASMAKAITGVVCYACRIASTLLLYQELMRKGIRWLIELIKDDYNETVHKKTEVVITLDFCIRNIEKTVKVYEKLMKINLEAAELGEISDIHTKLLRLSSSQGTIETSLQDIDSRLSPGGSLADAWAHQEGTHPKDRNVEKLQVLLNCMTEIYYQFKKDKAERNQIKASVGHK

SEQ ID NO: 90358 - protein, 249 aa, Homo sapiens
MGKWPPWVSVFQEETITLHCEVLHLPGSSSTQWFLNGTATQTSTPSYRITSASVNDSGEYRCQRGLSGRSDPIQLEIHRGWLLLQVSSRVFMEGEPLALRCHAWKDKLVYNVLYYRNGKAFKFFHWNSNLTILKTNISHNGTYHCSGMGKHRYTSAGISQYTVKGLQLPTPVWFHVLFYLAVGIMFLVNTVLWVTIRKELKRKKKWNLEISLDSGHEKKVISSLQEDRHLEEELKCQEQKEEQLQEGVH

SEQ ID NO: 90359 - protein, 96 aa, Homo sapiens
MPQAQKKTTSVSLTIGSSSPKTGVTTAVIQPLSVPVQQVHSPTSYLCRPDGTTTAYFPPVFTKELQNTAVAEGQVVVLECRVRGAPPLQVQWFRQG

SEQ ID NO: 90360 - protein, 97 aa, Homo sapiens
MPPNLTGYYRFVSQKNMEDYLQALNISLAVRKIALLLKPDKEIEHQGNHMTVRTLSTFRNYTVQFDVGVEFEEDLRSVDGRKCQAALGMNSPARAIS

SEQ ID NO: 90361 - protein, 60 aa, Homo sapiens
MFPLVKSALNRLQVRSIQQTMARQSHQKRTPDFHDKYGNAVLASGATFCIVTWTYVSTID

SEQ ID NO: 90362 - protein, 373 aa, Homo sapiens
MVLLHVKRGDESQFLLQAPGSTELEELTVQVARVYNGRLKVQRLCSEMEELAEHGIFLPPNMQGLTDDQIEELKLKDEWGEKCVPSGGAVFKKDDIGRRNGQAPNEKMKQVLKKTIEEAKAIISKKQVEAGVCVTMEMVKDALDQLRGAVMIVYPMGLPPYDPIRMEFENKEDLSGTQAGLNVIKEAEAQLWWAAKELRRTKKLSDYVGKNEKTKIIAKIQQPLQQQIIRLHQELGRQKSLWADVHGKLRSHIDALREQNMELREKLRALQLQRWKARKKSAASPHAGQESHTLALEPAFGKISPLSADEETIPKYAGHKNQSATLLGQRSSSNNSAPPKIFVKKMLNVDVEKMQTLRLKREEAGNSVRVTEC

SEQ ID NO: 90363 - protein, 516 aa, Homo sapiens
MERAGATSRGGQAPGFLLRLHTEGRAEAARVQEQDLRQWGLTGGVGMNLTAADTVIFVDSDFNPQNDLQAAARAHRIGQNKSVKVIRLIGRDTVEEIVYRKAASKLQLTNMIIEGGHFTLGAQKPAADADLQLSEILKFGLDKLLASEGSTMDEIDLESILGETKDGQWVSDALPAAEGGSRDQEEGKNHMYLFEGKDYSKEPSKEDRKSFEQLVNLQKTLLEKASQEGRSLRNKGSVLIPGLVEGSTKRKRVLSPEELEDRQKKRQEAAAKRRRLIEEKKRQKEEAEHKKKMAWWESNNYQSFCLPSEESEPEDLENGEESSAELDYQDPDATSLKYVSGDVTHPQAGAEDALIVHCVDDSGHWGRGGLFTALEKRSAEPRKIYELAGKMKDLSLGGVLLFPVDDKESRNKGQDLLALIVAQHRDRSNVLSGIKMAALEEGLKKIFLAAKKKKASVHLPRIGHATKGFNWYGTERLIRKHLAARGIPTYIYYFPRSKSAVLHSQSSSSSSRQLVP

SEQ ID NO: 90364 - protein, 35 aa, Homo sapiens
MLCFTKTPLQESLIELSDSSLSKMATDMFLAVRGP

SEQ ID NO: 90365 - protein, 120 aa, Homo sapiens
MGKQNSKLRPEVMQDLLESTDFTEHEIQEWYKGFLRDCPSGHLSMEEFKKIYGNFFPYGDASKFAEHVFRTFDANGDGTIDFREFIIALSVTSRGKLEQKLKWAFSMYDLDGNGYISKAE

SEQ ID NO: 90366 - protein, 63 aa, Homo sapiens
MASRRMETKPVITCLKTLLIIYSFVFWPYFCFETGAQCCMRYRESARWQTGLFAMVKEEAEIY

SEQ ID NO: 90367 - protein, 121 aa, Homo sapiens
MGEAPSPAPALWDWDYLDRCFARHRVCISFGLWICASSCWIAAHALLLYLRCAQKPRQDQSALCAACCLLTSLCDTVGALLARQLTIQSVDPNSSLIQIGKPERGRGGGSSGPVCLPWPCR

SEQ ID NO: 90368 - protein, 144 aa, Homo sapiens
MIEISRTQDEEVGDGTTSVIILAGEMLSVAEHFLEQQMHPTVVISAYRKALDDMISTLKKISIPVDISDSDMMLNIINSSITTKAISRWSSLACNIALDAVKMVQFEENGRKEIDIKKYARVEKIPGGIIEDSCVLRGVMINKD

SEQ ID NO: 90369 - protein, 342 aa, Homo sapiens
VKEITRDIKQLDHAKRHLTTSITTLNHLHMLAGGVDSLEAMTRRRQYGEVANLLQGVMNVLEHFHKYMGIPQIRQLSERVKAAQTELGQQILADFEEAFPSQGTKRPGGPSNVLRDACLVANILDPRIKQEIIKKFIKQHLSEYLVLFQENQDVAWLDKIDRRYAWIKRQLVDYEEKYGRMFPREWCMAERIAVEFCHVTRAELAKIMRTRAKEIEVKLLLFAIQRTTNFEGFLAKRFSGCTLTDGTLKKLESPPPSTNPFLEDEPTPEMEELATEKGDLDQTPPKGRLAGRTSSEKPVTMYFAASPAFILSQHHKGRSQESRASRSSSEMMQSNVSGPLIK

SEQ ID NO: 90370 - protein, 116 aa, Homo sapiens
MDARPKLDLGFKEGQTIKLCIGNITNKKGGASKPRTARGGGLSLLPPPPGGKVTIPPPSSSVAISNHVTPPPIPKSNHGGSDADILLDLDSPAPVTTPAPTPVSVSNDLWGDFSTA

SEQ ID NO: 90371 - protein, 193 aa, Homo sapiens
MSHVAVENALGLDQQFAGLDLNSSDNQSGGSTASKGRYIPPHLRNREATKGFYDKDSSGWSSSKDKDAYSSFGSRSDSRGKSSFFSDRGSGSRGRFDDRGRSDYDGIGSRGDRSGFGKFERGGNSRWCDKSDEDDWSKPLPPSERLEQELFSGGNTGINFEKYDDIPVEATGNNCPPHIESGLEKLQHFCCPS

SEQ ID NO: 90372 - protein, 389 aa, Homo sapiens
MRIPVDASTSRRFTPPSTALSPGKMSEALPLGAPDAGAALAGKLRSGDRSMVEVLADHPGELVRTDSPNFLCSVLPTHWRCNKTLPIAFKVVALGDVPDGTLVTVMAGNDENYSAELRNATAAMKNQVARFNDLRFVGRSGRGKSFTLTITVFTNPPQVATYHRAIKITVDGPREPRNTRQIQPSPPWSYDQSYQYLGSIASPSVHPATPISPGRASGMTTLSAELSSRLSTAPDLTAFSDPRQFPALPSISDPRMHYPGAFTYSPTPVTSGIGIGMSAMGSATRYHTYLPPPYPGSSQAQGGPFQASSPSYHLYYGASAGSYQFSMVGGERSPPRILPPCTNASTGSALLNPSLPNQSDVVEAEGSHSNSPTNMAPSARLEEAVWRPY

SEQ ID NO: 90373 - protein, 106 aa, Homo sapiens
  MOD_RES (1)..(1): Any amino acid
XDHADSCVVSSDDEELSRDRDVYVTTHTPRNARDEGATGLRPSGTVSCPICMDGYSEIVQNGRLIVSTECGHVFCSQCLRDSLKNANTCPTCRKKINHKRLLLVLA

SEQ ID NO: 90374 - protein, 299 aa, Homo sapiens
MAVMAPRTLLLLLSGALALTQTWAGSHSMRYFFTSVSRPGRGEPRFIAVGYVDDTQFVRFDSDAASQRMEPRAPWIEQEGPEYWDQETRNVKAQSQTDRVDLGTLRGYYNQSEAGSHTIQIMYGCDVGSDGRFLRGYRQDAYDGKDYIALNEDLRSWTAADMAAQITKRKWEAAHEAEQLRAYLDGTCVEWLRRYLENGKETLQRTDPPKTHMTHHPISDHEATLRCWALGFYPAEITLTWQRDGEDQTQDTELVETRPAGDGTFQKWAAVVVPSGEEQRYTCHVQHEGLPKPLTLRWV

SEQ ID NO: 90375 - protein, 190 aa, Homo sapiens
MRLWNKISRWMLGCYDALQKKYLRMVVLAVYTNPEDPQTISECYQFKFKYTNNGPLMDFISKNQSNESSMLSTDTKKASILLIRKIYILMQNLGPLPNDVCLTMKLFYYDEVTPPDYQPPGFKDGDCEGVIFEGEPMYLNVGEVSTPFHIFKVKVTTERERMENIDSTILSPKQIKTPFQKILRDKDVED

SEQ ID NO: 90376 - protein, 152 aa, Homo sapiens
MNPAAEAEFNILLATDSYKVTHYKQYPPNTSKVYSYFECREKKTENSKLRKVKYEETVFYGLQYILNKYLKGKVVTKEKIQEAKDVYKEHFQDDVFNEKGWNYILEKYDGHLPIEIKAVPEGFVIPRGNVLFTVENTDPECYWLTNWIEFRS

SEQ ID NO: 90377 - protein, 172 aa, Homo sapiens
MKTEMKQGAPTSFLPPEASQLKPDRQQFQSRKRPYEENRGRGYFEHREDRRGRSPQPPAEEDEDDFDDTLVAIDTYNCDLHFKVARDRSSGYPLTIEGFAYLWSGARASYGVRRGRVCFEMKINEEISVKHLPSTEPDPHVVRIGWSLDSCSTQLGEEPFSYGYGGTGKKST

SEQ ID NO: 90378 - protein, 158 aa, Homo sapiens
MLRDPSQIPDGVLANQVYQCIVNDCCYGPLVDCIKHAIGHEHEVLLRDLLLEKNLSFLDEDQLRAKGYDKTPDFILQVPVAVEGHIIHWIESKASFGDECSHHAYLHDQFWSYWNRFGPGLVIYWYGFIQELDCNRERGILLKACFPTNIVTLCHSIA

SEQ ID NO: 90379 - protein, 37 aa, Homo sapiens
MNDSLFVSLDRLLLEFVFQYEQDISTKEEMIQRINNI

SEQ ID NO: 90380 - protein, 213 aa, Homo sapiens
MSDILRELLCVSEKAANIARACRQQEALFQLLIEEKKEGEKNKKFAVDFKTLADVLVQEVIKQNMENKFPGLEKNIFGEESNEFTNDWGEKITLRLCSTEEETAELLSKVLNGNKVASEALARVVHQDVAFTDPTLDSTEINVPQDILGIWVDPIDSTYQYIKGSADIKSNQGIFPCGLQCVTILIGVYDIQTGVPLMGVINQPFVSRDPNTL

SEQ ID NO: 90381 - protein, 189 aa, Homo sapiens
MNLCQSPFQEGCQSLLRASWPEQAKEPRREGHTDKQQTEDVLAAGLRCLPHLPAICARRMSPAFRAMDVEPRAKGVLLEPFVHQVGGHSCVLRFNETTLCKPLVPREHQFYETLPAEMRKFTPQYKGKSQLLEGLPHWRGDVRDRGHGRPWQPSLEPSLPPTLCFPSLSSFSSSWPSAQHLTPSVFNPW

SEQ ID NO: 90382 - protein, 82 aa, Homo sapiens
MAYHSFLVEPISCHAWNKDRTQIAICPNNHEVHIYEKSGAKWTKVHELKEHNGQVTGIDWAPESNRIVTCGTDRNAYVWTLK

SEQ ID NO: 90383 - protein, 76 aa, Homo sapiens
MVRSRQMCNTNMSVPTDGAVTTSQIPASEQETLVRPKPLLLKLLKSVGAQKDTYTMKEDFLGIPGSQVKNFCTRDT

SEQ ID NO: 90384 - protein, 214 aa, Homo sapiens
  MOD_RES (1)..(1): Any amino acid
XAWAHCARGRHRPRPPTSGSRDNGPDGMEPEGVIESNWNEIVDSFDDMNLSESLLRGIYAYGFEKPSAIQQRAILPCIKGYDVIAQAQSGTGKTATFAISILQQIELDLKATQALVLAPTRELAQQIQKVVMALGDYMGASCHACIGGTNVRAEVQKLQMEAPHIIVGTPGRVFDMLNRRYLSPKYIKMFVLDEADEMLSRGFKDQIYDIFQKL

SEQ ID NO: 90385 - protein, 69 aa, Homo sapiens
  MOD_RES (1)..(1): Any amino acid
XRSSSMSSIDLVSASDDVHRFSSQVEEMVQNHMTYSLQDVGGDANWQLVVEEGEMKFWNYVLFRYTEEK

SEQ ID NO: 90386 - protein, 862 aa, Homo sapiens
MEKATVPVAAATAAEGEGSPPAVAAVAGPPAAAEVGGGVGGSSRARSASSPRGMVRVCDLLLKKKPPQQQHHKAKRNRTCRPPSSSESSSDSDNSGGGGGGGGGGGGGGGTSSNNSEEEEDDDDEEEEPDKPPANVATTLPIRNKAASKQKSSSHLPANSQDVQGYITNQSPESIVEEAQGKLTELEQRIKEAIEKNAQLQSLELAHADQLTKEKIEELNKTREEQIQKKQKILEELQKVERELQLKTQQQLKKQYLEVKAQRIQLQQQQQQSCQHLGLLTPVGVGEQLSEGDYARLQQVDPVLLKDEPQQTAAQMGFAPIQPLAMPQALPLAAGPLPPGSIANLTELQGVIVGQPVLGQAQLAGLGQGILTETQQGLMVASPAQTLNDTLDDIMAVSGRASAMSNTPTHSIAASISQPQTPTPSPIISPSAMLPIYPAIDIDAQTESNHDTALTLACAGGHEELVQTLLERGASIEHRDKKGFTPLILAATAGHVGVVEILLDNGADIEAQSERTKDTPLSLACSGGRQEVVELLLARGANKEHRNVSDYTPLSLAASGGYVNIIKILLNAGAEINSRTGSKLGISPLMLAAMNGHTAAVKLLLDMGSDINAQIETNRNTALTLACFQGRTEVVSLLLDRKANVEHRAKTGLTPLMEAASGGYAEVGRVLLDKGADVNAPPVPSSRDTALTIAADKGHYKFCELLIGRGAHIDVRNKKGNTPLWLAANGGHLDVVQLLVQAGADVDAADNRKITPLMAAFRKGHVKVVRYLVKEVNQFPSDSECMRYIATITDKEMLKKCHLCMESIVQAKDRQAAEANKNASILLEELDLEKLREESRRLALAAKREKRKEKRRKKKEEQ

SEQ ID NO: 90387 - protein, 59 aa, Homo sapiens
MDGEDIPDFSSLKEETAYWKELSLKYKQSFQEARDELVEFQEGSRELEAELEAQLVQAE

SEQ ID NO: 90388 - protein, 738 aa, Homo sapiens
METKENRWVPVTVLPGCVGCRTVAALASWTVRDVKERIFAETGFPVSEQRLWRGGRELSDWIKIGDLTSKNCHLFVNLQSKGLKGGGRFGQTTPPLVDFLKDILRRYPEGGQILKELIQNAEDAGATEVKFLYDETQYGTETLWSKDMAPYQGPALYVYNNAVFTPEDWHGIQEIARSRKKDDPLKVGRFGIGFNSVYHITDVPCIFSGDQIGMLDPHQTLFGPHESGQCWNLKDDSKEISELSDQFAPFVGIFGSTKETFINGNFPGTFFRFPLRLQPSQLSSNLYNKQKVLELFESFRADADTVLLFLKSVQDVSLYVREADGTEKLVFRVTSSESKALKHERPNSIKILGTAISNYCKKTPSNNITCVTYHVNIVLEEESTKDAQKTSWLVCNSVGGRGISSKLDSLADELKFVPIIGIAMPLSSRDDEAKGATSDFSGKAFCFLPLPPGEESSTGLPVHISGFFGLTDNRRSIKWRELDQWRDPAALWNEFLVMNVVPKAYATLILDSIKRLEMEKSSDFPLSVDVIYKLWPEASKVKVHWQPVLEPLFSELLQNAVIYSISCDWVRLEQVYFSELDENLEYTKTVLNYLQSSGKQIAKVPGNVDAAVQLTAASGTTPVRKVTPAWVRQVLRKCAHLGCAEEKLHLLEFVLSDQAYSELLGLELLPLQNGNFVPFSSSVSDQDVIYITSAEYPRSLFPSLEGRFILDNLKPHLVAALKEAAQTRAEIPWTAARR

SEQ ID NO: 90389 - protein, 463 aa, Homo sapiens
MSSKYPRSVRRCLPLWALTLEAALILLFYFFTHYDASLEDQKGLVASYQVGQDLTVMAAIGLGFLTSSFRRHSWSSVAFNLFMLALGVQWAILLDGFLSQFPSGKVVITLFSIRLATMSALSVLISVDAVLGKVNLAQLVVMVLVEVTALGNLRMVISNIFNTDYHMNMMHIYVFAAYFGLSVAWCLPKPLPEGTEDKDQTATIPSLSAMLGALFLWMFWPSFNSALLRSPIERKNAVFNTYYAVAVSVVTAISGSSLAHPQGKISKTYVHSAVLAGGVAVGTSCHLIPSPWLAMVLGLVAGLISVGGAKYLPGCCNRVLGIPHSSIMGYNFSLLGLLGEIIYIVLLVLDTVGAGNGMIGFQVLLSIGELSLAIVIALMSGLLTVSSFGCWILSKSIQEKQGLFKNKTTSSHCCLHLYVRNAHDSKVSNVRAGTGVRENGVESFLCHSLRRISPFIMHCRIQQ

SEQ ID NO: 90390 - protein, 114 aa, Homo sapiens
DSVRTVRVVATKQGNAVTLGDYYQGRRITITGNADLTFDQTAWGDSGVYYCSVVSAQDLQGNNEAYAELIVLGRTSGVAELLPGFQAGPIEVYAAGKAATSGVPSIYAPSTYAH

SEQ ID NO: 90391 - protein, 159 aa, Homo sapiens
MKCVFVTVGTTSFDDLIACVSAPDSLQKIESLGYNRLILQIGRGTVVPEPFSTESFTLDVYRYKDSLKEDIQKADLVISHAGAGSCLETLEKGKPLVVVINEKLMNNHQLELAKQLHKEGHLFYCTCRLILKKCLLVVEGGDKEILWVAGGSQLGLKFC

SEQ ID NO: 90392 - protein, 474 aa, Homo sapiens
MSTEEQYRIRQVNIYYYLEDDSMSVIEPVVENSGILQGKLIKRQRLAKNDRGDHYHWKDLNRGINITIYGKTFRVVDCDQFTQVFLESQGIELNPPEKMALDPYTELRKQPLRKYVTPSDFDQLKQFLTFDKQVLRFYAIWDDTDSMYGECRTYIIHYYLMDDTVEIREVHERNDGRDPFPLLMNRQRVPKVLVENAKNFPQCVLEISDQEVLEWYTAKDFIVGKSLTILGRTFFIYDCDPFTRRYYKEKFGITDLPRIDVSKREPPPVKQELPPYNGFGLVEDSAQNCFALIPKAPKKDVIKMLVNDNKVLRYLAVLESPIPEDKDRRFVFSYFLATDMISIFEPPVRNSGIIGGKYLGRTKVVKPYSTVDNPVYYGPSDFFIGAVIEVFGHRFIILDTDEYVLKYMESNAAQYSPEALASIQNHVRKREAPAPEAERFAFTSFHWLHIQILLKGSCVDIPTVSFLFYNSIYI

SEQ ID NO: 90393 - protein, 249 aa, Homo sapiens
MSSLPGCIGLDAATATVESEEIAELQQAVVEELGISMEELRHFIDEELEKMDCVQQRKKQLAELETWVIQKESEVAHVDQLFDDASRAVTNCESLVKDFYSKLGLQYRDSSSEDESSRPTEIIEIPDEDDDVLSIDSGDAGSRTPKDQKLREAMAALRKSAQDVQKFMDAVNKKSSSQDLHKGTLSQMSGELSKDGDLIVSMRILGKKRTKTWHKGTLIAIQTVGFSFSLMMAMLPMSHSRNCIPFAGH

SEQ ID NO: 90394 - protein, 69 aa, Homo sapiens
MVVCKGFVEDLDESFKENRNDDIWLVDFYAPWCGHCKKLEPIWNEVGLEMKSIGSPVKVGKMDATSYSN

SEQ ID NO: 90395 - protein, 236 aa, Homo sapiens
MPQALERADGSWAWVVLLATMVTQGLTLGFPTCIGIFFTELQWEFQASNSETSWFPSILTAVLHMAGPLCSILVGRFGCRVTVMLGGVLASLGMVASSFSHNLSQLYFTAGFITGLGMCFSFQSSITVLGFYFVRRRVLANALASMGVSLGITLWPLLSRYLLENLGWRGTFLVFGGIFLHCCICGAIIRPVATSVAPETKECPPPPPETPALGCLAACGRTIQRHLAFDILRHNT

SEQ ID NO: 90396 - protein, 203 aa, Homo sapiens
MQKSEGSGGTQLKNRATGNYDQRTSSSTQLKHRNAVQGSKSSLSTSSPESARKLHPRPSDKLNPKTINPFGEQSRVPSAFAAIYSKGGIPCRLVHGSVKHRLQWECPPESLSFDPLLITLAEGLRETKHPYTFVSKEGFRELLLVKGAPEKAIPLLPRLIPVLKAALVHSDDEVFERGLNALVQLSVVVGPSLNDHLKHLLTS

SEQ ID NO: 90397 - protein, 96 aa, Homo sapiens
MASVSALTEELDSITSELHAVEIQIQELTERQQELIQKKKVLTKKIKQCLEDSDAGASNEYDSSPAAWNKEDFPWSGKVKDILQNVFKLEKFRPLQ

SEQ ID NO: 90398 - protein, 101 aa, Homo sapiens
MSATVVDAVNAAPLSGSKEMSLEEPKKMTREDWRKKKELEEQRKLGNAPAEVDEEGKDINPHIPQYISSVPWYIDPSKRPTLKHQRPQPEKQKQFSSSGEW

SEQ ID NO: 90399 - protein, 200 aa, Homo sapiens
MAGQPGHMPHGGSSNNLCHTLGPVHPPDPQQLNHPNIIKYLDSFIEDNELNIVLELADAGDLSQMIKYFKKQKRLIPERTVWKYFVQLCSAVEHMHSRRVMHRDIKPANVFITATGVVKLGDLGLGRFFSSETTAAHSLVGTPYYMSPERIHENGYNFKSDIWSLGCLLYEMAALQSPFYGDKMNLFSLCQKIEQCDYPP

SEQ ID NO: 90400 - protein, 146 aa, Homo sapiens
MPSISSDRAALCAGCGGKISDRYYLLAVDKQWHMRCLKCCECKLNLESELTCFSKDGSIYCKEDYYRRFSVQRCARCHLGISASEMVMRARDLVYHLNCFTCTTCNKMLTTGDHFGMKDSLVYCRLHFEALLQGEYPAHFNHADVA

SEQ ID NO: 90401 - protein, 41 aa, Homo sapiens
MAAIYLSRGFFSREPICPFEEKTKVERMVEDYLASGYQDSV

SEQ ID NO: 90402 - protein, 98 aa, Homo sapiens
MQTAGALFISPALIRCCTRGLIRPVSASFLNSPVNSSKQPSYSNFPLQVARREFQTSVVSRDIDTAAKFIGAGAATVGVAGSGAGIGTVFGSLIIGYA

SEQ ID NO: 90403 - protein, 238 aa, Homo sapiens
MLLTSYNKGEMVVKEVKKRREIEGKENDLPSYRGWNTHPNERPVIYSILYSDATGRRGMDKNIGEQLNKAYEAFRQACMDRDSAVKELQQKTENYEQRIREQQEQLSLQQTIIDKLKSQLLLVNSTQDNNYGCVPLLEDSETRKNNLTLDQPQDKVISGIAREKLPKVRRQEVSSPRKETSARSLGSPLLHERGNIEKTFWDLKEEFHKICMLAKAQKDHLSKLNIPDTATAHLEALS

SEQ ID NO: 90404 - protein, 130 aa, Homo sapiens
MLLWPLLLLLLLLPTLALLRQQRSQDARLSWLAGLQHRVAWGALVWAATWQRRRLEQSTLHVHQSQQQALRWCLQGAQRPHCSLRRSTDISTFRNHLPLTKASQTQQEDSGEQPLPPTSNQDLGEASLQA

SEQ ID NO: 90405 - protein, 492 aa, Homo sapiens
MEATRLRQKAEELVKDNELLPPPSPSLGSFDPLAELTGKDSNVTASPTAPACPSDKPAPVQKPPSSGTSSEFEVVTPEEQNSPESSSHANAMALGPLPREDGNLMLHLQRLETTLSVCAEEPDHGQLFTHLGRMALEFNRLASKVHKNEQRTSILQTLCEQLRKENEALKAKLDKGLEQRDQAAERLREENLELKKLLMSNGNKEGASGRPGSPKMEGTGKKAVAGQQQASVTAGKVPEVVALGAAEKKVKMLEQQRSELLEVNKQWDQHFRSMKQQYEQKITELRQKLADLQKQVTDLEAEREQKQRDFDRKLLLAKSKIEMEETDKEQLTAEAKELRQKVKYLQDQLSPLTRQREYQEKEIQRLNKALEEALSIQTPPSSPPTAFGSPEGAGALLRKQELVTQNELLKQQVKIFEEDFQRERSDRERMNEEKEELKKQVEKLQAQVTLSNAQLKAFKDEEKAREALRQQKRKAKGTHRGCPRHLPERKVK

SEQ ID NO: 90406 - protein, 94 aa, Homo sapiens
MTVMSLSRDLKDDFHSDTVLSILNEQRIRGILCDVTIIVEDTKFKAHSNVLAASSLYFKNIFWSHTICISSHVLELDDLKAEVFTEILNYIYSS

SEQ ID NO: 90407 - protein, 218 aa, Homo sapiens
MAHVGSRKRSRSRSRSRGRGSEKRKKKSRKDTSRNCSASTSQERSKQKARRRTRSSSSSSSSSSSSSSSSSSSSSSSSSDGRKKRGKYKDKRRKKKKKRKKLKKKGKEKAEAQQVEALPGPSLDQWHRSAGEEEDGPVLTDEQKSRIQAMKPMTKEEWDARQSIIRKVVDPETGRTRLIKGDGEVLEEIVTKERHREINKQATRGDCLAFQMRAGLLP

SEQ ID NO: 90408 - protein, 147 aa, Homo sapiens
MASTEEQYDLKIVKVEEDPIWDQETHLRGNNFSGQEASRQLFRQFCYQETPGPREALSRLRELCHQWLRPEIHTKEQILELLVLEQFLTILPEELQAWVREHHPESGEEAVAVVEDLEQELSEPGNQAPDHEHGHSEVLLEDVEHLK

SEQ ID NO: 90409 - protein, 70 aa, Homo sapiens
MFQVPDSEGGRAGSRAMKPPGGESSNLFGSPEEATPSSRPNRMASNIFGPTEEPQNIPKRTNPPGSCFLM

SEQ ID NO: 90410 - protein, 147 aa, Homo sapiens
MSDDDSRASTSSSSSSSSNQQTEKETNTPKKKESKVSMSKNSKLLSTSAKRIQKELADITLDPPPNCSAGPKGDNIYEWRSTILGPPGSVYEGGVFFLDITFTPEYPFKPPKVTFRTRIYHCNINSQGVICLDILKDNWSPALTISK

SEQ ID NO: 90411 - protein, 236 aa, Homo sapiens
  MOD_RES (1)..(1): Any amino acid
XSDEESIRAHVMASHHSKRRGRASSESQIFELNKHISAVECLLTYLENTVVPPLAKGLGAGVRTEADVEEEALRRKLEELTSNVSDQETSSEEEEAKDEKAEPNRDKSVGPLPQADPEVSDIESRIAALRAAGLTVKPSGKPRRKSNLPIFLPRVAGKLGKRPEDPNADPSSEAKAMAVPYLLRRKFSNSLKSQGKDDDSFDRKSVYRGSLTQRNPNARKGMASHTFAKPVVAHQS

SEQ ID NO: 90412 - protein, 57 aa, Homo sapiens
  MOD_RES (1)..(1): Any amino acid
XPFSAPWWFWLSLTGVSLAGALGVKFVGLFIILQVGLNTIADLWYLFGDLSLSLWPW

SEQ ID NO: 90413 - protein, 765 aa, Homo sapiens
TGPLQGDGGPALGGADVAPRLSPVRVWPRPQAPKEPALHPMGLSLPKEKGLILCLWSKFCRWFQRRESWAQSRDEQNLLQQKRIWESPLLLAAKDNDVQALNKLLKYEDCKVHQRGAMGETALHIAALYDNLEAAMVLMEAAPELVFEPMTSELYEGQTALHIAVVNQNMNLVRALLARRASVSARATGTAFRRSPCNLIYFGEHPLSFAACVNSEEIVRLLIEHGADIRAQDSLGNTVLHILILQPNKTFACQMYNLLLSYDRHGDHLQPLDLVPNHQGLTPFKLAGVEGNTVMFQHLMQKRKHTQWTYGPLTSTLYDLTEIDSSGDEQSLLELIITTKKREARQILDQTPVKELVSLKWKRYGRPYFCMLGAIYLLYIICFTMCCIYRPLKPRTNNRTSPRDNTLLQQKLLQEAYMTPKDDIRLVGELVTVIGAIIILLVEVPDIFRMGVTRFFGQTILGGPFHVLIITYAFMVLVTMVMRLISASGEVVPMSFALVLGWCNVMYFARGFQMLGPFTIMIQKMIFGDLMRFCWLMAVVILGFASAFYIIFQTEDPEELGHFYDYPMALFSTFELFLTIIDGPANYNVDLPFMYSITYAAFAIIATLLMLNLLIAMMGDTHWRVAHERDELWRAQIVATTVMLERKLPRCLWPRSGICGREYGLGDRWFLRVEDRQDLNRQRIQRYAQAFHTRGSEDLDKDSVEKLELGCPFSPHLSLPMPSVSRSTSRSSANWERLRQGTLRRDLRGIINRGLEDGESWEYQI

SEQ ID NO: 90414 - protein, 285 aa, Homo sapiens
VKAATGEEVSAEDLGGADLHCRKSGVSDHWALDDHHALHLTRKVVRNLNYQKKLDVIARIVDGSRFTEFKAFYGDTLVTGFARIFGYPVGIVGNNGVLFSESAKKGTHFVQLCCQRNIPLLFLQNITGFMVGREYEAEGIAKDGAKMVAAVACAQVPKITLIIGGSYGAGNYGMCGRAYSPRFLYIWPNARISVMGGEQAANVLATITKDQRAREGKQFSSADEAALKEPIIKKFEEEGNPYYSSARVWDDGIIDPADTRLVLGLSFSAALNAPIEKTDFGIFRM

SEQ ID NO: 90415 - protein, 76 aa, Homo sapiens
MTGTPKTQEGAKDLEVDMNKTEVTPRLWTTCRDGEVLLRLSKHGPGHETPMTIPEFFRESVNRFGTYPALASKNGK

SEQ ID NO: 90416 - protein, 149 aa, Homo sapiens
MSTRSVSSSSYRRMFGGPGTASRPSSSRSYVTTSTRTYSLGSALRPSTSRSLYASSPGGVYATRSSAVRLRSSVPGVRLLQDSVDFSLADAINTEFKNTRTNEKVELQELNDRFANYIDKVRFLEQQNKILLAELEQLKGQGKSRLGDL

SEQ ID NO: 90417 - protein, 47 aa, Homo sapiens
MALTSYLRTSLRLKKRQDPRDHGRPHWSPPEENLPRTDTGKAGYLGY

SEQ ID NO: 90418 - protein, 139 aa, Homo sapiens
MSDVTIVKEGWVQKRGEYIKNWRPRYFLLKTDGSFIGYKEKPQDVDLPYPLNNFSVAKCQLMKTERPKPNTFIIRCLQWTTVIERTFHVDTPEEREEWTEAIQAVADRLQRQEEERMNCSPTSQIDNIGEEEMDASTTH

SEQ ID NO: 90419 - protein, 118 aa, Homo sapiens
  MOD_RES (1)..(1): Any amino acid
XLKPVPADQMIVSPSSNTSTSTSTLQSPVGAGTHTVTKIQSGITGTVISAPSSTPITPAMPLDEDPSKLCRHSLKCLECNEVFQDETSLATHFQQAADTSGQNGMEPARWLTPVVPAL

SEQ ID NO: 90420 - protein, 190 aa, Homo sapiens
  MOD_RES (1)..(1): Any amino acid
XTLSEQQEAPATAEPRVFGLPLPLLVERERPPGQVPLIIQKCVGQIERRGLRVVGLYRLCGSAAVKKELRDAFERDSAAVCLSEDLYPDINVITGHADASPGPPAPRLLLPCLQPHDPTELGRVLRACAAAGTPGAHKASCPQLRPRPCQCSGLQAPHRGAALPAAVLARSPPAPTISRCRALLATQTTA

SEQ ID NO: 90421 - protein, 942 aa, Homo sapiens
MVVSAGPWSSEKAEMNILEINEKLRPQLAENKQQFGNLKERCFLTQLAGFLANRQKKYKYEECKDLIKFMLRNERQFKEEKLAEQLKQAEELRQYKVLVHSQERELTQLKEKLREGRDASRSLNEHLQALLTPDEPDKSQGQDLQEQLAEGCRLAQHLVQKLSPENDEDEDEDVQVEEDEKVLESSAPREVQKAEESKVAEDSLEECAITCSNSHGPCDSNQPHKNIKITFEEDEVNSTLVVDRESSHDECQDALNILPVPGPTSSATNVSMVVSAGPLSSEKAEMNILEINEKLRPQLAEKKQQFRNLKEKCFLTQLAGFLANQQNKYKYEECKDLIKFMLRNERQFKEEKLAEQLKQAEELRQYKVLVHAQERELTQLREKLREGRDASRSLNEHLQALLTPDEPDKSQGQDLQEQLAEGCRLAQHLVQKLSPENDNDDDEDVQIEVAEKVQKSSAPREMQKAEEKEVPEDSLEECAITYSNSHGPYDSNQPHRKTKITFEEDKVDSTLIGSSSHVEREDAVHIIPENESDDEEEEEKGPVSPRNLQESEEEEVPQESWDEGYSTPSIPPEMLASYKSYSSTFHSLEEQQVCMAVDIGRHRWDQVKKEDQEATGPRLSRELLDEKGPEVLQDSLDRCYSTPSGCLELTDSCQPYRSAFYVLEQQRVGLAVDMDEIEKYQEVEEDQDPSCPRLSRELLDEKEPEVLQDSLDRCYSTPSGYLELPDLGQPYSSAVYSLEEQYLGLALDVDRIKKDQEEEEDQGPPCPRLSRELLEVVEPEVLQDSLDRCYSTPSSCLEQPDSCQPYGSSFYALEEKHVGFSLDVGEIEKKGKGKKRRGRRSKKERRRGRKEGEEDQNPPCPRLNGVLMEVEEPEVLQDSLDGCYSTPSMYFELPDSFQHYRSVFYSFEEQHISFALYVDNRFFTLTVTSLHLVFQMEVIFPQ

SEQ ID NO: 90422 - protein, 50 aa, Homo sapiens
MRTPPALGSQVSGGPGAGARRAPAARTWLGPARGPGKLAESGLGLGGRVT

SEQ ID NO: 90423 - protein, 478 aa, Homo sapiens
MIRKKRKRSAPPGPCRSHGPRPATAPAPPPSPEPTRPAWTGMGLRAAPSSAAAAAAEVEQRRSPGLCPPPLELLLLLLFSLGLLHAGDCQQPAQCRIQKCTTDFVSLTSHLNSAVDGFDSEFCKALRAYAGCTQRTSKACRGNLVYHSAVLGISDLMSQRNCSKDGPTSSTNPEVTHDPCNYHSHAGAREHRRGDQNPPSYLFCGLFGDPHLRTFKDNFQTCKVEGAWPLIDNNYLSVQVTNVPVVPGSSATATNKITIIFKAHHECTDQKVYQAVTDDLPAAFVDGTTSGGDSDAKSLRIVERESGHYVEMHARYIGTTVFVRQVGRYLTLAIRMPEDLAMSYEESQDLQLCVNGCPLSERIDDGQGQVSAILGHSLPRTSLVQAWPGYTLETANTQCHEKMPVKDIYFQSCVFDLLTTGDANFTAAAHSALEDVEALHPRKERWHIFPSSGNGTPRGGSDLSVSLGLTCLILIVFL

SEQ ID NO: 90424 - protein, 186 aa, Homo sapiens
EPSTSECLRIEPDTTALSTNHETIDLLVQILRNCLRYFLPPSFPISKKQLSAMNSDELISFPLKEYFKQYEVGLQNLCNSYQSRADSRAKASEESLRTSERKLRETEEKLQKLRTNIVALLQKVQETFRRTTWFENPPSHKNEVLFHMTPRWDWVAQKWGAPLSLLALHPGNKHEGLLCACPVDTE

SEQ ID NO: 90425 - protein, 186 aa, Homo sapiens
MLEEEEWYRSLKHFNYDVCQSCFFSGRTAKGHKLHYPMVEYCIPTTSGEDVRDFTKVLKNKFRSKKYFAKHPRLGYLPVQTVLEGDNLETPSQSPQLFHDDTHSRIEQYATRLAQMERTNGSFLTDSSSTTGSVEDEHALIQQYCQTLGGESPVSQPQSPAQILKSVEREERGELERIIADLEEEQ

SEQ ID NO: 90426 - protein, 110 aa, Homo sapiens
MDPALAAQMSEAVAEKMLQYRRDTAGWKICREGVSEELGGKGSRRRLRGARVPRSPQAPPLPVVFCSPIPWTRLRGIPMGIVFFFKKKIGPVMLTMTSGGTEEKALYMGH

SEQ ID NO: 90427 - protein, 97 aa, Homo sapiens
GYQLWSPWTPLDESFQWLRHTTPTPSSKHPFKASPCFPHTPSDLEVQLCFQEVTLVLDSPFLESGRWSFTTLPKLVLNSWTQAMPWPRPPKVLGLQR

SEQ ID NO: 90428 - protein, 864 aa, Homo sapiens
MDMFSLDMIISDPAAEASRAGKKQLRGVQNPCPSARARPRHKSLNIKDKISEWEGKKEVPTPAPSRRADGQEDYLPSSTVERRSSDGVRTQVTEAKNGMRPGTESTEKERNKGAVNVGGQDPEPGQDLSQPEREVDPSWGRGREPRLGKLRFQNDPLSVLKQVKKLEQALKDGSAGLDPQLPGTCYSPHCPPDKAEAGSTLPENLGGGSGSEVSQRVHPSDLEGREPTPELVEDRKGSCRRPWDRSLENVYRGSEGSPTKPFINPLPKPRRTFKHAGEGDKDGKPGIGFRKEKRNLPPLPSLPPPPLPSSPPPSSVNRRLWTGRQKSSADHRKSYEFEDLLQSSSESSRVDWYAQTKLGLTRTLSEENVYEDILDPPMKENPYEDIELHGRCLGKKCVLNFPASPTSSIPDTLTKQSLSKPAFFRQNSERRNFKLLDTRKLSRDGTGSPSKISPPSTPSSPDDIFFNLGDPQNGRKKRKIPKLVLRINAIYEVRRGKKRVKRLSQSMESNSGKVTDENSESDSDTEEKLKAHSQRLVNVKSRLKQAPRYPSLARELIEYQERQLFEYFVVVSLHKKQAGAAYVPELTQQFPLKLERSFKFMREAEDQLKAIPQFCFPDAKDWVPVQQFTSETFSFVLTGEDGSRRFGYCRRLLPGGKGKRLPEVYCIVSRLGCFSLFSRILDEVEKRRGISPALVQPLMRSVMEAPFPALGKTILVKNFLPGSGTEVIELCRPLDSRLEHVDFESLFSSLSVRHLVCVFASLLLERRVIFIADKLSTPTSRCCHPPWSTSCARRRPSSSGCSPARCHCSGSCRWKRSLWLTSSTAGSSDRWTMRTPSCPGSFRWPWNTFWNRGTSWLVSRTKGP

SEQ ID NO: 90429 - protein, 264 aa, Homo sapiens
MALLWGLLVLSWSCLQGPCSVFSPVSAMEPLGWQLTSGPNQEQVSPLTLLKLGNQEPGGQTALKSPPGVCSRDPTPEQTHRLARAMMAFTADLFSLVAQTSTCPNLILSPLSVALALSHLALGFWRNKFDPSLTQRDSFHLDEQFTVPVEMMQARTYPLRWFLLEQPEIQVAHFPFKNNMSFVVLVPTHFEWNVSQVLANLSWDTLHPPLVWERPTKVRLPKLYLKHQMDLVATLSQLGLQELFQAPDLRGISEQSLVVSGVQH

SEQ ID NO: 90430 - protein, 275 aa, Homo sapiens
SAAAAPSPVLGNIPPGDGMPVGPVPPGFFQPFMSPRYPGGPRPPLRIPNQALGGVPGSQPLLPSGMDPTRQQGHPNMGGPMQRMTPPRGMVPLGPQSDPWLSLQNYGGAMRPPLNALGGPGMPGMNMGPGGGRPWPNPTNANSIPYSSASPGNYVGPPGGGGPPGTPIMPSPADSTNSGDNMYTLMNAVPPGPNRPNFPMGPGSDGPMGGLGGMESHHMNGSLGSGDMDSISKNSPNNMSLSNQPGTPRDDGEMGGNFLNPFQSESYSPSMTMSV

SEQ ID NO: 90431 - protein, 25 aa, Homo sapiens
LQDFLAVRLVWTPEHAQAVYSTEWL

SEQ ID NO: 90432 - protein, 130 aa, Homo sapiens
MREIVHIQAGQCGNQIGTKFWEVISDEHGIDPAGGYVGDSALQLERINVYYNESSSQKYVPRAALVDLEPGTMDSVRSGPFGQLFRPDNFIFGQTGAGNNWAKGHYTEGAELVDAVLDVVRKECEHCDCL

SEQ ID NO: 90433 - protein, 670 aa, Homo sapiens [sequence omitted]

SEQ ID NO: 90434 - protein, 193 aa, Homo sapiens
MRLGSGTFATCCVAIEVLGIAVFLRGFFPAPVRSSARAEHGAEPPAPEPSAGASSNWTTLPPPLFSKVVIVLIDALRDDFVFGSKGVKFMPYTTYLVEKGASHSFVAEAKPPTVTMPRIKALMTGSLPGFVDVIRNLNSPALLEDSVIRQAKAAGKRIVFYGDETWVKLFPKHFVEYDGTTSFFVSDYTEKSM

SEQ ID NO: 90435 - protein, 351 aa, Homo sapiens
MLEVLRVLSTSSEALHHAVIFLFNGAEENVLQASHGFITQHPWASLIRAFINLEAAGVGGKELVFQTGPENPWLVQAYVSAAKHPFASVVAQEVFQSGIIPSDTDFRIYRDFGNIPGIDLAFIENGYIYHTKYDTADRILTDSIQRAGDNILAVLKHLATSDMLAAASKYRHGNMVFFDVLGLFVIAYPSRIGSIINYMVVMGVVLYLGKKFLQPKHKTGNYKKDFLCGLGITLISWFTSLVTVLIIAVFISLIGQSLSWYNHFYVSVCLYGTATVAKIILIHTLAKRFYYMNASAQYLGEVFFDISLFVHCCFLVTLTYQGLCSAFISAVWVAFPLLTKLCVHKDFKQHD

SEQ ID NO: 90436 - protein, 134 aa, Homo sapiens
  MOD_RES (1)..(1): Any amino acid
XQVLKKTIEEAKAIISKKQVEAGVCVTMEMVKDALDQLRGAVMIVYPMGLPPYDPIRMEFENKEDLSGTQPLQQQIIRLHQELGRQKSLWADVHGKLRSHIDALREQNMELREKLRALQLQRWKARKKSAASPH

SEQ ID NO: 90437 - protein, 41 aa, Homo sapiens
  MOD_RES (1)..(1): Any amino acid
XVLLEIFSYLPGLSPLEEAGGRPVAVATCRPDALHGWSAVV

SEQ ID NO: 90438 - protein, 149 aa, Homo sapiens
MVLGPEQKMSDDSVSGDHGESASLGNINPAYSNPSLSQSPGDSEEYFATYFNEKISIPEEEYSCFSFRKLWAFTGPGFLMSIAYLDPGNIESDLQSGAVAGFKLLWILLLATLVGLLLQRLAARLGVVTGLHLAEVCHRQYPKVPRVIL

SEQ ID NO: 90439 - protein, 98 aa, Homo sapiens
GEMSEKLRRCRKELTAAIDRAFEGVSYSQECTGQQRLELSAAPLSFSLPVHRLLCRRHPLAACSSAAPFAAVPCAPENENPAFATNHAPERYGERFEG

SEQ ID NO: 90440 - protein, 150 aa, Homo sapiens
MAAGTAARKAAPVLEAPPQQEQLVTLLQMWVVPLYFTIKLYWWRFLSMWGMFSVITSYILFRATRKPLSGRTPRLVYKWFLLIYKLSYAFGVVGYLAIMFTMCGFNLFFKIKARDSMDFGIVSLFYGLYYGVMGRDFAEICSDYMASTIG

SEQ ID NO: 90441 - protein, 85 aa, Homo sapiens
MISVKRNTWRALSLVIGDCRKKGNFEYCQDRTEKHSTMPDSPVDVKTQSRLTPPTMPPPPTTQGAPRTSSFTPTTLTNGTSHSPT

SEQ ID NO: 90442 - protein, 88 aa, Homo sapiens
MIESQEPVTFEDVAVDFTQEEWQQLNPAQKTLHRDVMLETYNHLVSVGCSGIKPDVIFKLEHGKDPWIIESELSRWIYPGIFGLCILI

SEQ ID NO: 90443 - protein, 119 aa, Homo sapiens
RSRTRPKSRLFLRGFAQFQPTRSTELDSNWNWFQLRCMQVGGNANATAFFRQHGCTANDANTKYNSRAAQMYREKIRQLGSAALARHGTDLWIDNMSSAVPNHSPEKKDSDFFTEHTQN

SEQ ID NO: 90444 - protein, 244 aa, Homo sapiens
MLRVLCLLRPWRPLRARGCASDGAAGGSEIQVRALAGPDQGITEILMNRPSARNALGNVFVSELLETLAQLREDRQVRVLLFRSGVKGVFCAGADLKEREQMSEAEVGVFVQRLRGLMNDIASSAVMGLIETTRGLLPGAGGTQRLPRCLGVALAKELIFTGRRLSGTEAHVLGLVNHAVAQNEEGDAAYQRARALAQEILPQVDIASGMAIEGMCYAQNIPTRDRLEGMAAFREKRTPKFVGK

SEQ ID NO: 90445 - protein, 235 aa, Homo sapiens
ATVNARPQRVLDTSSLTQSAPASPTNKGVHIHQAGGSPPASSTSSSSLTNDVAKQPVSRDLPSGRPGTTGPAGAQYTPHSHQFPRTRKMFDKGPEQVREPGCLVIWTLRALLLRWGLMASASGCSHHHGMGQDPPCRPGSVGHSLPLQTRVLVLTRAPLCLHSLGALLGVSRSLCLHSLGALLGVSRFSAPGSGFTILGSFHVTKQEHGVTWLCPSWAHSTLRPLGGSCTAEHLF

SEQ ID NO: 90446 - protein, 210 aa, Homo sapiens
  MOD_RES (1)..(1): Any amino acid
XKIPEGERVDFDDIHRKRMEKDLLELQTLIDVHFEQRKKEEEELVALKERIERRRSERAEQQRFRTEKERERQAKLAEEKMRKEEEEAKKRAEDDAKKKKVLSNMGAHFGGYLVKAEQKRGKRQTGREMKVRILSERKKPLDIDYMGEEQLREKAQELSDWIHQLESEKFDLMAKLKQQKYEINVLYNRISHAQKFRKGAGKGRVGGRWK

SEQ ID NO: 90447 - protein, 289 aa, Homo sapiens
MPEIRVTPLGAGQDVGRSCILVSIAGKNVMLDCGMHMGFNDDRRFPDFSYITQNGRLTDFLDCVIISHFHLDHCGALPYFSEMVGYDGPIYMTHPTQAICPILLEDYRKIAVDKKGEANFFTSQMIKDCMKKVVAVHLHQTVQVRFPGPQLAQSLPTPTPTMPSARSTQFLEGWGLRVSPPHLTLASSTVGTPGGVSARMRVPDQTGRRPGRARAGWGYAPAYEPTRLCPSGIEMARVGQAGALRALGAARDSLELPGCCRAGRQGLEGRWASSGGCLVLGVGQGRSEG

SEQ ID NO: 90448 - protein, 81 aa, Homo sapiens
MLAIGLSLCDHLSQDVFCLHESKFEEERMVAGWLTNYSQDSVTFEDVAVDFTQEEWTLLDQTQRNLYRDVMLENYKNLVAV

SEQ ID NO: 90449 - protein, 745 aa, Homo sapiens
MASLGANPRRTPQGPRPGAASSGFPSPAPVPGPREAEEEEVEEEEELAEIHLCVLWNSGYLGIAYYDTSDSTIHFMPDAPDHESLKLLQRVLDEINPQSVVTSAKQDENMTRFLGKLASQEHREPKRPEIIFLPSVDFGLEISKQRLLSGNYSFIPDAMTATEKILFLSSIIPFDCLLTPPGDLRFTPIPLLIPSQVRALGGLLKFLGRRRIGVELEDYNVSVPILGFKKFMLTHLVNIDQDTYSVLQIFKSESHPSVYKVASGLKEGLSLFGILNRCHCKWGEKLLRLWFTRPTHDLGELSSRLDVIQFFLLPQNLDMAQMLHRLLGHIKNVPLILKRMKLSHTKVSDWQVLYKTVYSALGLRDACRSLPQSIQLFRDIAQEFSDDLHHIASLIGKVVDFEGSLAENRFTVLPNIDPEIDEKKRRLMGLPSFLTEVARKELENLDSRIPSCSVIYIPLIGFLLSIPRLPSMVEASDFEINGLDFMFLSEEKLHYRSARTKELDALLGDLHCEIRDQETLLMYQLQCQVLARAAVLTRVLDLASRLDVLLALASAARDYGYSRPRYSPQVLGVRIQNGRHPLMELCARTFVPNSTECGGDKGRVKVITGPNSSGKSIYLKQVGLITFMALVGSFVPAEEAEIGAVDAIFTRIHSCESISLGLSTFMIDLNQQVAKAVNNATAQSLVLIDEFGKGTNTVDGLALLAAVLRHWLARGPTCPHIFVATNFLSLVQLQLLPQGPLVQYL

SEQ ID NO: 90450 - protein, 193 aa, Homo sapiens
MASSVAPYEQLVRQVEALKAENSHLRQELRDNSSHLSKLETETSGMKEVLKHLQGKLEQEARVLVSSGQTEVLEQLKALQMDITSLYNLKFQPPTLGPEPAARTPEGSPVHGSGPSKDSFGELSRATIRLLEELDRERCFLLNEIEKEEKEKLWYYSQLQGLSKRLDELPHVETFSMQMDLIRQQLEFEAQHI

SEQ ID NO: 90451 - protein, 125 aa, Homo sapiens
MLGMSLASLHFLWQTLDYLSPIPFWPTFPSTSSPAQHFGPRLPSPDPTLFCSLLTSWPPRFSHLTQLHPRHQRILQQQQHSQTPREPHFLLTTLLRKCQWWVSLKGCSSWLKVPQPRSLGLSSQT

SEQ ID NO: 90452 - protein, 591 aa, Homo sapiens
MPGFHLITQLKGMSVVLVLLPTLLLVMLTGAQRACPKNCRCDGKIVYCESHAFADIPENISGGSQGLSLRFNSIQKLKSNQFAGLNQLIWLYLDHNYISSVDEDAFQGIRRLKELILSSNKITYLHNKTFHPVPNLRNLDLSYNKLQTLQSEQFKGLRKLIILHLRSNSLKTVPIRVFQDCRNLDFLDLGYNRLRSLSRNAFAGLLKLKELHLEHNQFSKINFAHFPRLFNLRSIYLQWNRIRSISQGLTWTWSSLHNLDLSGNDIQGIEPGTFKCLPNLQKLNLDSNKLTNISQETVNAWISLISITLSGNMWECSRSICPLFYWLKNFKGNKESTMICAGPKHIQGEKVSDAVETYNICSEVQVVNTERSHLVPQTPQKPLIIPRPTIFKPDVTQSTFETPSPSPGFQIPGAEQEYEHVSFHKIIAGSVALFLSVAMILLVIYVSWKRYPASMKQLQQHSLMKRRRKKARESERQMNSPLQEYYVDYKPTNSETMDISVNGSGPCTYTISGSRECEMPHHMKPLPYYSYDQPVIGYCQAHQPLHVTKGYETVSPEQDESPGLELGRDHSFIATIARSAAPAIYLERIAN

SEQ ID NO: 90453 - protein, 187 aa, Homo sapiens
  MOD_RES (1)..(1): Any amino acid
XFISLKPKIPLSPEVTHTKPAPKTSQRTRTRRPRPKHKTTPRPETLQTKLDFGPITPGTSSAPTTTTKRTRRPHPKPKTTPHPEVPQTKLAPKQTPRAPPKPKTSPRPRIPQTQPVPKVPQRVTAKPKTSPSPEVSYTTPAPKDVLLPHKPYPEVSQSEPAPLETRGIPFIPMISPSPSQEELQTTL

SEQ ID NO: 90454 - protein, 55 aa, Homo sapiens
MTPLVSRLSRLWAIMRKPRAAVGSGHRKQAASQEGRQKHAKNNSQAKPSACDGRR

SEQ ID NO: 90455 - protein, 577 aa, Homo sapiens
MEGTAVAVFEILRFLIIHWKCDIDVSKGALLEGQLVISIEGLNSKHQANALHCVTTIASAGSLFGGMVLKKFLKEIQSILPGISAKLTWTSEEGSYSQDMTGVTPFQMIFEVDEKPRTLMTDCLVIKHFLRKIIMVHPKVRFHFSVKVNGILSTEIFGVENEPTLNLGNGIALLVDSQHYVRPNFGTIESHCSRIHPVLGHPVMLFIPEDVAGMDLLGELILTPAAALCPSPKVSSNQLNRISSVSIFLYGPLGLPLILSTWEQPMTTFFKDTSSLVDWKKYHLCMIPNLDLNLDRDLVLPDVSYQVESSEEDQSQTMDPQGQTLLLFLFVDFHSAFPVQQMEIWGVYTLLTTHLNAILVESHSVVQGSIQFTVDKVLEQHHQAAKAQQKLQASLSVAVNSIMSILTGSTRSSFRKMCLQTLQAADTQEFRTKLHKVFREITQHQFLHHCSCEVKQQLTLEKKDSAQGTEDAPDNSSLELLADTSGQAENKRLKRGSPRIEEMRALRSARAPSPSEAAPRRPEATAAPLTPRGREHREAHGRALAPGRASLGSRLEDVLWLQEVSNLSEWLSPSPGP

SEQ ID NO: 90456 - protein, 153 aa, Homo sapiens
MEAPDYEVLSVREQLFHERIRECIISTLLFATLYILCHIFLTRFKKPAEFTTVDDEDATVNKIALELCTFTLAIALGAVLLLPFSIISNEVLLSLPRNYYIQWLNGSLIHVCTPLGLARMFSVTGKLLVKPRLLEDLEEQLYCSAFEEAALTR

SEQ ID NO: 90457 - protein, 50 aa, Homo sapiens
FGSGYRGSSLNIMRNLVKAPQQKAEQNRVPLECWFLCGVRKDRECGQFPT

SEQ ID NO: 90458 - protein, 135 aa, Homo sapiens
MALSRVCWARSAVWGSAVTPGHFVTRRLQLGRSGLAWGAPRLFDLPCRSSKLHLSPKADVKNLMSYVVTKTKAINGKYHRFLGRHFPRFYVLYTIFMKGLQMLWADAKKARRIKTNMWKHNIKFHQLPYREMEHL

SEQ ID NO: 90459 - protein, 208 aa, Homo sapiens
  MOD_RES (1)..(1): Any amino acid
XARGERRRRAVPAEGVRTAERAARGGPGRRDGRGGGPRSTAGGVALAVVVLSLALGMSGRWVLAWYRARRAVTLHSAPPVLPADSSSPAVAPDLFWGTYRPHVYFGMKTRSPKPLLTGLMWAQQGTTPGTPKLRHTCEQGDGVGPYGWEFHDGLSFGRQHIQDGALRLTTEFVKRPGGQHGGDWSWRVTVEPQMARKSYYQRLGPRGS

SEQ ID NO: 90460 - protein, 164 aa, Homo sapiens
SEVLAELKEYATEVDVDFVRKAVRAIGRCAIKVEQSAERCVSTLLDLIQTKVNYVVQEAIVVIRDIFRKYPNKYESIIATLCENLDSLDEPDARAAMIWIVGEYAERIDNADELLESFLEGFHDESTQVQLTLLTAIVKLFLKKPSETQELVQQVLSLATQLKK

SEQ ID NO: 90461 - protein, 378 aa, Homo sapiens
MVMAYFVENFWGEKNSGFDVLYHNMKHGQISTKELADFVRERATIEEAYSRSMTKLAKSASNYSQLGTFAPVWDVFKTSTEKLANCHLDLVRKLQELIKEVQKYGEEQVKSHKKTKEEVAGTLEAVQTIQSITQALQKSKENYNAKCVEQERLKKEGATQREIEKAAVKSKKATDTYKLYVEKYALAKADFEQKMTETAQKFQDIEETHLIHIKEIIGSLSNAIKEIHLQIGQVHEEFINNMANTTVESLIQKFAESKGTGKERPGLIEFEECDTASAVEGIKPRKRKTFALPGIIKKEKDAESVWSFTVVAQVGMQWRDLGLLHSPPPRFKRFSSYLSLPSSWNYGAHHHIWLIFCIFSRDRVSPYWPGWSRTPDLR

SEQ ID NO: 90462 - protein, 42 aa, Homo sapiens
MPKKEKMAKTPLSDEKQLLLFQQKLLAEEEMAKKKERNTTVL

SEQ ID NO: 90463 - protein, 247 aa, Homo sapiens
  MOD_RES (1)..(1): Any amino acid
XILREILKGLDYLHSERKIHRDIKAANVLLSEQGDVKLADFGVAGQLTDTQIKRNTFVGTPFWMAPEVIKQSAYDFKADIWSLGITAIELAKGEPPNSDLHPMRVLFLIPKNSPPTLEGQHSKPFKEFVEACLNKDPRFRPTAKELLKHKFITRYTKKTSFLTELIDRYKRWKSEGHGEESSSEDSDILRSPSRGSRGPSACPRWSGPSSESSKRSTSRAAGAWVRWRSWRTPSAWPRSPAPASQTS

SEQ ID NO: 90464 - protein, 114 aa, Homo sapiens
MAKRALHDFIDKYLYAMRLSDETLIDIMTRFRKEMKNGLSRDFNPTATVKMLPTFVRSIPDGSEKGDFIALDLGGSSFRILRVQVNHEKNQNVHMESEVYDTPENIVHGSGSQL

SEQ ID NO: 90465 - protein, 1242 aa, Homo sapiens
MLQQVPENINFPAEEEKILEFWTEFNCFQECLKQSKHKPKFTFYDGPPFATGLPHYGHILAGTIKDIVTRYAHQSGFHVDRRFGWDCHGLPVEYEIDKTLGIRGPEDVAKMGITEYNNQCRAIVMRYSAEWKSTVSRLGRWIDFDNDYKTLYPQFMESVWWVFKQLYDKGLVYRGVKVMPFSTACNTPLSNFESHQNYKDVQDPSVFVTFPLEEDETVSLVAWTTTPWTLPSNLAVCVNPEMQYVKIKDVARGRLLILMEARLSALYKLESDYEILERFPGAYLKGKKYRPLFDYFLKCKENGAFTVLVDNYVKEEEGTGVVHQAPYFGAEDYRVCMDFNIIRKDSLPVCPVDASGCFTTEVTDFAGQYVKDADKSIIRTLKEQGRLLVATTFTHSYPFCWRSDTPLIYKAVPSWFVRVENMVDQLLRNNDLCYWVPELVREKRFGNWLKDARDWTISRNRYWGTPIPLWVSDDFEEVVCIGSVAELEELSGAKISDLHRESVDHLTIPSRCGKGSLHRISEVFDCWFESGSMPYAQVHYPFENKREFEDAFPADFIAEGIDQTRGWFYTLLVLATALFGQPPFKNVIVNGLVLASDGQKMSKRKKNYPDPVSIIQKYGADALRLYLINSPVVRAENLRFKEEGVRDVLKDVLLPWYNAYRFLIQNVLRLQKEEEIEFLYNENTVRESPNITDRWILSFMQSLIGFFETEMAAYRLYTVVPRLVKFVDILTNWYVRMNRRRLKGENGMEDCVMALETLFSVLLSLCRLMAPYTPFLTELMYQNLKVLIDPVSVQDKDTLSIHYLMLPRVREELIDKKTESAVSQMQSVIELGRVIRDRKTIPIKYPLKEIVVIHQDPEALKDIKSLEKYIIEELNVRKVTLSTDKNKYGIRLRAEPDHMVLGKRLKGAFKAVMTSIKQLSSEELEQFQKTGTIVVEGHELHDEDIRLMYTFDQATGGTAQFEAHSDAQALVLLDVTPDQSMVDEGMAREVINRIQKLRKKCNLVPTDEITVYYKAKSEGTYLNSVIESHTEFIFTTIKAPLKPYPVSPSDKVLIQEKTQLKGSELEITLTRGSSLPGPACAYVNLNICANGSEQGGVLLLENPKGDNRLDLLKLKSVVTSIFGVKNTELAVFHDETEIQNQTDLLSLSGKTLCVTAGSAPSLINSSSTLLCQYINLQLLNAKPQECLMGTVGTLLLENPLGQNGLTHQGLLYEAAKVFGLRSRKLKLFLNETQTQEITEDIP

SEQ ID NO: 90466 - protein, 184 aa, Homo sapiens
  MOD_RES (1)..(1): Any amino acid
XADPGRAQGAGSGAAAASSPAAGEPLQRERRAGAECGLARQVRAEVTKWIGVNRRPRKRKRREKEEVFEKLLPDQLVLLLEHLLEQKTLSPRTLQSLQRTYHLQDQDAEVRHRWCELIVKHKFTKAYKSVERFLQEDQAMGVYLYGELMVSEDARQQQLARRCFERTKEQMDRSSAQVVAEMLF

SEQ ID NO: 90467 - protein, 99 aa, Homo sapiens
MSSEDREAQEDELLALASIYDGDEFRKAESVQGGETRIYLDLPQNFKIFVSGNSNECLQNSGFEYTICFLPPLVLNFELPPDYPSSSPPSFTLSGKWLS

SEQ ID NO: 90468 - protein, 112 aa, Homo sapiens
VWFQNRRAKQRKQERSLLQPLAHLSPAAFSSFLPESTACPYSYAAPPPPVTCFPHPYSHALPSQPSTGGAFALSHQSEDWYPTLHPAPAGHLPCPPPPPMLPLSLEPSKSWN

SEQ ID NO: 90469 - protein, 183 aa, Homo sapiens
  MOD_RES (1)..(1): Any amino acid
XKQQLPPKKKRRVGTTVHCDYLNRPHKSIHRRRTDPMVTLSSILESIINDMRDLPNTYPFHTPVNAKVVKDYYKIITRPMDLQTLRENVRKRLYPSREEFREHLELIVKNSATYNGPKHSLTQISQSMLDLCDEKLKEKEDKLARLEKAINPLLDDDDQVAFSFILDNIVTQKMMAVPDIITK

SEQ ID NO: 90470 - protein, 591 aa, Homo sapiens [sequence omitted]

SEQ ID NO: 90471 - protein, 58 aa, Homo sapiens
MLSVQPDTKPKGCAGCNRKIKDRYLLKALDKYWHEDCLKCACCDCRLGEVGSTLYTKA

SEQ ID NO: 90472 - protein, 18 aa, Homo sapiens
RWDSELQREGGLAASCGL

SEQ ID NO: 90473 - protein, 165 aa, Homo sapiens
  MOD_RES (1)..(1): Any amino acid
XKPDSPPKVLEPENKQEKTEKEEEKTNVGRTLRRSPRISRPTAKVAEIRDQKADKKRGEGEDEVEEESTALQKTDKKEILKKSEKDTNSKVKPKGKVRWTGSRTRGRWKYSSNDESEGSGSEKSSAASEEEEEKESEEAILADDDEPCKKCGLPNHPELILLCDS

SEQ ID NO: 90474 - protein, 24 aa, Homo sapiens
MWLLSQIGPLHYAKRRNHLERDTQ

SEQ ID NO: 90475 - protein, 205 aa, Homo sapiens
MGVVSLFLCIVEQIFTSSKKIQFRGIFMAKVPKSKALEATKLAIEAGFRHIDSAHLYNNEEQVGLAIRSKIADGSVKREDIFYTSKLWCNSHRPELVRPALERSLKNLQLDYVDLYLIHFPVSVKPGEEVIPKDENGKILFDTVDLCATWEAVEKCKDAGLAKSIGVSNFNRRQLEMILNKPGLKYKPVCNQPRDNSIFSLSPDW

SEQ ID NO: 90476 - protein, 417 aa, Homo sapiens
EHLKDKLEEYMARFSKVRIVRTKKREGLIRTRLLGASMARGEVLTFLDSHCEVNVNWLPPLLNQIALNHKTIVCPMIDVIDHNHFGYEAQAGDAMRGAFDWEMYYKRIPIPPELQRADPSDPFESPVMAGGLFAVDRKWFWELGGYDPGLEIWGGEQYEISFKVWMCGGEMFDVPCSRVGHIYRKYVPYKVPSGTSLARNLKRVAETWMDEFAEYIYQRRPEYRHLSTGDISAQKELRKQLKCKDFKWFMAAVAWDVPKYYPPVEPPPAAWGEIRNVAANLCVDSKHGATGTELRLDICVKDGSERTWSHEQLFTFGWREDIRPGEPLHTRKFCFDAISHNSPVTLYDCHGMKGNQLWGYRKDRTLFHPVSNSCMDCNPAEKKIFMARCDPLSETQQWIFEHINMTVLEKFNHHANS

SEQ ID NO: 90477 - protein, 184 aa, Homo sapiens
  MOD_RES (1)..(1): Any amino acid
XPELGLWLETVNDKSGPLIFRKTMFNSTDIKLSVKSFHCSGPVKFTIVWHLKYHTCHNEHSNLEELFQKHKLSVDEDFCHYLKNDNCWTTKNENLDCNSDSQVFPSLNDVVARTQKDGFHIFIVSIKTENTDASWNLNVSLSMIGPHGYISASDWPLMIFYMVMCIVYILYGILWLTWSACYWK

SEQ ID NO: 90478 - protein, 135 aa, Homo sapiens
MTKIKADPDGPEAQAEACSGERTYQELLVNQNPIAQPLASRRLTRKLYKCIKKAVKQKQIRRGVKEVQKFVNKGEKGIMVLAGDTLPIEVYCHLPVMCEDRNLPYVYIPSKTFPSCKVGIPAQALWLTPVILVLW

SEQ ID NO: 90479 - protein, 71 aa, Homo sapiens
MEGVLYKWTNYLSVLGPFPAHSADRRAAVVNSSQPKAACASPAESYSVTQAGVQWCDLRLPSSSNSPASAS

SEQ ID NO: 90480 - protein, 140 aa, Homo sapiens
MNINDGGRRRFEDNEHTLRIYPGAISEGTIYCPIPARKNSTAAEVIESLINKLHLDKTKCYVLAEVKEFGGEEWILNPTDCPVQRMMLWPRMALENRLSGEDYRFLLREKNLDGSIHYGSLQSWLRVTEERRRMMERGFL

SEQ ID NO: 90481 - protein, 97 aa, Homo sapiens
MATFSRQEFFQQLLQGCLLPTAQQGLDQIWLLLAICLACRLLWRLGLPSYLKHASTVAGGFFSLYHFFQLHMVWVVLLSLLCYLVLFLCRHSSHRGV

SEQ ID NO: 90482 - protein, 238 aa, Homo sapiens
MQVPQDGEDLAGQPWYHGLLSRQKAEALLQQNGDFLVRASGSRGGNPVISCRWRGSALHFEVFRVALRPRPGRPTALFQLEDEQFPSIPALVHSYMTGRRPLSQATGAVVSRPVTWQGPLRRSFSEDTLMDGPARIEPLRARKWSNSQPADLAHMGRSREDPAGMESAPGTPSPAYPPWPVPGAPSWEHRPSPAIGRLPGHRPPGSDQRSAGQHGSLIWPGAAHSSPWTPLEVGTAGE

SEQ ID NO: 90483 - protein, 67 aa, Homo sapiens
MIPGKYRSVSGRAANNVNCGLHLVIQTSSLPEKNKTKADRMSYHQWGRPPSFVELSTQFYNSDTKYF

SEQ ID NO: 90484 - protein, 60 aa, Homo sapiens
MVENERLRQEMRRCEAELQELRTKPAGPCPGCEHSQESAQLRDKLSQLQLEMAESKGMLS

SEQ ID NO: 90485 - protein, 872 aa, Homo sapiens
MAGPRGALLAWCRRQCEGYRGVEIRDLSSSFRDGLAFCAILHRHRPDLLDFDSLSKDNVFENNRLAFEVAEKELGIPALLDPNDMVSMSVPDCLSIMTYVSQYYNHFCSPGQAGVSPPRKGLAPCSPPSVAPTPVEPEDVAQGEELSSGSLSEQGTGQTPSSTCAACQQHVHLVQRYLADGRLYHRHCFRCRRCSSTLLPGAYENGPEEGTFVCAEHCARLGPGTRSGTRPGPFSQPKQQHQQQLAEDAKDVPGGGPSSSAPAGAEADGPKASPEARPQIPTKPRVPGKLQELASPPAGRPTPAPRKASESTTPAPPTPRPRSSLQQENLVEQAGSSSLVNGRLHELPVPKPRGTPKPSEGTPAPRKDPPWITLVQAEPKKKPAPLPPSSSPGPPSQDSRQVENGGTEEVAQPSPTASLESKPYNPFEEEEEDKEEEAPAAPSLATSPALGHPESTPKSLHPWYGITPTSSPKTKKRPAPRAPSASPLALHASRLSHSEPPSATPSPALSVESLSSESASQTAGAELLEPPAVPKSSSEPAVHAPGTPGNPVSLSTNSSLASSGELVEPRVEQMPQASPGLAPRTRGSSGPQPAKPCSGATPTPLLLVGDRSPVPSPGSSSPQLQVKSSCKENPFNRKPSPAASPATKKATKGSKPVRPPAPGHGFPLIKRKVQADQYIPEEDIHGEMDTIERRLDALEHRGVLLEEKLRGGLNEGREDDMLVDWFKLIHEKHLLVRRESELIYVFKQQNLEQRQADVEYELRCLLNKPEKDWTEEDRAREKVLMQELVTLIEQRNAIINCLDEDRQREEEEDKMLEAMIKKKGEALAGDEAEFQREAEPEGKKKGKFKTMKMLKLLGNKRDAKSKSPRDKS

SEQ ID NO: 90486 - protein, 151 aa, Homo sapiens
MAAARDPPEVSLREATQRKLRRFSELRGKLVARGEFWDIVAITAADEKQELAYNQQLSEKLKRKELPLGVQYHVFVDPAGAKIGNGGSTLCALQCLEKLYGDKWNSFTILLIHSDEWKKKVSESYVITIERLEDDLQIKEKELTELRNIFG

SEQ ID NO: 90487 - protein, 70 aa, Homo sapiens
MTPQSLLQTTLFLLSLLFLVQGAHGRGHREDFRFCSQRNQTHRSSLHYKPTPDLRISIENSEEALTVHAP

SEQ ID NO: 90488 - protein, 97 aa, Homo sapiens
MEVTTRLTWNDENHLRKLLGNVSLSLLYKSSVHGGSIEDMVERCSRQGCTITMAYIDYNMIVAFMLGNYINLHESSTEPNDSLWFSLQKKNDTTEIE

SEQ ID NO: 90489 - protein, 115 aa, Homo sapiens
MASGSGDSVTRRSVASQFFTQEEGPGIDGMTTSERVVDLLNQAALITNDSKITVLKQVQELIINKDPTLLDNFLDEIIAFQADKSIEVRKFVIGFIEEACKRDIELLLKLIANLN

SEQ ID NO: 90490 - protein, 115 aa, Homo sapiens
MVKVLDAVRGSPAINVAVHVFRKAADDTWEPFASGKTSESGELHGLTTEEEFVEGIYKVEIDTKSYWKALGISPFHEHAEVVFTANDSGPRRYTIAALLSPYSYSTTAVVTNPKE

SEQ ID NO: 90491 - protein, 139 aa, Homo sapiens
MELRAKEEERLNKLRLESEGSPETLTNLRKGYLFMYNLVQFLGFSWIFVNLTVRFCILGKESFYDTFHTVADMMYFCQMLAVVETINAAIGVTTSPVLPSLIQLLGRNFILFIIFGTMEEMQNKAVVFFVFYLWSAIEI

SEQ ID NO: 90492 - protein, 1577 aa, Homo sapiens
MNKAPQSTGPPPAPSPGLPQPAFPPGQTAPVVFSTPQATQMNTPSQPRQHFYPSRAQPPSSAASRVQSAAPARPGPAAHVYPAGSQGRSTYVVPTQQYPVQPGAPGFYPGASPTEFGTYAGAYYPAQGVQQFPTGVAPTPVLMNQPPQIAPKRERKTIRIRDPNQGGKDITEEIMSGARTASTPTPPQTGGGLEPQANGETPQVAVIVRPDDRSQGAIIADRPGLPGPEHSPSESQPSSPSPTPSPSPVLEPGSEPNLAVLSIPGDTMTTIQMSVEESTPISRETGEPYRLSPEPTPLAEPILEVEVTLSKPVPESEFSSSPLQAPTPLASHTVEIHEPNGMVPSEDLEPEVESSPELAPPPACPSESPVPIAPTAQPEELLNGAPSPPAVDLSPVSEPEEQAKEVTASMAPPTIPSATPATAPSATSPAQEEEMEEEEEEEEGEAGEAGEAESEKGGEELLPPESTPIPANLSQNLEAAAATQVAVSVPKRRRKIKELNKKEAVGDLLDAFKEANPAVPEVENQPPAGSNPGPESEGSGVPPRPEEADETWDSKEDKIHNAENIQPGEQKYEYKSDQWKPLNLEEKKRYDREFLLGFQFIFASMQKPEGLPHISDVVLDKANKTPLRPLDPTRLQGINCGPDFTPSFANLGRTTLSTRGPPRGGPGGELPRGPAGLGPRRSQQGPRKEPRKIIATVLMTEDIKLNKAEKAWKPSSKRTAADKDRGEEDADGSKTQDLFRRVRSILNKLTPQMFQQLMKQVTQLAIDTEERLKGVIDLIFEKAISEPNFSVAYANMCRCLMALKVPTTEKPTVTVNFRKLLLNRCQKEFEKDKDDDEVFEKKQKEMDEAATAEERGRLKEELEEARDIARRRSLGNIKFIGELFKLKMLTEAIMHDCVVKLLKNHDEESLECLCRLLTTIGKDLDFEKAKPRMDQYFNQMEKIIKEKKTSSRIRFMLQDVLDLRGSNWVPRRGDQGPKTIDQIHKEAEMEEHREHIKVQQLMAKGSDKRRGGPPGPPISRGLPLVDDGGWNTVPISKGSRPIDTSRLTKITKPGSIDSNNQLFAPGGRLSWGKGSSGGSGAKPSDAASEAARPATSTLNRFSALQQAVPTESTDNRRVVQRSSLSRERGEKAGDRGDRLERSERGGDRGDRLDRARTPATKRSFSKEVEERSRERPSQPEGLRKAASLTEDRDRGRDAVKREAALPPVSPLKAALSEEELEKKSKAIIEEYLHLNDMKEAVQCVQELASPSLLFIFVRHGVESTLERSAIAREHMGQLLHQLLCAGHLSTAQYYQGLYEILELAEDMEIDIPHVWLYLAELVTPILQEGGVPMGELFREITKPLRPLGKAASLLLEILGLLCKSMGPKKVGTLWREAGLSWKEFLPEGQDIGAFVAEQKVEYTLGEESEAPGQRALPSEELNRQLEKLLKEGSSNQRVFDWIEANLSEQQIVSNTLVRALMTAVCYSAIIFETPLRVDVAVLKARAKLLQKYLCDEQKELQALYALQALVVTLEQPPNLLRMFFDALYDEDVVKEDAFYSWESSKDPAEQQGKGVALKSVTAFFKWLREAEEESDHN

SEQ ID NO: 90493 - protein, 62 aa, Homo sapiens
MPGEQQAEEEEEEEMQEEMVLLVKGEEDEGEEKYEVVKLKIPMDNKERHDLALSPRLECSGT

SEQ ID NO: 90494 - protein, 24 aa, Homo sapiens
MADLMQETFLHHATGYTTIYPFTC

SEQ ID NO: 90495 - protein, 28 aa, Homo sapiens
MRRAALWLWLCALALSLQPALPSLSHGR

SEQ ID NO: 90496 - protein, 1355 aa, Homo sapiens
ETFAKSLEALEAWIVEAEEILQGQDPSHSSDLSTIQERMEELKGQMLKFSSMAPDLDRLNELGYRLPLNDKEIKRMQNLNRHWSLISSQTTERFSKLQSFLLQHQTFLEKCETWMEFLVQTEQKLAVEISGNYQHLLEQQRAHELFQAEMFSRQQILHSIIIDGQRLLEQGQVDDRDEFNLKLTLLSNQWQGVIRRAQQRRGIIDSQIRQWQRYREMAEKLRKWLVEVSYLPMSGLGSVPIPLQQARTLFDEVQFKEKVFLRQQGSYILTVEAGKQLLLSADSGAEAALQAELAEIQEKWKSASMRLEEQKKKLAFLLKDWEKCEKGIADSLEKLRTFKKKLSQSLPDHHEELHAEQMRCKELENAVGSWTDDLTQLSLLKDTLSAYISADDISILNERVELLQRQWEELCHQLSLRRQQIGERLNEWAVFSEKNKELCEWLTQMESKVSQNGDILIEEMIEKLKKDYQEEIAIAQENKIQLQQMGERLAKASHESKASEIEYKLGKVNDRWQHLLDLIAARVKKLKETLVAVQQLDKNMSSLRTWLAHIESELAKPIVYDSCNSEEIQRKLNEQQELQRDIEKHSTGVASVLNLCEVLLHDCDACATDAECDSIQQATRNLDRRWRNICAMSMERRLKIEETWRLWQKFLDDYSRFEDWLKSSERTAAFPSSSGVIYTVAKEELKKFEAFQRQVHECLTQLELINKQYRRLARENRTDSACSLKQMVHEGNQRWDNLQKRVTSILRRLKHFIGQREEFETARDSILVWLTEMDLQLTNIEHFSECDVQAKIKQLKAFQQEISLNHNKIEQIIAQGEQLIEKSEPLDAAIIEEELDELRRYCQEVFGRVERYHKKLIRLPLPDDEHDLSDRELELEDSAALSDLHWHDRSADSLLSPQPSSNLSLSLAQPLRSERSGRDTPASVDSIPLEWDHDYDLSRDLESAMSRALPSEDEEGQDDKDFYLRGAVGLSGDHSALESQIRQLGKALDDSRFQIQQTENIIRSKTPTGPELDTSYKGYMKLLGECSSSIDSVKRLEHKLKEEEESLPGFVNLHSTETQTAGVIDRWELLQAQALSKELRMKQNLQKWQQFNSDLNSIWAWLGDTEEELEQLQRLELSTDIQTIELQIKKLKELQKAVDHRKAIILSINLCSPEFTQADSKESRDLQDRLSQMNGRWDRVCSLLEEWRGLLQDALMQCQGFHEMSHGLLLMLENIDRRKNEIVPIDSNLDAEILQDHHKQLMQIKHELLESQLRVASLQDMSCQLLVNAEGTDCLEAKEKVHVIGNRLKLLLKEVSRHIKELEKLLDVSSSQQDLSSWSSADELDTSGSVSPTSGRSTPNRQKTVHKRWLRFLPF

SEQ ID NO: 90497 - protein, 294 aa, Homo sapiens
MARGERRRRAVPAEGVRTAERAARGGPGRRDGRGGGPRSTAGGVALAVVVLSLALGMSGRWVLAWYRARRAVTLHSAPPVLPADSSSPAVAPDLFWGTYRPHVYFGMKTRSPKPLLTGLMWAQQGTTPGTPKLRHTCEQGDGVGPYGWEFHDGLSFGRQHIQDGALRLTTEFVKRPGGQHGGDWSWRVTVEPQDSGTSALPLVSLFFYVVTDGKEVLLPEVGAKGQLKFISGHTSELGDFRFTLLPPTSPGDTAPKYGSYNVFWTSNPGLPLLTEMAVPRQEEIKPCQDWQAVY

SEQ ID NO: 90498 - protein, 86 aa, Homo sapiens
MFYLDLTLFHRAEETGEESFSVQNGSIHQKDAVNDDDFEPYLSSQTNQSNSYPPMSDPYMPSYYAPSIGFPYSLGEAAWSTAGDQP

SEQ ID NO: 90499 - protein, 453 aa, Homo sapiens
MGLLVFVRNLLLALCLFLVLGFLYYSAWKLHLLQWEEDSNSVVLSFDSAGQTLGSEYDRLGFLLNLDSKLPAELATKYANFSEGACKPGYASALMTAIFPRFSKPAPMFLDDSFRKWARIREFVPPFGIKGQDNLIKAILSVTKEYRLTPALDSLRCRRCIIVGNGGVLANKSLGSRIDDYDIVVRLNSAPVKGFEKDVGSKTTLRITYPEGAMQRPEQYERDSLFVLAGFKWQDFKWLKYIVYKERVSASDGFWKSVATRVPKEPPEIRILNPYFIQEAAFTLIGLPFNNGLMGRGNIPTLGSVAVTMALHGCDEVAVAGFGYDMSTPNAPLHYYETVRMAAIKEPRPHVENLNPSELRLPHFCFDHQPSTDPSLKPGNLGPVLQQLLCCYIWVMGGCWREPPICADSCFCKSGGSGLSPHSCLSVFLSILLHHPPPLFQSLPCPKSSSLFQ

SEQ ID NO: 90500 - protein, 659 aa, Homo sapiens
  MOD_RES (1)..(1): Any amino acid
XSVRDSYTDFHIDFGGTSVWYHVLKGEKIFYLIRPTNANLTLFECWSSSSNQNEMFFGDQVDKCYKCSVKQGQTLFIPTGWIHAVLTPVDCLAFGGNFLHSLNIEMQLKAYEIEKRLSTADLFRFPNFETICWYVGKHILDIFRGLRENRRHPASYLVHGGKALNLAFRAWTRKEALPDHEDEIPETVRTVQLIKDLAREIRLVEDIFQQNVGKTSNIFGLQRIFPAGSIPLTRPAHSTSVSMSRLSLPSKNGSKKKGLKPKELFKKAERKGKESSALGPAGQLSYNLMDTYSHQALKTGSFQKAKFNITGACLNDSDDDSPDLDLDGNESPLALLMSNGSTKRVKSLSKSRRTKIAKKVDKARLMAEQVMEDEFDLDSDDELQIDERLGKEKATLIIRPKFPRKLPRAKPCSDPNRVREPGEVEFDIEEDYTTDEDMVEGVEGKLGNGSGAGGILDLLKASRQVGGPDYAALTEAPASPSTQEAIQGMLCMANLQSSSSSPATSSLQAWWTGGQDRSSGSSSSGLGTVSNSPASQRTPGKRPIKRPAYWRTESEEEEENASLDEQDSLGACFKDAEYIYPSLESDDDDPALKSRPKKKKNSDDAPWSPKARVTPTLPKQDRPVREGTRVASIETGLAAAAAKLAQQVKKMKLSLTDSG

SEQ ID NO: 90501 - protein, 107 aa, Homo sapiens
MKTGHFEIVTMLLATMILVDIFQVKAEVLDMADNAFDDEYLKCTDRMEIKYVPQLLKEEKASHQQLDTVWENAKAKWAARKTQIFLPMNFKDNHGIALMAYISEAQE

SEQ ID NO: 90502 - protein, 430 aa, Homo sapiens
  MOD_RES (1)..(1): Any amino acid
XAGATKASSRREAEEMKLEPLQEREPAPEENLTWSSSGGDEKFMTSGFEDKQSTCETKEQEPKLVKPKKKRRKKSVYTVGLRGLINLGNTCFMNCIVQALTHIPLLKDFFLSDKHKCIMTSPSLCLVCEMSSLFHAMYSGSRTPHIPYKLLHLIWIHAEHLAGYRQQDAHEFLIAILDVLHRHSKDDSGGQEANNPNCCNCIIDQIFTGGLQSDVTCQACHSVSTTIDPCWDISLDLPGSCATFDSQNPERADSTVSRDDHIPGIPSLTDCLQWFTRPEHLGSSAKIKCNSCQSYQESTKQLTMKKLPIVACFHLKRFEHVGKQRRKINTFISFPLELDMTPFLASTKESRMKEGQPPTDCVPNENKYSLFAVINHHGTLESGHYTSFIRQQKDQWFSCDDAIITKATIEDLLYSEGYLLFYHKQGLEKD

SEQ ID NO: 90503 - protein, 187 aa, Homo sapiens
  MOD_RES (1)..(1): Any amino acid
XPPRPVAPPTRPAPPQRPPPPSGARSPAPTRKEFGAPKSPGTTRKDNIGRSQPSPQAGLAGPGPAGYSTARPTIPPRAGVISAPQSHARASAGRLTPESQSKTSETSKGSTFLPEPLKPQAAFPPQSSLPPPAQRLQEPLVPVAAPMPQSGPQPNLETPPQPPPRSRSSHSLPSEASSQPQQEQPSG

SEQ ID NO: 90504 - protein, 201 aa, Homo sapiens
MGYDVTRFQGDVDEDLICPICSGVLEEPVQAPHCEHAFCNACITQWFSQQQTCPVDRSVVTVAHLRPVPRIMRNMLSKLQIACDNAVFGCSAVVRLDNLMSHLSDCEHNPKRPVTCEQGCGLEMPKDELPNHNCIKHLRSVVQQQQTRIAELEKTSAEHKHQLAEQKRDIQLLKAYMRAIRSVNPNLQNLEETIEYNEILE

SEQ ID NO: 90505 - protein, 137 aa, Homo sapiens
MVSWKGIYFILTLFWGSFFGSIFMLSPFLPLMFVNPSWYRWINNRLVATWLTLPVALLETMFGVKVIITGDAFVPGERSVIIMNHRTRMDWMFLWNCLMRYSYLRLEKICLKASLKGVPGFGWAMQAAAYIFIHRKW

SEQ ID NO: 90506 - protein, 66 aa, Homo sapiens
MTSKGPEEEHPSVTLFRQYLRIRTVQPKPDYEKIQKLVRNGGTPVVPATPEVEVGGSLEPGRLRLQ

SEQ ID NO: 90507 - protein, 305 aa, Homo sapiens
MAACGRVRRMFRLSAALHLLLLFAAGAEKLPGQGVHSQGQGPGANFVSFVGQAGGGGPAGQQLPQLPQSSQLQQQQQQQQQQQQPQPPQPPFPAGGPPARRGGAGAGGGWKLAEEESCREDVTRVCPKHTWSNNLAVLECLQDVREPENEISSDCNHLLWNYKLNLTTDPKFESVAREVCKSTITEIKECADEPVGKGYMVSCLVDHRGNITEYQCHQYITKMTAIIFSDYRLICGFMDDCKNDINILKCGSIRLGEKDAHSQDTPTALRNREGGSHGSAELKSKGSYTSVPWMSSWILPSRISA

SEQ ID NO: 90508 - protein, 61 aa, Homo sapiens
MEQLDFETGPNIFDLQIYVKDEVGVTDLQVLTVQVTDVNEPPQFQGNLAEARHECTQSWRN

SEQ ID NO: 90509 - protein, 163 aa, Homo sapiens
MAGDTHCPAEPLAREGTLWEALRALLPHSKEDLKLDLGEKVERSVVTLLQRATELFYEGRRDECLQSSEVILDYSWEKLNTGTWQDVDKDWRRVYAIGCLLKALCLCQAPEDANTVAAALRVCDMGLLMGAAILGDILLKVAAILQTHLPGKRPARGSLPEQP

SEQ ID NO: 90510 - protein, 172 aa, Homo sapiens
MNDRSSRRRTMKDDETFEISIPFDEAPHLDPQIFYSLSPSRRNFEEPPEAASSALALMNSVKTQLHMALERNSWLQKRIEDLEEERDFLRCQLDKFISSARMEAEDHCRMKPGPRRMEGDSRGGAGGEASDPESAASSLSGASEEGSASERRRQKQKGGASRRRFGKPKARE

SEQ ID NO: 90511 - protein, 135 aa, Homo sapiens
MSKRPSYAPPPTPAPATQMPSTPGFVGYNPYSHLAYNNYRLGGNPGTNSRVTASSGITIPKPPKPPDKPLMPYMRYSRKVWDQVKASNPDLKLWEIGKIIGGMWRDLTDEEKQEYLNEYEAEKIEYNESMKAYHN

SEQ ID NO: 90512 - protein, 903 aa, Homo sapiens
MADDDVLFEDVYELCEVIGKGPFSVVRRCINRETGQQFAVKIVDVAKFTSSPGLSTEGKRWISNLKREASICHMLKHPHIVELLETYSSDGMLYMVFEFMDGADLCFEIVKRADAGFVYSEAVASHYMRQILEALRYCHDNNIIHRDVKPHCVLLASKENSAPVKLGGFGVAIQLGESGLVAGGRVGTPHFMAPEVVKREPYGKPVDVWGCGVILFILLSGCLPFYGTKERLFEGIIKGKYKMNPRQWSHISESAKDLVRRMLMLDPAERITVYEALNHPWLKERDRYAYKIHLPETVEQLRKFNARRKLKGAVLAAVSSHKFNSFYGDPPEELPDFSEDPTSSGAVSQVLDSLEEIHALTDCSEKDLDFLHSVFQDQHLHTLLDLYDKINTKSSPQIRNPPSDAVQRAKEVLEEISCYPENNDAKELKRILTQPHFMALLQTHDVVAHEVYSDEALRVTPPPTSPYLNGDSPESANGDMDMENVTRVRLVQFQKNTDEPMGITLKMNELNHCIVARIMHGGMIHRQGTLHVGDEIREINGISVANQTVEQLQKMLREMRGSITFKIVPSYRTQSSSCEDLPSTTQPKGRQIYVRAQFEYDPAKDDLIPCKEAGIRFRVGDIIQIISKDDHNWWQGKLENSKNGTAGLIPSPELQEWRVACIAMEKTKQEQQASCTWFGKKKKQYKDKYLAKHNAVFDQLDLVTYEEVVKLPAFKRKTLVLLGAHGVGRRHIKNTLITKHPDRFAYPIPHTTRPPKKDEENGKNYYFVSHDQMMQDISNNEYLEYGSHEDAMYGTKLETIRKIHEQGLIAILDVEPQALKVLRTAEFAPFVVFIAAPTITPGLNEDESLQRLQKESDILQRTYAHYFDLTIINNEIDETIRHLEEAVELVCTAPQWVPVSWVY

SEQ ID NO: 90513 - protein, 133 aa, Homo sapiens
MSTVHEILCKLSLEGDHSTPPSAYGSVKAYTNFDAERDALNIETAIKTKGVDEVTIVNILTNRSNAQRQDIAFAYQRRTKKELASALKSALSGHLETVILGLLKTPAQYDASELKASMKGLGTDEDSLIEIIC

SEQ ID NO: 90514 - protein, 344 aa, Homo sapiens
  MOD_RES (1)..(1): Any amino acid
XLGDCISEDSYPDGNITWYRNGKVLHPLEGAVVIIFKKEMDPVTQLYTMTSTLEYKTTKADIQMPFTCSVTYYGPSGQKTIHSEQAVFDIYYLDLSLNPSGEVTRQIGDALPVSCTISASRNATVVWMKDNIRLRSSPSFSSLHYQDAGNYVCETALQEVEGLKKRESLTLIVEGKPQIKMTKKTDPSGLSKTIICHVEGFPKPAIQWTITGSGSVINQTEESPYINGRYYSKIIISPEENVTLTCTAENQLERTVNSLNVSAISIPEHDEADEISDENREKVNDQAKLIVGIVVGLLLAALVAGVVYWLYMKKSKTASKHVNKDLGNMEENKKLEENNHKTEA

SEQ ID NO: 90515 - protein, 128 aa, Homo sapiens
MYHIDCRDQLERVFLRLGHAETDEQLQNIISKFLPPVLLKLSSTQEGVRKKVMELLVHLNKRIKSRPKIQLPVETLLVQYQDPAAVSFVTNFTIIYVKMGYPRLPVEKQCELAPTLLTAMEGKPQPQQ

SEQ ID NO: 90516 - protein, 374 aa, Homo sapiens
  MOD_RES (1)..(1): Any amino acid
XIMDQYKFYDPSPPRRRGNWITLKMRKLIKSKKDINRERQKSLTLTPTRSDSSEGFLQLPHQDSQDSSSVGSNSLEDGQTLGTKKSSNTTSFEDISPQGVSDDSSTGSRVHAGAVNNQSRPQSHSSGEFSLLHDHEAWSSSGSSPIQYLKRQTRSSPVLQHKISETLESRHHKIKTGSPGSEVVTLQQFLEESNKLTSVQIKSSSQENLLDEVMKSLSVSSDFLGKDKPVSCGLARSVSGKTPGDFYDRRTTKPEFLRPGPRKTEDTYFISSAGKPTPGTQGKIKLVKESSLSRQSKDSNPYATLPRASSVISTAEGTTRRTSIHDFLTKDSRLPISVDSPPAAADSNTTAASNVDKVQESRNSKSRSREQQSS

SEQ ID NO: 90517 - protein, 314 aa, Homo sapiens
MQEESANDMECEQLPAEILRQVTVHRDPIYGFGFVAGSERPVVVRSVRPGGPSENKLLAGDQIVAINEEDVSEAPRERLIELIRSAKEFIVLTVLHTHQSPKSAFISAAKKAKLRSNPVKVRFSEQVAVGETDAKMMKKEALLLIPNVLKVFLENGQIKSFTFDGRTTVKDVMLTLQDRLSLRFIEHFALVLEYAGPEQNHKFLLLQDKQPLAYVVQRTHYHGMKCLFRISFFPKDPVELLRRDPAAFEYLYIQSRNDVIRERFGMDPKPEMLLGLAALHIYITVSATRPSQKISLKNVESSKRRTSGNLSLSN

SEQ ID NO: 90518 - protein, 72 aa, Homo sapiens
MANCSQEELDEEFEQFMKELSDDSFENSDKTARQSKKEMKKKDTVPWWITEDDFKDDGIIMKRQDVIPVSRV

SEQ ID NO: 90519 - protein, 1577 aa, Homo sapiens
MHNTADEVVLYHKLAGPWGRCTGDCGPGGVQSRAVWCFHVDGWTSHLSNCGESNRPPKERSCFRVCDWHSDLFQWEVSDWHHCVLVPYARGEVKPRTAECVTAQHGLQHRMVRCIQKLNRTVVANEICEHFALQPPTEQACLIPCPRDCVVSEFLPWSNCSKGCGKKLQHRTRAVIAPPLFGGLQCPNLTESRACDAPISCPLGEEEYTFSLKVGPWSKCRLPHLKEINPSGRTVLDFNSDSNERVTFKHQSYKAHHHSKSWAIEIGYQTRQVSCTRSDGQNAMLSLCLQDSFPLTVQSCIMPKDCETSQWSSWSPCSKTCRSGSLLPGFRSRSRNVKHMAIGGGKECPELLEKEACIVEGELLQQCPRYSWRTSEWKECQVSLLLEQQDPHWHVTGPVCGGGIQTREVYCAQSVPAAAALRAKEVSRPVEKALCVGPAPLPSQLCNIPCSTDCIVSSWSAWGLCIHENCHDPQGKKGFRTRQRHVLMESTGPAGHCPHLVESVPCEDPMCYRWLASEGICFPDHGKCGLGHRILKAVCQNDRGEDVSGSLCPVPPPPERKSCEIPCRMDCVLSEWTEWSSCSQSCSNKNSDGKQTRSRTILALAGEGGKPCPPSQALQEHRLCNDHSCMQLHWETSPWGPCSEDTLVTALNATIGWNGEATCGVGIQTRRVFCVKSHVGQVMTKRCPDSTRPETVRPCFLPCKKDCIVTAFSEWTPCPRMCQAGNATVKQSRYRIIIQEAANGGQECPDTLYEERECEDVSLCPVYRWKPQKWSPCILVPESVWQGITGSSEACGKGLQTRAVSCISDDNRSAEMMECLKQTNGMPLLVQECTVPCREDCTFTAWSKFTPCSTNCEATKSRRRQLTGKSRKKEKCQDSDLYPLVETELCPCDEFISQPYGNWSDCILPEGRREPHRGLRVQADSKECGEGLRFRAVACSDKNGRPVDPSFCSSSGYIQEKCVIPCPFDCKLSDWSSWGSCSSSCGIGVRIRSKWLKEKPYNGGRPCPKLDLKNQAQVHEAVPCYSECNQYSWVVEHWSSCKINNELRSLRCGGGTQSRKIRCVNTADGEGGAVDSNLCNQDEIPPETQSCSLMCPNECVMSEWGLWSKCPQSCDPHTMQRRTRHLLRPSLNSRTCAEDSQVQPCLLNENCFQFQYNLTEWSTCQLSENAPCGQGVRTRLLSCVCSDGKPVSMDQCEQHNLEKPQRMSIPCLVECVVNCQLSGWTAWTECSQTCGHGGRMSRTRFIIMPTQGEGRPCPTELTQEKTCPVTPCYSWVLGNWSACKLEGGDCGEGVQIRSLSCMVHSGSISHAAGRVEDALCGEMPFQDSILKQLCSVPCPGDCHLTEWSEWSTCELTCIDGRSFETVGRQSRSRTFIIQSFENQDSCPQQVLETRPCTGGKCYHYTWKASLWNNNERTVWCQRSDGVNVTGGCSPQARPAAIRQCIPACRKPFSYCTQGGVCGCEKGYTEIMKSNGFLDYCMKVPGSEDKKADVKNLSGKNRPVNSKIHDIFKGWSLQPLDPDGRVKIWVYGVSGGAFLIMIFLIFTSYLVCKKPKPHQSTPPQQKPLTLAYDGDLDM

SEQ ID NO: 90520 - protein, 1212 aa, Homo sapiens
MADNLDEFIEEQKARLAEDKAELESDPPYMEMKGKLSAKLSENSKILISMAKENIPPNSQQTRGSLGIDYGLSLPLGEDYERKKHKLKEELRQDYRRYLTQKNFLSTSETDPSTLGVSLPIGERLSAKERLKLERNKEYNQFLRGKEESSEKFRQVEKSTEPKSQRNKKPIGQVKPDLTSQIQTSCENSEGPRKDVLTPSEAYEELLNQRRLEEDRYRQLDDEIELRNRRIIKKANEEVGISNLKHQRFASKAGIPDRRFHRFNEDRVFDRRYHRPDQDPEVSEEMDERFRYESDFDRRLSRVYTNDRMHRNKRGNMPPMEHDGDVIEQSNIRISSAENKSAPDNETSKSANQDTCSPFAGMLFGGEDRELIQRRKEKYRLELLEQMAEQQRNKRREKDLELRVAASGAQDPEKSPDRLKQFSVAPRHFEEMIPPERPRIAFQTPLPPLSAPSVPPIPSVHPVPSQNEDLRSGLSSALGEMVSPRIAPLPPPPLLPPLATNYRTPYDDAYYFYGSRNTFDPSLAYYGSGMMGVQPAAYVSAPVTHQLAQPVVNTVGQNELKITSDQVINSGLIFEDKPKPSKQSLQSYQEALQQQIREREERRKKEREEKEEYEAKLEAEMRTYNPWGKGGGGAPLRDAKGNLITDLNRMHRQNIDAYHNPDARTYEDKRAVVSLDPNLATSNAENLEDAANKSSGHMQTQSSPFARGNVFGEPPTELQIKQQELYKNFLRFQIEEKKQREEAERERLRIAEEKEERRLAEQRARIQQEYEEEQEKKREKEEEQRLKNEEHIRLAEERQKEAERKKKEEEEKYNLQLQHYCERDNLIGEETKHMRQPSPIVPALQNKIASKLQRPPSVDSIIRSFIHESSMSRAQSPPVPARKNQLRAEEEKKNVIMELSEMRKQLRSEERRLQERLLHMDSDDEIPIRKKERNPMDIFDMARHRLQAPVRRQSPKGLDAATFQNVHDFNELKDRDSETRVDLKFMYLDPPRDHHTLEIQQQALLREQQKRLNRIKMQEGAKVDLDAIPSAKVREQRMPRDDTSDFLKNSLLESDSAFIGAYGETYPAIEDDVLPPPSQLPSARERRRNKWKGLDIDSSRPNVAPDGLSLKSISSVNVDELRVRNEERMRRLNEFHNKPINTDDESSLVDPDDIMKHIGDDGSNSVATEPWLRPGTSETLKRFMAEQLNQEQQQIPGKPGTFTWQGLSTAHG

SEQ ID NO: 90521 - protein, 49 aa, Homo sapiens
MLMDAGQDYMVFEDVAIHFSQEEWGILNDVQRHLHSDVMLENFALLSSV

SEQ ID NO: 90522 - protein, 22 aa, Homo sapiens
MASACGAPGPGGALGSQAPSWY

SEQ ID NO: 90523 - protein, 72 aa, Homo sapiens
MPKLVKNLLGEMPLWVCQSCRKSMEEDERQTGREHAVAISLSHTSCKSQSCGDDSHSSSSSSSSSSSSSSSS

SEQ ID NO: 90524 - protein, 61 aa, Homo sapiens
MRAAGVGLVDCHCHLSAPDFDRDLDDVLEKAKKANVVALVAVAEHSGEFEKIMQLSERIWM

SEQ ID NO: 90525 - protein, 88 aa, Homo sapiens
MADSLASKVTRLKSLALDIDRDAEDQNRYLDGMDSDFTSMTSLLTGSVKRFSTMARSGQDNRKLLCGMAVGLIVAFFILSYFLSRART

SEQ ID NO: 90526 - protein, 70 aa, Homo sapiens
MRKSPGLSDCLWAWILLLSTLTGRRTSRKSHQNTDLYEVNEGKDVAMDSRHYKMNLKTIPLSSPGFWTDS

SEQ ID NO: 90527 - protein, 109 aa, Homo sapiens
MTELPAPLSYFQNAQMSEDNHLSNTNDNRERQEHNDRRSLGHPEPLSNGRPQGNSRQVVEQDEEEDEELTLKYGAKHVIMLFVPVTLCMVVVVATIKSVSFYTRKDGQL

SEQ ID NO: 90528 - protein, 504 aa, Homo sapiens
MSVEMDSSSFIQFDVPEYSSTVLSQLNELRLQGKLCDIIVHIQGQPFRAHKAVLAASSPYFRDHSALSTMSGLSISVIKNPNVFEQLLSFCYTGRMSLQLKDVVSFLTAASFLQMQCVIDKCTQILESIHSKISVGDVDSVTVGAEENPESRNGVKDSSFFANPVEISPPYCSQGRQPTASSDLRMETTPSKALRSRLQEEGHSDRGSSGSVSEYEIQIEGDHEQGDLLVRESQITEVKVKMEKSDRPSCSDSSSLGDDGYHTEMVDGEQVVAVNVGSYGSVLQHAYSYSQAASQPTNVSEAFGSLSNSSPSRSMLSCFRGGRARQKRALSVHLHSDLQGLVQGSDSEAMMNNPGYESSPRERSARGHWYPYNERLICIYCGKSFNQKGSLDRHMRLHMGITPFVCKFCGKKYTRKDQLEYHIRGHTDDKPFRCEICGKCFPFQGTLNQHLRKNHPGVAEVRSRIESPERTDVYVEQKLENDASASEMGLDSRMEIHTVSDAPD

SEQ ID NO: 90529 - protein, 192 aa, Homo sapiens
  MOD_RES (1)..(1): Any amino acid
XLLLLLLSGDVQSSEVPGAAAEGSGGSGVGIGDRFKIEGRAVVPGVKPQDWISAARVLVDGEEHVGFLKARYVNYIKTSEVVRLPYPLQMKSSGPPSYFIKRESWGWTDFLMNPMVMMMVLPLLIFVLLPKVVNTSDPDMRREMEQSMNMLNSNHELPDVSEFMTRLFSSKSSGKSSSGSSKTGKSGAGKRR

SEQ ID NO: 90530 - protein, 88 aa, Homo sapiens
SSTPLHVPVPRALRMEEDSIRLPAHLRLQPIYWSRDDVAQWLKWAENEFSLRPIDSNTFEMNGKALLLLTKEDFRYRSPHSDLDSDVT

SEQ ID NO: 90531 - protein, 823 aa, Homo sapiens
  MOD_RES (1)..(1): Any amino acid
XNRLQDEDASSTQQRRQIFRVNKDASGRSTNSHQSSTENELKYSEPRPWSSTDSDSSLRNLKPAVTKASSFSGISVLTRGDSSGSSKSIGRLSKTGSESSGSVGSSTGSLSHIQQPLPGTALSQSSHGAPVVYPTVSTHSSLSFDGGLNGQVASPSTSFFLLPLEAAGIPPGSILINPQTGQPFINPDGSPVVYNPPMTQQPVRSQVPGPPQPPLPAPPQQPAANHIFSQPVHPLQSSSQPVQYSTAPYPSPFLPVSPTQQYSVQDNLGSQFSHMSLARQPSADGSDPHAAMFQSTVVLQSPQQSGYIMTAAPPPHPPPPPPPPPPPPPLPPGQPVPTAGYPASGHPVSQPVLQQQGYIQQPSPQMPACYCAPGHYHSSQPQYRPVPSVHYNSHLNQPLPQPAQQTGYQVIPNQQQNYQGIVGVQQPQSQSLVSGQPNSIGNQIQGVVIPYTSVPTYQVSLPQGSQGIPHQTYQQPVMFPNQSNQGSMPTTGMPVYYSVIPPGQQNNLSSSVGYLQHPGSEQVQFPRTTSPCSSQQLQGHQCTAGPPPPPGGGMVMMQLSVPNNPQSCAHSPPQWKQNKYYCDHQRGQKCVEFSSVDNIVQHSPQLSSPIISPAQSPAPAQLSTLKTVRPSGPPLSIMPQFSRPFVPGQGDSRYPLLGQPLQYNPPAVLHGHIPNQQGQPGSRHGNRGRRQAKKAASTDLGAGETVVGKVLEITELPDGITRMEAEKLFGELFKIGAKIRWLRDPQSQPRRHPLCCGSGDNTANPERSKPSDLASTYTVLATFPSISAAQNALKKQINSVNKFKLRTSKKHYDFHILERASSQ

SEQ ID NO: 90532 - protein, 156 aa, Homo sapiens
MKDEAGERDREVSSLNSKLLSLQLDIKNLHDVCKRQRKTLQDNQLCMEEAMNSSHDKKQAQALAFEESEVEFGSSKQCHLRQLQQLKKKLLVLQQELEFHTEELQTSYYSLRQYQSILEKQTSDLVLLHHHCKLKEDEVILYEEEMGNHNENTGEK

SEQ ID NO: 90533 - protein, 50 aa, Homo sapiens
RTSANKSSGAPSYSRWSSSQPHQDQTVNFFCKEASWHLDRNCVDSVDHFV

SEQ ID NO: 90534 - protein, 151 aa, Homo sapiens
MAHLRGFANQHSRVDPEELFTKLDRIGKGSFGEVYKGIDNHTKEVVAIKIIDLEEAEDEIEDIQQEITVLSQCDSPYITRYFGSYLKSTKLWIIMEYLGGGSALDLLKPGPLEETYIATILREILKGLDYLHSERKIHRDIKAANVLLSEQ

SEQ ID NO: 90535 - protein, 242 aa, Homo sapiens
MGRKKIQITRIMDERNRQVTFTKRKFGLMKKAYELSVLCDCEIALIIFNSTNKLFQYASTDMDKVLLKYTEYNEPHESRTNSDIVEALNKKENKGCESPDPDSSYALTPRTEEKYKKINEEFDNMIKSHKIPAVPPPNFEMPVSIPVSSHNSLVYSNPVSSLGNPNLLPLAHPSLQRNSMSPGVTHRPPSAGNTGGLMGGDLTSGAGTSAGNGYGNPRNSPGLLVSPGNLNKNMQAKSPPPM

SEQ ID NO: 90536 - protein, 123 aa, Homo sapiens
MFVLVEMVDTVRIPPWQFERKLNDSIAEELNKKLANKVVYNVGLCICLFDITKLEDAYVFPGDGASHTKVHFRCVVFHPFLDEILIGKIKGCSPEGVHGNSGPDASDKTWEHCGGRSLSRLLR

SEQ ID NO: 90537 - protein, 425 aa, Homo sapiens
MTTEQRRSLQAFQDYIRKTLDPTYILSYMAPWFREEEVQYIQAEKNNKGPMEAATLFLKFLLELQEEGWFRGFLDALDHAGYSGLYEAIESWDFKKIEKLEEYRLLLKRLQPEFKTRIIPTDIISDLSECLINQECEEILQALKNWIEGNPKLSFLKPGILTGRGKTNQNTGMTLPAQKCILDAFKASGDHNILIATSVADEGIDIAQCNLVILYEYVGNVIKMIQTRGRGRARGSKCFLLTSNAGVIEKEQINMYKEKMMNDSILRLQTWDEAVFREKILHIQTHEKFIRDSQEKPKPVPDKENKKLLCRKCKALACYTADVRVIEECHYTVLGDAFKECFVSRPHPKPKQFSSFEKRAKIFCARQNCSHDWGIHVKYKTFEIPVIKIESFVVEDIATGVQTLYSKWKDFHFEKIPFDPAEMSK

SEQ ID NO: 90538 - protein, 68 aa, Homo sapiens
MAAETQTLNFGPEWLRALSSGGSITSPPLSPALPKYKLADYRYGRGECGFYQRSFDEVEGVFGRGGGR

SEQ ID NO: 90539 - protein, 139 aa, Homo sapiens
MDLKIGKATPKDSKYVEKLEALFPDLPKRNDIFDSLQKAKFDVSGLTTEQMLRKDQKTIYRQGVKVAISAIYMDLEAFLQRSNLLADLHAFCQAHSYDVLVAMTIFFNTHNEPVRQLAIFCPHVALQTTICEVLERSHS

SEQ ID NO: 90540 - protein, 178 aa, Homo sapiens
MAPTVFLSMTPLKGIKSVILPQVFLCAYMAAFNSINGNRSYTCKPLERSLLMAGAVASSTFLGVIPQFVQMKYGLTGPWIKRLLPVIFLVQASGMNVYMSRSLESIKGIAVMDKEGNVLGHSRIAGTKAVRETLASRIVLFGTSALIPEVFTYFFKRTQYFRKNPGSLWILKLSCTVL

SEQ ID NO: 90541 - protein, 207 aa, Homo sapiens
MAPTQGPRAPLEFGGPLGAAALLLLLPATMFHLLLAARSGPARLLGPPASLPGLEVLWSPRALLLWLAWLGLQAALYLLPARKVAEGQELKDKSRLRYPINGFQALVLTALLVGLGMSAGLPLGALPEMLLPLAFVATLTAFIFSLFLYMKAQVAPVSALAPGGNSELNPRICFFDFKYFCELRPGLIGWVLINLALLMKEAELRGS

SEQ ID NO: 90542 - protein, 144 aa, Homo sapiens
MSAPCPGLLSCSCCLSTAQPVLHQPPAMSSALGTTIRLTCTLRNDHDIGVYSVYWYQQRPGHPPRFLLRYFSQSDKSQGPQVPPRFSGSKDVARNRGYLSISELQPEDEAMYYCAMGARSSEKEEREREWEEEMEPTAARTRVP

SEQ ID NO: 90543 - protein, 210 aa, Homo sapiens
MTTSHQPQDRYKAVWLIFFMLGLGTLLPWNFFMTATQYFTNRLDMSQNVSLVTAELSKDAQASAAPAAPLPERNSLSAIFNNVMTLCAMLPLLLFTYLNSFLHQRIPQSVRILGSLVAILLVFLITAILVKVQLDALPFFVITMIKIVLINSFGAILQGSLFGLAGLLPASYTAPIMSGQGLAGFFASVAMICAIASGSELSESAFGYFI

SEQ ID NO: 90544 - protein, 339 aa, Homo sapiens
MHSLESSLIDIMRAENDTIKGRLNYSYPGSDSSLLINGQSSLFPMEDGFLDDGRGDQPLHSGLGSPHCFSHQNGERVERYSRKVFVGGLPPDIDEDEITASFRRFGPLIVDWPHKAESKSYFPPKGYAFLLFQDESSVQALIDACIEEDGKLYLCVSSPTIKDKPVQIRPWNLSDSDFVMDGSQPLDPRKTIFVGGVPRPLRAVELAMIMDRLYGGVCYAGIDTDPELKYPKGAGRVAFSNQQSYIAAISARFVQLQHGEIDKRVEVKPYVLDDQLCDECQGARCGGKFAPFFCANVTCLQYYCEYCWAAIHSRAGREFHKPLVKEGGDRPRHISFRWN

SEQ ID NO: 90545 - protein, 67 aa, Homo sapiens
MKSEDYPHETMAPDIHEERQYRCEDCDQLFESKAELADHQKFPCSTPHSAFSMVEEDFQQKLESEND

SEQ ID NO: 90546 - protein, 129 aa, Homo sapiens
PPPPTYRTVVSSPGPGSGPGPGTTSGASSPARPATPLVPCRSTTPPPPPPRPPSRPKLPPGKPGVGDVSRPFSPPIHSSSPPPIAPLARAESTSSISSTNSLSAATTPTVGKNSLLSFNPFVVLTGYFL

SEQ ID NO: 90547 - protein, 135 aa, Homo sapiens
  MOD_RES (1)..(1): Any amino acid
XPAQGKRGKKSAGCGGGGGAGGGGGSSSGGGSPQSYEELQTQRVMANVRERQRTQSLNEAFAALRKIIPTLPSDKLSKIQTLKLAARYIDFLYQVLQSDELDSKMASCSYVAHERLSYAFSVWRMEGAWSMSASH

SEQ ID NO: 90548 - protein, 163 aa, Homo sapiens
MSELSDEASEPELLNRSLSMWHGLGTQVSGEELDVPLDLHTAASIGQYEVVKECVQRRELDLNKKNGGGWTPLMYASYIGHDTIVHLLLEAGVSVNVPTPEGQTPLMLASSCGNESIAYFLLQQGAELEMKDIQGWTALFHCTSAGHQHMVRFLLDSGANANV

SEQ ID NO: 90549 - protein, 74 aa, Homo sapiens
MSFFNFAMPLFITITSYSLMEQKLGKSGHLQVPALIAKMVPTINAINYALGNEMVCRGIWQCLSPQKREKDRTK

SEQ ID NO: 90550 - protein, 165 aa, Homo sapiens
  MOD_RES (1)..(1): Any amino acid
XVKENDKEKGKEKEKEKKEKTPATTPEARVLGKDGKEKPKEERPNKDEKARETKERTPKSDKEKEKFKKEEKAKDEKFKTTVPNAESKSTQEREREKEPSRERDIAKEMKSKENVKGGEKTPVSGSLKSPVPRSDIPEPEREQKRRKIDTHPSPSHSSTVKVSIA

SEQ ID NO: 90551 - protein, 452 aa, Homo sapiens
MALNSGSPPAIGPYYENHGYQPENPYPAQPTVVPTVYEVHPAQYYPSPVPQYAPRVLTQASNPVVCTQPKSPSGTVCTSKTKKALCITLTLGTFLVGAALAAGLLWKFIRLYGPNFILQVYSSQRKSWHPVCQDDWNENYGRAACRDMGYKNNFYSSQGIVDDSGSTSFMKLNTSAGNVDIYKKLYHSDACSSKAVVSLRCIACGVNLNSSRQSRIVGGESALPGAWPWQVSLHVQNVHVCGGSIITPEWIVTAAHCVEKPLNNPWHWTAFAGILRQSFMFYGAGYQVEKVISHPNYDSKTKNNDIALMKLQKPLTFNDLVKPVCLPNPGMMLQPEQLCWISGWGATEEKGKTSEVLNAAKVLLIETQRCNSRYVYDNLITPAMICAGFLQGNVDSCQGDSGGPLVTSKNNIWWLIGDTSWGSGCAKAYRPGVYGNVMVFTDWIYRQMRADG

SEQ ID NO: 90552 - protein, 898 aa, Homo sapiens
  MOD_RES (1)..(1): Any amino acid
XLEESGEIKDMLLECFININYIKKEEGRRFLSCLFNWNINFIKMIHGTIKNQLQGLQKSLMVYIAEIYFRAWKKASGKILEAIENDCIQDFMFHGIHLPRRSPVHSKVREVLSYFHHQKKVRQGVEEMLYRLYKPILWRGLKARNSEVRSNAALLFVEAFPIRDPNLHAIEMDSEIQKQFEELYSLLEDPYPMVRSTGILGVCKITSKYWEMMPPTILIDLLKKVTGELAFDTSSADVRCSVFKCLPMILDNKLSHPLLEQLLPALRYSLHDNSEKVRVAFVDMLLKIKAVRAAKFWKICPMEHILVRLETDSRPVSRRLVSLIFNSFLPVNQPEEVWCERCVTLVQMNHAAARRFYQYAHEHTACTNIAKLIHVIRHCLNACIQRAVREPPEDEEEEDGREKENVTVLDKTLSVNDVACMAGLLEIIVILWKSIDRSMENNKEAKLYTINKFASVLPEYLKVFKDDRCKIPLFMLMSFMPASAVPPFSCGVISTLRSREEGAVDKSYCTLLDCLCSWGQVGHILELVDNWLPTEHAQAKSNTASKGRVQIHDTRPVKPELALVYIEYLLTHPKNRECLLSAPRKKLNHLLKALETSKADLESLLQTPGGKPRGFSEAAAPRAFGLHCRLSIHLQHKFCSEGKVYLSMLEDTGFWLESKILSFIQDQEEDYLKLHRVIYQQIIQTYLTVCKDVVMVGLGDHQFQMQLLQRSLGIMQTVKGFFYVSLLLDILKEITGSSLIQKTDSDEEVAMLLDTVQKVFQKMLECIARSFRKQPEEGLRVSDVEELTPPEHLSDLPPFSRCLIGIIIKSSNVVRSFLDELKACVASNDIEGIVCLTAAVHIILVINAGKHKSSKVREVAATVHRKLKTFMEITLEEDSIERFLYESSSRTLGELLNS

SEQ ID NO: 90553 - protein, 231 aa, Homo sapiens
  MOD_RES (1)..(1): Any amino acid
XATGVQETFVFCCWKAAQIKEHLLKSKWCRPTSLNVVRIITSELYRSLGDVLRDVDAKALVRSDFLLVYGDVISNINITRALEEHRLRRKLEKNVSVMTMIFKESSPSHPTRCHEDNVVVAVDSTTNRVLHFQKTQGLRRFAFPLSLFQGSSDGVEVRYDLLDCHISICSPQVAQLFTDNFDYQTRDDFVRGLLVNEEVRKVFQCLFRREEKAMIVSHADPREPDPHARNS

SEQ ID NO: 90554 - protein, 205 aa, Homo sapiens
  MOD_RES (1)..(1): Any amino acid
XKKMGADLLGSVQAKVQKALDVTRESFPNDLQFNILMRFTVDQTQTPSLKTVKPALRDQLHSFWSSKVKVAILKYIETLAKQMDPGDFINSSETRLAVSRVITWTTEPKSSDVRKAAQSVLISLFELNTPEFTMLLGALPKTFQDGATKLLHNHLRNTGNGTQSSMGSPLTRPTPRSPANWSSPLTSPTNTSQNTLSPSAFDYDT

SEQ ID NO: 90555 - protein, 143 aa, Homo sapiens
  MOD_RES (1)..(1): Any amino acid
XGEKDTSLYRPALEELRRQIRSSTTSMTSVPKPLKFLRPHYGKLKEIYENMAPGENKRFAADIISVLAMTMSGERECLKYRLVGSQEELASWGHEYVREVLPLKLCSLNRLGLSVGIWQEKWLRSGRSWMTQRRSSGSLCSLW

SEQ ID NO: 90556 - protein, 487 aa, Homo sapiens
MAAFRGDGREEDNYYGTPKPPAEPAPLLLNVTDQILPGATPSAEGKRKRNKSVSNMEKASIEPPEEEEEERPVVNGNGVVVTPESSEHEDKSAGASGEMPSQPYPAPVYSQPEELKEQMDDTKPTKPEDNEEPDPLPDNWEMAYTEKGEVYFIDHNTKTTSWLDPRLAKKAKPPEECKENELPYGWEKIDDPIYGTYYVDHINRRTQFENPVLEAKRKLQQHNMPHTELGTKPLQAPGFREKPLFTRDASQLKGTFLSTTLKKSNMGFGFTIIGGDEPDEFLQVKSVIPDGPAAQDGKMETGDVIVYINEVCVLGHTHADVVKLFQSVPIGQSVNLVLCRGYPLPFDPEDPANSMVPPLAIMERPPPVMVNGRHNYETYLEYISRTSQSVPDITDRPPHSLHSMPTDGQLDGTYPPPVHDDNVSMASSGATQAELMTLTIVKGAQGFGFTIADSPTGQRVKQILDIQGCPGLCEGDLIVEINQQNVQ

SEQ ID NO: 90557 - protein, 388 aa, Homo sapiens
  MOD_RES (1)..(1): Any amino acid
XSQCGVKAVNKASSTTPKGNSSNGNSGSNSNKAVKENDKEKGKEKEKEKKEKTPATTPEARVLGKDGKEKPKEERPNKDEKARETKERTPKSDKEKEKFKKEEKAKDEKFKTTVPNAESKSTQEREREKEPSRERDIAKEMKSKENVKGGEKTPVSGSLKSPVPRSDIPEPEREQKRRKIDTHPSPSHSSTVKVTAILPKVPLGSENYASSPVISIHFLQDSLIELKESSAKLYINHTPPPLSKSKEREMDKKDLDKSRERSREREKKDEKDRKERKRDHSNNDREVPPDLTKRRKEENGTMGVSKHKSESPCESPYPNEKDKEKNKSKSSGKEKGSDSFKSEKMDKISSGGKKESRHDKEKIEKKEKRDSSGGKEEKKHHKSSDKHR

SEQ ID NO: 90558 - protein, 66 aa, Homo sapiens
MMYGGMRGMKGLVYETSVLDPDEGIRFRGFSIPECQKLLPKAKGGEEPLPEGLFWLLVTGHIPTEE

SEQ ID NO: 90559 - protein, 181 aa, Homo sapiens
MERGDQPKRTRNENIFNCLYKNPEATFKLICFPWMGGGSTHFAKWGQDTHDLLEVHSLRLPGRESRVEEPLENDISQLVDEVVCALQPVIQDKPFAFFGHSMGSYIAFRTALGLKENNQPEPLHLFLSSATPVHSKAWHRIPKDDELSEEQISHYLMEFGGTPKHFAEAKEFVKQCSPIIR

SEQ ID NO: 90560 - protein, 51 aa, Homo sapiens
MAEPGEGLPEEVLALIFRHLSLRDRAAAARVCRAWAAAATCSAVWHDTKIR

SEQ ID NO: 90561 - protein, 160 aa, Homo sapiens
MEFLDKDPEDHRTLSQFTDALVTIRNRHNDVVPTMAQGVLEYKDTYGDDPVSNQNIQYFLDRFYLSRISIRMLINQHTLIFDGSTNPAHPKHIGSIDPNCNVSEVVKDAYDMAKLLCDKYYMASPDLEIQEINAANSKQPIHMVYVPSHLYHMLFELFKN

SEQ ID NO: 90562 - protein, 101 aa, Homo sapiens
MEKPLFPLVPLHWFGFGYTALVVSGGIVGYVKTAATSVTFVGVMGMRSYYYGKFMPVGLIAGARYFHSITLLYHVEFSLLPRILYAFKTLLVSEYLMLCIN

SEQ ID NO: 90563 - protein, 515 aa, Homo sapiens
MWWQHAKGVPVPQGVMASMLLAQRLACSFQHSYRLLVPGSRHISQAAAKVDVEFDYDGPLMKTEVPGPRSQELMKQLNIIQNAEAVHFFCNYEESRGNYLVDVDGNRMLDLYSQISSVPIGYSHPALLKLIQQPQNASMFVNRPALGILPPENFVEKLRQSLLSVAPKGMSQLITMACGSCSNENALKTIFMWYRSKERGQRGFSQEELETCMINQAPGCPDYSILSFMGAFHGRTMGCLATTHSKAIHKIDIPSFDWPIAPFPRLKYPLEEFVKENQQEEARCLEEVEDLIVKYRKKKKTVAGIIVEPIQSEGGDNHASDDFFRKLRDIARKHGCAFLVDEVQTGGGCTGKFWAHEHWGLDDPADVMTFSKKMMTGGFFHKEEFRPNAPYRIFNTWLGDPSKNLLLAEVINIIKREDLLNNAAHAGKALLTGLLDLQARYPQFISRVRGRGTFCSFDTPDDSIRNKLILIARNKGVVLGGCGDKSIRFRPTLVFRDHHAHLFLNIFSDILADFK

SEQ ID NO: 90564 - protein, 108 aa, Homo sapiens
ECYFGSLVGSNVYITPAGSQGLPPHYDDVEVFILQLEGEKHWRLYHPTVPLAREYSVEAEERIGRPVHEFMLKPGDLLYFPRGTIHQADTPAGLAHSTHVTISTYQNK

SEQ ID NO: 90565 - protein, 33 aa, Homo sapiens
MTALSSENCSFQYQLRQTNQPLDVNYLLFLIIL

SEQ ID NO: 90566 - protein, 116 aa, Homo sapiens
GGANHGGYMNAGAGYGSYGYGGNSATAGYNYSGSGGRSGGNSYGSGGASYNPGSHGGYGGGSGGGSSYQGKQGGYSQSNYNSPGSGQNYSGPPSSYQSSQGGYGRNADHSMNYQYR

SEQ ID NO: 90567 - protein, 97 aa, Homo sapiens
MADPRDKALQDYRKKLLEHKEIDGRLKELREQLKELTKQYEKSENDLKALQSVGQIVGEVLKQLTEEKFIVKATNGPRYVVGCRRQIFAERGGSTGL

SEQ ID NO: 90568 - protein, 540 aa, Homo sapiens
MPGKMVVILGASNILWIMFAASQAFKIETTPESRYLAQIGDSVSLTCSTTGCESPFFSWRTQIDSPLNGKVTNEGTTSTLTMNPVSFGNEHSYLCTATCESRKLEKGIQVEIYSFPKDPEIHLSGPLEAGKPITVKCSVADVYPFDRLEIDLLKGDHLMKSQEFLEDADRKSLETKSLEVTFTPVIEDIGKVLVCRAKLHIDEMDSVPTVRQAVKELQVYISPKNTVISVNPSTKLQEGGSVTMTCSSEGLPAPEIFWSKKLDNGNLQHLSGNATLTLIAMRMEDSGIYVCEGVNLIGKNRKEVELIVQVAPRDTTVLVSPSSILEEGSSVNMTCLSQGFPAPKILWSRQLPNGELQPLSENATLTLISTKMEDSGVYLCEGINQAGRSRKEVELIIQVTPKDIKLTAFPSESVKEGDTVIISCTCGNVPETWIILKKKAETGDTVLKSIDGAYTIRKAQLKDAGVYECESKNKVGSQLRSLTLDVQGRENNKDYFSPELLVLYFASSLIIPAIGMIIYFARKANMKGSYSLVEAQKSKV

SEQ ID NO: 90569 - protein, 371 aa, Homo sapiens
  MOD_RES (1)..(1): Any amino acid
XEVGFLAEDRRINVAVTRARRHVAVICDSRTVNNHAFLKTLVEYFTQHGEVRTAFEYLDDIVPENYSHENSQGSSHAATKPQGPATSTRTGSQRQEGGQEAAAPARQGRKKPAGKSLASEAPSQPSLNGGSPEGVESQDGVDHFRAMIVEFMASKKMQLEFPPSLNSHDRLRVHQIAEEHGLRHDSSGEGKRRFITVSKRAPRPRAALGPPAGTGGPAPLQPVPPTPAQTEQPPREQRGPDQPDLRTLHLERLQRVRSAQGQPASKEQQASGQQKLPEKKKKKAKGHPATDLPTEEDFEALVSAAVKADNTCGFAKCTAGVTTLGQFCQLCSRRYCLSHHLPEGRWEAEPPARHLSWPWPGCCVIHSLSRG

SEQ ID NO: 90570 - protein, 220 aa, Homo sapiens
MSLEDPFFVVRGEVQKAVNTARGLYQRWCELLQESAAVGREELDWTTNELRNGLRSIEWDLEDLEETIGIVEANPGKFKLPAGDLQERKVFVERMREAVQEMKDHMVSPTAVAFLERNNREILAGKPAAQKSPSDLLDASAVSATSRYIEEQQATQQLIMDEQDQQLEMVSGSIQVLKHMSGRVGEELDEQACWMPSPKRWTTPSPAWTGSSGSWPKYPT

SEQ ID NO: 90571 - protein, 589 aa, Homo sapiens
MCSEARLARRLRDALREEEPWAVEELLRCGADPNLVLEDGAAAVHLAAGARHPRGLRCLGALLRQGGDPNARSVEALTPLHVAAAWGCRRGLELLLSQGADPALRDQDGLRPLDLALQQGHLECARVLQDLDTRTRTRTRIGAETQEPEPAPGTPGLSGPTDETLDSIALQKQPCRGDNRDIGLEADPGPPSLPVPLETVDKHGSSASPPGHWDYSSDASFVTAVEVSGAEDPASDTPPWAGSLPPTRQGLLHVVHANQRVPRSQGTEAELNARLQALTLTPPNAAGFQSSPSSMPLLDRSPAHSPPRTPTPGASDCHCLWEHQTSIDSDMATLWLTEDEASSTGGREPVGPCRHLPVSTVSDLELLKGLRALGPEFSGHSLELAAALRTGCIPDVQADEDALAQQFEQPDPARRWREGVVKSSFTYLLLDPRETQDLPARAFSLTPAERLQTFIRAIFYVGKGTRARPYVHLWEALGHHGRSRKQPHQACPKVRQILDIWASGCGVVSLHCFQHVVAVEAYTREACIVEALGIQTLTNQKQGHCYGVVAGWPPARRRRLGVHLLHRALLVFLAEGERQLHPQDIQARG

SEQ ID NO: 90572 - protein, 54 aa, Homo sapiens
MAGLALQPGTALLCYSCKAQVSNEDCLQVENCTQLGEQCWTARIREWGDDSRQA

SEQ ID NO: 90573 - protein, 182 aa, Homo sapiens
GNEITQLARPLPVEYLIIDITTTFPKDPVYTFSISQNPFPIENRDVLGETQDFHSLATYLSQNTSSVFLDTISDFHLLLFLVTNEVMPLQDSISLLLEAVRTRNEELAQTWKRSEQWATIEQLCSSRHSPSSAFLVAGITGAHHHPQAQLAGSSQVSMSTAPSGAPHTRPLQPCGPVSTARS

SEQ ID NO: 90574 - protein, 1035 aa, Homo sapiens
  MOD_RES (1)..(1): Any amino acid
XDKTRPLSTLANLAIIITDVQDMDPIFINLPYSTNIYEHSPPGTTVRIITAIDQDKGRPRGIGYTIVSGNTNSIFALDYISGVLTLNGLLDRENPLYSHGFILTVKGTELNDDRTPSDATVTTTFNILVIDINDNAPEFNSSEYSVAITELAQVGFALPLFIQVVDKDEENGGWLQGRPEGVGEGLHVQNLGLNSMFEVYLVGNNSHHFIISPTSVQGKADIRIRVAIPLDYETVDRYDFDLFANESVPDHVGYAKVKITLINENDNRPIFSQPLYNISLYENVTVGTSVLTVLATDNDAGTFGEVSYFFSDDPDRFSLDKDTGLIMLIARLDYELIQRFTLTIIARDGGGEETTGRVRINVLDVNDNVPTFQKDAYVGALRENEPSVTQLVRLRATDEDSPPNNQITYSIVSASAFGSYFDISLYEGYGVISVSRPLDYEQISNGLIYLTVMAMDAGNPPLNSTVPVTIEVFDENDNPPTFSKPAYFVSVVENIMAGATVLFLNATDLDRSREYGQESIIYSLEGSTQFRINARSGEITTTSLLDRETKSEYILIVRAVDGGVGHNQKTGIATVNITLLDINDNHPTWKDAPYYINLVEMTPPDSDVTTVVAVDPDLGENGTLVYSIQPPNKFYSLNSTTGKIRTTHAMLDRENPDPHEAELMRKIVVSVTDCGRPPLKATSSATVFVNLLDLNDNDPTFQNLPFVAEVLEGIPAGVSIYQVVAIDLDEGLNGLVSYRMPVGMPRMDFLINSSSGVVVTTTELDRERIAEYQLRVVASDAGTPTKSSTSTLTIHVLDVNDETPTFFPAVYNVSVSEDVPREFRVVWLNCTDNDVGLNAELSYFITGGNVDGKFSVGYRDAVVRTVVGLDRETTAAYMLILEAIDNGPVGKRHTGTATVFVTVLDVNDNRPIFLQSSYEASVPEDIPEGHSILQHPPWPLKGASSIIFNPFLIDPNVGALKRGHQDGCQDHAWRALFAPPPSWHPGICSTRREAAAPTGHQADAGSTRETQGREPRGFAPALGQHRCQDSVLAPV

SEQ ID NO: 90575 - protein, 60 aa, Homo sapiens
MDQSGMEIPVTLIIKAPNQKYSDQTISCFLNWTVGKLKTHLSNVYPSKPSSDHSGSTTPS

SEQ ID NO: 90576 - protein, 446 aa, Homo sapiens
MRNLKLFRTLEFRDIQGPGNPQCFSLRTEQGTVLIGSEHGLIEVDPVSREVKNEVSLVAEGFLPEDGSGRIVGVQDLLDQESVCVATASGDVILCSLSTQQLECVGSVASGISVMSWSPDQELVLLATGQQTLIMMTKDFEPILEQQIHQDDFGESKFITVGWGRKETQFHGSEGRQAAFQMQMHESALPWDDHRPQVTWRGDGQFFAVSVVCPETGARKVRVWNREFALQSTSEPVAGLGPALAWKPSGSLIASTQDKPNQQDIVFFEKNGLLHGHFTLPFLKDEVKVNDLLWNADSSVLAVWLEDLQREESSIPKTCVQLWTVGNYHWYLKQSLSFSTCGKSKIVSLMWDPVTPYRLHVLCQGWHYLAYDWHWTTDRSVGDNSSDLSNVAVIDGSLILFFLFHCRQGVGDSLPADCGSASHVHLPTAVPTPCESSHILSTPSKE

SEQ ID NO: 90577 - protein, 158 aa, Homo sapiens
MFPPSGSTGLIPPSHFQARPLSTLPRMAPTWLSDIPLVQPPGHQDVSERRLDTQRPQVTMWERDVSSDRQEPGRRGRSWGLEGSQALSQQAEVIVRQLQELRRLEEEVRLLRETSLQQKMRLEAQAMELEALARAEKAGRAEAEGLRAALAGAEVVRK

SEQ ID NO: 90578 - protein, 164 aa, Homo sapiens
DQWEDGAEDILEKEEIEASNIDNVVLDEDRSGARRLQNLWRDQREEELGEYYMKKYAKSSVGETVYGGSDELSDDITQQQLLPGVKDPNLWTVKCKIGEERATAISLMRKFIAYQFTDTVDYVEPSQNTISLKMIPRIDYDRIKARMSLKDWFAKRKKFKRPPQ

SEQ ID NO: 90579 - protein, 168 aa, Homo sapiens
MGIKFLEVIKPFCAVLPEIQKPERKIQFREKVLWTAITLFIFLVCCQIPLFGIMSSDSADPFYWMRVILASNRGTLMELGISPIVTSGLIMQLLAGAKIIEVGDTPKDRALFNGAQKLFGMIITIGQAIVYVMTGMYGDPAEMGAGICLLIIIQALLTLKICGYTEEL

SEQ ID NO: 90580 - protein, 78 aa, Homo sapiens
MSLLNKPKSEMTPEELQKREEEEFNTGPLSVLTQSVKNNTQVLINCRNNKKLLGRVKAFDSASPPCSPPGTATWCWRT

SEQ ID NO: 90581 - protein, 236 aa, Homo sapiens
ADTVQRIAAELKCHPTDERVALHLDEEDKLRHFRECFYIPKIQDLPPVDLSLVNKDENAIYFLGNSLGLQPKMVKTYLEEELDKWAKIAAYGHEVGKRPWITGDESIVGLMKDIVGANEKEIALMNALTVNLHLLMLSFFKPTPKRYKILLEAKAFPSDHYAIESQLQLHGLNIEESMRMIKPREGEETLRIEDILEVIEKEGDSIAVILFSGVHFYTGQHFNIPAITKAGQAKVV

SEQ ID NO: 90582 - protein, 451 aa, Homo sapiens
MANRELAFKAGDVIKVLDASNKDWWWGQIDDEEGWFPASFVRLWVNQEDEVEEGPSDVQNGHLDPNSDCLCLGRPLQNRDQMRANVINEIMSTERHYIKHLKDICEGYLKQCRKRRDMFSDEQLKVIFGNIEDIYRFQMGFVRDLEKQYNNDDPHLSEIGPCFLEHQDGFWIYSEYCNNHLDACMELSKLMKDSRYQHFFEACRLLQQMIDIAIDGFLLTPVQKICKYPLQLAELLKYTAQDHSDYRYVAAALAVMRNVTQQINERKRRLENIDKIAQWQASVLDWEDLIRRDILYYKGRIDMDKYEVVDIEDGRDDDFNVSMKNAFKLHNKETEEIHLFFAKKLEEKIRWLRAFREERKMVQEDEKIGFEISENQKRQAAMTVRKVPKQKGVNSARSVPPSYPPPQDPLNHGQYLVPDGIAQSQVFEFTEPKRSQSPFWQNFSRLTPFKK

SEQ ID NO: 90583 - protein, 162 aa, Homo sapiens
MSEARRDSTSSLQRKKPPWLKLDIPSAVPLTAEEPSFLQPLRRQAFLRSVSMPAETAHISSPHHELRRPVLQRQTSITQTIRRGTADWFGVSKDSDSTQKWQRKSIRHCSQRYGKLKPQVLRELDLPSQDNVSLTSTETPPPLYVGPCQLGMQKIIDPLARG

SEQ ID NO: 90584 - protein, 112 aa, Homo sapiens
  MOD_RES (1)..(1): Any amino acid
XEPPEFEIVGFTNHINVMVKFPSIVEEELQFDLSLVIEEQSEGIVKKHKPEIKGNMSGNFTYIIDKLIPNTNYCVSVYLEHSDEQAVIKSPLKCTLLPPGQESVIGYSKINA

SEQ ID NO: 90585 - protein, 142 aa, Homo sapiens
  MOD_RES (1)..(1): Any amino acid
XPLPTPHRGAFGRLPEPGLVQPQLPTPSSDFWKEVQLALPRKVQYRPVEGDPQTQLQDDKDPMLILRGRVPEGRALDSEVDPDPEGDLGVRGPVFGEPSAPPHTSGVSLGESRSSEVDVSDLGSRNYSARTDFYCLVSKDDM

SEQ ID NO: 90586 - protein, 38 aa, Homo sapiens
  MOD_RES (1)..(1): Any amino acid
XVAVNFSQEEWSLLSEAQRCLYHDVMLENLTLISSLGK

SEQ ID NO: 90587 - protein, 101 aa, Homo sapiens
MAAAAALRAPAQSSVTFEDVAVNFSLEEWSLLNEAQGCLYHDVMLETLTLISSLGGVPPHRLFPTGACGPQVPSSRIRPSPGHCPRPSLYLSLSPPHPTGV

SEQ ID NO: 90588 - protein, 452 aa, Homo sapiens
MNNHGNYIVRLGHLVSWMGEQAEALGVEVYPGYAAAEVLFHDDGSVKGIATNDVGIQKDGAPKATFERGLELHAKVTIFAEGCHGHLAKQLYKKFDLRANCEPQTYGIGLKELWVIDEKNWKPGRVDHTVGWPLDRHTYGGSFLYHLNEGEPLVALGLVVGLDYQNPYLSPFREFQRWKHHPSIRPTLEGGKRIAYGARALNEGGFQSIPKLTFPGGLLIGCSPGFMNVPKIKGTHTAMKSGILAAESIFNQLTSENLQSKTIGLHVTEYEDNLKNSWVWKELYSVRNIRPSCHGVLGVYGGMIYTGIFYWILRGMEPWTLKHKGSDFERLKPAKDCTPIEYPKPDGQISFDLLSSVALSGTNHEHDQPAHLTLRDDSIPVNRNLSIYDGPEQRFCPAGVYEFVPVEQGDGFRLQINAQNCVHCKTCDIKDPSQNINWVVPEGGGGPAYNGM

SEQ ID NO: 90589 - protein, 113 aa, Homo sapiens
ESKSDGRERSKKSSVSDAPVHITASGEPVPISEESEELDQKTFSICKERMRPVKAALKQLDRPEKGLSEREQLEHTRQCLIKIGDHITECLKEYTNPEQIKQWRNKTVIKTAT

SEQ ID NO: 90590 - protein, 708 aa, Homo sapiens
MKLVFLVLLFLGALGLCLAGRRRSVQWCAVSQPEATKCFQWQRNMRKVRGPPVSCIKRDSPIQCIQAIAENRADAVTLDGGFIYEAGLAPYKLRPVAAEVYGTERQPRTHYYAVAVVKKGGSFQLNELQGLKSCHTGLRRTAGWNVPIGTLRPFLNWTGPPEPIEAAVARFFSASCVPGADKGQFPNLCRLCAGTGENKCAFSSQEPYFSYSGAFKCLRDGAGDVAFIRESTVFEDLSDEAERDEYELLCPDNTRKPVDKFKDCHLARVPSHAVVARSVNGKEDAIWNLLRQAQEKFGKDKSPKFQLFGSPSGQKDLLFKDSAIGFSRVPPRIDSGLYLGSGYFTAIQNLRKSEEEVAARRARVVWCAVGEQELRKCNQWSGLSEGSVTCSSASTTEDCIALKGEADAMSLDGGYVYTAGKCGLVPVLAENYKSQQSSDPDPNCVDRPVEGYLAVAVVRRSDTSLTWNSVKGKKSCHTAVDRTAGWNIPMGLLFNQTGSCKFDEYFSQSCAPGSDPRSNLCALCIGDEQGENKCVPNSNERYYGYTGAFRCLAENAGDVAFVKDVTVLQNTDGNNNEAWAKDLKLADFALLCLDGKRKPVTEARSCHLAMAPNHAVVSRMDKVERLKQVLLHQQAKFGRNGSDCPDKFCLFQSETKNLLFNDNTECLARLHGKTTYEKYLGPQYVAGITNLKKCSTSPLLEACEFLRK

SEQ ID NO: 90591 - protein, 208 aa, Homo sapiens
MILNSLSLCYHNKLILAPMVRVGTLPMRLLALDYGADIVYCEELIDLKMIQCKRVVNEVLSTVDFVAPDDRVVFRTCEREQNRVVFQMGTSDAERALAVARLVENDVAGIDVNMGCPKQYSTKGGMGAALLSDPDKIEKILSTLVKGTRRPVTCKIRILPSLEDTLSLVKRIERTGIAAIAVHGRKREERPQHPVSCEVIKAIADTLS

SEQ ID NO: 90592 - protein, 254 aa, Homo sapiens [sequence omitted]

SEQ ID NO: 90593 - protein, 119 aa, Homo sapiens
GSDNEEEDKEAAQLREERLRQYAEKKAKKPALVAKSSILLDVKPWDDETDMAQLEACVRSIQLDGLVWGASKLVPVGYGIRKLQIQCVVEDDKVGTDLLEEEITKFEEHSVDIAAFNKI

SEQ ID NO: 90594 - protein, 195 aa, Homo sapiens
MEDSMDMDMSPLRPQNYLFGCELKADKDYHFKVDNDENEHQLSLRTVSLGAGAKDELHIVEAEAMNYEGSPIKVTLATLKMSVQPTVSLGGFEITPPVVLRLKCGSGPVHISGQHLVAVEEDAESEDEEEEDVKLLSISGKRSAPGGGSKVPQKKVKLAADEDDDDDDEEDDDEEDKNPSRNRKKLLKHQKDLVL

SEQ ID NO: 90595 - protein, 59 aa, Homo sapiens
EPTNQGQDSLKKRLQAKVKVIGSLLKKLYCMKGGEKEGIYLGLGGKHRVLVSRIASALM

SEQ ID NO: 90596 - protein, 622 aa, Homo sapiens
MTLTLSVLICLGLSVGPRTCVQAGTLPKPTLWAEPASVIARGKPVTLWCQGPLETEEYRLDKEGLPWARKRQNPLEPGAKAKFHIPSTVYDSAGRYRCYYETPAGWSEPSDPLELVATALPSPVVASGGNVTLQCDTLDGLLTFVLVEEEQKLPRTLYSQKLPKGPSQALFPVGPVTPSCRWRFRCYYYYRKNPQVWSNPSDLLEILVPGVSRKPSLLIPQGSVVARGGSLTLQCRSDVGYDIFVLYKEGEHDLVQGSGQQPQAGLSQANFTLGPVSRSHGGQYRCYGAHNLSPRWSAPSDPLDILIAGLIPDIPALSVQPGPKVASGENVTLLCQSWHQIDTFFLTKEGAAHPPLCLKSKYQSYRHQAEFSMSPVTSAQGGTYRCYSAIRSYPYLLSSPSYPQELVVSGPSGDPSLSPTGSTPTPAGPEDQPLTPTGLDPQSGLGRHLGVVTGVSVAFVLLLFLLLFLLLRHRHQSKHRTSAHFYRPAGAAGPEPKDQGLQKRASPVADIQEEILNAAVKDTQPKDGVEMDARQSPHDEDPQAVTYAEVKHSRPRREMASPPSPLSGEFLDTKDRQAEEDRQMDTERVLSSPGPQASPPPPRSLPLTLPRCRLLHLKPPRM

SEQ ID NO: 90597 - protein, 116 aa, Homo sapiens
IKKPLNAFMLYMKEMRAKVVAECTLKESAAINQILGRRWHALSREEQAKYYELARKERQLHMQLYPGWSARDNYGKKKKRKRDKQPGETNGEKKSAFATYKVKAAASAHPLQMEAY

SEQ ID NO: 90598 - protein, 2170 aa, Homo sapiens
MWERWVPVTVLPGCVGCRTVAALASWTVRDVKERIFAETGFPVSEQRLWRGGRELSDWIKIGDLTSKNCHLFVNLQSKGLKGGGRFGQTTPPLVDFLKDILRRYPEGGQILKELIQNAEDAGATEVKFLYDETQYGTETLWSKDMAPYQGPALYVYNNAVFTPEDWHGIQEIARSRKKDDPLKVGRFGIGFNSVYHITDVPCIFSGDQIGMLDPHQTLFGPHESGQCWNLKDDSKEISELSDQFAPFVGIFGSTKETFINGNFPGTFFRFPLRLQPSQLSSNLYNKQKVLELFESFRADADTVLLFLKSVQDVSLYVREADGTEKLVFRVTSSESKALKHERPNSIKILGTAISNYCKKTPSNNITCVTYHVNIVLEEESTKDAQKTSWLVCNSVGGRGISSKLDSLADELKFVPIIGIAMPLSSRDDEAKGATSDFSGKAFCFLPLPPGEESSTGLPVHISGFFGLTDNRRSIKWRELDQWRDPAALWNEFLVMNVVPKAYATLILDSIKRLEMEKSSDFPLSVDVIYKLWPEASKVKVHWQPVLEPLFSELLQNAVIYSISCDWVRLEQVYFSELDENLEYTKTVLNYLQSSGKQIAKVPGNVDAAVQLTAASGTTPVRKVTPAWVRQVLRKCAHLGCAEEKLHLLEFVLSDQAYSELLGLELLPLQNGNFVPFSSSVSDQDVIYITSAEYPRSLFPSLEGRFILDNLKPHLVAALKEAAQTRGRPCTQLQLLNPERFARLIKEVMNTFWPGRELIVQWYPFDENRNHPSVSWLKMVWKNLYIHFSEDLTLFDEMPLIPRTILEEGQTCVELIRLRIPSLVILDDESEAQLPEFLADIVQKLGGFVLKKLDASIQHPLIKKYIHSPLPSAVLQIMEKMPLQKLCNQITSLLPTHKDALRKFLASLTDSSEKEKRIIQELAIFKRINHSSDQGISSYTKLKGCKVLHHTAKLPADLRLSISVIDSSDEATIRLANMLKIEQLKTTSCLKLVLKDIENAFYSHEEVTQLMLWVLENLSSLKNENPNVLEWLTPLKFIQISQEQMVSAGELFDPDIEVLKDLFCNEEGTYFPPSVFTSPDILHSLRQIGLKNEASLKEKDVVQVAKKIEALQVGACPDQDVLLKKAKTLLLVLNKNHTLLQSSEGKMTLKKIKWVPACKERPPNYPGSLVWKGDLCNLCAPPDMCDVGHAILIGSSLPLVESIHVNLEKALGIFTKPSLSAVLKHFKIVVDWYSSKTFSDEDYYQFQHILLEIYGFMHDHLNEGKDSFRALKFPWVWTGKKFCPLAQAVIKPIHDLDLQPYLHNVPKTMAKFHQLFKVCGSIEELTSDHISMVIQKIYLKSDQDLSEQESKQNLHLMLNIIRWLYSNQIPASPNTPVPIHHSKNPSKLIMKPIHECCYCDIKVDDLNDLLEDSVEPIILVHEDIPMKTAEWLKVPCLSTRLINPENMGFEQSGQREPLTVRIKNILEEYPSVSDIFKELLQNADDANATECSFLIDMRRNMDIRENLLDPGMAACHGPALWSFNNSQFSDSDFVNITRLGESLKRGEVDKVGKFGLGFNSVYHITDIPIIMSREFMIMFDPNINHISKHIKDKSNPGIKINWSKQQKRLRKFPNQFKPFIDVFGCQLPLTVEAPYSYNGTLFRLSFRTQQEAKVSEVSSTCYNTADIYSLVDEFSLCGHRLIIFTQSVKSMYLKYLKIEETNPSLAQDTVIIKKKSCSSKALNTPVLSVLKEAAKLMKTCSSSNKKLPSDEPKSSCILQITVEEFHHVFRRIADLQSPLFRGPDDDPAALFEMAKSGQSKKPSDELSQKTVECTTWLLCTCMDTGEALKFSLSESGRRLGLVPCGAVGVQLSEIQDQKWTVKPHIGEVFCYLPLRIKTGLPVHINGCFAVTSNRKEIWKTDTKGRWNTTFMRHVIVKAYLQVLSVLRDLATSGELMDYTYYAVWPDPDLVHDDFSVICQGFYEDIAHGKGKELTKVFSDGSTWVSMKNVRFLDDSILKRRDVGSAAFKIFLKYLKKTGSKNLCAVELPSSVKLGFEEAGCKQILLENTFSEKQFFSEVFFPNIQEIEAELRDPLMIFVLNEKVDEFSGVLRVTPCIPCSLEGHPLVLPSRLIHPEGRVAKLFDIKDGRFPYGSTQDYLNPIILIKLVQLGFLFDEDSNGKLKMVAVLITSC

SEQ ID NO: 90599 - protein, 1939 aa, Homo sapiens
MAARLLAPPGPDSFKPFTPESLANIERRIAESKLKKPPKADGSHREDDEDSKPKPNSDLEAGKSLPFIYGDIPQGLVAVPLEDFDPYYLTQKTFVVLNRGKTLFRFSATPALYILSPFNLIRRIAIKILIHSVFSMIIMCTILTNCVFMTFSNPPDWSKNVEYTFTGIYTFESLVKIIARGFCIDGFTFLRDPWNWLDFSVIMMAYVTEFVDLGNVSALRTFRVLRALKTISVIPGLKTIVGALIQSVKKLSDVMILTVFCLSVFALIGLQLFMGNLRNKCVVWPINFNESYLENGTKGFDWEEYINNKTNFYTVPGMLEPLLCGNSSDAGQCPEGYQCMKAGRNPNYGYTSFDTFSWAFLALFRLMTQDYWENLYQLTLRAAGKTYMIFFVLVIFVGSFYLVNLILAVVAMAYEEQNQATLEEAEQKEAEFKAMLEQLKKQQEEAQAAAMATSAGTVSEDAIEEEGEEGGGSPRSSSEISKLSSKSAKERRNRRKKRKQKELSEGEEKGDPEKVFKSESEDGMRRKAFRLPDNRIGRKFSIMNQSLLSIPGSPFLSRHNSKSSIFSFRGPGRFRDPGSENEFADDEHSTVEESEGRRDSLFIPIRARERRSSYSGYSGYSQGSRSSRIFPSLRRSVKRNSTVDCNGVVSLIGGPGSHIGGRLLPEATTEVEIKKKGPGSLLVSMDQLASYGRKDRINSIMSVVTNTLVEELEESQRKCPPCWYKFANTFLIWECHPYWIKLKEIVNLIVMDPFVDLAITICIVLNTLFMAMEHHPMTPQFEHVLAVGNLVFTGIFTAEMFLKLIAMDPYYYFQEGWNIFDGFIVSLSLMELSLADVEGLSVLRSFRLLRVFKLAKSWPTLNMLIKIIGNSVGALGNLTLVLAIIVFIFAVVGMQLFGKSYKECVCKINQDCELPRWHMHDFFHSFLIVFRVLCGEWIETMWDCMEVAGQAMCLIVFMMVMVIGNLVVLNLFLALLLSSFSADNLAATDDDGEMNNLQISVIRIKKGVAWTKLKVHAFMQAHFKQREADEVKPLDELYEKKANCIANHTGADIHRNGDFQKNGNGTTSGIGSSVEKYIIDEDHMSFINNPNLTVRVPIAVGESDFENLNTEDVSSESDPEGSKDKLDDTSSSEGSTIDIKPEVEEVPVEQPEEYLDPDACFTEGCVQRFKCCQVNIEEGLGKSWWILRKTCFLIVEHNWFETFIIFMILLSSGALAFEDIYIEQRKTIRTILEYADKVFTYIFILEMLLKWTAYGFVKFFTNAWCWLDFLIVAVVVNALVGAIPSIMNVLLVCLIFWLIFSIMGVNLFAGKYHYCFNETSEIRFEIEDVNNKTECEKLMEGNNTEIRWKNVKINFDNVGAGYLALLQVATFKGWMDIMYAAVDSRKPDEQPKYEDNIYMYIYFVIFIIFGSFFTLNLFIGVIIDNFNQQKKKFGGQDIFMTEEQKKYYNAMKKLGSKKPQKPIPRPLNKIQGIVFDFVTQQAFDIVIMMLICLNMVTMMVETDTQSKQMENILYWINLVFVIFFTCECVLKMFALRHYYFTIGWNIFDFVVVILSIVGMFLADIIEKYFVSPTLFRVIRLARIGRILRLIKGAKGIRTLLFALMMSLPALFNIGLLLFLVMFIFSIFGMSNFAYVKHEAGIDDMFNFETFGNSMICLFQITTSAGWDGLLLPILNRPPDCSLDKEHPGSGFKGDCGNPSVGIFFFVSYIIISFLIVVNMYIAIILENFSVATEESADPLSEDDFETFYEIWEKFDPDATQFIEYCKLADFADALEHPLRVPKPNTIELIAMDLPMVSGDRIHCLDILFAFTKRVLGDSGELDILRQQMEERFVASNPSKVSYEPITTTLRRKQEEVSAVVLQRAYRGHLARRGFICKKTTSNKLENGGTHREKKESTPSTASLPSYDSVTKPEKEKQQRAEEGRRERAKRQKEVRESKC

SEQ ID NO: 90600 - protein, 154 aa, Homo sapiens
MNNQKQQKPTLSGQRFKTRKRDEKERFDPTQFQDCIIQGLTETGTDLEAVAKFLDASGAKLDYRRYAETLFDILVAGGMLAPGGTLADDMMRTDVCVFAAQEDLETMQAFAQVFNKLIRRYKYLEKGFEDEVKKLLLFLKGFSESERNKLAMLT

SEQ ID NO: 90601 - protein, 111 aa, Homo sapiens
MSMNPERPFKAEDKENTENNNSSSNKQNQLSPLEGGKPLMSSSEEEFSPPQSPDQNSVLLLQGNMGHARSSNYSLPGLTASQPSHGLQTHQHQLQDSLLGPLTSSLVDLGS

SEQ ID NO: 90602 - protein, 166 aa, Homo sapiens
MGRPLLLPLLPLLLPPAFLQPSGSTGSGPSYLYGVTQPKHLSASMGGSVEIPFSFYYPWELATAPDVRISWRRGHFHRQSFYSTRPPSIHKDYVNRLFLNWTEGQKSGFLRISNLQKQDQSVYFCRVELDTRSSGRQQWQSIEGTKLSITQGQQRTKATTPAREPF

SEQ ID NO: 90603 - protein, 166 aa, Homo sapiens
MGSTWGSPGWVRLALCLTGLVLSLYALHVKAARARDRDYRALCDVGTAISCSRVFSSRWGRGFGLVEHVLGQDSILNQSNSIFGCIFYTLQLLLGLQAAQRACGQRGPGPPKPQEGNTVPGEWPWQASVRRQGAHICSGSLVADTWVLTAAHCFEKAAATELNSWS

SEQ ID NO: 90604 - protein, 1569 aa, Homo sapiens
METSASATASEKQEAKSGILEAAGFPDPGKKASPLVVAAAAAAAVAAQGVPQHLLPPFHAPLPIDMRHQEGRYHYEPHSVHGVHGPPALSGSPVISDISLIRLSPHPAGPGESPFNAPHPYVNPHMEHYLRSVHSSPTLSMISAARGLSPADVAQEHLKERGLFGLPAPGTTPSDYYHQMTLVAGHPAPYGDLLMQSGGAASAPHLHDYLNPVDVSRFSSPRVTPRLSRKRALSISPLSDASLDLQRMIRTSPNSLVAYINNSRSSSAASGSYGHLSAGALSPAFTFPHPINPVAYQQILSQQRGLGSAFGHTPPLIQPSPTFLAQQPMALTSINATPTQLSSSSNCLSDTNQNKQSSESAVSSTVNPVAIHKRSKVKTEPEGLRPASPLALTQEQLADLKEDLDRDDCKQEAEVVIYETNCHWEDCTKEYDTQEQLVHHINNEHIHGEKKEFVCRWQACTREQKPFKAQYMLVVHMRRHTGEKPHKCTFEGCSKAYSRLENLKTHLRSHTGEKPYVCEHEGCNKAFSNASDRAKHQNRTHSNEKPYICKIPGCTKRYTDPSSLRKHVKTVHGPDAHVTKKQRNDVHLRTPLLKENGDSEAGTEPGGPESTEASSTSQAVEDCLHVRAIKTESSGLCQSSPGAQSSCSSEPSPLGSAPNNDSGVEMPGTGPGSLGDLTALDDTPPGADTSALAAPSAGGLQLRKHMTTMHRFEQLKKEKLKSLKDSCSWAGPTPHTRNTKLPPLPGSGSILENFSGSGGGGPAGLLPNPRLSELSASEVTMLSQLQERRDSSTSTVSSAYTVSRRSSGISPYFSSRRSSEASPLGAGRPHNASSADSYDPISTDASRRSSEASQCSGGSGLLNLTPAQQYSLRAKYAAATGGPPPTPLPGLERMSLRTRLALLDAPERTLPAGCPRPLGPRRGSDGPTYGHGHAGAAPAFPHEAPGGGARRASDPVRRPDALSLPRVQRFHSTHNVNPGPLPPCADRRGLRLQSHPSTDGGLARGAYSPRPPSISENVAMEAVAAGVDGAGPEADLGLPEDDLVLPDDVVQYIKAHASGALDEGTGQVYPTESTGFSDNPRLPSPGLHGQRRMVAADSNVGPSAPMLGGCQLGFGAPSSLNKNNMPVQWNEVSSGTVDALASQVKPPPFPQGNLAVVQQKPAFGQYPGYSPQGLQASPGGLDSTQPHLQPRSGAPSQGIPRVNYMQQLRQPVAGSQCPGMTTTMSPHACYGQVHPQLSPSTISGALNQFPQSCSNMPAKPGHLGHPQQTEVAPDPTTMGNRHRELGVPDSALAGVPPPHPVQSYPQQSHHLAASMSQEGYHQVPSLLPARQPGFMEPQTGPMGVATAGFGLVQPRPPLEPSPTGRHRGVRAVQQQLAYARATGHAMAAMPSSQETAEAVPKGAMGNMGSVPPQPPPQDAGGAPDHSMLYYYGQIHMYEQDGGLENLGSCQVMRSQPPQPQACQDSIQPQPLPSPGVNQVSSTVDSQLLEAPQIDFDAIMDDGDHSSLFSGALSPSLLHSLSQNSSRLTTPRNSLTLPSIPAGISNMAVGDMSSMLTSLAEESKFLNMMT

SEQ ID NO: 90605 - protein, 98 aa, Homo sapiens
MDSFGQPRPEDNQSVVRRMQKKYWKTKQVFIKATGKKEDEHLVASDAELDAKLEVFHSVQETCTELLKIIEKYQLRLNVISEEENELGLFLKFQAERD

SEQ ID NO: 90606 - protein, 504 aa, Homo sapiens
MTPTLAALLCLGLSLGPRTHVQAGPFPKPTLWAEPGSVISWGSPVTIWCQGSLEAQEYRLDKEGSPEPWDRNNPLEPKNKARFSIPSITEHHAGRYRCHYYSSAGWSEPSDPLELVMTGAYSKPTLSALPSPVVASGGNMTLQCGSQKGYHHFVLMKEGEHQLPRTLDSQQLHSGGFQALFPVGPVNPSHRWRFTCYYYYMNTPRVWSHPSDPLEILPSGVSRKPSLLTLQGPVLAPGQSLTLQCGSDVGYDRFVLYKEGERDFLQRPGQQPQAGLSQANFTLGPVSPSHGGQYRCYGAHNLSSEWSAPSDPLNILMAGQIYDTVSLSAQPGPTVASGENVTLLCQSWWQFDTFLLTKEGAAHPPLRLRSMYGAHKYQAEFPMSPVTSAHAGTYRCYGSYSSNPHLLSFPSEPLELMVSGHSGGSSLPPTGPPSTPGESLRPRGERGLPQGSLSLPKDPTPLPSRTGLCPRGSEAGLVKSGGFKAERDVGAQPGGGAGLMWGAR

SEQ ID NO: 90607 - protein, 185 aa, Homo sapiens
MSDGDYDYLIKFLALGDSGVGKTSVLYQYTDGKFNSKFITTVGIDFREKRVVYRASGPDGATGRGQRIHLQLWDTAGQERFRSLTTAFFRDAMGFLLLFDLTNEQSFLNVRNWISQLQMHAYCENPDIVLCGNKSDLEDQRVVKEEEAIALAEKYGIPYFETSAANGTNISQAIEMLLDLIMKRM

SEQ ID NO: 90608 - protein, 101 aa, Homo sapiens
MSTMFADTLLIVFISVCTALLAEGITWVLVYRTDKYKRLKAEVEKQSKKLEKKKETITESAGRQQKKKIDRVSPYRPGWSTVTRSWPTAASNSWAQVILPL

SEQ ID NO: 90609 - protein, 164 aa, Homo sapiens
MLTENGQVLSCGSNSFGQLGVPHGPRRCVVPQAIELHKEKVVCIAAGLRHAVAATASGIVFQWGTGLASCGRRLCPGQTLPLFFTAKEPSRVTGLENSKAMCVLAGSDHSASLTDAGEVYVWGSNKHGQLANEAAFLPVPQKIEAHCFQNEKVTAIWSGWTHLV

SEQ ID NO: 90610 - protein, 94 aa, Homo sapiens
MRTDGARSHLAPVESSQEEQSLCEGSNSAVSMELSEPIENGETEMSPEESWEHKEEISEAEPGGGSLGDGRPPEESAHEMMEEEEEIPKPKSVV

SEQ ID NO: 90611 - protein, 242 aa, Homo sapiens
MVPEAWRSGLEMKLEISEAVAPGTRFPLESAHDPDVGSNSLQTYELSRNEYFALRVQTREDSTKYAELVLERALDREREPSLQLVLTALDGGTPALSASLPIHIKVLDANDNAPVFNQSLYRARVLEDAPSGTRVVQVLATDLDEGPNGEIIYSFGSHNRAGVRQLFALDLVTGMLTIKGRLDFEDTKLHEIYIQAKDKGANPEGAHCKVLVEVVDVNDNAPEITVTSVYSPVPEDAPLGTV

SEQ ID NO: 90612 - protein, 844 aa, Homo sapiens
MAFPHLQQPSFLLASLKADSINKPFAQQCQDLVKVIEDFPAKELHTIFPWLVESIFGSLDGVLVGWNLRCLQGRVNPVEYSIVMEFLDPGGPMMKLVYKLQAEDYKFDFPVSYLPGPVKASIQECILPDSPLYHNKVQFTPTGGLGLNLALNPFEYYIFFFALSLITQKPLPVSLHVRTSDCAYFILVDRYLSWFLPTEGSVPPPLSSSPGGTSPSPPPRTPAIPFASYGLHHTSLLKRHISHQTSVNADPASHEIWRSETLLQVFVEMWLHHYSLEMYQKMQSPHAKESFTPTEEHVLVVRLLLKHLHAFANSLKPEQASPSAHSHATSPLEEFKRMGLNLPEVPSALPRRSQPSLMGALGSSVSRASLLGKQQVTLPIPCRAAVPRFVQQKLYLFLQHCFGHWPLDASFRAVLEMWLSYLQPWRYAPDKQAPGSDSQPRCVSEKWAPFVQENLLMYTKLFVGFLNRALRTDLVSPKHALMVFRVAKVFAQPNLAEMIQKGEQLFLEPELVIPHRQHRLFTAPTFTGSFLSPWPPAVTDASFKVKSHVYSLEGQDCKYTPMFGPEARTLVLRLAQLITQAKHTAKSISDQCAESPAGHSFLSWLGFSSMDTNGSYTANDLDEMGQDSVRKTDEYLEKALEYLRQIFRLSEAQLRQFTLALGTTQDENGKKQLPDCIVGEDGLILTPLGRYQIINGLRRFEIEYQGDPELQPIRSYEIASLVRTLFRLSSAINHRFAGQMAALCSRDDFLGSFCRYHLTEPGLASRHLLSPVGRRQVAGHTRGPRLSLRFLGSYRTLVSLLLAFFVASLFCVGPLPCTLLLTLGYVLYASAMTLLTERGKLHQP

SEQ ID NO: 90613 - protein, 151 aa, Homo sapiens
MEKPLFPLVPLHWFGFGYTALVVSGGIVGYVKTGSVPSLAAGLLFGSLAGLGAYQLYQDPRNVWGFLAATSVTFVGVMGMRSYYYGKFMPVGLIAGARWSMALVAQAGVQWCDLSSLQPPPPRFKRFSCLTLLSSWDFRCAPPHPANFLYF

SEQ ID NO: 90614 - protein, 113 aa, Homo sapiens
MEPFSCDTFVALPPATVDNRIIFGKNSDRLYDEVQEVVYFPAVVHDNLGERLKCTYIEIDQVPETYAVVLSRPAWLWGAEMGANEHGVCIGNEAVWGREEVCDEEALLGMDLV

SEQ ID NO: 90615 - protein, 179 aa, Homo sapiens
MAPAADREGYWGPTTSTLDWCEENYSVTWYIAEFWNTVSNLIMIIPPMFGAVQSVRDGLEKRYIASYLALTVVGMGSWCFHMTLKYEMQLLDELPMIYSCCIFVYCMFECFKIKNSVNYHLLFTLVLFSLIVTTVYLKVKEPIFHQESHSVTPAEVQWHNLGSLEPPPPRSCMECWSLH

SEQ ID NO: 90616 - protein, 95 aa, Homo sapiens
MAEKVNNFPPLPKFIPLKPCFYQDFEADIPPQHVSMTKRLYYLWMLNSVTLAVNLVGCLAWLIGGGGATNFGLAFLWLILFTPCSYVCWFRPIYK

SEQ ID NO: 90617 - protein, 125 aa, Homo sapiens
MFNIRNIGKTLVTRTQGTKIASDGLKGRVFEVSLADLQNDEVAFRKFKLITEDVQGKNCLTNFHGMDLTRDKMCSMVKKWQTMIEAHVDVKTTDGYLLRLFCVGFTKKRNNQIRKTSYAQHQQVR

SEQ ID NO: 90618 - protein, 156 aa, Homo sapiens
ESEFLTEAEIICDVVCLVYDVSNPKSFEYCARIFKQHFMDSRIPCLIVAAKSDLHEVKQEYSISPTDFCRKHKMPPPQAFTCNTADAPSKDIFVKLTTMAMYPHARLRCMCTCNRCTFCICQNFLNSDLLQSVKNKIFTAVLNRFLTLFTGYQAFC

SEQ ID NO: 90619 - protein, 53 aa, Homo sapiens
MVKETQYYDILGVKPSASPEEIKKAYRKLALKYHPDKNPDEGEKARMLYTSYL

SEQ ID NO: 90620 - protein, 128 aa, Homo sapiens
MTDLVAVWDVALSDGVHKIEFEHGTTSGKRVVYVDGKEEIRKEWMFKLVGKETFYVGAAKTKATINIDAISGFAYEYTLEINGKSLKKYMEDRSKTTNTWVLHMDGENFRIVLEKDAMDVWCNGKKLE

SEQ ID NO: 90621 - protein, 139 aa, Homo sapiens
MAVCARLCGVGPSRGCRRRQQRRGPAETAAADSEPDTDPEEERIEASAGVGGGLCAGPSPPPPRCSLLELPPELLVEIFASLPGTDLPSLAQVCTKRARVVAGRAPGSPSQALPSPGQRRPARAQMGHLVRMVASLGMP

SEQ ID NO: 90622 - protein, 151 aa, Homo sapiens
MALVRGGWLWRQSSILRRWKRNWFALWLDGTLGYYHDETAQDEEDRVLIHFNVRDIKIGPECHDVQPPEGRSRDGLLTVNLREGGRLHLCAETKDDALAWKTALLEANSTPVRVYSPYQDYYEVVPPNAHEATYVRSYYGPPYAGKSPACP

SEQ ID NO: 90623 - protein, 295 aa, Homo sapiens
MLLARMNPQVQPENNGADTGPEQPLRARKTAELLVVKERNGVQCLLAPRDGDAQPRETWGKKIDFLLSVVGFAVDLANVWRFPYLCYKNGGGAFLIPYTLFLIIAGMPLFYMELALGQYNREGAATVWKICPFFKGVGYAVILIALYVGFYYNVIIAWSLYYLFSSFTLNLPWTDCGHTWNSPNCTDPKLLNGSVLGNHTKYSKYKFTPAAEFYERGVLHLHESSGIHDIGLPQWQLLLCLMVVVIVLYFSLWKGVKTSGKVWIDAATQIFFSLGAGFGVLIAFASYNKFDNNCY

SEQ ID NO: 90624 - protein, 102 aa, Homo sapiens
MSAQSVEEDSILIIPTPDEEEKILRVKLEEDPDGEEGSSIPWNHLPDPEIFRQRFRQFGYQDSPGPREAVSQLRELCRLWLRPETHTKEQILELVVLEQFVA

SEQ ID NO: 90625 - protein, 82 aa, Homo sapiens
MLGRIVFAWWKGSKLDCNAKQWRLFADILNDVAMFLEIMAPVYPICFTMTVSTSNLAKCIVSVAGGATRAALTVHQARRNNM

SEQ ID NO: 90626 - protein, 630 aa, Homo sapiens
MADQRMDISSTISDFMSPGPTDLLSSSLGTSGVDCNRKRKGSSTDYQESMDTDKDDPHGRLEYTEHQGRIKNAREAHSQIEKRRRDKMNSFIDELASLVPTCNAMSRKLDKLTVLRMAVQHMKTLRGATNPYTEANYKPTFLSDDELKHLILRAADGFLFVVGCDRGKILFVSESVFKILNYSQNDLIGQSLFDYLHPKDIAKVKEQLSSSDTAPRERLIDAKTGLPVKTDITPGPSRLCSGARRSFFCRMKCNRPSVKVEDKDFPSTCSKKKDRKSFCTIHSTGYLKSWPPTKMGLDEDNEPDNEGCNLSCLVAIGRLHSHVVPQPVNGEIRVKSMEYVSRHAIDGKFVFVDQRATAILAYLPQELLGTSCYEYFHQDDIGHLAECHRQVLQTREKITTNCYKFKIKDGSFITLRSRWFSFMNPWTKEVEYIVSTNTVVLANVLEGGDPTFPQLTASPHSMDSMLPSGEDSFVVGGPKRTHPTVPGIPGGTRAGAGKIGRMIAEEIMEIHRIRGSSPSSCGSSPLNITSTPPPDASSPGGKKILNGGTPDIPSSGLLSGQAQENPGYPYSDSSSILGENPHIGIDMIDNDQGSSSPSNDEAAMAVIMSLLEADAGLGGPVDFSDLPWPL

SEQ ID NO: 90627 - protein, 397 aa, Homo sapiens
MLVPLAKLSCLAYQCFHALKIKKNYLPLCATRWSSTSTVPRITTHYTIYPRDKDKRWEGVNMERFAEEADVVIVGAGPAGLSAAVRLKQLAVAHEKDIRVCLVEKAAQIGAHTLSGACLDPGAFKELFPDWKEKGAPLNTPVTEDRFGILTEKYRIPVPILPGLPMNNHGNYIVRLGHLVSWMGEQAEALGVEVYPGYAAAEVLFHDDGSVKGIATNDVGIQKDGAPKATFERGLELHAKVTIFAEGCHGHLAKQLYKKFDLRANCEPQTYGIGLKELWVIDEKNWKPGRVDHTVGWPLDRHTYGGSFLYHLNEGEPLVALGLVVGLDYQNPYLSPFREFQRWKHHPSIRPTLEGGKRIAYGARALNEGGFQSERERMQSKWLPFSLYQNSPFLVVY

SEQ ID NO: 90628 - protein, 195 aa, Homo sapiens
MSYVFVNDSSQTNVPLLQACIDGDFNYSKRLLESGFDPNIRDSRGRTGLHLAAARGNVDICQLLHKFGADLLATDYQGNTALHLCGHVDTIQFLVSNGLKIDICNHQGATPLVLAKRRGVNKDVIRLLESLEEQEVKGFNRGTHSKLETMQTAESESAMESHSLLNPNLQQGEGVLSSFRTTWQEFVEDLGFWRV

SEQ ID NO: 90629 - protein, 292 aa, Homo sapiens
MDGSFVQHSVRVLQELNKQREKGQYCDATLDVGGLVFKAHWSVLACCSHFFQSLYGDGSGGSVVLPAGFAEIFGLLLDFFYTGHLALTSGNRDQVLLAARELRVPEAVELCQSFKPKTSVGQAAGGQSGLGPPASQNVNSHVKEPAGLEEEEVSRTLGLVPRDQEPRGSHSPQRPQLHSPAQSEGPSSLCGKLKQALKPCPLEDKKPEDCKVPPRPLEAEGAQLQGGSNEWEVVVQVEDDGDGDYMSEPEAVLTRRKSNVIRKPCAAEPALSAGSLAAEPAENRKGTAVPVE

SEQ ID NO: 90630 - protein, 102 aa, Homo sapiens
MRLSWFRVLTVLSICLSAVATATGAEGKRKLQIGVKKRVDHCPIKSRKGDVLHMHYTGKLEDGTEFDSSLPQNQPFVFSLGTGQVIKGWDQGLLGMCEGEKR

SEQ ID NO: 90631 - protein, 167 aa, Homo sapiens
MERTAGKELALAPLQDWGEETEDGAVYSVSLRRQRSQRRSPAEGPGGSQAPSPIANTFLHYRTSKVRVLRAARLERLVGELVFGDREQDPSFMPAFLATYRTFVPTACLLGFLLPPMPPPPPPGVEIKKTAVQDLSFNKNLRTTLRISETTLPIRTWAVSEPFWAGR

SEQ ID NO: 90632 - protein, 44 aa, Homo sapiens
MAPDPWFSTYDSTCQIAQEIAEKIQQRNQYERKGEKAPKVQPDE

SEQ ID NO: 90633 - protein, 185 aa, Homo sapiens
MAEPSAATQSHSISSSSFGAEPSAPGGGGSPGACPALGTKSCSSSCAESSLGSHFVPHPVSLLSFNLRIKIKRMHDLIFWRDVKKTGFVFGTTLIMLLSLAAFSVISVVSYLILALLSVTISFRIYKSVIQAVQKSEEGHPFKAYLDVDITLSSEAFHNYMNAAMVHINRALKLIIRLFLVEDLV

SEQ ID NO: 90634 - protein, 92 aa, Homo sapiens
MAMIELGFGRQNFHPLKRKSSLLLKLIAVVFAVLLFCEFLIYYLAIFQCNWPEVKTTASDGEQTTREPVLKAMFLADTHLLGEFLGHWLDKL

SEQ ID NO: 90635 - protein, 498 aa, Homo sapiens
MWNFRELSENSQQAANILSGACGLQRGDRVAVMLPRVPEWWLVILGCIRAGLIFMPGTIQMKSTDILYRLQMSKAKAIVAGDEVIQEVDTVASECPSLRIKLLVSEKSCDGWLNFKKLLNEASTTHHCVETGSQEASAIYFTSGTSGLPKMAEHSYSSLGLKAKMDAGWTGLQASDIMWTISDTGWILNILGSLLESWTLGACTFVHLLPKFDPLVILKTLSSYPIKSMMGAPIVYRMLLQQDLSSYKFPHLQNCLAGGESLLPETLENWRAQTGLDIREFYGQTETGLTCMVSKTMKIKPGYMGTAASCYDVQVIDDKGNVLPPGTEGDIGIRVKPIRPIGIFSGYVENPDKTAANIRGDFWLLGDRGIKDEDGYFQFMGRADDIINSSGYRIGPSEVENALMKHPAVVETAVISSPDPVRGEVVKAFVILASQFLSHDPEQLTKELQQHVKSVTAPYKYPRKIEFVLNLPKTVTGKIQRTKLRDKEWKMSGKARAQ

SEQ ID NO: 90636 - protein, 1004 aa, Homo sapiens
SFLGIHRLNGPLKCGQPQEVLVDYYIDPADASPDQEISFSYYLIGKGSLVMEGQKHLNSKKKGLKASFSLSLTFTSRLAPDPSLVIYAIFPSGGVVADKIQFSVEMCFDNQVSLGFSPSQQLPGAEVELQLQAAPGSLCALRAVDESVLLLRPDRELSNRSVYGMFPFWYGHYPYQVAEYDQCPVSGPWDFPQPLIDPMPQGHSSQRSIIWRPSFSEGTDLFSFFRDVGLKILSNAKIKKPVDCSHRSPEYSTAMGAGGGHPEAFESSTPLHQAEDSQVRQYFPETWLWDLFPIGNSGKEAVHVTVPDAITEWKAMSFCTSQSRGFGLSPTVGLTAFKPFFVDLTLPYSVVRGESFRLTATIFNYLKDCIRVQTDLAKSHEYQLESWADSQTSSCLCADDAKTHHWNITAVKLGHINFTISTKILDSNEPCGGQKGFVPQKGRSDTLIKPVLVKPEGVLVEKTHSSLLCPKGKVASESVSLELPVDIVPDSTKAYVTVLGDIMGTALQNLDGLVQMPSGCGEQNMVLFAPIIYVLQYLEKAGLLTEEIRSRAVGFLEIGYQKELMYKHSNGSYSAFGERDGNGNTWLTAFVTKCFGQAQKFIFIDPKNIQDALKWMAGNQLPSGCYANVGNLLHTAMKGGVDDEVSLTAYVTAALLEMGKDVDDPMVSQGLRCLKNSATSTTNLYTQALLAYIFSLAGEMDIRNILLKQLDQQAIISGESIYWSQKPTPSSNASPWSEPAAVDVELTAYALLAQLTKPSLTQKEIAKATSIVAWLAKQHNAYGGFSSTQDTVVALQALAKYATTAYMPSEEINLVVKSTENFQRTFNIQSVNRLVFQQDTLPNVPGMYTLEASGQGCVYVQTVLRYNILPPTNMKTFSLSVEIGKARCEQPTSPRSLTLTIHTSYVGSRSSSNMAIVEVKMLSGFSPMEGTNQLLLQQPLVKKVEFGTDTLNIYLDELIKNTQTYTFTISQSVLVTNLKPATIKVYDYYLPDEQATIQYSDPCE

SEQ ID NO: 90637 - protein, 2655 aa, Homo sapiens
MASRERLFELWMLYCTKKDPDYLKLWLDTFVSSYEQFLDVDFEKLPTRVDDMPPGISLLPDNILQVLRIQLLQCVQKMADGLEEQQQALSILLVKFFIILCRNLSNVEEIGTCSYINYVITMTTLYIQQLKSKKKEKEMADQTCIEEFVIHALAFCESLYDPYRNWRHRISGRILSTVEKSRQKYKPASLTVEFVPFFYQCFQESEHLKESLKCCLLHLFGAIVAGGQRNALQAISPATMEVLMRVLADCDSWEDGDPEEVGRKAELTLKCLTEVVHILLSSNSDQRQVETSTILENYFKLLNSDHSALPNQRRSRQWENRFIALQIKMLNTITAMLDCTDRPVLQAIFLNSNCFEHLIRLLQNCKVFQGQLDCLAISTIQALTAVMNKSPAAKEVFKERIGYTHMLEVLKSLGQPPLELLKELMNMAVEGDHTSVGILGISNVQPLLLLIQWLPELQSHDLQIFISDWLKRICCINRQSRTTCVNANMGIRIIETLDLHSSLHQTCAENLIAIHGSLGSQSVSSEEIRRLLRLLRVDESESVHPYVTPVTRAILTMARKLSLESALQYFNLSHSMAGISVPPIQKWPGSAFSFSAWFCLDQDQLTLGIANKGGKRKQLYSFFTGSGMGFEAFITHSGMLVVAVCTKREYATVMLPDHSFCDSLWHNITVVHMPGKRPFGQSFVYIYDNGQQKVSAPLRFPAMNEPFTSCCIGSAGQRTTTPPPSQIPDPPFSSPITPHRTSFGGILSSASWGGTIEKSKLITKLISAGTQDSEWGCPTSLEGQLGSVIIFYEPLQPPQVKALYLAGPNCLSPWKCQESDMADLPGNILLYYTAKACKNSICLDLSTNCLHGRLTGNKVVNWDIKDIINCIGGLNVLFPLLEQISHFSEGQIPEEKNESTVPESVTPVEGDWLVWTSTKASESRLERNLVATFILIVKHFIQRHPINQGNLIHSHGVATLGALLQKVPSTLMDVNVLMAVQLLIEQVSLEKNMQLLQQMYQYLLFDFRIWNRGDFPFRIGHIQYLSTIIKDSRRVFRKKYGVQFLLDTLRIYYGNGCKYNELSLDDIRTIRTSLYGLIKYFLCKGGSHEEIQSIMGYIAATNEEEQLFGILDVLFSLLRTSPTRGQLFLLLFEPGNADILYALLLNQKYSDRLREIIFKIMEQMLKCTNVYERSKQHIRLREVGYSGLGLLLNEALVNTSLIKNLTHQIINTDPVINFKDLLSVVYISHRAHINVRVAICRKVLQILQFQPDAAHQISQQVGWQDTLVRLFLKAKFENGNTLHKHSRAVLMKDNDKNMSTEDTKKNSDEKTDEEKITSFASANVSSDQWSLEDRHSLDSNTPLFPEDSSVGELSFKSENQEEFWHSNPSHLSLDLSGIDSCEMSDSGSQVPDSLPSTPSPVESTKSFSVHSDRESSITNDMGFSDDFSLLESQERCEEELLQLLTHILNYVMCKGLEKSDDDTWIERGQVFSALSKPGISSELLRPSDEIKLTLLQKMLEWAISENREAKTNPVTAENAFRLVLIIQDFLQSEGLVNSNMWTEKLLEDMMLLFDCLSVCYSESPVWVKLSQIQIQLLLGFIGRGNLQVCAMASAKLNTLLQTKVIENQDEACYILGKLEHVLSQSIKEQTEIYSFLIPLVRTLVSKIYELLFMNLHLPSLPFTNGSSSFFEDFQEYCNSNEWQVYIEKYIVPYMKQYEAHTFYDGHENMALYWKDCYEALMVNMHKRDREGGESKLKFQELFVEPFNRKARQENLRYNNMLKQLSSQQLATLRRWKAIQLYLTCERGPWAKRKQNPIHWKLANVENYSRMRLKLVPNYNFKTHEEASALRDNLGIQHSQPSSDTLLLEVVKQVKVSDMVEDKLDLPEEDITARVNVDEKEEQDQKEKLVLMEDCELITIIDVIPGRLEITTQHIYFYDGSIEKEDGVGFDFKWPHSQIREIHLRRYNLRRSALEIFHVDQSNYFLNFKKEVRNKIYSRLLSLHSPNSYYGSRSPQELFKASGLTQKWVNREISNFDYLIQINTMAGRTYNDLAQYPVFPWILQDYTSEELDLNNPAVFRDLSKPIGVVNEKNAKAMREKYENFEDPMGTIDKFHYGTHYSNSAGVMHYLIRVEPFTTLHIQLQSGRFDCADRQFHSIPATWQALMDNPYDVKELIPEFFYFPEFLENQNQFNLGRLQISKELVNDVILPKWAKSAEDFIYKHRKALESEYVSAHLHEWIDLIFGYKQRGPAAVEALNVFYYCSYEGAVDLDALTDEKERKALEGMINNFGQTPCQLLKGISDGIPLLKATIPKNQYRSFMSQGSPELLITISMNYVIGTHGWLPYDRNISNYFTFIKDQTVTNPKTQRSINGSFAPGLEITSKLFVVSHDAKLLFSAGYWDNSIQVMSLTKGKIISHIIRHMDIVTCLATDYCGIHLISGSRDTTCMIWQITQQGGVPVGLASKPFQILYGHTNEVLSVGISTELDMAVSGSRDGTVIIHTIQKGQYMRTLRPPCESSLFLTIPNLAISWEGHIVVYSSTEEKTTLKDKNALHLFSINGKYLGSQILKEQVSDICIIGEHIVTGSIQGFLSIRDLHSLNLSINPLAMRLPIHCVCVTKEYSHILVGLEDGKLIVVGVGKPAEMRSGQLSRKFWGSSKRLSQISAGETEYNTQDSK

SEQ ID NO: 90638 - protein, 51 aa, Homo sapiens
MNTEAEQQLLHHARNGNAEEVRQLLETMARNEVIADINCKGRRVGNASLRI

SEQ ID NO: 90639 - protein, 345 aa, Homo sapiens
MRYADPSANRDLLGSRTLLFIFICAFALVTLLQQILYGRNYIKRVKQSELFDRWKSLQMCKWAMNISEANQFKSTLSRCCNAPAFLFTTQKNTPLGTKLKYEVDTSGIYHINQEIFRMFPKDMPYYRSQFKKCAVVGNGGILKNSRCGREINSADFVFRCNLPPISEKYTMDVGVKTDVVTVNPSIITERFHKLEKWRRPFYRVLQVYENASVLLPAFYNTRNTDVSIRVKYVLDDFESPQAVYYFHPQYLVNVSRYWLSLGVRAKRISTGLILVTAALELCEEVHLFGFWAFPMNPSGLYITHHYYDNVKPRPGFHAMPSEIFNFLHLHSRGILRVHTGTCSCC

SEQ ID NO: 90640 - protein, 144 aa, Homo sapiens
MRRHMVTYAWQLLKKELGLYQLAMDIIIMIRVCKMFRQGLRGFREYQIIETAHWKHPIFSFWDKKMQSRVTFDTMDFIAEEGHFPPKAIQIMQKKPSWRTEDEIQAVCNILQVLDSYRNYAEPLQLLLAKVMRFERKWTFCMLQ

SEQ ID NO: 90641 - protein, 312 aa, Homo sapiens
MLLPVFTLKLRHKISPRMVAIGRYDGTHPCLAAATQTGKVFIHNPHTRNQHVSASRVFQSPLESDVSLLSINQAVSCLTAGVLNPELGYDALLVGTQTNLLAYDVYNNSDLFYREVADGANAIVLGTLGDISSPLAIIGGNCALQGFNHEGSDLFWTVTGDNVNSLALCDFDGDGKKELLVGSEDFDIRVFKEDEIVAEMTETEIVTSLCPMYGSRFGYALSNGTVGVYDKTSRYWRIKSKNHAMSIHAFDLNSDGVNELITGWSNGKVDARSDRTGEVIFKDNFSSAIAGVVEGDYRMDGHIHPGLPAWHG

SEQ ID NO: 90642 - protein, 182 aa, Homo sapiens
MASVDLSYCSFLHLLLLCSPILACPPLNGIRCVAYNNQSNRLAVSRTDGTVEIYNLSANYFQEKFFPGHESRATEALCWAEGQRLFSAGLNGEIMEYDLQALNIKYAMDAFGGPIWSMAASPSGSQLLVGCEDGSVKLFQITPDKIQFERNFDRQKSRILSLSWHPSGTHIAAGSIDYISVF

SEQ ID NO: 90643 - protein, 78 aa, Homo sapiens
MPLPPWQPVGENFTLSCRVPGAGPRASLTLTLLRGAQELIRRSFAGEPPRARGAVLTATVLARREDHGANFSCRAELD

SEQ ID NO: 90644 - protein, 1145 aa, Homo sapiens
MPRNQGFSEPEYSAEYSAEYSVSLPSDPDRGVGRTHEISVRNSGSCLCLPRFMRLTFVPESLENLYQTYFKRQRHETLLVLVVFAALFDCYVVVMCAVVFSSDKLASLAVAGIGLVLDIILFVLCKKGLLPDRVTRRVLPYVLWLLITAQIFSYLGLNFARAHAASDTVGWQVFFVFSFFITLPLSLSPIVIISVVSCVVHTLVLGVTVAQQQQEELKGMQLLREILANVFLYLCAIAVGIMSYYMADRKHRKAFLEARQSLEVKMNLEEQSQQQENLMLSILPKHVADEMLKDMKKDESQKDQQQFNTMYMYRHENVSILFADIVGFTQLSSACSAQELVKLLNELFARFDKLAAKYHQLRIKILGDCYYCICGLPDYREDHAVCSILMGLAMVEAISYVREKTKTGVDMRVGVHTGTVLGGVLGQKRWQYDVWSTDVTVANKMEAGGIPGRVHISQSTMDCLKGEFDVEPGDGGSRCDYLEEKGIETYLIIASKPEVKKTATQNGLNGSALPNGAPASSKSSSPALIETKEPNGSAHSSGSTSEKPEEQDAQADNPSFPNPRRRLRLQDLADRVVDASEDEHELNQLLNEALLERESAQVVKKRNTFLLSMRFMDPEMETRYSVEKEKQSGAAFSCSCVVLLCTALVEILIDPWLMTNYVTFMVGEILLLILTICSLAAIFPRAFPKKLVAFSTWIDRTRWARNTWAMLAIFILVMANVVDMLSCLQYYTGPSNATAGMETEGSCLENPKYYNYVAVLSLIATIMLVQVSHMVKLTLMLLVAGAVATINLYAWRPVFDEYDHKRFREHDLPMVALEQMQGFNPGLNGTDSRLPLVPSKYSMTVMVFLMMLSFYYFSRHVEKLARTLFLWKIEVHDQKERVYEMRRWNEALVTNMLPEHVARHFLGSKKRDEELYSQTYDEIGVMFASLPNFADFYTEESINNGGIECLRFLNEIISDFDSLLDNPKFRVITKIKTIGSTYMAASGVTPDVNTNGFASSNKEDKSERERWQHLADLADFALAMKDTLTNINNQSFNNFMLRIGMNKGGVLAGVIGARKPHYDIWGNTVNVASRMESTGVMGNIQVVEETQVILREYGFRFVRRGPIFVKGKGELLTFFLKGRDKLATFPNGPSVTLPHQVVDNS

SEQ ID NO: 90645 - protein, 86 aa, Homo sapiens
MLQQELLSRTSLETQKLDLMTEVSELKLKLVGMEKEQREQEEKQRKAEELLQELRHLKIKVEELENERNQYEWKLKATKAEVAQLQ

SEQ ID NO: 90646 - protein, 107 aa, Homo sapiens
  MOD_RES (1)..(1): Any amino acid
XIHEQWEKANVSSPHREFPPATAREVDPLRIPPHHPHTSRQPPWPRRGGMIVDPLRSGFPRALIDPSSGLPNRLPPGAVPPGARFDPFGPIGTSPPGPNPDHLPPPG

SEQ ID NO: 90647 - protein, 54 aa, Homo sapiens
  MOD_RES (1)..(1): Any amino acid
XTSKQQETLIKRICDQVFSRFPDFVQKSKDAAFETLSDPKYSGKMKVSSSKVYP

SEQ ID NO: 90648 - protein, 134 aa, Homo sapiens
MASFSMDCSPSFCVPGLWNPFIIFRSRSSRRRLHSLGLAAMPEKRPFERLPADVSPINYSLCLKPDLLDFTFEGKLEAAAQVRQATNQIVMNCADIDIITASYAPEGDEVSGLQMFRSLITFHLWTAFLLVHLS

SEQ ID NO: 90649 - protein, 91 aa, Homo sapiens
MTKKTRDLRRQLRKAVMDHVSDSFLETNVPLLVLIEAAKNGNEKEVKEYAQVFREHANKLIEVANLACSISNNEEGVKLVRMSASQLEALC

SEQ ID NO: 90650 - protein, 87 aa, Homo sapiens
MAAPRRGRGSSTVLSSVPLQMLFYLSGTYYALYFLATLLMITYKSQVFSYPHRYLVLDLALLFLMGILEAVRLYLGEWTVNTVKNLS

SEQ ID NO: 90651 - protein, 253 aa, Homo sapiens
MDSWFILVLLGSGLICVSANNATTVAPSVGITRLINSSTAEPVKEEAKTSNPTSSLTSLSVAPTFSPNITLGPTYLTTVNSSDSDNGTTRTASTNSIGITISPNGTWLPDNQFTDARTEPWEGNSSTAATTPETFPPSDETPIIAVMVALSSLLVIVFIIIVLYMLRFKKYKQAGSHSNSFRLSNGRTEDVEPQSVPLLARSPSTNRKYPPLPVDKLEEEINRRMADDNKLFREEFNALPACPIQATCEAASK

SEQ ID NO: 90652 - protein, 135 aa, Homo sapiens
MFDHPIPRVFQNRFSTQYRCFSVSMLAGPNDRSDVEKGGKIIMPPSALDQLSRLNITYPMLFKLTNKNSDRMTHCGVLEFVADEGICYLPHWMMQNLLLEEGGLVQVESVNLQVATYSKFQPQSPDFLDITNPKA

SEQ ID NO: 90653 - protein, 159 aa, Homo sapiens
MGIKFLEVIKPFCAVLPEIQKPERKIQFREKVLWTAITLFIFLVCCQIPLFGIMSSDSADPFYWMRVILASNRGTLMELGISPIVTSGLIMQLLAGAKIIEVGDTPKDRALFNGAQKLFGMIITIGQAIVYVMTGMYGDPAEMGAGICLLIIIQDQHSP

SEQ ID NO: 90654 - protein, 186 aa, Homo sapiens
MKFAYRFSNLLGTVYRRGNLNFTCDGNSVISPVGNRVTVFDLKNNKSDTLPLATRYNVKCVGLSPDGRLAIIVDEGSLLSQRVTLPRCIMPLGRSGSSTPSFWTRPILGPTMRPPASTGRMTPGALWLGAKTCPPGCSEPSAGTTSSTMHWGDIRMPSWPASLNPTAWTCTHSARTECCACGSVTR

SEQ ID NO: 90655 - protein, 129 aa, Homo sapiens
  MOD_RES (1)..(1): Any amino acid
XIVNPKQPKETPKSFSFDYSYWSHTSVSPLGLSHAVPSAGTRPASCLAGRSSSRICDTEGFSSRKLPHKPEDINYASQKQVYRDIGEEMLQHAFEGYNVCIFAYGQTGAGKSYTMMGKQEKDQQGIIPQ

SEQ ID NO: 90656 - protein, 228 aa, Homo sapiens
MGGCAGSRRRFSDSEGEYSRPPSWNDHLWLAAHLRGMRADSAPGGHARSGRAPESRWGSCPLLALPGEETVPEPRLPLLDHQGAHWKNAVGFWLLGLCNNFSYVVMLSAAHDILSHKRTSGNQSHVDPGPTPIPHNSSSRFDCNSVSTAAVLLADILPTLVIKLLAPLGLHLLPYSPRVLVSGICAAGSFVLVAFSHSVGTSLCGVVFASISSGLGEVTFLSLTAFYP

SEQ ID NO: 90657 - protein, 30 aa, Homo sapiens
MAYHSFLVEPISCHAWNKDRTQIAICPNNH

SEQ ID NO: 90658 - protein, 150 aa, Homo sapiens
MGWGRLQRISLPSQCLSLLSTWLGSLLLLVCLLASRSITEEVSEYCSHMIGSGHLQSLQRLIDSQMETSCQITFEFVDQEQLKDPVCYLKKAFLLVQDIMEDTMRFRDNTPNAIAIVQLQELSLRLKSCFTKDYEEHDKACVRTFYETPL

SEQ ID NO: 90659 - protein, 381 aa, Homo sapiens
MALPPGPAALRHTLLLLPALLSSGWGELEPQIDGQTWAERALRENERHAFTCRVAGGPGTPRLAWYLDGQLQEASTSRLLSVGGEAFSGGTSTFTVTAHRAQHELNCSLQDPRSGRSANASVILNVQFKPEIAQVGAKYQEAQGPGLLVVLFALVRANPPANVTWIDQDGPVTVNTSDFLVLDAQNYPWLTNHTVQLQLRSLAHNLSVVATNDVGVTSASLPAPGLLATRVEVPLLGIVVAAGLALGTLVGFSTLVACLVCRKEKKTKGPSRHPSLISSDSNNLKLNNVRLPRENMSLPSNLQLNDLTPDSRVKPADRQMAQNNSRPELLDPEPGGLLTSQACLLHHGTPALTNPWLPHQQEGALPGGWSPQAHNSTVWKL

SEQ ID NO: 90660 - protein, 251 aa, Homo sapiens
MSELEQLRQEAEQLRNQIRDARKACGDSTLTQITAGLDPVGRIQMRTRRTLRGHLAKIYAMHWGTDSRLLVSASQDGKLIIWDSYTTNKVHAIPLRSSWVMTCAYAPSGNFVACGGLDNICSIYSLKTREGNVRVSRELPGHTGYLSCCRFLDDNQIITSSGDTTCALWDIETGQQTVGFAGHSGDVMSLSLAPDGRTFVSGACDASIKLWDVRDSMCRQTFIGHESDINAVAFFPNGYAFTTGSDDATCR

SEQ ID NO: 90661 - protein, 190 aa, Homo sapiens
MGRRHCAAGEMSEKLRRCRKELTAAIDRAFEGVSYSQECTGQQRLELSAAPLSFSLPVHRLLCRRHPLAACSSAAPFAAVPCAPENENPAFATNHAPVNAKPHALCPERKPLTSKENVLMHSSILAPERESWRTAGEGENWRKENLRKDMERDLKADSNMPLNNSSQEVTKDLLDMIDHTSIRTIEELAG

SEQ ID NO: 90662 - protein, 210 aa, Homo sapiens
  MOD_RES (1)..(1): Any amino acid
XKMFIGGLSWDTTKKDLKDYFSKFGEVVDCTLKLDPITGRSRGFGFVLFKESESVDKVMDQKEHKLNGKVIDPKRAKAMKTKEPVKKIFVGGLSPDTPEEKIREYFGGFGEVESIELPMDNKTNKRRGFCFITFKEEEPVKKIMEKKYHNVGLSKCEIKVAMSKEQYQQQQQWGSRGGFAGRARGRGGDQQSGYGKVSRRGGHQNSYKPY

SEQ ID NO: 90663 - protein, 176 aa, Homo sapiens
MMFSGFNADYEASSSRCSSASPAGDSLSYYHSPADSFSSMGSPVNAQDFCTDLAVSSANFIPTVTAISTSPDLQWLVQPALVSSVAPSQTRAPHPFGVPAPSAGAYSRAGVVKTMTGGRAQSIGRRGKVEQLSPEEEEKRRIRRERNKMAAAKCRNRRRELTDTLQAVGTLWVAPF

SEQ ID NO: 90664 - protein, 264 aa, Homo sapiens
MSYFGEHFWGEKNHGFEVLYHSVKQGPISTKELADFIRERATIEETYSKAMAKLSKLASNGTPMGTFAPLWEVFRVSSDKLALCHLELTRKLQDLIKDVLRYGEEQLKTHKKCKEEVVSTLDAVQVLSGVSQLLPKSRENYLNRCMDQERLRRESTSQKEMDKAETKTKKAAESLRRSVEKYNSARADFEQKMLDSALRFQAMEETHLRHMKALLGSYAHSVEDTHVQIGQVHEEFKQNIENVSVEMLLRKFAESKGTGREKPG

SEQ ID NO: 90665 - protein, 215 aa, Homo sapiens
MAIRAQHSNAAQTQTGEANRGWTGQESLSDSDPEMWELLQREKDRQCRGLELIASENFCSRAALEALGSCLNNKYSEGYPGKRYYGGAEVVDEIELLCQRRALEAFDLDPAQWGVNVQPYSGSPANLAVYTALLQPHDRIMGLDLPDGGHLTHGYMSDVKRISATSIFFESMPYKLNPKTGLIDYNQLALTARLFRPRLIIAGTSAYARLIDYAR

SEQ ID NO: 90666 - protein, 110 aa, Homo sapiens
MVSHTFHMRTEESDASQEGDDLPKSSANTSHPKQDDSPKSSEETIQPKEGDIPKAPEETIQSKKEDLPKSSEKAIQPKESNIPKSSAKPIQPKLGNIPKASVKPSQPKEG

SEQ ID NO: 90667 - protein, 121 aa, Homo sapiens
MRKMLAAVSRVLSGASQKPFAGSPPPRHLTVGRKLSSRYEVTFESAQASRVLVASRNFANDATFEIKKCDLHRLEEGPPVTTVLTREDGLKYYRMMQTVRRMELKADQLYKQKIIRGFCHL

SEQ ID NO: 90668 - protein, 190 aa, Homo sapiens
MMEEISIMVAYDAHVFSQLHDEDFLTSLVAISKPRSMVPTKKLKKYEKEYQTMRESQLQQEDPMDRYKRENRRLQEASMRLEQENDDLAHELVTSKIALRNDLDQAEDKADVLNKELLLTKQRLVETEEEKRKQEEETAQLKEVFRKQLEKAEYEIKKTTAIIAEYKQICSQLSTRLEKQQAASKEELEV

SEQ ID NO: 90669 - protein, 852 aa, Homo sapiens
MAAVAAVAARRRRLSVSGRDENSVELTMAEGPYKIILTARPFRLDLLEDRSLLLSVNARGLLEFEHQRAPRVSFSDKVNLTLGSIWDKIKNLFSRQGSKDPAEGDGAQPEETPRDGDKPEETQGKAEKDEPGAWEETFKTHSDSKPYGPMSVGLDFSLPGMEHVYGIPEHADNLRLKVTEGGEPYRLYNLDVFQYELYNPMALYGSVPVLLAHNPHRDLGIFWLNAAETWVDISSNTAGKTLFGKMMDYLQGSGETPQTDVRWMSETGIIDVFLLLGPSISDVFRQYASLTGTQALPPLFSLGYHQSRWNYRDEADVLEVDQGFDDHNLPCDVIWLDIEHADGKRYFTWDPSRFPQPRTMLERLASKRRKLVAIVDPHIKVDSGYRVHEELRNLGLYVKTRDGSDYEGWCWPGSAGYPDFTNPTMRAWWANMFSYDNYEGSAPNLFVWNDMNEPSVFNGPEVTMLKDAQHYGGWEHRDVHNIYGLYVHMATADGLRQRSGGMERPFVLARAFFAGSQRFGAVWTGDNTAEWDHLKISIPMCLSLGLVGLSFCGADVGGFFKNPEPELLVRWYQMGAYQPFFRAHAHLDTGRREPWLLPSQHNDIIRDALGQRYSLLPFWYTLLYQAHREGIPVMRPLWVQYPQDVTTFNIDDQYLLGDALLVHPVSDSGAHGVQVYLPGQGEVWYDIQSYQKHHGPQTLYLPVTLSSIPVFQRGGTIVPRWMRVRRSSECMKDDPITLFVALSPQGTAQGELFLDDGHTFNYQTRQEFLLRRFSFSGNTLVSSSADPEGHFETPIWIERVVIIGAGKPAAVVLQTKGSPESRLSFQHDPETSVLVLRKPGINVASDWSIHLR

SEQ ID NO: 90670 - protein, 135 aa, Homo sapiens
MLGICRGRRKFLAASLSLLCIPAITWIYLFSGSFEDGKPVSLSPLESQAHSPRYTASSQRERESLEVRMREVEEENRALRRQLSLAQGRAPSHRRGNHSKTYSMEEGTGDSENLRAGIVAGNSSECGQQPVVEKC

SEQ ID NO: 90671 - protein, 510 aa, Homo sapiens
MRQLLRPIDRQRYDENEDLSDVEEIVSVRGFSLEEKLRSQLYQGDFVHAMEGKDFNYEYVQREALRVPLIFREKDGLGIKMPDPDFTVRDVKLLVGSRRLVDVMDVNTQKGTEMSMSQFVRYYETPEAQRDKLYNVISLEFSHTKLEHLVKRPTVVDLVDWVDNMWPQHLKEKQTEATNAIAEMKYPKVKKYCLMSVKGCFTDFHIDFGGTSVWYHVFRGGKIFWLIPPTLHNLALYEEWVLSGKQSDIFLGDRVERCQRIELKQGYTFFIPSGWIHAVYTPVDSLVFGGNILHSFNVPMQLRIYEIEDRTRVQPKFRYPFYYEMCWYVLERYVYCVTQRSHLTQEYQRESMLIDAPRKPSIDGFSSDSWLEMEEEACDQQPQEEEEKDEEGEGRDRAPKPPTDGSTSPTSTPSEDQEALGKKPKAPALRFLKRTLSNESEESVKSTTLAVDYPKTPTGSPATEVSAKWTHLTEFELKGLKALVEKLESLPENKKCVPEGIEDPQALLEG

SEQ ID NO: 90672 - protein, 743 aa, Homo sapiens
MVKISMDIFVRKFQPDRYQLWKQGKDIYTIDHTKPTPASTPEVKAWLQRRRKVRKASRSFQCARSTSKRPKADEEEEVSDEVDGAEVPNPDSVTDDLKVSEKSEAAVKLRNTEASSEEESSASRMQVEQNLSDHIKLSGNSCLSTSVTEDIKTEDDKAYAYRSVPSISSEADDSIPLSSGYEKPEKSDPSELSWPKSPESCSSVAESNGVLTEGEESDVESHGNGLEPGEIPAVPSGERNSFKVPSIAEGENKTSKSWRHPLSRPPARSPMTLVKQQAPSDEELPEVLSIEEEVEETESWAKPLIHLWQTKSPNFAAEQEYNATVARMKPHCAICTLLMPYHKPDSSNEENDARWETKLDEVVTSEGKTKPLIPEMCFIYSEENIEYSPPNAFLEEDGTSLLISCAKCCVRVHASCYGIPSHEICDGWLCARCKRNAWTAECCLCNLRGGALKQTKNNKWAHVMCAVAVPEVRFTNVPERTQIDVGRIPLQRLKLKCIFCRHRVKRVSGACIQCSYGRCPASFHVTCAHAAGVLMEPDDWPYVVNITCFRHKVNPNVKSKACEKVISVGQTVITKHRNTRYYSCRVMAVTSQTFYEVMFDDGSFSRDTFPEDIVSRDCLKLGPPAEGEVVQVKWPDGKLYGAKYFGSNIAHMYQVEFEDGSQIAMKREDIYTLDEELPKRVKARFSTASDMRFEDTFYGADIIQGERKRQRVLSSRFKNEYVADPVYRTFLKSSFQKKCQKRQ

SEQ ID NO: 90673 - protein, 157 aa, Homo sapiens
  MOD_RES (1)..(1): Any amino acid
XIPSALRIAKKKRWNSIEERRIHQESELHSYLSRLIAAERERELEECQRNHEGDEDDSHVRAQQACIEAKHVDEKRKKRDIPDYLCGKISFELMREPCITPSGITYDRKDIEEHLQRVGHFDPVTRSPLTQEQLIPNLAMKEVIDAFISENGWVEDY

SEQ ID NO: 90674 - protein, 108 aa, Homo sapiens
MADLANEEKPAIAPPVFVFQKDKGQKSPAEQKNLSDSGEEPRGEAEAPHHGTGHPESAGEHALEPPAPAGASASTPPPPAPEAQLPPFPRELAGEEEKTLPLNPEGIP

SEQ ID NO: 90675 - protein, 128 aa, Homo sapiens
ILSLCPEIKWHFIGHLQKQNVNKLMAVPNLFMLETVDSVKLADKVNSSWQRKGSPERLKVMVQINTSGEEIYLFSVSFLEGKHGLPPSETIAIVEHINAKCPNLEFVGLMTIGSFGHDLSQGPNPDFQ

SEQ ID NO: 90676 - protein, 129 aa, Homo sapiens
MDALQLANSAFAVDLFKQLCEKEPLGNVLFSPICLSTSLSLAQVGAKGDTANEIGQVLHFENVKDVPFGFQTVTSDVNKLSSFYSLKLIKRLYVDKSLNLSTEFISSTKRPYAKELETVDFKDKLEETK

SEQ ID NO: 90677 - protein, 43 aa, Homo sapiens
MTAQGGLVANRGRRFKWAIELSGPGGGSSAAGTSPWVPSNRFP

SEQ ID NO: 90678 - protein, 214 aa, Homo sapiens
  MOD_RES (1)..(1): Any amino acid
XSSSGRGEVGADLPGSLSLLESEGKDHGLELSIHRTPILEDFELEGVCQLPDQSPPRNSMPKAEEASSWGQFGLSSRKRVLLAKEEADRGAKRICDLREDSEVSKSKEGSPSWSAWQLPSTGDEEVFVSGSTPPPSCAVRSCLSASALQALTQSPLLFQGKTPSSQSKDPRDEDVDVLPSTVEDSPFSRAFSRRRPISRTYTRKKLMGTWLEDL

SEQ ID NO: 90679 - protein, 549 aa, Homo sapiens
MASPAPPEHAEEGCPAPAAEEQAPPSPPPPQASPAERQQQEEEAQEAGAAEGAGLQVEEAAGRAAAAVTWLLGEPVLWLGCRADELLSWKRPLRSLLGFVAANLLFWFLALTPWRVYHLISVMILGRVIMQIIKDMVLSRTRGAQLWRSLSERFSWAGCRLAKRLRREGDIGYKKRNVIPGASRGGGGQPGRGGLAPGKSWHRLCWEVINSKPDERPRLSHCIAESWMNFSIFLQEMSLFKQQSPGKFCLLVCSVCTFFTILGSYIPGVILSYLLLLCAFLCPLFKCNDIGQKIYSKIKSVLLKLDFGIGEYINQKKRERSEADKEKSHKDDSELDFSALCPKISLTVAAKELSVSDTDVSEVSWTDNGTFNLSEGYTPQTDTSDDLDRPSEEVFSRDLSDFPSLENGMGTNDEDELSLGLPTELKRKKEQLDSGHRPSKETQSAAGLTLPLNSDQTFHLMSNLAGDVITAAVTAAIKDQLEGVQQALSQAAPIPEEDTDTEEGDDFELLDQSELDQIESELGLTQDQEAEAQQNKKSSGFLSNLLGGH

SEQ ID NO: 90680 - protein, 90 aa, Homo sapiens
  MOD_RES (1)..(1): Any amino acid
XGSRLLRGVGGSHGRFGARGVREGGAAMAAGESMAQRMVWVDLEMTGLDIEKDQIIEMACLITDSDLNILAEEIQFMKIRSFLTNTCPSS

SEQ ID NO: 90681 - protein, 154 aa, Homo sapiens
MTEYKLVVVGAGGVGKSALTIQLIQNHFVDEYDPTIEDSYRKQVVIDGETCLLDILDTAGQEEYSAMRDQYMRTGEGFLCVFAINNTKSFEDIHQYREQIKRVKDSDDVPMVLVGNKCDLAARTVESRQAQDLARSYGIPYIETSAKTRQPLWL

SEQ ID NO: 90682 - protein, 213 aa, Homo sapiens
MQSPAVLVTSRRLQNAHTGLDLTVPQHQEVRGKMMSGHVEYQILVVTRLAAFKSAKHRPEDVVQFLVSKKYSEIEEFYQKLSSRYAAASLPPLPRKVLFVGESDIRERRAVFNEILRCVSKDAELAGSPELLEFLGTRSPGAAGLTSRDSSVLDGTDSQTGNDEEAFDFFEEQDQVAEEGPPVQSLKGEDAEESLEEEEALDPLGIMRLVSCC

SEQ ID NO: 90683 - protein, 73 aa, Homo sapiens
FCAFLGSWLVPFAYLTVLDLSKSLSAALLTAALLTFDLAYGSVITVKNLRMAIGYLHSHRHLYPEGIGARQQQ

SEQ ID NO: 90684 - protein, 169 aa, Homo sapiens
MDSVAFEDVAVSFTQEEWALLDPSQKNLYRDVMQETFKNLTSVGKTWKVQNIEDEYKNPRRNLSLMREKLCESKESHHCGESFNQIADDMLNRKTLPGITPCESSVCGEVGTGHSSLNTHIRADTGHKSSEYQEYGENPYRNKECKKAFSYLDSFQSHDKACTKEKPYD

SEQ ID NO: 90685 - protein, 192 aa, Homo sapiens
MSSAMLVTCLPDPSSSFREDAPRPPVPGEEGETPPCQPGVGKGQVTKPMPVSSNTRRNEDGLGEPEGRASPDSPLTRWTKSLHSLLGDQDGAYLFRTFLEREKCVDTLDFWFACNGFRQMNLKDTKTLRVAKAIYKRYIENNSIVSKQLKPATKTYIRDGIKKQQIDSIMFDQAQTEIQSVMEENAYQMFLT

SEQ ID NO: 90686 - protein, 216 aa, Homo sapiens
MSSFGYRTLTVALFTLICCPGSDEKVFEVHVRPKKLAVEPKGSLEVNCSTTCNQPEVGGLETSLDKILLDEQAQWKHYLVSNISHDTVLQCHFTCSGKQESMNSNVSVYQPPRQVILTLQPTLVAVGKSFTIECRVPTVEPLDSLTLFLFRGNETLHYETFGKAAPAPQEATATFNSTADREDGHRNFSCLAVLDLMSRGGNIFHKHSAPKMLEIY

SEQ ID NO: 90687 - protein, 782 aa, Homo sapiens
MVQHFKPQIFGDRKPVYDGKKNIYTVTALPIGNERVDFEVTIPGEGKDRIFKVSIKWLAIVSWRMLHEALVSGQIPVPLESVQALDVAMRHLASMRYTPVGRSFFSPPEGYYHPLGGGREVWFGFHQSVRPAMWKMMLNIDVSATAFYKAQPVIEFMCEVLDIRNIDEQPKPLTDSQRVRFTKEIKGLKVEVTHCGQMKRKYRVCNVTRRPASHQTFPLQLESGQTVECTVAQYFKQKYNLQLKYPHLPCLQVGQEQKHTYLPLEVCNIVAGQRCIKKLTDNQTSTMIKATARSAPDRQEEISRLMKNASYNLDPYIQEFGIKVKDDMTEVTGRVLPAPILQYGGRNRAIATPNQGVWDMRGKQFYNGIEIKVWAIACFAPQKQCREEVLKNFTDQLRKISKDAGMPIQGQPCFCKYAQGADSVEPMFRHLKNTYSGLQLIIVILPGKTPVYAEVKRVGDTLLGMATQCVQVKNVVKTSPQTLSNLCLKINVKLGGINNILVPHQRSAVFQQPVIFLGADVTHPPAGDGKKPSITAVVGSMDAHPSRYCATVRVQRPRQEIIEDLSYMVRELLIQFYKSTRFKPTRIIFYRDGVPEGQLPQILHYELLAIRDACIKLEKDYQPGITYIVVQKRHHTRLFCADKNERIGKSGNIPAGTTVDTNITHPFEFDFYLCSHAGIQGTSRPSHYYVLWDDNRFTADELQILTYQLCHTYVRCTRSVSIPAPAYYARLVAFRARYHLVDKEHDSGEGSHISGQSNGRDPQALAKAVQVHQDTLRTMYFA

SEQ ID NO: 90688 - protein, 194 aa, Homo sapiens
MPRREVCWEAAHFRQEEQSLPRPRVRALVRLACRMAGQPGHMPHGGSSNNLCHTLGPVHPPDPQRHPNTLSFRCSLADFQIEKKIGRGQFSEVYKATCLLDRKTVALKKVQIFEMMDAKARQDCVKEIGLLKQLNHPNIIKYLDSFIEDNELNIVLELADAGDLSQMIKYFKKQKRLIPERTVWKYFVQLCSAV

SEQ ID NO: 90689 - protein, 496 aa, Homo sapiens
MAMEIDSRPGGLPGSSCNLGAAREHMQAVTRNYITHPRVTYRTVCSVNGPLVVLDRVKFAQYAEIVHFTLPDGTQRSGQVLEVAGTKAIVQVFEGTSGIDARKTTCEFTGDILRTPVSEDMLGRVFNGSGKPIDKGPVVMAEDFLDINGQPINPHSRIYPEEMIQTGISPIDVMNSIARGQKIPIFSAAGLPHNEIAAQICRQAGLVKKSKAVLDYHDDNFAIVFAAMGVNMETARFFKSDFEQNGTMGNVCLFLNLANDPTIERIITPRLALTTAEFLAYQCEKHVLVILTDMSSYAEALREVSAAREEVPGRRGFPGYMYTDLATIYERAGRVEDITHPIPDLTGFITEGQIYVDRQLHNRQIYPPINVLPSLSRLMKSAIGEGMTRKDHGDVSNQLYACYAIGKDVQAMKAVVGEEALTSEDLLYLEFLQKFEKNFINQGPYENRSVFESLDLGWKLLRIFPKEMLKRIPQAVIDEFYSREGALQDLAPDTAL

SEQ ID NO: 90690 - protein, 85 aa, Homo sapiens
MARACLQAVKYLMFAFNLLFWLGGCGVLGVGIWLAATQGSFATLSSSFPSLSAANLLIITGAFVMAIGFVGCLGAIKENKCLLLT

SEQ ID NO: 90691 - protein, 37 aa, Homo sapiens
MYSSSCETTRNTTGIEESTDGMILGPEDLSYQIYDVS

SEQ ID NO: 90692 - protein, 31 aa, Homo sapiens
IWNLEGVQTAHFVLHSPGMSVCWHPEETFKI

SEQ ID NO: 90693 - protein, 78 aa, Homo sapiens
  MOD_RES (1)..(1): Any amino acid
XEQLINPFGEDDDDFETNFLIDRNFQVSMLAVDEMYDDLAVLEKDLYWDAAEARAPYTAATVFQLRQPSFQGSTFDIT

SEQ ID NO: 90694 - protein, 80 aa, Homo sapiens
MADGSGWQPPRPCEAYRAEWKLCRSARHFLHHYYVHGERPACEQWQRDLASCRDWEERRNAEAQVLSVVAHTCNLSYLGG

SEQ ID NO: 90695 - protein, 173 aa, Homo sapiens
  MOD_RES (1)..(1): Any amino acid
XPLRVRPPTWTQLSVRRICPSPASGLEDDASRRAWGPREAVRSLRAREEGSVDGVIKEVNVSPCPTQPCQLSKGQSYSVNVTFTSNIQSKSSKAVVHGILMGVPVPFPIPEPDGCKSGINCPIQKDKTYSYLNKLPVKSEYPSIKLVVEWQLQDDKNQSLFCWEIPVQIVSHL

SEQ ID NO: 90696 - protein, 8 aa, Homo sapiens
MATACKRS

SEQ ID NO: 90697 - protein, 681 aa, Homo sapiens
MGVDFDVKTFCHNLRATKPPYECPVETCRKVYKSYSGIEYHLYHYDHDNPPPPQQTPLRKHKKKGRQSRPANKQSPSPSEVSQSPGREVMSYAQAQRMVEVDLHGRVHRISIFDNLDVVSEDEEAPEEAPENGSNKENTETPAATPKSGKHKNKEKRKDSNHHHHHNVSASTTPKLPEVVYRELEQDTPDAPPRPTSYYRYIEKSAEELDEEVEYDMDEEDYIWLDIMNERRKTEGVSPIPQEIFEYLMDRLEKESYFESHNKGDPNALVDEDAVCCICNDGECQNSNVILFCDMCNLAVHQECYGVPYIPEGQWLCRRCLQSPSRAVDCALCPNKGGAFKQTDDGRWAHVVCALWIPEVCFANTVFLEPIDSIEHIPPARWKLTCYICKQRGSGACIQCHKANCYTAFHVTCAQQAGLYMKMEPVRETGANGTSFSVRKTAYCDIHTPPGSARRLPALSHSEGEEDEDEEEDEGKGWSSEKVKKAKAKSRIKMKKARKILAEKRAAAPVVSVPCIPPHRLSKITNRLTIQRKSQFMQRLHSYWTLKRQSRNGVPLLRRLQTHLQSQRNCDQVGRDSEDKNWALKEQLKSWQRLRHDLERARLLVELIRKREKLKRETIKVQQIAMEMQLTPFLILLRKTLEQLQEKDTGNIFSEPVPLSEGPEWEAVCTPSPEAGTESAK

SEQ ID NO: 90698 - protein, 439 aa, Homo sapiens
MTPQPAGPPDGGWGWVVAAAAFAINGLSYGLLRSLGLAFPDLAEHFDRSAQDTAWISALALAVQQAASPVGSALSTRWGARPVVMVGGVLASLGFVFSAFASDLLHLYLGLGLLAGFGWALVFAPALGTLSRYFSRRRVLAVGLALTGNGASSLLLAPALQLLLDTFGWRGALLLLGAITLHLTPCGALLLPLVLPGDPPAPPRSPLAALGLSLFTRRAFSIFALGTALVGGGYFVPYVHLAPHALDRGLGGYGAALVVAVAAMGDAGARLVCGWLADQGWVPLPRLLAVFGALTGLGLWVVGLSWGGPLLAAAVAYGLSAGSYAPLVFGVLPGLVGVGGVVQATGLVMMLMSLGGLLGPPLSGFLRDETGDFTASFLLSGSLILSGSFIYIGLPRALPSCGPASPPATPPPETGELLPAPQAVLLSPGGPGSTLDTTC

SEQ ID NO: 90699 - protein, 175 aa, Homo sapiens
MDRDLLRQSLNCHGSSLLSLLRSEQQDNPHFRSLLGSAAEPARGPPPQHPLQGRKEKRVDNIEIQKFISKKADLLFALSWKSDAPATSEINEDSEDHYAIMPPLEQFMEIPSMDRRELFFRDIERGDIVIGRISSIREFGFFMVLICLGSGIMRDIAHLEITVSYFCYLDCFCFC

SEQ ID NO: 90700 - protein, 475 aa, Homo sapiens
MSSMVVTANGNDSKKFKGEDKMDGAPSRVLHIRKLPGEVTETEVIALGLPFGKVTNILMLKGKNQAFLELATEEAAITMVNYYSAVTPHLRNQPIYIQYSNHKELKTDNTLNQRAQAVLQAVTAVQTANTPLSGTTVSESAVTPAQSPVLRIIIDNMYYPVTLDVLHQIFSKFGAVLKIITFTKNNQFQALLQYGDPVNAQQAKLALDGQNIYNACCTLRIDFSKLVNLNVKYNNDKSRDYTRPDLPSGDGQPALDPAIAAAFAKETSLLAVPGALSPLAIPNAAAAAAAAAAGRVGMPGVSAGGNTVLLVSNLNEEMVTPQSLFTLFGVYGDVQRVKILYNKKDSALIQMADGNQSQLAMNHLNGQKMYGKIIRVTLSKHQTVQLPREGLDDQGLTKDFGNSPLHRFKKPGSKNFQNIFPPSATLHLSNIPRDHKMALLQMATVEEAIQALIDLHNYNLGENHHLRVSFSKSTI

SEQ ID NO: 90701 - protein, 169 aa, Homo sapiens
  MOD_RES (1)..(1): Any amino acid
XWRSALRGLRCGPRAPGPSLLVRHGSGGPSWTRERTLVAVKPDGVQRRLVGDVIQRFERRGFTLVGMKMLQAPESVLAEHYQDLRRKPFYPALIRYMSSGPVVAMVWEGYNVVRASRAMIGHTDSAEAAPGTIRGDFSVHISSHRLAPLDRGQREQQMVPGIPQGAHEA

SEQ ID NO: 90702 - protein, 264 aa, Homo sapiens
MAAPRVFPLSCAVQQYAWGKMGSNSEVARLLASSDPLAQIAEDKPYAELWMGTHPRGDAKILDNRISQKTLSQWIAENQDSLGSKVKDTFNGNLPFLFKVLSVETPLSIQAHPNKELAEKLHLQAPQHYPDANHKPEMAIALTPFQGLCGFRPVEEIVTFLKKVPEFQFLIGDEAATHLKQTMSHDSQAVASSLQSCFSHLMKSEKKVVVEQLNLLVKRISQQGGHSYIPGWVQCSGLGFPADTRLWGQFSTPLPKWNTKRGPT

SEQ ID NO: 90703 - protein, 42 aa, Homo sapiens
  MOD_RES (1)..(1): Any amino acid
XNSLNELVDYHRSTSVSRNQQIFLRDIEQVPQIGPWLSSCVP

SEQ ID NO: 90704 - protein, 242 aa, Homo sapiens
MKSCGSMLGLWGQRLPAAWVLLLLPFLPLLLLAAPAPHRESYKPVIVVHGLFDSSYSFRHLLEYINETHPGTVVTVLDLFDGRESLRPLWEQVQGFREAVVPIMAKAPQGVHLICYSQGGLVCRALLSVMDDHNVDSFISLSSPQMGQYGDTDYLKWLFPTSMRSNLYRICYSPWGQEFSICNYWHDPHHDDLYLNASSFLALINGERDHPNATVWRKNFLRVGHLVLIGGPDDGVITPWQS

SEQ ID NO: 90705 - protein, 137 aa, Homo sapiens
MQPSGLEGPGTFGRWPLLSLLLLLLLLQPVTCAYTTPGPPRALTTLGAPRAHTMPGTYAPSTTLSSPSTQGLQEQARALMRDFPLVDGHNDLPLVLRQVYQKGLQDVNLRNFSYGQTSLDRLRDGLVGAQFWSAYVP

SEQ ID NO: 90706 - protein, 241 aa, Homo sapiens
MTRHGKNCTAGAVYTYHEKKKDTAASGYGTQNIRLSRDAVKDFDCCCLSLQPCHDPVVTPDGYLYEREAILEYILHQKKEIARQMKAYEKQRGTRREEQKELQRAASQDHVRGFLEKESAIVSRPLNPFTAKALSGTSPDDVQPGPSVGPPSKDKDKVLPSFWIPSLTPEAKATKLEKPSRTVTCPMSGKPLRMSDLTPVHFTPLDSSVDRVGLITRSERYVCAVTRDSLSNATPCAVLRP

SEQ ID NO: 90707 - protein, 49 aa, Homo sapiens
MKEDCLPSSHVPISDSKSIQKSELLGLLKTYNCYHEGKSFQLRHREEAQ

SEQ ID NO: 90708 - protein, 159 aa, Homo sapiens
MWKLLPAAGPAGGEPYRLLTGVEYVVGRKNCAILIENDQSISRNHAVLTANFSVTNLSQTDEIPVLTLKDNSKYGTFVNEEKMQNGFSRTLKSGDGITFGVFGSKFSFYPPLDEPSIGSKNVDLSGRQERKQIFKGKTFIFLNAKQHKKLSSAVVFGGG

SEQ ID NO: 90709 - protein, 608 aa, Homo sapiens
MKQIFFLDDSGPPFGHMVLALGGYLGGFDGNFLWNRIGAEYSSNVPVWSLRLLPALAGALSVPMAYQIVLELHFSHCAAMGAALLMLIENALITQSRLMLLESVLIFFNLLAVLSYLKFFNCQKHSPFSLSWWFWLTLTGVACSCAVGIKYMGVFTYVLVLGVAAVHAWHLLGDQTLSNVCVFCHLLARAVALLVIPVVLYLLFFYVHLILVFRSGPHDQIMSSAFQASLEGGLARITQGQPLEVAFGSQVTLRNVFGKPVPCWLHSHQDTYPMMHDVAAPLSPHSQEVSCYIDYNISMPAQNLWRLEIVNRGSDTDVWKTILSEVRFVHVNTSAVLKLSGAHLPDWGYRQLEIVGEKLSRGYHGSTVWNVEEHRYGASQEQRERERELHSPAQVDVSRNLSFMARFSELQWRMLALRSDDSEHKYSSSPLEWVTLDTNIAYWLHPRTSAQIHLLGNIVIWVSGSLALAIYALLSLWYLLRRRRNVHDLPQDAWLRWVLAGALCAGGWAVNYLPFFLMEKTLFLYHYLPALTFQILLLPVVLQHISDHLCRSQLQRSIFSALVVAWYSSACHVSNTLRPLTYGDKSLSPHELKALRWKDSWDILIRKH

SEQ ID NO: 90710 - protein, 297 aa, Homo sapiens
  MOD_RES (1)..(1): Any amino acid
XVYNGRLKVQRLCSEMEELAEHGIFLPPNMQGLTDDQIEELKLKDEWGEKCVPSGGAVFKKDDIGRRNGQAPNEKMKQVLKKTIEEAKAIISKKQVEAGVCVTMEMVKDALDQLRGAVMIVYPMGLPPYDPIRMEFENKEDLSGTQAGLNVIKEAEAQLWWAAKELRRTKKLSDYVGKNEKTKIIAKIQQRGQGAPAREPIISSEEQKQLMLYYHRRQEELKPLQQQIIRLHQELGRQKSLWADVHGKLRSHIDALREQNMELREKLRALQLQRWKARKKSAASPHAGQESHTLALE

SEQ ID NO: 90711 - protein, 111 aa, Homo sapiens
SGQERGQRGCEHYDRGCLLKVTPSMDSSLTSFRQAPCCDKLYTCRLCHDNNEDHQLDRFKVKEVQCINCEKIQHAQQTCEECSTLFGEYYCDICHLFDKDKKQYHCENCGI

SEQ ID NO: 90712 - protein, 72 aa, Homo sapiens
MRYACSSSEDWPPPLDISSDGDVDATVLRELYPDSPPGQGLTQSPTLECNGMNIAHCSLELLGSSDPPTSAS

SEQ ID NO: 90713 - protein, 67 aa, Homo sapiens
MASVVLPSGSQCAAAAAAAAPPGLRLRLLLLLFSAAALIPTGLTSSPRLECGGTISAHCSLGLPVLR

SEQ ID NO: 90714 - protein, 115 aa, Homo sapiens
MAFKQMEQISQFLKAAETYGVRTTDIFQTVDLWEGKDMAAVQRTLMALGSVAVTKDDGCYRGEPSWFHRKAQQNRRGFSEEQLRQGQNVIGLQMGSNKGASQAGMTGYGMPRQIM

SEQ ID NO: 90715 - protein, 53 aa, Homo sapiens
MQESQETHISNHLDEVVAAVSITHRKKFQNKLLQTALFQPPREKLHLCEEKAK

SEQ ID NO: 90716 - protein, 50 aa, Homo sapiens
MKLKKQVTVCGAAIFCVAVFSLYLMLDRVQHDPTRHQNGGNFPRSQISVL

SEQ ID NO: 90717 - protein, 178 aa, Homo sapiens
MAKRNAEKELTDRNWDQEDEAEEVGTFSMASEEVLKNRAIKKAKRRNVGFESDTGGAFKGFKGLVVPSGGGRFSGFGSGAGGKPLEGLSNGNNITSAPPFASAKAAADPKVAFGGDEEENDEPPKVVVTEVKEEDAFYSKKCKLFYKKDNEFKEKGIGTLHLKPTANQKTQLLVRADT

SEQ ID NO: 90718 - protein, 122 aa, Homo sapiens
MAGGKAGKDSGKAKAKAVSRSQRAGLQFPVGRIHRHLKTRTTSHGRVGATAAVYSAAILEYLTAEVLELAGNASKDLKVKRITPRHLQLAIRGDEELDSLIKATIAGGGMYYYLSLDSYWSF

SEQ ID NO: 90719 - protein, 73 aa, Homo sapiens
MLKTESSGERTTLRSASPHRNAYRTEFQALKSTFDKPKSDGEQKTKEGEGSQQSRGRKYGSNVNRIKNLFMQM

SEQ ID NO: 90720 - protein, 858 aa, Homo sapiens
AGKTMAIAAQGACRSLTIYRCEFADQGVYVCDAHDAQSSASVKVQGRNIQIVRPLEDVEVMEKDGATFSCEVSHDEVPGQWFWEGSKLRPTDNVRIRQEGRTYTLIYRRVLAEDAGEIQFVAENAESRAQLRVKELPVTLVRPLRDKIAMEKHRGVLECQVSRASAQVRWFKGSQELQPGPKYELVSDGLYRKLIISDVHAEDEDTYTCDAGDVKTSAQFFVEEQSITIVRGLQDVTVMEPAPAWFECETSIPSVRPPKWLLGKTVLQAGGNVGLEQEGTVHRLMLRRTCSTMTGPVHFTVGKSRSSARLVVSDIPVVLTRPLEPKTGRELQSVVLSCDFRPAPKAVQWYKDDTPLSPSEKFKMSLEGQMAELRILRLMPADAGVYRCQAGSAHSSTEVTVEAREVTVTGPLQDAEATEEGWASFSCELSHEDEEVEWSLNGMPLYNDSFHEISHKGRRHTLVLKSIQRADAGIVRASSLKVSTSARLEVRVKPVVFLKALDDLSAEERGTLALQCEVSDPEAHVVWRKDGVQLGPSDKYDFLHTAGTRGLVVHDVSPEDAGLYTCHVGSEETRARVRVHDLHVGITKRLKTMEVLEGESCSFECVLSHESASDPAMWTVGGKTVGSSSRFQATRQGRKYILVVREAAPSDAGEVVFSVRGLTSKASLIVRERPAAIIKPLEDQWVAPGEDVELRCELSRAGTPVHWLKDRKAIRKSQKYDVVCEGTMAMLVIRGASLKDAGEYTCEVEASKSTASLHVEEKANCFTEELTNLQVEEKGTAVFTCKTEHPAATVTWRKGLLELRASGKHQPSQEGLTLRLTISALEKADSDTYTCDIGQAQSRAQLLVQGEAAKCARA

SEQ ID NO: 90721 - protein, 75 aa, Homo sapiens
MSKSEDSQRPGAHLTVKKIFVGGIKEDTEEHHLRDYFEQYGKIEVIEIMTDRGSGKKRGFAFVTFDDHDSVDKIV

SEQ ID NO: 90722 - protein, 156 aa, Homo sapiens
MSSLPGCIGLDAATATVESEEIAELQQAVVEELGISMEELRHFIDEELEKMDCVQQRKKQLAELETWVIQKESEVAHVDQLFDDASRAVTNCESLVKDFYSKLGLQYRDSSSEDESSRPTEIIEIPDEDDDVLSIDSGDAGSRTPKDQKLREAMAA

SEQ ID NO: 90723 - protein, 982 aa, Homo sapiens
MEEGGEGLRASLEFDGEALPCHPQEQQGVQPLTGCHSGLDSVTEGPKDVREAPSQSHLKEQSLQPIDSLISALKATEARIISGTLQATKVLDQDAVSSFSVQQVEKELDTASRKTQRVNKTLPAGQKNLPEIPLSAEVTTEESFYLSIQKDLTALLTGDTQAEISQIMNNGRKGAVCVQEPSCPLASLGSSAVTCHSAGSVGFLKEQRSALGREHPGGCDRSSSMGRPGRVKHVEFQGVEILWTGGDKRETQHPIDFETSLQRTASPDSKESSKVPRHLISSAGLCNSSSLTENVWDESWKAPSERPGTSSGTFSPVRLDESGEDEVFLQENKQHLEKTPKPERDRERISEQEEHVKGEDEDILGPGYTEDSTDVYSSQFETILDNTSLYYSAESLETLYSEPDSYFSFEMPLTPMIQQRIKEGGQFLERTSGGGHQDILSVSADGGIVMGYSSGVTNGLNDASDSIYTKGTPEIAFWGSNAGVKTTRLEAHSEMGSTEILEKETPENLSNGTSSNVEAAKRLAKRLYQLDRFKRSDVAKHLGKNNEFSKLVAEEYLKFFDFTGMTLDQSLRYFFKAFSLVGETQERERVLIHFSNRYFYCNPDTIASQDGVHCLTCAIMLLNTDLHGHNIGKKMTCQEFIANLQGVNEGVDFSKDLLKALYNSIKNEKLEWAVDDEEKKKSPSESTEEKANGTHPKTISRIGSTTNPFLDIPHDPNAAVYKSGFLARKIHADMDGKKTPRGKRGWKTFYAVLKGTVLYLQKDEYKPEKALSEEDLKNAVSVHHALASKATDYEKKPNVFKLKTADWRVLLFQTQSPEEMQGWINKINCVAAVFSAPPFPAAIGSQKKFSRPLLPATTTKLSQEEQLKSHESKLKQITTELAEHRSYPPDKKVKAKDVDEYKLKDHYLEFEKTRYEMYVSILKEGGKELLSNDESEAAGLKKSHSSPSLNPDTSPITAKVKRNVSERKDHRPETPSIKQKVT

SEQ ID NO: 90724 - protein, 279 aa, Homo sapiens
MVALCSLQHLGSSDPRALPTLPTATSGQRPAKRRRKSPAMAALTRDPQFQKLQQWYREHRSELNLRRLFDANKDRFNHFSLTLNTNHGHILVDYSKNLVTEDVMRMLVDLAKSRGVEAARERMFNGEKINYTEGRAVLHVALRNRSNTPILVDGKDVMPEVNKVLDKMKSFCQGPLMVTEALKPYSSGGPRVWYVSNIDGTHIAKTLAQLNPESSLFIIASKTFTTQETITNAETAKEWFLQAAKDPSAVAKHFVALSTNTTKVKEFGIDPQNMFEFWD

SEQ ID NO: 90725 - protein, 36 aa, Homo sapiens
MRDAGDPSPPNKMLRRSDSPENKYSDSTGHSKAKNV

SEQ ID NO: 90726 - protein, 120 aa, Homo sapiens
MAEAITYADLRFVKAPLKKSISSRLGQDPGADDDGEITYENVQVPAVLGVPSSLASSVLGDKAAVKSEQPTASWRAVTSPAVGRILPCECACAGQPRGQVLAPVPAADGAGPRGVQLLPG

SEQ ID NO: 90727 - protein, 137 aa, Homo sapiens
MYLDNSSIEEASGVYPIDDDDYASASGSGADEDVESPELTTSRPLPKILLTSAAPKVETTTLNIQNKIPAQTKSPEETDKEKVHLSDSERKMDPAEEDTNVYTEKHSDSLFKRTEVLAAVIAGGVIGFLFAIFLILL

SEQ ID NO: 90728 - protein, 177 aa, Homo sapiens
KLLREEKDELGEQVLGLKSQVDAQLLTVQKLEEKERALQGSLGGVEKELTLRSQALELNKRKAVEAAQLAEDLKVQLEHVQTRLREIQPCLAESRAAREKESFNLKRAQEDISRLRRKLEKQRKVEVYADADEILQEEIKEYKGYGRMRCSLQCGGLGLDSSCCQLGVWALSELFPS

SEQ ID NO: 90729 - protein, 160 aa, Homo sapiens
MADSETFISLEECRGHKRARKRTSMETALALEKLFPKQCQVLGIVTPGIVVTPMGSGSNRPQEIEIGESGFALLFPQIEGIKIQPFHFIKDPKNLTLERHQLTEVGLLDNPELRVVLVFGYNCCKVGASNYLQQVVSTFSDMNIILAGGQVDNLSSLTSE

SEQ ID NO: 90730 - protein, 171 aa, Homo sapiens
MSTAAVPELKQISRVEAMRLGPGWSHSCHAMLYAANPGQLFGRIPMRFSVLMQMRFDGLLGFPGGFVDRRFWSLEDGLNRVLGLGLGCLRLTEADYLSSHLTEGPHRVVAHLYARQLTLEQLHAVEISAVHSRDHGLEVLNMMPEEKLVEALAAATEKQKKALEKLLPASS

SEQ ID NO: 90731 - protein, 277 aa, Homo sapiens
AFDDFIFAFFAVEMVVKMVALGIFGKKCYLGDTWNRLDFFIVIAGMLEYSLDLQNVSFSAVRTVRVLRPLRAINRVPSMRILVTLLLDTLPMLGNVLLLCFFVFFIFGIVGVQLWAGLLRNRCFLPENFSLPLSVDLERYYQTENEDESPFICSQPRENGMRSCRSVPTLRGDGGGGPPCGLDYEAYNSSSNTTCVNWNQYYTNCSAGEHNPFKGAINFDNIGYAWIAIFQVITLEGWVDIMYFVMDAHSFYNFIYFILLIIFLALRTSPVERASII

SEQ ID NO: 90732 - protein, 839 aa, Homo sapiens
MPVRKQDTQRALHLLEEYRSKLSQTEDRQLRSSIERVINIFQSNLFQALIDIQEFYEVTLLDNPKCIDRSKPSEPIQPVNTWEISSLPSSTVTSETLPSSLSPSVEKYRYQDEDTPPQEHISPQITNEVIGPELVHVSEKNLSEIENVHGFVSHSHISPIKVNGTDADYEYEEITLERGNSGLGFSIAGGTDNPHIGDDSSIFITKIITGGAAAQDGRLRVNDCILRVNEVDVRDVTHSKAVEALKEAGSIVRLYVKRRKPVSEKIMEIKLIKGPKGLGFSIAGGVGNQHIPGDNSIYVTKIIEGGAAHKDGKLQIGDKLLAVNNVCLEEVTHEEAVTALKNTSDFVYLKVAKPTSMYMNDGYAPPDITNSSSQPVDNHVSPSSFLGQTPASPARYSPVSKAVLGDDEITREPRKVVLHRGSTGLGFNIVGGEDGEGIFISFILAGGPADLSGELRKGDRIISVNSVDLRAASHEQAAAALKNAGQAVTIVAQYRPEEYSRFEAKIHDLREQMMNSSISSGSGSLRTSQKRSLYVRALFDYDKTKDSGLPSQGLNFKFGDILHVINASDDEWWQARQVTPDGESDEVGVIPSKRRVEKKERARLKTVKFNSKTRDKGEIPDDMGSKGLSGQEEYVLSYEPVNQQEVNYTRPVIILGPMKDRINDDLISEFPDKFGSCVPHTTRPKRDYEVDGRDYHFVTSREQMEKDIQEHKFIEAGQYNNHLYGTSVQSVREVAEKGKHCILDVSGNAIKRLQIAQLYPISIFIKPKSMENIMEMNKRLTEEQARKTFERAMKLEQEFTEHFTAIVQGDTLEDIYNQVKQIIEEQSGSYIWVPAKEKL

SEQ ID NO: 90733 - protein, 161 aa, Homo sapiens
MSYTGFVQGSETTLQSTYSDTSAQPTCDYDTLVSVFVSVSVCLPSACPHHLSVSVSLTAGYEGYGYGYGYGQDNTTNYGYGMATSHSWEMPSSDTNANTSASGSASADSVLSRINQRLDMVPHLETDMMQGGVYGSGGERYDSYESCDSRAVLSERDLYRS

SEQ ID NO: 90734 - protein, 2222 aa, Homo sapiens
MTAAANWVANGASLEDCHSNLFSLAELTGIKWRRYNFGGHGDCGPIISAPAQDDPILLSFIRCLQANLLCVWRRDVKPDCKELWIFWWGDEPNLVGVIHHELQVVEEGLWENGLSYECRTLLFKAIHNLLERCLMDKNFVRIGKWFVRPYEKDEKPVNKSEHLSCAFTFFLHGESNVCTSVEIAQHQPIYLINEEHIHMAQSSPAPFQVLVSPYGLNGTLTGQAYKMSDPATRKLIEEWQYFYPMVLKKKEESKEEDELGYDDDFPVAVEVIVGGVRMVYPSAFVLISQNDIPVPQSVASAGGHIAVGQQGLGSVKDPSNCGMPLTPPTSPEQAILGESGGMQSAASHLVSQDGGMITMHSPKRSGKIPPKLHNHMVHRVWKECILNRTQSKRSQMSTPTLEEEPASNPATWDFVDPTQRVSCSCSRHKLLKRCAVGPNRPPTVSQPGFSAGPSSSSSLPPPASSKHKTAERQEKGDKLQKRPLIPFHHRPSVAEELCMEQDTPGQKLGLAGIDSSLEVSSSRKYDKQMAVPSRNTSKQMNLNPMDSPHSPISPLPPTLSPQPRGQETESLDPPSVPVNPALYGNGLELQQLSTLDDRTVLVGQRLPLMAEVSETALYCGIRPSNPESSEKWWHSYRLPPSDDAEFRPPELQGERCDAKMEVNSESTALQRLLAQPNKRFKIWQDKQPQLQPLHFLDPLPLSQQPGDSLGEVNDPYTFEDGDIKYIFTANKKCKQGTEKDSLKKNKSEDGFGTKDVTTPGHSTPVPDGKNAMSIFSSATKTDVRQDNAAGRAGSSSLTQVTDLAPSLHDLDNIFDNSDDDELGAVSPALRSSKMPAVGTEDRPLGKDGRAAVPYPPTVADLQRMFPTPPSLEQHPAFSPVMNYKDGISSETVTALGMMESPMVSMVSTQLTEFKMEVEDGLGSPKPEEIKDFSYVHKVPSFQPFVGSSMFAPLKMLPSHCLLPLKIPDACLFRPSWAIPPKIEQLPMPPAATFIRDGYNNVPSVGSLADPDYLNTPQMNTPVTLNSAAPASNSGAGVLPSPATPRFSVPTPRTPRTPRTPRGGGTASGQGSVKYDSTDQGSPASTPSTTRPLNSVEPATMQPIPEAHSLYVTLILSDSVMNIFKDRNFDSCCICACNMNIKGADVGLYIPDSSNEDQYRCTCGFSAIMNRKLGYNSGLFLEDELDIFGKNSDIGQAAERRLMMCQSTFLPQVEGTKKPQEPPISLLLLLQNQHTQPFASLNFLDYISSNNRQTLPCVSWSYDRVQADNNDYWTECFNALEQGRQYVDNPTGGKVDEALVRSATVHSWPHSNVLDISMLSSQDVVRMLLSLQPFLQDAIQKKRTGRTWENIQHVQGPLTWQQFHKMAGRGTYGSEESPEPLPIPTLLVGYDKDFLTISPFSLPFWERLLLDPYGGHRDVAYIVVCPENEALLEGAKTFFRDLSAVYEMCRLGQHKPICKVLRDGIMRVGKTVAQKLTDELVSEWFNQPWSGEENDNHSRLKLYAQVCRHHLAPYLATLQLDSSLLIPPKYQTPPAAAQGQATPGNAGPLAPNGSAAPPAGSAFNPTSNSSSTNPAASSSASGSSVPPVSSSASAPGISQISTTSSSGFSGSVGGQNPSTGGISADRTQGNIGCGGDTDPGQSSSQPSQDGQESVTERERIGIPTEPDSADSHAHPPAVVIYMVDPFTYAAEEDSTSGNFWLLSLMRCYTEMLDNLPEHMRNSFILQIVPCQYMLQTMKDEQVFYIQYLKSMAFSVYCQCRRPLPTQIHIKSLTGFGPAASIEMTLKNPERPSPIQLYSPPFILAPIKDKQTELGETFGEASQKYNVLFVGYCLSHDQRWLLASCTDLHGELLETCVVNIALPNRDPFPFPISLFVRSRRSKVSARKIGLQKLWEWCIGIVQMTSLPWRVVIGRLGRLGHGELKDWSILLGECSLQTISKKLKDVCRMCGISAADSPSILSACLVAMEPQGSFVVMPDAVTMGSVFGRSTALNMQSSQLNTPQDASCTHILVFPTSSTIQVAPANYPNEDGFSPNNDDMFVDLPFPDDMDNDIGILMTGNLHSSPNSSPVPSPGSPSGIGVGSHFQHSRSQGERLLSREAPEELKQQPLALGYFVSTAKAENLPQWFWSSCPQAQNQCPLFLKASLHHHISVAQTDELLPARNSQRVPHPLDSKTTSDVLRFVLEQYNALSWLTCNPATQDRTSCLPVHFVVLTQLYNAIMNIL

SEQ ID NO: 90735 - protein, 84 aa, Homo sapiens
MLGTDRCVVEEWLSEFKALPDTQITSYAATLHRKKTLVPALYKVIQDSNNEIQPPRVPLLCTGVSLKKFSSWSLSAISCLSSIV

SEQ ID NO: 90736 - protein, 134 aa, Homo sapiens
MAADEGSAEKQAGEAHMAADGETNGSCENSDASSHANAAKHTQDSARVNPQDGTNTLTRIAENGVSERDSEAAKQNHVTADDFVQTSVIGSNGYILNKPALQAQPLRTTSTLASSLPGHAAKTLPGGAGKGRTP

SEQ ID NO: 90737 - protein, 58 aa, Homo sapiens
MEKLYSENEGMASNQGKMENEEQPQDERKPEVTCTLEDKKLENEGKTENKGKTGDEEM

SEQ ID NO: 90738 - protein, 169 aa, Homo sapiens
  MOD_RES (1)..(1): Any amino acid
XSPQPQPGSSDQESEEQQQFRNIFKQIAGDDMEICADELKKVLNTVVNKHKDLKTHGFTLESCRSMIALMDTDGSGKLNLQEFHHLWNKIKAWQMRNAVNDAGFHLNNQLYDIITMRYADKHMNIDFDSFICCFVRLEGMFRAFHAFDKDGDGIIKLNVLEWLQLTMYA

SEQ ID NO: 90739 - protein, 909 aa, Homo sapiens
MVMPRFYPDRPHQKSVGFFLQCNAESDSTSWSCHAQAVLKIINYRDDEKSFSRRISHLFFHKENDWGFSNFMAWSEVTDPEKGFIDDDKVTFEVFVQADAPHGVAWDSKKHTGYVGLKNQGATCYMNSLLQTLFFTNQLRKAVYMMPTEGDDSSKSVPLALQRVFYELQHSDKPVGTKKLTKSFGWETLDSFMQHDVQELCRVLLDNVENKMKGTCVEGTIPKLFRGKMVSYIQCKEVDYRSDRREDYYDIQLSIKGKKNIFESFVDYVAVEQLDGDNKYDAGEHGLQEAEKGVKFLTLPPVLHLQLMRFMYDPQTDQNIKINDRFEFPEQLPLDEFLQKTDPKDPANYILHAVLVHSGDNHGGHYVVYLNPKGDGKWCKFDDDVVSRCTKEEAIEHNYGGHDDDLSVRHCTNAYMLVYIRESKLSEVLQAVTDHDIPQQLVERLQEEKRIEAQKRKERQEAHLYMQVQIVAEDQFCGHQGNDMYDEEKVKYTVFKVLKNSSLAEFVQSLSQTMGFPQDQIRLWPMQARSNGTKRPAMLDNEADGNKTMIELSDNENPWTIFLETVDPELAASGATLPKFDKDHDVMLFLKMYDPKTRSLNYCGHIYTPISCKIRDLLPVMCDRAGFIQDTSLILYEEVKPNLTERIQDYDVSLDKALDELMDGDIIVFQKDDPENDNSELPTAKEYFRDLYHRVDVIFCDKTIPNDPGFVVTLSNRMNYFQVAKTVAQRLNTDPMLLQFFKSQGYRDGPGNPLRHNYEGTLRDLLQFFKPRQPKKLYYQQLKMKITDFENRRSFKCIWLNSQFREEEITLYPDKHGCVRDLLEECKKAVELGEKASGKLRLLEIVSYKIIGVHQEDELLECLSPATSRTFRIEEIPLDQVDIDKENEMLVTVAHFHKEVFGTFGIPFL

SEQ ID NO: 90740 - protein, 409 aa, Homo sapiens
MTTSSIRRQMKNIVNNYSEAEIKVREATSNDPWGPSSSLMTEIADLTYNVVAFSEIMSMVWKRLNDHGKNWRHVYKALTLLDYLIKTGSERVAQQCRENIFAIQTLKDFQYIDRDGKDQGINVREKSKQLVALLKDEERLKAERAQALKTKERMAQVATGMGSNQITFGRGSSQPNLSTSHSEQEYGKAGGSPASYHGSTSPRVSSELEQARPQTSGEEELQLQLALAMSREVAEQEERLRRGDDLRLQMALEESRRDTVKIPKKKEHGSLPQQTTLLDLMDALPSSGPAAQKAEPWGPSASTNQTNPWGGPAAPASTSDPWPSFGTKPAASIDPWGVPTGATVQSVPKNSDPWAASQQPASSAGKRASDAWGAVSTTKPVSVSGSFELFSNLNGTIKDDFSEFDNLRT

SEQ ID NO: 90741 - protein, 77 aa, Homo sapiens
MLQSIIKNIWIPMKPYYTKVYQEIWIGMGLMGFIVYKIRAADKRSKALKGKIFASENGWEWKTASCLFRTRYIVVLN

SEQ ID NO: 90742 - protein, 231 aa, Homo sapiens
MAARVLIIGSGGREHTLAWKLAQSHHVKQVLVAPGNAGTACSEKISNTAISISDHTALAQFCKEKKIEFVVVGPEAPLAAGIVGNLRSAGVQCFGPTAEAAQLESSKRFAKEFMDRHGIPTAQWKAFTKPEEACSFILSADFPALVVKASGLAAGKGVIVAKSKEEACKAVQEIMQEKAFGAAGETIVIEELLDGEEVSCLCFTDGKTVAPMPPAQDHKRLLEGDGGPNTG

SEQ ID NO: 90743 - protein, 148 aa, Homo sapiens
MHSMISSVDVKSEVPVGLEPISPLDLRTDLRMMMPVVDPVVREKQLQQELLLIQQQQQIQKQLLIAEFQKQHENLTRQHQAQLQEHIKLQQELLAIKQQQELLEKEQKLEQQRQEQEVERHRREQQLPPLRGKDRGRERAVASTEVKQ

SEQ ID NO: 90744 - protein, 558 aa, Homo sapiens
MAEAATGFLEQLKSCIVWSWTYLWTVWFFIVLFLVYILRVPLKINDNLSTVSMFLNTLTPKFYVALTGTSSLISGLILIFEWWYFRKYGTSFIEQVSVSHLRPLLGGVDNNSSNNSNSSNGDSDSNRQSVSECKVWRNPLNLFRGAEYNRYTWVTGREPLTYYDMNLSAQDHQTFFTCDSDHLRPADAIMQKAWRERNPQARISAAHEALEINECATAYILLAEEEATTIAEAEKLFKQALKAGDGCYRRSQQLQHHGSQYEAQHRRDTNVLVYIKRRLAMCARRLGRTREAVKMMRDLMKEFPLLSMFNIHENLLEALLELQAYADVQAVLAKYDDISLPKSATICYTAALLKARAVSDKFSPEAASRRGLSTAEMNAVEAIHRAVEFNPHVPKYLLEMKSLILPPEHILKRGDSEAIAYAFFHLAHWKRVEGALNLLHCTWEGIPQHFVCPLKLCHGESGEHPPIQSVAPANTDLREALSSTHLTRRCHHLLCANSLWTARKHDFEKGKPFRDFKMFMDYSILKAVFVVQNSLMFSSILFCLQKRRKSKIKLLCIT

SEQ ID NO: 90745 - protein, 161 aa, Homo sapiens
MADIDNKEQSELDQDLDDVEEVEEEETGEETKLKARQLTVQMMQNPQILAALQERLDGLVETPTGYIERVSFCQPGWSAVVVQSCSIQPRHPRLSLPRVVKRRVNALKNLQVKCAQIEAKFYEEVHDLERKYAVLYQPLFDKRFEIINAIYEPTEEECEWK

SEQ ID NO: 90746 - protein, 218 aa, Homo sapiens
MRGYLVAIFLSAVFLYYVLHCILWGTNVYWVAPVEMKRRNKIQPCLSKPAFASLLRFHQFHPFLCAADFRKIASLYGSDKFDLPYGMRTSAEYFRLALSKLQSCDLFDEFDKMNNGPVLGHEEEVGRRTTFRLFYPESVFSDPIHNDPNTTVILTAFKPHDLRWLLELLMGDKINTNGFWKKPALNLIYKPYQIRILDPFIIRTAAYELLHFPKVFPK

SEQ ID NO: 90747 - protein, 106 aa, Homo sapiens
RSPNIDQLASHSLLFQNAFAQQAVCAPSRVSFLTGRRPDTTRLYDFNSYWRVHAGNFSTIPQYFKENGYVTMSVGKVFHPALVGTHFSAESLFSRPFSVSIGPASR

SEQ ID NO: 90748 - protein, 118 aa, Homo sapiens
MIFGILASNNDVKKLLRELDVMNSVIAQLAPEEEVVIHEFASLCLANMSAEYTSKVQIFEHGGLEPLIRLLSSPDPDVKKNSMECIYNLVQDFQCRAKLQELNAIPPILDLLKSEYPV

SEQ ID NO: 90749 - protein, 126 aa, Homo sapiens
MQREVAANSQNGEEIVPALTLRFLITQLEAALRNIQAGNYTAHQINIGYYLTLLFLYGVALTERGKKEDYTEAENKFLVMKMMIQENEICENFMSLVYFGRGLLRCAQKRYNGGLLEFHKSLQEIG

SEQ ID NO: 90750 - protein, 10 aa, Homo sapiens
MGWLCSGLLF

SEQ ID NO: 90751 - protein, 2069 aa, Homo sapiens
MDNFFTEGTRVWLRENGQHFPSTVNSCAEGIVVFRTDYGQVFTYKQSTITHQKVTAMHPTNEEGVDDMASLTELHGGSIMYNLFQRYKRNQIYTYIGSILASVNPYQPIAGLYEPATMEQYSRRHLGELPPHIFAIANECYRCLWKRHDNQCILISGESGAGKTESTKLILKFLSVISQQSLELSLKEKTSCVERAILESSPIMEAFGNAKTVYNNNSSRFGKFVQLNICQKGNIQGGRIVDYLLEKNRVVRQNPGERNYHIFYALLAGLEHEEREEFYLSTPENYHYLNQSGCVEDKTISDQESFREVITAMDVMQFSKEEVREVSRLLAGILHLGNIEFITAGGAQVSFKTALGRSAELLGLDPTQLTDALTQRSMFLRGEEILTPLNVQQAVDSRDSLAMALYACCFEWVIKKINSRIKGNEDFKSIGILDIFGFENFEVNHFEQFNINYANEKLQEYFNKHIFSLEQLEYSREGLVWEDIDWIDNGECLDLIEKKLGLLALINEESHFPQATDSTLLEKLHSQHANNHFYVKPRVAVNNFGVKHYAGEVQYDVRGILEKNRDTFRDDLLNLLRESRFDFIYDLFEHVSSRNNQDTLKCGSKHRRPTVSSQFKDSLHSLMATLSSSNPFFVRCIKPNMQKMPDQFDQAVVLNQLRYSGMLETVRIRKAGYAVRRPFQDFYKRQEGAELDSLSFQRVLMRNLALPEDVRGKCTSLLQLYDASNSEWQLGKTKVFLRESLEQKLEKRREEEVSHAAMVIRAHVLGFLARKQYRKVLYCVVIIQKNYRAFLLRRRFLHLKKAAIVFQKQLRGQIARRVYRQLLAEKREQEEKKKQEEEEKKKREEEERERERERREAELRAQQEEETRKQQELEALQKSQKEAELTRELEKQKENKQVEEILRLEKEIEDLQRMKEQQELSLTEASLQKLQERRDQELRRLEEEACRAAQEFLESLNFDEIDECVRNIERSLSVGSEFSSELAESACEEKPNFNFSQPYPEEEVDEGFEADDDAFKDSPNPSEHGHSDQRTSGIRTSDDSSEEDPYMNDTVVPTSPSADSTVLLAPSVQDSGSLHNSSSGESTYCMPQNAGDLPSPDGDYDYDQDDYEDGAITSGSSVTFSNSYGSQWSPDYRCSVGTYNSSGAYRFSSEGAQSSFEDSEEDFDSRFDTDDELSYRRDSVYSCVTLPYFHSFLYMKGGLMNSWKRRWCVLKDETFLWFRSKQEALKQGWLHKKGGGSSTLSRRNWKKRWFVLRQSKLMYFENDSEEKLKGTVEVRTAKEIIDNTTKENGIDIIMADRTFHLIAESPEDASQWFSVLSQVHASTDQEIQEMHDEQANPQNAVGTLDVGLIDSVCASDSPDRPNSFVIITANRVLHCNADTPEEMHHWITLLQRSKGDTRVEGQEFIVRGWLHKEVKNSPKMSSLKLKKRWFVLTHNSLDYYKSSEKNALKLGTLVLNSLCSVVPPDEKIFKETGYWNVTVYGRKHCYRLYTKLLNEATRWSSAIQNVTDTKAPIDTPTQQLIQDIKENCLNSDVVEQIYKRNPILRYTHHPLHSPLLPLPYGDINLNLLKDKGYTTLQDEAIKIFNSLQQLESMSDPIPIIQGILQTGHDLRPLRDELYCQLIKQTNKVPHPGSVGNLYSWQILTCLSCTFLPSRGILKYLKFHLKRIREQFPGSEMEKYALFTYESLKKTKCREFVPSRDEIEALIHRQEMTSTVYCHGGGSCKITINSHTTAGEVVEKLIRGLAMEDSRNMFALFEYNGHVDKAIESRTVVADVLAKFEKLAATSEVGDLPWKFYFKLYCFLDTDNVPKDSVEFAFMFEQAHEAVIHGHHPAPEENLQVLAALRLQYLQGDYTLHAAIPPLEEVYSLQRLKARISQSTKTFTPCERLEKRRTSFLEGTLRRSFRTGSVVRQKVEEEQMLDMWIKEEVSSARASIIDKWRKFQGMNQEQAMAKYMALIKEWPGYGSTLFDVECKEGGFPQELWLGVSADAVSVYKRGEGRPLEVFQYEHILSFGAPLANTYKIVVDERELLFETSEVVDVAKLMKAYISMIVKKRYSTTRSASSQGSSR

SEQ ID NO: 90752 - protein, 837 aa, Homo sapiens
MAALLRSARWLLRAGAAPRLPLSLRLLPGGPGRLHAASYLPAARAGPVAGGLLSPARLYAIAAKEKDIQEESTFSSRKISNQFDWALMRLDLSVRRTGRIPKKLLQKVFNDTCRSGGLGGSHALLLLRSCGSLLPELKLEERTEFAHRIWDTLQKLGAVYDVSHYNALLKVYLQNEYKFSPTDFLAKMEEANIQPNRVTYQRLIASYCNVGDIEGASKILGFMKTKDLPVTEAVFSALVTGHARAGDMENAENILTVMRDAGIEPGPDTYLALLNAYAEKGDIDHVKQTLEKVEKSELHLMDRDLLQIIFSFSKAGYPQYVSEILEKVTCERRYIPDAMNLILLLVTEKLEDVALQILLACPVSKEDGPSVFGSFFLQHCVTMNTPVEKLTDYCKKLKEVQMHSFPLQFTLHCALLANKTDLAKALMKAVKEEGFPIRPHYFWPLLVGRRKEKNVQGIIEILKGMQELGVHPDQETYTDYVIPCFDSVNSARAILQENGCLSDSDMFSQAGLRSEAANGNLDFVLSFLKSNTLPISLQSIRSSLLLGFRRSMNINLWSEITELLYKDGRYCQEPRGPTEAVGYFLYNLIDSMSDSEVQAKEEHLRQYFHQLEKMNVKIPENIYRGIRNLLESYHVPELIKDAHLLVESKNLDFQKTVQLTSSELESTLETLKAENQPIRDVLKQLILVLCSEENMQKALELKAKYESDMVTGGYAALINLCCRHDKVEDALNLKEEFDRLDSSAVLDTGKYVGLVRVLAKHGKLQDAINILKEMKEKDVLIKDTTALSFFHMLNGAALRGEIETVKQLHEAIVTLGLAEPSTNISFPLVTVHLEKES

SEQ ID NO: 90753 - protein, 122 aa, Homo sapiens
VGTLQSPGAIYAASKLSYFDKMSNEMPMTLPETTLETLKHKINPSAGEAFPQAVDVLLYTPGHLDPAEKVEDAHPKLWCALSEGKVTVFNASSWTIHQHSFKVGTAKVVSTRSVRKEASEFT

SEQ ID NO: 90754 - protein, 141 aa, Homo sapiens
MSTEGGFGGTSSSDAQQSLQSFWPRVMEEIRNLTVKDFRVQELPLARIKKIMKLDEDVKMISAEAPVLFAKAAQIFITELTLRAWIHTEDNKRRTLQRNDIAMAITKFDQFDFLIDIVPRDELKPPKRQEVRQSVTPAEPV

SEQ ID NO: 90755 - protein, 35 aa, Homo sapiens
  MOD_RES (1)..(1): Any amino acid
XDKNGEIDHHREQYENLKWTLERKLEELDGTAAGV

SEQ ID NO: 90756 - protein, 132 aa, Homo sapiens
MSKGPAVGIDLGTTYSCVGVFQHGKVEIIANDQGNRTTPSYVAFTDTERLIGDAAKNQVAMNPTNTVFDAKRLIGRRFDDAVVQSDMKHWPFMVVNDAGRPKVQVEYKGETKSFYPEEVSSMVLTKMKEIAE

SEQ ID NO: 90757 - protein, 175 aa, Homo sapiens
  MOD_RES (1)..(1): Any amino acid
XQDAASIPPFEPPGPGSYENLSTGTRESKPDALAGRQEASADCQDVISMTANRLSAVIQAFYMCCSCQMPPGMTSPRFIEFVCKHDEVLKCFVNRNPKIIFDHFHFLLECPELMSRFMHIIKAQPFKDRCEWFYEHLHSGQPDSDMVHRPVNENDILLVHRGVAVKLCQKQIVQS

SEQ ID NO: 90758 - protein, 19 aa, Homo sapiens
MEERTITIEIPEVLKKQLE

SEQ ID NO: 90759 - protein, 163 aa, Homo sapiens
MARNVVYPLYRLGGPQLRVFRTNFFIQLVRPGVAQPEDTVQFRIPMEMTRVDLRNYLEGIYNVPVAAVRTRVQHGSNKRRDHRNVRIKKPDYKVAYVQLVPHPRSLPLCLQHRSQLRTPRIPCIVAFASWGPGSKHDACSALCVVARAWAAVYVSARLISVAG

SEQ ID NO: 90760 - protein, 126 aa, Homo sapiens
MMSIRQRREIRATEVSEDFPAQEENVKLENKLPSGCTSRRLWKILSLTIGGTIALCIGLLTSVYLATLHENDLWFSNIKEVEREISFRTECGLYYSYYKQMLQAPTLVQGFHGLIYDNKTESMKTI

SEQ ID NO: 90761 - protein, 25 aa, Homo sapiens
MAHLKRLVKLHIKRHYHKKFWKLGA

SEQ ID NO: 90762 - protein, 110 aa, Homo sapiens
MESIFHEKQEGSLCAQHCLNNLLQGEYFSPVELSSIAHQLDEEERMRMAEGGVTSEDYRTFLQQPSGNMDDSGFFSIQVISNALKVWGLELILFNSPEYQRLRIDPIGLT

SEQ ID NO: 90763 - protein, 78 aa, Homo sapiens
MTMLQESFSFDDLSVDFTQKEWQLLDPSQKNLYKDVMLENYSSLVSLGYEVMKPDVIFKLEQGEEPWVGDGEIPSSDS

SEQ ID NO: 90764 - protein, 159 aa, Homo sapiens
MEVTGDAGVPESGEIRTLKPCLLRRNYSREQHGVAASCLEDLRSKACDILAIDKSLTPVTLVLAEDGTIVDDDDYFLCLPSNTKFVALASNEKWAYNNSDGGTAWISQESFDVDETDSGAGLKWKNVARQLKEDLSSIILLSEEDLQSPKLPLVRRWMQ

SEQ ID NO: 90765 - protein, 1275 aa, Homo sapiens
MIKCLSVEVQAKLRSGLAISSLGQCVEELALNSIDAEAKCVAVRVNMETFQVQVIDNGFGMGSDDVEKVGNRYFTSKCHSVQDLENPRFYGFRGEALANIADMASAVEISSKKNRTMKTFVKLFQSGKALKACEADVTRASAGTTVTVYNLFYQLPVRRKCMDPRLEFEKVRQRIEALSLMHPSISFSLRNDVSGSMVLQLPKTKDVCSRFCQIYGLGKSQKLREISFKYKEFELSGYISSEAHYNKNMQFLFVNKRLVLRTKLHKLIDFLLRKESIICKPKNGPTSRQMNSSLRHRSTPELYGIYVINVQCQFCEYDVCMEPAKTLIEFQNWDTLLFCIQEGVKMFLKQEKLFVELSGEDIKEFSEDNGFSLFDATLQKRVTSDERSNFQEACNNILDSYEMFNLQSKAVKRKTTAENVNTQSSRDSEATRKNTNDAFLYIYESGGPGHSKMTEPSLQNKDSSCSESKMLEQETIVASEAGENEKHKKSFLEHSSLENPCGTSLEMFLSPFQTPCHFEESGQDLEIWKESTTVNGMAANILKNNRIQNQPKRFKDATEVGCQPLPFATTLWGVHSAQTEKEKKKESSNCGRRNVFSYGRVKLCSTGFITHVVQNEKTKSTETEHSFKNYVRPGPTRAQETFGNRTRHSVETPDIKDLASTLSKESGQLPNKKNCRTNISYGLENEPTATYTMFSAFQEGSKKSQTDCILSDTSPSFPWYRHVSNDSRKTDKLIGFSKPIVRKKLSLSSQLGSLEKFKRQYGKVENPLDTEVEESNGVTTNLSLQVEPDILLKDKNRLENSDVCKITTMEHSDSDSSCQPASHILNSEKFPFSKDEDCLEQQMPSLRESPMTLKELSLFNRKPLDLEKSSESLASKLSRLKGSERETQTMGMMSRFNELPNSDSSRKDSKLCSVLTQDFCMLFNNKHEKTENGVIPTSDSATQDNSFNKNSKTHSNSNTTENCVISETPLVLPYNNSKVTGKDSDVLIRASEQQIGSLDSPSGMLMNPVEDATGDQNGICFQSEESKARACSETEESNTCCSDWQRHFDVALGRMVYVNKMTGLSTFIAPTEDIQAACTKDLTTVAVDVVLENGYLFRCYHKNLEDLGLEFVFPDTSDSLVLVGKVPLCFVEREANELRRGRSTVTKSIVEEFIREQLELLQTTGGIQGTLPLTVQKVLASQACHGAIKFNDGLSLQESCRLIEALSSCQLPFQCAHGRPSMLPLADIDHLEQEKQIKPNLTKLRKMAQAWRLFGKAECDTRQSLQQSMPPCEPP

SEQ ID NO: 90766 - protein, 99 aa, Homo sapiens
MIKFFLMVNKQGQTRLSKYYEHVDINKRTLLETEVIKSCLSRSNEQCSFIEYKDFKLIYRQYAALFIVVGVNDTENEMAIYEFIHNFVEVLDEYFSRVS

SEQ ID NO: 90767 - protein, 92 aa, Homo sapiens
MGSVTAMTVFFPLDTARLRLQVDEKRKSKTTHMVLLEIIKEEGLLAPYRGWFPVISSLCCSNFVYFYTFNSLKALWVKGQHSTTGKDLVVGF

SEQ ID NO: 90768 - protein, 35 aa, Homo sapiens
MSGSKKKKVTKAERLKLLQEEEERRLKEEGSRKEK

SEQ ID NO: 90769 - protein, 115 aa, Homo sapiens
MAQFPTPFGGSLDIWAITVEERAKHDQQFHSLKPISGFITGDQARNFFFQSGLPQPVLAQIWALADMNNDGRMDQVEFSIAMKLIKLKLQGYQLPSALPPVMKQQPVAISSAPAF

SEQ ID NO: 90770 - protein, 356 aa, Homo sapiens
MQRLAMDLRMLSRELSLYLEHQVRVGFFGSGVGLSLILGFSVAYAFYYLSSIAKKPQLVTGGESFSRFLQDHCPVVTETYYPTVWCWEGRGQTLLRPFITSKPPVQYRNELIKTADGGQISLDWFDNDNSTCYMDASTRPTILLLPGLTGTSKESYILHMIHLSEELGYRMLLLNYLGKIGSKTPLMAAATFSVGWNTFACSESLEKPLNWLLFNYYLTTCLQSSVNKHRHMFVKQVDMDHVMKAKSIREFDKRFTSVMFGYQTIDDYYTDASPSPRLKSVGIPVLCLNSVDDVFSPSHAIPIETAKQNPNVALVLTSYGGHIGFLEGIWPRQSTYMDRVFKQFVQAMVEHGHELS

SEQ ID NO: 90771 - protein, 100 aa, Homo sapiens
MSTRTPLPTVNERDTENHTSHGDGRQEVTSRTSRSGARCRNSIASCADEQPHIGNYRLLKTIGKGNFAKVKLARHILTGREVAIKIIDKTQLNPTSLQKI

SEQ ID NO: 90772 - protein, 256 aa, Homo sapiens
MWGLKVLLLPVVSFALYPEEILDTHWELWKKTHRKQYNNKVDEISRRLIWEKNLKYISIHNLEASLGVHTYELAMNHLGDMTSEEVVQKMTGLKVPLSHSRSNDTLYIPEWEGRAPDSVDYRKKGYVTPVKNQEESCMYNPTGKAAKCRGYREIPEGNEKALKRAVARVGPVSVAIDASLTSFQFYSKGVYYDESCNSDNLNHAVLAVGYGIQKGNKHWIIKNSWGENWGNKGYILMARNKNNACGIANLASFPKM

SEQ ID NO: 90773 - protein, 142 aa, Homo sapiens
MATAMYLEHYLDSIENLPCELQRNFQLMRELDQRTEDKKAEIDILAAEYISTVKTLSPDQRVERLQKIQNAYSKCKEYSDDKVQLAMQTYEMVDKHIRRLDADLARFEADLKDKMEGSDFESSGGRGLKSKSVNFFSLFYYC

SEQ ID NO: 90774 - protein, 83 aa, Homo sapiens
MEIPNPPTSKCITYWKRKVKSEYMRLRQLKRLQANMGAKALYVANFAKVQEKTQILNEEWKKLRVQPVQSMKPVSGHPFLKKR

SEQ ID NO: 90775 - protein, 82 aa, Homo sapiens
AMKTLLLKERQEKLQLEMHLRDEICNEMVEQMQQREQWCSEHLDTQKELLEEMYEEKLNILKESLTSFYQEEIQSCISIRKC

SEQ ID NO: 90776 - protein, 153 aa, Homo sapiens
MASTGSQASDIDEIFGFFNDGEPPTKKPRKLLPSLKTKKPRELVLVIGTGISAAVAPQVPALKSWKGLIQALLDAAIDFDLLEDEESKKFQKCLHEDKNLVHVAHDLIQKLSPRTSNVRSTFFKDCLYEVFDDLESKMEDSGKQLLQSVLHLM

SEQ ID NO: 90777 - protein, 651 aa, Homo sapiens
MSAANPETPNSTISREASTQSSSAAASQGWVLPEGKIVPNTVFVGGIDARMDETEIGSCFGRYGSVKEVKIITNRTGVSKGYGFVSFVNDVDVQKIVGSQIHFHGKKLKLGPAIRKQKLCARHVQPRPLVVNPPPPPQFQNVWRNPNTETYLQPQITPNPVTQHVQSAANPETPNSTISREASTQSSSAAASQGWVLPEGKIVPNTVFVGGIDARMDETEIGSCFGRYGSVKEVKIITNRTGVSKGYGFVSFVNDVDVQKIVGSQIHFHGKKLKLGPAIRKQKLCARHVQPRPLVVNPPPPPQFQNVWRNPNTETYLQPQITPNPVTQHVQAYSAYPHSPGQVITGCQLLVYNYQEYPTYPDSAFQVTTGYQLPVYNYQPFPAYPRSPFQVTAGYQLPVYNYQAFPAYPNSPFQVATGYQFPVYNYQPFPAYPSSPFQVTAGYQLPVYNYQAFPAYPNSPFQVATGYQFPVYNYQAFPAYPNSPVQVTTGYQLPVYNYQAFPAYPNSPFQVATGYQFPVYNYQAFPAYPNSPVQVTTGYQLPVYNYQAFPAYPSSPFQVTTGYQLPVYNYQAFPAYPSSPFQVTTGYQLPVYNYQAFPAYPNSAVQVTTGYQFHVYNYQMPPQCPVGEQRRNLWTEAYKWWYLVCLIQRRD

SEQ ID NO: 90778 - protein, 852 aa, Homo sapiens
VVMFSVVDENFSWYLEDNIKTYCSEPEKVDKDNEDFQESNRMYSVNGYTFGSLPGLSMCAEDRVKWYLFGMGNEVDVHAAFFHGQALTNKNYRIDTINLFPATLFDAYMVAQNPGEWMLSCQNLNHLKAGLQAFFQVQECNKSSSKDNIRGKHVRHYYIAAEEIIWNYAPSGIDIFTKENLTAPGSDSAVFFEQGTTRIGGSYKKLVYREYTDASFTNRKERGPEEEHLGILGPVIWAEVGDTIRVTFHNKGAYPLSIEPIGVRFNKNNEGTYYSPNYNPQSRSVPPSASHVAPTETFTYEWTVPKEVGPTNADPVCLAKMYYSAVEPTKDIFTGLIGPMKICKKGSLHANGRQKDVDKEFYLFPTVFDENESLLLEDNIRMFTTAPDQVDKEDEDFQESNKMHSMNGFMYGNQPGLTMCKGDSVVWYLFSAGNEADVHGIYFSGNTYLWRGERRDTANLFPQTSLTLHMWPDTEGTFNVECLTTDHYTGGMKQKYTVNQCRRQSEDSTFYLGERTYYIAAVEVEWDYSPQREWEKELHHLQEQNVSNAFLDKGEFYIGSKYKKVVYRQYTDSTFRVPVERKAEEEHLGILGPQLHADVGDKVKIIFKNMATRPYSIHAHGVQTESSTVTPTLPGETLTYVWKIPERSGAGTEDSACIPWAYYSTVDQVKDLYSGLIGPLIVCRRPYLKVFNPRRKLEFALLFLVFDENESWYLDDNIKTYSDHPEKVNKDDEEFIESNKMHAINGRMFGNLQGLTMHVGDEVNWYLMGMGNEIDLHTVHFHGHSFQYKHRGVYSSDVFDIFPGTYQTLEMFPRTPGIWLLHCHVTDHIHAGMETTYTVLQNEGEYPDTKSG

SEQ ID NO: 90779 - protein, 327 aa, Homo sapiens
PSEPVVPAVMMATHEPSADLAPKKKPRKSSMPVKIEKEIIDTADEFDDEDDDPNDGGAVVNDMSHDNHCHSQEEMSPGMSVKDFSKHNRTRCISRTEIRRADSMTSEDQEPERDYENESESSEPKLGEESMEGDEHIHSEVSEKVLMNSERPDENHSEPSHQDVIKVKEEFTDPTYDMFYMSQYGLYNGGGASMAALHESFTSSLNYGSPQKFSPEGDLCSSPDPKICYVCKKSFKSSYSVKLHYRNVHLKEMHVCTVAGCNAAFPSRRSRDRNRNLRMERTIGPGHRDSLHLRRGNSNRPGTCCLHTGDSLEESVIVRISCKRLES

SEQ ID NO: 90780 - protein, 521 aa, Homo sapiens
MKKWSSTDLGAAADPLQKDTCPDPLDGDPNSRPPPAKPQLSTAKSRTRLFGKGDSEEAFPVDCPHEEGELDSCPTITVSPVITIQRPGDGPTGARLLSQDSVAASTEKTLRLYDRRSIFEAVAQNNCQDLESLLLFLQKSKKHLTDNEFKDPETGKTCLLKAMLNLHDGQNTTIPLLLEIARQTDSLKELVNASYTDSYYKGQTALHIAIERRNMALVTLLVENGADVQAAAHGDFFKKTKGRPGFYFGELPLSLAACTNQLGIVKFLLQNSWQTADISARDSVGNTVLHALVEVADNTADNTKFVTSMYNEILMLGAKLHPTLKLEELTNKKGMTPLALAAGTGKIGVLAYILQREIQEPECRHLSRKFTEWAYGPVHSSLYDLSCIDTCEKNSVLEVIAYSSSETPNRHDMLLVEPLNRLLQDKWDRFVKRIFYFNFLVYCLYMIIFTMAAYYRPVDGLPPFKMEKTGDYFRVTGEILSVLGGVYFFFRGIQYFLQRRPSMKTLFVDSYSEMLLPPGFP

SEQ ID NO: 90781 - protein, 147 aa, Homo sapiens
MERAVEPWGPDLHRPEEREPQRGARTGLGSENVISQPNEFEHTPQEDDLGFKEEDLAPDHEVGNASLKPEGIQNWDDLWVQREGLGKPQPRDRGPRLLGEPRWGQASSDRAAVCGECGKSFRQMSDLVKHQRTHTGEKPYKCGVCGK

SEQ ID NO: 90782 - protein, 83 aa, Homo sapiens
NCLPIAAIVDEKIFCCHGGLSPDLQSMEQIRRIMRPTDVPDQDFKACREKEAKCHETCNASKGYDHKASKEIDVVLTLPSRDL

SEQ ID NO: 90783 - protein, 867 aa, Homo sapiens
MPHKIGFVVVSSSGHEDGFSARELMIHAPTVSGWRSPRFCQFPQEIVLQMVERCRIRKLQLLAHQYMISSKIEFYISESLPEYFAPYQAERFRRLGYVSLCDNEKTGCKARELKSVYVDAVGQFLKLIFHQNHVNKYNIYNQVALVAINIIGDPADFSDESNTASREKLIDHYLGHNSEDPALEGTYARKSDYISPLDDLAFDMYQDPEVAQIIRKLDERKREAVQKERYDYAKKLKQAIADLQKVGERLGRYEVEKRCAVEKEDYDLAKEKKQQMEQYRAEVYEQLELHSLLDAELHSAVDPLLPATDPHPKINAESLPYDERPLPAIRKHYGEAVVEPEMSNADISDARRGGMLGEPEPLTEKALREASSAIDVLGETLVAEAYCKTWSYREDALLALSKKLMEMPVGTPKEDLKNTLRASVFLVRRAIKDIVTSVFQASLKLLKMIITQYIPKHKLSKLETAHCVERTIPVLLTRTGDSSARLRVTAANFIQEMALFKEVKSLQIIPSYLVQPLKANSSVHLAMSQMGLLARLLKDLGTGSSGFTIDNVMKFSVSALEHRVYEVRETAVRIILDMYRQHQASILEYLPPDDSNTRRNILYKTIFEGFAKIDGRATDAEMRARRKAATEEAEKQKKEEIKALQGQLAALKEIQAEVQEKESDAVKPKNQDIQGGKAAPAEALGIPDEHYLDNLCIFCGERSESFTEEGLDLHYWKHCLMLTRCDHCKQVVEISSLTEHLLTECDKKDGFGKCYRCSEAVFKEELPRHIKHKDCNPAKPEKLANRCPLCHENFSPGEEAWKAHLMGPAGCTMNLRKTHILQKAPALQPGKSSAVAASGPLGSKAGSKIPTPKGGLSKSSSRTYAKR

SEQ ID NO: 90784 - protein, 36 aa, Homo sapiens
MPNSEPASLLELFNSIATQGELVRSLKAGNASKGKL

SEQ ID NO: 90785 - protein, 207 aa, Homo sapiens
MEEIKPASASCVSKEKPSKVSDLISRFEGGSSLSNYSDLKKESAVNLNAPRTPGRHGLTTTPQQKLLSQHLPQRQGNDTDKTQGAQTCVANGVMAAQNQMECEEEKAATLSSDTSIQASEPLLDTHIVNGERDETATAPASPTTDSCDGNASDSSYRTPGIGPVLPLEERGAETETKVQERENGESPLELEQLDQHHEMKVEHETSS

SEQ ID NO: 90786 - protein, 57 aa, Homo sapiens
MGLGTLSPRMLVWLVASGIVFYGELWVCAGLDYDYTFDGNEEDKTETIDYKDPCKAD

SEQ ID NO: 90787 - protein, 350 aa, Homo sapiens
MEVMKSIIQKYQHKRISLVEAGVTRHRSIFNGLKALAEDQINSKLSKPEVVIIHDAVRPFVEEGVLLKVVTAAKEHGAAGAIRPLVSTVVSPSADGCLDYSLERARHRASEMPQAFLFDVIYEAYQQCSDYDLEFGTECLQLALKYCCTKAKLVEGSPDLWKVTYKRDLYAAESIIKERISQEICVVMDTEEDNKHVGHLLEEVLKSELNHVKVTSEALGHAGRHLQQIILDQCYNFVCVNVTTSDFQETQKLLSMLEESSLCILYPVVVVSVHFLDFKLVPPSQKMENLMQIREFAKEVKERNILLYGLLISYPQDDQKLQESLRQGAIIIASLIKERNSGLIGQLLIA

SEQ ID NO: 90788 - protein, 374 aa, Homo sapiens
MEEDLEGENWQTFSIPWCFSRAAEDEGEHICHHRTKSSGWPPPSGTWGLSQVPPYGWEMTANRDGRDYFINHMTQAIPFDDPRLESCQIIPPAPRKVEMRRDPVLGFGFVAGSEKPVVVRSVTPGGPSEGKLIPGDQIVMINDEPVSAAPRERVIDLVRSCKESILLTVIQPYPSPKSAFISAAKKARLKSNPVKVRFSEEVIINGQVSETVKDNSLLFMPNVLKVYLENGQTKSFRFDCSTSIKDVILTLQEKLSIKGIEHFSLMLEQRTEGAGTKLLLLHEQETLTQVTQRPSSHKMRCLFRISFVPKDPIDLLRRDPVAFEYLYVQSCNDVVQERFGPELKYDIALRLAALQMYIATVTTKQTQKISLKYI

SEQ ID NO: 90789 - protein, 80 aa, Homo sapiens
MFQASMRSPNMEPFKQQKVEDFYDIGEELGSGQFAIVKKCREKSTGLEYAAKFIKKRQSRASRRGVSREEIEREVSILRQ

SEQ ID NO: 90790 - protein, 251 aa, Homo sapiens
MPVKGGTKCIKYLLFGFNFIFWLAGIAVLAIGLWLRFDSQTKSIFEQETNNNNSSFYTGVYILIGAGALMMLVGFLGCCGAVQESQCMLGLATKRTMFPPFLEDHVCFFSLNPQFFGFLLVIFAIEIAAAIWGYSHKDEVIKEVQEFYKDTYNKLKTKDEPQRETLKAIHYALNCCGLAGGVEQFISDICPKKDVLETFTVKSCPDAIKEVFDNKFHIIGAVGIGIAVVMIFGMIFSMILCCAIRRNREMV

SEQ ID NO: 90791 - protein, 138 aa, Homo sapiens
MNRHLWKSQLCEMVQPSGGPAADQDVLGEESPLGKPAMLHLPSEQGAPETLQRCLEENQELRDAIRQSNQILRERCEELLHFQASQREEKEFLMCKFQEARKLVERLGLEKLDLKRQKEQALREVEHLKRCQQQMAED

SEQ ID NO: 90792 - protein, 335 aa, Homo sapiens
MCCQVCEAVRSGNEEVLADVRTIVNQISYTPQDPRDLCGRILTTCYMASKNSSQETCTRARELAQQIGSHHISLNIDPAVKAVMGIFSLVTGKSPLFAAHGGSSRENLALQNVQARIRMVLAYLFAQLSLWSRGVHGGLLVLGSANVDESLLGYLTKYDCSSADINPIGGISKTDLRAFVQFCIQRFQLPALQSILLAPATAELEPLADGQVSQTDEEDMGMTYAELSVYGKLRKVAKMGPYSMFCKLLGMWRHICTPRQVADKVKRFFSKYSMNRHKMTTLTPAYHAENYSPEDNRFDLRPFLYNTSWPWQFRCIENQVLQLERAEPQSLDGVD

SEQ ID NO: 90793 - protein, 782 aa, Homo sapiens
MDGNLAFCLHGRTWPPFSSSLFHPRKQYLEEHRFSVVVVPSPFPCALEEAQKAIQQLFGKIKDIKDKAEKSEQMVKEITRDIKQLDHAKRHLTTSITTLNHLHMLAGGVDSLEAMTRRRQYGEVANLLQGVMNVLEHFHKYMGIPQIRQLSERVKAAQTELGQQILADFEEAFPSQGTKRPGGPSNVLRDACLVANILDPRIKQEIIKKFIKQHLSEYLVLFQENQDVAWLDKIDRRYAWIKRQLVDYEEKYGRMFPREWCMAERIAVEFCHVTRAELAKIMRTRAKEIEVKLLLFAIQRTTNFEGFLAKRFSGCTLTDGTLKKLESPPPSTNPFLEDEPTPEMEELATEKGDLDQPKKPKAPDNPFHGIVSKCFEPHLYVYIESQDKNLGELIDRFVADFKAQGPPKPNTDEGGAVLPSCADLFVYYKKCMVQCSQLSTGEPMIALTTIFQKYLREYAWKILSGNLPKTTTSSGGLTISSLLKEKEGSEVAKFTLEELCLICNILSTAEYCLATTQQLEEKLKEKVDVSLIERINLTGEMDTFSTVISSSIQLLVQDLDAACDPALTAMSKMQWQNVEHVGDQSPYVTSVILHIKQNVPIIRDNLASTRKYFTQFCVKFANSFIPKFITHLFKCKPISMVGAEQLLLDTHSLKMVLLDLPSISSQVVRKAPASYTKIVVKGMTRAEMILKVVMAPHEPLVVFVDNYIKLLTDCNTETFQKILDMKGLKRSEQSSMLELLRQRLPAPPSGAESSGSLSLTAPTPEQESSRIRKLEKLIKKRL

SEQ ID NO: 90794 - protein, 81 aa, Homo sapiens
  MOD_RES (1)..(1): Any amino acid
XYSIQDDSSVAQVKAISFYQACCLPGVIPYLVSLIRDKLGWMWVFYFFILMTSCTIVFISPLIVREIFSLVLRRQAHILRE

SEQ ID NO: 90795 - protein, 619 aa, Homo sapiens
MEGRGPYRIYDPGGSVPSGEASAAFERLVKENSRLKEKMQGIKMLGELLEESQMEATRLRQKAEELVKDNELLPPPSPSLGSFDPLAELTGKDSNVTASPTAPACPSDKPAPVQKPPSSGTSSEFEVVTPEEQNSPESSSHANAMALGPLPREDGNLMLHLQRLETTLSVCAEEPDHGQLFTHLGRMALEFNRLASKVHKNEQRTSILQTLCEQLRKENEALKAKLDKGLEQRDQAAERLREENLELKKLLMSNGNKEGASGRPGSPKMEGTGKKAVAGQQQASVTAGKVPEVVALGAAEKKVKMLEQQRSELLEVNKQWDQHFRSMKQQYEQKITELRQKLADLQKQVTDLEAEREQKQRDFDRKLLLAKSKIEMEETDKEQLTAEAKELRQKVKYLQDQLSPLTRQREYQEKEIQRLNKALEEALSIQTPPSSPPTAFGSPEGAGALLRKQELVTQNELLKQQVKIFEEDFQRERSDRERMNEEKEELKKQVEKLQAQVTLSNAQLKAFKDEEKAREALRQQKRKAKASGERYHVEPHPEHLCGAYPYAYPPMPAMVPHHGFEDWSQIRYPPPPMAMEHPPPLPNSRLFHLHQFCRSRNTPGVYPVEGFEIQIRAPK

SEQ ID NO: 90796 - protein, 90 aa, Homo sapiens
MASGVAVSDGVIKVFNDMKVRKSSTPEEVKKRKKAVLFCLSEDKKNIILEEGKEILVGDVGQTVDDPYATFVKMLPDKDCRYALYDATYE

SEQ ID NO: 90797 - protein, 59 aa, Homo sapiens
  MOD_RES (1)..(1): Any amino acid
XVRYLHFLEGTRDYEWLEALLMNQTAQTPGSFSGSPAHGQVPVAAPRLSPIHEEQVSEV

SEQ ID NO: 90798 - protein, 273 aa, Homo sapiens
MAPWAEAEHSALNPLRAVWLTLTAAFLLTLLLQLLPPGLLPGCAIFQDLIRYGKTKCGEPSRPAACRAFDVPKRYFSHFYIISVLWNGFLLWCLTQSLFLGAPFPSWLHGLLRILGAAQFQGGELALSAFLVLVFLWLHSLRRLFECLYVSVFSNVMIHVVQYCFGLVYYVLVGLTVLSQVPMDGRNGVVIHCNHRIPFGDWFEYVSSPNYLAELMIYVSMAVTFGFHNLTWWLVVTNVFFNQALSAFLSHQFYKSKFVSYPKHRKAFLPFLF

SEQ ID NO: 90799 - protein, 159 aa, Homo sapiens
MAPEENAGTELLLQGFERRFLAVRTLRSFPWQSLEAKLRDSSDSELLRDILQKTVRHPVCVKHPPSVKYAWCFLSELIKKHEAVHTEPLDKLYEVLTETLMAKESTQGHRSYLLSSGGSVTLSKSTAIISHGTTGLVTWDAALYLAEWAIENPAAFINR

SEQ ID NO: 90800 - protein, 142 aa, Homo sapiens
MVVREETGRWCPDLASRDEPQKLSPKRDIYETELSQWVNMEEFKSHSPERSIFSAIWEGNCHFEQHQGQEEGYFRQLMINHENMPIFSQHTLLTQEFYDREKISECKKCRKIFSYHLFFSHHKRTHSKELSECKECTEIVNT

SEQ ID NO: 90801 - protein, 956 aa, Homo sapiens [sequence omitted]

SEQ ID NO: 90802 - protein, 50 aa, Homo sapiens
MCVRRSLVGLTFCTCYLASYLTNKYVLSVLKFTYPTLFQGPFLCFSLCIM

SEQ ID NO: 90803 - protein, 294 aa, Homo sapiens
MAGLTAAAPRPGVLLLLLSILHPSRPGGVPGAIPGGVPGGVFYPGAGLGALGGGALGPGGKPLKPGLGAFPAVTFPGALVPGGVADAAAAYKAAKAGAGLGGVPGVGGLGVSAGAVVPQPGAGVKPGKVPGVGLPGVYPGGVLPGARFPGVGVLPGVPTGAGVKPKAPGVGPFGGPQPGVPLGYPIKAPKLPGGYGLPYTTGKLPYGYGPGGVAGAAGKAGYPTGTGVGPQAAAAAAAKAAAKFGAGAAGVLPGVGGAGVPGVPGAIPGIGGIAGVGTPAAAAAAAAAAKAAKY

SEQ ID NO: 90804 - protein, 130 aa, Homo sapiens
MNTLFNTTFETEEASHHEACVRLRPQTYDLQESNVQLKLTIVDAVGFGDQINKDERPIVDYIDAQFENYLQEELKIRRSLFDYHDTRIHVCLYFITPTGHSLKSLDLVTMKKLDSKVNIIPIIAKADTIS

SEQ ID NO: 90805 - protein, 73 aa, Homo sapiens
MNINDGGRRRFEDNEHTLRIYPGAISEGTIYCPIPARKNSTAAEVIESLINKLHLDKTKCYVLAEVKEFGGEE

SEQ ID NO: 90806 - protein, 129 aa, Homo sapiens
ILHSLVQTGICVITLAESHPVLQSGKTIKSISYQISTNCSRLQNKVSGKFKRGAQFLTELAPLCKIYCSDGEEYTVSSCVRGRLMEVNENILHKPSILQEKPSTEGYIAVVLPKFEESKSITEGLLTQK

SEQ ID NO: 90807 - protein, 291 aa, Homo sapiens
MSSTLPALLCVETLPKPFIWAEPHFMVPKEKQVTICCQGNYGAVEYQLHFEGSLFAVDRPKPPERINKVQFYIPDMNSRMAGQYSCIYRVGELWSEPSNLLDLVVTEMYDTPTLSVHPGPEVISGEKVTFYCRLDTATSMFLLLKEGRSSHVQRGYGKVQAEFPLGPVTTAHRGTYRCFGSYNNHAWSFPSEPVKLLVTGDIENTSLAPEDPTFPDTWGTYLLTTETGLQKDHALWDHTAQNLLRMGLAFLVLVALVWFLVEDWLSRKRTRERASRASTWEGRRRLNTQTL

SEQ ID NO: 90808 - protein, 437 aa, Homo sapiens
MDRVLLRWISLFWLTAMVEGLQVTVPDKKKVAMLFQPTVLRCHFSTSSHQPAVVQWKFKSYCQDRMGESLGMSSTRAQSLSKRNLEWDPYLDCLDSRRTVRVVASKQGSTVTLGDFYRGREITIVHDADLQIGKLMWGDSGLYYCIITTPDDLEGKNEDSVELLVLGRTGLLADLLPSFAVEIMPEWVFVGLVLLGVFLFFVLVGICWCQCCPHSCCCYVRCPCCPDSCCCPQALYEAGKAAKAGYPPSVSGVPGPYSIPSVPLGGAPSSGMLMDKPHPPPLAPSDSTGGSHSVRKGYRIQADKERDSMKVLYYVEKELAQFDPARRMRGRYNNTISELSSLHEEDSNFRQSFHQMRSKQFPVSGDLESNPDYWSGVMGGSSGASRGPSAMEYNKEDRESFRHRMTFQPGCPLWSDVVNISLDNEKSDMDYGDKTQI

SEQ ID NO: 90809 - protein, 646 aa, Homo sapiens
MANCQIAILYQRFQRVVFGISQLLCFSALISELTNQKEVAAWTYHYSTKAYSWNISRKYCQNRYTDLVAIQNKNEIDYLNKVLPYYSSYYWIGIRKNNKTWTWVGTKKALTNEAENWADNEPNNKRNNEDCVEIYIKSPSAPGKWNDEHCLKKKHALCYTASCQDMSCSKQGECLETIGNYTCSCYPGFYGPECEYVRECGELELPQHVLMNCSHPLGNFSFNSQCSFHCTDGYQVNGPSKLECLASGIWTNKPPQCLAAQCPPLKIPERGNMTCLHSAKAFQHQSSCSFSCEEGFALVGPEVVQCTASGVWTAPAPVCKAISCEPLESPVHGSMDCSPSLRAFQYDTNCSFRCAEGFMLRGADIVRCDNLGQWTAPAPVCQALQCQDLPVPNEARVNCSHPFGAFRYQSVCSFTCNEGLLLVGASVLQCLATGNWNSVPPECQGKSIASLPTPGVQCPALTTPGQGTMYCRHHPGTFGFNTTCYFGCNAGFTLIGDSTLSCRPSGQWTAVTPACRAVKCSELHVNKPIAMNCSNLWGNFSYGSICSFHCLEGQLLNGSAQTACQENGHWSTTVPTCQAGPLTIQEALTYFGGAVASTIGLIMGGTLLALLRKRFRQKDDGKCPLNPHSHLGTYGVFTNAAFDPSP

SEQ ID NO: 90810 - protein, 161 aa, Homo sapiens
MWYRLRLLKPQPNIIPTVKKIVLLAGWALFLFLAYKVSKTDREYQEYNPYEVLNLDPGATVAEIKKQYRLLSLKYHPDKGGDEVMFMRIAKAYAALTDEESRKNWEEFGNPDGPQATSFGIALPAWIVDQKNSILVLLVYGLAFMVILPVVVGSWWYRSIR

SEQ ID NO: 90811 - protein, 151 aa, Homo sapiens
MTFKTFRPAAMLVERSADFGRTWHVYRYFSYDCGADFPGVPLAPPRHWDDVVCESRYSEIEPSTEGEVIYRVLDPAIPIPDPYSSRIQNLLKITNLRVNLTRLHTLGDNLLDPRREIREKYYYALYELVVRGNCFCYGHASECAPAPGAPA

SEQ ID NO: 90812 - protein, 171 aa, Homo sapiens
EKQRLLYQQARLHTRGAAEMVLQMISACKGETGAMVSSTLKLGISILNGGNAEVQQKMLDYLKDKKEVGFFQSIQALMQTCSVLDLNAFERQNKAEGLGMVNEDGTGEKVMADDEFTQDLFRFLQLLCEGHNNGALQWLPKFYTRGGFLYFRSRKDLREKTAWHLKINLLE

SEQ ID NO: 90813 - protein, 202 aa, Homo sapiens
MTGSNSHITILTLKVLPHFESLGKQEKIPNKMSAFRNHCPHLDSVGEITKEDLIQKSLGTCQDCKVQGPNLWACLENRCSYVGCGESQVDHSTIHSQETKHYLTVNLTTLRVWCYACSKEVFLDRKLGTQPSLPHVRQPHQIQENSVQDFKIPSNTTLKTPLVAVFDDLDIEADEEDELRARGLTGLKNIGNTCYMNAALQA

SEQ ID NO: 90814 - protein, 193 aa, Homo sapiens
MFNIRNIGKTLVTRTQGTKIASDGLKGRVFEVSLADLQNDEVAFRKFKLITEDVQGKNCLTNFHGMDLTRDKMCSMVKKWQTMIEAHVDVKTTDGYLLRLFCVGFTKKRNNQIRKTSYAQHQQVRQIRKKMMEIMTREVQTNDLKEVVNKLIPDSIGKDIEKACQSIYPLHDVFVRKVKMLKKPKFELGKLME

SEQ ID NO: 90815 - protein, 32 aa, Homo sapiens
MMKTLLLFVGLLLTWESGQVLGDQTVSDNELQ

SEQ ID NO: 90816 - protein, 56 aa, Homo sapiens
MANRELAFKAGDVIKVLDASNKDWWWGQIDDEEGWFPASFVRMQDFTMLPRLVLNS

SEQ ID NO: 90817 - protein, 533 aa, Homo sapiens
LFDRHLCVRQLRYSGMMETIRIRRAGYPIRYSFVEFVERYRVLLPGVKPAYKQGDLRGTCQRMAEAVLGTHDDWQIGKTKIFLKDHHDMLLEVERDKAITDRVILLQKVIRGFKDRSNFLKLKNAATLIQRHWRGHNCRKNYGLMRLGFLRLQALHRSRKLHQQYRLARQRIIQFQARCRAYLVRKAFRHRLWAVLTVQAYARGMIARRLHQRLRAEYLWRLEAEKMRLAEEEKLRKEMSAKKAKEEAERKHQERLAQLAREDAERELKEKEAARRKKELLEQMERARHEPVNHSDMVDKMFGFLGTSGGLPGQEGQAPSGFEDLERGRREMVEEDLDAALPLPDEDEEDLSEYKFAKFAATYFQGTTTHSYTRRPLKQPLLYHDDEGDQLAALAVWITILRFMGDLPEPKYHTAMSDGSEKIPVMTKIYETLGKKTYKRELQALQGEGEAQLPEGQKKSSVRHKLVHLTLKKKSKLTEEVTKRLHDGESTVQGNSMLEDRPTSNLEKLHFIIGNGILRPALRSVPGGGDTRA

SEQ ID NO: 90818 - protein, 120 aa, Homo sapiens
GDHRVELYKVLSSLGYHVVTFDYRGWGDSVGTPSERGMTYDALHVFDWIKARSGDNPVYIWGHSLGTGVATNLVRRLCERETPPDALILESPFTNIREEAKSHPFSVREAHLLSPAHPAR

SEQ ID NO: 90819 - protein, 84 aa, Homo sapiens
MTAQGGLVANRGRRFKWAIELSGPGGGSRGRSDRGSGQGDSLYPVGYLDKQVPDTSVQETDRILVEKVQSAAGTSPWVPSNRFP

SEQ ID NO: 90820 - protein, 583 aa, Homo sapiens
MVPEMRGLSPDRRLPEPAPCPAAGSPEPRSAGRRQRHVLALPEEEAWRPQQCALLEADASDEVGMLPASPRAASGFDNFFQVQEGEGQGWEGAMALEAGSSPFLPVSPEVMKRRRGGLIEQRDIIKAHEAHKMQSTPQARRKEWEMARFGEAVVARPGSGDGDSDQSRNRQGTPVPASGQAAAYKQTKAQRARTMALYNPIPVRQNCFTVNRSLFIFGEDNIVRKYAKKLIDWPPFEYMILATIIANCIVLALEQHLPEDDKTPMSRRLEKTEPYFIGIFCFEAGIKIVALGFIFHKGSYLRNGWNVMDFIVVLSGILATAGTHFNTHVDLRTLRAVRVLRPLKLVSGIPSLQIVLKSIMKAMVPLLQIGLLLFFAILMFAIIGLEFYSGKLHRACFMNNSGILEGFDPPHPCGVQGCPAGYECKDWIGPNDGITQFDNILFAVLTVFQCITMEGWTTVLYNTNDALGATWNWLYFIPLIIIGSFFVLNLVLGVLSGEFAKERERVENRRAFMKLRRQQQIERELNGYRAWIDKAEEVMLAEENKNAGTSALEVLRRATIKRSRTEAMTRDSSDEHCVDISSV

SEQ ID NO: 90821 - protein, 75 aa, Homo sapiens
  MOD_RES (1)..(1): Any amino acid
XRYLFVYRPDQVSAVDSYYYDDGCEPCGNDTFNREPAIVRFFSRFTGSVPHTTWLSPQRSGSLPLFPCMRPRGTQ

SEQ ID NO: 90822 - protein, 553 aa, Homo sapiens
  MOD_RES (1)..(1): Any amino acid
XRPPQLMVFRNVGRPPEEEDVEAAPEPGPSELLCPRHRCALDPKALPPGLALERTWGPAAGLEAQLAALGLGQPAGPGVKTVGGGCCPCPCPPQPPPPQPQPPAAAPQAGEDPTETSDALLVLEGLESEAESLETNSCSEEELSSPGRGGGGGGRLLLQPPGPELPPVPFPLQDLVPLGRLSRGEQQQQQQQQPPPPPPPPGPLRPLAGPSRKGSFKIRLSRLFRTKSCNGGSGGGDGTGKRPSGELAASAASLTDMGGSAGRELDAGRKPKLTRTQSAFSPVSFSPLFTGETVSLVDVDISQRGLTSPHPPTPPPPPRRSLSLLDAFPRIAPIRAAESLHSQPPQHLQCPLYRPDSSSFAASLRELEKCGWYWGPMNWEDAEMKLKGKPDGSFLVRDSSDPRYILSLSFRSQGITHHTRMEHYRGTFSLWCHPKFEDRCQSVVEFIKRAIMHSKNGKFLYFLRSRVPGLPPTPVQLLYPVSRFSNVKSLQHLCRFRIRQLVRIDHIPDLPLPKPLISYIRKFYYYDPQEEVYLSLKEAQLISKQKQEVEPST

SEQ ID NO: 90823 - protein, 74 aa, Homo sapiens
MLLITLSANLFTVPERSLTTTFSFSRCERHCTEEDENHSKPNKGNAEEIFSAEYWKVRFPASRISGNVNEQHEA

SEQ ID NO: 90824 - protein, 71 aa, Homo sapiens
MPRAPKRQRCMPEEDLQSQSETQGLEGAQAPLAVEEDASSSTSTSSSFPSSFPSSSSSSSSSCYPLIPSTP

SEQ ID NO: 90825 - protein, 167 aa, Homo sapiens
MGVPRPQPWALGLLLFLLPGSLGAESHLSLLYHLTAVSSPAPGTPAFWVSGWLGPQQYLSYNSLRGEAEPCGAWVWENQVSWYWEKETTDLRIKEKLFLEAFKALGGKGPYTLQGLLGCELGPDNTSVPTAKFALNGEEFMNFDLKQGTWGGDWPEALAISQRWQQQ

SEQ ID NO: 90826 - protein, 69 aa, Homo sapiens
MFLSAVFFAKSKSKLWLWFLEDHRGEMSFSSHHIKGTYDQHDFLLMVLTLVTWLSGDLQVKLKCPQKWP

SEQ ID NO: 90827 - protein, 1191 aa, Homo sapiens
MDCSLVRTLVHRYCAGEENWVDSRTIYVGHREPPPGAEAYIPQRYPDNRIVSSKYTFWNFIPKNLFEQFRRVANFYFLIIFLVQLIIDTPTSPVTSGLPLFFVITVTAIKQGYEDWLRHKADNAMNQCPVHFIQHGKLVRKQSRKLRVGDIVMVKEDETFPCDLIFLSSNRGDGTCHVTTASLDGESSHKTHYAVQDTKGFHTEEDIGGLHATIECEQPQPDLYKFVGRINVYSDLNDPVVRPLGSENLLLRGATLKNTEKIFGVAIYTGMETKMALNYQSKSQKRSAVEKSMNAFLIVYLCILISKALINTVLKYMWQSEPFRDEPWYNQKTESERQRNLFLKAFTDFLAFMVLFNYIIPVSMYVTVEMQKFLGSYFITWDEDMFDEETGEGPLVNTSDLNEELGQVEYIFTDKTGTLTENNMEFKECCIEGHVYVPHVICNGQVLPESSGIDMIDSSPSVNGREREELFFRALCLCHTVQVKDDDSVDGPRKSPDGGKSCVYISSSPDEVALVEGVQRLGFTYLRLKDNYMEILNRENHIERFELLEILSFDSVRRRMSVIVKSATGEIYLFCKGADSSIFPRVIEGKVDQIRARVERNAVEGLRTLCVAYKRLIQEEYEGICKLLQAAKVALQDREKKLAEAYEQIEKDLTLLGATAVEDRLQEKAADTIEALQKAGIKVWVLTGDKMETAAATCYACKLFRRNTQLLELTTKRIEEQSLHDVLFELSKTVLRHSGSLTRDNLSGLSADMQDYGLIIDGAALSLIMKPREDGSSGNYRELFLEICRSCSAVLCCRMAPLQKAQIVKLIKFSKEHPITLAIGDGANDVSMILEAHVGIGVIGKEGRQAARNSDYAIPKFKHLKKMLLVHGHFYYIRISELVQYFFYKNVCFIFPQFLYQFFCGFSQQTLYDTAYLTLYNISFTSLPILLYSLMEQHVGIDVLKRDPTLYRDVAKNALLRWRVFIYWTLLGLFDALVFFFGAYFVFENTTVTSNGQIFGNWTFGTLVFTVMVFTVTLKLALDTHYWTWINHFVIWGSLLFYVVFSLLWGGVIWPFLNYQRMYYVFIQMLSSGPAWLAIVLLVTISLLPDVLKKVLCRQLWPTATERVQNGCAQPRDRDSEFTPLASLQSPGYQSTCPSAAWYSSHSQQVTLAAWKEKVSTEPPPILGGSHHHCSSIPSHSCPRSRVGMLV

SEQ ID NO: 90828 - protein, 596 aa, Homo sapiens
MPPPFSSARGFGAPRPRPSPRERSGRRGRARGERPRGVDDLRPAATSSAAETRSHPPAGEPGPRAAPETAVAGCAGASLPGGAAAAAWKMAAPCGSELPANSPLKIPKMEVLSPASPGGLSDGNPSLSDPSTPRGASPLGPGSAAGSGAAASGGLGLGLGGRSAASSSVSFSPGGGGGGAAAAAAAACRGMSWTPAETNALIAVWGNERLVEARYQQLEGAGTVFGSKAPGPAMYERVSRALAELGYERTPSQCRERIKELESDGSTMEDYSQEDWGNHSQDLHGYPTDQELDEIPVTKRTLKIKQESSEEAQKRDIMQNIVQILESVQLKWELFQSWTDFSRLHLSNKLAIFGIGYNTRWKEDIRYHYAEISSQVPLGKRLREYFNSEKPEGRIIMTRVQKMNWKNVYYKFLEITISEARCLELHMEIDWIPIAHSKPTGGNVVQYLLPGGIPKSPGLYAIGYEECIERPLSPHMEQSSLDPGKEGRVDLETLSAQASLQVEIEPTRIIYCYLGIAEVRTLQQCLFLHFQANTKTFSKDWVGINGFLSQNCIVDPGVSPKSIYIKFVEVERDFLSAGSLVECLEKAIGYPLKFNN

SEQ ID NO: 90829 - protein, 694 aa, Homo sapiens
MKKMSRNVLLQMEEEEDDDDGDIVLENLGQTIVPDLGSLESQHDFRTPEFEEFNGKPDSLFFNDGQRRIDFVLVYEDESRKETNKKGTNEKQRRKRQAYESNLICHGLQLEATRSVLDDKLVFVKVHAPWEVLCTYAEIMHIKLPLKPNDLKNRSSAFGTLNWFTKVLSVDESIIKPEQEFFTAPFEKNRMNDFYIVDRDAFFNPATRSRIVYFILSRVKYQVINNVSKFGINRLVNSGIYKAAFPLHDCKFRRQSEDPSCPNERYLLYREWAHPRSIYKKQPLDLIRKYYGEKIGIYFAWLGYYTQMLLLAAVVGVACFLYGYLNQDNCTWSKEVCHPDIGGKIIMCPQCDRLCPFWKLNITCESSKKLCIFDSFGTLVFAVFMGVWVTLFLEFWKRRQAELEYEWDTVELQQEEQARPEYEARCTHVVINEITQEEERIPFTAWGKCIRITLCASAVFFWILLIIASVIGIIVYRLSVFIVFSAKLPKNINGTDPIQKYLTPQTATSITASIISFIIIMILNTIYEKVAIMITNFELPRTQTDYENSLTMKMFLFQFVNYYSSCFYIAFFKGKFVGYPGDPVYWLGKYRNEECDPGGCLLELTTQLTIIMGGKAIWNNIQEVLLPWIMNLIGRFHRVSGSEKITPRWEQDYHLQPMGKLGLFYEYLEMRLRPSSLHALISAWFEPITCHEVS

SEQ ID NO: 90830 - protein, 119 aa, Homo sapiens
MAGQGLPLHVATLLTGLLECLGFAGVLFGWPSLVFVFKNEDYFKDLCGPDAGPIGNATGQADCKAQDERFSLIFTLGSFMNNFMTFPTGYIFDRFKTTVARLIAIFFYTTATLIIAFTS

SEQ ID NO: 90831 - protein, 157 aa, Homo sapiens
MGPLSAPPCTQHITWKGLLLTASLLNFWNLPITAQVTIEALPPKVSEGKDVLLLVHNLPQNLAGYIWYKGQLMDLYHYITSYVVDGQINIYGPAYTGRETVYSNASLLIQNVTREDAGSYTLHIIKRGDRTRGVTGYFTFNLYPPSGIGRLPLLNPI

SEQ ID NO: 90832 - protein, 1099 aa, Homo sapiens
  MOD_RES (1)..(1): Any amino acid
XSRHSSYERGGDVSPSPYSSSSWRRSRSPYSPVLRRSGKSRSRSPYSSRHSRSRSRHRLSRSRSRHSSISPSTLTLKSSLAAELNKNKKARAAEAARAAEAAKAAEATKAAEAAAKAAKASNTSTPTKGNTETSASASQTNHVKDVKKIKIEHAPSPSSGGTLKNDKAKTKPPLQVTKVENNLIVDKATKKAVIVGKESKSAATKEESVSLKEKTKPLTPSIGAKEKEQHVALVTSTLPPLPLPPMLPEDKEADSLRGNISVKAVKKEVEKKLRCLLADLPLPPELPGGDDLSKSPEEKKTATQLHSKRRPKICGPRYGETKEKDIDWGKRCVDKFDIIGIIGEGTYGQVYKARDKDTGEMVALKKVRLDNEKEGFPITAIREIKILRQLTHQSIINMKEIVTDKEDALDFKKDKGAFYLVFEYMDHDLMGLLESGLVHFNENHIKSFMRQLMEGLDYCHKKNFLHRDIKCSNILLNNRGQIKLADFGLARLYSSEESRPYTNKVITLWYRPPELLLGEERYTPAIDVWSCGCILGELFTKKPIFQANQELAQLELISRICGSPCPAVWPDVIKLPYFNTMKPKKQYRRKLREEFVFIPAAALDLFDYMLALDPSKRCTAEQALQCEFLRDVEPSKMPPPERFLHAEAMHHSKMAESLPLWQDCHELWSKKRRRQKQMGMTDDVSTIKAPRKDLSLGLDDSRTNTPQGVLPSSQLKSQGSSNVAPGEKQTDPSTPQQESSKPLGGIQPSSQTIQPKVETDAAQAAVQSAFAVLLTQLIKAQQSKQKDVLLEERENGSGHEASLQLRPPPEPSTPVSGQDDLIQHQDMRILELTPEPDRPRILPPDQRPPEPPEPPPVTEEDLDYRTENQHVPTTSSSLTDPHAGVKAALLQLLAQHQPQDDPKREGGIDYQAGDTYVSTSDYKDNFGSSSFSSAPYVSNDGLGSSSAPPLERRSFIGNSDIQSLDNYSTASSHSGGPPQPSAFSESFPSSVAGYGDIYLNAGPMLFSGDKDHRFEYSHGPIAVLANSSDPSTGPESTHPLPAKMHNYNYGGNLQENPSGPSLMHGQTWTSPAQGPGYSQGYRGHISTSTGRGRGRGLPY

SEQ ID NO: 90833 - protein, 63 aa, Homo sapiens
MAFANLRKVLISDSLDPCCRKILQDGGLQVVEKQNLSKEELIAELQVWTMWIWRPQQGRASWL

SEQ ID NO: 90834 - protein, 71 aa, Homo sapiens
MPPSTTWPQRGDMSQHQQACGICRQEDPPEDMKQDRDIQAVATSLLPLTEANLRMFQRAQDDLIPAVDRQF

SEQ ID NO: 90835 - protein, 50 aa, Homo sapiens
MPNQGEDCYFFFYSTCTKGDSCPFRHCEAAIGNETVCTLWQEGRCFRQVC

SEQ ID NO: 90836 - protein, 248 aa, Homo sapiens
MPGCPCPGCGMAGPRLLFLTALALELLERAGGSQPALRSRGTATACRLDNKESESWGALLSGERLDTWICSLLGSLMVGLSGVFPLLVIPLEMGTMLRSEAGAWRLKQLLSFALGGLLGNVFLHLLPEAWAYTCSASPGGEGQSLQQQQQLGLWVIAGILTFLALEKMFLDSKEEGTSQAPNKDPTAAAAALNGGHCLAQPAAEPGLGAVVRSIKVSGYLNLLANTIDNFTHGLAVAASFLVSKKVRG

SEQ ID NO: 90837 - protein, 137 aa, Homo sapiens
MSKGPAVGIDLGTTYSCVGVFQHGKVEIIANDQGNRTTPSYVAFTDTERLIGDAAKNQVAMNPTNTVFDAKRLIGRRFDDAVVQSDMKHWPFMVVNDAGRPKVQVEYKGETKSFYPEEVSSMVLTKMKEIAEAYLGK

SEQ ID NO: 90838 - protein, 219 aa, Homo sapiens
MLNVHNLNYSSSRTLLFQRFSVIFMDVLFVYAVRECCKCIDGKKVGKELTEKPKFILSVLLLWNFGLLIVDHIHFQYNGFLFGLMLLSIARLFQKRHMEGAFLFAVLLHFKHIYLYVAPAYGVYLLRSYCFTANKPDGSIRWKSFSFVRVISLGLVVFLVSALSLGPFLALNQLPQVFSRLFPFKRGLCHAYWAPNFWALYNALDKVLSVIALYFLSLV

SEQ ID NO: 90839 - protein, 93 aa, Homo sapiens
  MOD_RES (1)..(1): Any amino acid
XCPYTYMSYFLRNVTDTDILALERRLLQTMDMIISKKKRMAMARRTMFQKGEVHNKPSGFWGMIKSVTTSASGSETSLSLCAKWITPWHKTIP

SEQ ID NO: 90840 - protein, 118 aa, Homo sapiens
MSEIRKDTLKAILLELECHFTWNLLKEDIDLFEVEDTIGQQLEFLTTKSRLALYNLLAYVKHLKGQNKDALECLEQAEEIIQQEHSDKEEVRSLVTWGNYAWVYYHMDQLEEAQKYTD

SEQ ID NO: 90841 - protein, 72 aa, Homo sapiens
  MOD_RES (1)..(1): Any amino acid
XSPPKLSGVQQPSEGVGGGRCSEISAELIRSLTELQELEAVYERLCGEEKVVERELDALLEQQNTIEILICS

SEQ ID NO: 90842 - protein, 316 aa, Homo sapiens
MHHRMNEMNLSPVGMEQLTSSSVSNALPVSGSHLGLAASPTHSAIPAPGLPVAIPNLGPSLSSLPSALSLMLPMGIGDRGVMCGLPERNYTLPPPPYPHLESSYFRTILPGILSYLADRPPPQYIHPNSINVDGNTALSITNNPSALDPYQSNGNVGLEPGIVSIDSRSVNTHGAQSLHPSDGHEVALDTAITMENVSRVTSPISTDGMAEELTMDGVAGEHSQIPNGSRSHEPLSVDSVSNNLAADAVGHGGVIPMHGNGLELPVVMETDHIASRVNGMSDSALSDSIHTVAMSTNSGVLCVTAPIPRTVPNMDQ

SEQ ID NO: 90843 - protein, 174 aa, Homo sapiens
MEPRAGVSKQDIREQIWGYMESQNLADFPRPVHHRIPNFKSKKTLLVPTPRLRTGLFNKITPPPGATKDILRKCATSQGVRNYSVPIGLDSRVLVDLVVVGSVAVSEKGWRIGKGEGYADLEYAMMVSMGAVSKETPVVTIVHDCQVVDIPEELVEEHDITVDYILTPTRVIAT

SEQ ID NO: 90844 - protein, 36 aa, Homo sapiens
MGEMEQLRQEAEQLKKQIADARKACADVTLAERDLL

SEQ ID NO: 90845 - protein, 99 aa, Homo sapiens
MGPSASSHGSPVPLPSDLSFRSPTPSNLPMVQLWAAHAHEGFSHLPSGLYPSYLHLNHLEPPSSGSPLLSQLGQPSIFDTQKGQGPGGDGFYLPTAGAP

SEQ ID NO: 90846 - protein, 327 aa, Homo sapiens
METFDPTELPELLKLYYRRLFPYSQYYRWLNYGGGDGVIKNYFQHREFSFTLKDDIYIRYQSFNNQSDLEKEMQKMNPYKIDIGAVYSHRPNQHNTVKLGAFQAQEKELVFDIDMTDYDDVRRCCSSADICPKCWTLMTMAIRIIDRALKEDFGFKHRLWVYSGRRGVHCWVCDESVRKLSSAVRSGIVEYLSLVKGGQDVKKKVHLSEKIHPFIRKSINIIKKYFEEYALVNQDILENKESWDKILALVPETIHDELQQSFQKSHNSLQRWEHLKKVASRYQNNIKNDKYGPWLEWEIMLQYCFPRLDINVSKGINHLLKSPFSVH

SEQ ID NO: 90847 - protein, 92 aa, Homo sapiens
MVTQILGAMESQVGGGPAGPALPNGPLLGTNGATDDSKTNLIVNYLPQNMTQDEFKSLFGSIGDIESCKLVRDKITDKAINTLNGLKLQTKT

SEQ ID NO: 90848 - protein, 106 aa, Homo sapiens
MLDVALFMSNAMRLKAVLEQGPSSHYYTTLVTLISLSLLLQVVIGVLLVVIARLNLNEVEKQWRLNQLNNAATILVFFTVVINVFITAFGAHKTGFLAARASRNPL

SEQ ID NO: 90849 - protein, 104 aa, Homo sapiens
IHINNKLRRGDIIGVQGNPGKTKKGELSIIPYEITLLSPCLHMLPHLHFGLKDKETRYRQRYLDLILNDFVRQKFIIRSKIITYIRSFLDELGFLEVRRVPCLT

SEQ ID NO: 90850 - protein, 66 aa, Homo sapiens
MQAKYSSTRDMLDDDGDTTMSLHSQGSATTRHPEPRRTGWSRVARSRLTAALTSLAQAILPPQPSE

SEQ ID NO: 90851 - protein, 113 aa, Homo sapiens
MVGALVPFQLPILLKGTSDDDVPCPGYLFEEIAKISHESPGSSQCLLEYLLSRLHSSSGHGKLKVLKILLYLCSHGSSFFLLILKRNSAFIQEAAAFAGPPDPLHGNSLYQKV

SEQ ID NO: 90852 - protein, 479 aa, Homo sapiens
GNMLRGIGETPIVPLGISYIDDFAKEGHSSLYLGSLNAIGMIGPVIGFALGSLFAKMYVDIGYVDLSTIRITPKDSRWVGAWWLGFLVSGLFSIISSIPFFFLPKNPNKPQKERKISLSLHVLKTNDDRNQTANLTNQGKNVTKNVTGFFQSLKSILTNPLYVIFLLLTLLQVSSFIGSFTYVFKYMEQQYGQSASHANFLLGIITIPTVATGMFLGGFIIKKFKLSLVGIAKFSFLTSMISFLFQLLYFPLICESKSVAGLTLTYDGNNSVASHVDVPLSYCNSECNCDESQWEPVCGNNGITYLSPCLAGCKSSSGIKKHTVFYNCSCVEVTGLQNRNYSAHLGECPRDNTCTRKFFIYVAIQVINSLFSATGGTTFILLTVKIVQPELKALAMGFQSMVIRTLGGILAPIYFGALIDKTCMKWSTNSCGAQGACRIYNSVFFGQKYPASDIKTTRLSGRNKKLLQLYLTSYRSINL

SEQ ID NO: 90853 - protein, 45 aa, Homo sapiens
MSPQKRVKNVQAQNRTSQGSSSFQTTLSAWKVKQDPSNSKNISKH

SEQ ID NO: 90854 - protein, 121 aa, Homo sapiens
MAPKDRKPKRSTWRFNLDLTHPVEDGIFDSGNFEQFLREKVKVNGKTGNLGNVVHIERFKNKITVVSEKQFSKRYLKYLTKKYLKKNNLRDWLRVVASDKETYELRYFQISQDEDESESED

SEQ ID NO: 90855 - protein, 114 aa, Homo sapiens
MFRKGKKRHSSSSSQSSEISTKSKSVDSSLGGLSRSSTVASLDTDSTKSSGQSNNNSDTCAEFRIKYVGAIEKLKLSEGKGLEGPLDLINYIDVAQQDGKLPFVPPEEEFIMGV

SEQ ID NO: 90856 - protein, 25 aa, Homo sapiens
MVVSEVDIAKADPAAASHPLLLNGD

SEQ ID NO: 90857 - protein, 125 aa, Homo sapiens
VRMAEMVSMGVGNKAFRDIAPSEEAINDRTVNYVLKCREVRSRASIAVAPFDHDSLYLGASNSLPGDPASCSVLGSLNLHLYRDPALLGLRCPLYPSFPEEAALEAEAELGGQPSLSLSPGLDEQ

SEQ ID NO: 90858 - protein, 100 aa, Homo sapiens
MKLHCCLFTLVASIIVPAAFVLEDVDFDQMVSLEANRSSYNASFPSSFELSASSHSDDDVIIAKEGTSVSIECLLTASHYEDVHWHNSKGQQLDGRSREP

SEQ ID NO: 90859 - protein, 198 aa, Homo sapiens
LHSTPERPGILSPATSEAVCQEKFNMEFRDNPGNFVKTEETLFEIQGIDPIASAIQNLKTTDKTKPSNLVNTCIRTTLDRAACLPPGDHNALYVNSFPLLDPSDAPFPSLDSPGKAIRGPQQMAPCIVHLLSILQQGKQLPIWKPFPNQDSDSVVLSGTDSELHIPRVCEFCQAVFPPSITSRGDFLRHLNSHFNGET

SEQ ID NO: 90860 - protein, 145 aa, Homo sapiens
MLALRCGSRWLGLLSVPRSVPLRLPAARACSKGSGDPSSSSSSGNPLVYLDVDANGKPLGRVVLELKADVVPKTAENFRALCTGEKGFGYKGSTFHRVIPSFMCQAGDFTNHNGTGGKSIYGSRFPDENFTLKHVGPGEWGPPLG

SEQ ID NO: 90861 - protein, 42 aa, Homo sapiens
MYFAPSMKDFTQYIFTEKLKQDKGSDASWKNDQEPPPETMVD

SEQ ID NO: 90862 - protein, 52 aa, Homo sapiens
GNQHEELQNVRKHIHSCFTNISCFLLPHPGLKVATNPNFDGKLKGLYKDLSR

SEQ ID NO: 90863 - protein, 347 aa, Homo sapiens
MGSLFRSETMCLAQLFLQSGTAYECLSALGEKGLVQFRDLNQNVSSFQRKFVGEVKRCEELERILVYLVQEINRADIPLPEGEASPPAPPLKQVLEMQEQLQKLEVELREVTKNKEKLRKNLLELIEYTHMLRVTKTFVKRNVEFEPTYEEFPSLESDSLLDYSCMQRLGAKLGFVSGLINQGKVEAFEKMLWRVCKGYTIVSYAELDESLEDPETGEVIKWYVFLISFWGEQIGHKVKKICDCYHCHVYPYPNTAEERREIQEGLNTRIQDLYTVLHKTEDYLRQVLCKAAESVYSRVIQVKKMKAIYHMLNMCSFDVTNKCLIAEVWCPEADLQDLRRALEEGSF

SEQ ID NO: 90864 - protein, 122 aa, Homo sapiens
  MOD_RES (1)..(1): Any amino acid
XTMTWLQTLTGLLEQMQVHRDAESQLVLQEWKKERKEMREMTKSFFNAQFGSLFRTDQNPTYFLRRLSRFADIYMASLSCLLNYDVSHTFYPRRTPLQHELPAWSERPPTFGTPLLQEAQAK

SEQ ID NO: 90865 - protein, 155 aa, Homo sapiens
MATASPSVFLLMVNGQVESAQFPEYDDLYCKYCFVYGQDWAPTAGLEEGISQITSKSQDVRQALVWNFPIDVTFKSTNPYGWPQIVLSVYGPDVFGNDVVRGYGAVHVPFSPGRHKRTIPMFVPESTSKLQKFTSHLQGCLSKIAVFQDESGLSP

SEQ ID NO: 90866 - protein, 138 aa, Homo sapiens
MRLDNMLLAEGVAGPEKGGGSAAAAAAAAASGGAGSDNSVEHSDYRAKLSQIRQIYHTELEKYEQACNEFTTHVMNLLREQSRTRPISPKEIERMVSIIHRKFSSIQMQLKQSTCEAVMILRSRFLDARRKRRNFNKQ

SEQ ID NO: 90867 - protein, 616 aa, Homo sapiens
MGVKTFTHSSSSHSQEMLGKLNMLRNDGHFCDITIRVQDKIFRAHKVVLAACSDFFRTKLVGQAEDENKNVLDLHHVTVTGFIPLLEYAYTATLSINTENIIDVLAAASYMQMFSVASTCSEFMKSSILWNTPNSQPEKGLDAGQENNSNCNFTSRDGSISPVSSECSVVERTIPVCRESRRKRKSYIVMSPESPVKCGTQTSSPQVLNSSASYSENRNQPVDSSLAFPWTFPFGIDRRIQPEKVKQAENTRTLELPGPSETGRRMADYVTCESTKTTLPLGTEEDVRVKVERLSDEEVHEEVSQPVSASQSSLSDQQTVPGSEQVQEDLLISPQSSSIGSVDEGVSEGLPTLQSTSSTNAPPDDDDRLENVQYPYQLYIAPSTSSTERPSPNGPDRPFQCPTCGVRFTRIQNLKQHMLIHSGIKPFQCDRCGKKFTRAYSLKMHRLKHEGKRCFRCQICSATFTSFGEYKHHMRVSRHIIRKPRIYECKTCGAMFTNSGNLIVHLRSLNHEASELANYFQSSDFLVPDYLNQEQEETLVQYDLGEHGFESNSSVQMPVISQVSSTQNCESTFPLGSLGGLAEKEEEVPEQPKSSACAEATRDDPPKSELSSITIE

SEQ ID NO: 90868 - protein, 51 aa, Homo sapiens
  MOD_RES (1)..(1): Any amino acid
XQLLANSAARKKKLLEAQSHFRKEPPRTPPPALRRHVQPWRLRQLSLFCFQ

SEQ ID NO: 90869 - protein, 132 aa, Homo sapiens
MELVQVLKRGLQQITGHGGLRGYLRVFFRTNDAKVGTLVGEDKYGNKYYEDNKQFFGRHRWVVYTTEMNGKNTFWDVDGSMVPPEWFFLLLLVDQSGSLNLSTLGGRGGQITGGQEFETSLDNMASLASQYD

SEQ ID NO: 90870 - protein, 898 aa, Homo sapiens
MAVRPGLWPALLGIVLAAWLRGSGAQQSATVANPVPGANPDLLPHFLVEPEDVYIVKNKPVLLVCKAVPATQIFFKCNGEWVRQVDHVIERSTDGSSGLPTMEVRINVSRQQVEKVFGLEEYWCQCVAWSSSGTTKSQKAYIRIAYLRKNFEQEPLAKEVSLEQGIVLPCRPPEGIPPAEVEWLRNEDLVDPSLDPNVYITREHSLVVRQARLADTANYTCVAKNIVARRRSASAAVIVYVNGGWSTWTEWSVCSASCGRGWQKRSRSCTNPAPLNGGAFCEGQNVQKTACATLCPVDGSWSPWSKWSACGLDCTHWRSRECSDPAPRNGGEECQGTDLDTRNCTSDLCVHTASGPEDVALYVGLIAVAVCLVLLLLVLILVYCRKKEGLDSDVADSSILTSGFQPVSIKPSKADNPHLLTIQPDLSTTTTTYQGSLCPRQDGPSPKFQLTNGHLLSPLGGGRHTLHHSSPTSEAEEFVSRLSTQNYFRSLPRGTSNMTYGTFNFLGGRLMIPNTGISLLIPPDAIPRGKIYEIYLTLHKPEDVRLPLAGCQTLLSPIVSCGPPGVLLTRPVILAMDHCGEPSPDSWSLRLKKQSCEGSWEDVLHLGEEAPSHLYYCQLEASACYVFTEQLGRFALVGEALSVAAAKRLKLLLFAPVACTSLEYNIRVYCLHDTHDALKEVVQLEKQLGGQLIQEPRVLHFKDSYHNLRLSIHDVPSSLWKSKLLVSYQEIPFYHIWNGTQRYLHCTFTLERVSPSTSDLACKLWVWQVEGDGQSFSINFNITKDTRFAELLALESEAGVPALVGPSAFKIPFLIRQKIISSLDPPCRRGADWRTLAQKLHLDSHLSFFASKPSPTAMILNLWEARHFPNGNLSQLAAAVAGLGQPDAGLFTVSEAEC

SEQ ID NO: 90871 - protein, 37 aa, Homo sapiens
MQRPSVSRAENYQLLWDTIASLKQCEQAMQHAFIPLE

SEQ ID NO: 90872 - protein, 243 aa, Homo sapiens
  MOD_RES (1)..(1): Any amino acid
XTAITHALTSASTLCQVEPVGRWFEAFVKRRNRNASASFQELEDKKELSEESEDEELQLEEFPMLKTLDPKDWKNQDHYAVLGLGHVRYKATQRQIKAAHKAMVLKHHPDKRKAAGEPIKEGDNDYFTCITKAYEMLSDPVKRRAFNSVDPTFDNSVPSKSEAKDNFFEVFTPVFERNSRYNFDSWREFSYLDEEEKEKAECRDERRWIEKQNRATRAQRKKEEMNRIRTLVDNAYSCDPRIK

SEQ ID NO: 90873 - protein, 42 aa, Homo sapiens
MMSSVSTESKLQQAVSLQGVDPETCMIVFKNHWAQVVKILEK

SEQ ID NO: 90874 - protein, 168 aa, Homo sapiens
MEPNSLRTKVPAFLSDLGKATLRGIRKCPRCGTYNGTRGLSCKNKTCGTIFRYGARKQPSVEAVKIITGSDLQVYSVRQRDRGPDYRCFVELGVSETTIQTVDGTIITQLSSGRCYVPSCLKAATQGVVENQCQHIKLAVNCQAEATPLTLKSSVLNAMQASPETKQT

SEQ ID NO: 90875 - protein, 575 aa, Homo sapiens
MSGNWVHPGQILIWAIWVLAAPTKGPSAEGPQRNTRLGWIQGKQVTVLGSPVPVNVFLGVPFAAPPLGSLRFTNPQPASPWDNLREATSYPNLCLQNSEWLLLDQHMLKVHYPKFGVSEDCLYLNIYAPAHADTGSKLPVLVWFPGGAFKTGSASIFDGSALAAYEDVLVVVVQYRLGIFGFFTTWDQHAPGNWAFKDQVAALSWVQKNIEFFGGDPSSVTIFGESAGAISVSSLILSPMAKGLFHKAIMESGVAIIPYLEAHDYEKSEDLQVVAHFCGNNASDSEALLRCLRTKPSKELLTLSQKTKSFTRVVDGAFFPNEPLDLLSQKAFKAIPSIIGVNNHECGFLLPMKEAPEILSGSNKSLALHLIQNILHIPPQYLHLVANEYFHDKHSLTEIRDSLLDLLGDVFFVVPALITARYHRDAGAPVYFYEFRHRPQCFEDTKPAFVKADHADEVRFVFGGAFLKGDIVMFEGATEEEKLLSRKMMKYWATFARTGNPNGNDLSLWPAYNLTEQYLQLDLNMSLGQRLKEPRVEFWTSTIPLILSASDMLHSPLSSLTFLSLLQPFFFFCAP

SEQ ID NO: 90876 - protein, 162 aa, Homo sapiens
MYQPEDDNNSDVTSDDDMTRNRRESSPPHSVHSFSGDRDWDRRGRSRDMEPRDRWSHTRNPRSRMPPRDLSLPVVAKTSFEMDREDDRDSRAYESRSQDAESYQNVVDLAEDRKPHNTIQDNMENYRKLLSLGFLAQDSVPAEKRNTEMLDNLPSAGSQVGP

SEQ ID NO: 90877 - protein, 138 aa, Homo sapiens [sequence omitted]

SEQ ID NO: 90878 - protein, 573 aa, Homo sapiens
MVLGPEQKMSDDSVSGDHGESASLGNINPAYSNPSLSQSPGDSEEYFATYFNEKISIPEEEYSCFSFRKLWAFTGPGFLMSIAYLDPGNIESDLQSGAVAGFKLLWILLLATLVGLLLQRLAARLGVVTGLHLAEVCHRQYPKVLPRGSTLFLLQVPRVILWLMVELAIIGSDMQEVIGSAIAINLLSVGRIPLWGGVLITIADTFVFLFLDKYGLRKLEAFFGFLITIMALTFGYEYVTVKPSQSQVLKGMFVPSCSGCRTPQIEQAVGIVGAVIMPHNMYLHSALVKSRQVNRNNKQEVREANKYFFIESCIALFVSFIINVFVVSVFAEAFFGKTNEQVVEVCTNTSSPHAGLFPKDNSTLAVDIYKGGVVLGCYFGPAALYIWAVGILAAGQSSTMTGTYSGQFVMEGFLNLKWSRFARVVLTRSIAIIPTLLVAVFQDVEHLTGMNDFLNVLQSLQLPFALIPILTFTSLRPVMSDFANGLGWRIAGGILVLIICSINMYFVVVYVRDLGHVALYVVAAVVSVAYLGFVFYLGWQCLIALGMSFLDCGHTVSISKGLLTEEATRGYVK

SEQ ID NO: 90879 - protein, 305 aa, Homo sapiens
MAGKRSGWSRAALLQLLLGVNLVVMPPTRARSLRFVTLLYRHGDRSPVKTYPKDPYQEEEWPQGFGQLTKEGMLQHWELGQALRQRYHGFLNTSYHRQEVYVRSTDFDRTLMSAEANLAGLFPPNGMQRFNPNISWQPIPVHTVPITEDRQFLDMVANETGLTDLTLETVWNVYDTLFCEQTHGLRLPPWASPQTMQRLSRLKDFSFRFLFGIYQQAEKARLQGGVLLAQIRKNLTLMATTSQLPKLLVYSAHDTTLVALQMALDVYNGEQAPYASCHIFELYQEDSGNFSVEMYFRNESDKAPW

SEQ ID NO: 90880 - protein, 186 aa, Homo sapiens
MSEPGGGGGEDGSAGLEVSAVQNVADVSVLQKHLRKLVPLLLEDGGEAPAALEAALEEKSALEQMRKFLSDPQVHTVLVERSTLKEDVGDEGEEEKEFISYNINIDIHYGVKSNSLAFIKRTPVIDADKPVSSQLRVLTLSEDSPYETLHSFISNAVAPFFKSYIRESGKADRPEMMGSLWRPIAH

SEQ ID NO: 90881 - protein, 275 aa, Homo sapiens
MRDPNTKRSRGFGFVTYATVEEVDAAMNARPHKVDGRVVEPKRAVSREDSQRPDAHLTVKKIFVGGIKEDTEEHHLRDYFEQYGKIEVIEIMTDRGSGKKRGFAFVTFDDHDSVDKIVIQKYHTVNGHNCEVRKALSKQEMASASSSQRGRSGSGNFGGGRGGGFGGNDNFGRGGNFSGRGGFGGSRGGGGYGGSGDGYNGFGNDGSNFGGGGSYNDFGNYNNQSSNFGPMKGGNFEGRSSGPHGGGGQYFAKPRNQGGYGGSSSSSSYGSGRRF

SEQ ID NO: 90882 - protein, 362 aa, Homo sapiens
MPRVKAAQAGRQSSAKRHLAEQFAVGEIITDMAKKEWKVGLPIGQGGFGCIYLADMNSSESVGSDAPCVVKVEPSDNGPLFTELKFYQRAAKPEQIQKWIRTRKLKYLGVPKYWGSGLHDKNGKSYRFMIMDRFGSDLQKIYEANAKRFSRKTVLQLSLRILDILEYIHEHEYVHGDIKASNLLLNYKNPDQVYLVDYGLAYRYCPEGVHKEYKEDPKRCHDGTIEFTSIDAHNGVAPSRRGDLEILGYCMIQWLTGHLPWEDNLKDPKYVRDSKIRYRENIASLMDKCFPEKNKPGEIAKYMETVKLLDYTEKPLYENLRDILLQGLKAIGSKDDGKLDLSVVENGGLKAKTITKETRTAF

SEQ ID NO: 90883 - protein, 202 aa, Homo sapiens
MENLPAVTTEEPTPMGRGPVGPSGGGSTRDQVRTVVMRPSVSWEKAGPEEAKAPVRGDLTLQLLAVRRKSRLRDPGLQQTLRGQLRLLENDSREMARVLGELSARLLSIHSDQDRIVVTFKTFEEIWKFSTYHALGFTHHCLANLLMDQAFWLLLPSEEEETAIQVHVDENALRLTHESLLIQEGGLLGSPRTPSTMPWVAL

SEQ ID NO: 90884 - protein, 297 aa, Homo sapiens
MEGKHKEELDTLKEEKENLQGLVTRQTYIIQELEKQLNRATTNNSVLQKQQLELMDTVHNLVNLCTKEVLLKGGKREEEKPFRDCADVYQAGFNKSGIYTIYINNMPEPKKVFCNMDVNGGGWTVIQHREDGSLDFQRGWKEYKMGFGNPSGEYWLGNEFIFAITSQRQYMLRIELMDWEGNRAYSQYDRFHIGNEKQNYRLYLKGHTGTAGKQSSLILHGADFSTKDADNDNCMCKCALMLTGGWWFDACGPSNLNGMFYTAGQNHGKLNGIKWHYFKGPSYSLRSTTMMIRPLDF

SEQ ID NO: 90885 - protein, 675 aa, Homo sapiens
MKQIDIMVAHKKSEWEGRTHALETCLKIREQELKSLRSQLDVTHKEVGMLHQQVEEHEKIKQEMTMEYKQELKKLHEELCILKRSYEKLQKKQMREFRGNTKNHREDRSEIERLTAKIEEFRQKSLDWEKQRLIYQQQVSSLEAQRKALAEQSEIIQAQLVNRKQKLESVELSSQSEIQHLSSKLERANDTICANELEIERLTMRVNDLVGTSMTVLQEQQQKEEKLRESEKLLEALQEEKRELKAALQSQENLIHEARIQKEKLQEKVKATNTQHAVEAIRPREESLAEKKYTSQGQGDLDSVLSQLNFTHTSEDLLQAEVTCLEGSLESVSATCKQLSQELMEKYEELKRMEAHNNEYKAEIKKLKEQILQGEQSYSSALEGMKMEISHLTQELHQRDITIASTKGSSSDMEKRLRAEMQKAEDKAVEHKEILDQLESLKLENRHLSEMVMKLELGLHEAKEISLADLQENYIEALNKLVSENQQLQKDLMNTKSQLEISTQMCKKQNDRIFKPTHSRTTEFKNTEFKPTHGQHRHDGIKTEHYKTDLHSPRGQASDSINPMSRVLSPLSPQISPCSSTRSLTSYSLCKTHSLPSALDTNEANFSDTMSESMNDQEEFISSCSLPVSPLGSIATRFLEEEELRSHHILERLDAHIEELKRESEKTVRQFTALK

SEQ ID NO: 90886 - protein, 84 aa, Homo sapiens
MVRCVPSAVIVCFLRPPQPGRTVIFHDVAVLTDKLFPIVEAMQKHFSAGLGTYYSDSIFFLSVAMHQIMPKECTPLVQGRTSCT

SEQ ID NO: 90887 - protein, 45 aa, Homo sapiens
  MOD_RES (1)..(1): Any amino acid
XVREKFGDQDVWILPQAEWQPGETLRGTAERTLATLSGDTHFKGG

SEQ ID NO: 90888 - protein, 137 aa, Homo sapiens
MASSVAPYEQLVRQVEALKAENSHLRQELRDNSSHLSKLETETSGMKEVLKHLQGKLEQEARVLVSSGQTEVLEQLKALQMDITSLYNLKFQPPTLGPEPAARTPEGSPVHGSGPSKDSFGELSRATIRLLEELDRE

SEQ ID NO: 90889 - protein, 191 aa, Homo sapiens
MEAQAQGLLETEPLQGTDEDAVASADFSSMLSEEEKEELKAELVQLEDEITTLRQVLSAKERHLVEIKQKLGMNLMNELKQNFSKSWHDMQTTTAYKKTHETLSHAGQKATAAFSNVGTAISKKFGDMRNSPTFKSFEERVETTVTSLKTKVGGTNPNGGSFEEVLSSTAHASAQSLAGGSRRTKEEELQC

SEQ ID NO: 90890 - protein, 159 aa, Homo sapiens
MELSESVQKGFQMLADPRSFDSNAFTLLLRAAFQSLLDAQADEAVLDHPDLKHIDPVVLKHCHAAAATYILEAGKHRADKSTLSTYLEDCKFDRERIELFCTEYQNNKNSLEILLGRIFYQAEMHRTTRIKITELNPHLMCVLCGGYFIDATTIIECLH

SEQ ID NO: 90891 - protein, 503 aa, Homo sapiens
  MOD_RES (1)..(1): Any amino acid
XEQATMRKFSLGGRGGYAGVAGYGTFAFGGDAGGMLGQGPMWARIAWAVSQSEEEEQEEARAESQSEEQQEARAESPLPQVSARPVPEVGRAPTRSSPEPTPWEDIGQVSLVQIRDLSGDAEAADTISLDISEVDPAYLNLSDLYDIKYLPFEFMIFRKVPKSAQPEPPSPMAEEELAEFPEPTWPWPGELGPHAGLEITEESEDVDALLAEAAVGRKRKWSSPSRSLFHFPGRHLPLDEPAELGLRERVKASVEHISRILKGRPEGLEKEGPPRKKPGLASFRLSGLKSWDRAPTFLRELSDETVVLGQSVTLACQVSAQPAAQATWSKDGAPLESSSRVLISATLKNFQLLTILVVVAEDLGVYTCSVSNALGTVTTTGVLRKAERPSSSPCPDIGEVYADGVLLVWKPVESYGPVTYIVQCSLEGGSWTTLASDIFDCCYLTSKLSRGGTYTFRTACVSKAGMGPYSSPSEQVLLGGPSHLEPEEQEVGVRNSKSQLSSL

SEQ ID NO: 90892 - protein, 110 aa, Homo sapiens
MGKSLSHLPLHSSKEDAYDGVTSENMRNGLVNSEVHNEDGRNGDVSQFPYVEFTGRDSVTCPTCQGTGRIPRGQENQLVALIPYSDQRLRPRRTKLYVMASVFVCLLLSG

SEQ ID NO: 90893 - protein, 189 aa, Homo sapiens
MNSYTRGSRRPSAKAASPAASVTSRVSPSGPGVPVDADVLLEACCADGHRMATHQKDCSLPYATESKECRMVQEQCCHSQLEELHCATGISLANEQDRCATPHGDNASLEATFVKRCCHCCLLGRAAQAQGQSCEYSLMVGYQCGQVFQACCVKSQETGDLDVGGLQETDKIIEVEEEQEDPYLNDRCR

SEQ ID NO: 90894 - protein, 74 aa, Homo sapiens
MEARSMLVPPQASVCFEDVAMAFTQEEWEQLDLAQRTLYREVTLETWEHIVSLAGARRGPVQGRAGGPPSLKKW

SEQ ID NO: 90895 - protein, 44 aa, Homo sapiens
MNIFLWTKAALQILLMKKMFLRKIFMEDFLSTVFFISVLTECLN

SEQ ID NO: 90896 - protein, 368 aa, Homo sapiens
  MOD_RES (1)..(1): Any amino acid
XFRFEPEEDIKRKFMRKKDKKLSDMHQIVNIDLMLEMSTSLAAVTPIIERESGGHHYVNMTLPVDAVISVAPEETWGKVRKLLVDAIHNQLTDMEKCILKYMKGTSIVVPEPLHFLLPGKKNLVTISYPSGIPDGQLQAYRKELHDLFNLPHDRPYFKRSNAYHFPDEPYKDGYIRNPHTYLNPPNMETGMDRIDDNGWGCAYRSLQTICSWFKHQGYTERSIPTHREIQQALVDAGDKPATFVGSRQWIGSIEVQLVLNQLIGITSKILFVSQGSEIASQGRELANHFQSEGTPVMIGGGVLAHTILGVAWNEITGQIKFLILDPHYTGAEDLQVILEKGWCGWKGPDFWNKDAYYNLCLPQRPNMI

SEQ ID NO: 90897 - protein, 664 aa, Homo sapiens
MEIIRSNFKSNLHKVYQAIEEADFFAIDGEFSGISDGPSVSALTNGFDTPEERYQKLKKHSMDFLLFQFGLCTFKYDYTDSKYITKSFNFYVFPKPFNRSSPDVKFVCQSSSIDFLASQGFDFNKVFRNGIPYLNQEEERQLREQYDEKRSQANGAGALSYVSPNTSKCPVTIPEDQKKFIDQVVEKIEDLLQSEENKNLDLEPCTGFQRKLIYQTLSWKYPKGIHVETLETEKKERYIVISKVDEEERKRREQQKHAKEQEELNDAVGFSRVIHAIANSGKLVIGHNMLLDVMHTVHQFYCPLPALSLNFPRCSFCLLHEVFIACYLAQEDLSEFKEMTTCVFPRLLDTKLMASTQPFKDIINNTSLAELEKRLKETPFNPPKVESAEGFPSYDTASEQLHEAGYDAYITGLCFISMANYLGSFLSPPKIHVSARSKLIEPFFNKLFLMRVMDIPYLNLEGPDLQPKRDHVLHVTFPKEWKTSDLYQLFSAFGNIQISWIDDTSAFVSLSQPEQVKIAVNTSKYAESYRIQTYAEYMGRKQEEKQIKRKWTEDSWKEADSKRLNPQCIPYTLQNHYYRNNSFTAPSTVGKRNLSPSQEEAGLEDGVSGEISDTELEQTDSCAEPLSEGRKKAKKLKRMKKELSPAGSISKNSPATLFEVPDTW

SEQ ID NO: 90898 - protein, 59 aa, Homo sapiens
DRMVEILFHYADRALKKCPDQGKIQVMEQHFQAIGMAYRNDWFLNIEPVLHPGINLTWS

SEQ ID NO: 90899 - protein, 146 aa, Homo sapiens
AKELRQKVKYLQDQLSPLTRQREYQEKEIQRLNKALEEALSIQTPPSSPPTAFGSPEGAGALLRKQELVTQNELLKQQVKIFEEDFQRERSDRERMNEEKEELKKQVEKLQAQVTLSNAQLKAFKDEEKAMPATSAEGRQPEAARP

SEQ ID NO: 90900 - protein, 43 aa, Homo sapiens
MAATAAVSPSDYLQPAASTTQDSQPSPLALLAATCSKIGPPAV

SEQ ID NO: 90901 - protein, 76 aa, Homo sapiens
MPTVVVMDVSLSMTRPVSIEGSEEYQPLSNMDDYDKTCLESALVGVCNIVQQEWGGAIPCQVVLVTDGCLGIGRGS

SEQ ID NO: 90902 - protein, 617 aa, Homo sapiens
  MOD_RES (1)..(1): Any amino acid
XRRERDDQMYRERLRTLLVIAVVMSLLNALSTSGGSISWNDFVHEMLAKGEVQRVQVVPESDVVEVYLHPGAVVFGRPRLALMYRMQVANIDKFEEKLRAAEDELNIEAKDRIPVSYKRTGFFGNALYSVGMTAVGLAILWYVFRLAGMTGREGGFSAFNQLKMARFTIVDGKMGKGVSFKDVAGMHEAKLEVREFVDYLKSPERFLQLGAKVPKGALLLGPPGCGKTLLAKAVATEAQVPFLAMAGPEFVEVIGGLGAARVRSLFKEARARAPCIVYIDEIDAVGKKRSTTMSGFSNTEEEQTLNQLLVEMDGMGTTDHVIVLASTNRADILDGALMRPGRLDRHVFIDLPTLQERREIFEQHLKSLKLTQSSTFYSQRLAELTPGFSGADIANICNEAALHAAREGHTSVHTLNFEYAVERVLAGTAKKSKILSKEEQKVVAFHESGHALVGWMLEHTEAVMKVSITPRTNAALGFAQMLPRDQHLFTKEQLFERMCMALGGRASEALSFNEVTSGAQDDLRKVTRIAYSMVKQFGMAPGIGPISFPEAQEGLMGIGRRPFSQGLQQMMDHFPPLTGSKTAGGQGLQTHREGAAGQPGQVAGAGKRPSGKGSDKL

SEQ ID NO: 90903 - protein, 37 aa, Homo sapiens
MAEKTQKSVKIAPGAVVCVESEIRGDVTIAGHGGACL

SEQ ID NO: 90904 - protein, 561 aa, Homo sapiens
MIRGRNSATSADEQPHIGNYRLLKTIGKGNFAKVKLARHILTGKEVAVKIIDKTQLNSSSLQKLFREVRIMKVLNHPNIVKLFEVIETEKTLYLVMEYASGGEVFDYLVAHGRMKEKEARAKFRQIVSAVQYCHQKFIVHRDLKAENLLLDADMNIKIADFGFSNEFTFGNKLDTFCGSPPYAAPELFQGKKYDGPEVDVWSLGVILYTLVSGSLPFDGQNLKELRERVLRGKYRIPFYMSTDCENLLKKFLILNPSKRGTLEQIMKDRWMNVGHEDDELKPYVEPLPDYKDPRRTELMVSMGYTREEIQDSLVGQRYNEVMATYLLLGYKSSELEGDTITLKPRPSADLTNSSAPSPSHKVQRSVSANPKQRRFSDQAGPAIPTSNSYSKKTQSNNAENKRPEEDRESGRKASSTAKVPASPLPGLERKKTTPTPSTNSVLSTSTNRSRNSPLLERASLGQASIQNGKDSLTMPGSRASTASASAAVSAARPRQHQKSMSASVHPNKASGLPPTESNCEVPRPRQVCWGSWCTCCPQPTLPPCPNNFFFPLGGPAVFLSS

SEQ ID NO: 90905 - protein, 57 aa, Homo sapiens
MKKTQVSRARPGAPRLSRKNRARCPGEAGAPWDLQLGRAGLCLPGETRGCGGGRRGV

SEQ ID NO: 90906 - protein, 77 aa, Homo sapiens
MFQVPDSEGGRAGSRKWQLLTGSLASTSPSLLSGQGPWAPLQRSASTRLVSGGHEAPRRRIEQSFWKSRRSYSFQQA

SEQ ID NO: 90907 - protein, 361 aa, Homo sapiens
MAPQRAGPGLGKPSSKKSRALRGGPGVPRARQRSPRAAAELNTEVPKPSAKDVEILEQESEVLEPSVEQDAESPGLSTAAGFESPEPGRDDPGPSEAQRAEVQGQHPPPGPKTSSSRSGSEAPHLRFPPCPEAPQRPPEERFMETPIEREIRRSCEREESLRRSRGLSPGRAGRELVELRVRPVLNLPGPGPALPRALERARAGAQMQRDIEREAHRQAALARPAVPEPRARSPPQPLGELKRFFEAAAGSGSSAGAGDGAGPQRLPEPGGRPRSAVQGGCRVLGSAPPPFTPSLLEQEVRAVREREQELQRQRRSVYGTAEFKEPTPSLTASRGDGKLVVIWPPRRKVSENGLEQEERKP

SEQ ID NO: 90908 - protein, 422 aa, Homo sapiens
MEALLEGIQNRGHGGGFLTSCEAELQELMKQIDIMVAHKKSEWEGRTHALETCLKIREQELKSLRSQLDVTHKEEFRQKSLDWEKQRLIYQQQVSSLEAQRKALAEQSEIIQAQLVNRKQKLESVELSSQSEIQHLSSKLERANDTICANELEIERLTMRVNDLVGTSMTVLQEQQQKEEKLRESEKLLEALQEEKRELKAALQSQENLIHEARIQKEKLQEKVKATNTQHAVEAISLESVSATCKQLSQELMEKYEELKRMEAHNNEYKAEIKKLKEQILQGEQSYSSALEGMKMEISHLTQELHQRDITIASTKGSSSDMEKRLRAEMQKAEDKAVEHKEILDQLESLKLENRHLSEMVMKLELGLHECSLPVSPLGSIATRFLEEEELRSHHILERLDAHIEELKRESEKTVRQFTALK

SEQ ID NO: 90909 - protein, 10 aa, Homo sapiens
MGPVSLLPKY

SEQ ID NO: 90910 - protein, 73 aa, Homo sapiens
MLEYALKQERAKYHKLKFGTDLNQGEKKADVSEQVSNGPVESVTLENSPLVWKEGRQLLRQYLEEVGYTDTIL

SEQ ID NO: 90911 - protein, 877 aa, Homo sapiens
  MOD_RES (1)..(1): Any amino acid
XGRRSPELSYQNSSDHANEEWETASESSDFSERRERREGPGSEPDSQVDGGLSGASLGEKKELAKRSFSSQRPVVDRQSRKLEPGGFGEKPVRPGGGDTSPRYESQQNGTPLKVKRSPDEALPGGLSGCSSGSGHSPYALERAAHASADLPEASSKKAEKEAKLAAPRAGEQGEAMKQFDLNYGSAIIENCGSSPGEESEVGSMVGEGFIEVLTKKQRRLLEEERRKKEQAVQVPVKGRGLSSRIPPRFAKKQNNLCLEQGDVTVPGSSLGTEIWESSSQALPVQAPANDSWRKAVTAFSSTETGSAEQGFKSSQGDSGVDLSAESRESSATSSQRSSPYGTLKPEEMSGPGLAEPKADSHKEQAPKPSEQKDSEQGSGQSKEHRPGPIGNERSLKNRKGSEGAERLQGAVVPPVNGVEIHVDSVLPVPPIEFGVSPKDSDFSLPPGSASGPTGSPVVKLQDALASNAGLTQSIPILRRDHHIQRAIGLSPMSFPTADLTLKMESARKAWENSPSLPEQSSPGGAGSGIQPPSSVGASSGVNYSSFGGVSMPPMPVASVAPSASMPGSHLPPLYLDGHVFASQPRLVPQTIPQQQSYQQAAAAQQIPISLHTSLQAQAQLGLRGGLPVSQSQEIFSSLQPFRSQVYMHPSLSPPSTMILSGGTALKPPYSAFPGMQPLEMVKPQSGSPYQPMSGNQALVYEGQLSQAAGLGASQMLDSQLPQQLTMPLPRYGSGQQPLILPQSIQLPPGQSLSVGAPRRIPPPGSQPPVLNTSREPSQMEMKGFHFADSKQNVPSGGPVPSPQTYRPSSASPSGKPSGSAVNMGSVQGHYVQQAKQRVDEKPSLGAVKLQEAPSAASQMKRTGAIKPRAVKVEESKA

SEQ ID NO: 90912 - protein, 298 aa, Homo sapiens
MTKLEYEEIALDLTPVIEELTNAGFLQTESELQELSEVLELLSAPELKSLAKTFHLVNPNGQKQQLVDAFLKLAKQRSVCTWGKNKPGIGAVILKRAKALAGQSVRICKGPRAVFSRILLLFSLTDSMEDEDAACGGQGQLSTVLLVNLGRMEFPSYTINRKTHIFQDRDDLIRYAAATHMLSDISSAMANGNWEEAKELAQCAKRDWNRLKNHPSLRCHEDLPLFLRCFTVGWIYTRILSRFVEILQRLHMYEEAVRELESLLSQRIYCPDSRGRWWDRLALNLHQHLKRLEPEPDV

SEQ ID NO: 90913 - protein, 132 aa, Homo sapiens
MTKIKADPDGPEAQAEACSGERTYQELLVNQNPIAQPLASRRLTRKLYKCIKKAVKQKQIRRGVKEVQKFVNKGEKGIMVLAGDTLPIEVYCHLPVMCEDRNLPYVYIPSKTVRSTWPPDLAQHWGVWDSLP

SEQ ID NO: 90914 - protein, 348 aa, Homo sapiens
MEVKPPPGRPQPDSGRRRRRRGEEGHDPKEPEQLRKLFIGGLSFETTDDSLREHFEKWGTLTDCVVMRDPQTKRSRGFGFVTYSCVEEVDAAMCARPHKVDGRVVEPKRAVSREDSVKPGAHLTVKKIFVGGIKEDTEEYNLRDYFEKYGKIETIEVMEDRQSGKKRGFAFVTFDDHDTVDKIVGRGGGSGNFMGRGGNFGGGGGNFGRGGNFGGRGGYGGGGGGSRGSYGGGDGGYNGFGGDGGNYGGGPGYSSRGGYGGGGPGYGNQGGGYGGGGGYDGYNEGGNFGGGNYGGGGNYNDFGNYSGQQQSNYGPMKGGSFGGRSSGSPYGGGYGSGGGSGGYGSRRF

SEQ ID NO: 90915 - protein, 23 aa, Homo sapiens
MERMQLWAMRLDLRDLQRHLRFQ

SEQ ID NO: 90916 - protein, 1434 aa, Homo sapiens
MSAPVGPRGRLAPIPAASQPPLQPEMPDLSHLTEEERKIILAVMDRQKKEEEKEQSVLKVKEEHKPQLTQWFPFSGITELVNNVLQPQQKQQNEKEPQTKLHQQFEMYKEQVKKMGEESQQQQEQKGDAPTCGICHKTKFADGCGHNCSYCQTKFCARCGGRVSLRSNKVMWVCNLCRKQQEILTKSGAWFYNSGSNTPQQPDQKVLRGLRNEEAPQEKKPKLHEQTQFQGPSGDLSVPAVEKSRSHGLTRQHSIKNGSGVKHHIASDIASDRKTSSELLNSKIISRKRSPSVSRDQNRRYDQREEREEYSQYATSDTAMPRSPSDYADRRSQHEPQFYEDSDHLSYRDSNRRSHRHSKEYIVDDEDVESRDEYERQRREEEYQSRYRSDPNLARYPVKPQPYEEQMRIHAEVSRARHERRHSDVSLANADLEDSRISMLRMDRPSRQRSISERRAAMENQRSYSMERTREAQGPSSYAQRTTNHSPPTPRRSPLPIDRPDLRRTDSLRKQHHLDPSSAVRKTKREKMETMLRNDSLSSDQSESVRPPPPKPHKSKKGGKMRQISLSSSEEELASTPEYTSCDDVEIESESVSEKGDSQKGKRKTSEQAVLSDSNTRSERQKEMMYFGGHSLEEDLEWSEPQIKDSGVDTCSSTTLNEEHSHSDKHPVTWQPSKDGDRLIGRILLNKRLKDGSVPRDSGAMLGLKVVGGKMTESGRLCAFITKVKKGSLADTVGHLRPGDEVLEWNGRLLQGATFEEVYNIILESKPEPQVELVVSRPIGDIPRIPDSTHAQLESSSSSFESQKMDRPSISVTSPMSPGMLRDVPQFLSGQLSIKLWFDKVGHQLIVTILGAKDLPSREDGRPRNPYVKIYFLPDRSDKNKRRTKTVKKTLEPKWNQTFIYSPVHRREFRERMLEITLWDQARVREEESEFLGEILIELETALLDDEPHWYKLQTHDVSSLPLPHPSPYMPRRQLHGESPTRRLQRSKRISDSEVSDYDCDDGIGVVSDYRHDGRDLQSSTLSVPEQVMSSNHCSPSGSPHRVDVIGRTRSWSPSVPPPQSRNVEQGLRGTRTMTGHYNTISRMDRHRVMDDHYSPDRDRDCEAADRQPYHRSRSTEQRPLLERTTTRSRSTERPDTNLMRSMPSLMTGRSAPPSPALSRSHPRTGSVQTSPSSTPVAGRRGRQLPQLPPKGTLDRKAGGKKLRSTVQRSTETGLAVEMRNWMTRQASRESTDGSMNSYSSEGNLIFPGVRLASDSQFSDFLDGLGPAQLVGRQTLATPAMGDIQVGMMDKKGQLEVEIIRARGLVVKPGSKTLPAPYVKVYLLDNGVCIAKKKTKVARKTLEPLYQQLLSFEESPQGKVLQIIVWGDYGRMDHKSFMGVAQILLDELELSNMVIGWFKLFPPSSLVDPTLAPLTRRASQSSLESSTGPSYSRS

SEQ ID NO: 90917 - protein, 100 aa, Homo sapiens
  MOD_RES (1)..(1): Any amino acid
XGTRARRGPTPPPHRKMRESLSDRSWHLEASLMMAQEFIPAVAKVGSQAFPPGLNEELVQLLLIRDELHTEQDAMLVDIEDLTRHAESQQKHMAEKMPAK

SEQ ID NO: 90918 - protein, 214 aa, Homo sapiens
METPSQRRATRSGAQASSTPLSPTRITRLQEKEDLQELNDRLAVYIDRVRSLETENAGLRLRITESEEVVSREVSGIKAAYEAELGDARKTLDSVAKERARLQLELSKVREEFKELKARNTKKEGDLIAAQARLKDLEALLNSKEAALSTALSEKRTLEGELHDLRGQVAKLEAALGEAKKQLQDEMLRRVDAENRLQTMKEELDFQKNIYRAA

SEQ ID NO: 90919 - protein, 277 aa, Homo sapiens
MACRPRSPPRHQSRCDGDASPPSPARWSLGRKRRADGRRWRPEDAEEAEHRGAERRPESFTTPEGPKPRSRCSDWASAVEEDEMRTRVNKEMASNIYFALRYKRKLLINDFGRERKSSSGSSDSKESMSTVPADFETDESVLMRRQKQINYGKNTIAYDRYIKEVPRHLRQPGIHPKTPNKFKKYSRRSWDQQIKLWKVALHFWDPPAEEGCDLQEIHPVDLESAESSSEPQTSSQDDFDVYSGTPTKVRHMDSQVEDEFDLEACLTEPLRDFSAMS

SEQ ID NO: 90920 - protein, 166 aa, Homo sapiens
MRIEKCYFCSGPIYPGHGMMFVRNDCKVFRFCKSKCHKNFKKKRNPRKVRWTKAFRKAAGKELTVVSTDNSFEFEKRRNEPIKYQRELWNKTIDAMKRVEEIKQKRQAKFIMNRLKKNKELQKVQDIKEVKQNIHLIRAPLAGKGKQLEEKMVQQLQEDVDMEDAP

SEQ ID NO: 90921 - protein, 97 aa, Homo sapiens
MAGQFRSYVWDPLLILSQIVLMQTVYYGSLGLWLALVDGLVRSSPSLDQMFDAEILGFSTPPGRLSMMSFILNALTWHFSLLLPHEEGRVCFPFHHD

SEQ ID NO: 90922 - protein, 601 aa, Homo sapiens
MAKTPSDHLLSTLEELVPYDFEKFKFKLQNTSVQKEHSRIPRSQIQRARPVKMATLLVTYYGEEYAVQLTLQVLRAINQRLLAEELHRAAIQDMGSCYVAQVGLELLISNNPPIFASETAGITGRPPDTAASPRCHAQEGDPVDGTCVRDSCSFPEAVSGHPQASGSRSPGCPRCQDSHERKSPGSLSPQPLPQCKRHLKQVQLLFCEDHDEPICLICSLSQEHQGHRVRPIEEVALEHKKKIQKQLEHLKKLRKSGEEQRSYGEEKAVSFLKQTEALKQRVQRKLEQVYYFLEQQEHFFVASLEDVGQMVGQIRKAYDTRVSQDIALLDALIGELEAKECQSEWELLQDIGDILHRAKTVPVPEKWTTPQEIKQKIQLLHQKSEFVEKSTKYFSETLRSEMEMFNVPELIGAQAHAVNVILDAETAYPNLIFSDDLKSVRLGNKWERLPDGPQRFDSCIIVLGSPSFLSGRRYWEVEVGDKTAWILGACKTSISRKGNMTLSPENGYWVVIMMKENEYQASSVPPTRLLIKEPPKRVGIFVDYRVGSISFYNVTARSHIYTFASCSFSGPLQPIFSPGTRDGGKNTAPLTICPVGGQGPD

SEQ ID NO: 90923 - protein, 128 aa, Homo sapiens
MSFLYSSKDCTRAAEQLKNNPRHKSYLEQVSLRQLEKLFSFLRGYLSGQSLAETMEQIQRETTIDPEEDLNKLDDKELAKRKSIMDELFEKNQKKKDDPNFVYDIEVEFPQDDQLQSCGWDTESADEF

SEQ ID NO: 90924 - protein, 564 aa, Homo sapiens
MKYILVTGGVISGIGKGIIASSVGTILKSCGLHVTSIKIDPYINIDAGTFSPYEHGEVFVLDDGGEVDLDLGNYERFLDIRLTKDNNLTTGKIYQYVINKERKGDYLGKTVQVVPHITDAIQEWVMRQALIPVDEDGLEPQVCVIELGGTVGDIESMPFIEAFRQFQFKVKRENFCNIHVSLVPQPSSTGEQKTKPTQNSVRELRGLGLSPDLVVCRCSNPLDTSVKEKISMFCHVEPEQVICVHDVSSIYRVPLLLEEQGVVDYFLRRLDLPIERQPRKMLMKWKEMADRYDRLLETCSIALVGKYTKFSDSYASVIKALEHSALAINHKLEIKYIDSADLEPITSQEEPVRYHEAWQKLCSAHGVLVPGGFGVRGTEGKIQAIAWARNQKKPFLGVCLGMQLAVVEFSRNVLGWQDANSTEFDPTTSHPVVVDMPEHNPGQMGGTMRLGKRRTLFQTKNSVMRKLYGDADYLEERHRHRFEVNPVWKKCLEEQGLKFVGQDVEGERMEIVELEDHPFFVGVQYHPEFLSRPIKPSPPYFGLLLASVGRLSHYLQKGCRLSPR

SEQ ID NO: 90925 - protein, 83 aa, Homo sapiens
MSAAPAYSEDKGGSAGPGEPEYGHDPASGGIFSSDYKRHDDLKEMLDTNKDSLKLEAMKRIVADHTQAWGEEGNDLAPGGPTC

SEQ ID NO: 90926 - protein, 675 aa, Homo sapiens
  MOD_RES (1)..(1): Any amino acid
XQKLKQNQPKRAHVEDGGSRSKQGNEQSKKTPIEKSDFAAATHPRAFYLSKPDETPNAWMSDSGTGLTYWKLEEKDMHHSLPETLEKTFISLSSTDVSPNQVLTLDPTLHMKPKQQISGIQPHGLPNALDDRISFSPDSVLEPSMSSPSDIDSFSQASNVTSQLPGFPKYPSHTKASPVDSWKNQTFQNESRTSSTFPSVYTITSNDISVNTVDEENTVMVASASVSQSQLPGTANSVPECISLTSLEDPVILSKIRQNLKEKHARHIADLRAYYESEINSLKQKLEAKEISGVEDWKITNQILVDRCGQLDSALHEATSRVRTLENKNNLLEIEVNDLRERFSAASSASKILQERIEEMRTSSKEKDNTIIRLKSRLQDLEEAFENAYKLSDDKEAQLKQENKMFQDLLGEYESLGKEHRRVKDALNTTENKLLDAYTQISDLKRMISKLEAQVKQVEHENMLSLRHNSRIHVRPSRANTLATSDVSRRKWLIPGAEYSIFTGQPLDTQDSNVDNQLEETCSLGHRSPLEKDSSPGSSSTSLLIKKQRETSDTPIMRALKELDEGKIFKNWGTQTEKEDTSNINPRQTETSVNASRSPEKCAQQRQKRLNSASQRSSSLPPSNRKSSTPTKREIMLTPVTVAYSPKRSPKENLSPGFSHLLSKNESSPIRKNLF

SEQ ID NO: 90927 - protein, 166 aa, Homo sapiens
MESVTFEDVAVEFIQEWALLDSARRSLCKYRMLDQCRTLASRGAGAVPEDAAGALHRREGDTIDSRGPASSPGAALVSGMHGTEGRYADSEGGDTSAYSGPPQPMGGQGFWEQFLDLSLVLLFSIFLRVTPLLSSDGEMGTRKQSQRKHRPLLRGAHGQLGGQSSK

SEQ ID NO: 90928 - protein, 190 aa, Homo sapiens
MLLAQINRDSQGMTEFPGGGMEAQHVTLCLTEAVTVADGDNLENMEGVSLQAVTLADGSTAYIQHNSKDAKLIDGQVIQLEDGSAAYVQHVPIPKSTGDSLRLEDGQAVQLEDGTTAFIHHTSKDSYDQSALQAVQLEDGTTAYIHHAVQVPQSDTILAIQADGTVAGLHTGDATIDPDTISALEQYAAK

SEQ ID NO: 90929 - protein, 155 aa, Homo sapiens
  MOD_RES (1)..(1): Any amino acid
XVNHLILVEPWGFPERPDLADQDRPIPVWIRALGAALTPFNPLAGLRIAGPFGLSLVQRLRPDFKRKYSSMFEDDTVTEYIYHCNVQTPSFSDLWRPILHRWQFWHQHPVLTTTFICEDNSYSWGRTLCICRSTRRIQPESKGDLRHCGLNTLKL

SEQ ID NO: 90930 - protein, 134 aa, Homo sapiens
MRPGTALQAVLLAVLLVGLRAATGRLLSGQPVCRGGTQRPCYKVIYFHDTSRRLNFEEAKEACRRDGGQLVSIESEDEQKLIEKFIENLLPSDGDFWIGLRRREEKQSNSTACQDLYAWTDGSISQFRETSSSF

SEQ ID NO: 90931 - protein, 102 aa, Homo sapiens
MSTRTPLPTVNERDTENHTSHGDGRQEVTSRTSRSGARCRNSIASCADEQPHIGNYRLLKTIGKGNFAKVKLARHILTGREVAIKIIDKTQLNPTSLQKHYS

SEQ ID NO: 90932 - protein, 1716 aa, Homo sapiens
  MOD_RES (1)..(1): Any amino acid
XRIQTAHPAGRQVMLHYLLPWMNNIELVDLKPLPTARRHDEDEDDSLKDRELMVTSRRWLRGEGWGSPQATAMVLNNLMYMTAKYGDELAWSEVENVWTTLADGWPKNLKIILHFLISICGVNSEPSLLPYVKKVIVYLGRDKTMQLLEELVSELQLTDPVSSGVTHMDNPPYYRITSSYKIPSVTSGTTSSSNTMVAPTDGNPDNKPIKENIEESYVHLDIYSGLNSHLNRQHHRLESRYSSSSGGSYEEEKSDSMPLYSNWRLKVMEHNQGEPLPFPPAGGCWSPLVDYVPETSSPGLPLHRCNIAVILLTDLIIDHSVKVEWGSYLHLLLHAIFIGFDHCHPEVYEHCKRLLLHLLIVMGPNSNIRTVASVLLRNKEFNEPRVLTVKQVAHLDYNFTAGINDFIPDYQPSPMTDSGLSSSSTSSSISLGNNSAAISHLHTTILNEVDISVEQDGKVKTLMEFITSRKRGPLWNHEDVSAKNPSIKSAEQLTTFLKHVVSVFKQSSSEGIHLEHHLSEVALQTALSCSSRHYAGRSFQIFRALKQPLTATTLSDVLSRLVETVGDPGEDAQGFVIELLLTLESAIDTLAETMKHYDLLSALSQTSYHDPIMGNKYAANRKSTGQLNLSTSPINSSSYLGYNSNARSNSLRLSLIGDRRGDRRRSNTLDIMDGRINHSSSLARTRSLSSLREKGMYDVQSTTEPTNLMATIFWIAASLLESDYEYEYLLALRLLNKLLIHLPLDKSESREKIENVQSKLKWTNFPGLQQLFLKGFTSASTQEMTVHLLSKLISVSKHTLVDPSQLSGFPLNILCLLPHLIQHFDSPTQFCKETASRIAKVCAEEKCPTLVNLAHMMSLYSTHTYSRDCSNWINVVCRYLHDSFSDTTFNLVTYLAELLEKGLSSMQQSLLQIIYSLLSHIDLSAAPAKQFNLEIIKIIGKYVQSPYWKEALNILKLVVSRSASLVVPSDIPKTYGGDTGSPEISFTKIFNNVSKELPGKTLDFHFDISETPIIGNKYGDQHSAAGRNGKPKVIAVTRSTSSTSSGSNSNALVPVSWKRPQLSQRRTREKLMNVLSLCGPESGLPKNPSVVFSSNEDLEVGDQQTSLISTTEDINQEEEVAVEDNSSEQQFGVFKDFDFLDVELEDAEGESMDNFNWGVRRRSLDSIDKGDTPSLQEYQCSSSTPSLNLTNQEDTDESSEEEAALTASQILSRTQMLNSDSATDETIPDHPDLLLQSEDSTGSITTEEVLQIRDETPTLEASLDNANSRLPEDTTSVLKEEHVTTFEDEGSYIIQEQQESLVCQGILDLEETEMPEPLAPESYPESVCEEDVTLALKELDERCEEEEADFSGLSSQDEEEQDGFPEVQTSPLPSPFLSAIIAAFQPVAYDDEEEAWRCHVNQMLSDTDGSSAVFTFHVFSRLFQTIQRKFGEITNEAVSFLGDSLQRIGTKFKSSLEVMMLCSECPTVFVDAETLMSCGLLETLKFGVLELQEHLDTYNVKREAAEQWLDDCKRTFGAKEDMYRINTDAQELELCRRLYKLHFQLLLLFQAYCKLINQVNTIKNEAEVINMSEELAQLESILKEAESASENEEIDISKAAQTTIETAIHSLIETLKNKEFISAVAQVKAFRSLWPSDIFGSCEDDPVQTLLHIYFHHQTLGQTGSFAVIGSNLDMSEANYKLMELNLEIRESLRMVQSYQLLAQAKPMGNMVSTGF

SEQ ID NO: 90933 - protein, 135 aa, Homo sapiens
MLHVTRGVWGSRVRVWPLLPALLGPPRALSSLAAKMGEYRKMWNPREPRDWAQQYRERFIPFSKEQLLRLLIQEFHSSPAEKAALEAFSAHVDFCTLFHYHQILARLQALYDPINPDRETLDQPSLTDPQRLSNE

SEQ ID NO: 90934 - protein, 92 aa, Homo sapiens
  MOD_RES (1)..(1): Any amino acid
XRNMALRWETNIKNGVCSLEFDRKDISMNKLVATSLEGKFHVFDMRTQHPTKGFASVSEKAHKSTVWQVRHLPQNRELFLTAGGAGGLHLWK

SEQ ID NO: 90935 - protein, 109 aa, Homo sapiens
MRELKRTLDAKAYPLEVTKLIYCSRTVPEIEKVIEELRKLLNFYEKQEGEKLPFLGLALSSRKNLCIHPEVTPLRFGKDVDGKCHSLTASYVRAQYQHDTSLPHCRFYE

SEQ ID NO: 90936 - protein, 263 aa, Homo sapiens
MMGEAAVAAGPCPLREDSFTRFSSQSNVYGLAGGAGGRGELLAATLKGKVLGFRYQDLRQKIRPVAKELQFNYIPESCLNLELQFTPFQLCHAEVQVGDQLETVFLLSGNDPAIHLYKENEGLHQFEEQPVENLFPELTNLTSSVLWLDVHNFPGTSRRLSALGCQSGYVRVAHVDQRSREVLQMWSVLQDGPISRVIVFSLSAAKETKDRPLQDEYSVLVASMLEPAVVYRDLLNRGLEDQLLLPGSDQFDSVLCSLVTDVD

SEQ ID NO: 90937 - protein, 242 aa, Homo sapiens
MCASRDDWRCARSMHEFSAKDIDGHMVNLDKYRGFVCIVTNVASQCGKTEVNYTQLVDLHARYAECGLRILAFPCNQFGKQEPGSNEEIKEFAAGYNVKFDMFSKICVNGDDAHPLWKWMKIQPKGKGILGNAIKWNFTKFGHRLSTVPHRQERLRGEALRTHGGAPGDREGPAPLFLAPQVCGPARAPAHALGAFHRHSCRPACKPAGGADPKIQRAPRRRKVPWPAGLGSAPPPLATLWE

SEQ ID NO: 90938 - protein, 78 aa, Homo sapiens
MASSSTVPLGFHYETKYVVLSYLGLLSQEKLQEQHLSSPQGVQLDIASQSLDQEILLKVKTEIEEELKSLDKEISEGQ

SEQ ID NO: 90939 - protein, 126 aa, Homo sapiens
MVAEPPVICSHFAQDFSPEQNIKDSFQKVTPRRYGKCEHENLQLSKSVDECKVQKGGYNGLNQCLPTTQSKIFQCDKYMKIFHKFSNLNGHKVRHTRKKPFKYKEFGKSFCIFSNLTQHKIICTRV

SEQ ID NO: 90940 - protein, 139 aa, Homo sapiens
  MOD_RES (1)..(1): Any amino acid
XPHLQDLPRAGCRPEPGAAAGRRHPVGERHRPAPGHPRPGRAGAEARGQGVKFIREVTPYIKKPSLVSDLPWEGAAPQSPSFSGSEDSGSPKHQNSTKDRKIIPLKMCFAARNLSMPDLENRLIELHSPDSRNTLILRC

SEQ ID NO: 90941 - protein, 122 aa, Homo sapiens
MTPNSMTENGLTAWDKPKHCPDREHDWKLVGMSEACLHRKSHSERRSTLKNEQSSPHLIQTTWTSSIFHLDHDDVNDQSVSSAQTFQTEEKKCKGYIPSYLDKDELCVVCGDKATGYHYRCI

SEQ ID NO: 90942 - protein, 140 aa, Homo sapiens
MRKVKKLRLDKENTGSWRSFSLNSEGAERMATTGTPTADRGDAAATDDPAARFQVQKHSWDGLRSIIHGSRKYSGLIVNKAPHDFQFVQKTDESGPHSHRLYYLGMPYGSRENSLLYSEIPKKVRKEALLLLSWKQMLDH

SEQ ID NO: 90943 - protein, 97 aa, Homo sapiens
  MOD_RES (1)..(1): Any amino acid
XCCVPLQILAGKPAAQKSPSDLLDASAVSATSRYIEEQQATQQLIMDEQDQQLEMVSGSIQVLKHMSGRVGEELDEQGIMLDAFAQEMDHTQSRMDG

SEQ ID NO: 90944 - protein, 72 aa, Homo sapiens
MDWKLEGSTQKVESPVLQGQEGILEETGEDGLPEGFQLLQIDAEGECQEGEILATGSTAWCSAFAPSTANVS

SEQ ID NO: 90945 - protein, 708 aa, Homo sapiens
MGLPEPGPLRLLALLLLLLLLLLLQLQHLAAAAADPLLGGQGPAKDCEKDQFQCRNERCIPSVWRCDEDDDCLDHSDEDDCPKKTCADSDFTCDNGHCIHERWKCDGEEECPDGSDESEATCRLNECLHNNGGCSHICTDLKIGFECTCPAGFQLLDQKTCGAGKSPSLIFTNRHEVRRIDLVKRNYSRLIPMLKNVVALDVEVATNRIYWCDLSYRKIYSAYMDKASDPKEQEVLIDEQLHSPEGLAVDWVHKHIYWTDSGNKTISVATVDGGRRRTLFSRNLSEPRAIAVDPLRGFMYWSDWGDQAKIEKSGLNGVDRQTLVSDNIEWPNGITLDLLSQRLYWVDSKLHQLSSIDFSGGNRKTLISSTDFLSHPFGIAVFEDKVFWTDLENEAIFSANRLNGLEISILAENLNNPHDIVIFHELKQPRAPDACELSVQPNGGCEYLCLPAPQISSHSPKYTCACPDTMWLGPDMKRCYRAPQSTSTTTLASTMTRTVPATTRAPGTTVHRSTYQNHSTETPSLTAAVPSSVSVPRAPSISPSTLSPATSNHSQHYANEDSKMGSTVTAAVIGIIVPIVVIALLCMSGYLIWRNWKRKNTKSMNFDNPVYRKTTEEEDEDELHIGRTAQIGHVYPAAISSFDRPLWAEPCLGETREPEDPAPALKELFVLPGEPRSQLHQLPKNPLSELPVVKSKRVALSLEDDGLP

SEQ ID NO: 90946 - protein, 58 aa, Homo sapiens
MSEKKQPVDLGLLEEDDEFEEFPAEDWAGLDEDEDAHVWEDNWDDDNVEDDFSNQLRS

SEQ ID NO: 90947 - protein, 49 aa, Homo sapiens
MVGFGLGTLRYVPEESKDKVISDEDVLGTLLKVFQALFLNDFNKQSEIL

SEQ ID NO: 90948 - protein, 76 aa, Homo sapiens
MAPAADREGYWGPTTSTLDWCEENYSVTWYIAEFWNTVSNLIMIIPPMFGAVQSVRDGLEKRYIASYLALTEVLQI

SEQ ID NO: 90949 - protein, 181 aa, Homo sapiens
MDSAAKDEMQPALSPGPEWPEQERAEQLARGAALKWASGIFYRPEQLARLGQYRSREVQRTCSLESRLKSVMQSYLEGVQTGVWQLAQAIEVVQGTREALSQARGLLQGMSQALQTLEPLRERVAQHKQLQALSHLLPRLRAVPAAVSHTQTLIDGQQFLEAYVSLRELEQLREDTWAPLG

SEQ ID NO: 90950 - protein, 1651 aa, Homo sapiens
MDSKKRSSTEAEGSKERGLVHIWQAGSFPITPERLPGWGGKTVLQAALGVKHGVLLTEDGEVYSFGTLPWRSGPVEICPSSPILENALVGQYVITVATGSFHSGAVTDNGVAYMWGENSAGQCAVANQQYVPEPNPVSIADSEASPLLAVRILQLACGEEHTLALSISREIWAWGTGCQLGLITTAFPVTKPQKVEHLAGRVVLQVACGAFHSLALVQCLPSQDLKPVPERCNQCSQLLITMTDKEDHVIISDSHCCPLGVTLTESQAENHASTALSPSTETLDRQEEVFENTLVANDQSVATELNAVSAQITSSDAMSSQQNVMGTTEISSARNIPSYPDTQAVNEYLRKLSDHSVREDSEHGEKPVPSQPLLEEAIPNLHSPPTTSTSALNSLVVSCASAVGVRVAATYEAGALSLKKVMNFYSTTPCETGAQAGSSAIGPEGLKDSREEQVKQESMQGKKSSSLVDIREEETEGGSRRLSLPGLLSQVSPRLLRKAARVKTRTVVLTPTYSGEADALLPSLRTEVWTWGKGKEGQLGHGDVLPRLQPLCVKCLDGKEVIHLEAGGYHSLALTAKSQVYSWGSNTFGQLGHSDFPTTVPRLAKISSENGVWSIAAGRDYSLFLVDTEDFQPGLYYSGRQDPTEGDNLPENHSGSKTPVLLSCSKLGYISRVTAGKDSYLALVDKNIMGYIASLHELATTERRFYSKLSDIKSQILRPLLSLENLGTTTTVQLLQEVASRFSKLCYLIGQHGASLSSFLHGVKEARSLVILKHSSLFLDSYTEYCTSITNFLVMGGFQLLAKPAIDFLNKNQELLQDLSEVNDENTQLMEILNTLFFLPIRRLHNYAKVLLKLATCFEVASPEYQKLQDSSSCYECLALHLGRKRKEAEYTLGFWKTFPGKMTDSLRKPERRLLCESSNRALSLQHAGRFSVNWFILFNDALVHAQFSTHHVFPLATLWAEPLSEEAGGVNGLKITTPEEQFTLISSTPQEKTKWLRAISQAVDQALRGMSDLPPYGSGSSVQRQEPPISRSAKYTFYKDPRLKDATYDGRWLSGKPHGRGVLKWPDGKMYSGMFRNGLEDGYGEYRIPNKAMNKEDHYVGHWKEGKMCGQGVYSYASGEVFEGCFQDNMRHGHGLLRSGKLTSSSPSMFIGQWVMDKKAGYGVFDDITRGEKYMGMWQDDVCQGNGVVVTQFGLYYEGNFHLNKMMGNGVLLSEDDTIYEGEFSDDWTLSGKGTLTMPNGDYIEGYFSGEWGSGIKITGTYFKPSLYESDKDRPKVFRKLGNLAVPADEKWKAVFDECWRQLGCEGPGQGEVWKAWDNIAVALTTSRRQHRDSPEILSRSQTQTLESLEFIPQHVGAFSVEKYDDIRKYLIKACDTPLHPLGRLVETLVAVYRMTYVGVGANRRLLQEAVKEIKSYLKRIFQLVRFLFPELPEEGSTIPLSAPLPTERKSFCTGKSDSRSESPEPGYVVTSSGLLLPVLLPRLYPPLFMLYALDNDREEDIYWECVLRLNKQPDIALLGFLGVQRKFWPATLSILGESKKVLPTTKDACFASAVECLQQISTTFTPSDKLKVIQQTFEEISQSVLASLHEDFLWSMDDLFPVFLYVVLRARIRNLGSEVHLIEDLMDPYLQHGEQGIMFTTLKVSIVII

SEQ ID NO: 90951 - protein, 76 aa, Homo sapiens
MADFYKEFLSKNFQKHMYYNRLDTVARTWNPMTLGGQEIGTSAILPSPSSWEKWPWKGFGTSLNRNKRRGATRSPL

SEQ ID NO: 90952 - protein, 556 aa, Homo sapiens
MAKSALRENGTNSETFRQRFRRFHYQEVAGPREAFSQLWELCCRWLRPEVRTKEQIVELLVLEQFLTVLPGEIQNWVQEQCPENGEEAVTLVEDLEREPGRPRSSVTVSVKGQEVRLEKMTPPKSSQELLSVRQESVEPQPRGVPKKERARSPDLGPQEQMNPKEKLKPFQRSGLPFPKSGVVSRLEQGEPWIPDLLGSKEKELPSGSHIGDRRVHADLLPSKKDRRSWVEQDHWSFEDEKVAGVHWGYEETRTLLAILSQTEFYEALRNCHRNSQVYGAVAERLREYGFLRTLEQCRTKFKGLQKSYRKVKSGHPPETCPFFEEMEALMSAQVIALPSNGLEAAASHSGLVGSDAETEEPGQRGWQHEEGAEEAVAQESDSDDMDLEATPQDPNSAAPVVFRSPGGVHWGYEETKTYLAILSETQFYEALRNCHRNSQLYGAVAERLWEYGFLRTPEQCRTKFKSLQTSYRKVKNGQAPETCPFFEEMDALVLKLDLRMKIIQNGIFLRKYNCIGHYLQDLKGKFPGIFIRVKAMRVTVDQEDSGQRPQGRKEEN

SEQ ID NO: 90953 - protein, 48 aa, Homo sapiens
MSFVLSRMAACGGTCKNKVTVSKPVWDFLSKETPARLARLREEHRVSI

SEQ ID NO: 90954 - protein, 10 aa, Homo sapiens
MNIFDRKINF

SEQ ID NO: 90955 - protein, 101 aa, Homo sapiens
MCLRGCKRNVLMKRVKLGKARWLMPVIPALWEAKEPMMLPKPGTYYLPWEVSAGQVPDGSTLRTFGRLCLYDMIQSRVTLMAQHGSDQHQVLVCTKLVEPF

SEQ ID NO: 90956 - protein, 351 aa, Homo sapiens
MALVHKLLRGTYFLRKFSKPTSALYPFLGIRFAEYSSSLQKPVASPGKASSQRKTEGDLQGDHQKEVALDITSSEEKPDVSFDKAIRDEAIYHFRLLKDEIVDHWRGPEGHPLHEVLLEQAKVVWQFRGKEDLDKWTVTSDKTIGGRSEVFLKMGKNNQSALLYGTLSSEAPQDGESTRSGYCAMISRIPRGAFERKMSYDWSQFNTLYLRVRGDGRPWMVNIKEDTDFFQRTNQMYSYFMFTRGGPYWQEVKIPFSKFFFSNRGRIRDVQHELPLDKAGVQWHDLGSLQPLPPGFKHFSCLSLLSSWNYRCLPPHLANLCILSRDEVLPYWAGWFLTGPCDLPTLASQCW

SEQ ID NO: 90957 - protein, 120 aa, Homo sapiens
  MOD_RES (1)..(1): Any amino acid
XERVPYTDDGLEAIIFTAQGDMRQALNNLQSTFSGFGFINSENVFKVCDEPHPLLVKEMIQHCVNANIDEAYKVGLLPPVLAEEPLTSWAEESGSPSDSCSLVASGLLTRRYHWQHLSSV

SEQ ID NO: 90958 - protein, 147 aa, Homo sapiens
MLRACQLSGVTAAAQSCLCGKFVLRPLRPCRRYSTSGSSGLTTGKIAGAGLLFVGGGIGGTILYAKWDSHFRESVEKTIPYSDKLFEMVLGPAAYNVPLPKKSIQSGPLKISSVSEVMKESKQPASQLQKQKGDTPASATGKYKYHE

SEQ ID NO: 90959 - protein, 500 aa, Homo sapiens
MGLQACLLGLFALILSGKCSYSPEPDQRRTLPPGWVSLGRADPEEELSLTFALRQQNVERLSELVQAVSDPSSPQYGKYLTLENVADLVRPSPLTLHTVQKWLLAAGAQKCHSVITQDFLTCWLSIRQAELLLPGAEFHHYVGGPTETHVVRSPHPYQLPQALAPHVDFVGGLHRFPPTSSLRQRPEPQVTGTVGLHLGVTPSVIRKRYNLTSQDVGSGTSNNSQACAQFLEQYFHDSDLAQFMRLFGGNFAHQASVARVVGQQGRGRAGIEASLDVQYLMSAGANISTWVYSSPGDSGAGCWSVSGRHQFRPTFPASSPYVTTVGGTSFQEPFLITNEIVDYISGGGFSNVFPRPSYQEEAVTKFLSSSPHLPPSSYFNASGRAYPDVAALSDGYWVVSNRVPIPWVSGTSASTPVFGGILSLINEHRILSGRPPLGFLNPRLYQQHGAGLFDVTRGCHESCLDEEVEGQGFCSGPGWDPVTGWGTPNFPALLKTLLNP

SEQ ID NO: 90960 - protein, 134 aa, Homo sapiens
GFTEIEAEKSMSSGGILRQCLRLVCAVAVRNCLECQQHSQLKTRGDKALKPMHSLIPLGKSAAKSPVDIVTGGISPVRDLDRLLQDMDINRLRAVVFRDITKKSLHMNLQNIIDFVRSRITNMSKNCIKWICSN

SEQ ID NO: 90961 - protein, 68 aa, Homo sapiens
TFCESLPAPRPRRCGDPGLRRRGRWAHPWAFPKAKRNPGKVKEAQALGSPRLRPWARAQGGAGLGGAV

SEQ ID NO: 90962 - protein, 168 aa, Homo sapiens
  MOD_RES (1)..(1): Any amino acid
XVEGDDVVSTQVATVTQSGLSQQVTLISQDGTQHVNISQADMQAIGNTITMVTQDGTPITVPAHDAVISSAGTHSVAMVTAEGTEGEQVAIVAQDLAAFHTASSEMGHQQHSHHLVTTETRPLTLVATSNGTQIAVQVSTKAYCPQSTAVLLIAFNFVHCASCITFTG

SEQ ID NO: 90963 - protein, 163 aa, Homo sapiens
MLIKEYHILLPMSLDEYQVAQLYMIQKKSREESSGEGSGVEILANRPYTDGPGGSGQYTHKVYHVGSHIPGWFRALLPKAALQVEEESWNAYPYTRTRYTCPFVEKFSIEIETYYLPDGGQQPNVFNLSGAERRQRILDTIDIVRDAVAPGEYKAEEDPRLYH

SEQ ID NO: 90964 - protein, 8 aa, Homo sapiens
MRMSVGLS

SEQ ID NO: 90965 - protein, 503 aa, Homo sapiens
MRPRGLPPLLVVLLGCWASVSAQTDATPAVTTEGLNSTEAALATFGTFPSTRPPGTPRAPGPSSGPRPTPVTDVAVLCVCDLSPAQCDINCCCDPDCSSVDFSVFSACSVPVVTGDSQFCSQKAVIYSLNFTANPPQRVFELVDQINPSIFCIHITNYKPALSFINPEVPDENNFDTLMKTSDGFTLNAESYVSFTTKLDIPTAAKYEYGVPLQTSDSFLRFPSSLTSSLCTDNNPAAFLVNQAVKCTRKINLEQCEEIEALSMAFYSSPEILRVPDSRKKVPITVQSIVIQSLNKTLTRREDTDVLQPTLVNAGHFSLCVNVVLEVKYSLTYTDAGEVTKADLSFVLGTVSSVVVPLQQKFEIHFLQLVAQKVKSLLWGQGFPDYVAPFGNSQAQDMLDWVPIHFITQSFNRKDSCQLPGALVIEVKWTKYGSLLNPQAKIVNVTANLISSSFPEANSGNERTILISTAVTFVDVSAPAEAGFRAPPAINARLPFNFFFPFV

SEQ ID NO: 90966 - protein, 220 aa, Homo sapiens
MATEEFIIRIPPYHYIHVLDQNSNVSRVEVGPKTYIRQDNERVLFAPMRMVTVPPRHYCTVANPVSRDAQGLVLFDVTGQVRLRHADLEIRLAQDPFPLYPGEVLEKDITPLQVVLPNTALHLKALLDFEDKDGDKVVAGDEWLFEGPGTYIPRKEVEVVEIIQATIIRQNQALRLRARKECWDRDGKERVTGEEWLVTTVGAYLPAVFEEVLDLVDAVI

SEQ ID NO: 90967 - protein, 686 aa, Homo sapiens
  MOD_RES (1)..(1): Any amino acid
XSEDCEVAGYRVLKGTEAVIIPYALHRDPRYFPNPEEFQPERFFPENAQGRHPYAYVPFSAGPRNCIGCLTQLYENAFFRGGDVASMYTPNAQYCQMRCTFHPRCLLFSFLPASSINDMEKRFGCFLKDSVTGTLPKVHRTGAVSGHSLKQCGHQISACHRDIYKGVDMRGVNFNVSKVSSVEECQKRCTSNIRCQFFSYATQTFHKAEYRNNCLLKYSPGGTPTAIKVLSNVESGFSLKPCALSEIGCHMNIFQHLAFSDVDVARVLTPDAFVCRTICTYHPNCLFFTFYTNVWKIESQRNVCLLKTSESGTPSSSTPQENTISGYSLLTCKRTLPEPCHSKIYPGVDFGGEELNVTFVKGVNVCQETCTKMIRCQFFTYSLLPEDCKEEKCKCFLRLSMDGSPTRIAYGTQGSSGYSLRLCNTGDNSVCTTKTSTRIVGGTNSSWGEWPWQVSLQVKLTAQRHLCGGSLIGHQWVLTAAHCFDGLPLQDVWRIYSGILNLSDITKDTPFSQIKEIIIHQNYKVSEGNHDIALIKLQAPLNYTEFQKPICLPSKGDTSTIYTNCWVTGWGFSKEKGEIQNILQKVNIPLVTNEECQKRYQDYKITQRMVCAGYKEGGKDACKGDSGGPLVCKHNGMWRLVGITSWGEGCARREQPGVYTKVAEYMDWILEKTQSSDGKAQMQSPA

SEQ ID NO: 90968 - protein, 237 aa, Homo sapiens
MHQECEAIVQSIIHIRTRWELSQPDSIPQHTKIRPKDVPGTLLNIALLNLGSSDPSLRSAAYNLLCALTCTFNLKIEGQLLETSGLCIPANNTLFIVSISKTLAANEPHLTLEFLEECISGFSKSSIELKHLCLEYMTPWLSNLVRFCKHNDDAKRQRVTAILDKLITMTINEKQMYPSIQAKIWGSLGQITDLLDVVLDSFIKTSATGGLGSIKAEVMADTAVALASGNVKLVSSK

SEQ ID NO: 90969 - protein, 148 aa, Homo sapiens
  MOD_RES (1)..(1): Any amino acid
XHRNLLHNPCAEEGFEFWSLDVNGGDEWKVEDLSRDQRKEFPNDQVRSQARLRVQVPAVRSAPVVRARASGDLPARPGDHPAEERCQVEGGLPHILQLPARRPLHLVSARRRGHSLLGRLVRPEGHQQQHHHRAPAALTPPEPPSAEP

SEQ ID NO: 90970 - protein, 42 aa, Homo sapiens
GRFCTIFRSYSRGAQGVILVYDIANRWSFDGIDRWIKEIDEC

SEQ ID NO: 90971 - protein, 202 aa, Homo sapiens
  MOD_RES (1)..(1): Any amino acid
XAFQDLLDQVGGLGRFQILQMVFLIMFNVIVYHQTQLENFAAFILDHRCWVHILDNDTIPDNDPGTLSQDALLRISIPFDSNLRPEKCRRFVHPQWKLIHLNGTFPNTSEPDTEPCVDGWVYDQSSFPSTIVTKWDLVCESQPLNSVAKFLFMAGMMVGGNLYGHLSDRKPLSSPNHVSTDCDEGLEVPIAIHQHHVFWYLS

SEQ ID NO: 90972 - protein, 389 aa, Homo sapiens
NEPLTPGYHGFPARDSQGNQEPTTTPDAMVQPFTTIPFPPPPQNGIPTEYGVPHTQDYAGQTGEHNLTLYGSTQAHGEQSSNSPSTQNGSLTQTEGGAQTDGQQSQTQSSENSESKSTPKRLHVSNIPFRFRDPDLRQMFGQFGKILDVEIIFNERGSKGFGFVTFENSADADRAREKLHGTVVEGRKIEVNNATARVMTNKKMVTPYANGWKLSPVVGAVYGPELYAASSFQADVSLGNDAAVPLSGRGGINTYIPLISLPLVPGFPYPTAATTAAAFRGAHLRGRGRTVYGAVRAVPPTAIPAYPGVVYQDGFYGADLYGGYAAYRYAQPATATAATAAAAAAAAYSDGYGRVYTADPYHALAPAASYGVGAVASLYRGGYSRFAPY

SEQ ID NO: 90973 - protein, 47 aa, Homo sapiens
MAPRPPTAAPQESVTFKDVSVDFTQEEWYHVDPAQRSLYRDVMLENY

SEQ ID NO: 90974 - protein, 148 aa, Homo sapiens
RYDYLEFTDARGRKTRYDTKVGTDKWPKKVTFKAGPRLQFLFHSDSSHNEWGYKFTVTACGLPDVAVSWGLDLQLLVSRLMGRLASQCMALKSVRQLGSNMVVPQAKMALVLSSPLWKPVFRHQVCPELELEASWPTHPHRNSKEGEV

SEQ ID NO: 90975 - protein, 218 aa, Homo sapiens
MIPLLLAALLCVPAGALTCYGDSGQPVDWFVVYKLPALRGSGEAAQRGLQYKYLDESSGGWRDGRALINSPEGAVGRSLQPLYRSNTSQLAFLLYNDQPPQPSKAQDSSMRGHTKGKQLTYTYPWVYNYQLEGIFAQEFPDLENVVKGHHVSQEPWNSSITLTSQAGAVFQSFAKFSKFGDDLYSGWLAAALGTNLQVQFWHKTVGILPSNCSDIWQV

SEQ ID NO: 90976 - protein, 46 aa, Homo sapiens
MEERGDSEPTPGCSGLGPGGVRGFGDGGGAPSWAPEDAWMGTHPKK

SEQ ID NO: 90977 - protein, 983 aa, Homo sapiens
MWDPVTPYRLHVLCQGWHYLAYDWHWTTDRSVGDNSSDLSNVAVIDGNRVLVTVFRQTVVPPPMCTYQLLFPHPVNQVTFLAHPQKSNDLAVLDASNQISVYKCGDCPSADPTVKLGAVGGSGFKVCLRTPHLEKRYKIQFENNEDQDVNPLKLGLLTWIEEDVFLAVSHSEFSPRSVIHHLTAASSEMDEEHGQLNVSSSAAVDGVIISLCCNSKTKSVVLQLADGQIFKYLWESPSLAIKPWKNSGGFPVRFPYPCTQTELAMIGEEECVLGLTDRCRFFINDIEVASNITSFAVYDEFLLLTTHSHTCQCFCLRDASFKTLQAGLSSNHVSHGEVLRKVERGSRIVTVVPQDTKLVLQMPRGNLEVVHHRALVLAQIRKWLDKLMFKEAFECMRKLRINLNLIYDHNPKVFLGNVETFIKQIDSVNHINLFFTELKEEDVTKTMYPAPVTSSVYLSRDPDGNKIDLVCDAMRAVMESINPHKYCLSILTSHVKKTTPELEIVLQKVHELQGNAPSDPDAVSAEEALKYLLHLVDVNELYDHSLGTYDFDLVLMVAEKSQKDPKEYLPFLNTLKKMETNYQRFTIDKYLKRYEKAIGHLSKCGPEYFPECLNLIKDKNLYNEALKLYSPSSQQYQDISIAYGEHLMQEHMYEPAGLMFARCGAHEKALSAFLTCGNWKQALCVAAQLNFTKDQLVGLGRTLAGKLVEQRKHIDAAMVLEECAQDYEEAVLLLLEGAAWEEALRLVYKYNRLDIIETNVKPSILEAQKNYMAFLDSQTATFSRHKKRLLVVRELKEQAQQAGLDDEVPHGQESDLFSETSSVVSGSEMSGKYSHSNSRISARSSKNRRKAERKKHSLKEGSPLEDLALLEALSEVVQNTENLKDEVYHILKVLFLFEFDEQGRELQKAFEDTLQLMERSLPEIWTLTYQQNSATPVLGPNSTANSIMASYQQQKTSVPVLDAELFIPPKINRRTQWKLSLLD

SEQ ID NO: 90978 - protein, 60 aa, Homo sapiens
MQLSFTQLTIDYYPYHKAGDSCNHWMYFSDATKTKNGWANELLHEFECNVEMLKQAVKDH

SEQ ID NO: 90979 - protein, 169 aa, Homo sapiens
LARQKFSRLMEEKEKLQKHGVCIRVLGDLHLLPLDLQELIAQAVQATKNYNNDISESLLDKCLYTNRSPHPDILIRTSGEVRLSDFLLWQQKARDMYAEERKRQQLERDQATVTEQLLREGLQASGDAQLRRTRLHKLSARREERVQGFLQALELKRADWLARLGTASA

SEQ ID NO: 90980 - protein, 209 aa, Homo sapiens
  MOD_RES (1)..(1): Any amino acid
XITCPPPMSVEHADIWVKSYSLYSRERYICNSGFKRKAGTSSLTECVLNKATNVAHWTTPSLKCIRTTEISSHESSHGTPSQTTAKNWELTASASHQPPGVYPQGHSDTTGRKQHLLPDFQASFQRDCINKHIEDKECWTVASFLLFLAISTSTVLLCGLSAVSLLACYLKSRQTPPLASVEMEAMEALPVTWGTSSRDEDLENCSHHL

SEQ ID NO: 90981 - protein, 81 aa, Homo sapiens
  MOD_RES (1)..(1): Any amino acid
XPHRVTRDTAFRGFLIPKGTDVITLLNTVHYDPSQFLTPQEFNPEHFLDANQSFKKSPAFMPFSAALDAQRHSFLLSTLLL

SEQ ID NO: 90982 - protein, 118 aa, Homo sapiens
MGLLTFRDVAIEFSLEEWQCLDTAQRNLYKNVILENYRNLVFLGIAVSKQDLITCLEQEKEPLTVKRHEMVNEPPGLPLMPSRSWTVLLPSLLTATSLPDSPASACRVPAIAGARSHA

SEQ ID NO: 90983 - protein, 611 aa, Homo sapiens
MSSKEVKTALKSARDAIRNKEYKEALKHCKGLANLYEKYNHINAKDDLPGVYQKLLDLYESVDKQKWCDVCKKLVDLYYQEKKHLEVARTWHKLIKTRQEQGAENEELHQLWRKLTQFLAESTEDQNNETQQLLFTAFENALGLSDKIPSEDHQVLYRHFIQSLSKFPHESARLKKACEGMINIYPTVQYPLEVLCLHLIESGNLTDEGQQYCCRLVEMDSKSGPGLIGLGIKALQDKKYEDAVRNLTEGLKESPVCTSGWYHLAEAQVKMHRPKEAVLSCSQALKIVDNLGASGNSLYQRNLCLHLKAEALIKLSDYDSSEEAIRTLDQISDADNIPGLLVLKSLAYRNKGSFDEAAKIMEDLLSSYPDLAEVHALEALIHFTKKDYLQAEKCFQRALEKDTEVAEYHYQLGLTYWFMGEETRKDKTKALTHFLKAARLDTYMGKVFCYLGHYYRDVVGDKNRARGCYRKAFELDDTDAESGAAAVDLSVELEDMEMALAILTTVTQKASAGTAKWAWLRRGLYYLKAGQHSQAVADLQAALRADPKDFNCWESLGEAYLSRGGYTTALKSFTKASELNPESIYSVFKVAAIQQILGKYKEAVAQYQMII

SEQ ID NO: 90984 - protein, 94 aa, Homo sapiens
MNVVFAVKQYISKMIEDSGPGMKVLLMDKETTGIVSMVYTQSEILQKEVYLFERIDSQNREIMKHLKAICFLRPTKVLHKLSFHLPRQMQNTLI

SEQ ID NO: 90985 - protein, 52 aa, Homo sapiens
MFTSEKGVVEEWLSEFKTLPETSLPNYATNLKDKSSLVSSLYKVIQEPQRNS

SEQ ID NO: 90986 - protein, 86 aa, Homo sapiens
  MOD_RES (1)..(1): Any amino acid
XSCIPAQVVAAIDVNTVANEVYKYNFPHTQLLAKTIERPLDTNNRKLWLSVPRVSIISNLSWHSKFKATIFSYCKASVRAITLSSP

SEQ ID NO: 90987 - protein, 119 aa, Homo sapiens
MAAAAARVVLSSAARRRLWGFSESLLIRGAAGRSLYFGENRLRSTQAATQVVLNVPETRVTCLESGLRVASEDSGLSTCTVGLWIDAGSRYENEKNNGTAHFLEHMAFKAKEIPVRSGT

SEQ ID NO: 90988 - protein, 305 aa, Homo sapiens
MRAHAQRGRGCTRRSAAVLMARHGLPLLPLLSLLVGAWLKLGNGQATSMVQLQGGRFLMGTNSPDSRDGDGPVREATVKPFAIDIFPVTNKDFRDFVREKKYRTEAEMFGWSFVFEDFVSDELRNKATQPMKPAGPGSGIRERLEHPVLHVSWNDARAYCAWRGKRLPTEEEWEFAARGGLKGQVYPWGNWFQPNRTNLWQGKFPKGDKAEDGFHGVSPVNAFPAQNNYGLYDLLGNVWEWTASPYQAAEQDMRVLRGASWIDTADGSANHRARVTTRMGNTPDSASDNLGFRCAADAGRPPGEL

SEQ ID NO: 90989 - protein, 64 aa, Homo sapiens
MDPLRRSPSPCLSSQPSSPSTPPCEMLGPVGIEAVLDQLKIKAMKMGFEFNIMVVGQSGLGKST

SEQ ID NO: 90990 - protein, 63 aa, Homo sapiens
PTWALLLTVLICETGILIASLDSVAPILSMFFLMCYLFVNLACAVQTLLRTPNWRPRFKFYHW

SEQ ID NO: 90991 - protein, 747 aa, Homo sapiens
MGVDFDVKTFCHNLRATKPPYECPVETCRKVYKSYSGIEYHLYHYDHDNPPPPQQTPLRKHKKKGRQSRPANKQSPSPSEVSQSPGREVMSYAQAQRMVEVDLHGRVHRISIFDNLDVVSEDEEAPEEAPENGSNKENTETPAATPKSGKHKNKEKRKDSNHHHHHNVSASTTPKLPEVVYRELEQDTPDAPPRPTSYYRYIEKSAEELDEEVEYDMDEEDYIWLDIMNERRKTEGVSPIPQEIFEYLMDRLEKESYFESHNKGDPNALVDEDAVCCICNDGECQNSNVILFCDMCNLAVHQECYGVPYIPEGQWLCRRCLQSPSRAVDCALCPNKGGAFKQTDDGRWAHVVCALWIPEVCFANTVFLEPIDSIEHIPPARWKLTCYICKQRGSGACIQCHKANCYTAFHVTCAQQAGLYMKMEPVRETGANGTSFSVRKTAYCDIHTPPGSARRLPALSHSEGEEDEDEEEDEGKGWSSEKVKKAKAKSRIKMKKARKILAEKRAAAPVVSVPCIPPHRLSKITNRLTIQRKSQFMQRLHSYWTLKRQSRNGVPLLRRLQTHLQSQRNCDQVGRDSEDKNWALKEQLKSWQRLRHDLERARLLVELIRKREKLKRETIKVQQIAMEMQLTPFLILLRKTLEQLQEKDTGNIFSEPVPLSEVTELDEVRIPSPHSTFSLFLSQLDPCCRSGPGLDGDLEERGWWLWGRMNWSHMYHLDSVLSLSHPKGPEWEAVCTPSPEAGTESAK

SEQ ID NO: 90992 - protein, 171 aa, Homo sapiens
  MOD_RES (1)..(1): Any amino acid
XGQPAAAPQPGLALAARRHYSEAVADREDDPNFFKMVEGFFDRGASIVEDKLVEDLRTRESEEQKRNRVRGILRIIKPCNHVLSLSFPIRRDDGSWEVIEGYRAQHSQHRTPCKGGIRYSTDVSVDEVKALASLMTYKCAVVDVPFGGAKAGVKINPKNYTVLALMCLLQT

SEQ ID NO: 90993 - protein, 258 aa, Homo sapiens
MNPTLILAAFCLGIASATLTFDHSLEAQWTKWKAMHNRLYGMNEEGWRRAVWEKNMKMIELHNQEYREGKHSFTMAMNAFGDMTSEEFRQVMNGFQNRKPRKGKVFQEPLFYEAPRSVDWREKGYVTPVKNQEESCKYNPKYSVANDTGFVDIPKQEKALMKAVATVGPISVAIDAGHESFLFYKEGIYFEPDCSSEDMDHGVLVVGYGFESTESDNNKYWLVKNSWGEEWGMGGYVKMAKDRRNHCGIASAASYPTV

SEQ ID NO: 90994 - protein, 821 aa, Homo sapiens
LTGDATSPEGETDKNLANRVHSPHKRLSHRHLKVSTASLTSVDPAGHIIDLVNDQLPDISISEEDKKKNLALLEEAKLVSERFLTRRGRKSRSSPGDSPSAVSPNLSPSASPTSSRSNSLTVPTPPGLDVCSGPPSPLPGAPPQKGDEADVSSPHPGEPNVPKGLADRKQNDQRKVSQGRLAPRPPPVEKSKEIAIEQKENFDPLQYPETTPKGLAPVTNSSGKMALNSPQPGPVESELGKQLLKTGWEGSPLPRSPTQDAAGVGPPASQGRGPAGEPMGPEAGSKAELPPTVSRPPLLRGLSWDSGPEEPGPRLQKVLAKLPLAEEEKRFAGKAGGKLAKAPGLKDFQIQVQPVRMQKLTKLREEHILMRNQNLVGLKLPDLSEAAEQEKGLPSELSPAIEEEESKSGLDVMPNISDVLLRKLRVHRSLPGSAPPLTEKEVENVFVQLSLAFRNDSYTLESRINQAERERNLTEENTEKELENFKASITSSASLWHHCEHRETYQKLLEDIAVLHRLAARLSSRAEVVGAVRQEKRMSKATEVMMQYVENLKRTYEKDHAELMEFKKLANQNSSRSCGPSEDGVPRTARSMSLTLGKNMPRRRVSVAVVPKFNALNLPGQTPSSSSIPSLPALSESPNGKGSLPVTSALPALLENGKTNGDPDCEASAPALTLSCLEELSQETKARMEEEAYSKGFQEGLKKTKELQDLKEEEEEQKSESPEEPEEVEETEEEEKGPRSSKLEELVHFLQVMYPKLCQHWQVIWMMAAVMLVLTVVLGLYNSYNSCAEQADGPLGRSTCSAAQRDSWWSSGLQHEQPTEQ

SEQ ID NO: 90995 - protein, 63 aa, Homo sapiens
  MOD_RES (1)..(1): Any amino acid
XSSEGEDRGGNSPSREPGNARGRARASVELMPAWCGGPCQKSATLVAVTVTSSSLANQTDKVT

SEQ ID NO: 90996 - protein, 260 aa, Homo sapiens
DKDLKQYLDDCGNIINMHNVKLFLFQLLRGLAYCHRQKVLHRDLKPQNLLINERGELKLADFGLARAKSIPTKTYSNEVVTLWYRPPDILLGSTDYSTQIDMWGVGCIFYEMATGRPLFPGSTVEEQLHFIFRILGTPTEETWPGILSNEEFKTYNYPKYRAEALLSHAPRSLCPCGRLDSDGADLLTKLLQFEGRNRISAEDAMKHPFFLSLGERIHKLPDTTSIFALKEIQLQKEASLRSSSMPDSGRPAFRVVDTEF

SEQ ID NO: 90997 - protein, 848 aa, Homo sapiens [sequence omitted]

SEQ ID NO: 90998 - protein, 126 aa, Homo sapiens
MASVPVYCLCRLPYDVTRFMIECDMCQDWFHGSCVGVEEEKAADIDLYHCPNCEVLHGPSIMKKRRGSSKGHDTHKGKPVKTGSPTFVRELRSRTFDSSDEVILKPTGNQLTVEFLEENSFSVPIL

SEQ ID NO: 90999 - protein, 177 aa, Homo sapiens
MSEGDSVGESVHGKPSVVYRFFTRLGQIYQSWLDKSTPYTAVRWVVTLGLSFVYMIRVYLLQGWYIVTYALGIYHLNLFIAFLSPKVDPSLMEDSDDGPSLPTKQNEEFRPFIRRLPEFKFWHAATKGILVAMVCTFFDAFNVPVFWPILVMYFIMLFCITMKRQIKHMIKYRYIPF

SEQ ID NO: 91000 - protein, 1186 aa, Homo sapiens
MVVSAGHWSSEKAEMNILEINETLRPQLPENKQQLRNLKEKCFLTQLAGFLANRQKKYKYEECKDLIKFMLRNERQFKEEKLAEQLKQAEELRQYKVLVHSQERELTQLKEKLREGRDASRSLNEHLQALLTPDEPDKSQGQDLQEQLAEGCRLAQHLVQKLSPENDEDEDEDVQVEEDEKVLESSAPREVQKTEESKVPEDSLEECAITCSNSHGPCDSNQPHKNIKITFEEDEVNSTLVVDRESSHDECQDALNILPVPGPTSSATNVSMVVSAGPLSGEKAAINILEINEKLRPQLAEKKQQFRNLKEKCFLTQLAGFLANQQNKYKYEECKDLIKSMLRNERQFKEEKLAEQLKQAEELRQYKVLVHAQERELTQLREKLREGRDASRSLNEHLQALLTPDEPDKSQGQDLQEQLAEGCRLAQHLVQKLSPENDNDDDEDVQVEVAEKVQKSSAPREMQKAEEKEVPEDSLEECAITCSNSHGPYDCNQPHRKTKITFEEDKVDSTLIGSSSHVEWEDAVHIIPENESDDEEEEEKGPVSPRNLQESEEEEVPQESWDEGYSTLSIPPEMLASYKSYSSTFHSLEEQQVCMAVDIGRHRWDQVKKEDHEATGPRLSRELLDEKGPEVLQDSLDRCYSTPSGCLELTDSCQPYRSAFYVLEQQRVGLAVDMDEIEKYQEVEEDQDPSCPRLSRELLDEKEPEVLQDSLGRCYSTPSGYLELPDLGQPYSSAVYSLEEQYLGLALDVDRIKKDQEEEEDQGPPCPRLSRELLEVVEPEVLQDSLDRCYSTPSSCLEQPDSCQPYGSSFYALEEKHVGFSLDVGEIEKKGKGKKRRGRRSKKERRRGRKEGEEDQNPPCPRLSRELLDEKGPEVLQDSLDRCYSTPSGCLELTDSCQPYRSAFYILEQQRVGLAVDMDEIEKYQEVEEDQDPSCPRLSRELLDEKEPEVLQDSLGRCYSTPSGYLELPDLGQPYSSAVYSLEEQYLGLALDVDRIKKDQEEEEDQGPPCPRLSRELLEVVEPEVLQDSLDRCYSTPSSCLEQPDSCQPYGSSFYALEEKHVGFSLDVGEIEKKGKGKKRRGRRSKKERRRGRKEGEEDQNPPCPRLNSMLMEVEEPEVLQDSLDICYSTPSMYFELPDSFQHYRSVFYSFEEEHISFALYVDNRFFTLTVTSLHLVFQMGVIFPQ

SEQ ID NO: 91001 - protein, 207 aa, Homo sapiens
MSSPLASLSKTRKVPLPSEPMNPGRRGIRIYGDVPASHDSELMAFMTRKLWDLEQQVKAQTDEILSKDQKIAALEDLVQTLRPHPAEATLQRQEELETMCVQLQRQVREMERFLSDYGLQWVGEPMDQEDSESKTVSEHGERDWMTAKKFWKPGDSLAPPEVDFDRLLASLQDLSELVVEGDTQVTPVPGGARLRTLEPIPLKLYRN

SEQ ID NO: 91002 - protein, 53 aa, Homo sapiens
MADGPRCKRRKQANPRRNNVFSLNSQLAIGRKLPSEDMIIQMSFCDLATVCLT

SEQ ID NO: 91003 - protein, 265 aa, Homo sapiens
MAELNTHVNVKEKIYAVRSVVPNKSNNEIVLVLQQFDFNVDKAVQAFVDGSAIQVLKEWNMTGKKKNNKRKRSKSKQHQGNKDAKDKVERPEAGPLQPQPPQIQNGPMNGCEKDSSSTDSANEKPALIPREKKISILEEPSKALRGVTGPNIEKSVKDLQRCTVSLTRYRVMIKEEVDSSVKKIKAAFAELHNCIIDKEVSLMAEMDKVKEEAMEILTARQKKAEELKRLTDLASQMAEMQLAELRAEIKHFVSERKYDEELGKA

SEQ ID NO: 91004 - protein, 93 aa, Homo sapiens
MGSKCCKGGPDEDAVERQRRQKGLDDSVLVEDVGAETDPSAAAGPVEGLRHPGAGDGQAPVLHPHVAVPAMLPPNVQCSLLVPGPREQPCLPD

SEQ ID NO: 91005 - protein, 583 aa, Homo sapiens
MASTEGANNMPKQVEVRMHDSHLGSEEPKHRHLGLRLCDKLGKNLLLTLTVFGVILGAVCGGLLRLASPIHPDVVMLIAFPGDILMRMLKMLILPLIISSLITGLSGLDAKASGRLGTRAMVYYMSTTIIAAVLGVILVLAIHPGNPKLKKQLGPGKKNDEVSSLDAFLDLIRNLFPENLVQACFQQIQTVTKKVLVAPPPDEEANATSAVVSLLNETVTEVPEETKMVIKKGLEFKDGMNVLGLIGFFIAFGIAMGKMGDQAKLMVDFFNILNEIVMKLVIMIMWYSPLGIACLICGKIIAIKDLEVVARQLGMYMVTVIIGLIIHGGIFLPLIYFVVTRKNPFSFFAGIFQAWITALGTASSAGTLPVTFRCLEENLGIDKRVTRFVLPVGATINMDGTALYEAVAAIFIAQMNGVVLDGGQIVTVSLTATLASVGAASIPSAGLVTMLLILTAVGLPTEDISLLVAVDWLLDRMRTSVNVVGDSFGAGIVYHLSKSELDTIDSQHRVHEDIEMTKTQSIYDDMKNHRESNSNQCVYAAHNSVIVDECKPMESQPTAVLRKNLGNVRNKDMSLSKFLNKLP

SEQ ID NO: 91006 - protein, 138 aa, Homo sapiens
  MOD_RES (1)..(1): Any amino acid
XPVGSWYNVTILVKMDFKELQQVDPRLLNHMRLLHSLVTSALQPMASTVHHLHSAPGNASTTVSRLLLGLPRPLPVADVSTLLGDIAKRVYEVISVQMSMSVSMRSSMPALEGNCAQTWRARTGASVTRKLQPRLHGS

SEQ ID NO: 91007 - protein, 772 aa, Homo sapiens
MSKRGMSSRAKGDKAEALAALQAANEDLRAKLTDIQIELQQEKSKVSKVEREKNQELRQVREHEQHKTAVLLTELKTKLHEEKMKELQAVRETLLRQHEAELLRVIKIKDNENQRLQALLSALRDGGPEKVKTVLLSEAKEEAKKGFEVEKVKMQQEISELKGAKRQVEEALTLVIQADKIKAAEIRSVYHLHQEEITRIKKECEREIRRLEQQLDEKDARRFQLKIAELSAIIRKLEDRNALLSEERNELLKRVREAESQYKPLLDKNKRLSRKNEDLSHALRRMENKLKFVTQENIEMRQRAGIIRRPSSLNDLDQSQDEREVDFLKLQIVEQQNLIDELSKTLETAGYVKSVLERDKLLRFRKQRKKMAKLPKPVVVETFFGYDEEASLESDGSSVSYQTDRTDQTPCTPDDDLEEGMAKEETELRFRQLTMEYQALQRAYALLQEQVGGTLDAEREVKTREQLQAEVQRAQARIEDLEKALAEQGQDMKWIEEKQALYRRNQELVEKIKQMETEEARLRHEVQDARDQNELLEFRILELEERERKSPAISFHHTPFVDGKSPLQVYCEAEGVTDIVVAELMKKLDILGDNANLTNEEQVVVIQARTVLTLAEKWLQQIEETEAALQRKMVDLESEKELFSKQKGYLDEELDYRKQALDQANKHILELEAMLYDALQQEAGAKVAELLSEEEREKLKVAVEQWKRQVMSELRERDAQILRERMELLQLAQQRIKELEERIEAQKRQIKELEEKFLFLFLFFSLAFILWS

SEQ ID NO: 91008 - protein, 73 aa, Homo sapiens
MSFLCSWLLFAMAWWLIAFAHGDLAPSEGTAEPCVTSIHSFSSAFLFSIEVQVTIGFGGRMVTEECPLAILIL

SEQ ID NO: 91009 - protein, 19 aa, Homo sapiens
MKCSCCEMNVHRRCVRSVP

SEQ ID NO: 91010 - protein, 8 aa, Homo sapiens
  MOD_RES (1)..(1): Any amino acid
XMIPVYVE

SEQ ID NO: 91011 - protein, 226 aa, Homo sapiens
MGLELYLDLLSQPCRAVYIFAKKNDIPFELRIVDLIKDGVSLCRPGWSAVAGSQLTATSAARNLVLCLLFLLGRSALKRCLCPGEPPQEGASLEGRGLHLDGEVMFPVFLGEPVSPQTLAATLAELDVTLQLLEDKFLQNKAFLTGPHISLADLVAITELMHPVGAGCQVFEGRPKLATWRQRVEAAVGEDLFQEAHEVILKAKDFPPADPTIKQKLMPWVLAMIR

SEQ ID NO: 91012 - protein, 238 aa, Homo sapiens
MVVVTGREPDSRRQDGAMSSSDAEDDFLEPATPTATQAGHALPLLPQEFPEVVPLNIGGAHFTTRLSTLRCYEDTMLAAMFSGRHYIPTDSEGRYFIDRDGTHFGDVLNFLRSGDLPPRERVRAVYKEAQYYAIGPLLEQLENMQPLKGEKVRQAFLGLMPYYKDHLERIVEIARLRAVQRKARFAKLKGLTVDHQCIGVCDKHLVNHYYCKRPIYEFKITWWVIFSQGWNANFRGFF

SEQ ID NO: 91013 - protein, 120 aa, Homo sapiens
MALVSGISLDPEAAIGVTKRPPPKWVDGVDEIQYDVGRIKQKMKELASLHDKHLNRPTLDDSSEEEHAIEITTQEITQLFHRCQRAVQALPSRARACSEQEGRLLGNVVASLAQALQELS

SEQ ID NO: 91014 - protein, 32 aa, Homo sapiens
MGSRRTRTQMPPAQSLLWCCKAGTLLEAPWHE

SEQ ID NO: 91015 - protein, 114 aa, Homo sapiens
MPTGEDGRRVWRTGLLWWLMDYSVEGAAVLMRLLSFVVLALFAVTQAEEGARLLASKSLLNRYAVEGRDLTLQYNIYNVGSSAALDVELSDDSFPPEDFGIVSGMLNVKWDRIA

SEQ ID NO: 91016 - protein, 464 aa, Homo sapiens
MGVSKLDILYRRLLLTKLFIRGWGRPEDLKRLFEFRKMIGNRERCQNLVSSDYPVHIDKIEEQSDCKILDGHFVSPMAHYVPDIMPIESVIARFQFIVPKEWNSKYRPVCIHLAGTGDHHYWRRRTLMARPMIKEARMASLLLENPYYGCRKPKDQVRSSLKNVSDLFVMGGALVLESAALLHWLEREGYGPLGMTGISMGGHMASLAVSNWPKPMPLIPCLSWSTASGVFTTGVLSKSINWRELEKQYYTQTVYEEEIIHMLEYCGTDSFKMGQEFVKHFTSSADKLTNLNLVSRTLNLDISNQVVSQKPADCHNSSKTSVSATSEGLLLQDTSKMKRFNQTLSTNKSGYTSRNPQSYHLLSKEQSRNSLRKESLIFMKGVMDECTHVANFSVPVDPSLIIVVQAKEDAYIPRTGVRSLQEIWPGCEIRYLEGGHISAYLFKQGLFRQAIYDAFDRFLHKYAN

SEQ ID NO: 91017 - protein, 59 aa, Homo sapiens
GNSGLKPKDNEFTSKPWHWPINYQVVWWLNLLSIALYLLSGSIIAVAMQRGARLPAEVA

SEQ ID NO: 91018 - protein, 86 aa, Homo sapiens
MTAEEGVQLSQQNAKDFFRVLNLNKKCDTSKHKVLVVSVCPQSLPYFAAKFNLSVTDASRRLCGFLKSLGVHYVFDTTIAADFSIL

SEQ ID NO: 91019 - protein, 92 aa, Homo sapiens
MCGNGRLEQRPEDRGAFSCGDCSRVVTSPVLKRHLQVFLDCRSRPQCRVKVKLLQRSISSLLRFAAGEDGSYEVKSVLGKEVGLLNCFVQSV

SEQ ID NO: 91020 - protein, 431 aa, Homo sapiens
MQLKIMPKKKRLSAGRVPLILFLCQMISALEVPLDLVQPPTITQQSPKDYIIDPRENIVIQCEAKGKPPPSFSWTRNGTHFDIDKDPLVTMKPGTGTLIINIMSEGKAETYEGVYQCTARNERGAAVSNNIVVRPSRSPLWTKEKLEPITLQSGQSLVLPCRPPIGLPPPIIFWMDNSFQRLPQSERVSQGLNGDLYFSNVLPEDTREDYICYARFNHTQTIQQKQPISVKVISVDELNDTIAANLSDTEFYGAKSSRERPPTFLTPEGNASNKEELRGNVLSLECIAEGLPTPIIYWAKEDGMLPKNRTVYKNFEKTLQIIHVSEADSGNYQCIAKNALGAIHHTISVRVKAAPYWITAPQNLVLSPGEDGTLICRANGNPKPRISWLTNGVPIEIAPDDPSRKIDGDTIIFSNVQERSSAVYQCNASNE

SEQ ID NO: 91021 - protein, 61 aa, Homo sapiens
MACQQSRYHSFSSASRLQPRPSGVTIDESFLTEDKSTQNRKLLQKRRTLPTKGRRFGLWSP

SEQ ID NO: 91022 - protein, 1160 aa, Homo sapiens
MSVKEGAQRKWAALKEKLGPQDSDPTEANLESADPELCIRLLQMPSVVNYSGLRKRLEGSDGGWMVQFLEQSGLDLLLEALARLSGRGVARISDALLQLTCVSCVRAVMNSRQGIEYILSNQGYVRQLSQALDTSNVMVKKQVFELLAALCIYSPEGHVLTLDALDHYKTVCSQQYRFSIVMNELSGSDNVPYVVTLLSVINAVILGPEDLRARTQLRNEFIGLQLLDVLARLRDLEDADLLIQLEAFEEAKAEDEEELLRVSGGVDMSSHQEVFASLFHKVSCSPVSAQLLSVLQGLLHLEPTLRSSQLLWEALESLVNRAVLLASDAQECTLEEVVERLLSVKGRPRPSPLVKAHKSVQANLDQSQRGSSPQNTTTPKPSVEGQQPAAAAACEPVDHAQSESILKVSQPRALEQQASTPPPPPPPPLLPGSSAEPPPPPPPPPLPSVGAKALPTAPPPPPLPGLGAMAPPAPPLPPPLPGSCEFLPPPPPPLPGLGCPPPPPPLLPGMGWGPPPPPPPLLPCTCSPPVAGGMEEVIVAQVDHGLGSAWVPSHRRVNPPTLRMKKLNWQKLPSNVAREHNSMWASLSSPDAEAVEPDFSSIERLFSFPAAKPKEPTMVAPRARKEPKEITFLDAKKSLNLNIFLKQFKCSNEEVAAMIRAGDTTKFDVEVLKQLLKLLPEKHEIENLRAFTEERAKLASADHFYLLLLAIPCYQLRIECMLLCEGAAAVLDMVRPKAQLVLAACESLLTSRQLPIFCQLILRIGNFLNYGSHTGDADGFKISTLLKLTETKSQQNRVTLLHHVLEEAEKSHPDLLQLPRDLEQPSQAAGINLEIIRSEASSNLKKLLETERKVSASVAEVQEQYTERLQASISAFRALDELFEAIEQKQRELADYLCEDAQQLSLEDTFSTMKAFRDLFLRALKENKDRKEQAAKAERRKQQLAEEEARRPRGEDGKPVRKGPGKQEEVCVIDALLADIRKGFQLRKTARGRGDTDGGSKAASMDPPRATEPVATSNPAGDPVGSTRCPASEPGLDATTASESRGWDLVDAVTPGPQPTLEQLEEGGPRPLERRSSCSPATSPLQPEVQGKMPRIPRPCWASSRPRPTAQVRGWRTLSTAVVPDPLQQAQVGMRTRTRRTRPQSPHWTHPWTSPSPRMR

SEQ ID NO: 91023 - protein, 45 aa, Homo sapiens
  MOD_RES (1)..(1): Any amino acid
XRKDSSGSVSPNTLSQEEGDQICLYHIRKSCSFQGHGAPCDHCQQ

SEQ ID NO: 91024 - protein, 164 aa, Homo sapiens
MSAFNLLHLVTKSQPVALRACGLPSGSCRDKKNCKVVFSQQELRKRLTPLQYHVTQEKGTESAFEGEYTHHKDPGIYKCVVCGTPLFKSETKFDSGSGWPSFHDVINSEAITFTDDFSYGMHRVETSCSQCGAHLGHIFDDGPRPTGKRYCINSAALSFTPADS

SEQ ID NO: 91025 - protein, 67 aa, Homo sapiens
  MOD_RES (1)..(1): Any amino acid
XEEPQAGASMGGMCLSLAPRSSRANWQASGTAIESSAAVPKLEKRPCWPPQRRQEVDSPVPQPPRAP

SEQ ID NO: 91026 - protein, 34 aa, Homo sapiens; identical to SEQ ID NO: 85266

SEQ ID NO: 91027 - protein, 185 aa, Homo sapiens
MAAPEQPLAISRGCTSSSSLSPPRGDRTLLVRHLPAELTAEEKEDLLKYFGAQSVRVLSDKGRLKHTAFATFPNEKAAIKALTRLHQLKLLGHTLVVEFAKEQDRVHSPCPTSGSEKKKRSDDPVEDDKEKKELGYLTVENGIAPNHGLTFPLNSCLKYMYPPPSSTILANIVNALASVPKFYVQ

SEQ ID NO: 91028 - protein, 550 aa, Homo sapiens
MEGKWLLCMLLVLGTAIVEAHDGHDDDVIDIEDDLDDVIEEVEDSKPDTTAPPSSPKVTYKAPVPTGEVYFADSFDRGTLSGWILSKAKKDDTDDEIAKYDGKWEVEEMKESKLPGDKGLVLMSRAKHHAISAKLNKPFLFDTKPLIVQYEVNFQNGIECGGAYVKLLSKTPELNLDQFHDKTPYTIMFGPDKCGEDYKLHFIFRHKNPKTGIYEEKHAKRPDADLKTYFTDKKTHLYTLILNPDNSFEILVDQSVVNSGNLLNDMTPPVNPSREIEDPEDRKPEDWDERPKIPDPEAVKPDDWDEDAPAKIPDEEATKPEGWLDDEPEYVPDPDAEKPEDWDEDMDGEWEAPQIANPRCESAPGCGVWQRPVIDNPNYKGKWKPPMIDNPSYQGIWKPRKIPNPDFFEDLEPFRMTPFSAIGLELWSMTSDIFFDNFIICADRRIVDDWANDGWGLKKAADGAAEPGVVGQMIEAAEERPWLWVVYILTVALPVFLVILFCCSGKKQTSGMEYKKTDAPQPDVKEEEEEKEEEKDKGDEEEEGEEKLGG

SEQ ID NO: 91029 - protein, 201 aa, Homo sapiens
MGEAEKFHYIYSCDLDINVQLKIGSLEGKREQKSYKAVLEDPMLKFSGLYQETCSDLYVTCQVFAEGKPLALPVRTSYKAFSTRWNWNEWLKLPVKYPDLPRNAQVALTIWDVYGPGKAVPVGGTTVSLFGKYGMFRQGMHDLKVWPNVEADGSEPTKTPGRTSSTLSEDQMSRLAKVKKVIWNRCKALTDVYCSIYTLTL

SEQ ID NO: 91030 - protein, 3641 aa, Homo sapiens
MSEPGGGGGEDGSAGLEVSAVQNVADVSVLQKHLRKLVPLLLEDGGEAPAALEAALEEKSALEQMRKFLSDPQVHTVLVERSTLKEDVGDEGEEEKEFISYNINIDIHYGVKSNSLAFIKRTPVIDADKPVSSQLRVLTLSEDSPYETLHSFISNAVAPFFKSYIRESGKADRDGDKMAPSVEKKIAELEMGLLHLQQNIEIPEISLPIHPMITNVAKQCYERGEKPKVTDFGDKVEDPTFLNQLQSGVNRWIREIQKVTKLDRDPASGTALQEISFWLNLERALYRIQEKRESPEVLLTLDILKHGKRFHATVSFDTDTGLKQALETVNDYNPLMKDFPLNDLLSATELDKIRQALVAIFTHLRKIRNTKYPIQRALRLVEAISRDLSSQLLKVLGTRKLMHVAYEEFEKVMVACFEVFQTWDDEYEKLQVLLRDIVKRKREENLKMVWRINPAHRKLQARLDQMRKFRRQHEQLRAVIVRVLRPQVTAVAQQNQGEVPEPQDMKVAEVLFDAADANAIEEVNLAYENVKEVDGLDVSKEGTEAWEAAMKRYDERIDRVETRITARLRDQLGTAKNANEMFRIFSRFNALFVRPHIRGAIREYQTQLIQRVKDDIESLHDKFKVQYPQSQACKMSHVRDLPPVSGSIIWAKQIDRQLTAYMKRVEDVLGKGWENHVEGQKLKQDGDSFRMKLNTQEIFDDWARKVQQRNLGVSGRIFTIESTRVRGRTGNVLKLKVNFLPEIITLSKEVRNLKWLGFRVPLAIVNKAHQANQLYPFAISLIESVRTYERTCEKVEERNTISLLVAGLKKEVQALIAEGIALVWESYKLDPYVQRLAETVFNFQEKVDDLLIIEEKIDLEVRSLETCMYDHKTFSEILNRVQKAVDDLNLHSYSNLPIWVNKLDMEIERILGVRLQAGLRAWTQVLLGQAEDKAEVDMDTDAPQVSHKPGGEPKIKNVVHELRITNQVIYLNPPIEECRYKLYQEMFAWKMVVLSLPRIQSQRYQVGVHYELTEEEKFYRNALTRMPDGPVALEESYSAVMGIVSEVEQYVKVWLQYQCLWDMQAENIYNRLGEDLNKWQALLVQIRKARGTFDNAETKKEFGPVVIDYGKVQSKVNLKYDSWHKEVLSKFGQMLGSNMTEFHSQISKSRQELEQHSVDTASTSDAVTFITYVQSLKRKIKQFEKQVELYRNGQRLLEKQRFQFPPSWLYIDNIEGEWGAFNDIMRRKDSAIQQQVANLQMKIVQEDRAVESRTTDLLTDWEKTKPVTGNLRPEEALQALTIYEGKFGRLKDDREKCAKAKEALELTDTGLLSGSEERVQVALEELQDLKGVWSELSKVWEQIDQMKEQPWVSVQPRKLRQNLDALLNQLKSFPARLRQYASYEFVQRLLKGYMKINMLVIELKSEALKDRHWKQLMKRLHVNWVVSELTLGQIWDVDLQKNEAIVKDVLLVAQGEMALEEFLKQIREVWNTYELDLVNYQNKCRLIRGWDDLFNKVKEHINSVSAMKLSPYYKVFEEDALSWEDKLNRIMALFDVWIDVQRRWVYLEGIFTGSADIKHLLPVETQRFQSISTEFLALMKKVSKSPLVMDVLNIQGVQRSLERLADLLGKIQKALGEYLERERSSFPRFYFVGDEDLLEIIGNSKNVAKLQKHFKKMFAGVSSIILNEDNSVVLGISSREGEEVMFKTPVSITEHPKINEWLTLVEKEMRVTLAKLLAESVTEVEIFGKATSIDPNTYITWIDKYQAQLVVLSAQIAWSENVETALSSMGGGGDAAPLHSVLSNVEVTLNVLADSVLMEQPPLRRRKLEHLITELVHQRDVTRSLIKSKIDNAKSFEWLSQMRFYFDPKQTDVLQQLSIQMANAKFNYGFEYLGVQDKLVQTPLTDRCYLTMTQALEARLGGSPFGPAGTGKTESVKALGHQLGRFVLVFNCDETFDFQAMGRIFVGLCQVGAWGCFDEFNRLEERMLSAVSQQVQCIQEALREHSNPNYDKTSAPITCELLNKQVKVSPDMAIFITMNPGYAGRSNLPDNLKKLFRSLAMTKPDRQLIAQVMLYSQGFRTAEVLANKIVPFFKLCDEQLSSQSHYDFGLRALKSVLVSAGNVKRERIQKIKREKEERGEAVDEGEIAENLPEQEILIQSVCETMVPKLVAEDIPLLFSLLSDVFPGVQYHRGEMTALREELKKVCQEMYLTYGDGEEVGGMWVEKVLQLYQITQINHGLMMVGPSGSGKSMAWRVLLKALERLEGVEGVAHIIDPKAISKDHLYGTLDPNTREWTDGLFTHVLRKIIDSVRGELQKRQWIVFDGDVDPEWVENLNSVLDDNKLLTLPNGERLSLPPNVRIMFEVQDLKYATLATVSRCGMVWFSEDVLSTDMIFNNFLARLRSIPLDEGEDEAQRRRKGKEDEGEEAASPMLQIQRDAATIMQPYFTSNGLVTKALEHAFQLEHIMDLTRLRCLGSLFSMLHQACRNVAQYNANHPDFPMQIEQLERYIQRYLVYAILWSLSGDSRLKMRAELGEYIRRITTVPLPTAPNIPIIDYEVSISGEWSPWQAKVPQIEVETHKVAAPDVVVPTLDTVRHEALLYTWLAEHKPLVLCGPPGSGKTMTLFSALRALPDMEVVGLNFSSATTPELLLKTFDHYCEYRRTPNGVVLAPVQLGKWLVLFCDEINLPDMDKYGTQRVISFIRQMVEHGGFYRTSDQTWVKLERIQFVGACNPPTDPGRKPLSHRFLRHVPVVYVDYPGPASLTQIYGTFNRAMLRLIPSLRTYAEPLTAAMVEFYTMSQERFTQDTQPHYIYSPREMTRWVRGIFEALRPLETLPVEGLIRIWAHEALRLFQDRLVEDEERRWTDENIDTVALKHFPNIDREKAMSRPILYSNWLSKDYIPVDQEELRDYVKARLKVFYEEELDVPLVLFNEVLDHVLRIDRIFRQPQGHLLLIGVSGAGKTTLSRFVAWMNGLSVYQIKVHRKYTGEDFDEDLRTVLRRSGCKNEKIAFIMDESNVLDSGFLERMNTLLANGEVPGLFEGDEYATLMTQCKEGAQKEGLMLDSHEELYKWFTSQVIRNLHVVFTMNPSSEGLKDRAATSPALFNRCVLNWFGDWSTEALYQVGKEFTSKMDLEKPNYIVPDYMPVVYDKLPQPPSHREAIVNSCVFVHQTLHQANARLAKRGGRTMAITPRHYLDFINHYANLFHEKRSELEEQQMHLNVGLRKIKETVDQVEELRRDLRIKSQELEVKNAAANDKLKKMVKDQQEAEKKKVMSQEIQEQLHKQQEVIADKQMSVKEDLDKVEPAVIEAQNAVKSIKKQHLVEVRSMANPPAAVKLALESICLLLGESTTDWKQIRSIIMRENFIPTIVNFSAEEISDAIREKMKKNYMSNPSYNYEIVNRASLACGPMVKWAIAQLNYADMLKRVEPLRNELQKLEDDAKDNQQKANEVEQMIRDLEASIARYKEEYAVLISEAQAIKADLAAVEAKVNRSTALLKSLSAERERWEKTSETFKNQMSTIAGDCLLSAAFIAYAGYFDQQMRQNLFTTWSHHLQQANIQFRTDIARTEYLSNADERLRWQASSLPADDLCTENAIMLKRFNRYPLIIDPSGQATEFIMNEYKDRKITRTSFLDDAFRKNLESALRFGNPLLVQVGVGL

SEQ ID NO: 91031 - protein, 174 aa, Homo sapiens
MYRQQKRHQGSLGPRPRTGEDEVDHLILLALMTVVMAVCSLPLTIRCFTQAVAPDSSSEMGDLLAFRFYAFNPILDPWVFILFRKAVFQRLKLWVCCLCLGPAHGDSQTPLSQLASGRRDPRAPSAPVGKEGSCVPLSAWGEGQVEPLPPTQQSSGSAVGTSSKAEASVACSLC

SEQ ID NO: 91032 - protein, 44 aa, Homo sapiens
ILMASVFMVCLALLGCFALLWCVYKKTKYAFSPRNSLPQHLKEE

SEQ ID NO: 91033 - protein, 248 aa, Homo sapiens
MVPAWLWLLCVSVPQALPKAQPAELSVEVPENYGGNFPLYLTKLPLPREGAEGQIVLSGDSGKATEGPFAMDPDSGFLLVTRALDREEQAEYQLQVTLEMQDGHVLWGPQPVLVHVKDENDQVPHFSQAIYRARLSRGTRPGIPFLFLEASDRDEPGTANSDLRFHILSQAPAQPSPDMFQLEPRLGALALSPKGSTSLDHALERTYQLLVQVKDMGDQASGHQATATVEGRHRRDFWPGLGARLWAC

SEQ ID NO: 91034 - protein, 284 aa, Homo sapiens
MTTPRNSVNGTFPAEPMKGPIAMQSGPKPLFRRMSSLVGPTQSFFMRESKTLGAVQIMNGLFHIALGGLLMIPAGIYAPICVTVWYPLWGGIMYIISGSLLAATEKNSRKCLVKGKMIMNSLSLFAAISGMILSIMDILNIKISHFLKMESLNFIRAHTPYINIYNCEPANPSEKNSPSTQYCYSIQSLFLELVIAGIVENEWKRTCSRPKSNIVLLSAEEKKEQTIEIKEEVVGLTETSSQPKNEEDIEIIPIQEEEEEETETNFPEPPQDQESSPIENDSSP

SEQ ID NO: 91035 - protein, 313 aa, Homo sapiens
MAAEEEDEVEWVVESIAGFLRGPDWSIPILDFVEQKCEVFDDEEESKLTYTEIHQEYKELVEKLLEGYLKEIGINEDQFQEACTSPLAKTHTSQAILQPVLAAEDFTIFKAMMVQKNIEMQLQAIRIIQERNGVLPDCLTDGSDVVSDLEHEEMKILREVLRKSKEEYDQEEERKRKKQLSEAKTEEPTVHSSEAAIMNNSQGDGEHFAHPPSDLKIPGLEHASIEGPIANLSVLGTEELRQREHYLKQKRDKLMSMRKDMRTKQIQNMEQKGKPTGEVEEMTEKPEMTAEEKQTLLKRRLLAEKLKEEVINK

SEQ ID NO: 91036 - protein, 53 aa, Homo sapiens
MDSQGRKVVVCDNGTGFVKCGYAGSNFPEHIFPALVGRPIIRSTTKVGNIEIK

SEQ ID NO: 91037 - protein, 148 aa, Homo sapiens
  MOD_RES (1)..(1): Any amino acid
XQQDSQELLHYLLDAVRTEETKRIQASILKAFNNPTTKTADDETRKKVKAYGKEGVKMNFIDRIFIGELTSTVMCEECANISTVKDPFIDISLPIIEERVSKPLLWGRMNKYRSLRETDHDRYSGNVTIENIHQPRAAKKHSSSKDKR

SEQ ID NO: 91038 - protein, 990 aa, Homo sapiens
MSNSNTTQETLEIMKESEKKLVEESVNKNKFISKTPSKEEIEKECEDTSLRQETQRRTSNHGHARKRAKSNSKLKLVRSLAVCEESSTPFADGPLETQDIIQLHISCPSDKEEEKSTKDVSEKEDKDKNKEKIPRKMLSRDSSQEYTDSTGIDLHEFLVNTLKKNPRDRMMLLKLEQEILEFINDNNNQFKKFPQMTSYHRMLLHRVAAYFGMDHNVDQTGKAVIINKTSNTRIPEQRFSEHIKDEKNTEFQQRFILKRDDASMDRDDNQIRVPLQDGRRSKSIEEREEEYQRVRERIFARETGQNGYLNDIRGNREGLSRTSSSRQSSTDSELKSLEPRPWSSTDSDGSVRSMRPPVTKASSFSGISILTRGDSIGSSKGGSAGRISRPGMALGAPEVCNQVTSSQSVRGLLPCTAQQQQQQQQQQLPALPPTPQQQPPLNNHMISQADDLSNPFGQMSLSRQGSTEAADPSAALFQTPLISQHPQQTSFIMASTGQPLPTSNYSTSSHAPPTQQVLPPQGYMQPPQQIQVSYYPPGQYPNSNQQYRPLSHPVAYSPQRGQQLPQPSQQPGLQPMMPNQQQAAYQGMIGVQQPQNQGLLSSQRSSMGGQMQGLVVQYTPLPSYQVPVGSDSQNVVQPPFQQPMLVPVSQSVQGGLPAAGVPVYYSMIPPAQQNGTSPSVGFLQPPGSEQYQMPQSPSPCSPPQMPQQYSGVSPSGPGVVVMQLNVPNGPQPPQNPSMVQWSHCKYYSMDQRGQKPGDLYSPDSSPQANTQMSSSPVTSPTQSPAPSPVTSLSSVCTGLSPLPVLTQFPRPGGPAQGDGRYSLLGQPLQYNLSICPPLLHGQSTYTVHQGQSGLKHGNRGKRQALKSASTDLGTADVVLGRVLEVTDLPEGITRTEADKLFTQLAMSGAKIQWLKDAQGLPGGGGGDNSGTAENGRHSDLAALYTIVAVFPSPLAAQNASLRLNNSVSRFKLRMAKKNYDLRILERASSQ

SEQ ID NO: 91039 - protein, 390 aa, Homo sapiens
MPPSGLRLLPLLLPLLWLLVLTPGRPAAGLSTCKTIDMELVKRKRIEAIRGQILSKLRLASPPSQGEVPPGPLPEAVLALYNSTRDRVAGESAEPEPEPEADYYAKEVTRVLMVETHNEIYDKFKQSTHSIYMFFNTSELREAVPEPVLLSRAELRLLRLKLKVEQHVELYQKYSNNSWRYLSNRLLAPSDSPEWLSFDVTGVVRQWLSRGGEIEGFRLSAHCSCDSRDNTLQVDINGFTTGRRGDLATIHGMNRPFLLLMATPLERAQHLQSSRHRRALDTNYCFSSTEKNCCVRQLYIDFRKDLGWKWIHEPKGYHANFCLGPCPYIWSLDTQYSKVLALYNQHNPGASAAPCCVPQALEPLPIVYYVGRKPKVEQLSNMIVRSCKCS

SEQ ID NO: 91040 - protein, 296 aa, Homo sapiens
MKVRQRAVALYFIDKLALRAGNEKEEGETADTVGCCSLRVEHINLHPELDGQEYVVEFDFLGKDSIRYYNKVPVEKRVFKNLQLFMENKQPEDDLFDRLNTGILNKHLQDLMEGLTAKVFRTYNASITLQQQLKELTAPDENIPAKILSYNRANRAVAILCNHQRAPPKTFEKSMMNLQTKIDAKKEQLADARRDLKSAKADAKVMKDAKTKKVVESKKKAVQRLEEQLMKLEVQATDREENKQIALGTSKLNYLDPRITVAWCKKWGVPIEKIYNKTQREKFAWAIDMADEDYEF

SEQ ID NO: 91041 - protein, 1277 aa, Homo sapiens
MAALLRSARWLLRAGAAPRLPLSLRLLPGGPGRLHAASYLPAARAGPVAGGLLSPARLYAIAAKEKDIQEESTFSSRKISNQFDWALMRLDLSVRRTGRIPKKLLQKVFNDTCRSGGLGGSHALLLLRSCGSLLPELKLEERTEFAHRIWDTLQKLGAVYDVSHYNALLKVYLQNEYKFSPTDFLAKMEEANIQPNRVTYQRLIASYCNVGDIEGASKILGFMKTKDLPVTEAVFSALVTGHARAGDMENAENILTVMRDAGIEPGPDTYLALLNAYAEKGDIDHVKQTLEKVEKSELHLMDRDLLQIIFSFSKAGYPQYVSEILEKVTCERRYIPDAMNLILLLVTEKLEDVALQILLACPVSKEDGPSVFGSFFLQHCVTMNTPVEKLTDYCKKLKEVQMHSFPLQFTLHCALLANKTDLAKALMKAVKEEGFPIRPHYFWPLLVGRRKEKNVQGIIEILKGMQELGVHPDQETYTDYVIPCFDSVNSARAILQENGCLSDSDMFSQAGLRSEAANGNLDFVLSFLKSNTLPISLQSIRSSLLLGFRRSMNINLWSEITELLYKDGRYCQEPRGPTEAVGYFLYNLIDSMSDSEVQAKEEHLRQYFHQLEKMNVKIPENIYRGIRNLLESYHVPELIKDAHLLVESKNLDFQKTVQLTSSELESTLETLKAENQPIRDVLKQLILVLCSEENMQKALELKAKYESDMVTGGYAALINLCCRHDKVEDALNLKEEFDRLDSSAVLDTGKYVGLVRVLAKHGKLQDAINILKEMKEKDVLIKDTTALSFFHMLNGAALRGEIETVKQLHEAIVTLGLAEPSTNISFPLVTVHLEKGDLSTALEVAIDCYEKYKVLPRIHDVLCKLVEKGETDLIQKAMDFVSQEQGEMVMLYDLFFAFLQTGNYKEAKKIIETPGIRARSARLQWFCDRCVANNQVETLEKLVELTQKLFECDRDQMYYNLLKLYKINGDWQRADAVWNKIQEENVIPREKTLRLLAEILREGNQEVPFDVPELWYEDEKHSLNSSSASTTEPDFQKDILIACRLNQKKGAYDIFLNAKEQNIVFNAETYSNLIKLLMSEDYFTQAMEVKAFAETHIKGFTLNDAANSRLIITQVRRDYLKEAVTTLKTVLDQQQTPSRLAVTRVIQALAMKGDVENIEVVQKMLNGLEDSIGLSKMVFINNIALAQIKNNNIDAAIENIENMLTSENKVIEPQYFGLAYLFRKVIEEQLEPAVEKISIMAERLANQFAIYKPVTDFFLQLVDAGKVDDARALLQEF

SEQ ID NO: 91042 - protein, 168 aa, Homo sapiens
MAEKRHTRDSEAQRLPDSFKDSPSKGLGPCGWILVAFSFLFTVITFPISIWMCIKIIKEYERAIIFRLGRILQGGAKGPGLFFILPCTDSFIKVDMRTISFDIPPQEILTKDSVTISVDGVVYYRVQNATLAVANITNADSATRLLAQTTLRNVLGTKNLSQISSLRL

SEQ ID NO: 91043 - protein, 112 aa, Homo sapiens
MPHRKERPSGSSLHTHGSTGTAEGGNMSRLSLTRSPVSPLAAQGIPLPAQLTKSNAPVHIDVGGHMYTSSLATLTKYPDSRISRLFNGTEPIVLDSLKQHYFIDRDGEIFRY

SEQ ID NO: 91044 - protein, 84 aa, Homo sapiens
MLAAMGSLAAALWAVVHPRTLLLGTVAFLLAADFLKRRRPKNYPPGPWRLPFLGNFFLVDFEQSHLEVQLVGVGEVCEEIWEPF

SEQ ID NO: 91045 - protein, 288 aa, Homo sapiens
MESIFHEKQEGSLCAQHCLNNLLQGEYFSPVELSSIAHQLDEEERMRMAEGGVTSEDYRTFLQQPSGNMDDSGFFSIQVISNALKVWGLELILFNSPEYQRLRIDPINERSFICNYKEHWFTVRKLGKQWFNLNSLLTGPELISDTYLALFLAQLQQEGYSIFVVKGDLPDCEADQLLQMIRVQQMHRPKLIGEELAQLKEQRVHKTDLERVLEANDGSGMLDEDEEDLQRALALSRQEIDMEDEEADLRRAIQLSMQGSSRNISQDMTQTSGTNLTSEESEETRSLL

SEQ ID NO: 91046 - protein, 305 aa, Homo sapiens
MGSLSTANVEFCLDVFKELNSNNIGDNIFFSSLSLLYALSMVLLGARGETEEQLEKVLHFSHTVDSLKPGFKDSPKCSQAGRIHSEFGVEFSQINQPDSNCTLSIANRLYGTKTMAFHQGKNVTVEMMYQIGTFKLAFVKEPQMQVLELPYVNNKLSMIILLPVGIANLKQIEKQLNSGTFHEWTSSSNMMEREVEVHLPRFKLETKYELNSLLKSLGVTDLFNQVKADLSGMSPTKGLYLSKAIHKSYLDVSEEGTEAAAATGDSIAVKSLPMRAQFKANHPFLFFIRHTHTNTILFCGKLASP

SEQ ID NO: 91047 - protein, 71 aa, Homo sapiens
  MOD_RES (1)..(1): Any amino acid
XHGLRQDAQQEDFGIFQVRATTWDAGNPELRAGRKGLLVGPAEKAEVAREGRARANAGLGRGHWCICSREG

SEQ ID NO: 91048 - protein, 410 aa, Homo sapiens
MGGAVVDEGPTGVKAPDGGWGWAVLFGCFVITGFSYAFPKAVSVFFKELIQEFGIGYSDTAWISSILLAMLYGTGPLCSVCVNRFGCRPVMLVGGLFASLGMVAASFCRSIIQVYLTTGVITGLGLALNFQPSLIMLNRYFSKRRPMANGLAAAGSPVFLCALSPLGQLLQDRYGWRGGFLILGGLLLNCCVCAALMRPLVVTAQPGSGPPRPSRRLLDLSVFRDRGFVLYAVAASVMVLGLFVPPVFVVSYAKDLGVPDTKAAFLLTILGFIDIFARPAAGFVAGLGKVRPYSVYLFSFSMFFNGLADLAGSTAGDYGGLVVFCIFFGISYGMVGALQFEVLMAIVGTHKFSSAIGLVLLMEAVAVLVGPPSGGRSPKSHSLRWRPRRRRSSTSLLQTRGWTCGRWSIS

SEQ ID NO: 91049 - protein, 190 aa, Homo sapiens
  MOD_RES (1)..(1): Any amino acid
XRACSETLAESRTAVLQQRRAAQLPGGPAAAGEQRASPSKARLKEFLQQCDREDLVELALPQLAQVVTVYEFLLMKVAESLGITEFLRKKEIHPDNLGPKHLSRDMDGEQLEGASSEKREREAAEEGLASVKRPRREALSNDTTESLAANSRGREKPRPLHALAAGTIVSQEEDIVTVTDAEGRACGWAR

SEQ ID NO: 91050 - protein, 114 aa, Homo sapiens
MDASRTSRHLEETINNFERQKMKDIKTIFSEFITIEMLFHGKALEVYTAAYQNIQNIDEDEDLEVFRNSLYAPDYSSRLDIVRANSKSPLQRSLSAKCVSGTGQVSKKPYSKGI

SEQ ID NO: 91051 - protein, 745 aa, Homo sapiens
MKSSVAQIKPSSGHDRRENLNSYQRNSSPEDRYEEQERSPRDRDYFDYSRSDYEHSRRGRSYDSSMESRNRDREKRRERERDTDRKRSRKSPSPGRRNPETSVTQSSSAQDEPATKKKKDELDPLLTRTGGAYIPPAKLRMMQEQITDKNSLAYQRMSWEALKKSINGLINKVNISNISIIIQELLQENIVRGRGLLSRSVLQAQSASPIFTHVYAALVAIINSKFPQIGELILKRLILNFRKGYRRNDKQLCLTASKFVAHLINQNVAHEVLCLEMLTLLLERPTDDSVEVAIGFLKECGLKLTQVSPRGINAIFERLRNILHESEIDKRVQYMIEVMFAVRKDGFKDHPIILEGLDLVEEDDQFTHMLPLEDDYNPEDVLNVFKMDPNFMENEEKYKAIKKEILDEGDTDSNTDQDAGSSEEDEEEEEEEGEEDEEGQKVTIHDKTEINLVSFRRTIYLAIQSSLDFEECAHKLLKMEFPESQTKELCNMILDCCAQQRTYEKFFGLLAGRFCMLKKEYMESFEGIFKEQYDTIHRLETNKLRNVAKMFAHLLYTDSLPWSVLECIKLSEETTTSSSRIFVKIFFQELCEYMGLPKLNARLKDETLQPFFEGLLPRDNPRNTRFAINFFTSIGLGGLTDELREHLKNTPKVIVAQKPDVEQNKSSPSSSSSASSSSESDSSDSDSDSSDSSSESSSEESDSSSISSHSSASANDVRKKGHGKTRSKEVDKLIRNQQTNDRKQK

SEQ ID NO: 91052 - protein, 597 aa, Homo sapiens
MIKFQIQGIHVQERVTFKDVAVVFTKEELALLDKAQINLYQDVMLENFRNLMLVRDGIKNNILNLQAKGLSYLSQEVLHCWQIWKQRIRDLTVSQDYIVNLQEECSPHLEDVSLSEEWAGISLQISENENYVVNAIIKNQDITAWQSLTQVLTPESWRKANIMTEPQNSQGRYKGIYMEEKLYRRAQHDDSLSWTSCDHHESQECKGEDPGRHPSCGKNLGMKSTVEKRNAAHVLPQPFPCNNCGVAFADDTDPHVHHSTHLGEKSYKCDQYGKNFSQSQDLIVHCKTHSGKTPYEFHEWPMGCKQSSDLPRYQKVSSGDKPYKCKECGKGFRRSSSLHNHHRVHTGEMPYKCDECGKGFGFRSLLCIHQGVHTGKKPYKCEECGKGFDQSSNLLVHQRVHTGEKPYKCSECGKCFSSSSVLQVHWRFHTGEKPYRCGECGKGFSQCTHLHIHQRVHTGEKPYKCNVCGKDFAYSSVLHTHQRVHTGEKPYKCEVCGKCFSYSSYFHLHQRDHIREKPYKCDECGKGFSRNSDLNVHLRVHTGERPYKCKACGKGFSRNSYLLAHQRVHIDETQYTHCERGKDLLTHQRLHEQRETL

SEQ ID NO: 91053 - protein, 392 aa, Homo sapiens
EERSALFGNIQDIYHFNSELLQDLENCENDPVAIAECFVSKSEEFHIYTQYCTNYPRSVAVLTECMRNKILAKFFRERQETLKHSLPLGSYLLKPVQRILKYHLLLHEIENHLDKDTEGYDVVLDAIDTMQRVAWHINDMKRKHEHAVRLQEIQSLLTNWKGPDLTSYGELVLEGTFRIQRAKNERTLFLFDKLLLITKKRDDTFTYKAHILCGNLMLVEVIPKEPLSFSVFHYKNPKLQHTVQAKSQQDKRLWVLHLKRLILENHAAKIPAKAKQAILEMDAIHHPGFCYSPEGGTKALFGSKEGSAPYRLRRKSEPSSRSHKVLKTSETAQDIQKVSREEGSPQLSSARPSPAQRNSQPSSSTMISVLRAGGALRNIWTDHQISTTFGNG

SEQ ID NO: 91054 - protein, 181 aa, Homo sapiens
MAPVRRSAKWRPGGIEARGEGVSTVGYRNKNVRQKTWRPNHPQAFVGSVREGQGFAFRRKLKIQQSYKKLLRKEKKAQTSLESQFTDRYPDNLKHLYLAEEERHRKQARKVDHPLSEQVHQPLLEEQCSIDEPLFEDQCSFDQPQPEEQCIKTVKSEFLTCTFSFSLRNVFQHFLQVFGNQ

SEQ ID NO: 91055 - protein, 111 aa, Homo sapiens
MAGLQELRFPEEKPLLRGQDATELESSDAFLLAADTDWKEHDIETPYGLLHVVIRGSPKGNRPAILTYHDVGLNHKLCFNTFFNFEDMQEITKHFVVCHVDAPGQQVGASQ

SEQ ID NO: 91056 - protein, 23 aa, Homo sapiens
  MOD_RES (1)..(1): Any amino acid
XRTEDSIRDYEGIHTPTKARERF

SEQ ID NO: 91057 - protein, 130 aa, Homo sapiens
TNLAHICEERPDLARRYLGVNCVWRYYNFSVFQIDAPSFAYLKMGDLYYYGHQNQSQDLELSVQMYAQAALDGDSQGFFNLALLIEEGTIIPHHILDFLEIDSTLHSNNISILQELYERSTFWEPFCYPY

SEQ ID NO: 91058 - protein, 210 aa, Homo sapiens
  MOD_RES (1)..(1): Any amino acid
XVYTLLTTHLNAILVESHSVVQGSIQFTVDKVLEQHHQAAKAQQKLQASLSVAVNSIMSILTGSTRSSFRKMCLQTLQAADTQEFRTKLHKVFREITQHQFLHHCSCEVKQLTLEKKDSAQGTEDAPDNSSLELLAVLKQPSQPTAAGVQQLSHSVTSRDARYQRASRKQEAQEGQPPHRGDASSALCQGPEPVRGRPAPPGSHRGPPHS

SEQ ID NO: 91059 - protein, 128 aa, Homo sapiens
AQALWRMPWLPVFLSLAAAAAAAAAEQQVPLVLWSSDRDLWAPAADTHEGHITSDLQLSTYLDPALELGPRNVLLFLQDKLSIEDFTAYGGVFGNKQDSAFSNLEHTQVRRCPIHSGPHSGPPFQGGP

SEQ ID NO: 91060 - protein, 128 aa, Homo sapiens
MKKWEDMANLPPHFRERTERLERNFTVSAVIFKKYEPIFQDIFKYPQEEQPRQQRGRKQRRQPCTVSEIFHFCWVLFIYAKGNFPMISDDLVNSYHLLLCALDLVYGNALQCSNRKELVNPNFKGLSE

SEQ ID NO: 91061 - protein, 278 aa, Homo sapiens
MPEIRVTPLGAGQDVGRSCILVSIAGKNVMLDCGMHMGFNDDRRFPDFSYITQNGRLTDFLDCVIISHFHLDHCGALPYFSEMVGYDGPIYMTHPTQAICPILLEDYRKIAVDKKGEANFFTSQMIKDCMKKVVAVHLHQTVQVDDELEIKAYYAGHVLGAAMFQIKVGSESVVYTGDYNMTPDRHLGAAWIDKCRPNLLITESTYATTIRDSKRCRERDFLKKVHETVERGGKGAHEPEGAHLLLHGADREGQPLLQAVHPLDQPEDPQDFRAEEHV

SEQ ID NO: 91062 - protein, 213 aa, Homo sapiens
  MOD_RES (1)..(1): Any amino acid
XFSTSRQTLMWIPDSFFSSLLSGRISTLRDETGAIFIDRDPAAFAPILNFLRTKELDLRGVSINVLRHEAEFYGITPLVRRLLLCEELERSSCGSVLFHGYLPPPGIPSRKINNTVRSADSRNGLNSTEGEARGNGTQPVLSGTGEETVRLGFPVDPRKVLIVAGHHNWIVAAYAHFAVCYRVFWLGTVGHACNPSTLGGRDGWSSRSARPTW

SEQ ID NO: 91063 - protein, 105 aa, Homo sapiens
RDSQDGSSYRRPLEQQQPHHIPTSAPVYQQPQQQPVAQSYGGYKEPAAPVSIQRSAPGGGGVSNPGRRGEARGRGSFGKAWTQLMDSPDLCTHPLLCVMIRISAL

SEQ ID NO: 91064 - protein, 388 aa, Homo sapiens
  MOD_RES (1)..(1): Any amino acid
XTSRPTPVVFSESRGPALTRLHAMARDPHSLWVGWEPPNPWPQGYVIEWGLGPPSASNSNKTWRMEQNGRATGFLLKAPSHAPELHLKHIGKTWAQLEWVPEPPELGKSPLTHYTIFWTNAQNQSFSAILNASSRGFVLHGLEPASLYHIHLMAASQAGATNSTVLTLMTLTPEGSELHIILGLFGLLLLLTCLCGTAWLCCSPNRKNPLWPSVPDPAHSSLGSWVPTIMEEDAFQLPGLGTPPITKLTVLEEDEKKPVPWESHNSSETCGLPTLVQTYVLQGDPRAVSTQPQSQSGTSDQVLYGQLLGSPTSPGPGHYLRCDSTQPLLAGLTPSPKSYENLWFQASPLGTLVTPAPSQEDDCVFGPLLNFPLLQGIRVHGMEALGSF

SEQ ID NO: 91065 - protein, 538 aa, Homo sapiens
MAAHLSYGRVNLNVLREAVRRELREFLDKCAGSKAIVWDEYLTGPFGLIAQYSLLKEHEVEKMFTLKGNRLPAADVKNIIFFVRPRLELMDIIAENVLSEDRRGPTRDFHILFVPRRSLLCEQRLKDLGVLGSFIHREEYSLDLIPFDGDLLSMESEGAFKQVANMMIRMKREFTGSQNSIFPVFDNLLLLDRNVDLLTPLATQLTYEGLIDEIYGIQNSYVKLPPEKFAPKKQGDGGKDLPTEAKKLQLNSAEELYAEIRDKNFNAVGSVLSKKAKIISAAFEERHNAKTVGEIKQFVSQLPHMQAARGSLANHTSIAELIKDVTTSEDFFDKLTVEQEFMSGIDTDKVNNYIEDCIAQKHSLIKVLRLVCLQSVCNSGLKQKVLDYYKREILQTYGYEHILTLHNLEKAGLLKPQTGGRNNYPTIRKTLRLWMDDVNEQNPTDISYVYSGYAPLSVRLAQLLSRPGWRSIEEVLRILPGPHFEERQPLPTGLQKKRQPGENRVTLIFFLGGVTFAEIAALRFLSQLEDGEIRASFP

SEQ ID NO: 91066 - protein, 183 aa, Homo sapiens
  MOD_RES (1)..(1): Any amino acid
XGKQSVNRGFTKDKTLSSIFNIEMVKEKTAEEIKQAEKFDLIWNRAQSCPTFLCALPRREGYEFFVGQWTGTELHFTALINIQTRGEAAASQLILYHYPELKEEKGIVLMTAEMDSTFLNVAEAQCIANQVQLFYATDRKETYGLVETFNLRPNEFKYMSVIAELEQSGLGAELKCAQNQNKT

SEQ ID NO: 91067 - protein, 352 aa, Homo sapiens
  MOD_RES (1)..(1): Any amino acid
XLLRKQAWKQKWRKKGECFGGGGATVTTKESCFLNEQFDHWAAQCPRPASEEDTDAVGPEPLVPSPQPVPEVPSLDPTVLPLYSLGPSGQLAETPAEVFQALEQLGHQAFRPGQERAVMRILSGAGKSLCYQLPALLYSRRSPCLTLVVSPLLSLMDDQVSGLPPCLKAACIHSGMTRKQRESVLQKIRAAQVHVLMLTPEALVGAGGLPPAAQLPPVAFACIDEAHCLSQWSHNFRPCYLRVCKVLRERMGVHCFLGLTATATRRTASDVAQHLAVAEEPDLHGPAPVPTNLHLSVSMDRDTDQALLTLLQGKRFQNLDSIIIYCNRREDTERIAALLRTCLHAAWVPGSG

SEQ ID NO: 91068 - protein, 152 aa, Homo sapiens
MAAATGDPGLSKLQFAPFSSALDVGFWHELTQKKLNEYRLDEAPKDIKGYYYNGDSAGLPARLTLEFSAFDMSAPTPARCCPAIGTLYNTNTLESFKTADKKLLLEQAANEIWESIKSGTALENPVLLNKFLLLTFAIEALECAYDNLCQTE

SEQ ID NO: 91069 - protein, 350 aa, Homo sapiens
MTVFFKTLRNHWKKTTAGLCLLTWGGHWLYGKHCDNLLRRAACQEAQVFGNQLIPPNAQVKKATVFLNPAACKGKARTLFEKNAAPILHLSGMDVTIVKTDYEGQAKKLLELMENTDVIIVAGGDGTLQEVVTGVLRRTDEATFSKIPIGFIPLGETSSLSHTLFAESGNKVQHITDATLAIVKGETVPLDVLQIKGEKEQPVFAMTGLRWGSFRDAGVKVSKYWYLGPLKIKAAHFFSTLKEWPQTHQASISYTGPTERPPNEPEETPVQRPSLYRRILRRLASYWAQPQDALSQEVSPEVWKDVQLSTIELSITTRNNQLDPTSKEDFLNICIEPDTISKGDFITIGK

SEQ ID NO: 91070 - protein, 63 aa, Homo sapiens
MKSRQKGKKKGSAKERVFGCDLQEHLQHSGQEGSHSVTQQARVRLPAALASWAQVILPYQPPE

SEQ ID NO: 91071 - protein, 1876 aa, Homo sapiens
MLSVVHFLRSFFKTPEPGAHLPGEGEIEDNQLPTSPAEQVEQGWNQQTDRDDSETLSQQSESGSDTKTDPFESASDTESLSGYLPRGVFHPLRGTPVDIEAPWEYPDVSATGPPQEQHLTSVPGLHAKEELDLSPSLEDDSCKNGWRAFATVAGEQEAGHLWDCATSLERESLLAGVPRHTGCCLQRATDSSGPEPVQGVAVQDLRGLSSVSLQKSRSESYLGIPVVWPFLLWCCELGRSWPHIHNRARALVLPSRGPLDNTAPLGTRTKKESTLGPAGDTELLWSQPHSDVPCQPPLRTSCLLRTNRHHSAPETTGDKNRASPRLNCGHMRALVRAHSIAGFSPECPEDPVGQNVVKSGTHVKEGAKNERDPRIQNIPSPAPTQLSGPIPAFQSGAPHLQGPCKPGGFRLQRASQDTPSAGLLGENQLRQDSRSCLVASCLTSELVKLSAEEVPEPAECKSEQSPESRTQEPQGTQLAPRAADERETQKHLWGISVQAGNQTSNYTSKYVLSEESKSPTRAKFPRQPSSEGTQVWSGDLMGCLEVSDSSDAPETTQKSSAIDTSKAAEEAMVLDPNYREQALQGLSEFKAATVSHCGPGAEEGEQGPGGAGGRQLEPKAGGEASRGRGALIIVAVEQKGLQASRSNAGPVPETLPRDFPKERPESPLSTGETPCESPTRGKTPAGNECELPAAPIQGAGDGALQRVAQAAELGRVLVPQAASEETPSTEEPPGERLRGESRSSGSGERGPEEAPEGGAAAARGQRPRVPALEPPQPPRGLRKGAQEPGKRPTFSKVTSFRKGRPLATESPGGVPAPTTEGRRWGSSGPEGLPRENPPAAAGRDAPPLHHGDASAWPEFVPQAAGDRTAGPAGAGHTGTSGDLGSRGPSSESCNAKRLKTTEKKLRARLALAHKTFSNFIESIVLEKENTHERSPSSPKGEKEKSRLRQGSWRAFLKSKDAGSPKKPTLVSLPLGPEVLSPAETDSHCEERAEDKEGYVFSDHWAPPLASTPLSSSLVSPEHRRKSEPTIKCTATQEGGRYLPSGIFPEKSWLASPGSPRAQQAGIAHTLPSSSACCLAYENPGTPCRPTSPKPLSPRPSAQRMGLHYPGRGSAISMVSLGSYSYVDSSSGDPERPKIPKGQTSFLLSLQTLNQDEQKEESREGGQGPRGLGTVPWLRDLPGSENHMPWEEPAGEKPSCSHSQKAFHMEPAQKPCFTTDMVTWALLCISAETVRGEAPSQPRGIPHRSPVSVDDLWLEKTQRKKLQKQAHVERRLHIGAVHKDGVKCWRKTIITSPESLNLPRRSHPLSQSAPTGLNHMGWPEHTPGTAMPDGALDTAVCADEVGSEEDLYDDLHSSSHHYSHPGGGGEQLAINELISDGSVVCAEALWDHVTMDDQELGFKAGDVIEVMDATNREWWWGRVADGEGWFPASFVRLRVNQDEPADDDAPLAGNSGAEDGGAEAQSSKDQMRTNVINEILSTERDYIKHLRDICEGYVRQCRKRADMFSEEQLRTIFGNIEDIYRCQKAFVKALEQRFNRERPHLSELGACFLEHQADFQIYSEYCNNHPNACVELSRLTKLSKYVYFFEACRLLQKMIDISLDGFLLTPVQKICKYPLQLAELLKYTHPQHRDFKDVEAALHAMKNVAQLINERKRRLENIDKIAQWQSSIEDWEGEDLLVRSSELIYSGELTRVTQPQAKSQQRMFFLFDHQLIYCKKDLLRRDVLYYKGRLDMDGLEVVDLEDGKDRDLHVSIKNAFRLHRGATGDSHLLCTRKPEQKQRWLKAFAREREQVQLDQETGFSITELQRKQAMLNASKQQVTGKPKAVGRPCYLTRQKHPALPSNRPQQQVLVLAEPRRKPSTFWHSISRLAPFRK

SEQ ID NO: 91072 - protein, 356 aa, Homo sapiens
  MOD_RES (1)..(1): Any amino acid
XWLVGFWGGSGCKEFGLCLPAGRQTQPTRWGRRLAWWTRAAWPCGSRAMVSKLSQLQTELLAALLESGLSKEALIQALGEPGPYLLAGEGPLDKGESCGGGRGELAELPNGLGETRGSEDETDDDGEDFTPPILKELENLSPEEAAHQKAVVETLLQEDPWRVAKMVKSYLQQHNIPQREVVDTTGLNQSHLSQHLNKGTPMKTQKRAALYTWYVRKQREVAQQFTHAGQGGLIEEPTGDELPTKKGRRNRFKWGPASQQILFQAYERQKNPSKEERETLVEECNRAECIQRGVSPSQPQPAEYRSQAGLSSWGPPPPCQHPDSTAQLGADIPRPQPAAPEPHHGLTSWGHDHRAW

SEQ ID NO: 91073 - protein, 91 aa, Homo sapiens
MIHTNLKKKFSCCVLVFLLFAVICVWKEKKKGSYYDSFKLQTKEFQVLKSLGKLAMGSDSQSVSSSSTQDPHRGRQTLGSLRGLAKAKPEA

SEQ ID NO: 91074 - protein, 225 aa, Homo sapiens
MVGFKATDVPPTATVKFLGAGTAACIADLITFPLDTAKVRLQIQGESQGPVRATASAQYRGVMGTILTMVRTEGPRSLYNGLVAGLQRQMSFASVRIGLYDSVKQFYTKGSEHASIGSRLLAGSTTGALAVAVAQPTDVVKVRFQAQARAGGGRRYQSTVNAYKTIAREEGFRGLWKGTSPNVARNAIVNCAELVTYDLIKDALLKANLMTGSCPPFSAWVPGTW

SEQ ID NO: 91075 - protein, 220 aa, Homo sapiens
MKTLFLGVTLGLAAALSFTLEEEDITGTWYVKAMVVDKDFPEDRRPRKVSPVKVTALGGGNLEATFTFMREDRCIQKKILMRKTEEPGKFSAYGGRKLIYLQELPGTDDYVFYCKDQRRGGLRYMGKLVASAPCRAVPLSPPWLTWPPHLQVGILIPTWRPWKNLRNWCSTRDSRRRTFSCPCRREAAFSNTRVTPGSAPPEPTLPPDTEPGPPGPTLQP

SEQ ID NO: 91076 - protein, 59 aa, Homo sapiens
MEPSAQQLQLAASLPANLSNFCQGSEMPTTSRPALDVKGGTSPAKEDANQEMSSVAYSN

SEQ ID NO: 91077 - protein, 321 aa, Homo sapiens
  MOD_RES (1)..(1): Any amino acid
XINDIAFKPDGTQLILAAGSRLLVYDTSDGTLLQPLKGHKDTVYCVAYAKDGLWSPEQKSVSKHKSSSKIICCREERNDILAVADWGQKVSFYQLSGKQIGKDRALNFDPCCISYFTKGEYILLGGSDKQVSLFTKDGVRLGTVGEQNSWVWTCQAKPDSNYVVVGCQDGTISFYQLIFSTVHGLYKDRYAYRDSMTDVIVQHLITEQKVRIKCKELVKKIAIYRNRLAIQLPEKILIYELYSEDLSDMHYRVKEKIIKKFECNLLVVCANHIILCQEKRLQCLSFSGVKEREWQMESLIRYIKVIGGPPGREGLLVGLKN

SEQ ID NO: 91078 - protein, 144 aa, Homo sapiens
MATEEFIIRIPPYHYIHVLDQNSNVSRVEVGPKTYIRQDNERVLFAPMRMVTVPPRHYCTVANPVSRDAQGLVLFDVTGQVRLRHADLEIRLAQDPFPLYPGEVLEKAIPLDENEGIYVQDVKTGKVRAVIGSTYMLTQDEVLW

SEQ ID NO: 91079 - protein, 4416 aa, Homo sapiens
MGSSAAAAAAAAAAADSAQWLSVKEETIFLHDGLIRVTDLAELPSEILGAPEAADTDLEILTFETKNPSELAERLRSVCGNQSNAYARLLEYRLNALRGLWNAQRQLALEEQHERESSGDEETLALLKRQGLLQQPEQAPFTSRMGLLLVFPLIQSQSRTDPSLCNITAEVLLNCLRDCQPLSLTKEPADCLNGIETLLCSWLEETSDTGRHIPHKQKENAAAALVALACARGSLKTFVHTVHLLQKQTDLGSLPVADVLYRLLLLEGGPGSPSCLLGGKHIVSWGYEDMLPAPDSNTGSSSENKDADLGRCLTADGLYLYTTNSVGRGVSKLGSGLHGTLRGFVYCRNEELEPGWVAFGSGSLLHRPVSFDNKPHSLFQVIDQNTLQVCQVVPMPANHLPIGSTMSTVHLSSDGTYFYWIWSPASLNEKTPKGHSVFMDIFELVVENGVFVANPLQERTILMRKEGESAKSINEMLLSRLSRYRASPSATLAALTGSTISNTLKEDQAANTSCGLPLKMLRKTPIYTCGTYLVMLVPPPGGSGSSATRSLFGGTSGLSSLKILASSLVYNISDGQFTSRADLIDAAGSSLGRGALVPGLGACYDTVNNMLWTCSNDYIDQWCNPGNQAFHYVCQRLGVSHIITEPKEEAITTNEVINQLLHHVGAMCIHQLNLLATNPNLPITSVLGKQHPIEAHHLSSICDIMEKAMVNGDTCIIRCILVVFQVVFKFFFSPQTERNRDIIRRSGLLLWQLLMAPKDQICPEIQKEVCLAISSGLNILYPGETEINNLLKLVLTEGERNSGLSQLRDVILTNLAEQLQNNRFGSDEDDHYRLNDELLHYILKIVVRESCILITKCQTVSKDDFQKLLSTVPAASSCLRYLMAVQNHLLSNTILIKPDENDDSDSSLQGETLKELKVSILALATQILTGCDEVLEMLQQVTTALINSDIADREQRLKGLEQVTKATMLGHLLPVLLTSLMHPNLQTLIMADALMPQLVQLVLYTSQTALLLKTQCPVFAEVGCSPCGAPDQKCRLFPDERMLEEKEEPGFLTGLKIPAPWAAGKTVETVHPVRDNYKFKETVHIPGARCLYLRFDSRCSSQYDYDKLVIYAGPNTNSRKVAEYGGNTLGYGSRSVLGTGWPKDLVKVEGDTVTFSFEMRSGREHNTPDKAMWGFACTVRAQESSEDVSGGLPFLVDLALGLSVLACSMLRILYNGPEITKEEEACQELLRSKLLQRCQWQVEANGVISPALTPSPSPLPLTIEEDREFTYPSDVLVPPVGNYFDLPRIRLPPGIMIKLREISGRARPQFRPSIKEVIQPDVMEEMVVSCVIKHLNLVDALQSLINFQYQEEHAEEYDLLCKIMGETFKKLNAMERQLQSVAELEQKWQSEVDDAMQGKLENNMPFFYDYHFNENKMKELELLCSMKEVSFDGNDLENMVLSLREKFLQEVNSLIQKPSHPLAKTKTLVKSLMNRAELLLHVTIAAQSGLTRSISGTPAETPACKSASETKVISHAVRQPVFLRSMSAPSDLEMIGNEDLEFTRANQRRRHVTSHRSSSFTLLQSLAIEDSRDKPTYSVLLGQLFAFIGTNPDQAVSSSSFLLAAQTRWRRGNTRKQALVHMRELLTAAVRVGGVTHLVGPVTMVLQGGPRIEELTCGGMVEQVQEAFGETMTSVVSLCARYPIACANSIGLLCTIPYTRSEEKCLVRSGLVQLMDRLCSLSNQTESSSSEKQTKKQKVATMAWAAFQVLANRCVEWEKEEGGSTEAVHSGLARQVSSLLTNHLARATECCGNQAAGNDALQDVLSLLNDLSRSHIGKAILSQPACVSKLLSLLLDQRPSPKLVLIILQLCRAALPLMSVEDCGNVELPPWSYSVPSLNSEQEDPSDPASKIASLLLAKLADYVVPGCQTVLSPTASEPDTTLTKTSPKNSLKGDKDPGEESEAVDGKLSIFIHKREDQSSHEVLQPLLSSSEGRPFRLGTGANMEKVVKMDRDMTKGGCCEVITEEAAAALRKATKWAQSGLIVSIGPPVESINPETVSGLSTGDKKKTAQTSICRERNSELARTDPVRPFISGHVANSMAAEVIALLHSLLMAPESNAAQIWTTTAEKVLSRALMYIPQLGKYAESILENGSSSGRKLAKLQRIARQAVAALCALGGFKETIKIGSEVQVLGRGISGSIGVVASINEQEGIATVRFPPIDCRKTSQASDTLTIPLSRLCVPRSEALPLHKLSITEKVVQAVQSMLLPQEGSLSIHTSLPATGDGSAPVMAVVRLLAEIRTRACLVMAQLLEDSLFCEEFIQQCPAAVEVLNLVAQECSAGERLAVVEVQCERLRMLYRDCARPPPPPLQADRRQPKEITWSPSRVFPPVRACMFSSHLTSVTFLADPSAGGGLPRGTFIYATSPLPVQAPSFYWEIEIVSYGDTDDDTGPIVSFGFTTEAEKRDGAWTNPVGTCLFHNNGRAVHYNGSSLLQWKSVRLDVTLSPGDVAGIGWERTEGTPPPPGQPAKGRVYFTYCGQRLSPYLEDVSGGMWPVVHIQKKNTKTRANFGSRPFAYAEGQAHRNAADLCTDLAEEISANFEALPFAMASDSDNDAGTSIASDPGTHGPPCRIAAVATAQQQYDSDTSCHYKVELSYENFITSGPDPHPPPIADDESDDDDDDDIPQEDHYALLVKAWETKVFPTIRRRFRNEAERKSGLDQIKGALQLGMVDIARQTVEFLYEENGGIPRDLYLPTIEDIKDEANKFTIDKVRKGLTVVTRSPDSNNVASSAVGTALPKFAIRGMLKTFGLHGVVLDVDSVNELVQVETYLRSEGVLVRYWYPIDMLERPPAGYRRTATNGLVTLDNTNLQIHRELLRCEAALARLYCRMALLNIFAPKLPHLFTRLFHIPAIRDITLEHLQLLSNQLLAPPLPDGTISSSSILLAQSLQHCIHSQNCSATDLFYQGNSQTVREWLNVAITRTLHQGEESLLELTKQICSFLQTAPEQFPSEEFPISESKVNMDVNFPGAAFVVVSCKESQSGFRKDSSLYKAPWARVLVYGLGHKVKRNGQLNLIEAACYPRDASPANTGLAPPPTADQYPSVVLSTDRVHIKLGVSPPPGAVLVLHSLPLEFPLAMAFAEQLLSWKSEDSEGKSEDEPDTIPTSVLLQVVELLGNFLWTTDMAACVKELVFHLLAELLRTVHTLEQRRHPAGLSSSIALQLNPCLAMLMALQSELHKLYDEETQNWVSGGACGGSGGAAAGDQGRFSTYFHALMEGCLAVAEVTLPTNMSVTASGVTSATAPNLSDSSSSSSSSPGQTPQSPSLLSKRKKVKMKREKASSSGKRQSSRTVDSDPTVLSIGGSKPEDMLWFHRALTLLIILRHLTRKDPQGLGVTSDAIADACQALVGPTAHSRLLVISGIPTHLDEGVVRGAIRKACNAHGGVFKDEIYIPLQEEDTKKPKDKAEGGDGKVEPEKTLAFPGTDSMEVSTSSSLTPAMSISASASTSQASICSSQGISQTVSDLSVDPLPAGLELPIPPGLLEPHAVSSQESLDISLCSTGSLGSLGSLGEPLDNAETASVSDMGSMYTVTSLDNQPLAARPIKGFAVVEIRSRAKIEKIRASLFNNNDLIGLSSLDGEDELMEMSTEEILTVSVVNQSLFDTQGSPGLEDYFNDKSIKGEKLVPGAREVLTEIFKSCAHSEQTLSLTPAKPIRVSDIYLSKEQINSQTPGNLLHLFFTNVRPPKKVLEDQLTQILRKYGVPKPKFDKSKYSKAGKEQHPVKVVSTKRPITKPPAKDKAVLNSVSRTALSEKKPTVKPKSPEKSKPDEKDPEKSPTKKQEVPEEKYLTLEGFHKFVIDRARQDIRSVWRAILSCGYDLHFERCACIDVRHAQKASRKWTLEMDVALVQYINQLCRHLAITPARLHPHEVYLDPADAADPRVACLLNVPIESLRLRFALLQSLNTTLETFFLPLVELRQTPMYTHSIAALLKEAKGLIFYDTKVTVMNRVLNATVQRTADHAAPEITLDPLEIVGGEIRASENSYFCQAARQLASVPSSQLCVKLASGGDPTYAFNIRFTGEEVHGTSGSFRHFLWQVCKELQSSSLSLLLLCPSSAVNKNKGKYILTPSPITYGEEQLLHFLGQLLGIAIRADVPLPLDLLPSFWKTLVGEPLDPEQDLQEADILTYNYVKKFESINDETELEALCAEIASQHLATESPDSPNKPCCRFTYLTMTGEEVELCSRGRHILVAWENKDIYAAAIRSLRLRELQNVECVTAVRAGLGSIIPLQLLTMLSPLEMELRTCGLPYINLEFLKAHTMYQVGLMETDQHIEFFWGALEMFTQEELCKFIKFACNQERIPFTCPCKDGGPDTAHVPPYPMKIAPPDGTAGSPDSRYIRVETCMFMIKLPQYSSLEIMLEKLRCAIHYREDPLSG

SEQ ID NO: 91080 - protein, 98 aa, Homo sapiens
MREYKLVVLGSGGVGKSALTVQFVQGIFVEKYDPTIEDSYRKQVEVDAQQCMLEILDTAGTEQFTAMRDLYMKNGQGFALVYSITAQSTFNDLQDLRE

SEQ ID NO: 91081 - protein, 164 aa, Homo sapiens
MIDKNQTCGVGQDSVPYMICLIHILEEWFGVEQLEDYLNFANYLLWVFTPLILLILPYFTIFLLYLTIIFLHIYKRKNVLKEAYSHNLWDGARKTVATLWDGHAAVWHGYEVHGMEKIPEDGPALIIFYHGAIPIDFYYFMAKIFIHKGRTCRVVADHFVFKIP

SEQ ID NO: 91082 - protein, 71 aa, Homo sapiens
MTQESFEANKENVFHGTKDTSGAGAGRGADPRVPPSSPATQVCFEEPQPSTSTSDLFPTASASSTEPSPAG

SEQ ID NO: 91083 - protein, 47 aa, Homo sapiens
IHSRTVTRYPANSIVVVGGCPVCSNFVYDDGNQPLLPAKREKRPYQQ

SEQ ID NO: 91084 - protein, 69 aa, Homo sapiens
MADLMQETFLHHATDGVGVDEKLSLRRVAVVEDFFDIIYSMHVETGPNGEQIRKHAGQKRTYKAGPREI

SEQ ID NO: 91085 - protein, 94 aa, Homo sapiens
MLFGLVRQGLKCDDCKFNCHKRCATRVPNDCLGEALINGDVPMEEATDFSEADKSALMDESEDSGVIPGSHSENALHASEEEEGEGGKAQSSLG

SEQ ID NO: 91086 - protein, 23 aa, Homo sapiens
MNNEITYYFPCQRWLAVEEDDGQ

SEQ ID NO: 91087 - protein, 224 aa, Homo sapiens
MNSMTSAVPVANSVLVVAPHNGYPVTPGIMSHVPLYPNSQPQVHLVPGNPPSLVSNVNGQPVQKALKEGKTLGAIQIIIGLAHIGLGSIMATVLVGEYLSISFYGGFPFWGGLWFIISGSLSVAAENQPYSYCLLSGSLGLNIVSAICSAVGVILFITDLKPWNGDFWRAAGLLPPGVWHRMRIFPLWLPVGLLSIKQCECHLSKHLCSKPSDHPRTGDLTTKL

SEQ ID NO: 91088 - protein, 122 aa, Homo sapiens
MAKIQKAVEYFQDNSPDSPELNKVKLLFERGKEALESEFRSLMTRHSKVVSPVLILDLISGDDDLEAQEDVTLEHLPESVLQDVIRISRWLVEYGRNQDFMNVYYQIRSSQLDRSIKGLKEH

SEQ ID NO: 91089 - protein, 219 aa, Homo sapiens
MQNERREQAQRTVLIHCPEKISENKFLKYLSQFGPINNHFFYESFGLYAVVEFCQKESIGSLQNGTHTPSTAMETAIPFRSRFFNLKLKNQTSERSRVRSSNQLPRSNKQLFELLCYAESIDDQLNTLLKEFQLTEENTKLRYLTCSLIEDMAAAYFPDCIVRPFGSSVNTFGKLGCDLDMFLDLDETRNLSAHKISGNFLMEFQVKNVPSERIATQKI

SEQ ID NO: 91090 - protein, 545 aa, Homo sapiens
MVPSSPAVEKQVPVEPGPDPELRSWRHLVCYLCFYGFMAQIRPGESFITPYLLGPDKNFTREQVTNEITPVLSYSYLAVLVPVFLLTDYLRYTPVLLLQGLSFVSVWLLLLLGHSVAHMQLMELFYSVTMAARIAYSSYIFSLVRPARYQRVAGYSRAAVLLGVFTSSVLGQLLVTVGRVSFSTLNYISLAFLTFSVVLALFLKRPKRSLFFNRDDRGRCETSASELERMNPGPGGKLGHALRVACGDSVLARMLRELGDSLRRPQLRLWSLWWVFNSAGYYLVVYYVHILWNEVDPTTNSARVYNGAADAASTLLGAITSFAAGFVKIRWARWSKLLIAGVTATQAGLVFLLAHTRHPSSIWLCYAAFVLFRGSYQFLVPIATFQIASSLSKELCALVFGVNTFFATIVKTIITFIVSDVRGLGLPVRKQALRMSRPRLGLCLPGPFPPQSAAPARAGMAASSAEDPGSERGPWRRAGTVAARGDPGGERGPWRREGTLAARGDPGGERGPWWREGTLAVRGDPGGERGPWRREGTLVVKGARG

SEQ ID NO: 91091 - protein, 81 aa, Homo sapiens
MINAQELLTLEDVTVEFTWEEWQLLGPFQKDLYRDVMLEIYSNLLSMGYQVSKPDALSKLERGEEPWTMEDERHSRICPGM

SEQ ID NO: 91092 - protein, 59 aa, Homo sapiens
MPGAFSQNSSKSPQEAQSHSPRAQPSSPTVPQAWSHGMPPSTLQNGPSRTRQPSLTGLS

SEQ ID NO: 91093 - protein, 39 aa, Homo sapiens
  MOD_RES (1)..(1): Any amino acid
XSSHVKIFLPKKLLECLPKCSSLPKERHRWNTNEVLKFW

SEQ ID NO: 91094 - protein, 2343 aa, Homo sapiens
MSSSGYPPNQGAFSTEQSRYPPHSVQYTFPNTRHQQDPAFGGKHEAPSSPISGQPCGDDQNASPSKLSKEELIQSMDRVDREIAKVEQQILKLKKKQQQLEEEAAKPPEPEKPVSPPPVEQKHRSIVQIIYDENRKKAEEAHKIFEGLGPKVELPLYNQPSDTKVYHENIKTNQVMRKKLILFFKRRNHARKQREQKICQRYDQLMEAWEKKVDRIENNPRRKAKESKTREYYEKQFPEIRKQREQQERFQRVGQRGAGLSATIARSEHEISEIIDGLSEQENNEKQMRQLSVIPPMMFDAEQRRVKFINMNGLMEDPMKVYKDRQFMNVWTDHEKEIFKDKFIQHPKNFGLIASYLERKSVPDCVLYYYLTKKNENYKALVRRNYGKRRGRNQQIARPSQEEKVEEKEEDKAEKTEKKEEEKKDEEEKDEKEDSKENTKEKDKIDGTAEETEEREQATPRGRKTANSQGRRKGRITRSMTNEAAAASAAAAAATEEPPPPLPPPPEPISTEPVETSRWTEEEMEVAKKGLVEHGRNWAAIAKMVGTKSEAQCKNFYFNYKRRHNLDNLLQQHKQKTSRKPREERDVSQCESVASTVSAQEDEDIEASNEEENPEDSEGAENSSDTESAPSPSPVEAVKPSEDSPENATSRGNTEPAVELEPTTETAPSTSPSLAVPSTKPAEDESVETQVNDSISAETAEQMDVDQQEHSAEEGSVCDPPPATKADSVDVEVRVPENHASKVEGDNTKERDLDRASEKVEPRDEDLVVAQQINAQRPEPQSDNDSSATCSADEDVDGEPERQRMFPMDSKPSLLNPTGSILVSSPLKPNPLDLPQLQHRAAVIPPMVSCTPCNIPIGTPVSGYALYQRHIKAMHESALLEEQRQRQEQIDLECRSSTSPCGTSKSPNREWEVLQPAPHQVITNLPEGVRLPTTRPTRPPPPLIPSSKTTVASEKPSFIMGGSISQGTPGTYLTSHNQASYTQETPKPSVGSISLGLPRQQESAKSATLPYIKQEEFSPRSQNSQPEGLLVRAQHEGVVRGTAGAIQEGSITRGTPTSKISVESIPSLRGSITQGTPALPQTGIPTEALVKGSISRMPIEDSSPEKGREEAASKGHVIYEGKSGHILSYDNIKNAREGTRSPRTAHEISLKRSYESVEGNIKQGMSMRESPVSAPLEGLICRALPRGSPHSDLKERTVLSGSIMQGTPRATTESFEDGLKYPKQIKRESPPIRAFEGAITKGKPYDGITTIKEMGRSIHEIPRQDILTQESRKTPEVVQSTRPIIEGSISQGTPIKFDNNSGQSAIKHNVKSLITGPSKLSRGMPPLEIVPENIKVVERGKYEDVKAGETVRSRHTSVVSSGPSVLRSTLHEAPKAQLSPGIYDDTSARRTPVSYQNTMSRGSPMMNRTSDVSSNKSTNHERKSTLTPTQRESIPAKSPVPGVDPVVSHSPFDPHHRGSTAGEVYRSHLPTHLDPAMPFHRALDPAAAYLFQRQLSPTPGYPSQYQLYAMENTRQTILNDYITSQQMQVNLRPDVARGLSPREQPLGLPYPATRGIIDLTNMPPTILVPHPGGTSTPPMDRITYIPGTQITFPPRPYNSASMSPGHPTHLAAAASAEREREREREKERERERIAAASSDLYLRPGSEQPGRPGSHGYVRSPSPSVRTQETMLQQRPSVFQGTNGTSVITPLDPTAQLRIMPLPAGGPSISQGLPASRYNTAADALAALVDAAASAPQMDVSKTKESKHEAARLEENLRSRSAAVSEQQQLEQKTLEVEKRSVQCLYTSSAFPSGKPQPHSSVVYSEAGKDKGPPPKSRYEEELRTRGKTTITAANFIDVIITRQIASDKDARERGSQSSDSSSSLSSHRYETPSDAIEVISPASSPAPPQEKLQTYQPEVVKANQAENDPTRQYEGPLHHYRPQQESPSPQQQLPPSSQAEGMGQVPRTHRLITLADHICQIITQDFARNQVSSQTPQQPPTSTFQNSPSALVSTPVRTKTSNRYSPESQAQSVHHQRPGSRVSPENLVDKSRGSRPGKSPERSHVSSEPYEPISPPQVPVVHEKQDSLLLLSQRGAEPAEQRNDARSPGSISYLPSFFTKLENTSPMVKSKKQEIFRKLNSSGGGDSDMAAAQPGTEIFNLPAVTTSGSVSSRGHSFADPASNLGLEDIIRKALMGSFDDKVEDHGVVMSQPMGVVPGTANTSVVTSGETRREEGDPSPHSGVCKPKLISKSNSRKSKSPIPGQGYLGTERPSSVSSVHSEGDYHRQTPGWAWEDRPSSTGSTQFPYNPLTMRMLSSTPPTPIACAPSAVNQAAPHQQNRIWEREPAPLLSAQYETLSDSDD

SEQ ID NO: 91095 - protein, 76 aa, Homo sapiens
MGSKERFHWQSHNVKQSGVDDMVLLPQITEDAIAANLRKRFMDDYIFVPWAKAGDLHRLCAHLCKPLQADALLHRP

SEQ ID NO: 91096 - protein, 147 aa, Homo sapiens
MRFKNRFQRFMNHRAPANGRYKPTCYEHAANCYTHAFLIVPAIVGSALLHRLSDDCWEKITAWIYGMGLCALFIVSTVFHIVSWKKSHLRLNLRELGPLASHMRWFIWLMAAGGTIYVFLYHEKYKVVELFFYLTMGFSPALVVTSM

SEQ ID NO: 91097 - protein, 161 aa, Homo sapiens
MAEFPSKVSTRTSSPAQGAEASVSALRPDLGFVRSRLGALMLLQLVLGLLVWALIADTPYHLYPAYGWVMFVAVFLWLVTIVLFNLYLFQLHMKLYMVPWPLVLMIFNISATVLYITAFIACSAAVDLTSLRGTRPYNQRAAASVLVTSRRPQLDCRRCLL

SEQ ID NO: 91098 - protein, 315 aa, Homo sapiens
MNSGVPATLAVRRVKFFGQHGGEVNSSAFSPDGQMLLTGSEDGCVYGWETRSGQLLWRLGGHTGPVKFCRFSPDGHLFASASCDCTVRLWDVARAKCLRVLKGHQRSVETVSFSPDSRQLASGGWDKRVMLWDVQSGQMLRLLVGHRDSIQSSDFSPTVNCLATGSWDSTVHIWDLRMVTPAVSHQALEGHSANISCLCYSASGLLASGSWDKTIHIWKPTTSSLLIQLKGHVTWVKSIAFSPDELWLASAGYSRMVKVWDCNTGKCLETLKQGVLDVAHTCAFTPDGKILVSGAADQTRRQISRTSKSPRDPQT

SEQ ID NO: 91099 - protein, 147 aa, Homo sapiens
  MOD_RES (1)..(1): Any amino acid
XETENMELKNKVQDLENQLRITQVSAPPAGSMTPKSPSTDIFDMIPFSPISHQSSMPTRNGTQPPPVPSRSTEIKRDLFGAEPFDPFNCGAADFPPDIQSKLDEMQVTILIDWPINDLFHFDMGQRECYVPKLWFPSIIFAIKTRLK

SEQ ID NO: 91100 - protein, 222 aa, Homo sapiens
MGKGWLFRKILASPSVFRREGTAGPAGGPPGPARAPTAAPFPEPRRPSPRLPEGWSRQPAEPLAKLGSPAQLRTAEPAPPRQTEPPLNTPENREYLAEIMFESFNVPGLYIAVQAVLALAASWTSRQVGERTLTGIVIDSGDGVTHVIPVAEGYVIGSCIKHIPIAGRDITYFIQQLLREREVGIPPEQSLETAKAIKEKYCYICPDIVKEFAKYDVDPQKW

SEQ ID NO: 91101 - protein, 62 aa, Homo sapiens
  MOD_RES (1)..(1): Any amino acid
XAFDEYGRPFLIIKDQDRKSRLMGLEALKSHIMAAKAVANTMRTSLGPNDCQADGGTVQVSG

SEQ ID NO: 91102 - protein, 590 aa, Homo sapiens
MKITSTSCICPVLVCLCFVQRCYGTAHHSSIKVMRNQTKHIEGETEVHHRPKRGWVWNQFFVLEEHMGPDPQYVGKLHSNSDKGDGSVKYILTGEGAGTIFIIDDTTGDIHSTKSLDREQKTHYVLHAQAIDRRTNKPLEPESEFIIKVQDINDNAPKFTDGPYIVTVPEMSDMGTSVLQVTATDADDPTYGNSARVVYSILQGQPYFSVDPKTGVIRTALHNMDREAREHYSVVIQAKDMAGQVGGLSGSTTVNITLTDVNDNPPRFPQKHYQLYVPESAQVGSAVGKIKANDADTGSNADMTYSIINGDGMGIFSISTDKETREGILSLKKPLNYEKKKSYTLNIEGANTHLDFRFSHLGPFKDATMLKIIVGDVDEPPLFSMPSYLMEVYENAKIGTVVGTVLAQDPDSTNSLVRYFINYNVEDDRFFNIDANTGTIRTTKVLDREETPWYNITVTASEIDNPDLLSHVTVGIRVLDVNDNPPELAREYDIIVCENSKPGQVIHTISATDKDDFANGPRFNFFLDERLPVNPNFTLKDNEGEHIYTYLFIYVVSALTLYVIGFILIYTQTSCKSAFKVSLMLLCYDL

SEQ ID NO: 91103 - protein, 142 aa, Homo sapiens
MSEETVPEAASPPPPQGQPYFDRFSEDDPEYMRLRNRAADLRQDFNLMEQKKRVTMILQSPSFREELEGLIQEQMKKGNNSSNIWALRQIADFMASTSHAVFPTSSMNVSMMTPINDLHTADSLNLAKGERLMRCKISSVYR

SEQ ID NO: 91104 - protein, 149 aa, Homo sapiens
QWSTDPAQIRRELCSLPATNTETHPAKDETFWKRKSRARKSLFQKNLMGRKVKSLDLSITQQKWKQSVDRPELRRSLSQQPQDTFDLEEAFSTTTTACGLTELASKKKLKATSCRKLHCPQHPAPTPWSSKPPNSAGERQHGTWGGRPD

SEQ ID NO: 91105 - protein, 109 aa, Homo sapiens
MADEIDFTTGDAGASSTYPMQCSALRKNGFVVLKGRPCKIVEMSTSKTGKHGHAKVHLVGIDIFTGKKYEDICPSTHNMDVPNIKRNDYQVSVMCAMSEEYAVAIKPCK

SEQ ID NO: 91106 - protein, 659 aa, Homo sapiens
MVLGPAAYNVPLPKKSIQSGPLKISSVSEVMKESKQPASQLQKQKGDTPASATAGDTLSVPAPAVQPEESLKTDHPEIGEGKPTPALSEASSSSIRERPPEEVAARLAQQEKQEQVKIESLAKSLEDALRQTASVTLQAIAAQNAAVQAVNAHSNILKAAMDNSEIAGEKKSAQWRTVEGALKERRKAVDEAADALLKAKEELEKMKSVIENAKKKEVAGAKPHITAAEGKLHNMIVDLDNVVKKVQAAQSEAKVVSQYHELVVQARDDFKRELDSITPEVLPGWKGMSVSDLADKLSTDDLNSLIAHAHRRIDQLNRELAEQKATEKQHITLALEKQKLEEKRAFDSAVAKALEHHRSEIQAEQDRKIEEVRDAMENEMRTQLRRQAAAHTDHLRDVLRVQEQELKSEFEQNLSEKLSEQELQFRRLSQEQVDNFTLDINTAYARLRGIEQAVQSHAVAEEEARKAHQLWLSVEALKYSMKTSSAETPTIPLGSAVEAIKANCSDNEFTQALTAAIPPESLTRGVYSEETLRARFYAVQKLARRVAMIDETRNSLYQYFLSYLQSLLLFPPQQLKPPPELCPEDINTFKLLSYASYCIEHGDLELAAKFVNQLKGESRRVAQDWLKEARMTLETKQIVEILTAYASAVGIGTTQVQPE

SEQ ID NO: 91107 - protein, 95 aa, Homo sapiens
MTVHNLYLFDRNGVCLHYSEWHRKKQAGIPKEEEYKLMYGMLFSIRSFVSKMSPLDMKDGFLAFQTSRYKLHYYETPTGIKVVMNTDLGVGPIRD

SEQ ID NO: 91108 - protein, 87 aa, Homo sapiens
MASNSTKSFLADAGYGEQELDANSALMELDKGLRSGKLGEQCEAVVRFPRLFQKYPFPILINSAFLKLADVFRVGMRCMSVKYLKHK

SEQ ID NO: 91109 - protein, 1571 aa, Homo sapiens
MVSEKSHLGNPQEPVQEEPKTRLLSMTVRRGPRSLPPIPSTSRTGFAEFSMRGRMREKLQAARSKAESALLQEIPTPRPRRLRSPSKKELETEFGTEPGKEVERTQQEVDSQSYSRVKFHDSARKIKPKPQVPPGFPSAEEAYNFFTFNFDPEPEGSEEKPKARHRAGTNQEEEEGEEEEPPAQGGGKEMDEEELLNGDDAEDFLLGLDHVADDFVAVRPADYESIHDRLQMEREMLFIPSRQTVPTYKKLPENVQPRFLEDEGLYTGVRPEVARTNQNIMENRLLMQDPERRWFGDDGRILALPNPIKPFPSRPPVLTQEQSIKAELETLYKKAVKYVHSSQHVIRSGDPPGNFQLDIDISGLIFTHHPCFSREHVLAAKLAQLYDQYLARHQRNKAKFLTDKLQALRNAVQTGLDPEKPHQSLDTIQKTINEYKSEIRQTRKFRDAEQEKDRTLLKTIIKVWKEMKSLREFQRFTNTPLKLVLRKEKADQKADEEAYEAEIQAEISELLEEHTEEYAQKMEEYRTSLQQWKAWRKVQRAKKKKRKQAAEEHPGDEIAEPYPEEDLVKPSPPEPTDRAVIEQEVRERAAQSRRRPWEPTLVPELSLAGSVTPNDQCPRAEVSRREDVKKRSVYLKVLFNNKEVSRTVSRPLGADFRVHFGQIFNLQIVNWPESLTLQVYETVGHSSPTLLAEVFLPIPETTVVTGRAPTEEVEFSSNQHVTLDHEGVGSGVPFSFEADGSNQLTLMTSGKVSHSVAWAIGENGIPLIPPLSQQNIGFRSALKKADAISSIGTSGLTDMKKLAKWAAESKLDPNDPNNAPLMQLISVATSGESYVPDFFRLEQLQQEFNFVSDQELNRSKRFRLLHLRSQEVPEFRNYKQVPVYDREIMEKVFQDYEKRLRDRNVIETKEHIDTHRAIVAKYLQQVRESVINRFLIAKQYFLLADMIVEEEVPNISILGLSLFKLAEQKRPLRPRRKGRKKVTAQNLSDGDIKLLVNIVRAYDIPVRKPAVSKFQQPSRSSRMFSEKHAASPSTYSPTHNADYPLGQVLVRPFVEVSFQRTVCHTTTAEGPNPSWNEELELPFRAPNGDYSTASLQSVKDVVFINIFDEVLHDVLEDDRERGSGIHTRIERHWLGCVKMPFSTIYFQARIDGTFKIDIPPVLLGYSKERNMILERGFDSVRSLSEGSYITLFITIEPQLVPGESIREKFESQEDEKLLQATEKFQAECALKFPNRQCLTTVIDISGKTVFITRYLKPLNPPQELLNVYPNNLQATAELVARYVSLIPFLPDTVSFGGICDLWSTSDQFLDLLAGDEEEHAVLLCNYFLSLGKKAWLLMGNAIPEGPTAYVLTWEQGRYLIWNPCSGHFYGQFDTFCPLKNVGCLIGPDNIWFNIQRYESPLRINFDVTRPKLWKSFFSRSLPYPGLSSVQPEELIYQRSDKAAAAELQDRIEKILKEKIMDWRPRHLTRWNRYCTSTLRHFLPLLEKSQGEDVEDDHRAELLKQLGDYRFSGFPLHMPYSEVKPLIDAVYSTGVHNIDVPNVEFALAVYIHPYPKNVLSVWIYVASLIRNR

SEQ ID NO: 91110 - protein, 146 aa, Homo sapiens
MKTLFLGVTLGLAAALSFTLEEEDITGTWYVKAMVVDKDFPEDRRPRKVSPVKVTALGGGNLEATFTFMREDRCIQKKILMRKTEEPGKFSAYGGRKLIYLQELPGTDDYVFYCKDQRRGGLRYMGKLVGPCRCPHLGSPGHLTCR

SEQ ID NO: 91111 - protein, 146 aa, Homo sapiens
MALPQGLLTFRDVAIEFSQEEWKCLDPAQRTLYRDVMLENYRNLVSLDTGFLLFCLADLKLLPSGDPSTSASETAAITDISSKCMMKEFSSTAQGNREVIHTGTLQRHESHHTGDFRFQEIDKDIHNLEFQWQEDERNSHEAPMTE

SEQ ID NO: 91112 - protein, 98 aa, Homo sapiens
  MOD_RES (1)..(1): Any amino acid
XSAISADLGRQELIQRSSEALATVTGIVDGSGSIGAAVGQETGSHIEGVTGARETERTMSATSGPLGLRVCPNLGLSRSSSLILDCQASLNTASHLRC

SEQ ID NO: 91113 - protein, 228 aa, Homo sapiens
MASYYEILDVPRSASADDIKKAYRRKALQWHPDKNPDNKEFAEKKFKEVAEAYEVLSDKHKREIYDRYGREGLTGTGTGPSRAEAGSGGPGFTFTFRSPEEVFREFFGSGDPFAELFDDLGPFSELQNRGSRHSGPFFTFSSSFPGHSDFSSSSFSFSPGAGAFRSVSTSTTFVQGRRITTRRIMENGQERVEVEEDGQLKSVTINGVPDDLALGLELSRREQQPSVT

SEQ ID NO: 91114 - protein, 906 aa, Homo sapiens
MERGLPLLCAVLALVLAPAGAFRNDKCGDTIKIESPGYLTSPGYPHSYHPSEKCEWLIQAPDPYQRIMINFNPHFDLEDRDCKYDYVEVFDGENENGHFRGKFCGKIAPPPVVSSGPFLFIKFVSDYETHGAGFSIRYEIFKRGPECSQNYTTPSGVIKSPGFPEKYPNSLECTYIVFVPKMSEIILEFESFDLEPDSNPPGGMFCRYDRLEIWDGFPDVGPHIGRYCGQKTPGRIRSSSGILSMVFYTDSAIAKEGFSANYSVLQSSVSEDFKCMEALGMESGEIHSDQITASSQYSTNWSAERSRLNYPENGWTPGEDSYREWIQVDLGLLRFVTAVGTQGAISKETKKKYYVKTYKIDVSSNGEDWITIKEGNKPVLFQGNTNPTDVVVAVFPKPLITRFVRIKPATWETGISMRFEVYGCKITDYPCSGMLGMVSGLISDSQITSSNQGDRNWMPENIRLVTSRSGWALPPAPHSYINEWLQIDLGEEKIVRGIIIQGGKHRENKVFMRKFKIGYSNNGSDWKMIMDDSKRKAKSFEGNNNYDTPELRTFPALSTRFIRIYPERATHGGLGLRMELLGCEVEAPTAGPTTPNGNLVDECDDDQANCHSGTGDDFQLTGGTTVLATEKPTVIDSTIQSEFPTYGFNCEFGWGSHKTFCHWEHDNHVQLKWSVLTSKTGPIQDHTGDGNFIYSQADENQKGKVARLVSPVVYSQNSAHCMTFWYHMSGSHVGTLRVKLRYQKPEEYDQLVWMAIGHQGDHWKEGRVLLHKSLKLYQVIFEGEIGKGNLGGIAVDDISINNHISQEDCARSTPGYEGEGEGDKNISRKPGNVLKTLDPILITIIAMSALGVLLGAVCGVVLYCACWHNGMSERNLSALENYNFELVDGVKLKKDKLNTQSTYSEA

SEQ ID NO: 91115 - protein, 159 aa, Homo sapiens
MTDGILGKAATMEIPIHGNGEARQLPEDDGLEQDLQQVMVSGPNLNETSIVSGGYGGSGDGLIPTGSGRHPSHSTTPSGPGDEVARGIAGEKFDIVKKWGINTYKCTKQLLSERFGRGSRTVDLELELQIELLRETKRKRNLATMQRHRNYYARMGKRC

SEQ ID NO: 91116 - protein, 114 aa, Homo sapiens
MSQATKRKHVVKEVLGEHIVPSDQQQIVRVLRTPGNNLHEVETAQGQRFLVSMPSKYRKNIWIKRGDFLIVDPIEEGEKVKAEISFVLCKDHVRSLQKEGFWPEAFSEVAEKHN

SEQ ID NO: 91117 - protein, 226 aa, Homo sapiens
MGRPLLLPLLPLLLPPAFLQPSGSTGSGPSYLYGVTQPKHLSASMGGSVEIPFSFYYPWELATAPDVRISWRRGHFHRQSFYSTRPPSIHKDYVNRLFLNWTEGQKSGFLRISNLQKQDQSVYFCRVELDTRSSGRQQWQSIEGTKLSITQGQQRTKATTPAREPFQNTEEPYENIRNEGQNTDPKLNPKLHLTQSTSQPPSPQEPPERDPVLCLKGLTNGQPSQD

SEQ ID NO: 91118 - protein, 263 aa, Homo sapiens
VAGPVDGGDLDPVACFLSWCRRVGLELSPKVSERAGGRRTRGGARAALTSPPAQVAVSRQGTVAGYGMVARESVQAGELLFVVPRAALLSQHTCSIGGLLERERVALQSQSGWVPLLLALLHELQAPASRWRPYFALWPELGRLEHPMFWPEEERRCLLQGTGVPEAVEKDLANIRSEYQSIVLPFMEAHPDLFSLRVRSLELYHQLVALVMAYSFQEPLEEEEDEKEPNSPVMVPAADILNHLANHNANLEYSAMTQLTFRW

SEQ ID NO: 91119 - protein, 124 aa, Homo sapiens
MVWEVKTNQMPNAVQKLLLVMDKRASGMNDSLELLQCNENLPSSPGYNSCDEHMELDDLPELQAVQSDPTQSGMYQLSSDVSHQEYPRSSWNQNTSDIPETTYRENEVDWLTELANIATSPQSP

SEQ ID NO: 91120 - protein, 85 aa, Homo sapiens
MSDPEGETLRSTFPSYMAEGERLYLCGEFSKAAQSFSNALYLQDGDKNCLVARSKCFLKMGDLERSLKDAEASLQSDPAFCKVIA

SEQ ID NO: 91121 - protein, 203 aa, Homo sapiens
MLALLVLVTVALASAHHGGEHFEGEKVFRVNVEDENHINIIRELASTTQIDFWKPDSVTQIKPHSTVDFRVKAEDTVTVENVLKQNELQYKVLISNLRNVVEAQFDSRVRATGHSYEKYNKWETVGKAGQNKPAIFMDCGFHAREWISPAFCQWFVREAVRTYGREIQVTELLDKLDFYVLPVLNIDGYIYTWTKSRFWRKTR

SEQ ID NO: 91122 - protein, 131 aa, Homo sapiens
MSTERTSWTSLSTIQKIALGLGIPASATVAYILYRRYRESREERLTFVGEDDIEIEMRVPQEAVKLIIGRQGANIKQLRKQTGARIDVDTEDVGDERVLLISGFPVQVCKAKAAIHQILTENTPVSEQLSV

SEQ ID NO: 91123 - protein, 164 aa, Homo sapiens
MDEMATTQISKDELDELKEAFAKVDLNSNGFICDYELHELFKEANMPLPGYKVREIIQKLMLDGDRNKDGKISFDEFVYLWPKPFVLNSMFNKEEKYAFVNWINKALENDPDCRHVIPMNPNTDDLFKAVGDGIVLCKMINLSVPDTIDERAINKKKLTPFIIQ

SEQ ID NO: 91124 - protein, 174 aa, Homo sapiens
MDFSRLHMYSPPQCVPENTGYTYALSSSYSSDALDFETEHKLDPVFDSPRMSRRSLRLATTACTLGDGEAVGADSGTSSAVSLKNRAARTTKQRRSTNKSAFSINHVSRQVTSSGVSHGGTVSLQDAVTRRPPVLDESWIREQTTVDHFWGLDDDGDLKGGNKAAIQGNGDVGA

SEQ ID NO: 91125 - protein, 106 aa, Homo sapiens
MDSKKRSSTEAEGSKERGLVHIWQAGSFPITPERLPGWGGKTVLQAALGVKHGVLLTEDGEVYSFGTLPWRSGPVEICPSSPILENALVGQYVITVATGSFHSGAV

SEQ ID NO: 91126 - protein, 233 aa, Homo sapiens
MGGLFWRSALRGLRCGPRAPGPSLLVRHGSGGPSWTRERTLVAVKPDGVQRRLVGDVIQRFERRGFTLVGMKMLQAPESVLAEHYQDLRRKPFYPALIRYMSSGPVVAMVWEGYNVVRASRAMIGHTDSAEAAPGTIRGDFSVHISRNVIHASDSVEGAQREIQLWFQSSELSPTGAPWPSRRPTWRGTTVSPRTATSSARTCCGTKWPSSQEAALGLGSGLLRFSCGTAAIR

SEQ ID NO: 91127 - protein, 1313 aa, Homo sapiens
MDSKKRSSTEAEGSKERGLVHIWQAGSFPITPERLPGWGGKTVLQAALGVKHGVLLTEDGEVYSFGTLPWRSGPVEICPSSPILENALVGQYVITVATGSFHSGAVTDNGVAYMWGENSAGQCAVANQQYVPEPNPVSIADSEASPLLAVRILQLACGEEHTLALSISREIWAWGTGCQLGLITTAFPVTKPQKVEHLAGRVVLQVACGAFHSLALVQCLPSQDLKPVPERCNQCSQLLITMTDKEDHVIISDSHCCPLGVTLTESQAENHASTALSPSTETLDRQEEVFENTLVANDQSVATELNAVSAQITSSDAMSSQQNVMGTTEISSARNIPSYPDTQAVNEYLRKLSDHSVREDSEHGEKPVPSQPLLEEAIPNLHSPPTTSTSALNSLVVSCASAVGVRVAATYEAGALSLKKVMNFYSTTPCETGAQAGSSAIGPEGLKDSREEQVKQESMQGKKSSSLVDIREEETEGGSRRLSLPGLLSQVSPRLLRKAARVKTRTVVLTPTYSGEADALLPSLRTEVWTWGKGKEGQLGHGDVLPRLQPLCVKCLDGKEVIHLEAGGYHSLALTAKSQVYSWGSNTFGQLGHSDFPTTVPRLAKISSENGVWSIAAGRDYSLFLVDTEDFQPGLYYSGRQDPTEGDNLPENHSGSKTPVLLSCSKLGYISRVTAGKDSYLALVDKNIMGYIASLHELATTERRFYSKLSDIKSQILRPLLSLENLGTTTTVQLLQEVASRFSKLCYLIGQHGASLSSFLHGVKEARSLVILKHSSLFLDSYTEYCTSITNFLVMGGFQLLAKPAIDFLNKNQELLQDLSEVNDENTQLMEILNTLFFLPIRRLHNYAKVLLKLATCFEVASPEYQKLQDSSSCYECLALHLGRKRKEAEYTLGFWKTFPGKMTDSLRKPERRLLCESSNRALSLQHAGRFSVNWFILFNDALVHAQFSTHHVFPLATLWAEPLSEEAGGVNGLKITTPEEQFTLISSTPQEKTKWLRAISQAVDQALRGMSDLPPYGSGSSVQRQEPPISRSAKYTFYKDPRLKDATYDGRWLSGKPHGRGVLKWPDGKMYSGMFRNGLEDGYGEYRIPNKAMNKEDHYVGHWKEGKMCGQGVYSYASGEVFEGCFQDNMRHGHGLLRSGKLTSSSPSMFIGQWVMDKKAGYGVFDDITRGEKYMGMWQDDVCQGNGVVVTQFGLYYEGNFHLNKMMGNGVLLSEDDTIYEGEFSDDWTLSGKGTLTMPNGDYIEGYFSGEWGSGIKITGTYFKPSLYESDKDRPKVLWSLTLSPRLDCSGVISAHCNLHLPGSSDSPASAS

SEQ ID NO: 91128 - protein, 138 aa, Homo sapiens
MAKQILDLYMLYKLVTEKGGLVEIINKKIWREITKGLNLPTSITSAAFTLRTQYMKYLYAYECEKKALSSPAELQAAIDGNRREGRRPSYSSSLFGYSPAAATAAAAAGAPALLSPPKIRFPILGLGSSSGTNTSSPR

SEQ ID NO: 91129 - protein, 122 aa, Homo sapiens
ILAQQVHALERRLLSACYHHQQGPGLTPPCPCLMAPAPPCHVSLTAQPGGVTSRDVMEPLTHLFAGTATPLLLPLLPHLPTVSSAPGPLGLPARGAPPAPDKSLAVTGIYTGRQRRPLRGLF

SEQ ID NO: 91130 - protein, 54 aa, Homo sapiens
  MOD_RES (1)..(1): Any amino acid
XLLTEDFFAFHNHSAEGYEQDTEFGNTAHLGDCHEILPTSTTPDYKIFGGPTSG

SEQ ID NO: 91131 - protein, 60 aa, Homo sapiens
MVEKGPTLGSIETSDFTKRQLAVQSLAFNLKDKVFCELFPEVVEEIKQKQKAQDELSSRP

SEQ ID NO: 91132 - protein, 118 aa, Homo sapiens
MNPSAPSYPMASLYVGDLHPDVTEAMLYEKFSPAGPILSIRVCRDMITRRSLGYAYVNFQQPADAERALDTMNFDVIKGKPVRIMWSQRDPSLRKSGVGNIFIKNLDKSIDNKALYDT

SEQ ID NO: 91133 - protein, 145 aa, Homo sapiens
MFSWVSKDARRKKEPELFQTVAEGLRQLYAQKLLPLEEHYRFHEFHSPALEDADFDNKPMVLLVGQYSTGKTTFIRHLIEQDFPGMRIGPEPTTDSFIAVMHGPTEGVVPGNALVVDPRRPFRKLNAFGNAFLNRFMCAQLPNPV

SEQ ID NO: 91134 - protein, 40 aa, Homo sapiens
MSLHFLYYCSEPTLDVKIAFCQGFDKQVDVSYIAKHYNMS

SEQ ID NO: 91135 - protein, 379 aa, Homo sapiens
MANVPWAEVCEKFQAALALSRVELHKNPEKEPYKSKYSARALLEEVKALLGPAPEDEDERPEAEDGPGAGDHALGLPAEVVEPEGPVAQRAVRLAVIEFHLGVNHIDTEELSAGEEHLVKCLRLLRRYRLSHDCISLCIQAQNNLGILWSEREEIETAQAYLESSEALYNQYMKEVGSPPLDPTERFLPEEEKLTEQERSKRFEKVYTHNLYYLAQVYQHLEMFEKAAHYCHSTLKRQLEHNAYHPIEWAINAATLSQFYINKLCFMEARHCLSAANVIFGQTGKISATEDTPEAEGEVPELYHQRKGEIARCWIKYCLTLMQNAQLSMQKNEEELQDKFQHLFSIFIHSCHGCAEDAQSGRPSAHPPRGPVHSCSGYA

SEQ ID NO: 91136 - protein, 35 aa, Homo sapiens
MDPLQKRNPASPSKSSPMTAAETSQEGPAPSQPSY

SEQ ID NO: 91137 - protein, 39 aa, Homo sapiens
MDAIHIGMSSTPLVKHTAGAGLKANRPRVMSKSGHSNVR

SEQ ID NO: 91138 - protein, 72 aa, Homo sapiens
MKIFCSRANPTTGSVEWLEEDEHYDYHQEIARSSYADMLHDKDRNVKYYQGIRAAVSRVKDRGQKALVLDIG

SEQ ID NO: 91139 - protein, 182 aa, Homo sapiens
  MOD_RES (1)..(1): Any amino acid
XFSEARQPLSEEDVASLSWRPLHLPSADWQRAALSLWTHRTFREVLKEEDVHLTYQDWLHLELEIQPEADALSDTERQDFHQWAIHEHFLPESSASGGCDGDLQAACTILVNALMDFHQSSRSYDHSENSDLVFGGRTGNEDIISRLQDPPPPAFVCPLRQQLPGRTAHHCQMRAVLPLGQL

SEQ ID NO: 91140 - protein, 196 aa, Homo sapiens
  MOD_RES (1)..(1): Any amino acid
XSTSYSQSDSQCGSPPRGWSEELDERGHTLYTSDYTNEKWLKHVDDQGRQYYYSADGSRSEWELPKYNASSQQQREIIKSRSLDRRLQEPIVLTKWRHSTIVLDTNDKESPTASKPCFPENESSPSSPKHQDTDQEKYGLLNVTKIAENGKKVRKNWLSSWAVLQGSSLLFTKTQGSSTSWFGSNQSKPEFTVDLK

SEQ ID NO: 91141 - protein, 132 aa, Homo sapiens
  MOD_RES (1)..(1): Any amino acid
XFMPEPNLPPLVLYDATSLPAGADPQQVINIDQIRETLPELPSVTREKLVQQYGMLLEHSFTLLNEVGLLEFFQNVIKETRAEPKKVTSWVLNTFLGYLKQQNLAVSERCLRNCGRGKARLQGRLFQKSSLN

SEQ ID NO: 91142 - protein, 223 aa, Homo sapiens
MQVSNGFSQELALFGQHKIEDAAITYVSENEEIKHEEKPGKSIHHSKSHVGRGRIYYAKFINTNARTYNEPFPYIDPKKGPEIQGDWWSHGKALEPVFLPPYDSKSTQRSDFQKPSCPLVLPVKHSKMQKPSCGIVPLASPGTSAELQNNFIEYISFIHQYDARKTPNEPLQGKRHGAFVQREIKPGSRPTVPKGAEVLLNTPGSRSSEQSKKTEKGNSAESR

SEQ ID NO: 91143 - protein, 471 aa, Homo sapiens
  MOD_RES (1)..(1): Any amino acid
XENNKNSLESSLRQLKCHFTWNLMEGENSLDDFEDKVFYRTEFQNREFKATMCNLLAYLKHLKGQNEAALECLRKAEELIQQEHADQAEIRSLVTWGNYAWVYYHMGRLSDVQIYVDKVKHVCEKFSSPYRIESPELDCEEGWTRLKCGGNQNERAKVCFEKALEKKPKNPEFTSGLAIASYRLDNWPPSQNAIDPLRQAIRLNPDNQYLKVLLALKLHKMREEGEEEGEGEKLVEEALEKAPGVTDVLRSAAKFYRRKDEPDKAIELLKKALEYIPNNAYLHCQIGCCYRAKVFQVMNLRENGMYGKRKLLELIGHAVAHLKKADEANDNLFRVCSILASLHALADQYEDAEYYFQKEFSKELTPVAKQLLHLRYGNFQLYQMKCEDKAIHHFIEGVKINQKSREKEKMKDKLQKIAKMRLSKNGADSEALHVLAFLQELNEKMQQADEDSERGLESGSLIPSASSWNGE

SEQ ID NO: 91144 - protein, 177 aa, Homo sapiens
  MOD_RES (1)..(1): Any amino acid
XQLNQQKMLVSEIEMKQSKMDECQKYAEQYSATVKDYELQTMTYRAMVDSQQKSPVKRRRMQSSADLIIQEFMDLRTRYTALVTLMTQYIKFAGDSLKRLEEEEIAKNKQYDMHTEVTTLKQEKNPVPSAEEWMLEGCRASGGLKKGDFLKKGLEPETFQNFDGDHACSVRDDEFKF

SEQ ID NO: 91145 - protein, 212 aa, Homo sapiens
MSQLHFYRFYLEFGCLRKAFRHKFRLPPPSSDFLADVVGLQTEQRAGDLPKTMEGPLPSNAKAAINLQDDPIIQKYGSKKVGLTRCLLTKEEMRTFHFPLQGFPDCENFLLTKCNGSIADNSPLFGLDCEMCLTSKGRELTRISLVAEGGCCVMDELVKPENKILDYLTSFSGITKKILNPVTTKLKDVQRQLKALLPPDAVLVGHSLDLDL

SEQ ID NO: 91146 - protein, 437 aa, Homo sapiens
MSGILKRKFEEVDGSSPCSSVRESDDEVSSSESADSGDSVNPSTSSHFTPSSILKREKRLRTKNVHFSCVTVYYFTRRQGFTSVPSQGGSTLGMSSRHNSVRQYTLGEFAREQERLHREMLREHLREEKLNSLKLKMTKNGTVESEEASTLTLDDISDDDIDLDNTEVDEYFFLQPLPTKKRRALLRASGVKKIDVEEKHELRAIRLSREDCGCDCRVFCDPDTCTCSLAGIKCQVDRMSFPCGCTKEGCSNTAGRIEFNPIRVRTHFLHTIMKLELEKNREQQIPTLNGCHSEISAHSSSMGPVAHSVEYSIADSFEIETEPQAAVLHLQSAEELDCQGEEEEEEEDGSSFCSGVTDSSTQSLAPSESDEEEEEEEEEEEEEDDDDDKGDGFVEGLGTHAEVVPLPSVLCYSDGTAVHESHAKNASFYANSSTLYY

SEQ ID NO: 91147 - protein, 56 aa, Homo sapiens
  MOD_RES (1)..(1): Any amino acid
XRGIVNGAAPELPVPTGGPAVGAREQALAVSRNYLSQPRLSYTISPISFVTFVTSA

SEQ ID NO: 91148 - protein, 45 aa, Homo sapiens
MAPRPPTAAPQESVTFKDVSVDFTQEEWYHVDPAQRSLYRDVMLE

SEQ ID NO: 91149 - protein, 113 aa, Homo sapiens
MMLPYPSALGDQYWEEILLPKNGENVETMKKLTQNHKAKGLPSNDTDCPQKKEGKAQIVVPVTFRDVTVIFTEAEWKRLSPEQRNLYKEVMLENYRNLLSLDGGQEQQDAAAY

SEQ ID NO: 91150 - protein, 197 aa, Homo sapiens
  MOD_RES (1)..(1): Any amino acid
XLVELVQYCHTQMDVTDYKGETVFHYAVQGDNSQLLGRNAVAGLNQVNNQGLTPLHLACQLGKQEMVRVLLLCNARCNIMGPNGYPIHSAMKFSQKGCAEMIISMDSSQIHSKDPRYGASPLHWAKNAEMARMLLKRGCNVNSTSSAGNTALHVAVMRNRFDCAIVLLTHGANADARGEHGNTPLHLAMSKDNVEMI

SEQ ID NO: 91151 - protein, 59 aa, Homo sapiens
MLQTVWFQGLGRNLLFQEPVTFEDVAVYFTQNEWASLHPTQRALYREVMLENYANVTSL

SEQ ID NO: 91152 - protein, 638 aa, Homo sapiens
MEGDAVEAIVEESETFIKGKERKTYQRRREGGQEEDACHLPQNQTDGGEVVQDVNSSVQMVMMEQLDPTLLQMKTEVMEGTVAPEAEAAVDDTQIITLQVVNMEEQPINIGELQLVQVPVPVTVPVATTSVEELQGAYENEVSKEGLAESEPMICHTLPLPEGFQVVKVGANGEVETLEQGELPPQEDPSWQKDPDYQPPAKKTKKTKKSKLRYTEEGKDVDVSVYDFEEEQQEGLLSEVNAEKVVGNMKPPKPTKIKKKGVKKTFQCELCSYTCPRRSNLDRHMKSHTDERPHKCHLCGRAFRTVTLLRNHLNTHTGTRPHKCPDCDMAFVTSGELVRHRRYKHTHEKPFKCSMCDYASVEVSKLKRHIRSHTGERPFQCSLCSYASRDTYKLKRHMRTHSGEKPYECYICHARFTQSGTMKMHILQKHTENVAKFHCPHCDTVIARKSDLGVHLRKQHSYIEQGKKCRYCDAVFHERYALIQHQKSHKNEKRFKCDQCDYACRQERHMIMHKRTHTGEKPYACSHCDKTFRQKQLLDMHFKRYHDPNFVPAAFVCSKCGKTFTRRNTMARHADNCAGPDGVEGENGGETKKSKRGRKRKMRSKKEDSSDSEFHSCGPGWSAVADLSSPQPPPPRFK

SEQ ID NO: 91153 - protein, 94 aa, Homo sapiens
MISYIVLLSILLWPLVVYHELIQRMYTRLEPLLMQLDYSMKAEANALHHKHDKRKRQGKNAPPGGDEPLAETESESEAELAGFSPVVDVKKTAL

SEQ ID NO: 91154 - protein, 113 aa, Homo sapiens
MSPADFQRAVDERFPGCMQGRTMYVLPFSMGPVGSPLSRIGVQLTDSAYVVASMRIMTRLGTPVLQALGDGDFVKCLHSVGQPLTGQGEPVSQWPCNPEKTLIGHVPDQREII

SEQ ID NO: 91155 - protein, 489 aa, Homo sapiens
MALNSGSPPAIGPYYENHGYQPENPYPAQPTVVPTVYEVHPAQYYPSPVPQYAPRVLTQASNPVVCTQPKSPSGTVCTSKTKKALCITLTLGTFLVGAALAAGLLWKFMGSKCSNSGIECDSSGTCINPSNWCDGVSHCPGGEDENRCVRLYGPNFILQVYSSQRKSWHPVCQDDWNENYGRAACRDMGYKNNFYSSQGIVDDSGSTSFMKLNTSAGNVDIYKKLYHSDACSSKAVVSLRCIACGVNLNSSRQSRIVGGESALPGAWPWQVSLHVQNVHVCGGSIITPEWIVTAAHCVEKPLNNPWHWTAFAGILRQSFMFYGAGYQVEKVISHPNYDSKTKNNDIALMKLQKPLTFNDLVKPVCLPNPGMMLQPEQLCWISGWGATEEKGKTSEVLNAAKVLLIETQRCNSRYVYDNLITPAMICAGFLQGNVDSCQGDSGGPLVTSKNNIWWLIGDTSWGSGCAKAYRPGVYGNVMVFTDWIYRQMR

SEQ ID NO: 91156 - protein, 141 aa, Homo sapiens
MKSYAGFLTVNKTYNSNLFFWFFPAQIQPEDAPVVLWLQGGPGGSSMFGLFVEHGPYVVTSNMTLRDRDFPWTTTLSMLYIDNPVGTGFSFTDDTHGYAVNEDDVARDLYSALIQFFQIFPEYKNNDFYVTGESYAGKYVP

SEQ ID NO: 91157 - protein, 208 aa, Homo sapiens
MKSCDDEDDYSLRGLLPSEGIVHLHSETKPKTKNIDPVNKVQNKLHSANKGRKTNSSVKLKYSDVQTADDVAIPEDFSDFSLAKTISKIEGQLEEEGLPEYIDDIFSGVSNDIGTEAQIRFLKAKLHVMQEELDNVVCECNKKEDEIQNLKSQVKNFEEDFMRQQRTINMQQSQVEKYKTLFEEANKKYDGLQQQLSSVERVIIWYFS

SEQ ID NO: 91158 - protein, 941 aa, Homo sapiens
MVSKSDQLLIVVSILEGRHFPKRPKHMLVVEAKFDGEQLATDPVDHTDQPEFATELAWEIDRKALHQHRLQRTPIKLQCFALDPVTSAKETIGYIVLDLRTAQETKQAPKWYQLLSNKYTKFKSEIQISIALETDTKPPVDSFKAKGAPPRDGKVPAILAGLDPRDIVAVLNEEGGYHQIGPAEYCTDSFIMSVTIAFATQLEQLIPCTMKLPERQPEFFFYYSLLGNDVTNEPFNDLINPNFEPERASVRIRSSVEILRVYLALQSKLQIHLCCGDQSLGSTEIPLTGLLKKGSTEINQHPVTVEGAFTLDPPNRAKQKLAPIPVELAPTVGVSVALQREGIDSQSPPTKDDATESEVESLQYDKDTKPNPKASSSVPASLAQLVTTSNASEVASGQKIAVPATSHHFCFSIDLRSIHALEIGFPINCILRYSYPFFGSAAPIMTNPPVEVRKNMEVFLPQSYCAFDFATMPHQLQDTFLRIPLLVELWHKDKMSKDLLLGIARIQLSNILSSEKTRFLGSNGEQCWRQTYSESVPVIAAQGSNNRIADLSYTVTLEDYGLVKMREIFISDSSQGVSAVQQKPSSLPPAPCPSEIQTEPRETLEYKAALELEMWKEMQEDIFENQLKQKELAHMQALAEEWKKRDRERESLVKKKVAEYTILEGKLQKTLIDLEKREQQLASVESELQREKKELQSERQRNLQELQDSIRRAKEDCIHQVELERLKIKQLEEDKHRLQQQLNDAENKYKILEKEFQQFKDQQNNKPEIRLQSEINLLTLEKVELERKLESATKSKLHYKQQWGRALKELARLKQREQESQMARLKKQQEELEQMRLRYLAAEEKDTVKTERQELLDIRNELNRLRQQEQKQYQDSTEIASGKKDGPHGSVLEEGLDDYLTRLIEERDTLMRTGVYNHEDRIISELDRQIREILAKSNASN

SEQ ID NO: 91159 - protein, 219 aa, Homo sapiens
MDIPLDLSSSAGSGKRRRRGNLPKESVQILRDWLYEHRYNAYPSEQEKALLSQQTHLSTLQVCNWFINARRRLLPDMLRKDGKDPNQFTISRRGAKISETSSVESVMGIKNFMPALEETPFHSCTAGPNPTLGRPLSPKPSSPGSVLARPSVICHTTVTALKDVPFSLCQSVGVGQNTDIQQIAAKNFTDTSLMYPEDTCKSGPSTNTQSGLFNTPPPT

SEQ ID NO: 91160 - protein, 151 aa, Homo sapiens
MKLLSLVAVVGCLLVPPAEANKSSEDIRCKCICPPYRNISGHIYNQNVSQKDCPVSLCCSNCLHVVEPMPVPGHDVEAYCLLCECRYEERSTTTIKVIIVIYLSVVGALLLYMAFLMLVDPLIRKPDAYTEQLHNEEENEDARSMAAAAAS

SEQ ID NO: 91161 - protein, 252 aa, Homo sapiens
MASSAAGCVVIVGSGVIGRSWAMLFASGGFQVKLYDIEQQQIRNALENIRKEMKLLEQAGSLKGSLSVEEQLSLISGCPNIQEAVEGAMHIQECVPEDLELKKKIFAQLDSIIDDRVILSSSTSCLMPSKLFAGLVHVKQCIVAHPVNPPYYIPLVELVPHPETAPTTVDRTHALMKKIGQCPMRVQKEVAGFVLNRLQYAIISEAWRLVEEGIVSPSDLDLVMSEGLGMRYAFIGPLETMHLNAEGGLTSC

SEQ ID NO: 91162 - protein, 84 aa, Homo sapiens
  MOD_RES (1)..(1): Any amino acid
XNQAHRVEVVLLHGKAFNSHTWEQLGTLQLLSQRGYRAVALDLPGGTWLCGDRVDLARHQPYTLLHLAQLPHGCGACLQGTWKL

SEQ ID NO: 91163 - protein, 286 aa, Homo sapiens
FFTRRHSFIDCISVATSSTQANPPPVLVNTDSLETPTYGNSGLGFSIAGGTDNPHIGDDSSIFITKIITGGAAAQDGRLRVNDCILRVNEVDVRDVTHSKAVEALKEAGSIVRLYVKRRKPVSEKIMEIKLIKGPKGLGFSIAGGVGNQHIPGDNSIYVTKIIEGGAAHKDGKLQIGDKLLAVNNVCLEEVTHEEAVTALKNTSDFVYLKVAKPTSMYMNDGYAPPDITNSSSQPVDNHVSPSSFLGQTPASPARYSPVSKAVLGDDEITREPRKVVLHRGSTGLG

SEQ ID NO: 91164 - protein, 57 aa, Homo sapiens
  MOD_RES (1)..(1): Any amino acid
XTNLVKLLETKPEYHSLLQELGVDPDDLPVTRALLHQTLYHPDQPPQCAPSSLQDPT

SEQ ID NO: 91165 - protein, 136 aa, Homo sapiens
MANVPWAEVCEKFQAALALSRVELHKNPEKEPYKSKYSARALLEEVKALLGPAPEDEDERPEAEDGPGAGDHALGLPAEVVEPEGPVAQRAVRLAVIEFHLGVNHIDTEELSAGEEHLVKCLRLLRRDGVSLCRPE

SEQ ID NO: 91166 - protein, 147 aa, Homo sapiens
MERQSRVMSEKDEYQFQHQGAVELLVFNFLLILTILTIWLFKNHRFRFLHETGGAMVYGLIMGLILRYATAPTDIESGTVYDCVKLTFSPSTLLVNITDQVYEYKYKREISQHNINPHQGNAILEKRHFFQNLGSILTYAFLGTAIS

SEQ ID NO: 91167 - protein, 77 aa, Homo sapiens
MYFKRAARAFPVLLTGAGKTTLLNYILTEQHSKRVAVILNEFGEGSALEKSLAVSQGGELYEEWLELRNGCLCCSVK

SEQ ID NO: 91168 - protein, 325 aa, Homo sapiens
MAVMAPRTLVLLLSGALALTQTWAGSHSMRYFYTSVSRPGRGEPRFIAVGYVDDTQFVRFDSDAASQRMEPRAPWIEQEGPEYWDRNTRNVKAHSQTDRANLGTLRGYYNQSEDGSHTIQRMYGCDVGPDGRFLRGYQQDAYDGKDYIALNEDLRSWTAADMAAQITQRKWETAHEAEQWRAYLEGRCVEWLRRYLENGKETLQRTDAPKTHMTHHAVSDHEATLRCWALSFYPAEITLTWQRDGEDQTQDTELVETRPAGDGTFQKWASVVVPSGQEQRYTCHVQHEGLPKPLTLRWDRKGGSYSQAASSDSAQGSDMSLTACK

SEQ ID NO: 91169 - protein, 162 aa, Homo sapiens
MAAAMETEQLGVEIFETADCEENIESQDRPKLEPFYVERYSWSQLKKLLADTRKYHGYMMAKAPHDFMFVKRNDPDGPHSDRIYYLAMSGENRENTLFYSEIPKTINRAAVLMLSWKPLLDLFQQQPLRPNLVETSCPNIRMDPKLCPADPDWIAFIHSNDI

SEQ ID NO: 91170 - protein, 720 aa, Homo sapiens
  MOD_RES (1)..(1): Any amino acid
XAEVAAKARDTGILIFAIGVGQVDFNTLKSIGSEPHEDHVFLVANFSQIETLTSVFQKKLCTAHMCSTLEHNCAHFCINIPGSYVCRCKQGYILNSDQTTCRTVDYCASENHGCEHECVNADGSYLCQCHEGFALNPDKKTCTKIDYCASSNHGCQHECVNTDDSYSCHCLKGFTLNPDKKTCRRINYCALNKPGCEHECVNMEESYYCRCHRGYTLDPNGKTCSRVDHCAQQDHGCEQLCLNTEDSFVCQCSEGFLINEDLKTCSRVDYCLLSDHGCEYSCVNMDRSFACQCPEGHVLRSDGKTCAKLDSCALGDHGCEHSCVSSEDSFVCQCFEGYILREDGKTCRRKDVCQAIDHGCEHICVNSDDSYTCECLEGFRLAEDGKRCRRKDVCKSTHHGCEHICVNNGNSYICKCSEGFVLAEDGRRCKKCTEGPIDLVFVIDGSKSLGEENFEVVKQFVTGIIDSLTISPKAARVGLLQYSTQVHTEFTLRNFNSAKDMKKAVAHMKYMGKGSMTGLALKHMFERSFTQGEGARPLSTRVPRAAIVFTDGRAQDDVSEWASKAKANGITMYAVGVGKAIEEELQEIASEPTNKHLFYAEDFSTMDEISEKLKKGICEALEDSDGRQDSPAGELPKTVQQPTVQHRYLFEEDNLLRSTQKLSHSTKPSGSPLEEKHDQCKCENLIMFQNLANEEVRKLTQRLEEMTQRMEALENRLRYR

SEQ ID NO: 91171 - protein, 256 aa, Homo sapiens
  MOD_RES (1)..(1): Any amino acid
XTENGYKPWYLEECASTLATTYSSGAFYERKIVTTDLRQRCTDGHTGTSVSAPMVAGIIALALEANSQLTWRDVQHLLVKTSRPAHLKASDWKVNGAGHKVSHFYGFGLVDAEALVVEAKKWTAVPSQHMCVAASDKRPRSIPLVQVLRTTALTSACAEHSDQRVVYLEHVVVRTSISHPRRGDLQIYLVSPSGTKSQLLAKRLLDLSNEGFTNWEFMTVHCWGEKAEGQWTLEIQDLPSQVRNPEKQGQWLLGIS

SEQ ID NO: 91172 - protein, 55 aa, Homo sapiens
MGKSIPQYLGQLDIRKSVVSLATGAGAIYLLYKAIKAGIKCKPPLCSNSPICIAP

SEQ ID NO: 91173 - protein, 540 aa, Homo sapiens
MLAEWGACLLLAVALLGPGLQAQAMEGVKCGGVLSAPSGNFSSPNFPRLYPYNTECSWLIVVAEGSSVLLTFHAFDLEYHDTCSFDFLEIYNGASPDKGNLLGRFCGKVPPPPFTSSWHVMSVIFHSDKHVASHGFSAGYQKDVCGGVLTGLSGVLTSPEYPNNYPNSMECHWVIRAAGPAHVKLVFVDFQVEGNEECTYDYVAVLGGPGPTRGHHYCGSTRPPTLVSLGHELQVVFKSDFNIGGRGFKAYYFSGECQEVYMAMRGNFSSPQYPSSYPNNIRCHWTIRLPPGYQVKVFFLDLDLEEPNSLTKTCDFDHLAAFDGASEEAPLLGNWCGHHLPPPVTSSHNQLLLLLHTDRSTTRRGFSVAYIGVVPMNVSCSRTDFQILISTQALAPLERTKVYLGSRSCAAQEVGGNLRIQARFDTCGTESQRRNNTSVIVSVLYIDFSAAGREDIHEYEVRCEPRRKEASVHLLSGSHWLGPYAATAEHLQEAPPMDEAEALEGPVSMVAQDTSDIVFLGLCILAGILMVIAIVVLMLL

SEQ ID NO: 91174 - protein, 63 aa, Homo sapiens
SSLSMCMKSDKHGSPYFYLLGHPKDTERSKLARTDNRKDEPAPWSSPAAAAPGLPEVGVSLDD

SEQ ID NO: 91175 - protein, 638 aa, Homo sapiens
  MOD_RES (1)..(1): Any amino acid
XKSLLQAVANLPYKGGNTLTGMALNFIRQQNFRTQAGMRPRARKIGVLITDGKSQDDVEAPSKKLKDEGVELFAIGIKNADEVELKMIATDPDDTHAYNVADFESLSRIVDDLTINLCNSVKGPGDLEAPSNLVISERTHRSFRVSWTPPSDSVDRYKVEYYPVSGGKRQEFYVSRMETSTVLKDLKPETEYVVNVYSVVEDEYSEPLKGTEKTLPVPVVSLNIYDVGPTTMHVQWQPVGGATGYILSYKPVKDTEPTRPKEVRLGPTVNDMQLTDLVPNTEYAVTVQAVLHDLTSEPVTVREVTLPLPRPQDLKLRDVTHSTMNVFWEPVPGKVRKYIVRYKTPEEDVKEVEVDRSETSTSLKDLFSQTLYTVSVSAVHDEGESPPVTAQETTRPVPAPTNLKITEVTSEGFRGTWDHGASDVSLYRITWAPFGSSDKMETILNGDENTLVFENLNPNTIYEVSITAIYPDESESDDLIGSERTPPKSGPRNLQVYNATSNSLTVKWDPASGRVQKYRITYQPSTGEGNEQTTTIGGRQNSVVLQKLKPDTPYTITVSSLYPDGEGGRMTGRGKTKPLNTVRNLRVYDPSTSTLNVRWDHAEGNPRQYKLFYAPAAGGPEELVPIPGNTNYAILRNL

SEQ ID NO: 91176 - protein, 1395 aa, Homo sapiens
MAALLRSARWLLRAGAAPRLPLSLRLLPGGPGRLHAASYLPAARAGPVAGGLLSPARLYAIAAKEKDIQEESTFSSRKISNQFDWALMRLDLSVRRTGRIPKKLLQKVFNDTCRSGGLGGSHALLLLRSCGSLLPELKLEERTEFAHRIWDTLQKLGAVYDVSHYNALLKVYLQNEYKFSPTDFLAKMEEANIQPNRVTYQRLIASYCNVGDIEGASKILGFMKTKDLPVTEAVFSALVTGHARAGDMENAENILTVMRDAGIEPGPDTYLALLNAYAEKGDIDHVKQTLEKVEKSELHLMDRDLLQIIFSFSKAGYPQYVSEILEKVTCERRYIPGNAMNLILLLVTEKLEDVALQILLACPVSKEDGPSVFGSFFLQHCVTMNTPVEKLTDYCKKLKEVQMHSFPLQFTLHCALLANKTDLAKALMKAVKEEGFPIRPHYFWPLLVGRRKEKNVQGIIEILKGMQELGVHPDQETYTDYVIPCFDSVNSARAILQENGCLSDSDMFSQAGLRSEAANGNLDFVLSFLKSNTLPISLQSIRSSLLLGFRRSMNINLWSEITELLYKDGRYCQEPRGPTEAVGYFLYNLIDSMSDSEVQAKEEHLRQYFHQLEKMNVKIPENIYRGIRNLLESYHVPELIKDAHLLVESKNLDFQKTVQLTSSELESTLETLKAENQPIRDVLKQLILVLCSEENMQKALELKAKYESDMVTGGYAALINLCCRHDKVEDALNLKEEFDRLDSSAVLDTGKYVGLVRVLAKHGKLQDAINILKEMKEKDVLIKDTTALSFFHMLNGAALRGEIETVKQLHEAIVTLGLAEPSTNISFPLVTVHLEKGDLSTALEVAIDCYEKYKVLPRIHDVLCKLVEKGETDLIQKAMDFVSQEQGEMVMLYDLFFAFLQTGNYKEAKKIIETPGIRARSARLQWFCDRCVANNQVETLEKLVELTQKLFECDRDQMYYNLLKLYKINGDWQRADAVWNKIQEENVIPREKTLRLLAEILREGNQEVPFDVPELWYEDEKHSLNSSSASTTEPDFQKDILIACRLNQKKGAYDIFLNAKEQNIVFNAETYSNLIKLLMSEDYFTQAMEVKAFAETHIKGFTLNDAANSRLIITQVRRDYLKEAVTTLKTVLDQQQTPSRLAVTRVIQALAMKGDVENIEVVQKMLNGLEDSIGLSKMVFINNIALAQIKNNNIDAAIENIENMLTSENKVIEPQYFGLAYLFRKVIEEQLEPAVEKISIMAERLANQFAIYKPVTDFFLQLVDAGKVDDARALLQRCGAIAEQTPILLLFLLRNSRKQGKASTVKSVLELIPELNEKEEAYNSLMKSYVSEKDVTSAKALYEHLTAKNTKLDDLFLKRYASLLKYAGEPVPFIEPPESFEFYAQQLRKLRENSS

SEQ ID NO: 91177 - protein, 189 aa, Homo sapiens
MEGESTSAVLSGFVLGALAFQHLNTDSDTVSRGTGRGPASPGKSPARGLPPRCCSGPRPLPRRRRASSLRSRLCLLSPSAVPEEGFLLGEVKGEAKNSITDSQMDDVEVVYTIDIQKYIPCYQLFSFYNSSGEVNEQALKKILSNVKKNVVGWYKFRRHSDQIMTFRERLLHKNLQEHFSNQDLVFLLL

SEQ ID NO: 91178 - protein, 141 aa, Homo sapiens
MAELSDLARDPPAQCSAGPVGDDMFHWQATIMGPNDSPYQGGVFFLTIHFPTDYPFKPPKVAFTTRIYHPNINSNGSICLDILRSQWSPALTISKVLLSICSLLCDPNPDDPLVPEIARIYKTDRDKYNRISREWTQKYAM

SEQ ID NO: 91179 - protein, 210 aa, Homo sapiens
MACAGLLTVCLLRPPAPQPQPQTPRHPQLAPDPGPAGHTLFQDVFRRADKNDDGKLSFEEFQNYFADGVLSLGELQELFSGIDGHLTDNLETEKLCDYFSEHLGVYRPVLAALESLNRAVLAAMDATKLEYERASKVDQFVTRFLLRETVSQLQALQSSLEGASDTLEAQAHGWRCRERGGAEQALRQPAGRTPSPEECQPVIHLVPRLF

SEQ ID NO: 91180 - protein, 517 aa, Homo sapiens
  MOD_RES (1)..(1): Any amino acid
XCFSEEVTSTELSSGDQSHKMGDNASERDTGESKAGIAASVSILENSSRETSRRQEQHRFSMDLKMPAFHPKQEVPVPGDGVEFPSSTGAEGQTGHPAEKLSDLHNKEHSGGGKRALAPDLMPLDLSARSTRDDPSNKETASSLQAALVVHPCPYCSHKTYYPEVLWMHKRIWHRVSCNSVAPPWIQPNGYKSIRSNLVFLSRSGRTGPPPALGGKECQPLLLARFTRTQVPGGMPGSKSGSSPLGVVTKAASMPKNKESHSGGPCALWAPGPDGYRQTKPCHGQEPHGAATQGPLAKPRQEASSKPVPAPGGGGFSRSATPTPTVIARAGAQPSANSKPVEKFGVPPAGAGFAPTNKHSAPDSLKAKFSAQPQGPPPAKGEGGAPPLPPREPPSKAAQELRTLATCAAGSRGDAALQAQPGVAGAPPVLHSIKQEPVAEGHEKRLDILNIFKTYIPKDFATLYQGWGVSGPGLEHRGTLRTQARPGEFVCIECGKSFHQPGHLRAHMRAHSGERPF

SEQ ID NO: 91181 - protein, 223 aa, Homo sapiens
  MOD_RES (1)..(1): Any amino acid
XSSQDKDKSLVTVETDAHGSFCFKAKPGTYKVQVMVPEAETRAGLTLKPQTFPLTVTDRPVMDVAFVQFLASVSGKVSCLDTCGDLLVTLQSLSRQGEKRSLQLSGKVNAMTFTFDNVLPGKYKISIMHEDWCWKNKSLEVEVLEDDVSAVEFRQTGYMLRCSLSHAITLAQPYCSGEMCPGTSELKTPRNFIRMEMGVRMWGFITSPKESTDSACPSLVCTK

SEQ ID NO: 91182 - protein, 493 aa, Homo sapiens
MAAEPNKTEIQTLFKRLRAVPTNKACFDCGAKNPSWASITYGVFLCIDCSGVHRSLGVHLSFIRSTELDSNWNWFQLRCMQVGGNANATAFFRQHGCTANDANTKYNSRAAQMYREKIRQLGSAALARHGTDPPAWDAPATEPSGTQQPAPSTESSGLAQPEHGPNTDLLGTSPKASLELKSSIIGKKKPAAAKKGLGAKKGLGAQKVSSQSFSEIERQAQVAEKLREQQAADAKKQAEESMVASMRLAYQELQIDRKKEEKKLQNLEGKKREQAERLGMGLVSRSSVSHSVLSEMQVIEQETPVSAKSSRSQLDLFDDVGTFASGPPKYKDNPFSLGESFGSRWDTDAAWGMDRVEEKEPEVTISSIRPISERATNRREVESRSSGLESSEARQKFAGAKAISSDMFFGREVDAEYEARSRLQQLSGSSAISSSDLFGDMDGAHGAGSVSLGNVLPTADIAQFKQGVKSVAGKMAVLANGVMNSLQDRYGSY

SEQ ID NO: 91183 - protein, 194 aa, Homo sapiens
  MOD_RES (1)..(1): Any amino acid
XYGLLQRRLENVENLLRNRNFWILRLPPGSKGEAPKVSRSLENDGVCFTEQEWENLEDWQKELYRNVMESNYETLVSLSSSDSPASASRVAEITEVLGQTEGEAELGTEMLGDLEEEGPGGAHPAGGVMIKQELQYTQEGPADLPGEFSCIAEEQAFLSPEQTELWGGQGSSVLLETGPGDSTLEEPVGSRVPS

SEQ ID NO: 91184 - protein, 419 aa, Homo sapiens
MLATLARVAALRRTCLFSGRGGGRGLWTGRPQSDMNNIKPLEGVKILDLTRVLAGPFATMNLGDLGAEVIKVERPGAGDDTRTWGPPFVGTESTYYLSVNRNKKSIAVNIKDPKGVKIIKELAAVCDVFVENYVPGKLSAMGLGYEDIDEIAPHIIYCSITGYGQTGPISQRAGYDAVASAVSGLMHITGPENGDPVRPGVAMTDLATGLYAYGAIMAGLIQKYKTGKGLFIDCNLLSSQVACLSHIAANYLIGQKEAKRWGTAHGSIVPYQAFKTKDGYIVVGAGNNQQFATVCKILDLPELIDNSKYKTNHLRVHNRKELIKILSERFEEELTSKWLYLFEGSGVPYGPINNMKNVFAEPQVSSLVLPLMSCRVSWRLVHGNGHFCSDVGTHHWRVWPTLHVRCASTAASSTGNCFG

SEQ ID NO: 91185 - protein, 38 aa, Homo sapiens
MATTKRVLWTGRGSGRQSSSCCVHSFWRHHRYSDSSGL

SEQ ID NO: 91186 - protein, 158 aa, Homo sapiens
MPRARARYPERPQLFLDSSSPRHLPQPPPRPGRPSFLPRCALGHMALELRWAAQCGGPRLTQGRPAENLAKVFSLMDPNSPERVTFVSRALKWSSGGSGKLGHPRLHQLLALTLWKEQNYCESRYHFLHSADGEGCANMLVEYSTSRGFRSEVDMFVA

SEQ ID NO: 91187 - protein, 183 aa, Homo sapiens
PDQKENTHFTVLIHELAEAFQKDFTKSTKERLLLTAGVSAGRQMIDNSYQVEKLAKDLDFINLLSFDFHGSWEKPLITGHNSPLSKGWQDRGPSSYYNVICQFLKGAKITRLQDQQVPYAVKGNQWVGYDDVKSMETKVQFLKNLNLGGAMIWSIDMDDFTGKSCNQGPYPLVQAVKRSLGSL

SEQ ID NO: 91188 - protein, 118 aa, Homo sapiens
MTFTTFDLGGHVQARRVWKNYLPAINGIVFLVDCADHERLLESKEELDSLMTDETIANVPILILGNKIDRPEAISEERLREMFGLYGQTTGKGSISLKELNARPLEVFMCSVLKRQGY

SEQ ID NO: 91189 - protein, 264 aa, Homo sapiens
MKMKLFQTICRQLRSSKFSVESAALVAFSTSSYSCGRKKKVNPYEEVDQEKYSNLVQSVLSSRGVAQTPGSVEEDALLCGPVSKHKLPNQDVFLQGKRFHEALESILSPQETLKERDENLLKSGYIESVQHILKDVSGVRALESAVQHETLNYIGLLDCVAEYQGKLCVIDWKTSEKPKPFIQSTFDNPLQVVAYMGAMNHDTNYSFQVQCGLIVVAYKDGSPAHPHFMDAELCSQYWTKWLLRLEEYTEKKKNQNIQKPEYSE

SEQ ID NO: 91190 - protein, 93 aa, Homo sapiens
MHPGRTTGKGPSTHTQIDQQPPRLLIVHIALPSWADICTNLCEALQNFFSLACSLMGPSRMSLFSLYMVQDQHECILPFVRVLFWELTLTFRL

SEQ ID NO: 91191 - protein, 236 aa, Homo sapiens
IYPIMDKSSRTRLALIICNEEFDSIPRRTGAEVDITGMTMLLQNLGYSVDVKKNLTASDMTTELEAFAHRPEHKTSDSTFLVFMSHGIREGICGKKHSEQVPDILQLNAIFNMLNTKNCPSLKDKPKVIIIQACRGDSPGVVWFKDSVGVSGNLSLPTTEEFEDDAIKKAHIEKDFIAFCSSTPDNVSWRHPTMGSVFIGRLIEHMQEYACSCDVEEIFRKEVKRSFCKGFWNYVC

SEQ ID NO: 91192 - protein, 115 aa, Homo sapiens
MMLGSPTSPKPGVNAQFLPGFLMGDLPAPVTPQPRSISGPSVGVMEMRSPLLAGGSPPQPVVPAHKDKSGAPPVRSIYDDISSPGLGSTPLTSRRQPNISVMQSPLVGVTSTPGT

SEQ ID NO: 91193 - protein, 120 aa, Homo sapiens
MRLSVRRVLLAAGCALVLVLAVQLGQQVLECRAVLAGLRSPRGAMRPEQEELVMVGTNHVEYRYGKAMPLIFVGGVPRSGTTLMRAMLDAHPEVRCGEETRIIPRVLAMRQAWSKSGREK

SEQ ID NO: 91194 - protein, 36 aa, Homo sapiens
MEKSTDTDEDNVTRTEYSDKTTQFPSVYAVPGTEQT

SEQ ID NO: 91195 - protein, 98 aa, Homo sapiens
MSHVAVENALGLDQQFAGLDLNSSDNQSGGSTASKGRYIPPHLRNREATKGFYDKDSSGWSSSKDKDAYSSFGSRSDSRGKSSFFSDRGSGSRGSVVN

SEQ ID NO: 91196 - protein, 204 aa, Homo sapiens
MGPLRESKEHRVQHHDKEISRSRIPRLILRPHMPQQQHKVSPASESPFSEEESREFNPSSSGRSARTVSSNSFCSDDTGCPSSQSVSPVKTPSDAGNSPIGFCPGSDEGFTRKKCTIGMVGEGSIQSSRYKKESKSGLVKPGSEADFSSSSSTGSISAPEVHMSTAGSKRSSSSRNRGPHGRSNGASSHKPGSSPSSPREKDLL

SEQ ID NO: 91197 - protein, 112 aa, Homo sapiens
MWKLVMMEQMTYLPLTVCPQRLPLQSRKMFLLQLSQDQYLVYWAQSIWWQLQDNKTFLAMLNHVLNVDGFYFSTTYDLTHTLQRLSNTSPEFQEMSLLERADQRFVWNGHLL

SEQ ID NO: 91198 - protein, 846 aa, Homo sapiens
AKLVRYICKQRQCKLSVAPGERTPELNSYPRFSDWLYTFNVRPEVVQEIPRDLTLDALLEMNEAKVKETLRRCGASGDECGRLQYALTCLRKVTGLGGEHKEDSSWSSLDARRESGSGPSTDTLSAASLPWPPGSSQLGRAGNSAQGPRSISVSALPASDSPTPSFSEGLSDTCIPLHASGRLTPRALHSFITPPTTPQLRRHTKLKPPRTPPPPSRKVFQLLPSFPTLTRSKSHESQLGNRIDDVSSMRFDLSHGSPQMVRRDIGLSVTHRFSTKSWLSQVCHVCQKSMIFGVKCKHCRLKCHNKCTKEAPACRISFLPLTRLRRTESVPSDINNPVDRAAEPHFGTLPKALTKKEHPPAMNHLDSSSNPSSTTSSTPSSPAPFPTSSNPSSATTPPNPSPGQRDSRFNFPAAYFIHHRQQFIFPVPSAGHCWKCLLIAESLKENAFNISAFAHAAPLPEAADGTRLDDQPKADVLEAHEAEAEEPEAGKSEAEDDEDEVDDLPSSRRPWRGPISRKASQTSVYLQEWDIPFEQVELGEPIGQGRWGRVHRGRWHGEVAIRLLEMDGHNQDHLKLFKKEVMNYRQTRHENVVLFMGACMNPPHLAIITSFCKGRTLHSFVRDPKTSLDINKTRQIAQEIIKGMGYLHAKGIVHKDLKSKNVFYDNGKVVITDFGLFGISGVVREGRRENQLKLSHDWLCYLAPEIVREMTPGKDEDQLPFSKAADVYAFGTVWYELQARDWPLKNQAAEASIWQIGSGEGMKRVLTSVSLGKEVSEILSACWAFDLQERPSFSLLMDMLEKLPKLNRRLSHPGHFWKSADINSSKVVPRFERFGLGVLESSNPKM

SEQ ID NO: 91199 - protein, 59 aa, Homo sapiens
MKSCGKRFHDEVGKFRFLNELIKVVSPKYLGSRTSEKVKNKILELLYSWTVGLPEEVKI

SEQ ID NO: 91200 - protein, 150 aa, Homo sapiens
MMSHLVKIPGIIIAASAVRAKATRISIQCRSCRNTLTNIAMRPGLEGYALPRKCNTDQAGRPKCPLDPYFIMPDKCKCVDFQTLKLQELPDAVPHGEMPRHMQLYCDRYLCDKVVPGNRVTIMGIYSIKKFGLTTSRGRDRVGVGIRSSY

SEQ ID NO: 91201 - protein, 67 aa, Homo sapiens
MEADLSGFNIDAPRWDQRTFLGRVKHFLNITDPRTVFVSERELDWAKDGGCAPRHPSGAAAVCQEAV

SEQ ID NO: 91202 - protein, 36 aa, Homo sapiens
MAGSQDIFDAIVMADERAPGEPLVLRQWGSCELPPG

SEQ ID NO: 91203 - protein, 802 aa, Homo sapiens
MSEQSICQARAAVMVYDDANKKWVPAGGSTGFSRVHIYHHTGNNTFRVVGRKIQDHQVVINCAIPKGLKYNQATQTFHQWRDARQVYGLNFGSKEDANVFASAMMHALEVLNSQETVFYLGPTLPRQNSQLPAQVQNGPSQEELEIQRRQLQEQQRQKELERERLERERMERERLERERLERERLERERLEQEQLERERQERERQERLERQERLERQERLERQERLDRERQERQERERLERLERERQERERQEQLEREQLEWERERRISSAAPSSDSSLYNAPLPEYSSCQPPSAPPPSYAKVISAPVSDATPDYAVVTALPPTSTPPTPPLRHSATRFATSLGSAFHPVLPHYATVPRPLNKNSRPSSPVNTPSSQPPATKPCAWSTSNFSPLPPSPPIMISSPPGKATGPRPVLPVCVSSPVPQMPPSPTAPNGLVDSVTYPVSPPPTSGPAAPPPPPPLPSLASLSHCGSQASPPPSTPIASTPSSKPSVLPSPSAAAPASVETPLNSVLGDSSASEPGLQAASQPAETPSQQGIVLGPLAPPPPPPLPPGPAQASVALPPPPGPPPPPPLPSTGPPPPPPPPPLPNQVPPPPPPPPAPPLPASGFFLASMSEDNRPLTGLAAAIAGAKLRKVSRMEDTSFPSGGNAIGVNSASSKTDTGRGNGPLPLGGSGLMEEMSALLARRRRIAEKGSTIETEQKEDKGEDSEPVTSKASSTSTPEPTRKPWERTNTMNGSKSPVISRPKSTPLSQPSANGVQTEGLDYDRLKQDILDEMRKELTKLKEELIDAIRQELSKSNTA

SEQ ID NO: 91204 - protein, 123 aa, Homo sapiens
MKKQRGVGVLPALRMRGNLALVGVLISLAFLSLLPSGHPQPAGDDACSVQILVPGLKGDAGEKGDKGAPGRPGRVGPTGEKGDMGDKGQKGSVGRHGKIGPIGSKGEKGDSGDIGPPGPNGEP

SEQ ID NO: 91205 - protein, 51 aa, Homo sapiens
MGEHPSPGPAVAACAEAERIEELEPEAEERLPAAPEDHWKVLFDQEAFLDL

SEQ ID NO: 91206 - protein, 564 aa, Homo sapiens
MTLLITGDSIVSAEAVWDHVTMANRELAFKAGDVIKVLDASNKDWWWGQIDDEEGWFPASFVRLWVNQEDEVEEGPSDVQNGHLDPNSDCLCLGRPLQNRDQMRANVINEIMSTERHYIKHLKDICEGYLKQCRKRRDMFSDEQLKVIFGNIEDIYRFQMGFVRDLEKQYNNDDPHLSEIGPCFLEHQDGFWIYSEYCNNHLDACMELSKLMKDSRYQHFFEACRLLQQMIDIAIDGFLLTPVQKICKYPLQLAELLKYTAQDHSDYRYVAAALAVMRNVTQQINERKRRLENIDKIAQWQASVLDWEGEDILDRSSELIYTGEMAWIYQPYGRNQQRVFFLFDHQMVLCKKDLIRRDILYYKGRIDMDKYEVVDIEDGRDDDFNVSMKNAFKLHNKETEEIHLFFAKKLEEKIRWLRAFREERKMVQEDEKIGFEISENQKRQAAMTVRKVPKQKGVNSARSVPPSYPPPQDPLNHGQYLVPDGIAQSQVFEFTEPKRSQSPFWQNFSRYCEGIKKPNRSKGVSDYDDAGVDFCSGNILHSGCFFYHWGFPCCSTSGSLQFCI

SEQ ID NO: 91207 - protein, 129 aa, Homo sapiens
MIPDSQKLLRCELESLKSQLQAQTKAFEFLNHSVTMLEKESCLQQIKIQQLEEVLSPTGRQGEKEEHKWGMEQGRQELYGALTQGLQGLEKTLRDSEEMQRARTTRCLQLLAQEIRDSKKFLWEELELV

SEQ ID NO: 91208 - protein, 664 aa, Homo sapiens
  MOD_RES (1)..(1): Any amino acid
XEVCQSLVKHSSGIKGSLPLQKLHLVSRSIYHSHHPTLKLQRPQLRTSFQQFSSLTNLPLRKLKFSPIKYGYQPRRNFWPARLATRLLKLRYLILGSAVGGGYTAKKTFDQWKDMIPDLSEYKWIVPDIVWEIDEYIDFEKIRKALPSSEDLVKLAPDFDKIVESLSLLKDFFTSGSPEETAFRATDRGSESDKHFRKVSDKEKIDQLQEELLHTQLKYQRILERLEKENKELRKLVLQKDDKGIHHRKLKKSLIDMYSEVLDVLSDYDASYNTQDHLPRVVVVGDQSAGKTSVLEMIAQARIFPRGSGEMMTRSPVKVTLSEGPHHVALFKDSSREFDLTKEEDLAALRHEIELRMRKNVKEGCTVSPETISLNVKGPGLQRMVLVDLPGVINTVTSGMAPDTKETIFSISKAYMQNPNAIILCIQDGSVDAERSIVTDLVSQMDPHGRRTIFVLTKVDLAEKNVASPSRIQQIIEGKLFPMKALGYFAVVTGKGNSSESIEAIREYEEEFFQNSKLLKTSMLKAHQVTTRNLSLAVSDCFWKMVRESVEQQADSFKATRFNLETEWKNNYPRLRELDRNELFEKAKNEILDEVISLSQVTPKHWEEILQQSLWERVSTHVIENIYLPAAQTMNSGTFNTTVDIKLKQWTDKQLPNKAVEVRI

SEQ ID NO: 91209 - protein, 3256 aa, Homo sapiens
MVKRKSSEGQEQDGGRGIPLPIQTFLWRQTSAFLRPKLGKQYEASCVSFERVLVENKLHGLSPALSEAIQSISRWELVQAALPHVLHCTATLLSNRNKLGHQDKLGVAETKLLHTLHWMLLEAPQDCNNERFGGTDRGSSWGGSSSAFIHQVENQGSPGQPCQSSSNDEEENNRRKIFQNSMATVELFVFLFAPLVHRIKESDLTFRLASGLVIWQPMWEHRQPGVSGFTALVKPIRNIITAKRSSPINSQSRTCESPNQDARHLEGLQVVCETFQSDSISPKATISGCHRGNSFDGSLSSQTSQERGPSHSRASLVIPPCQRSRYATYFDVAVLRCLLQPHWSEEGTQWSLMYYLQRLRHMLEEKPEKPPEPDIPLLPRPRSSSMVAAAPSLVNTHKTQDLTMKCNEEEKSLSSEAFSKVSLTNLRRSAVPDLSSDLGMNIFKKFKSRKEDRERKGSIPFHHTGKRRPRRMGVPFLLHEDHLDVSPTRSTFSFGSFSGLGEDRRGIEKGGWQTTILGKLTRRGSSDAATEMESLSARHSHSHHTLVSDLPDPSNSHGENTVKEVRSQISTITVATFNTTLASFNVGYADFFNEHMRKLCNQVPIPEMPHEPLACANLPRSLTDSCINYSYLEDTEHIDGTNNFVHKNGMLDLSVVLKAVYLVLNHDISSRICDVALNIVECLLQLGVVPCVEKNRKKSENKENETLEKRPSEGAFQFKGVSGSSTCGFGGPAVSGAGDGGGEEGGGGDGGGGGGDGGGGGGGGGGPYEKNDKNQEKDESTPVSNHRLALTMLIKIVKSLGCAYGCGEGHRGLSGDRLRHQVFRENAQNCLTKLYKLDKMQFRQTMRDYVNKDSLNNVVDFLHALLGFCMEPVTDNKAGFGNNFTTVDNKSTAQNVEGIIVSAMFKSLITRCASTTHELHSPENLGLYCDIRQLVQFIKEAHGNVFRRVALSALLDSAEKLAPGKKVEENEQESKPAGSKRSEAGSIVDKGQVSSAPEECRSFMSGRPSQTPEHDEQMQGANLGRKDFWRKMFKSQSAASDTSSQSEQDTSECTTAHSGTTSDRRARSRSRRISLRKKLKLPIGNWLKRSSLSGLADGVEDLLDISSVDRLSFIRQSSKVKFTSAVKLSEGGPGSGMENGRDEEENFFKRLGCHSFDDHLSPNQDGGKSKNVVNLGAIRQGMKRFQFLLNCCEPGTIPDASILAAALDLEAPVVARAALFLECARFVHRCNRGNWPEWMKGHHVNITKKGLSRGRSPIVGNKRNQKLQWNAAKLFYQWGDAIGVRLNELCHGESESPANLLGLIYDEETKRRLRKEDEEEDFLDDSTVNPSKCGCPFALKMAACQLLLEITTFLRETFSCLPRPRTEPLVDLESCRLRLDPELDRHRYERKISFAGVLDENEDSKDSLHSSSHTLKSDAGVEEKKEGSPWSASEPSIEPEGMSNAGAEENYHRNMSWLHVMILLCNQQSFICTHVDYCHPHCYLHHSRSCARLVRAIKLLYGDSVDSLRESSNISSVALRGKKQKECSDKSCLRTPSLKKRVSDANLEGKKDSGMLKYIRLQVMSLSPAPLSLLIKAAPILTEEMYGDIQPAAWELLLSMDEHMAGAAAAMFLLCAVKVPEAVSDMLMSEFHHPETVQRLNAVLKFHTLWRFRYQVWPRMEEGAQQIFKIPPPSINFTLPSPVLGMPSVPMFDPPWVPQCSGSVQDPINEDQSKSFSARAVSRSHQRAEHILKNLQQEEEKKRLGREASLITAIPITQEACYEPTCTPNSEPEEEVEEVTNLASRRLSVSPSCTSSTSHRNYSFRRGSVWSVRSAVSAEDEEHTTEHTPNHHVPQPPQAVFPACICAAVLPIVHLMEDGEVREDGVAVSAVAQQVLWNCLIEDPSTVLRHFLEKLTISNRQDELMYMLRKLLLNIGDFPAQTSHILFNYLVGLIMYFVRTPCEWGMDAISATLTFLWEVVGYVEGLFFKDLKQTMKKEQCEVKLLVTASMPGTKTLVVHGQNECDIPTQLPVHEDTQFEALLKECLEFFNIPESQSTHYFLMDKRWNLIHYNKTYVRDIYPFRRSVSPQLNLVHMHPEKGQELIQKQVFTRKLEEVGRVLFLISLTQKIPTAHKQSHVSMLQEDLLRLPSFPRSAIDAEFSLFSDPQAGKELFGLDTLQKSLWIQLLEEMFLGMPSEFPWGDEIMLFLNVFNGALILHPEDSALLRQYAATVINTAVHFNHLFSLSGYQWILPTMLQVYSDYESNPQLRQAIEFACHQFYILHRKPFVLQLFASVAPLLEFPDAANNGPSKGVSAQCLFDLLQSLEGETTDILDILELVKAEKPLKSLDFCYGNEDLTFSISEAIKLCVTVVAYAPESFRSLQMLMVLEALVPCYLQKLKRQTSQVETVPAAREEIAATAALATSLQALLYSVEVLTRPMTAPQMSRCDQGHKGTTTANHTMSSGVNTRYQEQGAKLHFIRENLHLLEEGQGIPREELDERIAREEFRRPRESLLNICTEFYKHCGPRLKILQNLAGEPRVIALELLDVKSHMRLAEIAHSLLKLAPYDTQTMESRGLRRYIMEMLPITDWTAEAVRPALILILKRLDRMFNKIHKMPTLRRQVEWEPASNLIEGVCLTLQRQPIISFLPHLRSLINVCVNLVMGVVGPSSVADGLPLLHLSPYLSPPLPFSTAVVRLVALQIQALKEDFPLSHVISPFTNQERREGMLLNLLIPFVLTVGSGSKDSPWLEQPEVQLLLQTVINVLLPPRIISTSRSKNFMLESSPAHCSTPGDAGKDLRREGLAESTSQAAYLALKVILVCFERQLGSQWYWLSLQVKEMALRKVGGLALWDFLDFIVRTRIPIFVLLRPFIQCKLLAQPAENHEELSARQHIADQLERRFIPRPLCKSSLIAEFNSELKILKEAVHSGSAYQGKTSISTVGTSTSAYRLSLATMSRSNTGTGTVWEQDSEPSQQASQDTLSRTDEEDEENDSISMPSVVSEQEAYLLSAIGRRRFSSHVSSMSVPQAEVGMLPSQSEPNVLDDSQGLAAEGSLSRVASIQSEPGQQNLLVQQPLGRKRGLRQLRRPLLSRQKTQTEPRNRQGARLSTTRRSIQPKTKPSADQKRSVTFIEAQPEPAAAPTDALPATGQLQGCSPAPSRKPEAMDEPVLTSSPAIVVADLHSVSPKQSENFPTEEGEKEEDTEAQGATAHSPLSAQLSDPDDFTGLETSSLLQHGDTVLHISEENGMENPLLSSQFTFTPTELGKTDAVLDESHV

SEQ ID NO: 91210 - protein, 991 aa, Homo sapiens
MVKLANPLYTEWILEAIQKIKKQKQRPSEERICHAVSTSHGLDKKTVSEQLELSVQDGSVLKVTNKGLASYKDPDNPGRFSSVKPGTFPKSAKGSRGSCNDLRNVDWNKLLRRAIEGLEEPNGSSLKNIEKYLRSQSDLTSTTNNPAFQQRLRLGAKRAVNNGRLLKDGPQYRVNYGSLDGKGAPQYPSAFPSSLPPVSLLPHEKDQPRADPIPICSFCLGTKESNREKKPEELLSCADCGSSGHPSCLKFCPELTTNVKALRWQCIECKTCSACRVQGRNADNMLFCDSCDRGFHMECCDPPLSRMPKDTEIKINIKQESADVNVIGNKDVVTEEDLDVFKQAQELSWEKIECESGVEDCGRYPSVIEFGKYEIQTWYSSPYPQEYARLPKLYLCEFCLKYMKSKNILLRHSKKCGWFHPPANEIYRRKDLSVFEVDGNMSKIYCQNLCLLAKLFLDHKTLYYDVEPFLFYVLTKNDEKGCHLVGYFSKEKLCQQKYNVSCIMIMPQHQRQGFGRFLIDFSYLLSRREGQAGSPEKPLSDLGRLSYLAYWKSVILEYLYHHHERHISIKAISRATGMCPHDIATTLQHLHMIDKRDGRFVIIRREKLILSHMEKLKTCSRANELDPDSLRWTPILISNAAVSEEEREAEKEAERLMEQASCWEKEEQEILSTRANSRQSPAKVQSKNKYLHSPESRPVTGERGQLLELSKESSEEEEEEEDEEEEEEEEEEEEDEEEEEEEEEEEEEENIQSSPPRLTKPQSVAIKRKRPFVLKKKRGRKRRRINSSVTTETISETTEVLNEPFDNSDEERPMPQLEPTCEIEVEEDGRKPVLRKAFQHQPGKKRQTEEEEGKDNHCFKNADPCRNNMNDDSSNLKEGSKDNPEPLKCKQVWPKGTKRGLSKWRQNKERKTGFKLNLYTPPETPMEPDEQVTVEEQKETSEGKTSPSPIRIEEEVKETGEALLPQEENRREETCAPVSPNTSPGEKPEDD

SEQ ID NO: 91211 - protein, 87 aa, Homo sapiens
MAVKVQTTKRGDPHELRNIFLQYASTEVDGERYMTPEDFVQRYLGLYNDPNSNPKIVQLLAGVADQTKDGKCQRNFWTDYYSSSYPF

SEQ ID NO: 91212 - protein, 284 aa, Homo sapiens
NVSAAVMVLMAPRGRVPKDRSWKAAKVTMAKVDGFLDSLINFNKENIHENCLKAIRPYLQDPEFNPEFVATKSYAAAGLCSWVINIVRFYEVFCDVEPKRQALNKATADLTAAQEKLAAIKAKIAHLNENLAKLTARFEKATADKLKCQQEAEVTAVTISLANRLTPIPVTPALDPLRMLMDDADVAAWQNEGLPADRMSVENATILINCERWPLMVDPQLQGIKWIKNKYGEDLRVTQIGQKGYLQIIEQALEAGAVVLIENLEESIDPVLGPLLGREVIKKG

SEQ ID NO: 91213 - protein, 86 aa, Homo sapiens
  MOD_RES (1)..(1): Any amino acid
XNRRSALARVGKVGPMIGQYVDSQWSLASFTVPAESACICAFGRNTSKNVNSVIDGTFHKYVFTPDGNCNREAFDVYLDICDDDDF

SEQ ID NO: 91214 - protein, 34 aa, Homo sapiens
  MOD_RES (1)..(1): Any amino acid
XLEIKAYYAGHVLGAAMFQIKVGSESVVYTSCLD

SEQ ID NO: 91215 - protein, 55 aa, Homo sapiens
MPNSEPASLLELFNSIATQGELVRSLKAGNASKDEIDSAVKMLVSLKMSYKAAAG

SEQ ID NO: 91216 - protein, 271 aa, Homo sapiens
MDRSKENCISGPVKATAPVGGPKRVLVTQQFPCQNPLPVNSGQAQRVLCPSNSSQRIPLQAQKLVSSHKPVQNQKQKQLQATSVPHPVSRPLNNTQKSKQPLPSAPENNPEEELASKQKNEESKKRQWALEDFEIGRPLGKGKFGNVYLAREKQSKFILALKVLFKAQLEKAGVEHQLRREVEIQSHLRHPNILRLYGYFHDATRVYLILEYAPLGTVYRELQKLSKFDEQRTATYITELANALSYCHSKRVIHRDIKPENLLLGSAGELK

SEQ ID NO: 91217 - protein, 85 aa, Homo sapiens
MHYPTALLFLILANGAQAFRICAFNAQRLTLAKVAREQVMDTLVRALNISDHYPVEVELKLSQAHSVQPLSLTVLLLLSLLSPQL

SEQ ID NO: 91218 - protein, 109 aa, Homo sapiens
MDPDGVIESNWNEIVDNFDDMNLKESLLRGIYAYGFEKPSAIQQRAIIPCIKGYDVIAQAQSGTGKTATFAISILQQLEIEFKETQALVLAPTRELAQQIQKVILALGD

SEQ ID NO: 91219 - protein, 213 aa, Homo sapiens
MDPGKDKEGVPQPSGPPARKKFVIPLDEDEVPPGVAKPLFRSTQSLPTVDTSAQAAPQTYAEYAISQPLEGAGATCPTGSEPLAGETPNQALKPGAKSNSIIVSPRQRGNPVLKFVRNVPWEFGDVIPDYVLGQSTCALFLSLRYHNLHPDYIHGRLQSLGKNFALRVLLVQVDVKDPQQALKELAKMCILADCTLILAWRPGGCLMSCTSPS

SEQ ID NO: 91220 - protein, 102 aa, Homo sapiens
MSRIEKMSILGVRSFGIEDKDKQIITFFSPLTILVGPNGAGKTTIIECLKYICTGDFPPGTKGNTFVHDPKVAQETDVRAQIRLQFRDVNGELIAVQRSMAW

SEQ ID NO: 91221 - protein, 278 aa, Homo sapiens
MAGEQKPSSNLLEQFILLAKGTSGSALTALISQVLEAPGVYVFGELLELANVQELAEGANAAYLQLLNLFAYGTYPDYIANKESLPELSTAQQNKLKHLTIVSLASRMKCIPYSVLLKDLEMRNLRELEDLIIEAVYTDIIQGKLDQRNQLLEVDFCIGRDIRKKDINNIVKTLHEWCDGCEAVLLGIEQQVLRANQYKENHNRTQQQVEAEIACFQREKRDVPLLNLITTAFFWLPTSRRHSKPPHPPRLRRWSSSWLNGSVPLTLSRGSPPRRCPK

SEQ ID NO: 91222 - protein, 119 aa, Homo sapiens
  MOD_RES (1)..(1): Any amino acid
XKLPAELATKYANFSEGACKPGYASALMTAIFPRFSKPAPMFLDDSFRKWARIREFVPPFGIKGQDNLIKAILSVTKEYRLTPALDSLRCRRCIIVGNGGVLANKSLGSRIDDYDIVVR

SEQ ID NO: 91223 - protein, 41 aa, Homo sapiens
MYEPEAKKSKTAAKKNDKEAAGEGPALYEDPPDQKTSPSGK

SEQ ID NO: 91224 - protein, 113 aa, Homo sapiens
MSLGLLCCAAFSLLWAGPVNAGVTQTPKFHILKTGQSMTLQCAQDMNHGYMSWYRQDPGMGLRLIYYSAAAGTTDKEVPNGYNVSRLNTEDFPLRLVSAAPSRTSVYLCASSY

SEQ ID NO: 91225 - protein, 72 aa, Homo sapiens
MESTLGAGIVIAEALQNQLAWLENVWLWITFLGDPKILFLFYFPAAYYASRRVGIAVLWISLITEWLNLIFK

SEQ ID NO: 91226 - protein, 78 aa, Homo sapiens
  MOD_RES (1)..(1): Any amino acid
XLNKKRLQILLKGYGEYPTKYRMFIWRSLLQLPENHTAFSTLIDKGTHVAFLNLQKKYPIKSRKLLRVLQSQLVSTLV

SEQ ID NO: 91227 - protein, 66 aa, Homo sapiens
MAQRHNSVRSYTLCEFAQEQEVNHREILREHLKEEKLHAKKMKLTKNGTVESVEADGLTLDDVSDE

SEQ ID NO: 91228 - protein, 223 aa, Homo sapiens
MKLKLKNVFLAYFLVSIAGLLYALVQLAKGMDRTLPLMQRFRDSATALSSGQPCDCLPPLRAAAEQLRQKDLRISQLQAELRRPPPAPAQPPEPEALPTIYVVTPTYARLVQKAELVRLSQTLSLVPRLHWLLVEDAEGPTPLVSGLLAASGLLFTHLVVLTPKAQRLREGEPGWVHPRGVEQRNKALDWLRGRGGAVGGEKDPPPPGTQGVVYFADDDNTYS

SEQ ID NO: 91229 - protein, 109 aa, Homo sapiens
  MOD_RES (1)..(1): Any amino acid
XSGQSLKSLNASSGHLALILSSIFGLLLLVLFILFLTWCRVQKQKHLPLRVSTRRRGSLEENLFHEMETCLKREDPHGTRTSDDTPNHGCEDASDTSLLGVLPASEATK

SEQ ID NO: 91230 - protein, 118 aa, Homo sapiens
MTFGQSKLYRSEDYGKNFKDITDLINNTFIRTEFGMAIGPENSGKVVLTAEVSGGSRGGRIFRSSDFAKNFVQTDLPFHPLTQMMYSPQNSDYLLALSTENGLWVSKNFGGKWEEIHK

SEQ ID NO: 91231 - protein, 631 aa, Homo sapiens
MNIIRENKDLACFYTTKHSWRGKYKRVFSVGTHAITTYNPNTLEVTNQWPYGDICSISPVGKGQGTEFNLTFRKGSGKKSETLKFSTEHRTELLTEALRFRTDFSEGKITGRRYNCYKHHWSDSRKPVILEVTPGGFDQINPATNRVLCSYDYRNIEGFVDLSDYQGGFCILYGGFSRLHLFASEQREEIIKSAIDHAGNYIGISLRIRKEPLEFEQYLNLRFGKYSTDESITSLAEFVVQKISPRHSEPVKRVLALTETCLVERDPATYNIATLKPLGEVFALVCDSENPQLFTIEFIKGQVRKYSSTERDSLLASLLDGVRASGNRDVCVKMTPTHKGQRWGLLSMPVDEEVESLHLRFLATPPNGNFADAVFRFNANISYSGVLHAVTQDGLFSENKEKLINNAITALLSQEGDVVASNAELESQFQAVRRLVASKAGFLAFTQLPKFRERLGVKVVKALKRSNNGIIHAAVDMLCALMCPMHDDYDLRQEQLNKASLLSSKKFLENLLEKFNSHVDHGTGALVISSLLDFLTFALCAPYSETTEGQQFDMLLEMVASNGRTLFKLFQHPSMAIIKGAGLVMKAIIEEGDKEIATKMQELALSEGALPRHLHTAMFTISSDQRMLTNS

SEQ ID NO: 91232 - protein, 142 aa, Homo sapiens
MGDEDWEAEINPHMSSYVPIFEKDRYSGENGDNFNRTPASSSDAGECNKRDNTSTMGGFGVGKSFGNRGFSNSRFEDGDSSGFWRESSNDCEDNPTRNRGFSKRGGYRDGNNSEASGPYRRGGRGSFRGCRGGFGLGSPNND

SEQ ID NO: 91233 - protein, 71 aa, Homo sapiens
  MOD_RES (1)..(1): Any amino acid
XTATPTQMKEMFQSAGIRMINNRGEKHGTITARLHEENFEITTLRIDVTTDGRHAEVLMALYLTTLMVMKI

SEQ ID NO: 91234 - protein, 39 aa, Homo sapiens
MRLLRRRHMPLRLAMVGCAFVLFLFLLHRDVSSREEATE

SEQ ID NO: 91235 - protein, 101 aa, Homo sapiens
MASDDFDIVIEAMLEAPYKKEEDEQQRKEVKKDYPSNTTSSTSNSGNETSGSSTIGETSNRSRDRDRYRRRNSRSRSPGRQCRHRSRSWDRRHGSESRSRD

SEQ ID NO: 91236 - protein, 179 aa, Homo sapiens
  MOD_RES (1)..(1): Any amino acid
XSQPKSFENSPGDLGNSSLPTAGYKRAQTSGIEEETVKEKKRKGNKQSKHGPGRPKGNKNQENVSHLSVSSASPTSSVASAAGSITSSSLQKSPTLLRNGSLQSLSVGSSPVGSEISMQYRHDGACPTTSIYNSNDVAVSFPNVVSGSGSSTPVSSSHLPQQSSGHLQQVGALSPSAVS

SEQ ID NO: 91237 - protein, 140 aa, Homo sapiens
MLVSLKMSYKAAAGEDYKADCPPGNPAPTSNHGPDATEAEEDFVDPWTVQTSSAKGIDYDKLIVRFGSSKIDKELINRIERATGQRPHHFLRRGIFFSHRDMNQVLDAYENKKPFYLYTGRGPSSEAMHVGHLIPFIFTK

SEQ ID NO: 91238 - protein, 26 aa, Homo sapiens
MTMTANKNSSITHGAGGTKAPRGTLS

SEQ ID NO: 91239 - protein, 151 aa, Homo sapiens
  MOD_RES (1)..(1): Any amino acid
XPLLPVYELDGAPTAAQVLIMGPDDFIVAMVSSLNQPFGSGLITPSGILLNSQMLDFSWPNRTANHSAPSLENSVQPGKRPLSFLLPTVVRPAEGLCGTYLALGANGAARGLSGLTQHLNRQPALFRVGFERKGLLFSRTPQNGSMNVLRT

SEQ ID NO: 91240 - protein, 572 aa, Homo sapiens
MKIIFPILSNPVFRRTVKLLLCLLWIGYSQGTTHVLRFGGIFEYVESGPMGAEELAFRFAVNTINRNRTLLPNTTLTYDTQKINLYDSFEASKKACDQLSLGVAAIFGPSHSSSANAVQSICNALGVPHIQTRWKHQVSDNKDSFYVSLYPDFSSLSRAILDLVQFFKWKTVTVVYDDSTGLIRLQELIKAPSRYNLRLKIRQLPADTKDAKPLLKEMKRGKEFHVIFDCSHEMAAGILKQALAMGMMTEYYHYIFTTLDLFALDVEPYRYSGVNMTGFRILNTENTQVSSIIEKWSMERLQAPPKPDSGLLDGFMTTDAALMYDAVHVVSVAVQQFPQMTVSSLQCNRHKPWRFGTRFMSLIKEAHWEGLTGRITFNKTNGLRTDFDLDVISLKEEGLEKIGTWDPASGLNMTESQKGKPANITDSLSNRSLIVTTILEEPYVLFKKSDKPLYGNDRFEGYCIDLLRELSTILGFTYEIRLVEDGKYGAQDDANGQWNGMVRELIDHKADLAVAPLAITYVREKVIDFSKPFMTLGISILYRKPNGLVLMSGIIHTLATLTQTWWKTILPC

SEQ ID NO: 91241 - protein, 356 aa, Homo sapiens
MSTMRLLTLALLFSCSVARAACDPKIVNIGAVLSTRKHEQMFREAVNQANKRHGSWKIQLNATSVTHKPNAIQMALSVCEDLISSQVYAILVSHPPTPNDHFTPTPVSYTAGFYRIPVLGLTTRMSIYSDKSIHLSFLRTVPPYSHQSSVWFEMMRVYSWNHIILLVSDDHEGRAAQKRLETLLEERESKSKKRNYENLDQLSYDNKRGPKAEKVLQFDPGTKNVTALLMEAKELEARVIILSASEDDAATVYRAAAMLNMTGSGYVWLVGEREISGNALRYAPDAHQRQERVGPHQRRRGRGGPGRARAPREGEHHRPAAGLRGQHQHLEDRAALQESADVFQVCGWGDWSRGVQ

SEQ ID NO: 91242 - protein, 193 aa, Homo sapiens
MAKGDPKKPKGKMSAYAFFVQTCREEHKKKNPEVPVNFAEFSKKCSERWKTMSGKEKSKFDEMAKADKVRYDREMKDYGPAKGGKKKKDPNAPKRPPSGFFLFCSEFRPKIKSTNPGISIGDVAKKLGEMWNNLNDSEKQPYITKAAKLKEKYEKDVADYKSKGKFDGAKGPAKVARKKVEEEDEEEEEEEEE

SEQ ID NO: 91243 - protein, 140 aa, Homo sapiens
  MOD_RES (1)..(1): Any amino acid
XLAAGWGPCEVLLSNALARLRGFKDHFTFCQQLNISICPLSQTAARFQVIVYNPLGRKVNWMVRLPVSEGVFVVKDPNGRTVPSDLRQPGAPSGAAVLSLTARPGLQHLFSSPGASLEAPGPRTTAHPQKILVPCFNHRK

SEQ ID NO: 91244 - protein, 154 aa, Homo sapiens [sequence omitted]

SEQ ID NO: 91245 - protein, 99 aa, Homo sapiens
MCKPATDPRFTRSPLAGGVILGVALWLRHDPQTTNLLYLELGDKPAPNTFYVGIYILIAVGAVMMFVGFLGCYGAIQESQCLLGTFFTCLVILFACEVA

SEQ ID NO: 91246 - protein, 390 aa, Homo sapiens
MSAANPETPNSTISREASTQSSSAAASQGWVLPEGKIVPNTVFVGGIDARMDETEIGSCFGRYGSVKEVKIITNRTGVSKGYGFVSFVNDVDVQKIVGSQIHFHGKKLKLGPAIRKQKLCARHVQPRPLVVNPPPPPQFQNVWRNPNTETYLQPQITPNPVTQHVQAYSAYPHSPGQVITGCQLLVYNYQEYPTYPDSAFQVTTGYQLPVYNYQPFPAYPRSPFQVTAGYQLPVYNYQAFPAYPNSPFQVATGYQFPVYNYQAFPAYPNSPVQVTTGYQLPVYNYQAFPAYPNSPFQVATGYQFPVYNYQAFPAYPNSPVQVTTGYQLPVYNYQAFPAYPNSAVQVTTGYQFHVYNYQMPPQCPVGEQRRNLWTEAYKWWYLVCLIQRRD

SEQ ID NO: 91247 - protein, 61 aa, Homo sapiens
  MOD_RES (1)..(1): Any amino acid
XGDEWLFEGPGTYIPRKEVEVVEIIQATIIRQNQALRLRARKECWDRDGKERVTGGVTKGR

SEQ ID NO: 91248 - protein, 140 aa, Homo sapiens
MAPKGKVGTRGKKQIFEENRETLKFYLRIILGANAIYCLVTLVFFYSSASFWAWLALGFSLAVYGASYHSMSSMARAAFSEDGALMDGGMDLNMEQGMAEHLKDVILLTAIVQVLSCFSLYVWSFWLLVCGLGALPRRGI

SEQ ID NO: 91249 - protein, 99 aa, Homo sapiens
MGLLVFVRNLLLALCLFLVLGFLYYSAWKLHLLQWEEDSKYDRLGFLLNLDSKLPAELATKYANFSEGACKPGYASALMTAIFPREKVRTFMAWLAWYG

SEQ ID NO: 91250 - protein, 174 aa, Homo sapiens
  MOD_RES (1)..(1): Any amino acid
XSYPMASLYVGDLHPDVTEAMLYEKFSPAGPILSIRVCRDMITRRSLGYAYVNFQQPADAERALDTMNFDVIKGKPVVCDENGSKGYGFVHFETQEAAERAIEKMNGMLLNDRKVFVGRFKSRKEREAELGARAKEFTNVYIKNFGEDMDDERLKDLFGKFGPALSVKVMTDES

SEQ ID NO: 91251 - protein, 156 aa, Homo sapiens
MISVKRNTWRALSLVIGDCRKKGNFEYCQDRTEKHSTMPDSPVDVKTQSRLTPPTMPPPPTTQGAPRTSSFTPTTLTNGTSHSPTALNGAPSPPNGFSNGPSSSSSSSLANQQLPPACGARQLSKLKRFLTTLQQFGNDISPEIGERVRTLVLGLV

SEQ ID NO: 91252 - protein, 280 aa, Homo sapiens
MPAARRFPGLELSFPLLARLRRRLYTRLGGGRMQPEEGTGWLLELLSEVQLQQYFLRLRDDLNVTRLSHFEYVKNEDLEKIGMGRPGQRRLWEAVKRRKALCKRKSWMSKVFSGKRLEAEFPPHHSQSTFRKTSPAPGGPAGEGPLQSLTCLIGEKDLRLLEKLGDGSFGVVRRGEWDAPSGKTVSVAVKCLKPDVLSQPEAMDDFIREVNAMHSLDHRNLIRLYGVVLTPPMKMVCPREPEDTHLLPCQRHLDVRGDTVGNVHLRPGALDRPQRQSDPA

SEQ ID NO: 91253 - protein, 67 aa, Homo sapiens
MADSQLFCVAEERSGHCAVVDGNFLYVWGGYVMESRSCPGWSAVARSRLTATSASQVQPILLPQPPE

SEQ ID NO: 91254 - protein, 109 aa, Homo sapiens
MVSGRFYLSCLLLGSLGSMCILFTIYWMQYWRGGFAWNGSIYMFNWHPVLMVAGMVVFYGGGKTPPGHTTACPVRRSLPTAPGCWWWPLGCWCSTSFWLHLGSAQSRGS

SEQ ID NO: 91255 - protein, 639 aa, Homo sapiens
MSRIKSTLNSVSKAVFGNQNEMISRLAQFKPSSQILRKVSDSGWLKQKNIKQAIKSLKKYSDKSAEKSPFPEEKSHIIDKEEDIGKRSLFHYTSSITTKFGDSFYFLSNHINSYFKRKEKMSQQKENEHFRDKSELEDKKVEEGKLRSPDPGILAYKPGSESVHTVDKPTSPSAIPDVLQVSTKQSIANFLSRPTEGVQALVGGYIGGLVPKLKYDSKSQSEEQEEPAKTDQAVSKDRNAEEKKRLSLQREKIIARVSIDNRTRALVQALRRTTDPKLCITRVEELTFHLLEFPEGKGVAVKERIIPYLLRLRQIKDETLQAAVREILALIGYVDPVKGRGIRILSIDGGGTRGVVALQTLRKLVELTQKPVHQLFDYICGVSTGAILAFMLGLFHMPLDECEELYRKLGSDVFSQNVIVGTVKMSWSHAFYDSQTWENILKDRMGSALMIETARNPTCPKVAAVSTIVNRGITPKAFVFRNYGHFPGINSHYLGGCQYKMWQAIRASSAAPGYFAEYALGNDLHQDGGLLLNNPSALAMHECKCLWPDVPLECIVSLGTGRYESDVRNTVTYTSLKTKLSNVINSATDTEEVHIMLDGLLPPDTYFRFNPVMCENIPLDESRNEKLDQLQLEGLKYIE

SEQ ID NO: 91256 - protein, 482 aa, Homo sapiens
MFRLNSLSALAELAVGSRWYHGGSQPIQIRRRLMMVAFLGASAVTASTGLLWKRAHAESPPCVDNLKSDIGDKGKNKDEGDVCNHEKKTADLAPHPEEKKKKRSGFRDRKVMEYENRIRAYSTPDKIFRYFATLKVISEPGEAEVFMTPEDFVRSITPNEKQPEHLGLDQYIIKRFDGKDFWQTEKISQEREKFADEGSIFYTLGECGLISFSDYIFLTTVLSTPQRNFEIAFKMFDLNGDGEVDMEEFEQVQSIIRSQTSMGMRHRDRPTTGNTLKSGLCSALTTYFFGADLKGKLTIKNFLEFQRKLQHDVLKLEFERHDPVDGRITERQFGGMLLAYSGVQSKKLTAMQRQLKKHFKEGKGLTFQEVENFFTFLKNINDVDTALSFYHMAGASLDKVTMQQVARTVAKVELSDHVCDVVFALFDCDGNGELSNKEFVSIMKQRLMRGLEKPKDMGFTRLMQAMWKCAQETAWDFALPKQ

SEQ ID NO: 91257 - protein, 178 aa, Homo sapiens
MAAARPSLGRVLPGSSVLFLCDMQEKFRHNIAYFPQIVSVAARMLKVARLLEVPVMLTEQYPQGLGPTVPELGTEGLRPLAKTCFSMVPALQQELDSRPQLRSVLLCGIEAQACILNTTLDLLDRGLQVHVVVDACSSRSQVDRLVALARMRQSGAFLSTSEGLILQLVGDAVHPQFK

SEQ ID NO: 91258 - protein, 138 aa, Homo sapiens
MVDVLVTTAGGVEEDLIKCLAPTYLGEFSLRGKELRENGINRIGNLLVPNENYCKFEDWLMPILDQMVMEQNTEGVKWTPSKMIARLGKEINNPESVYYWAQKNHIPVFSPALTDGSLGDMIFFHSYKNPGLVLDIVE

SEQ ID NO: 91259 - protein, 298 aa, Homo sapiens
  MOD_RES (1)..(1): Any amino acid
XIGKLPIAMRALTNYQRLCEAFDAQRKDIQGTQGARAIWQALSHAFGRRLVLSSTFRILADLLGFAGPLCIFGIVDHLGKENDVFQPKTQFLGVYFVSSQEFLANAYVLAVLLFLALLLQRTFLQASYYVAIETGINLRGAIQTKIYNKIMHLSTSNLSMGEMTAGQICNLVAIDTNQLMWFFFLCPNLWAMPVQIIVGVILLYYILGVSALIGAAVIILLAPVQYFVATKLSQAQRSTLEYSNERLKQTNEMLRGIKLLKLYAWENIFRTRVETTRRKEMTSLRAFAIYTSISTCKS

SEQ ID NO: 91260 - protein, 126 aa, Homo sapiens
MAGVGPGGYAAEFVPPPECPVFEPSWEEFTDPLSFIGRIRPLAEKTGICKIRPPKDWQPPFACEVKSFRFTPRVQRLNELEIVASKGGFEMVTKEKKWSKVGSRLGYLPGKGTGSLLKSHYERILY

SEQ ID NO: 91261 - protein, 1017 aa, Homo sapiens
EPLAPTEDSALAEQGTSADEAFMVSPAQARPETFPNSLESHNGEGLGSSGAATSPILTSNDALLFHEKCGTLIKLSNNNKTAERRRPLDEFNNGVVMTNRPLRDNEMFEIRIDKLVDKWSGSIEIGVTTHNPNSLEYPATMTNLQSGTIMMSGCGILTNGKGTRREYCEFSLDELQEGDHIGLTRKSNSALHFFINGIDQGVATPLTPPVVYGVVDLYGMAVKVTIVHNNNHSDRLRRNNAILRALSPEGALRRAAPAAQAEPERLLFHPNCGQKAAITHEGRTALRPHATDDFNHGVVLSSRALRDGEVFQVRIDKMVDKWAGSIEIGVTTHNPAYLQLPSTMTNLRSGTWMMTGNGVMHNGTTILDEYGHNLDRLKAGDTVGVVRREDGTLHFFVNGMTQGPAAWNVPPGVYAVVDLYGQAAQATIVDDVEVAPVPEPLPEGNNQVSPSSPSSGAGGSDLRFHQLHGSNAVITNGGRTALRHNCRSEFNDAIVISNRALRDGELFEIVIQKMVDRWSGSIEAGVTAIRPEDLEFPNTMTDIDYDTWMLSGTAIMQDGNTMRNNYGCDLDALGTGARIGMMRTAKGDLHYFINGQDQGAACSGLPPGKEVYAVVDLYGQCVQVSITNATGPMDNSLATSNTATEKSFPLHSPVAGVAHRFHSTCGKNVTLEEDGTRAVRAAGYAHGLVFSTKELRAEEVFEVKVEELDEKWAGSLRLGLTTLAPGEMGPGAGGGGPGLPPSLPELRTKTTWMVSSCEVRRDGQLQRMNYGRNLERLGVGSRVGVRRGADDTMHILVDGEDMGPAATGIAKNVWAVLDLYGPVRGVSIVSSTRLEESEGTQPPSPSSDTGSEGEEDDEGEEHGLGGQNEVGIIPTTLEFLENHGKNILLSNGNRTATRVASYNQGIVVINQPLVPQLLVQVRIDFLNRQWTSSLVLGVITCAPERLNFPASACALKRAAWLLRGRGVFHNGLKPVSPPRSARSLGPIWTRALKAPSWDCGWTALGGCIFMLMGWTRG

SEQ ID NO: 91262 - protein, 153 aa, Homo sapiens
MKMVIGQLEGILRELKEVAKELREVVSQIDKLTSDFDFELEPDDWTTATVSSTSSSDKAGMGGPFDLGHLDFMTADILSDSWEFCSFLDVSTPSDSVDGPESTRPGAGPDYRLMNGGTPIPNGPRVETPDSSSEEAFGAGPTVKSQLPQRTPG

SEQ ID NO: 91263 - protein, 328 aa, Homo sapiens
  MOD_RES (1)..(1): Any amino acid
XNSNCNFTSRDGSISPVSSECSVVERTIPVCRESRRKRKSYIVMSPESPVKCGTQTSSPQVLNSSASYSENRNQPVDSSLAFPWTFPFGIDRRIQPEKVKQAENTRTLELPGPSETGRRMADYVTCESTKTTLPLGTEEDVRVKVERLSDEEVHEEVSQPVSASQSSLSDQQTVPGSEQVQEDLLISPQSSSIGSVDEGVSEGLPTLQSTSSTNAPPDDDDRLENVQYPYQLYIAPSTSSTERPSPNGPDRPFQCPTCGVRFTRIQNLKQHMLIHSGIKPFQCDRCGKKFTRAYSLKMHRLKHEVPLQRQGTMIDNSQAVDEMTRNGE

SEQ ID NO: 91264 - protein, 118 aa, Homo sapiens
MAEKILEKLDVLDKQAEIILARRTKINRLQSEGRKTTMAIPLTFDFQLEFEEALATSASKAISKIKEDKSCSITKSKMHVSFKCEPEPRKSNFEKSNLRPFFIQTNVKNKESESTVIF

SEQ ID NO: 91265 - protein, 45 aa, Homo sapiens
  MOD_RES (1)..(1): Any amino acid
XHSGGIHSRGTRSAYHLHCIRDISLCHLDSSGKRGFSNHCLQSRI

SEQ ID NO: 91266 - protein, 132 aa, Homo sapiens
MGPGRCLLTALLLLALAPPPEASQYCGRLEYWNPDNKCCSSCLQRFGPPPCPDYEFRENCGLNDHGDFVTPPFRKCSSGQCNPDGAELCSPCGGGAVTPTPAAGGGRTPWRCREAGPCQGALPPHTWKPRRP

SEQ ID NO: 91267 - protein, 1279 aa, Homo sapiens
  MOD_RES (1)..(1): Any amino acid
XIEVFFKEIFLYILETSTSSFDHKWMVIQTLTRICADAQSVVDIYVNYDCDLNAANIFERLVNDLSKIAQGRGSQELGMSNVQELSLRKKGLECLVSILKCMVEWSKDQYVNPNSQTTLGQEKPSEQEMSEIKHPETINRYGSLNSLESTSSSGIGSYSTQMSGTDNPEQFEVLKQQKEIIEQGIDLFNKKPKRGIQYLQEQGMLGTTPEDIAQFLHQEERLDSTQVGEFLGDNDKFNKEVMYAYVDQHDFSGKDFVSALRMFLEGFRLPGEAQKIDRLMEKFAARYLECNQGQTLFASADTAYVLAYSIIMLTTDLHSPQVKNKMTKEQYIKMNRGINDSKDLPEEYLSAIYNEIAGKKISMKETKELTIPTKSSKQNVASEKQRRLLYNLEMEQMAKTAKALMEAVSHVQAPFTSATHLEHVRPMFKLAWTPFLAAFSVGLQDCDDTEVASLCLEGIRCAIRIACIFSIQLERDAYVQALARFTLLTVSSGITEMKQKNIDTIKTLITVAHTDGNYLGNSWHEILKCISQLELAQLIGTGVKPRYISGTVRGREGSLTGTKDQAPDEFVGLGLVGGNVDWKQIASIQESIGETSSQSVVVAVDRIFTGSTRLDGNAIVDFVRWLCAVSMDELLSTTHPRMFSLQKIVEISYYNMGRIRLQWSRIWEVIGDHFNKVGCNPNEDVAIFAVDSLRQLSMKFLEKGELANFRFQKDFLRPFEHIMKRNRSPTIRDMVVRCIAQMVNSQAANIRSGWKNIFSVFHLAASDQDESIVELAFQTTGHIVTLVFEKHFPATIDSFQDAVKCLSEFACNAAFPDTSMEAIRLIRHCAKYVSDRPQAFKEYTSDDMNVAPEDRVWVRGWFPILFELSCIINRCKLDVRTRGLTVMFEIMKTYGHTYEKHWWQDLFRIVFRIFDNMKLPEQQTEKAEWMTTTCNHALYAICDVFTQYLEVLSDVLLDDIFAQLYWCVQQDNEQLARSGTNCLENVVILNGEKFTLEIWDKTCNCTLDIFKTTIPHALLTWRPNSGETAPPPPSPVSEKPLDTISQKSVDIHDSIQPRSVDNRPQAPLVSASAVNEEVSKIKSTAKFPEQKLFAALLIKCVVQLELIQTIDNIVFFPATSKKEDAENLAAAQRDAVDFDVRVDTQDQGMYRFLTSQQLFKLLDCLLESHRFAKAFNSNNEQRTALWKAGFKGKSKPNLLKQETSSLACGLRILFRMYMDESRVSAWEEVQQRLLNVCSEALSYFLTLTSESHREAWTNLLLLFLTKVLKISDNRTKRTL

SEQ ID NO: 91268 - protein, 112 aa, Homo sapiens
MKVTLSALDTSESSFTPLVVIELAQDVKEETKEWLKNRIIAKKKDGGAQLLFRPLLNKYEQETLENQNLYLVGASKIRMLLGAEAVGLVKECNDNTMRAFTYRTRQNFKGFD

SEQ ID NO: 91269 - protein, 57 aa, Homo sapiens
NLPICMAKTHLSLSHQPDKKGVPRDFILPISDVRASIGAGFIYPLVGTGGREAPLWL

SEQ ID NO: 91270 - protein, 54 aa, Homo sapiens
MTQSVVVQVGQCGNQIGCCFWDLALREHAAVNQKGIYDEAISSFFRNVDTRKSN

SEQ ID NO: 91271 - protein, 152 aa, Homo sapiens
MHPPKTPSGALHRKRKMAAWPFSRLWKVSDPILFQMTLIAALLPAVLGNCGPPPTLSFAAPMDITLTETRFKTGTTLKYTCLPGYVRSHSTQTLTCNSDGEWVYNTFCIYKRCRHPGELRNGQVEIKTDLSFGSQIEFSCSEGFFLIGSTTS

SEQ ID NO: 91272 - protein, 156 aa, Homo sapiens
MPREDRATWKSNYFLKIIQLLDDYPKCFIVGADNVGSKQMQQIRMSLRGKAVVLMGKNTMMRKAIRGHLENNPALEKLLPHIRGNVGFVFTKEDLTEIRDMLLANKVPAAARAGAIAPCEVTVPAQNTGLGPEKTSFFQALGVYCPTIIWFRVMCS

SEQ ID NO: 91273 - protein, 104 aa, Homo sapiens
MNLRDAETGKILWQGTEDLSVPGVEHEARVPKKILKCKAVSRELNFSSTEQMEKFRLEQKVYFKGQCLEEWFFEFGFVIPNSTNTWQSLIEAAPESQMMPASVL

SEQ ID NO: 91274 - protein, 132 aa, Homo sapiens
MDYPTLLLALLHVYRALCEEVLWHTSVPFAENMSLECVYPSMGILTQVEWFKIGTQQDSIAIFSPTHGMVIRKPYAERVYFLNSTMASNNMTLFFRNASEDDVGYYSCSLYTYPQGTWQKVIQVVQSDSFEA

SEQ ID NO: 91275 - protein, 55 aa, Homo sapiens
MANALASATCERCKGGFAPAETIVNSNGELYHEQCFVCAQCFQQFPEGLFYEERT

SEQ ID NO: 91276 - protein, 92 aa, Homo sapiens
MERLEIQRIEKEKWHRLEAKDLERRNEELEELYLLERCFPEAEKLKQETKLLSQWKHYIQCDGSPDPSVAQEMNTFISLWKEKTNETFEEVI

SEQ ID NO: 91277 - protein, 94 aa, Homo sapiens
CVNKCTKGTKSQMNCNLGTCQLQRSGPRCLCPNTNTHWYWGETCEFNIAKSLVYGIVGAVMAVLLLALIILIILFSLSQRKRHRPESEGEQIRP

SEQ ID NO: 91278 - protein, 724 aa, Homo sapiens
MVPWVRTMGQKLKQRLRLDVGREICRQYPLFCFLLLCLSAASLLLNRYIHILMIFWSFVAGVVTFYCSLGPDSLLPNIFFTIKYKPKQLGLQELFPQGHSCAVCGKVKCKRHRPSLLLENYQPWLDLKISSKVDASLSEVLELVLENFVYPWYRDVTDDESFVDELRITLRFFASVLIRRIHKVDIPSIITKKLLKAAMKHIEVIVKARQKVKNTEFLQQAALEEYGPELHVALRSRRDELHYLRKLTELLFPYILPPKATDCRSLTLLIREILSGSVFLPSLDFLADPDTVNHLLIIFIDDSPPEKATEPASPLVPFLQKFAEPRNKKPSVLKLELKQIREQQDLLFRFMNFLKQEGAVHVLQFCLTVEEFNDRILRPELSNDEMLSLHEELQKIYKTYCLDESIDKIRFDPFIVEEIQRIAEGPYIDVVKLQTMRCLFEAYEHVLSLLENVFTPMFCHSDEYFRQLLRGAESPTRNSKLNRGSLSLDDFRNTQKRGESFGISRIGSKIKGVFKSTTMEGAMLPNYGVAEGEDDFIEEGIVVMEDDSPVEAVSTPNTPRNLAAWKISIPYVDFFEDPSSERKEKKERIPVFCIDVERNDRRAVGHEPEHWSVYRRYLEFYVLESKLTEFHGAFPDAQLPSKRIIGPKNYEFLKSKREEFQEYLQKLLQHPELSNSQLLADFLSPNGGETQFLDKILPDVNLGKIIKSVPGKLMKEVSIWNLLS

SEQ ID NO: 91279 - protein, 1260 aa, Homo sapiens
MGVYPTDLTLQLLAVRRKSRLRDPGLQQTLRGQLRLLENDSREMARVLGELSARLLSIHSDQDRIVVTFKTFEEIWKFSTYHALGFTHHCLANLLMDQAFWLLLPSEEEETAIQVHVDENALRLTHESLLIQEGPFFVLCPDHHVRVMTGPRDAGNGPQALRQASGAPQGEAAPETDSSPPSPSVSSEEVAVAAAPEPLIPFHQWALRIPQDPIDDAMGGPVMPGNPLMAVGLASALADFQGSGPEEMTFRGGDLIEILGAQVPSLPWCVGRHAASGRVGFVRSSLISMQGPVSELESAIFLNEEEKSFFSEGCFSEEDARQLLRRMSGTDVCSVYSLDSVEEAETEQPQEKEIPPPCLSLEPQETLQKVKNVLEQCKTCPGCPQEPASWGLCAASSDVSLQDPEEPSFCLEAEDDWEDPEALSSLLLFLNAPGYKASFRGLYDVALPWLSSVFRSFSDEEELTGRLAQARGAAKKAGLLMALARLCFLLGRLCSRRLKLSQARVYFEEALGALEGSFGDLFLVVAVYANLASIYRKQKNREKCAQVVPKAMALLLGTPDHICSTEAEGELLQLALRRAVGGQSLQAEARACFLLARHHVHLKQPEEALPFLERLLLLHRDSGAPEAAWLSDCYLLLADIYSRKCLPHLVLSCVKVASLRTRGSLAGSLRSVNLVLQNAPQPHSLPAQTSHYLRQALASLTPGTGQALRGPLYTSLAQLYSHHGCHGPAITFMTQAVEASAIAGVRAIVDHLVALAWLHVLHGQSPVALDILQSVRDAVVASEDQEGVIANMVAVALKRTGRTRQAAESYYRALRVARDLGQQRNQAVGLANFGALCLHAGASRLAQHYLLEAVRLFSRLPLGECGRDFTHVLLQLGHLCTRQGPAQQGKGYYEWALLVAVEMGHVESQLRAVQRLCHFYSAVMPSEAQCVIYHELQLSLACKVADKVLEGQLLETISQLYLSLGTERAYKSALDYTKRSLGIFIDLQKKEKEAHAWLQAGKIYYILRQSELVDLYIQVAQNVALYTGDPNLGLELFEAAGDIFFDGAWEREKAVSFYRDRALPLAVTTGNRKAELRLCNKLVALLATLEEPQEGLEFAHMALALSITLGDRLNERVAYHRLAALQHRLGHGELAEHFYLKALSLCNSPLEFDEETLYYVKVYLVLGDIIFYDLKDPFDAAGYYQLALAAAVDLGNKKAQLKIYTRLATIYHNFLLDREKSLFFYQKARTFATELNVRRVNLPPLPLCGWAPWLAPSHPR

SEQ ID NO: 91280 - protein, 63 aa, Homo sapiens
MRFFCARCCSFGPEMPAVQLLLLACLVWDVGARTAQLRKANDQRSFYVEFGHFGLPGTEVRAN

SEQ ID NO: 91281 - protein, 69 aa, Homo sapiens
MSLADLTKTNIDEHFFGVALENNRRSAACKRSPGTGDFSRNSNASNKSVDYSRSQCSCGSLSSQYDYSE

SEQ ID NO: 91282 - protein, 79 aa, Homo sapiens
MGILKLQVFLIVLSVALNHLKATPIERQEWIIPVLSRNILLELRGAKPEHEAGKKSKVIRWKSGNATLPHVQRSAWQIF

SEQ ID NO: 91283 - protein, 143 aa, Homo sapiens
MTKMYKGFQALGDAADIRFVYTPAMESVCGYFHRSHNRSEEFLIAGKLQDGLLHITTCSFVAPWNSLSLAQRRGFTKTYTVGCEECTVFPCLSIPCKLQSGTHCLWTDQLLQGSEKGFQSRHLACLPREPGLCTWQSLRSQIA

SEQ ID NO: 91284 - protein, 127 aa, Homo sapiens
MEDRAGEQEQERHSLRLEKLQHWARHRQSGHLLVLAGLLTGTVTLELRRAPRLWKVRAMMIFNTFNLILGFIVVVVEVMKTALGPAPTASSQHAGLLVLELSAEAFTLGGVLVSVHALFLLSQRKPG

SEQ ID NO: 91285 - protein, 453 aa, Homo sapiens
MPHNSIRSGHGGLNQLGGAFVNGRPLPEVVRQRIVDLAHQGVRPCDISRQLRVSHGCVSKILGRYYETGSIRPGVIGGSKPKVATPKVVEKIGDYKRQNPTMFAWEIRDRLLAEGVCDNDTVPSVSSINRIIRTKVQQPFNLPMDSCVATKSLSPGHTLIPSSAVTPPESPQSDSLGSTYSINGLLGIAQPGSDKRKMDDSDQDSCRLSIDSQSSSSGPRKHLRTDAFSQHHLEPLECPFERQHYPEAYASPSHTKGEQGLYPLPLLNSTLDDGKATLTPSNTPLGRNLSTHQTYPVVADPHSPFAIKQETPEVSSSSSTPSSLSSSAFLDLQQVGSGVPPFNAFPHAASVYGQFTGQALLSGREMVGPTLPGYPPHIPTSGQGSYASSAIAGMVAGSEYSGNAYGHTPYSSYSEAWRFPNSSLLIPHQGRVHRPPLPRPLTICSCHGDSGSD
